United States Patent Application Publication US 2026/0021141 A1 - sequence listing, part 4

SEQ ID NO: 92172 - RNA, 21 nt, synthetic construct
  source 1..21: mol_type = other RNA
gggcacttgggatgtttctac

SEQ ID NO: 92173 - RNA, 21 nt, synthetic construct
  source 1..21: mol_type = other RNA
gggcagactccttcccctggt

SEQ ID NO: 92174 - RNA, 21 nt, synthetic construct
  source 1..21: mol_type = other RNA
gggcagagaactgactgaagg

SEQ ID NO: 92175 - RNA, 21 nt, synthetic construct
  source 1..21: mol_type = other RNA
gggcagagataactgggtgtg

SEQ ID NO: 92176 - RNA, 21 nt, synthetic construct
  source 1..21: mol_type = other RNA
gggcagcaaagcaagaaaaag

SEQ ID NO: 92177 - RNA, 21 nt, synthetic construct
  source 1..21: mol_type = other RNA
gggcagccttggaggagccct

SEQ ID NO: 92178 - RNA, 21 nt, synthetic construct
  source 1..21: mol_type = other RNA
gggcaggaaaggtggggaagg

SEQ ID NO: 92179 - RNA, 21 nt, synthetic construct
  source 1..21: mol_type = other RNA
gggcagggagagagaaacttt

SEQ ID NO: 92180 - RNA, 21 nt, synthetic construct
  source 1..21: mol_type = other RNA
gggcagggtggagtccaacca

SEQ ID NO: 92181 - RNA, 21 nt, synthetic construct
  source 1..21: mol_type = other RNA
gggcataacatctatgaagta

SEQ ID NO: 92182 - RNA, 21 nt, synthetic construct
  source 1..21: mol_type = other RNA
gggcatcaaagctaccctttc

SEQ ID NO: 92183 - RNA, 21 nt, synthetic construct
  source 1..21: mol_type = other RNA
gggcatgggtccaagacagga

SEQ ID NO: 92184 - RNA, 21 nt, synthetic construct
  source 1..21: mol_type = other RNA
gggcattaattgagagctttc

SEQ ID NO: 92185 - RNA, 21 nt, synthetic construct
  source 1..21: mol_type = other RNA
gggcattagaagttaaattga

SEQ ID NO: 92186 - RNA, 21 nt, synthetic construct
  source 1..21: mol_type = other RNA
gggcattccagagggtaacgt

SEQ ID NO: 92187 - RNA, 21 nt, synthetic construct
  source 1..21: mol_type = other RNA
gggcattccctgtctgggaag

SEQ ID NO: 92188 - RNA, 21 nt, synthetic construct
  source 1..21: mol_type = other RNA
gggcattccgtggaaggcctt

SEQ ID NO: 92189 - RNA, 21 nt, synthetic construct
  source 1..21: mol_type = other RNA
gggcattttcaaggtagaagt

SEQ ID NO: 92190 - RNA, 21 nt, synthetic construct
  source 1..21: mol_type = other RNA
gggccaaagacagatcttatg

SEQ ID NO: 92191 - RNA, 21 nt, synthetic construct
  source 1..21: mol_type = other RNA
gggccaaagacttcaacggac

SEQ ID NO: 92192 - RNA, 21 nt, synthetic construct
  source 1..21: mol_type = other RNA
gggccaacttccagcaagact

SEQ ID NO: 92193 - RNA, 21 nt, synthetic construct
  source 1..21: mol_type = other RNA
gggccaccaagccctgcctta

SEQ ID NO: 92194 - RNA, 21 nt, synthetic construct
  source 1..21: mol_type = other RNA
gggccactgagagctcaggcc

SEQ ID NO: 92195 - RNA, 21 nt, synthetic construct
  source 1..21: mol_type = other RNA
gggccactggaaaccttttgt

SEQ ID NO: 92196 - RNA, 21 nt, synthetic construct
  source 1..21: mol_type = other RNA
gggccagaggagggatgcatt

SEQ ID NO: 92197 - RNA, 21 nt, synthetic construct
  source 1..21: mol_type = other RNA
gggccagttgagagagaattc

SEQ ID NO: 92198 - RNA, 21 nt, synthetic construct
  source 1..21: mol_type = other RNA
gggccatctgaattcaagtta

SEQ ID NO: 92199 - RNA, 21 nt, synthetic construct
  source 1..21: mol_type = other RNA
gggccattctgctatgaaatg

SEQ ID NO: 92200 - RNA, 21 nt, synthetic construct
  source 1..21: mol_type = other RNA
gggccatttcatttctgtttt

SEQ ID NO: 92201 - RNA, 21 nt, synthetic construct
  source 1..21: mol_type = other RNA
gggcccactctccccaagtaa

SEQ ID NO: 92202 - RNA, 21 nt, synthetic construct
  source 1..21: mol_type = other RNA
gggcccagcagaaggtgaggg

SEQ ID NO: 92203 - RNA, 21 nt, synthetic construct
  source 1..21: mol_type = other RNA
gggcccagcctcaacagcact

SEQ ID NO: 92204 - RNA, 21 nt, synthetic construct
  source 1..21: mol_type = other RNA
gggcccagctcttttgtgtct

SEQ ID NO: 92205 - RNA, 21 nt, synthetic construct
  source 1..21: mol_type = other RNA
gggcccgcagtggctcatgcc

SEQ ID NO: 92206 - RNA, 21 nt, synthetic construct
  source 1..21: mol_type = other RNA
gggccgcccctggagaaagcc

SEQ ID NO: 92207 - RNA, 21 nt, synthetic construct
  source 1..21: mol_type = other RNA
gggccgcgtccacctggcaac

SEQ ID NO: 92208 - RNA, 21 nt, synthetic construct
  source 1..21: mol_type = other RNA
gggcctaaataaaacacatgt

SEQ ID NO: 92209 - RNA, 21 nt, synthetic construct
  source 1..21: mol_type = other RNA
gggcctacagtggttccattt

SEQ ID NO: 92210 - RNA, 21 nt, synthetic construct
  source 1..21: mol_type = other RNA
gggcctagaaatcatacacga

SEQ ID NO: 92211 - RNA, 21 nt, synthetic construct
  source 1..21: mol_type = other RNA
gggcctcaaatttcatttact

SEQ ID NO: 92212 - RNA, 21 nt, synthetic construct
  source 1..21: mol_type = other RNA
gggcctcagcatgtcttcaga

SEQ ID NO: 92213 - RNA, 21 nt, synthetic construct
  source 1..21: mol_type = other RNA
gggcctctgaagacatgctga

SEQ ID NO: 92214 - RNA, 21 nt, synthetic construct
  source 1..21: mol_type = other RNA
gggcctgcttttggaagcatg

SEQ ID NO: 92215 - RNA, 21 nt, synthetic construct
  source 1..21: mol_type = other RNA
gggcctggttagggagacttt

SEQ ID NO: 92216 - RNA, 21 nt, synthetic construct
  source 1..21: mol_type = other RNA
gggcctgttccaggcctcgct

SEQ ID NO: 92217 - RNA, 21 nt, synthetic construct
  source 1..21: mol_type = other RNA
gggccttcccaaagacatcct

SEQ ID NO: 92218 - RNA, 21 nt, synthetic construct
  source 1..21: mol_type = other RNA
gggccttctactttaataaat

SEQ ID NO: 92219 - RNA, 21 nt, synthetic construct
  source 1..21: mol_type = other RNA
gggccttgcaagccacattag

SEQ ID NO: 92220 - RNA, 21 nt, synthetic construct
  source 1..21: mol_type = other RNA
gggcctttaatcacctcaagt

SEQ ID NO: 92221 - RNA, 21 nt, synthetic construct
  source 1..21: mol_type = other RNA
gggcctttctgtttgtttgtt

SEQ ID NO: 92222 - RNA, 21 nt, synthetic construct
  source 1..21: mol_type = other RNA
gggccttttgtcaagctatca

SEQ ID NO: 92223 - RNA, 21 nt, synthetic construct
  source 1..21: mol_type = other RNA
gggcgacaagagcagaactcc

SEQ ID NO: 92224 - RNA, 21 nt, synthetic construct
  source 1..21: mol_type = other RNA
gggcgacagagtgaaactctg

SEQ ID NO: 92225 - RNA, 21 nt, synthetic construct
  source 1..21: mol_type = other RNA
gggcgagatggcgtgcgcctg

SEQ ID NO: 92226 - RNA, 21 nt, synthetic construct
  source 1..21: mol_type = other RNA
gggcgatcttggctcaccaca

SEQ ID NO: 92227 - RNA, 21 nt, synthetic construct
  source 1..21: mol_type = other RNA
gggcgcgtgcctatggtccta

SEQ ID NO: 92228 - RNA, 21 nt, synthetic construct
  source 1..21: mol_type = other RNA
gggcgtagtggctcacaccta

SEQ ID NO: 92229 - RNA, 21 nt, synthetic construct
  source 1..21: mol_type = other RNA
gggcgtggagcggtgtcttat

SEQ ID NO: 92230 - RNA, 21 nt, synthetic construct
  source 1..21: mol_type = other RNA
gggcgtgggggctcacatctg

SEQ ID NO: 92231 - RNA, 21 nt, synthetic construct
  source 1..21: mol_type = other RNA
gggctaaatgctcacatttag

SEQ ID NO: 92232 - RNA, 21 nt, synthetic construct
  source 1..21: mol_type = other RNA
gggctaaggtggagtggtgga

SEQ ID NO: 92233 - RNA, 21 nt, synthetic construct
  source 1..21: mol_type = other RNA
gggctaagtagtggcagcccc

SEQ ID NO: 92234 - RNA, 21 nt, synthetic construct
  source 1..21: mol_type = other RNA
gggctagagccaggaagtcag

SEQ ID NO: 92235 - RNA, 21 nt, synthetic construct
  source 1..21: mol_type = other RNA
gggctaggatttcagtaaatg

SEQ ID NO: 92236 - RNA, 21 nt, synthetic construct
  source 1..21: mol_type = other RNA
gggctagggaagcagttgatg

SEQ ID NO: 92237 - RNA, 21 nt, synthetic construct
  source 1..21: mol_type = other RNA
gggctatctttactttcagct

SEQ ID NO: 92238 - RNA, 21 nt, synthetic construct
  source 1..21: mol_type = other RNA
gggctattaagtattgcattg

SEQ ID NO: 92239 - RNA, 21 nt, synthetic construct
  source 1..21: mol_type = other RNA
gggctattgttttgcaagatt

SEQ ID NO: 92240 - RNA, 21 nt, synthetic construct
  source 1..21: mol_type = other RNA
gggctcaagccatcctccagc

SEQ ID NO: 92241 - RNA, 21 nt, synthetic construct
  source 1..21: mol_type = other RNA
gggctcaagtaagtgaaatca

SEQ ID NO: 92242 - RNA, 21 nt, synthetic construct
  source 1..21: mol_type = other RNA
gggctcactgcaacttccgcc

SEQ ID NO: 92243 - RNA, 21 nt, synthetic construct
  source 1..21: mol_type = other RNA
gggctcatctaagcctacctc

SEQ ID NO: 92244 - RNA, 21 nt, synthetic construct
  source 1..21: mol_type = other RNA
gggctcccagtgcccacctga

SEQ ID NO: 92245 - RNA, 21 nt, synthetic construct
  source 1..21: mol_type = other RNA
gggctcccttccagcgtgtgc

SEQ ID NO: 92246 - RNA, 21 nt, synthetic construct
  source 1..21: mol_type = other RNA
gggctcctccaaggctgcccg

SEQ ID NO: 92247 - RNA, 21 nt, synthetic construct
  source 1..21: mol_type = other RNA
gggctcgcagcatccctgccg

SEQ ID NO: 92248 - RNA, 21 nt, synthetic construct
  source 1..21: mol_type = other RNA
gggctctaatgcaagagttaa

SEQ ID NO: 92249 - RNA, 21 nt, synthetic construct
  source 1..21: mol_type = other RNA
gggctctctattccaaatgtc

SEQ ID NO: 92250 - RNA, 21 nt, synthetic construct
  source 1..21: mol_type = other RNA
gggctgaaaaacacctcagtt

SEQ ID NO: 92251 - RNA, 21 nt, synthetic construct
  source 1..21: mol_type = other RNA
gggctgagccttcagaactct

SEQ ID NO: 92252 - RNA, 21 nt, synthetic construct
  source 1..21: mol_type = other RNA
gggctgaggattggagactga

SEQ ID NO: 92253 - RNA, 21 nt, synthetic construct
  source 1..21: mol_type = other RNA
gggctgagtatgggtctccat

SEQ ID NO: 92254 - RNA, 21 nt, synthetic construct
  source 1..21: mol_type = other RNA
gggctgcatcatggtgggcct

SEQ ID NO: 92255 - RNA, 21 nt, synthetic construct
  source 1..21: mol_type = other RNA
gggctgccactacttagcccc

SEQ ID NO: 92256 - RNA, 21 nt, synthetic construct
  source 1..21: mol_type = other RNA
gggctggacataagggtctgt

SEQ ID NO: 92257 - RNA, 21 nt, synthetic construct
  source 1..21: mol_type = other RNA
gggctgggggatccaggggaa

SEQ ID NO: 92258 - RNA, 21 nt, synthetic construct
  source 1..21: mol_type = other RNA
gggctgttcccagataacagt

SEQ ID NO: 92259 - RNA, 21 nt, synthetic construct
  source 1..21: mol_type = other RNA
gggcttaacatttgaactcac

SEQ ID NO: 92260 - RNA, 21 nt, synthetic construct
  source 1..21: mol_type = other RNA
gggcttatcagatggtgatac

SEQ ID NO: 92261 - RNA, 21 nt, synthetic construct
  source 1..21: mol_type = other RNA
gggcttcactttcgtcatcta

SEQ ID NO: 92262 - RNA, 21 nt, synthetic construct
  source 1..21: mol_type = other RNA
gggcttcatgctgggagacca

SEQ ID NO: 92263 - RNA, 21 nt, synthetic construct
  source 1..21: mol_type = other RNA
gggcttcgcctttgttgccag

SEQ ID NO: 92264 - RNA, 21 nt, synthetic construct
  source 1..21: mol_type = other RNA
gggcttctgaaggtgcctgcc

SEQ ID NO: 92265 - RNA, 21 nt, synthetic construct
  source 1..21: mol_type = other RNA
gggcttgaacccgaggtgcac

SEQ ID NO: 92266 - RNA, 21 nt, synthetic construct
  source 1..21: mol_type = other RNA
gggcttgatctagtaaatata

SEQ ID NO: 92267 - RNA, 21 nt, synthetic construct
  source 1..21: mol_type = other RNA
gggcttggtatgcatcttgaa

SEQ ID NO: 92268 - RNA, 21 nt, synthetic construct
  source 1..21: mol_type = other RNA
gggcttggtggcccacacctg

SEQ ID NO: 92269 - RNA, 21 nt, synthetic construct
  source 1..21: mol_type = other RNA
gggcttggttggaaaagaaag

SEQ ID NO: 92270 - RNA, 21 nt, synthetic construct
  source 1..21: mol_type = other RNA
gggctttactgtattaggatg

SEQ ID NO: 92271 - RNA, 21 nt, synthetic construct
  source 1..21: mol_type = other RNA
gggctttcaatagtgggtaga

SEQ ID NO: 92272 - RNA, 21 nt, synthetic construct
  source 1..21: mol_type = other RNA
gggctttctccaggggcggcc

SEQ ID NO: 92273 - RNA, 21 nt, synthetic construct
  source 1..21: mol_type = other RNA
gggctttgagaaaggtttctt

SEQ ID NO: 92274 - RNA, 21 nt, synthetic construct
  source 1..21: mol_type = other RNA
gggctttgtgaagggaggtag

SEQ ID NO: 92275 - RNA, 21 nt, synthetic construct
  source 1..21: mol_type = other RNA
gggcttttcatatacgtattt

SEQ ID NO: 92276 - RNA, 21 nt, synthetic construct
  source 1..21: mol_type = other RNA
gggcttttgaacactctgcaa

SEQ ID NO: 92277 - RNA, 21 nt, synthetic construct
  source 1..21: mol_type = other RNA
ggggaaaaaaccataaaattt

SEQ ID NO: 92278 - RNA, 21 nt, synthetic construct
  source 1..21: mol_type = other RNA
ggggaaaacacccttgaaaat

SEQ ID NO: 92279 - RNA, 21 nt, synthetic construct
  source 1..21: mol_type = other RNA
ggggaaaactccaagtgtaaa

SEQ ID NO: 92280 - RNA, 21 nt, synthetic construct
  source 1..21: mol_type = other RNA
ggggaaaattgacatttttca

SEQ ID NO: 92281 - RNA, 21 nt, synthetic construct
  source 1..21: mol_type = other RNA
ggggaaatagatgcctagaaa

SEQ ID NO: 92282 - RNA, 21 nt, synthetic construct
  source 1..21: mol_type = other RNA
ggggaacagtttagcaatcca

SEQ ID NO: 92283 - RNA, 21 nt, synthetic construct
  source 1..21: mol_type = other RNA
ggggaactcttgtagtatttt

SEQ ID NO: 92284 - RNA, 21 nt, synthetic construct
  source 1..21: mol_type = other RNA
ggggaagagagcattgccttt

SEQ ID NO: 92285 - RNA, 21 nt, synthetic construct
  source 1..21: mol_type = other RNA
ggggaagcaggaactcatatt

SEQ ID NO: 92286 - RNA, 21 nt, synthetic construct
  source 1..21: mol_type = other RNA
ggggaagcttttcatatacag

SEQ ID NO: 92287 - RNA, 21 nt, synthetic construct
  source 1..21: mol_type = other RNA
ggggaaggaattttcaggact

SEQ ID NO: 92288 - RNA, 21 nt, synthetic construct
  source 1..21: mol_type = other RNA
ggggaaggagtctgcccatcc

SEQ ID NO: 92289 - RNA, 21 nt, synthetic construct
  source 1..21: mol_type = other RNA
ggggaaggcttcgagttctgg

SEQ ID NO: 92290 - RNA, 21 nt, synthetic construct
  source 1..21: mol_type = other RNA
ggggaataagattttaggtca

SEQ ID NO: 92291 - RNA, 21 nt, synthetic construct
  source 1..21: mol_type = other RNA
ggggaatagaaagttagtgtc

SEQ ID NO: 92292 - RNA, 21 nt, synthetic construct
  source 1..21: mol_type = other RNA
ggggaatcatgcagtacttgt

SEQ ID NO: 92293 - RNA, 21 nt, synthetic construct
  source 1..21: mol_type = other RNA
ggggaatctactcttttgttt

SEQ ID NO: 92294 - RNA, 21 nt, synthetic construct
  source 1..21: mol_type = other RNA
ggggaatgctcataattaaag

SEQ ID NO: 92295 - RNA, 21 nt, synthetic construct
  source 1..21: mol_type = other RNA
ggggaatggtactgcctccac

SEQ ID NO: 92296 - RNA, 21 nt, synthetic construct
  source 1..21: mol_type = other RNA
ggggaattgcatgagacttgg

SEQ ID NO: 92297 - RNA, 21 nt, synthetic construct
  source 1..21: mol_type = other RNA
ggggacagctcaattaagcaa

SEQ ID NO: 92298 - RNA, 21 nt, synthetic construct
  source 1..21: mol_type = other RNA
ggggacatagatgaaactaaa

SEQ ID NO: 92299 - RNA, 21 nt, synthetic construct
  source 1..21: mol_type = other RNA
ggggacatgaaggaaggattg

SEQ ID NO: 92300 - RNA, 21 nt, synthetic construct
  source 1..21: mol_type = other RNA
ggggacatgctctgataggat

SEQ ID NO: 92301 - RNA, 21 nt, synthetic construct
  source 1..21: mol_type = other RNA
ggggacccctccctgctttaa

SEQ ID NO: 92302 - RNA, 21 nt, synthetic construct
  source 1..21: mol_type = other RNA
ggggacgacgtatgcaactta

SEQ ID NO: 92303 - RNA, 21 nt, synthetic construct
  source 1..21: mol_type = other RNA
ggggactaacagggtctacaa

SEQ ID NO: 92304 - RNA, 21 nt, synthetic construct
  source 1..21: mol_type = other RNA
ggggactcttatggctataac

SEQ ID NO: 92305 - RNA, 21 nt, synthetic construct
  source 1..21: mol_type = other RNA
ggggactgcaacagatctgag

SEQ ID NO: 92306 - RNA, 21 nt, synthetic construct
  source 1..21: mol_type = other RNA
ggggacttgctctcttgccca

SEQ ID NO: 92307 - RNA, 21 nt, synthetic construct
  source 1..21: mol_type = other RNA
ggggactttgatgttttacat

SEQ ID NO: 92308 - RNA, 21 nt, synthetic construct
  source 1..21: mol_type = other RNA
ggggactttgtggcctcttcc

SEQ ID NO: 92309 - RNA, 21 nt, synthetic construct
  source 1..21: mol_type = other RNA
ggggagactgtgcaatgtgaa

SEQ ID NO: 92310 - RNA, 21 nt, synthetic construct
  source 1..21: mol_type = other RNA
ggggagagcactggtttcagt

SEQ ID NO: 92311 - RNA, 21 nt, synthetic construct
  source 1..21: mol_type = other RNA
ggggagaggcctcatgtattt

SEQ ID NO: 92312 - RNA, 21 nt, synthetic construct
  source 1..21: mol_type = other RNA
ggggagagtgggcccagcaga

SEQ ID NO: 92313 - RNA, 21 nt, synthetic construct
  source 1..21: mol_type = other RNA
ggggagataccttgaaaggat

SEQ ID NO: 92314 - RNA, 21 nt, synthetic construct
  source 1..21: mol_type = other RNA
ggggagctagagggtaagacc

SEQ ID NO: 92315 - RNA, 21 nt, synthetic construct
  source 1..21: mol_type = other RNA
ggggagcttttgaaactgagc

SEQ ID NO: 92316 - RNA, 21 nt, synthetic construct
  source 1..21: mol_type = other RNA
ggggaggccaaggcaggactg

SEQ ID NO: 92317 - RNA, 21 nt, synthetic construct
  source 1..21: mol_type = other RNA
ggggagggagagggagctctg

SEQ ID NO: 92318 - RNA, 21 nt, synthetic construct
  source 1..21: mol_type = other RNA
ggggagggggagggagaggga

SEQ ID NO: 92319 - RNA, 21 nt, synthetic construct
  source 1..21: mol_type = other RNA
ggggagtgtgcccaaggaagg

SEQ ID NO: 92320 - RNA, 21 nt, synthetic construct
  source 1..21: mol_type = other RNA
ggggagttttaggaaaataga

SEQ ID NO: 92321 - RNA, 21 nt, synthetic construct
  source 1..21: mol_type = other RNA
ggggatatccaaagataaagg

SEQ ID NO: 92322 - RNA, 21 nt, synthetic construct
  source 1..21: mol_type = other RNA
ggggatccaggggaatagaaa

SEQ ID NO: 92323 - RNA, 21 nt, synthetic construct
  source 1..21: mol_type = other RNA
ggggatgcaacaaatgttgca

SEQ ID NO: 92324 - RNA, 21 nt, synthetic construct
  source 1..21: mol_type = other RNA
ggggatgctcagggtgcgacc

SEQ ID NO: 92325 - RNA, 21 nt, synthetic construct
  source 1..21: mol_type = other RNA
ggggatgctgtctataggcaa

SEQ ID NO: 92326 - RNA, 21 nt, synthetic construct
  source 1..21: mol_type = other RNA
ggggatgggggacgacgtatg

SEQ ID NO: 92327 - RNA, 21 nt, synthetic construct
  source 1..21: mol_type = other RNA
ggggatggttgcacaatgttg

SEQ ID NO: 92328 - RNA, 21 nt, synthetic construct
  source 1..21: mol_type = other RNA
ggggatgtagaaggatatgtt

SEQ ID NO: 92329 - RNA, 21 nt, synthetic construct
  source 1..21: mol_type = other RNA
ggggattctgctactagcaag

SEQ ID NO: 92330 - RNA, 21 nt, synthetic construct
  source 1..21: mol_type = other RNA
ggggattgagggttagatttt

SEQ ID NO: 92331 - RNA, 21 nt, synthetic construct
  source 1..21: mol_type = other RNA
ggggatttcatgaacaatttt

SEQ ID NO: 92332 - RNA, 21 nt, synthetic construct
  source 1..21: mol_type = other RNA
ggggcaatctcagctcattac

SEQ ID NO: 92333 - RNA, 21 nt, synthetic construct
  source 1..21: mol_type = other RNA
ggggcacctaaaaggttgctt

SEQ ID NO: 92334 - RNA, 21 nt, synthetic construct
  source 1..21: mol_type = other RNA
ggggcagagaactgactgaag

SEQ ID NO: 92335 - RNA, 21 nt, synthetic construct
  source 1..21: mol_type = other RNA
ggggcagcaaagcaagaaaaa

SEQ ID NO: 92336 - RNA, 21 nt, synthetic construct
  source 1..21: mol_type = other RNA
ggggcaggaaaggtggggaag

SEQ ID NO: 92337 - RNA, 21 nt, synthetic construct
  source 1..21: mol_type = other RNA
ggggcagggtggagtccaacc

SEQ ID NO: 92338 - RNA, 21 nt, synthetic construct
  source 1..21: mol_type = other RNA
ggggcataacatctatgaagt

SEQ ID NO: 92339 - RNA, 21 nt, synthetic construct
  source 1..21: mol_type = other RNA
ggggcatcaaagctacccttt

SEQ ID NO: 92340 - RNA, 21 nt, synthetic construct
  source 1..21: mol_type = other RNA
ggggcattccctgtctgggaa

SEQ ID NO: 92341 - RNA, 21 nt, synthetic construct
  source 1..21: mol_type = other RNA
ggggcattccgtggaaggcct

SEQ ID NO: 92342 - RNA, 21 nt, synthetic construct
  source 1..21: mol_type = other RNA
ggggccactggaaaccttttg

SEQ ID NO: 92343 - RNA, 21 nt, synthetic construct
  source 1..21: mol_type = other RNA
ggggccaggtgtggaggctca

SEQ ID NO: 92344 - RNA, 21 nt, synthetic construct
  source 1..21: mol_type = other RNA
ggggccagttgagagagaatt

SEQ ID NO: 92345 - RNA, 21 nt, synthetic construct
  source 1..21: mol_type = other RNA
ggggccatctgaattcaagtt

SEQ ID NO: 92346 - RNA, 21 nt, synthetic construct
  source 1..21: mol_type = other RNA
ggggccgcccctggagaaagc

SEQ ID NO: 92347 - RNA, 21 nt, synthetic construct
  source 1..21: mol_type = other RNA
ggggccgcgtccacctggcaa

SEQ ID NO: 92348 - RNA, 21 nt, synthetic construct
  source 1..21: mol_type = other RNA
ggggcctacagtggttccatt

SEQ ID NO: 92349 - RNA, 21 nt, synthetic construct
  source 1..21: mol_type = other RNA
ggggcctcagcatgtcttcag

SEQ ID NO: 92350 - RNA, 21 nt, synthetic construct
  source 1..21: mol_type = other RNA
ggggccttttgtcaagctatc

SEQ ID NO: 92351 - RNA, 21 nt, synthetic construct
  source 1..21: mol_type = other RNA
ggggcgatcttggctcaccac

SEQ ID NO: 92352 - RNA, 21 nt, synthetic construct
  source 1..21: mol_type = other RNA
ggggcgcgtgcctatggtcct

SEQ ID NO: 92353 - RNA, 21 nt, synthetic construct
  source 1..21: mol_type = other RNA
ggggctaaatgctcacattta

SEQ ID NO: 92354 - RNA, 21 nt, synthetic construct
  source 1..21: mol_type = other RNA
ggggctaagtagtggcagccc

SEQ ID NO: 92355 - RNA, 21 nt, synthetic construct
  source 1..21: mol_type = other RNA
ggggctaggatttcagtaaat

SEQ ID NO: 92356 - RNA, 21 nt, synthetic construct
  source 1..21: mol_type = other RNA
ggggctatctttactttcagc

SEQ ID NO: 92357 - RNA, 21 nt, synthetic construct
  source 1..21: mol_type = other RNA
ggggctcaagtaagtgaaatc

SEQ ID NO: 92358 - RNA, 21 nt, synthetic construct
  source 1..21: mol_type = other RNA
ggggctcgcagcatccctgcc

SEQ ID NO: 92359 - RNA, 21 nt, synthetic construct
  source 1..21: mol_type = other RNA
ggggctctaatgcaagagtta

SEQ ID NO: 92360 - RNA, 21 nt, synthetic construct
  source 1..21: mol_type = other RNA
ggggctgagccttcagaactc

SEQ ID NO: 92361 - RNA, 21 nt, synthetic construct
  source 1..21: mol_type = other RNA
ggggctgaggattggagactg

SEQ ID NO: 92362 - RNA, 21 nt, synthetic construct
  source 1..21: mol_type = other RNA
ggggctgagtatgggtctcca

SEQ ID NO: 92363 - RNA, 21 nt, synthetic construct
  source 1..21: mol_type = other RNA
ggggctgcatcatggtgggcc

SEQ ID NO: 92364 - RNA, 21 nt, synthetic construct
  source 1..21: mol_type = other RNA
ggggctgccactacttagccc

SEQ ID NO: 92365 - RNA, 21 nt, synthetic construct
  source 1..21: mol_type = other RNA
ggggctggacataagggtctg

SEQ ID NO: 92366 - RNA, 21 nt, synthetic construct
  source 1..21: mol_type = other RNA
ggggctgggggatccagggga

SEQ ID NO: 92367 - RNA, 21 nt, synthetic construct
  source 1..21: mol_type = other RNA
ggggctgttcccagataacag

SEQ ID NO: 92368 - RNA, 21 nt, synthetic construct
  source 1..21: mol_type = other RNA
ggggcttgaacccgaggtgca

SEQ ID NO: 92369 - RNA, 21 nt, synthetic construct
  source 1..21: mol_type = other RNA
ggggctttactgtattaggat

SEQ ID NO: 92370 - RNA, 21 nt, synthetic construct
  source 1..21: mol_type = other RNA
ggggcttttgaacactctgca

SEQ ID NO: 92371 - RNA, 21 nt, synthetic construct
  source 1..21: mol_type = other RNA
gggggaaaaaaccataaaatt

SEQ ID NO: 92372 - RNA, 21 nt, synthetic construct
  source 1..21: mol_type = other RNA
gggggaaaacacccttgaaaa

SEQ ID NO: 92373 - RNA, 21 nt, synthetic construct
  source 1..21: mol_type = other RNA
gggggaaaactccaagtgtaa

SEQ ID NO: 92374 - RNA, 21 nt, synthetic construct
  source 1..21: mol_type = other RNA
gggggaaaattgacatttttc

SEQ ID NO: 92375 - RNA, 21 nt, synthetic construct
  source 1..21: mol_type = other RNA
gggggaagagagcattgcctt

SEQ ID NO: 92376 - RNA, 21 nt, synthetic construct
  source 1..21: mol_type = other RNA
gggggaagcaggaactcatat

SEQ ID NO: 92377 - RNA, 21 nt, synthetic construct
  source 1..21: mol_type = other RNA
gggggaagcttttcatataca

SEQ ID NO: 92378 - RNA, 21 nt, synthetic construct
  source 1..21: mol_type = other RNA
gggggaatctactcttttgtt

SEQ ID NO: 92379 - RNA, 21 nt, synthetic construct
  source 1..21: mol_type = other RNA
gggggacgacgtatgcaactt

SEQ ID NO: 92380 - RNA, 21 nt, synthetic construct
  source 1..21: mol_type = other RNA
gggggagactgtgcaatgtga

SEQ ID NO: 92381 - RNA, 21 nt, synthetic construct
  source 1..21: mol_type = other RNA
gggggagagcactggtttcag

SEQ ID NO: 92382 - RNA, 21 nt, synthetic construct
  source 1..21: mol_type = other RNA
gggggagggagagggagctct

SEQ ID NO: 92383 - RNA, 21 nt, synthetic construct
  source 1..21: mol_type = other RNA
gggggatccaggggaatagaa

SEQ ID NO: 92384 - RNA, 21 nt, synthetic construct
  source 1..21: mol_type = other RNA
gggggatgtagaaggatatgt

SEQ ID NO: 92385 - RNA, 21 nt, synthetic construct
  source 1..21: mol_type = other RNA
gggggcataacatctatgaag

SEQ ID NO: 92386 - RNA, 21 nt, synthetic construct
  source 1..21: mol_type = other RNA
gggggcatcaaagctaccctt

SEQ ID NO: 92387 - RNA, 21 nt, synthetic construct
  source 1..21: mol_type = other RNA
gggggccactggaaacctttt

SEQ ID NO: 92388 - RNA, 21 nt, synthetic construct
  source 1..21: mol_type = other RNA
gggggcgcgtgcctatggtcc

SEQ ID NO: 92389 - RNA, 21 nt, synthetic construct
  source 1..21: mol_type = other RNA
gggggctaaatgctcacattt

SEQ ID NO: 92390 - RNA, 21 nt, synthetic construct
  source 1..21: mol_type = other RNA
gggggctcacatctgtaatct

SEQ ID NO: 92391 - RNA, 21 nt, synthetic construct
  source 1..21: mol_type = other RNA
gggggctgaggattggagact

SEQ ID NO: 92392 - RNA, 21 nt, synthetic construct
  source 1..21: mol_type = other RNA
gggggctgagtatgggtctcc

SEQ ID NO: 92393 - RNA, 21 nt, synthetic construct
  source 1..21: mol_type = other RNA
gggggctggacataagggtct

SEQ ID NO: 92394 - RNA, 21 nt, synthetic construct
  source 1..21: mol_type = other RNA
ggggggaaaaaaccataaaat

SEQ ID NO: 92395 - RNA, 21 nt, synthetic construct
  source 1..21: mol_type = other RNA
ggggggaaaacacccttgaaa

SEQ ID NO: 92396 - RNA, 21 nt, synthetic construct
  source 1..21: mol_type = other RNA
ggggggaagcttttcatatac

SEQ ID NO: 92397 - RNA, 21 nt, synthetic construct
  source 1..21: mol_type = other RNA
ggggggatgtagaaggatatg

SEQ ID NO: 92398 - RNA, 21 nt, synthetic construct
  source 1..21: mol_type = other RNA
ggggggccactggaaaccttt

SEQ ID NO: 92399 - RNA, 21 nt, synthetic construct
  source 1..21: mol_type = other RNA
ggggggtttgttttttgtttt

SEQ ID NO: 92400 - RNA, 21 nt, synthetic construct
  source 1..21: mol_type = other RNA
gggggtaagattgtggtccag

SEQ ID NO: 92401 - RNA, 21 nt, synthetic construct
  source 1..21: mol_type = other RNA
gggggtatggagacactaggg

SEQ ID NO: 92402 - RNA, 21 nt, synthetic construct
  source 1..21: mol_type = other RNA
gggggtcgagactgtaatgag

SEQ ID NO: 92403 - RNA, 21 nt, synthetic construct
  source 1..21: mol_type = other RNA
gggggtttgttttttgttttg

SEQ ID NO: 92404 - RNA, 21 nt, synthetic construct
  source 1..21: mol_type = other RNA
ggggtaaaggggatgggggac

SEQ ID NO: 92405 - RNA, 21 nt, synthetic construct
  source 1..21: mol_type = other RNA
ggggtaaatctttgtacagta

SEQ ID NO: 92406 - RNA, 21 nt, synthetic construct
  source 1..21: mol_type = other RNA
ggggtaaatggtttctccttc

SEQ ID NO: 92407 - RNA, 21 nt, synthetic construct
  source 1..21: mol_type = other RNA
ggggtaagattgtggtccaga

SEQ ID NO: 92408 - RNA, 21 nt, synthetic construct
  source 1..21: mol_type = other RNA
ggggtaattttggggccatct

SEQ ID NO: 92409 - RNA, 21 nt, synthetic construct
  source 1..21: mol_type = other RNA
ggggtatggagacactaggga

SEQ ID NO: 92410 - RNA, 21 nt, synthetic construct
  source 1..21: mol_type = other RNA
ggggtatgtttgattagttga

SEQ ID NO: 92411 - RNA, 21 nt, synthetic construct
  source 1..21: mol_type = other RNA
ggggtattcagggggctaaat

SEQ ID NO: 92412 - RNA, 21 nt, synthetic construct
  source 1..21: mol_type = other RNA
ggggtccccagcatccactag

SEQ ID NO: 92413 - RNA, 21 nt, synthetic construct
  source 1..21: mol_type = other RNA
ggggtcgagactgtaatgagc

SEQ ID NO: 92414 - RNA, 21 nt, synthetic construct
  source 1..21: mol_type = other RNA
ggggtcttagttctgcttcca

SEQ ID NO: 92415 - RNA, 21 nt, synthetic construct
  source 1..21: mol_type = other RNA
ggggtcttatgctggtgggct

SEQ ID NO: 92416 - RNA, 21 nt, synthetic construct
  source 1..21: mol_type = other RNA
ggggtggggggatgtagaagg

SEQ ID NO: 92417 - RNA, 21 nt, synthetic construct
  source 1..21: mol_type = other RNA
ggggttagggcctagaaatca

SEQ ID NO: 92418 - RNA, 21 nt, synthetic construct
  source 1..21: mol_type = other RNA
ggggttcaaaccacctaacta

SEQ ID NO: 92419 - RNA, 21 nt, synthetic construct
  source 1..21: mol_type = other RNA
ggggtttcagcacaatactgt

SEQ ID NO: 92420 - RNA, 21 nt, synthetic construct
  source 1..21: mol_type = other RNA
ggggtttccttacctttatct

SEQ ID NO: 92421 - RNA, 21 nt, synthetic construct
  source 1..21: mol_type = other RNA
ggggtttgtccatgttggtca

SEQ ID NO: 92422 - RNA, 21 nt, synthetic construct
  source 1..21: mol_type = other RNA
ggggtttgttttttgttttgg

SEQ ID NO: 92423 - RNA, 21 nt, synthetic construct
  source 1..21: mol_type = other RNA
ggggtttttatggttttaagt

SEQ ID NO: 92424 - RNA, 21 nt, synthetic construct
  source 1..21: mol_type = other RNA
gggtaaaaagcctgcttcagc

SEQ ID NO: 92425 - RNA, 21 nt, synthetic construct
  source 1..21: mol_type = other RNA
gggtaaaatagtcaagtaaca

SEQ ID NO: 92426 - RNA, 21 nt, synthetic construct
  source 1..21: mol_type = other RNA
gggtaaacaagactcaacatg

SEQ ID NO: 92427 - RNA, 21 nt, synthetic construct
  source 1..21: mol_type = other RNA
gggtaaacagaattaaacaat

SEQ ID NO: 92428 - RNA, 21 nt, synthetic construct
  source 1..21: mol_type = other RNA
gggtaaaggggatgggggacg

SEQ ID NO: 92429 - RNA, 21 nt, synthetic construct
  source 1..21: mol_type = other RNA
gggtaaagtcaattctagtta

SEQ ID NO: 92430 - RNA, 21 nt, synthetic construct
  source 1..21: mol_type = other RNA
gggtaaatctttgtacagtaa

SEQ ID NO: 92431 - RNA, 21 nt, synthetic construct
  source 1..21: mol_type = other RNA
gggtaaatggtttctccttct

SEQ ID NO: 92432 - RNA, 21 nt, synthetic construct
  source 1..21: mol_type = other RNA
gggtaaatttctaaaaacgtg

SEQ ID NO: 92433 - RNA, 21 nt, synthetic construct
  source 1..21: mol_type = other RNA
gggtaacgtgagctggaagta

SEQ ID NO: 92434 - RNA, 21 nt, synthetic construct
  source 1..21: mol_type = other RNA
gggtaagaaaattgtacaatt

SEQ ID NO: 92435 - RNA, 21 nt, synthetic construct
  source 1..21: mol_type = other RNA
gggtaagaaaggagttcagct

SEQ ID NO: 92436 - RNA, 21 nt, synthetic construct
  source 1..21: mol_type = other RNA
gggtaagaccaaaatggagac

SEQ ID NO: 92437 - RNA, 21 nt, synthetic construct
  source 1..21: mol_type = other RNA
gggtaagattccgtctcaaaa

SEQ ID NO: 92438 - RNA, 21 nt, synthetic construct
  source 1..21: mol_type = other RNA
gggtaagattgtggtccagaa

SEQ ID NO: 92439 - RNA, 21 nt, synthetic construct
  source 1..21: mol_type = other RNA
gggtaatgctggcttcatggg

SEQ ID NO: 92440 - RNA, 21 nt, synthetic construct
  source 1..21: mol_type = other RNA
gggtaatttatctccataagt

SEQ ID NO: 92441 - RNA, 21 nt, synthetic construct
  source 1..21: mol_type = other RNA
gggtaattttggggccatctg

SEQ ID NO: 92442 - RNA, 21 nt, synthetic construct
  source 1..21: mol_type = other RNA
gggtacacatcctaatacagt

SEQ ID NO: 92443 - RNA, 21 nt, synthetic construct
  source 1..21: mol_type = other RNA
gggtacagaactgctaatggt

SEQ ID NO: 92444 - RNA, 21 nt, synthetic construct
  source 1..21: mol_type = other RNA
gggtacagggtttctgtttgg

SEQ ID NO: 92445 - RNA, 21 nt, synthetic construct
  source 1..21: mol_type = other RNA
gggtagaagcagcaagggtgg

SEQ ID NO: 92446 - RNA, 21 nt, synthetic construct
  source 1..21: mol_type = other RNA
gggtagactgtaaaaattttc

SEQ ID NO: 92447 - RNA, 21 nt, synthetic construct
  source 1..21: mol_type = other RNA
gggtagagactggatcctgga

SEQ ID NO: 92448 - RNA, 21 nt, synthetic construct
  source 1..21: mol_type = other RNA
gggtagagcactttcgtattt

SEQ ID NO: 92449 - RNA, 21 nt, synthetic construct
  source 1..21: mol_type = other RNA
gggtagctttgatgcccccac

SEQ ID NO: 92450 - RNA, 21 nt, synthetic construct
  source 1..21: mol_type = other RNA
gggtagcttttcctgctgtcg

SEQ ID NO: 92451 - RNA, 21 nt, synthetic construct
  source 1..21: mol_type = other RNA
gggtaggaaaagacttctcaa

SEQ ID NO: 92452 - RNA, 21 nt, synthetic construct
  source 1..21: mol_type = other RNA
gggtaggaagctgatcaagga

SEQ ID NO: 92453 - RNA, 21 nt, synthetic construct
  source 1..21: mol_type = other RNA
gggtaggaaggcggtggggac

SEQ ID NO: 92454 - RNA, 21 nt, synthetic construct
  source 1..21: mol_type = other RNA
gggtataaatgatgagctact

SEQ ID NO: 92455 - RNA, 21 nt, synthetic construct
  source 1..21: mol_type = other RNA
gggtatacagcaaaagaatta

SEQ ID NO: 92456 - RNA, 21 nt, synthetic construct
  source 1..21: mol_type = other RNA
gggtatatacaatattacagt

SEQ ID NO: 92457 - RNA, 21 nt, synthetic construct
  source 1..21: mol_type = other RNA
gggtatcatattatttttgtc

SEQ ID NO: 92458 - RNA, 21 nt, synthetic construct
  source 1..21: mol_type = other RNA
gggtatggagacactagggac

SEQ ID NO: 92459 - RNA, 21 nt, synthetic construct
  source 1..21: mol_type = other RNA
gggtatgtttgattagttgac

SEQ ID NO: 92460 - RNA, 21 nt, synthetic construct
  source 1..21: mol_type = other RNA
gggtattcagggggctaaatg

SEQ ID NO: 92461 - RNA, 21 nt, synthetic construct
  source 1..21: mol_type = other RNA
gggtattttgttgttgttgtt

SEQ ID NO: 92462 - RNA, 21 nt, synthetic construct
  source 1..21: mol_type = other RNA
gggtcaacaaactaactagaa

SEQ ID NO: 92463 - RNA, 21 nt, synthetic construct
  source 1..21: mol_type = other RNA
gggtcaaccactaaggtcaac

SEQ ID NO: 92464 - RNA, 21 nt, synthetic construct
  source 1..21: mol_type = other RNA
gggtcactattaaccatatgg

SEQ ID NO: 92465 - RNA, 21 nt, synthetic construct
  source 1..21: mol_type = other RNA
gggtcacttcctctcttaaat

SEQ ID NO: 92466 - RNA, 21 nt, synthetic construct
  source 1..21: mol_type = other RNA
gggtcagaatcgtgatagtct

SEQ ID NO: 92467 - RNA, 21 nt, synthetic construct
  source 1..21: mol_type = other RNA
gggtcagaattttattttctt

SEQ ID NO: 92468 - RNA, 21 nt, synthetic construct
  source 1..21: mol_type = other RNA
gggtcagctagtgtgtctgac

SEQ ID NO: 92469 - RNA, 21 nt, synthetic construct
  source 1..21: mol_type = other RNA
gggtcatgcacacgctggaag

SEQ ID NO: 92470 - RNA, 21 nt, synthetic construct
  source 1..21: mol_type = other RNA
gggtccaagacaggaagaatt

SEQ ID NO: 92471 - RNA, 21 nt, synthetic construct
  source 1..21: mol_type = other RNA
gggtccagcttcactcttctg

SEQ ID NO: 92472 - RNA, 21 nt, synthetic construct
  source 1..21: mol_type = other RNA
gggtccaggcagttctcctgc

SEQ ID NO: 92473 - RNA, 21 nt, synthetic construct
  source 1..21: mol_type = other RNA
gggtccccagcatccactagg

SEQ ID NO: 92474 - RNA, 21 nt, synthetic construct
  source 1..21: mol_type = other RNA
gggtcgagactgtaatgagct

SEQ ID NO: 92475 - RNA, 21 nt, synthetic construct
  source 1..21: mol_type = other RNA
gggtcgcggacgcgcattttt

SEQ ID NO: 92476 - RNA, 21 nt, synthetic construct
  source 1..21: mol_type = other RNA
gggtcgggtgtcagaaaccat

SEQ ID NO: 92477 - RNA, 21 nt, synthetic construct
  source 1..21: mol_type = other RNA
gggtctacaaaaggtttccag

SEQ ID NO: 92478 - RNA, 21 nt, synthetic construct
  source 1..21: mol_type = other RNA
gggtctatagtttaattgggg

SEQ ID NO: 92479 - RNA, 21 nt, synthetic construct
  source 1..21: mol_type = other RNA
gggtctcactcttaccaaggc

SEQ ID NO: 92480 - RNA, 21 nt, synthetic construct
  source 1..21: mol_type = other RNA
gggtctccattttggtcttac

SEQ ID NO: 92481 - RNA, 21 nt, synthetic construct
  source 1..21: mol_type = other RNA
gggtctggtatctaccaaaaa

SEQ ID NO: 92482 - RNA, 21 nt, synthetic construct
  source 1..21: mol_type = other RNA
gggtctgtctcacctcaaggc

SEQ ID NO: 92483 - RNA, 21 nt, synthetic construct
  source 1..21: mol_type = other RNA
gggtctgttttacatgtttaa

SEQ ID NO: 92484 - RNA, 21 nt, synthetic construct
  source 1..21: mol_type = other RNA
gggtcttagttctgcttccac

SEQ ID NO: 92485 - RNA, 21 nt, synthetic construct
  source 1..21: mol_type = other RNA
gggtcttataggttgaatagg

SEQ ID NO: 92486 - RNA, 21 nt, synthetic construct
  source 1..21: mol_type = other RNA
gggtcttatgctggtgggctt

SEQ ID NO: 92487 - RNA, 21 nt, synthetic construct
  source 1..21: mol_type = other RNA
gggtcttgctctgtcacccac

SEQ ID NO: 92488 - RNA, 21 nt, synthetic construct
  source 1..21: mol_type = other RNA
gggtgaaacttgaatactcgt

SEQ ID NO: 92489 - RNA, 21 nt, synthetic construct
  source 1..21: mol_type = other RNA
gggtgaataacccatatcttt

SEQ ID NO: 92490 - RNA, 21 nt, synthetic construct
  source 1..21: mol_type = other RNA
gggtgacagagagagaccttt

SEQ ID NO: 92491 - RNA, 21 nt, synthetic construct
  source 1..21: mol_type = other RNA
gggtgacagagccgagcagaa

SEQ ID NO: 92492 - RNA, 21 nt, synthetic construct
  source 1..21: mol_type = other RNA
gggtgacctcatgtaactaat

SEQ ID NO: 92493 - RNA, 21 nt, synthetic construct
  source 1..21: mol_type = other RNA
gggtgactagtgtgaatgagg

SEQ ID NO: 92494 - RNA, 21 nt, synthetic construct
  source 1..21: mol_type = other RNA
gggtgagaccaccacacttgc

SEQ ID NO: 92495 - RNA, 21 nt, synthetic construct
  source 1..21: mol_type = other RNA
gggtgataaaaaggagggaaa

SEQ ID NO: 92496 - RNA, 21 nt, synthetic construct
  source 1..21: mol_type = other RNA
gggtgatatctgtaagtcatc

SEQ ID NO: 92497 - RNA, 21 nt, synthetic construct
  source 1..21: mol_type = other RNA
gggtgatgttcaaccctcggc

SEQ ID NO: 92498 - RNA, 21 nt, synthetic construct
  source 1..21: mol_type = other RNA
gggtgcagcctctaatcaggt

SEQ ID NO: 92499 - RNA, 21 nt, synthetic construct
  source 1..21: mol_type = other RNA
gggtgcgacctcgaagcacaa

SEQ ID NO: 92500 - RNA, 21 nt, synthetic construct
  source 1..21: mol_type = other RNA
gggtgcgttgaccgctttcgt

SEQ ID NO: 92501 - RNA, 21 nt, synthetic construct
  source 1..21: mol_type = other RNA
gggtgctactcaaagtttagt

SEQ ID NO: 92502 - RNA, 21 nt, synthetic construct
  source 1..21: mol_type = other RNA
gggtgctgatcaggaaagacc

SEQ ID NO: 92503 - RNA, 21 nt, synthetic construct
  source 1..21: mol_type = other RNA
gggtggaaattaaacacaccc

SEQ ID NO: 92504 - RNA, 21 nt, synthetic construct
  source 1..21: mol_type = other RNA
gggtggaagctgtccttctcg

SEQ ID NO: 92505 - RNA, 21 nt, synthetic construct
  source 1..21: mol_type = other RNA
gggtggagtccaaccaatcgc

SEQ ID NO: 92506 - RNA, 21 nt, synthetic construct
  source 1..21: mol_type = other RNA
gggtggatgggtgtagggttt

SEQ ID NO: 92507 - RNA, 21 nt, synthetic construct
  source 1..21: mol_type = other RNA
gggtggctggcactttcctga

SEQ ID NO: 92508 - RNA, 21 nt, synthetic construct
  source 1..21: mol_type = other RNA
gggtgggggcatcaaagctac

SEQ ID NO: 92509 - RNA, 21 nt, synthetic construct
  source 1..21: mol_type = other RNA
gggtggggggatgtagaagga

SEQ ID NO: 92510 - RNA, 21 nt, synthetic construct
  source 1..21: mol_type = other RNA
gggtggtagggagggggctga

SEQ ID NO: 92511 - RNA, 21 nt, synthetic construct
  source 1..21: mol_type = other RNA
gggtggtgctggactggaggg

SEQ ID NO: 92512 - RNA, 21 nt, synthetic construct
  source 1..21: mol_type = other RNA
gggtgtaaaaggctaattttt

SEQ ID NO: 92513 - RNA, 21 nt, synthetic construct
  source 1..21: mol_type = other RNA
gggtgtagccacaagccacat

SEQ ID NO: 92514 - RNA, 21 nt, synthetic construct
  source 1..21: mol_type = other RNA
gggtgtagggggaaaactcca

SEQ ID NO: 92515 - RNA, 21 nt, synthetic construct
  source 1..21: mol_type = other RNA
gggtgtagggtttggcagttt

SEQ ID NO: 92516 - RNA, 21 nt, synthetic construct
  source 1..21: mol_type = other RNA
gggtgtcagaaaccatcgttc

SEQ ID NO: 92517 - RNA, 21 nt, synthetic construct
  source 1..21: mol_type = other RNA
gggtgtcagaattccatcagt

SEQ ID NO: 92518 - RNA, 21 nt, synthetic construct
  source 1..21: mol_type = other RNA
gggtgtgatcaggaaagatga

SEQ ID NO: 92519 - RNA, 21 nt, synthetic construct
  source 1..21: mol_type = other RNA
gggtgtgcacgtttgctttgg

SEQ ID NO: 92520 - RNA, 21 nt, synthetic construct
  source 1..21: mol_type = other RNA
gggtgtgtgaatggaaaattc

SEQ ID NO: 92521 - RNA, 21 nt, synthetic construct
  source 1..21: mol_type = other RNA
gggtgtgtttaatttccaccc

SEQ ID NO: 92522 - RNA, 21 nt, synthetic construct
  source 1..21: mol_type = other RNA
gggtgttttcccccctaaaac

SEQ ID NO: 92523 - RNA, 21 nt, synthetic construct
  source 1..21: mol_type = other RNA
gggttaaaagttagctggcaa

SEQ ID NO: 92524 - RNA, 21 nt, synthetic construct
  source 1..21: mol_type = other RNA
gggttacagtataggggaact

SEQ ID NO: 92525 - RNA, 21 nt, synthetic construct
  source 1..21: mol_type = other RNA
gggttagaagacaatactgtt

SEQ ID NO: 92526 - RNA, 21 nt, synthetic construct
  source 1..21: mol_type = other RNA
gggttagattatatggtctac

SEQ ID NO: 92527 - RNA, 21 nt, synthetic construct
  source 1..21: mol_type = other RNA
gggttagatttttcctttgcc

SEQ ID NO: 92528 - RNA, 21 nt, synthetic construct
  source 1..21: mol_type = other RNA
gggttagggcctagaaatcat

SEQ ID NO: 92529 - RNA, 21 nt, synthetic construct
  source 1..21: mol_type = other RNA
gggttatacacacataagggg

SEQ ID NO: 92530 - RNA, 21 nt, synthetic construct
  source 1..21: mol_type = other RNA
gggttattaacataccgacgg

SEQ ID NO: 92531 - RNA, 21 nt, synthetic construct
  source 1..21: mol_type = other RNA
gggttattcacccaagaattt

SEQ ID NO: 92532 - RNA, 21 nt, synthetic construct
  source 1..21: mol_type = other RNA
gggttcaaaccacctaactac

SEQ ID NO: 92533 - RNA, 21 nt, synthetic construct
  source 1..21: mol_type = other RNA
gggttcaagccccagttctgc

SEQ ID NO: 92534 - RNA, 21 nt, synthetic construct
  source 1..21: mol_type = other RNA
gggttcaattatgtggaaaaa

SEQ ID NO: 92535 - RNA, 21 nt, synthetic construct
  source 1..21: mol_type = other RNA
gggttcaggtgcctcctgcct

SEQ ID NO: 92536 - RNA, 21 nt, synthetic construct
  source 1..21: mol_type = other RNA
gggttctcaccaacatccaca

SEQ ID NO: 92537 - RNA, 21 nt, synthetic construct
  source 1..21: mol_type = other RNA
gggttctcccttctattccat

SEQ ID NO: 92538 - RNA, 21 nt, synthetic construct
  source 1..21: mol_type = other RNA
gggttcttggaaattagaaat

SEQ ID NO: 92539 - RNA, 21 nt, synthetic construct
  source 1..21: mol_type = other RNA
gggttgaacatcacccagctc

SEQ ID NO: 92540 - RNA, 21 nt, synthetic construct
  source 1..21: mol_type = other RNA
gggttgatttttaatgagata

SEQ ID NO: 92541 - RNA, 21 nt, synthetic construct
  source 1..21: mol_type = other RNA
gggttggaggagaaggccttc

SEQ ID NO: 92542 - RNA, 21 nt, synthetic construct
  source 1..21: mol_type = other RNA
gggttggggtatgtttgatta

SEQ ID NO: 92543 - RNA, 21 nt, synthetic construct
  source 1..21: mol_type = other RNA
gggttggtgcttccttctctt

SEQ ID NO: 92544 - RNA, 21 nt, synthetic construct
  source 1..21: mol_type = other RNA
gggtttaaaagagtgcacatt

SEQ ID NO: 92545 - RNA, 21 nt, synthetic construct
  source 1..21: mol_type = other RNA
gggtttaactgaggtgttttt

SEQ ID NO: 92546 - RNA, 21 nt, synthetic construct
  source 1..21: mol_type = other RNA
gggtttcagcacaatactgtc

SEQ ID NO: 92547 - RNA, 21 nt, synthetic construct
  source 1..21: mol_type = other RNA
gggtttcagtgagtagggaag

SEQ ID NO: 92548 - RNA, 21 nt, synthetic construct
  source 1..21: mol_type = other RNA
gggtttcctcggtctacggac

SEQ ID NO: 92549 - RNA, 21 nt, synthetic construct
  source 1..21: mol_type = other RNA
gggtttccttacctttatctt

SEQ ID NO: 92550 - RNA, 21 nt, synthetic construct
  source 1..21: mol_type = other RNA
gggtttctgtttggatgaaaa

SEQ ID NO: 92551 - RNA, 21 nt, synthetic construct
  source 1..21: mol_type = other RNA
gggtttgagtttccagaaaac

SEQ ID NO: 92552 - RNA, 21 nt, synthetic construct
  source 1..21: mol_type = other RNA
gggtttggcagtttaagaatt

SEQ ID NO: 92553 - RNA, 21 nt, synthetic construct
  source 1..21: mol_type = other RNA
gggtttgttttttgttttggt

SEQ ID NO: 92554 - RNA, 21 nt, synthetic construct
  source 1..21: mol_type = other RNA
gggttttctgtagaatatcca

SEQ ID NO: 92555 - RNA, 21 nt, synthetic construct
  source 1..21: mol_type = other RNA
gggttttgttttgttttttca

SEQ ID NO: 92556 - RNA, 21 nt, synthetic construct
  source 1..21: mol_type = other RNA
ggtaaaaagcctgcttcagcc

SEQ ID NO: 92557 - RNA, 21 nt, synthetic construct
  source 1..21: mol_type = other RNA
ggtaaaaagtgcttctagtaa

SEQ ID NO: 92558 - RNA, 21 nt, synthetic construct
  source 1..21: mol_type = other RNA
ggtaaaacaaattccctctac

SEQ ID NO: 92559 - RNA, 21 nt, synthetic construct
  source 1..21: mol_type = other RNA
ggtaaaatagtcaagtaacag

SEQ ID NO: 92560 - RNA, 21 nt, synthetic construct
  source 1..21: mol_type = other RNA
ggtaaaatcactaattcaagt

SEQ ID NO: 92561 - RNA, 21 nt, synthetic construct
  source 1..21: mol_type = other RNA
ggtaaaatgtggcaaatttat

SEQ ID NO: 92562 - RNA, 21 nt, synthetic construct
  source 1..21: mol_type = other RNA
ggtaaacaagactcaacatgt

SEQ ID NO: 92563 - RNA, 21 nt, synthetic construct
  source 1..21: mol_type = other RNA
ggtaaacagaattaaacaatc

SEQ ID NO: 92564 - RNA, 21 nt, synthetic construct
  source 1..21: mol_type = other RNA
ggtaaacagcagtcttaacca

SEQ ID NO: 92565 - RNA, 21 nt, synthetic construct
  source 1..21: mol_type = other RNA
ggtaaaggggatgggggacga

SEQ ID NO: 92566 - RNA, 21 nt, synthetic construct
  source 1..21: mol_type = other RNA
ggtaaagtcaattctagttaa

SEQ ID NO: 92567 - RNA, 21 nt, synthetic construct
  source 1..21: mol_type = other RNA
ggtaaatctttgtacagtaat

SEQ ID NO: 92568 - RNA, 21 nt, synthetic construct
  source 1..21: mol_type = other RNA
ggtaaatggtttctccttctg

SEQ ID NO: 92569 - RNA, 21 nt, synthetic construct
  source 1..21: mol_type = other RNA
ggtaaattggtcctggaaaaa

SEQ ID NO: 92570 - RNA, 21 nt, synthetic construct
  source 1..21: mol_type = other RNA
ggtaaatttctaaaaacgtgc

SEQ ID NO: 92571 - RNA, 21 nt, synthetic construct
  source 1..21: mol_type = other RNA
ggtaacagccaaataaaacac

SEQ ID NO: 92572 - RNA, 21 nt, synthetic construct
  source 1..21: mol_type = other RNA
ggtaacgtgagctggaagtaa

SEQ ID NO: 92573 - RNA, 21 nt, synthetic construct
  source 1..21: mol_type = other RNA
ggtaactagatgcctcgaagg

SEQ ID NO: 92574 - RNA, 21 nt, synthetic construct
  source 1..21: mol_type = other RNA
ggtaactcctgttctttggag

SEQ ID NO: 92575 - RNA, 21 nt, synthetic construct
  source 1..21: mol_type = other RNA
ggtaactgatgtgaggatctg

SEQ ID NO: 92576 - RNA, 21 nt, synthetic construct
  source 1..21: mol_type = other RNA
ggtaagaaaaattccctcagc

SEQ ID NO: 92577 - RNA, 21 nt, synthetic construct
  source 1..21: mol_type = other RNA
ggtaagaaaggagttcagctt

SEQ ID NO: 92578 - RNA, 21 nt, synthetic construct
  source 1..21: mol_type = other RNA
ggtaagaacacttaacatgag

SEQ ID NO: 92579 - RNA, 21 nt, synthetic construct
  source 1..21: mol_type = other RNA
ggtaagaacttgtctttgtct

SEQ ID NO: 92580 - RNA, 21 nt, synthetic construct
  source 1..21: mol_type = other RNA
ggtaagaatgtcaagctgttt

SEQ ID NO: 92581 - RNA, 21 nt, synthetic construct
  source 1..21: mol_type = other RNA
ggtaagaccaaaatggagacc

SEQ ID NO: 92582 - RNA, 21 nt, synthetic construct
  source 1..21: mol_type = other RNA
ggtaagattccgtctcaaaaa

SEQ ID NO: 92583 - RNA, 21 nt, synthetic construct
  source 1..21: mol_type = other RNA
ggtaagattgtggtccagaaa

SEQ ID NO: 92584 - RNA, 21 nt, synthetic construct
  source 1..21: mol_type = other RNA
ggtaagctgtgagtccttcca

SEQ ID NO: 92585 - RNA, 21 nt, synthetic construct
  source 1..21: mol_type = other RNA
ggtaaggaaacagagttttcc

SEQ ID NO: 92586 - RNA, 21 nt, synthetic construct
  source 1..21: mol_type = other RNA
ggtaaggaaaccccagggata

SEQ ID NO: 92587 - RNA, 21 nt, synthetic construct
  source 1..21: mol_type = other RNA
ggtaaggactgaagtcctttc

SEQ ID NO: 92588 - RNA, 21 nt, synthetic construct
  source 1..21: mol_type = other RNA
ggtaaggagccaaacatcatg

SEQ ID NO: 92589 - RNA, 21 nt, synthetic construct
  source 1..21: mol_type = other RNA
ggtaagggtccagcttcactc

SEQ ID NO: 92590 - RNA, 21 nt, synthetic construct
  source 1..21: mol_type = other RNA
ggtaataatgaaagctcccaa

SEQ ID NO: 92591 - RNA, 21 nt, synthetic construct
  source 1..21: mol_type = other RNA
ggtaatacagtctgatttact

SEQ ID NO: 92592 - RNA, 21 nt, synthetic construct
  source 1..21: mol_type = other RNA
ggtaatactataaggaaatac

SEQ ID NO: 92593 - RNA, 21 nt, synthetic construct
  source 1..21: mol_type = other RNA
ggtaatactctagtggtgctt

SEQ ID NO: 92594 - RNA, 21 nt, synthetic construct
  source 1..21: mol_type = other RNA
ggtaatcacagctactcaggg

SEQ ID NO: 92595 - RNA, 21 nt, synthetic construct
  source 1..21: mol_type = other RNA
ggtaatctagtttatctcatt

SEQ ID NO: 92596 - RNA, 21 nt, synthetic construct
  source 1..21: mol_type = other RNA
ggtaatgaatagaaaatcctt

SEQ ID NO: 92597 - RNA, 21 nt, synthetic construct
  source 1..21: mol_type = other RNA
ggtaatgacaataataactac

SEQ ID NO: 92598 - RNA, 21 nt, synthetic construct
  source 1..21: mol_type = other RNA
ggtaatgctggcttcatgggt

SEQ ID NO: 92599 - RNA, 21 nt, synthetic construct
  source 1..21: mol_type = other RNA
ggtaatgggaaagacaggtag

SEQ ID NO: 92600 - RNA, 21 nt, synthetic construct
  source 1..21: mol_type = other RNA
ggtaatgttatatttccgtat

SEQ ID NO: 92601 - RNA, 21 nt, synthetic construct
  source 1..21: mol_type = other RNA
ggtaattggttcgtttgaggc

SEQ ID NO: 92602 - RNA, 21 nt, synthetic construct
  source 1..21: mol_type = other RNA
ggtaatttatctccataagtc

SEQ ID NO: 92603 - RNA, 21 nt, synthetic construct
  source 1..21: mol_type = other RNA
ggtaatttgtccatctggatt

SEQ ID NO: 92604 - RNA, 21 nt, synthetic construct
  source 1..21: mol_type = other RNA
ggtaattttggggccatctga

SEQ ID NO: 92605 - RNA, 21 nt, synthetic construct
  source 1..21: mol_type = other RNA
ggtacaattacacatctccca

SEQ ID NO: 92606 - RNA, 21 nt, synthetic construct
  source 1..21: mol_type = other RNA
ggtacacatcctaatacagta

SEQ ID NO: 92607 - RNA, 21 nt, synthetic construct
  source 1..21: mol_type = other RNA
ggtacagaactgctaatggtc

SEQ ID NO: 92608 - RNA, 21 nt, synthetic construct
  source 1..21: mol_type = other RNA
ggtacagggtttctgtttgga

SEQ ID NO: 92609 - RNA, 21 nt, synthetic construct
  source 1..21: mol_type = other RNA
ggtaccaaagcagaaatacag

SEQ ID NO: 92610 - RNA, 21 nt, synthetic construct
  source 1..21: mol_type = other RNA
ggtacgacgctcttgttcaaa

SEQ ID NO: 92611 - RNA, 21 nt, synthetic construct
  source 1..21: mol_type = other RNA
ggtactcaacgacaatctctg

SEQ ID NO: 92612 - RNA, 21 nt, synthetic construct
  source 1..21: mol_type = other RNA
ggtactctatgatatatactt

SEQ ID NO: 92613 - RNA, 21 nt, synthetic construct
  source 1..21: mol_type = other RNA
ggtactgcctccacaggcttt

SEQ ID NO: 92614 - RNA, 21 nt, synthetic construct
  source 1..21: mol_type = other RNA
ggtactggtaccaaagcagaa

SEQ ID NO: 92615 - RNA, 21 nt, synthetic construct
  source 1..21: mol_type = other RNA
ggtagaaacatcccaagtgcc

SEQ ID NO: 92616 - RNA, 21 nt, synthetic construct
  source 1..21: mol_type = other RNA
ggtagaagataatgttagaat

SEQ ID NO: 92617 - RNA, 21 nt, synthetic construct
  source 1..21: mol_type = other RNA
ggtagaagcagcaagggtggc

SEQ ID NO: 92618 - RNA, 21 nt, synthetic construct
  source 1..21: mol_type = other RNA
ggtagaagtacaaacattaca

SEQ ID NO: 92619 - RNA, 21 nt, synthetic construct
  source 1..21: mol_type = other RNA
ggtagaatgaaaatttttgtc

SEQ ID NO: 92620 - RNA, 21 nt, synthetic construct
  source 1..21: mol_type = other RNA
ggtagacatgagtaaaaagaa

SEQ ID NO: 92621 - RNA, 21 nt, synthetic construct
  source 1..21: mol_type = other RNA
ggtagacatgtgccatgttgg

SEQ ID NO: 92622 - RNA, 21 nt, synthetic construct
  source 1..21: mol_type = other RNA
ggtagaccatataatctaacc

SEQ ID NO: 92623 - RNA, 21 nt, synthetic construct
  source 1..21: mol_type = other RNA
ggtagactgtaaaaattttct

SEQ ID NO: 92624 - RNA, 21 nt, synthetic construct
  source 1..21: mol_type = other RNA
ggtagagactggatcctggag

SEQ ID NO: 92625 - RNA, 21 nt, synthetic construct
  source 1..21: mol_type = other RNA
ggtagagcactttcgtatttt

SEQ ID NO: 92626 - RNA, 21 nt, synthetic construct
  source 1..21: mol_type = other RNA
ggtagaggattccaggtttac

SEQ ID NO: 92627 - RNA, 21 nt, synthetic construct
  source 1..21: mol_type = other RNA
ggtagataccagaccctttat

SEQ ID NO: 92628 - RNA, 21 nt, synthetic construct
  source 1..21: mol_type = other RNA
ggtagatttctgcatagagat

SEQ ID NO: 92629 - RNA, 21 nt, synthetic construct
  source 1..21: mol_type = other RNA
ggtagcacaactagtaagtaa

SEQ ID NO: 92630 - RNA, 21 nt, synthetic construct
  source 1..21: mol_type = other RNA
ggtagctgctttttaaaaatt

SEQ ID NO: 92631 - RNA, 21 nt, synthetic construct
  source 1..21: mol_type = other RNA
ggtagcttgggctaaggtgga

SEQ ID NO: 92632 - RNA, 21 nt, synthetic construct
  source 1..21: mol_type = other RNA
ggtagctttgatgcccccacc

SEQ ID NO: 92633 - RNA, 21 nt, synthetic construct
  source 1..21: mol_type = other RNA
ggtagcttttcctgctgtcgt

SEQ ID NO: 92634 - RNA, 21 nt, synthetic construct
  source 1..21: mol_type = other RNA
ggtaggaaaagacttctcaaa

SEQ ID NO: 92635 - RNA, 21 nt, synthetic construct
  source 1..21: mol_type = other RNA
ggtaggaagctgatcaaggaa

SEQ ID NO: 92636 - RNA, 21 nt, synthetic construct
  source 1..21: mol_type = other RNA
ggtaggaaggcggtggggaca

SEQ ID NO: 92637 - RNA, 21 nt, synthetic construct
  source 1..21: mol_type = other RNA
ggtaggagggtgtgatcagga

SEQ ID NO: 92638 - RNA, 21 nt, synthetic construct
  source 1..21: mol_type = other RNA
ggtaggccaaggcgggaggat

SEQ ID NO: 92639 - RNA, 21 nt, synthetic construct
  source 1..21: mol_type = other RNA
ggtaggcttagatgagcccag

SEQ ID NO: 92640 - RNA, 21 nt, synthetic construct
  source 1..21: mol_type = other RNA
ggtagggagggggctgaggat

SEQ ID NO: 92641 - RNA, 21 nt, synthetic construct
  source 1..21: mol_type = other RNA
ggtagggaggggtattcaggg

SEQ ID NO: 92642 - RNA, 21 nt, synthetic construct
  source 1..21: mol_type = other RNA
ggtagggataagaataccaaa

SEQ ID NO: 92643 - RNA, 21 nt, synthetic construct
  source 1..21: mol_type = other RNA
ggtagggttggggtatgtttg

SEQ ID NO: 92644 - RNA, 21 nt, synthetic construct
  source 1..21: mol_type = other RNA
ggtaggtgctttttgtatcct

SEQ ID NO: 92645 - RNA, 21 nt, synthetic construct
  source 1..21: mol_type = other RNA
ggtaggtgtgtgtaatcccag

SEQ ID NO: 92646 - RNA, 21 nt, synthetic construct
  source 1..21: mol_type = other RNA
ggtagtaaggatcgttagtat

SEQ ID NO: 92647 - RNA, 21 nt, synthetic construct
  source 1..21: mol_type = other RNA
ggtagtacatattcattgtaa

SEQ ID NO: 92648 - RNA, 21 nt, synthetic construct
  source 1..21: mol_type = other RNA
ggtagtcaacacttttccagt

SEQ ID NO: 92649 - RNA, 21 nt, synthetic construct
  source 1..21: mol_type = other RNA
ggtagtcaatgcaatgcgtgt

SEQ ID NO: 92650 - RNA, 21 nt, synthetic construct
  source 1..21: mol_type = other RNA
ggtagtcttgtcataacagta

SEQ ID NO: 92651 - RNA, 21 nt, synthetic construct
  source 1..21: mol_type = other RNA
ggtagttacacaagtgtttca

SEQ ID NO: 92652 - RNA, 21 nt, synthetic construct
  source 1..21: mol_type = other RNA
ggtagtttctttgaacttata

SEQ ID NO: 92653 - RNA, 21 nt, synthetic construct
  source 1..21: mol_type = other RNA
ggtagtttgcacgtttttaga

SEQ ID NO: 92654 - RNA, 21 nt, synthetic construct
  source 1..21: mol_type = other RNA
ggtataaaggatgcacaagac

SEQ ID NO: 92655 - RNA, 21 nt, synthetic construct
  source 1..21: mol_type = other RNA
ggtataaagtttccgttttgc

SEQ ID NO: 92656 - RNA, 21 nt, synthetic construct
  source 1..21: mol_type = other RNA
ggtataaatgatgagctactg

SEQ ID NO: 92657 - RNA, 21 nt, synthetic construct
  source 1..21: mol_type = other RNA
ggtatacagcaaaagaattaa

SEQ ID NO: 92658 - RNA, 21 nt, synthetic construct
  source 1..21: mol_type = other RNA
ggtatatttctgtaaacatga

SEQ ID NO: 92659 - RNA, 21 nt, synthetic construct
  source 1..21: mol_type = other RNA
ggtatcaattgtaatgtctcc

SEQ ID NO: 92660 - RNA, 21 nt, synthetic construct
  source 1..21: mol_type = other RNA
ggtatcacagtgaggacgctg

SEQ ID NO: 92661 - RNA, 21 nt, synthetic construct
  source 1..21: mol_type = other RNA
ggtatcaccatctgataagcc

SEQ ID NO: 92662 - RNA, 21 nt, synthetic construct
  source 1..21: mol_type = other RNA
ggtatcactttttgtatttcc

SEQ ID NO: 92663 - RNA, 21 nt, synthetic construct
  source 1..21: mol_type = other RNA
ggtatcatattatttttgtcc

SEQ ID NO: 92664 - RNA, 21 nt, synthetic construct
  source 1..21: mol_type = other RNA
ggtatcatcggaaatataaaa

SEQ ID NO: 92665 - RNA, 21 nt, synthetic construct
  source 1..21: mol_type = other RNA
ggtatcatttccaagattgaa

SEQ ID NO: 92666 - RNA, 21 nt, synthetic construct
  source 1..21: mol_type = other RNA
ggtatctaccaaaaaactacg

SEQ ID NO: 92667 - RNA, 21 nt, synthetic construct
  source 1..21: mol_type = other RNA
ggtatctccccaaagatatta

SEQ ID NO: 92668 - RNA, 21 nt, synthetic construct
  source 1..21: mol_type = other RNA
ggtatgagtgtttcccttaaa

SEQ ID NO: 92669 - RNA, 21 nt, synthetic construct
  source 1..21: mol_type = other RNA
ggtatgcactgtactcctaga

SEQ ID NO: 92670 - RNA, 21 nt, synthetic construct
  source 1..21: mol_type = other RNA
ggtatgcatcttgaactaagt

SEQ ID NO: 92671 - RNA, 21 nt, synthetic construct
  source 1..21: mol_type = other RNA
ggtatggagacactagggact

SEQ ID NO: 92672 - RNA, 21 nt, synthetic construct
  source 1..21: mol_type = other RNA
ggtatggcgactcatgcctgt

SEQ ID NO: 92673 - RNA, 21 nt, synthetic construct
  source 1..21: mol_type = other RNA
ggtatgggagatgtgtaattg

SEQ ID NO: 92674 - RNA, 21 nt, synthetic construct
  source 1..21: mol_type = other RNA
ggtatgtacccaatggattat

SEQ ID NO: 92675 - RNA, 21 nt, synthetic construct
  source 1..21: mol_type = other RNA
ggtatgtgccatctccttaat

SEQ ID NO: 92676 - RNA, 21 nt, synthetic construct
  source 1..21: mol_type = other RNA
ggtatgttaataaccctgttt

SEQ ID NO: 92677 - RNA, 21 nt, synthetic construct
  source 1..21: mol_type = other RNA
ggtatgttgtgttttcattcg

SEQ ID NO: 92678 - RNA, 21 nt, synthetic construct
  source 1..21: mol_type = other RNA
ggtatgtttgattagttgact

SEQ ID NO: 92679 - RNA, 21 nt, synthetic construct
  source 1..21: mol_type = other RNA
ggtattattttcacagacagt

SEQ ID NO: 92680 - RNA, 21 nt, synthetic construct
  source 1..21: mol_type = other RNA
ggtattcagggggctaaatgc

SEQ ID NO: 92681 - RNA, 21 nt, synthetic construct
  source 1..21: mol_type = other RNA
ggtattcatgctgtgaatttg

SEQ ID NO: 92682 - RNA, 21 nt, synthetic construct
  source 1..21: mol_type = other RNA
ggtattctatcatcaagacag

SEQ ID NO: 92683 - RNA, 21 nt, synthetic construct
  source 1..21: mol_type = other RNA
ggtattctgaactttcaacct

SEQ ID NO: 92684 - RNA, 21 nt, synthetic construct
  source 1..21: mol_type = other RNA
ggtattcttatccctacctaa

SEQ ID NO: 92685 - RNA, 21 nt, synthetic construct
  source 1..21: mol_type = other RNA
ggtattgagcctgttccgatt

SEQ ID NO: 92686 - RNA, 21 nt, synthetic construct
  source 1..21: mol_type = other RNA
ggtatttaatctgtcagcagt

SEQ ID NO: 92687 - RNA, 21 nt, synthetic construct
  source 1..21: mol_type = other RNA
ggtatttctaaatcaacagtg

SEQ ID NO: 92688 - RNA, 21 nt, synthetic construct
  source 1..21: mol_type = other RNA
ggtatttggggctaggatttc

SEQ ID NO: 92689 - RNA, 21 nt, synthetic construct
  source 1..21: mol_type = other RNA
ggtattttgttgttgttgttt

SEQ ID NO: 92690 - RNA, 21 nt, synthetic construct
  source 1..21: mol_type = other RNA
ggtattttttagagacagggt

SEQ ID NO: 92691 - RNA, 21 nt, synthetic construct
  source 1..21: mol_type = other RNA
ggtcaaaactgtattttctaa

SEQ ID NO: 92692 - RNA, 21 nt, synthetic construct
  source 1..21: mol_type = other RNA
ggtcaaactcacttattagca

SEQ ID NO: 92693 - RNA, 21 nt, synthetic construct
  source 1..21: mol_type = other RNA
ggtcaaatcaatacttcattt

SEQ ID NO: 92694 - RNA, 21 nt, synthetic construct
  source 1..21: mol_type = other RNA
ggtcaaatggtaacagccaaa

SEQ ID NO: 92695 - RNA, 21 nt, synthetic construct
  source 1..21: mol_type = other RNA
ggtcaacaaactaactagaaa

SEQ ID NO: 92696 - RNA, 21 nt, synthetic construct
  source 1..21: mol_type = other RNA
ggtcaacacatcagcgctaag

SEQ ID NO: 92697 - RNA, 21 nt, synthetic construct
  source 1..21: mol_type = other RNA
ggtcaacagggtaagattccg

SEQ ID NO: 92698 - RNA, 21 nt, synthetic construct
  source 1..21: mol_type = other RNA
ggtcaacatgaaaagatactc

SEQ ID NO: 92699 - RNA, 21 nt, synthetic construct
  source 1..21: mol_type = other RNA
ggtcaaccactaaggtcaaca

SEQ ID NO: 92700 - RNA, 21 nt, synthetic construct
  source 1..21: mol_type = other RNA
ggtcaacgcacccagagcggg

SEQ ID NO: 92701 - RNA, 21 nt, synthetic construct
  source 1..21: mol_type = other RNA
ggtcaagaaataaaacatggc

SEQ ID NO: 92702 - RNA, 21 nt, synthetic construct
  source 1..21: mol_type = other RNA
ggtcaagagagattaaataac

SEQ ID NO: 92703 - RNA, 21 nt, synthetic construct
  source 1..21: mol_type = other RNA
ggtcaagagcggcctttgcct

SEQ ID NO: 92704 - RNA, 21 nt, synthetic construct
  source 1..21: mol_type = other RNA
ggtcaatctaggaggtctaag

SEQ ID NO: 92705 - RNA, 21 nt, synthetic construct
  source 1..21: mol_type = other RNA
ggtcaatctgaaaaatatcaa

SEQ ID NO: 92706 - RNA, 21 nt, synthetic construct
  source 1..21: mol_type = other RNA
ggtcaattgatctgccaggac

SEQ ID NO: 92707 - RNA, 21 nt, synthetic construct
  source 1..21: mol_type = other RNA
ggtcaatttcatcgtaaaaag

SEQ ID NO: 92708 - RNA, 21 nt, synthetic construct
  source 1..21: mol_type = other RNA
ggtcacaaacacaaaacaaat

SEQ ID NO: 92709 - RNA, 21 nt, synthetic construct
  source 1..21: mol_type = other RNA
ggtcacactttttgtgagttt

SEQ ID NO: 92710 - RNA, 21 nt, synthetic construct
  source 1..21: mol_type = other RNA
ggtcacattcagaggtatttg

SEQ ID NO: 92711 - RNA, 21 nt, synthetic construct
  source 1..21: mol_type = other RNA
ggtcacattctgcctgcagac

SEQ ID NO: 92712 - RNA, 21 nt, synthetic construct
  source 1..21: mol_type = other RNA
ggtcacccaagccacagcgtg

SEQ ID NO: 92713 - RNA, 21 nt, synthetic construct
  source 1..21: mol_type = other RNA
ggtcacctagcctctctgggc

SEQ ID NO: 92714 - RNA, 21 nt, synthetic construct
  source 1..21: mol_type = other RNA
ggtcactattaaccatatggt

SEQ ID NO: 92715 - RNA, 21 nt, synthetic construct
  source 1..21: mol_type = other RNA
ggtcactgcagtctcaaactc

SEQ ID NO: 92716 - RNA, 21 nt, synthetic construct
  source 1..21: mol_type = other RNA
ggtcactgctgatgtaagtgg

SEQ ID NO: 92717 - RNA, 21 nt, synthetic construct
  source 1..21: mol_type = other RNA
ggtcactggccactgattgag

SEQ ID NO: 92718 - RNA, 21 nt, synthetic construct
  source 1..21: mol_type = other RNA
ggtcactgtttggacagtaaa

SEQ ID NO: 92719 - RNA, 21 nt, synthetic construct
  source 1..21: mol_type = other RNA
ggtcacttcctctcttaaatc

SEQ ID NO: 92720 - RNA, 21 nt, synthetic construct
  source 1..21: mol_type = other RNA
ggtcagaaaaatggaatattt

SEQ ID NO: 92721 - RNA, 21 nt, synthetic construct
  source 1..21: mol_type = other RNA
ggtcagaagtttggaaccagc

SEQ ID NO: 92722 - RNA, 21 nt, synthetic construct
  source 1..21: mol_type = other RNA
ggtcagaatacaaaaatgaca

SEQ ID NO: 92723 - RNA, 21 nt, synthetic construct
  source 1..21: mol_type = other RNA
ggtcagaatcgtgatagtctt

SEQ ID NO: 92724 - RNA, 21 nt, synthetic construct
  source 1..21: mol_type = other RNA
ggtcagaattttattttcttc

SEQ ID NO: 92725 - RNA, 21 nt, synthetic construct
  source 1..21: mol_type = other RNA
ggtcagagttgtatctgtgat

SEQ ID NO: 92726 - RNA, 21 nt, synthetic construct
  source 1..21: mol_type = other RNA
ggtcagccagaggaagcttat

SEQ ID NO: 92727 - RNA, 21 nt, synthetic construct
  source 1..21: mol_type = other RNA
ggtcagctagtgtgtctgact

SEQ ID NO: 92728 - RNA, 21 nt, synthetic construct
  source 1..21: mol_type = other RNA
ggtcaggaaggcaggaggcct

SEQ ID NO: 92729 - RNA, 21 nt, synthetic construct
  source 1..21: mol_type = other RNA
ggtcagtactatcttccctaa

SEQ ID NO: 92730 - RNA, 21 nt, synthetic construct
  source 1..21: mol_type = other RNA
ggtcagtagtacagtgagtag

SEQ ID NO: 92731 - RNA, 21 nt, synthetic construct
  source 1..21: mol_type = other RNA
ggtcatcctttcccttctgct

SEQ ID NO: 92732 - RNA, 21 nt, synthetic construct
  source 1..21: mol_type = other RNA
ggtcatgacttttttgcccac

SEQ ID NO: 92733 - RNA, 21 nt, synthetic construct
  source 1..21: mol_type = other RNA
ggtcatgcacacgctggaagg

SEQ ID NO: 92734 - RNA, 21 nt, synthetic construct
  source 1..21: mol_type = other RNA
ggtcattacatattttgtaac

SEQ ID NO: 92735 - RNA, 21 nt, synthetic construct
  source 1..21: mol_type = other RNA
ggtcattctggagtgttttct

SEQ ID NO: 92736 - RNA, 21 nt, synthetic construct
  source 1..21: mol_type = other RNA
ggtcatttttcacttcttatt

SEQ ID NO: 92737 - RNA, 21 nt, synthetic construct
  source 1..21: mol_type = other RNA
ggtccaagacaggaagaatta

SEQ ID NO: 92738 - RNA, 21 nt, synthetic construct
  source 1..21: mol_type = other RNA
ggtccacagaggctttttata

SEQ ID NO: 92739 - RNA, 21 nt, synthetic construct
  source 1..21: mol_type = other RNA
ggtccagatgaagcagggaaa

SEQ ID NO: 92740 - RNA, 21 nt, synthetic construct
  source 1..21: mol_type = other RNA
ggtccagcttcactcttctgc

SEQ ID NO: 92741 - RNA, 21 nt, synthetic construct
  source 1..21: mol_type = other RNA
ggtccccagcatccactaggg

SEQ ID NO: 92742 - RNA, 21 nt, synthetic construct
  source 1..21: mol_type = other RNA
ggtccctacaaaggacatgaa

SEQ ID NO: 92743 - RNA, 21 nt, synthetic construct
  source 1..21: mol_type = other RNA
ggtccctgctactcaggagat

SEQ ID NO: 92744 - RNA, 21 nt, synthetic construct
  source 1..21: mol_type = other RNA
ggtcctgaactcgtggcctca

SEQ ID NO: 92745 - RNA, 21 nt, synthetic construct
  source 1..21: mol_type = other RNA
ggtcctgagctttccttagtt

SEQ ID NO: 92746 - RNA, 21 nt, synthetic construct
  source 1..21: mol_type = other RNA
ggtcctgagggctttgtgaag

SEQ ID NO: 92747 - RNA, 21 nt, synthetic construct
  source 1..21: mol_type = other RNA
ggtcctgcatatgtttttatt

SEQ ID NO: 92748 - RNA, 21 nt, synthetic construct
  source 1..21: mol_type = other RNA
ggtcctggaaaaagaccataa

SEQ ID NO: 92749 - RNA, 21 nt, synthetic construct
  source 1..21: mol_type = other RNA
ggtccttaaatttctaaggtt

SEQ ID NO: 92750 - RNA, 21 nt, synthetic construct
  source 1..21: mol_type = other RNA
ggtccttgctgaagaataact

SEQ ID NO: 92751 - RNA, 21 nt, synthetic construct
  source 1..21: mol_type = other RNA
ggtccttttttactgactttt

SEQ ID NO: 92752 - RNA, 21 nt, synthetic construct
  source 1..21: mol_type = other RNA
ggtcgaaaacctgaaatggct

SEQ ID NO: 92753 - RNA, 21 nt, synthetic construct
  source 1..21: mol_type = other RNA
ggtcgagactgtaatgagctg

SEQ ID NO: 92754 - RNA, 21 nt, synthetic construct
  source 1..21: mol_type = other RNA
ggtcgagctgggtgatgttca

SEQ ID NO: 92755 - RNA, 21 nt, synthetic construct
  source 1..21: mol_type = other RNA
ggtcgcaccctgagcatcccc

SEQ ID NO: 92756 - RNA, 21 nt, synthetic construct
  source 1..21: mol_type = other RNA
ggtcgcggacgcgcatttttt

SEQ ID NO: 92757 - RNA, 21 nt, synthetic construct
  source 1..21: mol_type = other RNA
ggtcggaaggaatgtgcttcc

SEQ ID NO: 92758 - RNA, 21 nt, synthetic construct
  source 1..21: mol_type = other RNA
ggtcgggtgtcagaaaccatc

SEQ ID NO: 92759 - RNA, 21 nt, synthetic construct
  source 1..21: mol_type = other RNA
ggtcgttggatttatctttct

SEQ ID NO: 92760 - RNA, 21 nt, synthetic construct
  source 1..21: mol_type = other RNA
ggtcgtttcagattgcttgag

SEQ ID NO: 92761 - RNA, 21 nt, synthetic construct
  source 1..21: mol_type = other RNA
ggtctaagagataactaatga

SEQ ID NO: 92762 - RNA, 21 nt, synthetic construct
  source 1..21: mol_type = other RNA
ggtctacaaaaggtttccagt

SEQ ID NO: 92763 - RNA, 21 nt, synthetic construct
  source 1..21: mol_type = other RNA
ggtctaccatgttgttctttt

SEQ ID NO: 92764 - RNA, 21 nt, synthetic construct
  source 1..21: mol_type = other RNA
ggtctacggacgcaggcaaac

SEQ ID NO: 92765 - RNA, 21 nt, synthetic construct
  source 1..21: mol_type = other RNA
ggtctaggctaatgtgtgttc

SEQ ID NO: 92766 - RNA, 21 nt, synthetic construct
  source 1..21: mol_type = other RNA
ggtctagtgtgcatgtgttgt

SEQ ID NO: 92767 - RNA, 21 nt, synthetic construct
  source 1..21: mol_type = other RNA
ggtctatagtttaattggggg

SEQ ID NO: 92768 - RNA, 21 nt, synthetic construct
  source 1..21: mol_type = other RNA
ggtctatctcattataacata

SEQ ID NO: 92769 - RNA, 21 nt, synthetic construct
  source 1..21: mol_type = other RNA
ggtctatgtgacagaatgcat

SEQ ID NO: 92770 - RNA, 21 nt, synthetic construct
  source 1..21: mol_type = other RNA
ggtctcaaaacaaacaaacag

SEQ ID NO: 92771 - RNA, 21 nt, synthetic construct
  source 1..21: mol_type = other RNA
ggtctcaaaatttaaagttag

SEQ ID NO: 92772 - RNA, 21 nt, synthetic construct
  source 1..21: mol_type = other RNA
ggtctcaaactccaagtctca

SEQ ID NO: 92773 - RNA, 21 nt, synthetic construct
  source 1..21: mol_type = other RNA
ggtctcaatctcctgatccac

SEQ ID NO: 92774 - RNA, 21 nt, synthetic construct
  source 1..21: mol_type = other RNA
ggtctcacactgttgtccagg

SEQ ID NO: 92775 - RNA, 21 nt, synthetic construct
  source 1..21: mol_type = other RNA
ggtctcaccctcaggactctg

SEQ ID NO: 92776 - RNA, 21 nt, synthetic construct
  source 1..21: mol_type = other RNA
ggtctcactcttaccaaggct

SEQ ID NO: 92777 - RNA, 21 nt, synthetic construct
  source 1..21: mol_type = other RNA
ggtctcagccttttctgattt

SEQ ID NO: 92778 - RNA, 21 nt, synthetic construct
  source 1..21: mol_type = other RNA
ggtctcagctcctcagaaggc

SEQ ID NO: 92779 - RNA, 21 nt, synthetic construct
  source 1..21: mol_type = other RNA
ggtctcattcactagacacat

SEQ ID NO: 92780 - RNA, 21 nt, synthetic construct
  source 1..21: mol_type = other RNA
ggtctccattttggtcttacc

SEQ ID NO: 92781 - RNA, 21 nt, synthetic construct
  source 1..21: mol_type = other RNA
ggtctcccagcatgaagccct

SEQ ID NO: 92782 - RNA, 21 nt, synthetic construct
  source 1..21: mol_type = other RNA
ggtctccttgtatggagacta

SEQ ID NO: 92783 - RNA, 21 nt, synthetic construct
  source 1..21: mol_type = other RNA
ggtctcctttctatacttcat

SEQ ID NO: 92784 - RNA, 21 nt, synthetic construct
  source 1..21: mol_type = other RNA
ggtctcgaactctcgacctcg

SEQ ID NO: 92785 - RNA, 21 nt, synthetic construct
  source 1..21: mol_type = other RNA
ggtctcgagctcctgacctca

SEQ ID NO: 92786 - RNA, 21 nt, synthetic construct
  source 1..21: mol_type = other RNA
ggtctctctgaaattagctaa

SEQ ID NO: 92787 - RNA, 21 nt, synthetic construct
  source 1..21: mol_type = other RNA
ggtctcttcgagggggctgag

SEQ ID NO: 92788 - RNA, 21 nt, synthetic construct
  source 1..21: mol_type = other RNA
ggtctctttgaaaggaatccg

SEQ ID NO: 92789 - RNA, 21 nt, synthetic construct
  source 1..21: mol_type = other RNA
ggtctgcagactcttgtcccg

SEQ ID NO: 92790 - RNA, 21 nt, synthetic construct
  source 1..21: mol_type = other RNA
ggtctggaatgtgtagttctg

SEQ ID NO: 92791 - RNA, 21 nt, synthetic construct
  source 1..21: mol_type = other RNA
ggtctgggtgatatctgtaag

SEQ ID NO: 92792 - RNA, 21 nt, synthetic construct
  source 1..21: mol_type = other RNA
ggtctggtatctaccaaaaaa

SEQ ID NO: 92793 - RNA, 21 nt, synthetic construct
  source 1..21: mol_type = other RNA
ggtctgtaagtcagttaacag

SEQ ID NO: 92794 - RNA, 21 nt, synthetic construct
  source 1..21: mol_type = other RNA
ggtctgtatttctgctttggt

SEQ ID NO: 92795 - RNA, 21 nt, synthetic construct
  source 1..21: mol_type = other RNA
ggtctgtctcacctcaaggcc

SEQ ID NO: 92796 - RNA, 21 nt, synthetic construct
  source 1..21: mol_type = other RNA
ggtctgtctttcagtatgtgt

SEQ ID NO: 92797 - RNA, 21 nt, synthetic construct
  source 1..21: mol_type = other RNA
ggtctgttactcccgatttca

SEQ ID NO: 92798 - RNA, 21 nt, synthetic construct
  source 1..21: mol_type = other RNA
ggtctgttttacatgtttaac

SEQ ID NO: 92799 - RNA, 21 nt, synthetic construct
  source 1..21: mol_type = other RNA
ggtcttaagagactctcaaga

SEQ ID NO: 92800 - RNA, 21 nt, synthetic construct
  source 1..21: mol_type = other RNA
ggtcttaccctctagctcccc

SEQ ID NO: 92801 - RNA, 21 nt, synthetic construct
  source 1..21: mol_type = other RNA
ggtcttagttctgcttccaca

SEQ ID NO: 92802 - RNA, 21 nt, synthetic construct
  source 1..21: mol_type = other RNA
ggtcttataggttgaataggg

SEQ ID NO: 92803 - RNA, 21 nt, synthetic construct
  source 1..21: mol_type = other RNA
ggtcttatgctggtgggcttt

SEQ ID NO: 92804 - RNA, 21 nt, synthetic construct
  source 1..21: mol_type = other RNA
ggtcttcaacctcaactttag

SEQ ID NO: 92805 - RNA, 21 nt, synthetic construct
  source 1..21: mol_type = other RNA
ggtcttctagctttcagcact

SEQ ID NO: 92806 - RNA, 21 nt, synthetic construct
  source 1..21: mol_type = other RNA
ggtcttgctctgtcacccacg

SEQ ID NO: 92807 - RNA, 21 nt, synthetic construct
  source 1..21: mol_type = other RNA
ggtcttgtactcccagcctca

SEQ ID NO: 92808 - RNA, 21 nt, synthetic construct
  source 1..21: mol_type = other RNA
ggtcttgtctcaacctttgcc

SEQ ID NO: 92809 - RNA, 21 nt, synthetic construct
  source 1..21: mol_type = other RNA
ggtctttaaaagaaagctctc

SEQ ID NO: 92810 - RNA, 21 nt, synthetic construct
  source 1..21: mol_type = other RNA
ggtctttcctgatcagcaccc

SEQ ID NO: 92811 - RNA, 21 nt, synthetic construct
  source 1..21: mol_type = other RNA
ggtctttctcccaggtcagta

SEQ ID NO: 92812 - RNA, 21 nt, synthetic construct
  source 1..21: mol_type = other RNA
ggtctttgatccattttgagt

SEQ ID NO: 92813 - RNA, 21 nt, synthetic construct
  source 1..21: mol_type = other RNA
ggtcttttagccaacaaccat

SEQ ID NO: 92814 - RNA, 21 nt, synthetic construct
  source 1..21: mol_type = other RNA
ggtctttttccaggaccaatt

SEQ ID NO: 92815 - RNA, 21 nt, synthetic construct
  source 1..21: mol_type = other RNA
ggtgaaaaaatggtgcagcca

SEQ ID NO: 92816 - RNA, 21 nt, synthetic construct
  source 1..21: mol_type = other RNA
ggtgaaacttgaatactcgtg

SEQ ID NO: 92817 - RNA, 21 nt, synthetic construct
  source 1..21: mol_type = other RNA
ggtgaactattagagctttta

SEQ ID NO: 92818 - RNA, 21 nt, synthetic construct
  source 1..21: mol_type = other RNA
ggtgaactgggtgtaggggga

SEQ ID NO: 92819 - RNA, 21 nt, synthetic construct
  source 1..21: mol_type = other RNA
ggtgaagaaccgactgaaagg

SEQ ID NO: 92820 - RNA, 21 nt, synthetic construct
  source 1..21: mol_type = other RNA
ggtgaagaatgtgaaaaattt

SEQ ID NO: 92821 - RNA, 21 nt, synthetic construct
  source 1..21: mol_type = other RNA
ggtgaagagagcctgtggtct

SEQ ID NO: 92822 - RNA, 21 nt, synthetic construct
  source 1..21: mol_type = other RNA
ggtgaaggttcatgaacataa

SEQ ID NO: 92823 - RNA, 21 nt, synthetic construct
  source 1..21: mol_type = other RNA
ggtgaagttaagggccatttc

SEQ ID NO: 92824 - RNA, 21 nt, synthetic construct
  source 1..21: mol_type = other RNA
ggtgaataacccatatctttg

SEQ ID NO: 92825 - RNA, 21 nt, synthetic construct
  source 1..21: mol_type = other RNA
ggtgaatctgagtaaagggta

SEQ ID NO: 92826 - RNA, 21 nt, synthetic construct
  source 1..21: mol_type = other RNA
ggtgacagagagagacctttc

SEQ ID NO: 92827 - RNA, 21 nt, synthetic construct
  source 1..21: mol_type = other RNA
ggtgacagagccgagcagaag

SEQ ID NO: 92828 - RNA, 21 nt, synthetic construct
  source 1..21: mol_type = other RNA
ggtgacctcatgtaactaatt

SEQ ID NO: 92829 - RNA, 21 nt, synthetic construct
  source 1..21: mol_type = other RNA
ggtgacctgccagagttggca

SEQ ID NO: 92830 - RNA, 21 nt, synthetic construct
  source 1..21: mol_type = other RNA
ggtgacgtgagatcatgccac

SEQ ID NO: 92831 - RNA, 21 nt, synthetic construct
  source 1..21: mol_type = other RNA
ggtgactagtgtgaatgagga

SEQ ID NO: 92832 - RNA, 21 nt, synthetic construct
  source 1..21: mol_type = other RNA
ggtgactgaattcccacaaaa

SEQ ID NO: 92833 - RNA, 21 nt, synthetic construct
  source 1..21: mol_type = other RNA
ggtgagaacccagtgtctgct

SEQ ID NO: 92834 - RNA, 21 nt, synthetic construct
  source 1..21: mol_type = other RNA
ggtgagacagaccctggcttg

SEQ ID NO: 92835 - RNA, 21 nt, synthetic construct
  source 1..21: mol_type = other RNA
ggtgagaccaccacacttgct

SEQ ID NO: 92836 - RNA, 21 nt, synthetic construct
  source 1..21: mol_type = other RNA
ggtgagctttttctttttaaa

SEQ ID NO: 92837 - RNA, 21 nt, synthetic construct
  source 1..21: mol_type = other RNA
ggtgaggacatggagacagtg

SEQ ID NO: 92838 - RNA, 21 nt, synthetic construct
  source 1..21: mol_type = other RNA
ggtgagggactgagcagtgaa

SEQ ID NO: 92839 - RNA, 21 nt, synthetic construct
  source 1..21: mol_type = other RNA
ggtgagtgagatgggaagaaa

SEQ ID NO: 92840 - RNA, 21 nt, synthetic construct
  source 1..21: mol_type = other RNA
ggtgagtggactgtgagggag

SEQ ID NO: 92841 - RNA, 21 nt, synthetic construct
  source 1..21: mol_type = other RNA
ggtgagtggatcatttgaggt

SEQ ID NO: 92842 - RNA, 21 nt, synthetic construct
  source 1..21: mol_type = other RNA
ggtgataaaaaggagggaaaa

SEQ ID NO: 92843 - RNA, 21 nt, synthetic construct
  source 1..21: mol_type = other RNA
ggtgataactggtgctttttt

SEQ ID NO: 92844 - RNA, 21 nt, synthetic construct
  source 1..21: mol_type = other RNA
ggtgatacctcttactaaaaa

SEQ ID NO: 92845 - RNA, 21 nt, synthetic construct
  source 1..21: mol_type = other RNA
ggtgatatctgtaagtcatca

SEQ ID NO: 92846 - RNA, 21 nt, synthetic construct
  source 1..21: mol_type = other RNA
ggtgatcctaagccatctaat

SEQ ID NO: 92847 - RNA, 21 nt, synthetic construct
  source 1..21: mol_type = other RNA
ggtgatctatgaatttgccta

SEQ ID NO: 92848 - RNA, 21 nt, synthetic construct
  source 1..21: mol_type = other RNA
ggtgatgctaacgtgcttgct

SEQ ID NO: 92849 - RNA, 21 nt, synthetic construct
  source 1..21: mol_type = other RNA
ggtgatgttcaaccctcggcc

SEQ ID NO: 92850 - RNA, 21 nt, synthetic construct
  source 1..21: mol_type = other RNA
ggtgattaaaggccctgattt

SEQ ID NO: 92851 - RNA, 21 nt, synthetic construct
  source 1..21: mol_type = other RNA
ggtgattcagagtgctgggta

SEQ ID NO: 92852 - RNA, 21 nt, synthetic construct
  source 1..21: mol_type = other RNA
ggtgcaaggataaacaaagag

SEQ ID NO: 92853 - RNA, 21 nt, synthetic construct
  source 1..21: mol_type = other RNA
ggtgcaatcacggctgattat

SEQ ID NO: 92854 - RNA, 21 nt, synthetic construct
  source 1..21: mol_type = other RNA
ggtgcaatgataggtcactgc

SEQ ID NO: 92855 - RNA, 21 nt, synthetic construct
  source 1..21: mol_type = other RNA
ggtgcacaagggaagaggcca

SEQ ID NO: 92856 - RNA, 21 nt, synthetic construct
  source 1..21: mol_type = other RNA
ggtgcacacaacactcagata

SEQ ID NO: 92857 - RNA, 21 nt, synthetic construct
  source 1..21: mol_type = other RNA
ggtgcacattccaagagagga

SEQ ID NO: 92858 - RNA, 21 nt, synthetic construct
  source 1..21: mol_type = other RNA
ggtgcacgctgtgaatgtgag

SEQ ID NO: 92859 - RNA, 21 nt, synthetic construct
  source 1..21: mol_type = other RNA
ggtgcagccactatagaaaat

SEQ ID NO: 92860 - RNA, 21 nt, synthetic construct
  source 1..21: mol_type = other RNA
ggtgcagcctctaatcaggtt

SEQ ID NO: 92861 - RNA, 21 nt, synthetic construct
  source 1..21: mol_type = other RNA
ggtgcaggccagatatccata

SEQ ID NO: 92862 - RNA, 21 nt, synthetic construct
  source 1..21: mol_type = other RNA
ggtgcatttgggacagcctag

SEQ ID NO: 92863 - RNA, 21 nt, synthetic construct
  source 1..21: mol_type = other RNA
ggtgccccactccacacacga

SEQ ID NO: 92864 - RNA, 21 nt, synthetic construct
  source 1..21: mol_type = other RNA
ggtgcccgcgaaggcgtgtaa

SEQ ID NO: 92865 - RNA, 21 nt, synthetic construct
  source 1..21: mol_type = other RNA
ggtgccctacatatggcaatt

SEQ ID NO: 92866 - RNA, 21 nt, synthetic construct
  source 1..21: mol_type = other RNA
ggtgccgcgcgagggagcgta

SEQ ID NO: 92867 - RNA, 21 nt, synthetic construct
  source 1..21: mol_type = other RNA
ggtgcctcctgcctcagcctc

SEQ ID NO: 92868 - RNA, 21 nt, synthetic construct
  source 1..21: mol_type = other RNA
ggtgcctgccatagagggagc

SEQ ID NO: 92869 - RNA, 21 nt, synthetic construct
  source 1..21: mol_type = other RNA
ggtgcgacctcgaagcacaac

SEQ ID NO: 92870 - RNA, 21 nt, synthetic construct
  source 1..21: mol_type = other RNA
ggtgcgggattatttggaaga

SEQ ID NO: 92871 - RNA, 21 nt, synthetic construct
  source 1..21: mol_type = other RNA
ggtgcgttgaccgctttcgtg

SEQ ID NO: 92872 - RNA, 21 nt, synthetic construct
  source 1..21: mol_type = other RNA
ggtgctaattgtttgttgggt

SEQ ID NO: 92873 - RNA, 21 nt, synthetic construct
  source 1..21: mol_type = other RNA
ggtgctactcaaagtttagtt

SEQ ID NO: 92874 - RNA, 21 nt, synthetic construct
  source 1..21: mol_type = other RNA
ggtgctgataaatggcttttt

SEQ ID NO: 92875 - RNA, 21 nt, synthetic construct
  source 1..21: mol_type = other RNA
ggtgctgatcaggaaagaccg

SEQ ID NO: 92876 - RNA, 21 nt, synthetic construct
  source 1..21: mol_type = other RNA
ggtgctgatttaaaattttgc

SEQ ID NO: 92877 - RNA, 21 nt, synthetic construct
  source 1..21: mol_type = other RNA
ggtgctgcacgtctgtggtct

SEQ ID NO: 92878 - RNA, 21 nt, synthetic construct
  source 1..21: mol_type = other RNA
ggtgctggactggagggatgc

SEQ ID NO: 92879 - RNA, 21 nt, synthetic construct
  source 1..21: mol_type = other RNA
ggtgctggcagccttctctct

SEQ ID NO: 92880 - RNA, 21 nt, synthetic construct
  source 1..21: mol_type = other RNA
ggtgctggcttcaatatgcag

SEQ ID NO: 92881 - RNA, 21 nt, synthetic construct
  source 1..21: mol_type = other RNA
ggtgctgttgtattttacacc

SEQ ID NO: 92882 - RNA, 21 nt, synthetic construct
  source 1..21: mol_type = other RNA
ggtgcttaattcaaacaaatc

SEQ ID NO: 92883 - RNA, 21 nt, synthetic construct
  source 1..21: mol_type = other RNA
ggtgcttacagactgattaat

SEQ ID NO: 92884 - RNA, 21 nt, synthetic construct
  source 1..21: mol_type = other RNA
ggtgcttagctgcctcttcct

SEQ ID NO: 92885 - RNA, 21 nt, synthetic construct
  source 1..21: mol_type = other RNA
ggtgcttccttctcttatact

SEQ ID NO: 92886 - RNA, 21 nt, synthetic construct
  source 1..21: mol_type = other RNA
ggtgcttgaactgctggtctg

SEQ ID NO: 92887 - RNA, 21 nt, synthetic construct
  source 1..21: mol_type = other RNA
ggtgctttctatctctcagat

SEQ ID NO: 92888 - RNA, 21 nt, synthetic construct
  source 1..21: mol_type = other RNA
ggtgcttttgctgcatcccaa

SEQ ID NO: 92889 - RNA, 21 nt, synthetic construct
  source 1..21: mol_type = other RNA
ggtgctttttgtatcctgttt

SEQ ID NO: 92890 - RNA, 21 nt, synthetic construct
  source 1..21: mol_type = other RNA
ggtgcttttttggtgtttttc

SEQ ID NO: 92891 - RNA, 21 nt, synthetic construct
  source 1..21: mol_type = other RNA
ggtggaaattaaacacaccct

SEQ ID NO: 92892 - RNA, 21 nt, synthetic construct
  source 1..21: mol_type = other RNA
ggtggaactctgtcatggtgt

SEQ ID NO: 92893 - RNA, 21 nt, synthetic construct
  source 1..21: mol_type = other RNA
ggtggaagctgtccttctcgt

SEQ ID NO: 92894 - RNA, 21 nt, synthetic construct
  source 1..21: mol_type = other RNA
ggtggaaggcctgatagctgt

SEQ ID NO: 92895 - RNA, 21 nt, synthetic construct
  source 1..21: mol_type = other RNA
ggtggacaaaaaacgcggcac

SEQ ID NO: 92896 - RNA, 21 nt, synthetic construct
  source 1..21: mol_type = other RNA
ggtggagtattctagttctag

SEQ ID NO: 92897 - RNA, 21 nt, synthetic construct
  source 1..21: mol_type = other RNA
ggtggagtccaaccaatcgca

SEQ ID NO: 92898 - RNA, 21 nt, synthetic construct
  source 1..21: mol_type = other RNA
ggtggagtggtggatagagag

SEQ ID NO: 92899 - RNA, 21 nt, synthetic construct
  source 1..21: mol_type = other RNA
ggtggagttctgctcttgtcg

SEQ ID NO: 92900 - RNA, 21 nt, synthetic construct
  source 1..21: mol_type = other RNA
ggtggatagagagattcaaga

SEQ ID NO: 92901 - RNA, 21 nt, synthetic construct
  source 1..21: mol_type = other RNA
ggtggatatctgaggtcagga

SEQ ID NO: 92902 - RNA, 21 nt, synthetic construct
  source 1..21: mol_type = other RNA
ggtggatgggtgtagggtttg

SEQ ID NO: 92903 - RNA, 21 nt, synthetic construct
  source 1..21: mol_type = other RNA
ggtggcattaaggacatccac

SEQ ID NO: 92904 - RNA, 21 nt, synthetic construct
  source 1..21: mol_type = other RNA
ggtggcccacacctgcaatca

SEQ ID NO: 92905 - RNA, 21 nt, synthetic construct
  source 1..21: mol_type = other RNA
ggtggcggatgccggtaatca

SEQ ID NO: 92906 - RNA, 21 nt, synthetic construct
  source 1..21: mol_type = other RNA
ggtggctggcactttcctgat

SEQ ID NO: 92907 - RNA, 21 nt, synthetic construct
  source 1..21: mol_type = other RNA
ggtgggagaggcatgccggga

SEQ ID NO: 92908 - RNA, 21 nt, synthetic construct
  source 1..21: mol_type = other RNA
ggtgggatctctgggctcact

SEQ ID NO: 92909 - RNA, 21 nt, synthetic construct
  source 1..21: mol_type = other RNA
ggtgggcactgggagccctcc

SEQ ID NO: 92910 - RNA, 21 nt, synthetic construct
  source 1..21: mol_type = other RNA
ggtgggccttgcaagccacat

SEQ ID NO: 92911 - RNA, 21 nt, synthetic construct
  source 1..21: mol_type = other RNA
ggtgggctttgagaaaggttt

SEQ ID NO: 92912 - RNA, 21 nt, synthetic construct
  source 1..21: mol_type = other RNA
ggtggggacagctcaattaag

SEQ ID NO: 92913 - RNA, 21 nt, synthetic construct
  source 1..21: mol_type = other RNA
ggtgggggcatcaaagctacc

SEQ ID NO: 92914 - RNA, 21 nt, synthetic construct
  source 1..21: mol_type = other RNA
ggtggggggatgtagaaggat

SEQ ID NO: 92915 - RNA, 21 nt, synthetic construct
  source 1..21: mol_type = other RNA
ggtggtaactgatgtgaggat

SEQ ID NO: 92916 - RNA, 21 nt, synthetic construct
  source 1..21: mol_type = other RNA
ggtggtagggagggggctgag

SEQ ID NO: 92917 - RNA, 21 nt, synthetic construct
  source 1..21: mol_type = other RNA
ggtggtaggtgtgtgtaatcc

SEQ ID NO: 92918 - RNA, 21 nt, synthetic construct
  source 1..21: mol_type = other RNA
ggtggtagtaaggatcgttag

SEQ ID NO: 92919 - RNA, 21 nt, synthetic construct
  source 1..21: mol_type = other RNA
ggtggtatgcactgtactcct

SEQ ID NO: 92920 - RNA, 21 nt, synthetic construct
  source 1..21: mol_type = other RNA
ggtggtatgggagatgtgtaa

SEQ ID NO: 92921 - RNA, 21 nt, synthetic construct
  source 1..21: mol_type = other RNA
ggtggtatttaatctgtcagc

SEQ ID NO: 92922 - RNA, 21 nt, synthetic construct
  source 1..21: mol_type = other RNA
ggtggtctcaccctcaggact

SEQ ID NO: 92923 - RNA, 21 nt, synthetic construct
  source 1..21: mol_type = other RNA
ggtggtgctggactggaggga

SEQ ID NO: 92924 - RNA, 21 nt, synthetic construct
  source 1..21: mol_type = other RNA
ggtggttctgcctaatctcta

SEQ ID NO: 92925 - RNA, 21 nt, synthetic construct
  source 1..21: mol_type = other RNA
ggtggtttgaaccccagaagg

SEQ ID NO: 92926 - RNA, 21 nt, synthetic construct
  source 1..21: mol_type = other RNA
ggtgtaaaaggctaatttttt

SEQ ID NO: 92927 - RNA, 21 nt, synthetic construct
  source 1..21: mol_type = other RNA
ggtgtaaaatacaacagcacc

SEQ ID NO: 92928 - RNA, 21 nt, synthetic construct
  source 1..21: mol_type = other RNA
ggtgtaagagattaattcagt

SEQ ID NO: 92929 - RNA, 21 nt, synthetic construct
  source 1..21: mol_type = other RNA
ggtgtacaattaggctgtttg

SEQ ID NO: 92930 - RNA, 21 nt, synthetic construct
  source 1..21: mol_type = other RNA
ggtgtagccacaagccacatg

SEQ ID NO: 92931 - RNA, 21 nt, synthetic construct
  source 1..21: mol_type = other RNA
ggtgtagggggaaaactccaa

SEQ ID NO: 92932 - RNA, 21 nt, synthetic construct
  source 1..21: mol_type = other RNA
ggtgtagggtttggcagttta

SEQ ID NO: 92933 - RNA, 21 nt, synthetic construct
  source 1..21: mol_type = other RNA
ggtgtatgatcttattaatgt

SEQ ID NO: 92934 - RNA, 21 nt, synthetic construct
  source 1..21: mol_type = other RNA
ggtgtcactggatagaagtgt

SEQ ID NO: 92935 - RNA, 21 nt, synthetic construct
  source 1..21: mol_type = other RNA
ggtgtcagaaaccatcgttca

SEQ ID NO: 92936 - RNA, 21 nt, synthetic construct
  source 1..21: mol_type = other RNA
ggtgtcagaattccatcagtg

SEQ ID NO: 92937 - RNA, 21 nt, synthetic construct
  source 1..21: mol_type = other RNA
ggtgtcatttttaagaaatcg

SEQ ID NO: 92938 - RNA, 21 nt, synthetic construct
  source 1..21: mol_type = other RNA
ggtgtccttctgagaaggcga

SEQ ID NO: 92939 - RNA, 21 nt, synthetic construct
  source 1..21: mol_type = other RNA
ggtgtcgtttatttcttctcc

SEQ ID NO: 92940 - RNA, 21 nt, synthetic construct
  source 1..21: mol_type = other RNA
ggtgtctcatttaataactaa

SEQ ID NO: 92941 - RNA, 21 nt, synthetic construct
  source 1..21: mol_type = other RNA
ggtgtctgatgtgtgtctctg

SEQ ID NO: 92942 - RNA, 21 nt, synthetic construct
  source 1..21: mol_type = other RNA
ggtgtcttattgttttgattt

SEQ ID NO: 92943 - RNA, 21 nt, synthetic construct
  source 1..21: mol_type = other RNA
ggtgtgaaccacgcatctggt

SEQ ID NO: 92944 - RNA, 21 nt, synthetic construct
  source 1..21: mol_type = other RNA
ggtgtgaagttgggcttaaca

SEQ ID NO: 92945 - RNA, 21 nt, synthetic construct
  source 1..21: mol_type = other RNA
ggtgtgagattgatagatcat

SEQ ID NO: 92946 - RNA, 21 nt, synthetic construct
  source 1..21: mol_type = other RNA
ggtgtgagccaccgtgccggg

SEQ ID NO: 92947 - RNA, 21 nt, synthetic construct
  source 1..21: mol_type = other RNA
ggtgtgagccactacgcccgg

SEQ ID NO: 92948 - RNA, 21 nt, synthetic construct
  source 1..21: mol_type = other RNA
ggtgtgataactgatatgagg

SEQ ID NO: 92949 - RNA, 21 nt, synthetic construct
  source 1..21: mol_type = other RNA
ggtgtgatcaggaaagatgaa

SEQ ID NO: 92950 - RNA, 21 nt, synthetic construct
  source 1..21: mol_type = other RNA
ggtgtgatctctgctcaccgc

SEQ ID NO: 92951 - RNA, 21 nt, synthetic construct
  source 1..21: mol_type = other RNA
ggtgtgcacgtttgctttgga

SEQ ID NO: 92952 - RNA, 21 nt, synthetic construct
  source 1..21: mol_type = other RNA
ggtgtgctcttttcatcactc

SEQ ID NO: 92953 - RNA, 21 nt, synthetic construct
  source 1..21: mol_type = other RNA
ggtgtgcttctgataggaata

SEQ ID NO: 92954 - RNA, 21 nt, synthetic construct
  source 1..21: mol_type = other RNA
ggtgtggcatgtctgtagtta

SEQ ID NO: 92955 - RNA, 21 nt, synthetic construct
  source 1..21: mol_type = other RNA
ggtgtgggccaccaagccctg

SEQ ID NO: 92956 - RNA, 21 nt, synthetic construct
  source 1..21: mol_type = other RNA
ggtgtggtcttgtctcaacct

SEQ ID NO: 92957 - RNA, 21 nt, synthetic construct
  source 1..21: mol_type = other RNA
ggtgtggtgctgcacgtctgt

SEQ ID NO: 92958 - RNA, 21 nt, synthetic construct
  source 1..21: mol_type = other RNA
ggtgtgtaaacactgttctgc

SEQ ID NO: 92959 - RNA, 21 nt, synthetic construct
  source 1..21: mol_type = other RNA
ggtgtgtctgcgccttaaagc

SEQ ID NO: 92960 - RNA, 21 nt, synthetic construct
  source 1..21: mol_type = other RNA
ggtgtgtgaatggaaaattca

SEQ ID NO: 92961 - RNA, 21 nt, synthetic construct
  source 1..21: mol_type = other RNA
ggtgtgtgactgtagtccctg

SEQ ID NO: 92962 - RNA, 21 nt, synthetic construct
  source 1..21: mol_type = other RNA
ggtgtgtgcaaaggattagaa

SEQ ID NO: 92963 - RNA, 21 nt, synthetic construct
  source 1..21: mol_type = other RNA
ggtgtgtgtaatcccagctac

SEQ ID NO: 92964 - RNA, 21 nt, synthetic construct
  source 1..21: mol_type = other RNA
ggtgtgtgttccttcctacac

SEQ ID NO: 92965 - RNA, 21 nt, synthetic construct
  source 1..21: mol_type = other RNA
ggtgtgtttaatttccaccca

SEQ ID NO: 92966 - RNA, 21 nt, synthetic construct
  source 1..21: mol_type = other RNA
ggtgttaagccgttccatcag

SEQ ID NO: 92967 - RNA, 21 nt, synthetic construct
  source 1..21: mol_type = other RNA
ggtgttagcaggactggactc

SEQ ID NO: 92968 - RNA, 21 nt, synthetic construct
  source 1..21: mol_type = other RNA
ggtgttaggcaatccttccgc

SEQ ID NO: 92969 - RNA, 21 nt, synthetic construct
  source 1..21: mol_type = other RNA
ggtgttatttgttctgtcacg

SEQ ID NO: 92970 - RNA, 21 nt, synthetic construct
  source 1..21: mol_type = other RNA
ggtgttcctgaagtctttggt

SEQ ID NO: 92971 - RNA, 21 nt, synthetic construct
  source 1..21: mol_type = other RNA
ggtgttgactgaattaatctc

SEQ ID NO: 92972 - RNA, 21 nt, synthetic construct
  source 1..21: mol_type = other RNA
ggtgttgcttgctctacaaac

SEQ ID NO: 92973 - RNA, 21 nt, synthetic construct
  source 1..21: mol_type = other RNA
ggtgttggtgcatttgggaca

SEQ ID NO: 92974 - RNA, 21 nt, synthetic construct
  source 1..21: mol_type = other RNA
ggtgtttctgacaggtggtat

SEQ ID NO: 92975 - RNA, 21 nt, synthetic construct
  source 1..21: mol_type = other RNA
ggtgtttggtgaattttattc

SEQ ID NO: 92976 - RNA, 21 nt, synthetic construct
  source 1..21: mol_type = other RNA
ggtgttttcccccctaaaaca

SEQ ID NO: 92977 - RNA, 21 nt, synthetic construct
  source 1..21: mol_type = other RNA
ggtgtttttcagccctgatag

SEQ ID NO: 92978 - RNA, 21 nt, synthetic construct
  source 1..21: mol_type = other RNA
ggtgtttttctaggtagtttc

SEQ ID NO: 92979 - RNA, 21 nt, synthetic construct
  source 1..21: mol_type = other RNA
ggtgttttttccttctttggg

SEQ ID NO: 92980 - RNA, 21 nt, synthetic construct
  source 1..21: mol_type = other RNA
ggttaaaaccacaaacatgaa

SEQ ID NO: 92981 - RNA, 21 nt, synthetic construct
  source 1..21: mol_type = other RNA
ggttaaaagttagctggcaaa

SEQ ID NO: 92982 - RNA, 21 nt, synthetic construct
  source 1..21: mol_type = other RNA
ggttaaacttggtctgggtga

SEQ ID NO: 92983 - RNA, 21 nt, synthetic construct
  source 1..21: mol_type = other RNA
ggttaaagcaacaggaagagg

SEQ ID NO: 92984 - RNA, 21 nt, synthetic construct
  source 1..21: mol_type = other RNA
ggttaactaatagccagtgca

SEQ ID NO: 92985 - RNA, 21 nt, synthetic construct
  source 1..21: mol_type = other RNA
ggttaagactgctgtttacca

SEQ ID NO: 92986 - RNA, 21 nt, synthetic construct
  source 1..21: mol_type = other RNA
ggttaagggaagagctaagat

SEQ ID NO: 92987 - RNA, 21 nt, synthetic construct
  source 1..21: mol_type = other RNA
ggttaatagtgaccctttgaa

SEQ ID NO: 92988 - RNA, 21 nt, synthetic construct
  source 1..21: mol_type = other RNA
ggttacagtataggggaactc

SEQ ID NO: 92989 - RNA, 21 nt, synthetic construct
  source 1..21: mol_type = other RNA
ggttacgtactaggtatcaca

SEQ ID NO: 92990 - RNA, 21 nt, synthetic construct
  source 1..21: mol_type = other RNA
ggttagaagacaatactgtta

SEQ ID NO: 92991 - RNA, 21 nt, synthetic construct
  source 1..21: mol_type = other RNA
ggttagactgcacataaaagg

SEQ ID NO: 92992 - RNA, 21 nt, synthetic construct
  source 1..21: mol_type = other RNA
ggttagattatatggtctacc

SEQ ID NO: 92993 - RNA, 21 nt, synthetic construct
  source 1..21: mol_type = other RNA
ggttagatttttcctttgcct

SEQ ID NO: 92994 - RNA, 21 nt, synthetic construct
  source 1..21: mol_type = other RNA
ggttaggaaaatacatgaggc

SEQ ID NO: 92995 - RNA, 21 nt, synthetic construct
  source 1..21: mol_type = other RNA
ggttagggagactttcactgc

SEQ ID NO: 92996 - RNA, 21 nt, synthetic construct
  source 1..21: mol_type = other RNA
ggttagggcctagaaatcata

SEQ ID NO: 92997 - RNA, 21 nt, synthetic construct
  source 1..21: mol_type = other RNA
ggttagtgttgtttttaaaca

SEQ ID NO: 92998 - RNA, 21 nt, synthetic construct
  source 1..21: mol_type = other RNA
ggttataatcagccgtgattg

SEQ ID NO: 92999 - RNA, 21 nt, synthetic construct
  source 1..21: mol_type = other RNA
ggttatacacacataaggggg

SEQ ID NO: 93000 - RNA, 21 nt, synthetic construct
  source 1..21: mol_type = other RNA
ggttatagccataagagtccc

SEQ ID NO: 93001 - RNA, 21 nt, synthetic construct
  source 1..21: mol_type = other RNA
ggttatccaattttttggcat

SEQ ID NO: 93002 - RNA, 21 nt, synthetic construct
  source 1..21: mol_type = other RNA
ggttatctgttttcttactga

SEQ ID NO: 93003 - RNA, 21 nt, synthetic construct
  source 1..21: mol_type = other RNA
ggttatgcgaatttactttta

SEQ ID NO: 93004 - RNA, 21 nt, synthetic construct
  source 1..21: mol_type = other RNA
ggttattaacataccgacggc

SEQ ID NO: 93005 - RNA, 21 nt, synthetic construct
  source 1..21: mol_type = other RNA
ggttattaagataatgctgtt

SEQ ID NO: 93006 - RNA, 21 nt, synthetic construct
  source 1..21: mol_type = other RNA
ggttattcaaaacaaaacaca

SEQ ID NO: 93007 - RNA, 21 nt, synthetic construct
  source 1..21: mol_type = other RNA
ggttattcacccaagaatttc

SEQ ID NO: 93008 - RNA, 21 nt, synthetic construct
  source 1..21: mol_type = other RNA
ggttattcatgtttgtggttt

SEQ ID NO: 93009 - RNA, 21 nt, synthetic construct
  source 1..21: mol_type = other RNA
ggttattgagtctgtagggtg

SEQ ID NO: 93010 - RNA, 21 nt, synthetic construct
  source 1..21: mol_type = other RNA
ggttcaaaccacctaactact

SEQ ID NO: 93011 - RNA, 21 nt, synthetic construct
  source 1..21: mol_type = other RNA
ggttcaagccccagttctgcg

SEQ ID NO: 93012 - RNA, 21 nt, synthetic construct
  source 1..21: mol_type = other RNA
ggttcaagtttggctcccatg

SEQ ID NO: 93013 - RNA, 21 nt, synthetic construct
  source 1..21: mol_type = other RNA
ggttcaattatgtggaaaaaa

SEQ ID NO: 93014 - RNA, 21 nt, synthetic construct
  source 1..21: mol_type = other RNA
ggttcacaaattagaacaaat

SEQ ID NO: 93015 - RNA, 21 nt, synthetic construct
  source 1..21: mol_type = other RNA
ggttcacacctgtagtcccag

SEQ ID NO: 93016 - RNA, 21 nt, synthetic construct
  source 1..21: mol_type = other RNA
ggttcacttgaaacctgccat

SEQ ID NO: 93017 - RNA, 21 nt, synthetic construct
  source 1..21: mol_type = other RNA
ggttcaggtgcctcctgcctc

SEQ ID NO: 93018 - RNA, 21 nt, synthetic construct
  source 1..21: mol_type = other RNA
ggttcataatatatcacaact

SEQ ID NO: 93019 - RNA, 21 nt, synthetic construct
  source 1..21: mol_type = other RNA
ggttcatatttcccttttgga

SEQ ID NO: 93020 - RNA, 21 nt, synthetic construct
  source 1..21: mol_type = other RNA
ggttcatccatgttgttgaat

SEQ ID NO: 93021 - RNA, 21 nt, synthetic construct
  source 1..21: mol_type = other RNA
ggttcatgaacataaatttgt

SEQ ID NO: 93022 - RNA, 21 nt, synthetic construct
  source 1..21: mol_type = other RNA
ggttcatgtgtgcttacacac

SEQ ID NO: 93023 - RNA, 21 nt, synthetic construct
  source 1..21: mol_type = other RNA
ggttcatttcaggaatgcaaa

SEQ ID NO: 93024 - RNA, 21 nt, synthetic construct
  source 1..21: mol_type = other RNA
ggttcattttaataagcttcg

SEQ ID NO: 93025 - RNA, 21 nt, synthetic construct
  source 1..21: mol_type = other RNA
ggttccaaacttctgaccttg

SEQ ID NO: 93026 - RNA, 21 nt, synthetic construct
  source 1..21: mol_type = other RNA
ggttccatttgttttgtgttt

SEQ ID NO: 93027 - RNA, 21 nt, synthetic construct
  source 1..21: mol_type = other RNA
ggttccctgtagagattttta

SEQ ID NO: 93028 - RNA, 21 nt, synthetic construct
  source 1..21: mol_type = other RNA
ggttcctagaaaatttaatac

SEQ ID NO: 93029 - RNA, 21 nt, synthetic construct
  source 1..21: mol_type = other RNA
ggttcgtttgaggcttttcat

SEQ ID NO: 93030 - RNA, 21 nt, synthetic construct
  source 1..21: mol_type = other RNA
ggttctcaccaacatccacag

SEQ ID NO: 93031 - RNA, 21 nt, synthetic construct
  source 1..21: mol_type = other RNA
ggttctcaggagcctagtcat

SEQ ID NO: 93032 - RNA, 21 nt, synthetic construct
  source 1..21: mol_type = other RNA
ggttctcccttctattccatt

SEQ ID NO: 93033 - RNA, 21 nt, synthetic construct
  source 1..21: mol_type = other RNA
ggttctgcctaatctctaggc

SEQ ID NO: 93034 - RNA, 21 nt, synthetic construct
  source 1..21: mol_type = other RNA
ggttctgcgtgttattttaat

SEQ ID NO: 93035 - RNA, 21 nt, synthetic construct
  source 1..21: mol_type = other RNA
ggttctgctatgctgaaaggc

SEQ ID NO: 93036 - RNA, 21 nt, synthetic construct
  source 1..21: mol_type = other RNA
ggttctgtgctagatgctaaa

SEQ ID NO: 93037 - RNA, 21 nt, synthetic construct
  source 1..21: mol_type = other RNA
ggttcttcaccgtgcaactag

SEQ ID NO: 93038 - RNA, 21 nt, synthetic construct
  source 1..21: mol_type = other RNA
ggttcttcatcagtccctgtg

SEQ ID NO: 93039 - RNA, 21 nt, synthetic construct
  source 1..21: mol_type = other RNA
ggttcttggaaattagaaatg

SEQ ID NO: 93040 - RNA, 21 nt, synthetic construct
  source 1..21: mol_type = other RNA
ggttcttttaaatgccaattt

SEQ ID NO: 93041 - RNA, 21 nt, synthetic construct
  source 1..21: mol_type = other RNA
ggttgaaaactcaactgcctc

SEQ ID NO: 93042 - RNA, 21 nt, synthetic construct
  source 1..21: mol_type = other RNA
ggttgaaagttcagaatacca

SEQ ID NO: 93043 - RNA, 21 nt, synthetic construct
  source 1..21: mol_type = other RNA
ggttgaacatcacccagctcg

SEQ ID NO: 93044 - RNA, 21 nt, synthetic construct
  source 1..21: mol_type = other RNA
ggttgaagaaagtaggaatta

SEQ ID NO: 93045 - RNA, 21 nt, synthetic construct
  source 1..21: mol_type = other RNA
ggttgaagacctgcagtctgc

SEQ ID NO: 93046 - RNA, 21 nt, synthetic construct
  source 1..21: mol_type = other RNA
ggttgaagctctagtgagcta

SEQ ID NO: 93047 - RNA, 21 nt, synthetic construct
  source 1..21: mol_type = other RNA
ggttgaatagggcctcaaatt

SEQ ID NO: 93048 - RNA, 21 nt, synthetic construct
  source 1..21: mol_type = other RNA
ggttgacccataaactgaaca

SEQ ID NO: 93049 - RNA, 21 nt, synthetic construct
  source 1..21: mol_type = other RNA
ggttgagacaagaccacacca

SEQ ID NO: 93050 - RNA, 21 nt, synthetic construct
  source 1..21: mol_type = other RNA
ggttgagacttagatttattt

SEQ ID NO: 93051 - RNA, 21 nt, synthetic construct
  source 1..21: mol_type = other RNA
ggttgaggctgcagtgagctc

SEQ ID NO: 93052 - RNA, 21 nt, synthetic construct
  source 1..21: mol_type = other RNA
ggttgatactagtttagtgca

SEQ ID NO: 93053 - RNA, 21 nt, synthetic construct
  source 1..21: mol_type = other RNA
ggttgatggctgtactaagcc

SEQ ID NO: 93054 - RNA, 21 nt, synthetic construct
  source 1..21: mol_type = other RNA
ggttgcacaatgttgtggatg

SEQ ID NO: 93055 - RNA, 21 nt, synthetic construct
  source 1..21: mol_type = other RNA
ggttgcattaatgcttcatat

SEQ ID NO: 93056 - RNA, 21 nt, synthetic construct
  source 1..21: mol_type = other RNA
ggttgcggtgacgtgagatca

SEQ ID NO: 93057 - RNA, 21 nt, synthetic construct
  source 1..21: mol_type = other RNA
ggttgcttaattgagctgtcc

SEQ ID NO: 93058 - RNA, 21 nt, synthetic construct
  source 1..21: mol_type = other RNA
ggttgcttttacttggctcct

SEQ ID NO: 93059 - RNA, 21 nt, synthetic construct
  source 1..21: mol_type = other RNA
ggttggaaaacttttaactga

SEQ ID NO: 93060 - RNA, 21 nt, synthetic construct
  source 1..21: mol_type = other RNA
ggttggaaaagaaagctgtgg

SEQ ID NO: 93061 - RNA, 21 nt, synthetic construct
  source 1..21: mol_type = other RNA
ggttggaagtttctggaagtt

SEQ ID NO: 93062 - RNA, 21 nt, synthetic construct
  source 1..21: mol_type = other RNA
ggttggactccaccctgcccc

SEQ ID NO: 93063 - RNA, 21 nt, synthetic construct
  source 1..21: mol_type = other RNA
ggttggaggagaaggccttcc

SEQ ID NO: 93064 - RNA, 21 nt, synthetic construct
  source 1..21: mol_type = other RNA
ggttggccgaggccagtccct

SEQ ID NO: 93065 - RNA, 21 nt, synthetic construct
  source 1..21: mol_type = other RNA
ggttgggcttatcagatggtg

SEQ ID NO: 93066 - RNA, 21 nt, synthetic construct
  source 1..21: mol_type = other RNA
ggttggggtatgtttgattag

SEQ ID NO: 93067 - RNA, 21 nt, synthetic construct
  source 1..21: mol_type = other RNA
ggttggtgcttccttctctta

SEQ ID NO: 93068 - RNA, 21 nt, synthetic construct
  source 1..21: mol_type = other RNA
ggttgtatagcagtaaaatga

SEQ ID NO: 93069 - RNA, 21 nt, synthetic construct
  source 1..21: mol_type = other RNA
ggttgtgcttcgaggtcgcac

SEQ ID NO: 93070 - RNA, 21 nt, synthetic construct
  source 1..21: mol_type = other RNA
ggttgtggaattaactccagg

SEQ ID NO: 93071 - RNA, 21 nt, synthetic construct
  source 1..21: mol_type = other RNA
ggttgttcttggttaatatta

SEQ ID NO: 93072 - RNA, 21 nt, synthetic construct
  source 1..21: mol_type = other RNA
ggttgttggctaaaagaccgc

SEQ ID NO: 93073 - RNA, 21 nt, synthetic construct
  source 1..21: mol_type = other RNA
ggttgtttccatgtcttggct

SEQ ID NO: 93074 - RNA, 21 nt, synthetic construct
  source 1..21: mol_type = other RNA
ggtttaaaagagtgcacattc

SEQ ID NO: 93075 - RNA, 21 nt, synthetic construct
  source 1..21: mol_type = other RNA
ggtttaacacatacaaaccaa

SEQ ID NO: 93076 - RNA, 21 nt, synthetic construct
  source 1..21: mol_type = other RNA
ggtttaactgaggtgtttttc

SEQ ID NO: 93077 - RNA, 21 nt, synthetic construct
  source 1..21: mol_type = other RNA
ggtttaaggtaagggtccagc

SEQ ID NO: 93078 - RNA, 21 nt, synthetic construct
  source 1..21: mol_type = other RNA
ggtttaataaatactagtagg

SEQ ID NO: 93079 - RNA, 21 nt, synthetic construct
  source 1..21: mol_type = other RNA
ggtttacaatggttcataata

SEQ ID NO: 93080 - RNA, 21 nt, synthetic construct
  source 1..21: mol_type = other RNA
ggtttacaggatatcagaagt

SEQ ID NO: 93081 - RNA, 21 nt, synthetic construct
  source 1..21: mol_type = other RNA
ggtttactccaagaaggctag

SEQ ID NO: 93082 - RNA, 21 nt, synthetic construct
  source 1..21: mol_type = other RNA
ggtttacttggggagagtggg

SEQ ID NO: 93083 - RNA, 21 nt, synthetic construct
  source 1..21: mol_type = other RNA
ggtttagaaaacatatccttc

SEQ ID NO: 93084 - RNA, 21 nt, synthetic construct
  source 1..21: mol_type = other RNA
ggtttaggaagcacattcctt

SEQ ID NO: 93085 - RNA, 21 nt, synthetic construct
  source 1..21: mol_type = other RNA
ggtttaggctgtctccaacgc

SEQ ID NO: 93086 - RNA, 21 nt, synthetic construct
  source 1..21: mol_type = other RNA
ggtttaggtttttcttgtggg

SEQ ID NO: 93087 - RNA, 21 nt, synthetic construct
  source 1..21: mol_type = other RNA
ggtttattcatataatggagt

SEQ ID NO: 93088 - RNA, 21 nt, synthetic construct
  source 1..21: mol_type = other RNA
ggtttattttctgcatttggt

SEQ ID NO: 93089 - RNA, 21 nt, synthetic construct
  source 1..21: mol_type = other RNA
ggtttcaagtgaaccaaaaac

SEQ ID NO: 93090 - RNA, 21 nt, synthetic construct
  source 1..21: mol_type = other RNA
ggtttcacacgcattgcattg

SEQ ID NO: 93091 - RNA, 21 nt, synthetic construct
  source 1..21: mol_type = other RNA
ggtttcagcacaatactgtct

SEQ ID NO: 93092 - RNA, 21 nt, synthetic construct
  source 1..21: mol_type = other RNA
ggtttcagtacacgaaaatat

SEQ ID NO: 93093 - RNA, 21 nt, synthetic construct
  source 1..21: mol_type = other RNA
ggtttcagtccctcctttcta

SEQ ID NO: 93094 - RNA, 21 nt, synthetic construct
  source 1..21: mol_type = other RNA
ggtttcagtgagtagggaagg

SEQ ID NO: 93095 - RNA, 21 nt, synthetic construct
  source 1..21: mol_type = other RNA
ggtttcataaaatgatggcaa

SEQ ID NO: 93096 - RNA, 21 nt, synthetic construct
  source 1..21: mol_type = other RNA
ggtttccagtggcccccctga

SEQ ID NO: 93097 - RNA, 21 nt, synthetic construct
  source 1..21: mol_type = other RNA
ggtttccctggggaataagat

SEQ ID NO: 93098 - RNA, 21 nt, synthetic construct
  source 1..21: mol_type = other RNA
ggtttcctcggtctacggacg

SEQ ID NO: 93099 - RNA, 21 nt, synthetic construct
  source 1..21: mol_type = other RNA
ggtttccttacctttatcttt

SEQ ID NO: 93100 - RNA, 21 nt, synthetic construct
  source 1..21: mol_type = other RNA
ggtttctcatttttcaggggg

SEQ ID NO: 93101 - RNA, 21 nt, synthetic construct
  source 1..21: mol_type = other RNA
ggtttctccttctgcaggctg

SEQ ID NO: 93102 - RNA, 21 nt, synthetic construct
  source 1..21: mol_type = other RNA
ggtttctctccaaggtacaat

SEQ ID NO: 93103 - RNA, 21 nt, synthetic construct
  source 1..21: mol_type = other RNA
ggtttctgacacccgacccac

SEQ ID NO: 93104 - RNA, 21 nt, synthetic construct
  source 1..21: mol_type = other RNA
ggtttctgcatacttagctaa

SEQ ID NO: 93105 - RNA, 21 nt, synthetic construct
  source 1..21: mol_type = other RNA
ggtttctgtttggatgaaaaa

SEQ ID NO: 93106 - RNA, 21 nt, synthetic construct
  source 1..21: mol_type = other RNA
ggtttcttcaagatactgcac

SEQ ID NO: 93107 - RNA, 21 nt, synthetic construct
  source 1..21: mol_type = other RNA
ggtttcttcactcttaaaagg

SEQ ID NO: 93108 - RNA, 21 nt, synthetic construct
  source 1..21: mol_type = other RNA
ggtttcttgaatctctctatc

SEQ ID NO: 93109 - RNA, 21 nt, synthetic construct
  source 1..21: mol_type = other RNA
ggtttgaaatgatcttttgta

SEQ ID NO: 93110 - RNA, 21 nt, synthetic construct
  source 1..21: mol_type = other RNA
ggtttgaaccccagaaggtta

SEQ ID NO: 93111 - RNA, 21 nt, synthetic construct
  source 1..21: mol_type = other RNA
ggtttgaagcttcacttctct

SEQ ID NO: 93112 - RNA, 21 nt, synthetic construct
  source 1..21: mol_type = other RNA
ggtttgagtttccagaaaact

SEQ ID NO: 93113 - RNA, 21 nt, synthetic construct
  source 1..21: mol_type = other RNA
ggtttgatcccactagtggaa

SEQ ID NO: 93114 - RNA, 21 nt, synthetic construct
  source 1..21: mol_type = other RNA
ggtttgattgttccagggggg

SEQ ID NO: 93115 - RNA, 21 nt, synthetic construct
  source 1..21: mol_type = other RNA
ggtttgcaaaaattttgttca

SEQ ID NO: 93116 - RNA, 21 nt, synthetic construct
  source 1..21: mol_type = other RNA
ggtttgcactggcacagcact

SEQ ID NO: 93117 - RNA, 21 nt, synthetic construct
  source 1..21: mol_type = other RNA
ggtttgccttttcactcttag

SEQ ID NO: 93118 - RNA, 21 nt, synthetic construct
  source 1..21: mol_type = other RNA
ggtttgctttggagtcacagt

SEQ ID NO: 93119 - RNA, 21 nt, synthetic construct
  source 1..21: mol_type = other RNA
ggtttggagtttgtagctcaa

SEQ ID NO: 93120 - RNA, 21 nt, synthetic construct
  source 1..21: mol_type = other RNA
ggtttggcagtttaagaatta

SEQ ID NO: 93121 - RNA, 21 nt, synthetic construct
  source 1..21: mol_type = other RNA
ggtttggggcttttgaacact

SEQ ID NO: 93122 - RNA, 21 nt, synthetic construct
  source 1..21: mol_type = other RNA
ggtttgtagagcaagcaacac

SEQ ID NO: 93123 - RNA, 21 nt, synthetic construct
  source 1..21: mol_type = other RNA
ggtttgtatgtgttaaaccat

SEQ ID NO: 93124 - RNA, 21 nt, synthetic construct
  source 1..21: mol_type = other RNA
ggtttgtgcttggatattcta

SEQ ID NO: 93125 - RNA, 21 nt, synthetic construct
  source 1..21: mol_type = other RNA
ggtttgtgtgtttgtgaaaaa

SEQ ID NO: 93126 - RNA, 21 nt, synthetic construct
  source 1..21: mol_type = other RNA
ggtttgttttttgttttggtc

SEQ ID NO: 93127 - RNA, 21 nt, synthetic construct
  source 1..21: mol_type = other RNA
ggttttaacctcttgaagtca

SEQ ID NO: 93128 - RNA, 21 nt, synthetic construct
  source 1..21: mol_type = other RNA
ggttttaatgggcattagaag

SEQ ID NO: 93129 - RNA, 21 nt, synthetic construct
  source 1..21: mol_type = other RNA
ggttttactactgtactgttt

SEQ ID NO: 93130 - RNA, 21 nt, synthetic construct
  source 1..21: mol_type = other RNA
ggttttatctctctcaagcaa

SEQ ID NO: 93131 - RNA, 21 nt, synthetic construct
  source 1..21: mol_type = other RNA
ggttttatggtaactcctgtt

SEQ ID NO: 93132 - RNA, 21 nt, synthetic construct
  source 1..21: mol_type = other RNA
ggttttcctactaacaagaaa

SEQ ID NO: 93133 - RNA, 21 nt, synthetic construct
  source 1..21: mol_type = other RNA
ggttttcctgatggacattct

SEQ ID NO: 93134 - RNA, 21 nt, synthetic construct
  source 1..21: mol_type = other RNA
ggttttcgaccaagttactag

SEQ ID NO: 93135 - RNA, 21 nt, synthetic construct
  source 1..21: mol_type = other RNA
ggttttctagttagtttgttg

SEQ ID NO: 93136 - RNA, 21 nt, synthetic construct
  source 1..21: mol_type = other RNA
ggttttctggaggctagaagt

SEQ ID NO: 93137 - RNA, 21 nt, synthetic construct
  source 1..21: mol_type = other RNA
ggttttctgtagaatatccaa

SEQ ID NO: 93138 - RNA, 21 nt, synthetic construct
  source 1..21: mol_type = other RNA
ggttttgactcagtacttccc

SEQ ID NO: 93139 - RNA, 21 nt, synthetic construct
  source 1..21: mol_type = other RNA
ggttttgatcatcgcattacg

SEQ ID NO: 93140 - RNA, 21 nt, synthetic construct
  source 1..21: mol_type = other RNA
ggttttggtaatgggaaagac

SEQ ID NO: 93141 - RNA, 21 nt, synthetic construct
  source 1..21: mol_type = other RNA
ggttttggtatgttgtgtttt

SEQ ID NO: 93142 - RNA, 21 nt, synthetic construct
  source 1..21: mol_type = other RNA
ggttttgttttgttttttcac

SEQ ID NO: 93143 - RNA, 21 nt, synthetic construct
  source 1..21: mol_type = other RNA
ggtttttaaaagatgcattct

SEQ ID NO: 93144 - RNA, 21 nt, synthetic construct
  source 1..21: mol_type = other RNA
ggtttttatggaataatggaa

SEQ ID NO: 93145 - RNA, 21 nt, synthetic construct
  source 1..21: mol_type = other RNA
ggtttttattttatgtacacg

SEQ ID NO: 93146 - RNA, 21 nt, synthetic construct
  source 1..21: mol_type = other RNA
ggtttttcttgtgggtatttt

SEQ ID NO: 93147 - RNA, 21 nt, synthetic construct
  source 1..21: mol_type = other RNA
ggtttttgaacaagagcgtcg

SEQ ID NO: 93148 - RNA, 21 nt, synthetic construct
  source 1..21: mol_type = other RNA
ggtttttgattactgactcaa

SEQ ID NO: 93149 - RNA, 21 nt, synthetic construct
  source 1..21: mol_type = other RNA
ggtttttggttcacttgaaac

SEQ ID NO: 93150 - RNA, 21 nt, synthetic construct
  source 1..21: mol_type = other RNA
ggttttttcattttactgcta

SEQ ID NO: 93151 - RNA, 21 nt, synthetic construct
  source 1..21: mol_type = other RNA
ggttttttcccccctggaaca

SEQ ID NO: 93152 - RNA, 21 nt, synthetic construct
  source 1..21: mol_type = other RNA
gtaaaaaaggaccatctgtta

SEQ ID NO: 93153 - RNA, 21 nt, synthetic construct
  source 1..21: mol_type = other RNA
gtaaaaactgtttggctggga

SEQ ID NO: 93154 - RNA, 21 nt, synthetic construct
  source 1..21: mol_type = other RNA
gtaaaaagaaatctgcatcca

SEQ ID NO: 93155 - RNA, 21 nt, synthetic construct
  source 1..21: mol_type = other RNA
gtaaaaagcactatccacatt

SEQ ID NO: 93156 - RNA, 21 nt, synthetic construct
  source 1..21: mol_type = other RNA
gtaaaaagccatttatcagca

SEQ ID NO: 93157 - RNA, 21 nt, synthetic construct
  source 1..21: mol_type = other RNA
gtaaaaagcctgcttcagcct

SEQ ID NO: 93158 - RNA, 21 nt, synthetic construct
  source 1..21: mol_type = other RNA
gtaaaaagtgcttctagtaac

SEQ ID NO: 93159 - RNA, 21 nt, synthetic construct
  source 1..21: mol_type = other RNA
gtaaaaatatagaaggccaga

SEQ ID NO: 93160 - RNA, 21 nt, synthetic construct
  source 1..21: mol_type = other RNA
gtaaaaattttctcccaaggt

SEQ ID NO: 93161 - RNA, 21 nt, synthetic construct
  source 1..21: mol_type = other RNA
gtaaaacaaattccctctaca

SEQ ID NO: 93162 - RNA, 21 nt, synthetic construct
  source 1..21: mol_type = other RNA
gtaaaacagacccttatgtcc

SEQ ID NO: 93163 - RNA, 21 nt, synthetic construct
  source 1..21: mol_type = other RNA
gtaaaacatcaaagtcccctg

SEQ ID NO: 93164 - RNA, 21 nt, synthetic construct
  source 1..21: mol_type = other RNA
gtaaaacatctggaaggaaac

SEQ ID NO: 93165 - RNA, 21 nt, synthetic construct
  source 1..21: mol_type = other RNA
gtaaaaccaaatgtggatagt

SEQ ID NO: 93166 - RNA, 21 nt, synthetic construct
  source 1..21: mol_type = other RNA
gtaaaagaagatgcagttgct

SEQ ID NO: 93167 - RNA, 21 nt, synthetic construct
  source 1..21: mol_type = other RNA
gtaaaagcaacctcatttgca

SEQ ID NO: 93168 - RNA, 21 nt, synthetic construct
  source 1..21: mol_type = other RNA
gtaaaagctaatctactttct

SEQ ID NO: 93169 - RNA, 21 nt, synthetic construct
  source 1..21: mol_type = other RNA
gtaaaaggctaattttttctg

SEQ ID NO: 93170 - RNA, 21 nt, synthetic construct
  source 1..21: mol_type = other RNA
gtaaaatacaacagcaccttt

SEQ ID NO: 93171 - RNA, 21 nt, synthetic construct
  source 1..21: mol_type = other RNA
gtaaaatagtcaagtaacagt

SEQ ID NO: 93172 - RNA, 21 nt, synthetic construct
  source 1..21: mol_type = other RNA
gtaaaatcactaattcaagtg

SEQ ID NO: 93173 - RNA, 21 nt, synthetic construct
  source 1..21: mol_type = other RNA
gtaaaatcggaacaggctcaa

SEQ ID NO: 93174 - RNA, 21 nt, synthetic construct
  source 1..21: mol_type = other RNA
gtaaaatgtggcaaatttatg

SEQ ID NO: 93175 - RNA, 21 nt, synthetic construct
  source 1..21: mol_type = other RNA
gtaaaattcccttcagtgtag

SEQ ID NO: 93176 - RNA, 21 nt, synthetic construct
  source 1..21: mol_type = other RNA
gtaaacaactgactctaaagt

SEQ ID NO: 93177 - RNA, 21 nt, synthetic construct
  source 1..21: mol_type = other RNA
gtaaacaagactcaacatgtg

SEQ ID NO: 93178 - RNA, 21 nt, synthetic construct
  source 1..21: mol_type = other RNA
gtaaacaatgctgctatgaaa

SEQ ID NO: 93179 - RNA, 21 nt, synthetic construct
  source 1..21: mol_type = other RNA
gtaaacactgttctgcgtggt

SEQ ID NO: 93180 - RNA, 21 nt, synthetic construct
  source 1..21: mol_type = other RNA
gtaaacagcagtcttaaccat

SEQ ID NO: 93181 - RNA, 21 nt, synthetic construct
  source 1..21: mol_type = other RNA
gtaaacagcatactgtggata

SEQ ID NO: 93182 - RNA, 21 nt, synthetic construct
  source 1..21: mol_type = other RNA
gtaaacatgaacaagttacaa

SEQ ID NO: 93183 - RNA, 21 nt, synthetic construct
  source 1..21: mol_type = other RNA
gtaaaccatatggttaatagt

SEQ ID NO: 93184 - RNA, 21 nt, synthetic construct
  source 1..21: mol_type = other RNA
gtaaacctcaagtcttttcct

SEQ ID NO: 93185 - RNA, 21 nt, synthetic construct
  source 1..21: mol_type = other RNA
gtaaacctggaatcctctacc

SEQ ID NO: 93186 - RNA, 21 nt, synthetic construct
  source 1..21: mol_type = other RNA
gtaaactgttggaaaaatcgt

SEQ ID NO: 93187 - RNA, 21 nt, synthetic construct
  source 1..21: mol_type = other RNA
gtaaagatagccccttatcag

SEQ ID NO: 93188 - RNA, 21 nt, synthetic construct
  source 1..21: mol_type = other RNA
gtaaagatcaagctcgccgtc

SEQ ID NO: 93189 - RNA, 21 nt, synthetic construct
  source 1..21: mol_type = other RNA
gtaaagcaaatgtgactagaa

SEQ ID NO: 93190 - RNA, 21 nt, synthetic construct
  source 1..21: mol_type = other RNA
gtaaagccccattgtacacat

SEQ ID NO: 93191 - RNA, 21 nt, synthetic construct
  source 1..21: mol_type = other RNA
gtaaaggggatgggggacgac

SEQ ID NO: 93192 - RNA, 21 nt, synthetic construct
  source 1..21: mol_type = other RNA
gtaaagggtaagaaaattgta

SEQ ID NO: 93193 - RNA, 21 nt, synthetic construct
  source 1..21: mol_type = other RNA
gtaaagtaatcaagtgaaatg

SEQ ID NO: 93194 - RNA, 21 nt, synthetic construct
  source 1..21: mol_type = other RNA
gtaaagtcactgtggaaaaca

SEQ ID NO: 93195 - RNA, 21 nt, synthetic construct
  source 1..21: mol_type = other RNA
gtaaagtttctctctccctgc

SEQ ID NO: 93196 - RNA, 21 nt, synthetic construct
  source 1..21: mol_type = other RNA
gtaaatatactgactagtggc

SEQ ID NO: 93197 - RNA, 21 nt, synthetic construct
  source 1..21: mol_type = other RNA
gtaaatatccgaaagaactga

SEQ ID NO: 93198 - RNA, 21 nt, synthetic construct
  source 1..21: mol_type = other RNA
gtaaatatttaacaccatggc

SEQ ID NO: 93199 - RNA, 21 nt, synthetic construct
  source 1..21: mol_type = other RNA
gtaaatcagactgtattacca

SEQ ID NO: 93200 - RNA, 21 nt, synthetic construct
  source 1..21: mol_type = other RNA
gtaaatcccggccaggtgcgg

SEQ ID NO: 93201 - RNA, 21 nt, synthetic construct
  source 1..21: mol_type = other RNA
gtaaatctttggtgaaggttc

SEQ ID NO: 93202 - RNA, 21 nt, synthetic construct
  source 1..21: mol_type = other RNA
gtaaatgaaacacttgtgtaa

SEQ ID NO: 93203 - RNA, 21 nt, synthetic construct
  source 1..21: mol_type = other RNA
gtaaatgaaatttgaggccct

SEQ ID NO: 93204 - RNA, 21 nt, synthetic construct
  source 1..21: mol_type = other RNA
gtaaatgcaatgcaggcgcct

SEQ ID NO: 93205 - RNA, 21 nt, synthetic construct
  source 1..21: mol_type = other RNA
gtaaatggtttctccttctgc

SEQ ID NO: 93206 - RNA, 21 nt, synthetic construct
  source 1..21: mol_type = other RNA
gtaaattcctaactcaagagt

SEQ ID NO: 93207 - RNA, 21 nt, synthetic construct
  source 1..21: mol_type = other RNA
gtaaattcgcataaccaaatt

SEQ ID NO: 93208 - RNA, 21 nt, synthetic construct
  source 1..21: mol_type = other RNA
gtaaattctgccacattcaac

SEQ ID NO: 93209 - RNA, 21 nt, synthetic construct
  source 1..21: mol_type = other RNA
gtaaattggtcctggaaaaag

SEQ ID NO: 93210 - RNA, 21 nt, synthetic construct
  source 1..21: mol_type = other RNA
gtaaatttctaaaaacgtgca

SEQ ID NO: 93211 - RNA, 21 nt, synthetic construct
  source 1..21: mol_type = other RNA
gtaacaaagatgccacaaatg

SEQ ID NO: 93212 - RNA, 21 nt, synthetic construct
  source 1..21: mol_type = other RNA
gtaacaaataagaagattgag

SEQ ID NO: 93213 - RNA, 21 nt, synthetic construct
  source 1..21: mol_type = other RNA
gtaacacagttctagttctaa

SEQ ID NO: 93214 - RNA, 21 nt, synthetic construct
  source 1..21: mol_type = other RNA
gtaacacatatttatcaacac

SEQ ID NO: 93215 - RNA, 21 nt, synthetic construct
  source 1..21: mol_type = other RNA
gtaacactcagaagtactact

SEQ ID NO: 93216 - RNA, 21 nt, synthetic construct
  source 1..21: mol_type = other RNA
gtaacagacctctgaagagtc

SEQ ID NO: 93217 - RNA, 21 nt, synthetic construct
  source 1..21: mol_type = other RNA
gtaacagaggcatgcacggac

SEQ ID NO: 93218 - RNA, 21 nt, synthetic construct
  source 1..21: mol_type = other RNA
gtaacagccaaataaaacaca

SEQ ID NO: 93219 - RNA, 21 nt, synthetic construct
  source 1..21: mol_type = other RNA
gtaacagttcaatactactgc

SEQ ID NO: 93220 - RNA, 21 nt, synthetic construct
  source 1..21: mol_type = other RNA
gtaacatacacatcagatttt

SEQ ID NO: 93221 - RNA, 21 nt, synthetic construct
  source 1..21: mol_type = other RNA
gtaacatgtggaacataatct

SEQ ID NO: 93222 - RNA, 21 nt, synthetic construct
  source 1..21: mol_type = other RNA
gtaacatgttagattaggaaa

SEQ ID NO: 93223 - RNA, 21 nt, synthetic construct
  source 1..21: mol_type = other RNA
gtaacattacaacagcaaggc

SEQ ID NO: 93224 - RNA, 21 nt, synthetic construct
  source 1..21: mol_type = other RNA
gtaaccctgtttcccttaatg

SEQ ID NO: 93225 - RNA, 21 nt, synthetic construct
  source 1..21: mol_type = other RNA
gtaacctaaagttgaggttga

SEQ ID NO: 93226 - RNA, 21 nt, synthetic construct
  source 1..21: mol_type = other RNA
gtaacctccacctcccagatt

SEQ ID NO: 93227 - RNA, 21 nt, synthetic construct
  source 1..21: mol_type = other RNA
gtaacgtgagctggaagtaag

SEQ ID NO: 93228 - RNA, 21 nt, synthetic construct
  source 1..21: mol_type = other RNA
gtaactacagacatgccacac

SEQ ID NO: 93229 - RNA, 21 nt, synthetic construct
  source 1..21: mol_type = other RNA
gtaactaccactgaggtcaag

SEQ ID NO: 93230 - RNA, 21 nt, synthetic construct
  source 1..21: mol_type = other RNA
gtaactagatgcctcgaaggc

SEQ ID NO: 93231 - RNA, 21 nt, synthetic construct
  source 1..21: mol_type = other RNA
gtaactccatcttcacgtggc

SEQ ID NO: 93232 - RNA, 21 nt, synthetic construct
  source 1..21: mol_type = other RNA
gtaactcctgttctttggagc

SEQ ID NO: 93233 - RNA, 21 nt, synthetic construct
  source 1..21: mol_type = other RNA
gtaactcttgagttaggaatt

SEQ ID NO: 93234 - RNA, 21 nt, synthetic construct
  source 1..21: mol_type = other RNA
gtaactgacttcaagaggtta

SEQ ID NO: 93235 - RNA, 21 nt, synthetic construct
  source 1..21: mol_type = other RNA
gtaactgatgtgaggatctgt

SEQ ID NO: 93236 - RNA, 21 nt, synthetic construct
  source 1..21: mol_type = other RNA
gtaactgctcctctgacttta

SEQ ID NO: 93237 - RNA, 21 nt, synthetic construct
  source 1..21: mol_type = other RNA
gtaactggtccagatgaagca

SEQ ID NO: 93238 - RNA, 21 nt, synthetic construct
  source 1..21: mol_type = other RNA
gtaactgtcatcagcgtcctc

SEQ ID NO: 93239 - RNA, 21 nt, synthetic construct
  source 1..21: mol_type = other RNA
gtaactgttggcaaggatgtg

SEQ ID NO: 93240 - RNA, 21 nt, synthetic construct
  source 1..21: mol_type = other RNA
gtaacttgaattcagatggcc

SEQ ID NO: 93241 - RNA, 21 nt, synthetic construct
  source 1..21: mol_type = other RNA
gtaacttgcttaggctgaagc

SEQ ID NO: 93242 - RNA, 21 nt, synthetic construct
  source 1..21: mol_type = other RNA
gtaacttggtcgaaaacctga

SEQ ID NO: 93243 - RNA, 21 nt, synthetic construct
  source 1..21: mol_type = other RNA
gtaacttgttcatgtttacag

SEQ ID NO: 93244 - RNA, 21 nt, synthetic construct
  source 1..21: mol_type = other RNA
gtaactttctgcttaaagcct

SEQ ID NO: 93245 - RNA, 21 nt, synthetic construct
  source 1..21: mol_type = other RNA
gtaagaaaaattccctcagca

SEQ ID NO: 93246 - RNA, 21 nt, synthetic construct
  source 1..21: mol_type = other RNA
gtaagaaaacagataacctag

SEQ ID NO: 93247 - RNA, 21 nt, synthetic construct
  source 1..21: mol_type = other RNA
gtaagaaaggagttcagcttt

SEQ ID NO: 93248 - RNA, 21 nt, synthetic construct
  source 1..21: mol_type = other RNA
gtaagaaatgccacatttttt

SEQ ID NO: 93249 - RNA, 21 nt, synthetic construct
  source 1..21: mol_type = other RNA
gtaagaacacttaacatgaga

SEQ ID NO: 93250 - RNA, 21 nt, synthetic construct
  source 1..21: mol_type = other RNA
gtaagaacttgtctttgtcta

SEQ ID NO: 93251 - RNA, 21 nt, synthetic construct
  source 1..21: mol_type = other RNA
gtaagaatgtcaagctgtttg

SEQ ID NO: 93252 - RNA, 21 nt, synthetic construct
  source 1..21: mol_type = other RNA
gtaagacaatgtctttggctc

SEQ ID NO: 93253 - RNA, 21 nt, synthetic construct
  source 1..21: mol_type = other RNA
gtaagaccaaaatggagaccc

SEQ ID NO: 93254 - RNA, 21 nt, synthetic construct
  source 1..21: mol_type = other RNA
gtaagagattaattcagtcaa

SEQ ID NO: 93255 - RNA, 21 nt, synthetic construct
  source 1..21: mol_type = other RNA
gtaagaggtatcaccatctga

SEQ ID NO: 93256 - RNA, 21 nt, synthetic construct
  source 1..21: mol_type = other RNA
gtaagatcctggattgctagt

SEQ ID NO: 93257 - RNA, 21 nt, synthetic construct
  source 1..21: mol_type = other RNA
gtaagattccgtctcaaaaaa

SEQ ID NO: 93258 - RNA, 21 nt, synthetic construct
  source 1..21: mol_type = other RNA
gtaagattctgtctctacaaa

SEQ ID NO: 93259 - RNA, 21 nt, synthetic construct
  source 1..21: mol_type = other RNA
gtaagattgtggtccagaaaa

SEQ ID NO: 93260 - RNA, 21 nt, synthetic construct
  source 1..21: mol_type = other RNA
gtaagcaactgcatcttcttt

SEQ ID NO: 93261 - RNA, 21 nt, synthetic construct
  source 1..21: mol_type = other RNA
gtaagcacacatgaacctgca

SEQ ID NO: 93262 - RNA, 21 nt, synthetic construct
  source 1..21: mol_type = other RNA
gtaagcacctgtataaataaa

SEQ ID NO: 93263 - RNA, 21 nt, synthetic construct
  source 1..21: mol_type = other RNA
gtaagctgaactctgtggagt

SEQ ID NO: 93264 - RNA, 21 nt, synthetic construct
  source 1..21: mol_type = other RNA
gtaagctggtaatacagtctg

SEQ ID NO: 93265 - RNA, 21 nt, synthetic construct
  source 1..21: mol_type = other RNA
gtaagctgtgagtccttccag

SEQ ID NO: 93266 - RNA, 21 nt, synthetic construct
  source 1..21: mol_type = other RNA
gtaaggaaacagagttttcca

SEQ ID NO: 93267 - RNA, 21 nt, synthetic construct
  source 1..21: mol_type = other RNA
gtaaggaaaccccagggatat

SEQ ID NO: 93268 - RNA, 21 nt, synthetic construct
  source 1..21: mol_type = other RNA
gtaaggactgaagtcctttct

SEQ ID NO: 93269 - RNA, 21 nt, synthetic construct
  source 1..21: mol_type = other RNA
gtaaggagccaaacatcatga

SEQ ID NO: 93270 - RNA, 21 nt, synthetic construct
  source 1..21: mol_type = other RNA
gtaaggatcgttagtattttc

SEQ ID NO: 93271 - RNA, 21 nt, synthetic construct
  source 1..21: mol_type = other RNA
gtaagggtaaacagaattaaa

SEQ ID NO: 93272 - RNA, 21 nt, synthetic construct
  source 1..21: mol_type = other RNA
gtaagggtacagaactgctaa

SEQ ID NO: 93273 - RNA, 21 nt, synthetic construct
  source 1..21: mol_type = other RNA
gtaagggtccagcttcactct

SEQ ID NO: 93274 - RNA, 21 nt, synthetic construct
  source 1..21: mol_type = other RNA
gtaaggtgcacgctgtgaatg

SEQ ID NO: 93275 - RNA, 21 nt, synthetic construct
  source 1..21: mol_type = other RNA
gtaaggtgtttggtgaatttt

SEQ ID NO: 93276 - RNA, 21 nt, synthetic construct
  source 1..21: mol_type = other RNA
gtaaggtttccctggggaata

SEQ ID NO: 93277 - RNA, 21 nt, synthetic construct
  source 1..21: mol_type = other RNA
gtaagtaaaatcggaacaggc

SEQ ID NO: 93278 - RNA, 21 nt, synthetic construct
  source 1..21: mol_type = other RNA
gtaagtcagttaacagtgctg

SEQ ID NO: 93279 - RNA, 21 nt, synthetic construct
  source 1..21: mol_type = other RNA
gtaagtcatcaaaggaaggaa

SEQ ID NO: 93280 - RNA, 21 nt, synthetic construct
  source 1..21: mol_type = other RNA
gtaagtgggaggaggtcatac

SEQ ID NO: 93281 - RNA, 21 nt, synthetic construct
  source 1..21: mol_type = other RNA
gtaagtgtgagcaaaaataca

SEQ ID NO: 93282 - RNA, 21 nt, synthetic construct
  source 1..21: mol_type = other RNA
gtaagttcctggactgtgatg

SEQ ID NO: 93283 - RNA, 21 nt, synthetic construct
  source 1..21: mol_type = other RNA
gtaagttgcatacgtcgtccc

SEQ ID NO: 93284 - RNA, 21 nt, synthetic construct
  source 1..21: mol_type = other RNA
gtaagttggattcccaggtat

SEQ ID NO: 93285 - RNA, 21 nt, synthetic construct
  source 1..21: mol_type = other RNA
gtaagttgtgtcatttttgta

SEQ ID NO: 93286 - RNA, 21 nt, synthetic construct
  source 1..21: mol_type = other RNA
gtaataaagcaagtatgagcc

SEQ ID NO: 93287 - RNA, 21 nt, synthetic construct
  source 1..21: mol_type = other RNA
gtaataaaggcaatgctctct

SEQ ID NO: 93288 - RNA, 21 nt, synthetic construct
  source 1..21: mol_type = other RNA
gtaataacttggagaacttaa

SEQ ID NO: 93289 - RNA, 21 nt, synthetic construct
  source 1..21: mol_type = other RNA
gtaataatgaaagctcccaat

SEQ ID NO: 93290 - RNA, 21 nt, synthetic construct
  source 1..21: mol_type = other RNA
gtaatacagtctgatttactt

SEQ ID NO: 93291 - RNA, 21 nt, synthetic construct
  source 1..21: mol_type = other RNA
gtaatactctagtggtgctta

SEQ ID NO: 93292 - RNA, 21 nt, synthetic construct
  source 1..21: mol_type = other RNA
gtaatatacttgtcaagttct

SEQ ID NO: 93293 - RNA, 21 nt, synthetic construct
  source 1..21: mol_type = other RNA
gtaatattaaccaagaacaac

SEQ ID NO: 93294 - RNA, 21 nt, synthetic construct
  source 1..21: mol_type = other RNA
gtaatattgtatatacccttc

SEQ ID NO: 93295 - RNA, 21 nt, synthetic construct
  source 1..21: mol_type = other RNA
gtaatcaaaaacctcccaaca

SEQ ID NO: 93296 - RNA, 21 nt, synthetic construct
  source 1..21: mol_type = other RNA
gtaatcaaacagtgtgatatt

SEQ ID NO: 93297 - RNA, 21 nt, synthetic construct
  source 1..21: mol_type = other RNA
gtaatcaagtatctccctgtg

SEQ ID NO: 93298 - RNA, 21 nt, synthetic construct
  source 1..21: mol_type = other RNA
gtaatcaagtgaaatgatctt

SEQ ID NO: 93299 - RNA, 21 nt, synthetic construct
  source 1..21: mol_type = other RNA
gtaatcacagtacgcttttat

SEQ ID NO: 93300 - RNA, 21 nt, synthetic construct
  source 1..21: mol_type = other RNA
gtaatcctgtttctctacatc

SEQ ID NO: 93301 - RNA, 21 nt, synthetic construct
  source 1..21: mol_type = other RNA
gtaatctaaggattatggcta

SEQ ID NO: 93302 - RNA, 21 nt, synthetic construct
  source 1..21: mol_type = other RNA
gtaatctcatggaagttattt

SEQ ID NO: 93303 - RNA, 21 nt, synthetic construct
  source 1..21: mol_type = other RNA
gtaatcttgctaaacatgtat

SEQ ID NO: 93304 - RNA, 21 nt, synthetic construct
  source 1..21: mol_type = other RNA
gtaatgaaaattagctggatg

SEQ ID NO: 93305 - RNA, 21 nt, synthetic construct
  source 1..21: mol_type = other RNA
gtaatgacctggaaattattc

SEQ ID NO: 93306 - RNA, 21 nt, synthetic construct
  source 1..21: mol_type = other RNA
gtaatgagctgagattgcccc

SEQ ID NO: 93307 - RNA, 21 nt, synthetic construct
  source 1..21: mol_type = other RNA
gtaatgcgatgatcaaaacca

SEQ ID NO: 93308 - RNA, 21 nt, synthetic construct
  source 1..21: mol_type = other RNA
gtaatgctggccagtgagttc

SEQ ID NO: 93309 - RNA, 21 nt, synthetic construct
  source 1..21: mol_type = other RNA
gtaatgctggcttcatgggtg

SEQ ID NO: 93310 - RNA, 21 nt, synthetic construct
  source 1..21: mol_type = other RNA
gtaatggatcaaggcacagtc

SEQ ID NO: 93311 - RNA, 21 nt, synthetic construct
  source 1..21: mol_type = other RNA
gtaatggatgtttttagagag

SEQ ID NO: 93312 - RNA, 21 nt, synthetic construct
  source 1..21: mol_type = other RNA
gtaatgggaaagacaggtaga

SEQ ID NO: 93313 - RNA, 21 nt, synthetic construct
  source 1..21: mol_type = other RNA
gtaatggttggccgaggccag

SEQ ID NO: 93314 - RNA, 21 nt, synthetic construct
  source 1..21: mol_type = other RNA
gtaatgtctcctctttcatat

SEQ ID NO: 93315 - RNA, 21 nt, synthetic construct
  source 1..21: mol_type = other RNA
gtaatgttacttctcagctat

SEQ ID NO: 93316 - RNA, 21 nt, synthetic construct
  source 1..21: mol_type = other RNA
gtaatgttatatttccgtatc

SEQ ID NO: 93317 - RNA, 21 nt, synthetic construct
  source 1..21: mol_type = other RNA
gtaatgtttgtacttctacct

SEQ ID NO: 93318 - RNA, 21 nt, synthetic construct
  source 1..21: mol_type = other RNA
gtaattacaggggactttgat

SEQ ID NO: 93319 - RNA, 21 nt, synthetic construct
  source 1..21: mol_type = other RNA
gtaattacatacttcaaaggg

SEQ ID NO: 93320 - RNA, 21 nt, synthetic construct
  source 1..21: mol_type = other RNA
gtaattagttacatgaggtca

SEQ ID NO: 93321 - RNA, 21 nt, synthetic construct
  source 1..21: mol_type = other RNA
gtaattcatcctactagtatt

SEQ ID NO: 93322 - RNA, 21 nt, synthetic construct
  source 1..21: mol_type = other RNA
gtaattctccactttcatgat

SEQ ID NO: 93323 - RNA, 21 nt, synthetic construct
  source 1..21: mol_type = other RNA
gtaattctgcagtgaacatgg

SEQ ID NO: 93324 - RNA, 21 nt, synthetic construct
  source 1..21: mol_type = other RNA
gtaattgggatctgataaatt

SEQ ID NO: 93325 - RNA, 21 nt, synthetic construct
  source 1..21: mol_type = other RNA
gtaattggttcgtttgaggct

SEQ ID NO: 93326 - RNA, 21 nt, synthetic construct
  source 1..21: mol_type = other RNA
gtaattgtaccttggagagaa

SEQ ID NO: 93327 - RNA, 21 nt, synthetic construct
  source 1..21: mol_type = other RNA
gtaattgtagtttccatggag

SEQ ID NO: 93328 - RNA, 21 nt, synthetic construct
  source 1..21: mol_type = other RNA
gtaattgttttcccttttgta

SEQ ID NO: 93329 - RNA, 21 nt, synthetic construct
  source 1..21: mol_type = other RNA
gtaatttatctccataagtcc

SEQ ID NO: 93330 - RNA, 21 nt, synthetic construct
  source 1..21: mol_type = other RNA
gtaatttgtccatctggatta

SEQ ID NO: 93331 - RNA, 21 nt, synthetic construct
  source 1..21: mol_type = other RNA
gtaattttggggccatctgaa

SEQ ID NO: 93332 - RNA, 21 nt, synthetic construct
  source 1..21: mol_type = other RNA
gtaatttttaaaagagcgaag

SEQ ID NO: 93333 - RNA, 21 nt, synthetic construct
  source 1..21: mol_type = other RNA
gtacaaaagtgctgttgaggc

SEQ ID NO: 93334 - RNA, 21 nt, synthetic construct
  source 1..21: mol_type = other RNA
gtacaaagatttacccctact

SEQ ID NO: 93335 - RNA, 21 nt, synthetic construct
  source 1..21: mol_type = other RNA
gtacaacattcatccctctaa

SEQ ID NO: 93336 - RNA, 21 nt, synthetic construct
  source 1..21: mol_type = other RNA
gtacaaggctagagctcacac

SEQ ID NO: 93337 - RNA, 21 nt, synthetic construct
  source 1..21: mol_type = other RNA
gtacaatgaattagcaatgcg

SEQ ID NO: 93338 - RNA, 21 nt, synthetic construct
  source 1..21: mol_type = other RNA
gtacaatggggctttactgta

SEQ ID NO: 93339 - RNA, 21 nt, synthetic construct
  source 1..21: mol_type = other RNA
gtacaattacacatctcccat

SEQ ID NO: 93340 - RNA, 21 nt, synthetic construct
  source 1..21: mol_type = other RNA
gtacaattaggctgtttgaga

SEQ ID NO: 93341 - RNA, 21 nt, synthetic construct
  source 1..21: mol_type = other RNA
gtacaattcggtggcattaag

SEQ ID NO: 93342 - RNA, 21 nt, synthetic construct
  source 1..21: mol_type = other RNA
gtacaattttcttacccttta

SEQ ID NO: 93343 - RNA, 21 nt, synthetic construct
  source 1..21: mol_type = other RNA
gtacacatcctaatacagtaa

SEQ ID NO: 93344 - RNA, 21 nt, synthetic construct
  source 1..21: mol_type = other RNA
gtacacctcaaactagaaaaa

SEQ ID NO: 93345 - RNA, 21 nt, synthetic construct
  source 1..21: mol_type = other RNA
gtacacgaaaatatccctggg

SEQ ID NO: 93346 - RNA, 21 nt, synthetic construct
  source 1..21: mol_type = other RNA
gtacacgtcttgtcaataatt

SEQ ID NO: 93347 - RNA, 21 nt, synthetic construct
  source 1..21: mol_type = other RNA
gtacactgttgatttagaaat

SEQ ID NO: 93348 - RNA, 21 nt, synthetic construct
  source 1..21: mol_type = other RNA
gtacagaactgctaatggtcc

SEQ ID NO: 93349 - RNA, 21 nt, synthetic construct
  source 1..21: mol_type = other RNA
gtacagataaccaataagaag

SEQ ID NO: 93350 - RNA, 21 nt, synthetic construct
  source 1..21: mol_type = other RNA
gtacagccatcaacctaatga

SEQ ID NO: 93351 - RNA, 21 nt, synthetic construct
  source 1..21: mol_type = other RNA
gtacagggtttctgtttggat

SEQ ID NO: 93352 - RNA, 21 nt, synthetic construct
  source 1..21: mol_type = other RNA
gtacagtaattgtagtttcca

SEQ ID NO: 93353 - RNA, 21 nt, synthetic construct
  source 1..21: mol_type = other RNA
gtacagtagtaaaaccaaatg

SEQ ID NO: 93354 - RNA, 21 nt, synthetic construct
  source 1..21: mol_type = other RNA
gtacagtgagtagaagagtaa

SEQ ID NO: 93355 - RNA, 21 nt, synthetic construct
  source 1..21: mol_type = other RNA
gtacagtgcataccaccacat

SEQ ID NO: 93356 - RNA, 21 nt, synthetic construct
  source 1..21: mol_type = other RNA
gtacagtggcacgattttggc

SEQ ID NO: 93357 - RNA, 21 nt, synthetic construct
  source 1..21: mol_type = other RNA
gtacatctcaattcagaagct

SEQ ID NO: 93358 - RNA, 21 nt, synthetic construct
  source 1..21: mol_type = other RNA
gtacatgaaatactcaaacta

SEQ ID NO: 93359 - RNA, 21 nt, synthetic construct
  source 1..21: mol_type = other RNA
gtacatgaagtcctcaatcat

SEQ ID NO: 93360 - RNA, 21 nt, synthetic construct
  source 1..21: mol_type = other RNA
gtacatgacctatctattaac

SEQ ID NO: 93361 - RNA, 21 nt, synthetic construct
  source 1..21: mol_type = other RNA
gtacatgtagatatgggagtc

SEQ ID NO: 93362 - RNA, 21 nt, synthetic construct
  source 1..21: mol_type = other RNA
gtacatttaaaattgcagagt

SEQ ID NO: 93363 - RNA, 21 nt, synthetic construct
  source 1..21: mol_type = other RNA
gtacattttaccatatacaca

SEQ ID NO: 93364 - RNA, 21 nt, synthetic construct
  source 1..21: mol_type = other RNA
gtaccaaaagtcctgttcttt

SEQ ID NO: 93365 - RNA, 21 nt, synthetic construct
  source 1..21: mol_type = other RNA
gtaccaaagcagaaatacaga

SEQ ID NO: 93366 - RNA, 21 nt, synthetic construct
  source 1..21: mol_type = other RNA
gtaccaggtcagccagaggaa

SEQ ID NO: 93367 - RNA, 21 nt, synthetic construct
  source 1..21: mol_type = other RNA
gtaccattccccttgccaagg

SEQ ID NO: 93368 - RNA, 21 nt, synthetic construct
  source 1..21: mol_type = other RNA
gtacccaatggattataaatc

SEQ ID NO: 93369 - RNA, 21 nt, synthetic construct
  source 1..21: mol_type = other RNA
gtacccattagacactaactt

SEQ ID NO: 93370 - RNA, 21 nt, synthetic construct
  source 1..21: mol_type = other RNA
gtacccgtgtgttttgttgtt

SEQ ID NO: 93371 - RNA, 21 nt, synthetic construct
  source 1..21: mol_type = other RNA
gtacccttacgcgtggatgtg

SEQ ID NO: 93372 - RNA, 21 nt, synthetic construct
  source 1..21: mol_type = other RNA
gtacctctgggatgctcagtt

SEQ ID NO: 93373 - RNA, 21 nt, synthetic construct
  source 1..21: mol_type = other RNA
gtaccttgatttatggcctaa

SEQ ID NO: 93374 - RNA, 21 nt, synthetic construct
  source 1..21: mol_type = other RNA
gtaccttggagagaaaccttg

SEQ ID NO: 93375 - RNA, 21 nt, synthetic construct
  source 1..21: mol_type = other RNA
gtacctttcgctatcagtagt

SEQ ID NO: 93376 - RNA, 21 nt, synthetic construct
  source 1..21: mol_type = other RNA
gtacgacgctcttgttcaaaa

SEQ ID NO: 93377 - RNA, 21 nt, synthetic construct
  source 1..21: mol_type = other RNA
gtacgccaattttcatagcag

SEQ ID NO: 93378 - RNA, 21 nt, synthetic construct
  source 1..21: mol_type = other RNA
gtacgctccctcgcgcggcac

SEQ ID NO: 93379 - RNA, 21 nt, synthetic construct
  source 1..21: mol_type = other RNA
gtacgcttttatgttataatg

SEQ ID NO: 93380 - RNA, 21 nt, synthetic construct
  source 1..21: mol_type = other RNA
gtacgtaacctaaagttgagg

SEQ ID NO: 93381 - RNA, 21 nt, synthetic construct
  source 1..21: mol_type = other RNA
gtacgtgcagagcaggggtgg

SEQ ID NO: 93382 - RNA, 21 nt, synthetic construct
  source 1..21: mol_type = other RNA
gtactaagcctatgtaagaca

SEQ ID NO: 93383 - RNA, 21 nt, synthetic construct
  source 1..21: mol_type = other RNA
gtactacctatagaattcttc

SEQ ID NO: 93384 - RNA, 21 nt, synthetic construct
  source 1..21: mol_type = other RNA
gtactactgacctgggagaaa

SEQ ID NO: 93385 - RNA, 21 nt, synthetic construct
  source 1..21: mol_type = other RNA
gtactacttgtcaggtgggca

SEQ ID NO: 93386 - RNA, 21 nt, synthetic construct
  source 1..21: mol_type = other RNA
gtactaggtatcacagtgagg

SEQ ID NO: 93387 - RNA, 21 nt, synthetic construct
  source 1..21: mol_type = other RNA
gtactagtcagcacactctta

SEQ ID NO: 93388 - RNA, 21 nt, synthetic construct
  source 1..21: mol_type = other RNA
gtactagtctccatacaagga

SEQ ID NO: 93389 - RNA, 21 nt, synthetic construct
  source 1..21: mol_type = other RNA
gtactatcttccctaaagaga

SEQ ID NO: 93390 - RNA, 21 nt, synthetic construct
  source 1..21: mol_type = other RNA
gtactatgcagcaacggaaat

SEQ ID NO: 93391 - RNA, 21 nt, synthetic construct
  source 1..21: mol_type = other RNA
gtactcaacgacaatctctgg

SEQ ID NO: 93392 - RNA, 21 nt, synthetic construct
  source 1..21: mol_type = other RNA
gtactcccagcctcaaacaat

SEQ ID NO: 93393 - RNA, 21 nt, synthetic construct
  source 1..21: mol_type = other RNA
gtactgaaaccagtgctctcc

SEQ ID NO: 93394 - RNA, 21 nt, synthetic construct
  source 1..21: mol_type = other RNA
gtactgaccatctcagcacag

SEQ ID NO: 93395 - RNA, 21 nt, synthetic construct
  source 1..21: mol_type = other RNA
gtactgagtcaaaaccaaaga

SEQ ID NO: 93396 - RNA, 21 nt, synthetic construct
  source 1..21: mol_type = other RNA
gtactgcatgattccccttat

SEQ ID NO: 93397 - RNA, 21 nt, synthetic construct
  source 1..21: mol_type = other RNA
gtactgcctccacaggctttg

SEQ ID NO: 93398 - RNA, 21 nt, synthetic construct
  source 1..21: mol_type = other RNA
gtactggaaatggacagcggg

SEQ ID NO: 93399 - RNA, 21 nt, synthetic construct
  source 1..21: mol_type = other RNA
gtactggaagtgtaacataca

SEQ ID NO: 93400 - RNA, 21 nt, synthetic construct
  source 1..21: mol_type = other RNA
gtactggtaccaaagcagaaa

SEQ ID NO: 93401 - RNA, 21 nt, synthetic construct
  source 1..21: mol_type = other RNA
gtactgtgattacaattcctt

SEQ ID NO: 93402 - RNA, 21 nt, synthetic construct
  source 1..21: mol_type = other RNA
gtactgtgtggcttctcaaac

SEQ ID NO: 93403 - RNA, 21 nt, synthetic construct
  source 1..21: mol_type = other RNA
gtactgtttagcatctagcac

SEQ ID NO: 93404 - RNA, 21 nt, synthetic construct
  source 1..21: mol_type = other RNA
gtacttcaaggttcacaaatt

SEQ ID NO: 93405 - RNA, 21 nt, synthetic construct
  source 1..21: mol_type = other RNA
gtacttcagcgcttgaacaaa

SEQ ID NO: 93406 - RNA, 21 nt, synthetic construct
  source 1..21: mol_type = other RNA
gtacttccctctttctcaact

SEQ ID NO: 93407 - RNA, 21 nt, synthetic construct
  source 1..21: mol_type = other RNA
gtacttctaccttgaaaatgc

SEQ ID NO: 93408 - RNA, 21 nt, synthetic construct
  source 1..21: mol_type = other RNA
gtacttctgagtgttacttga

SEQ ID NO: 93409 - RNA, 21 nt, synthetic construct
  source 1..21: mol_type = other RNA
gtacttgacacaaaggactgg

SEQ ID NO: 93410 - RNA, 21 nt, synthetic construct
  source 1..21: mol_type = other RNA
gtacttgtctttttgtgactt

SEQ ID NO: 93411 - RNA, 21 nt, synthetic construct
  source 1..21: mol_type = other RNA
gtactttttcatccaaacaga

SEQ ID NO: 93412 - RNA, 21 nt, synthetic construct
  source 1..21: mol_type = other RNA
gtagaaaatagggacggcctt

SEQ ID NO: 93413 - RNA, 21 nt, synthetic construct
  source 1..21: mol_type = other RNA
gtagaaacatcccaagtgccc

SEQ ID NO: 93414 - RNA, 21 nt, synthetic construct
  source 1..21: mol_type = other RNA
gtagaaagcaggttcatttta

SEQ ID NO: 93415 - RNA, 21 nt, synthetic construct
  source 1..21: mol_type = other RNA
gtagaaatcttccagaaggag

SEQ ID NO: 93416 - RNA, 21 nt, synthetic construct
  source 1..21: mol_type = other RNA
gtagaaatgtggagataaaga

SEQ ID NO: 93417 - RNA, 21 nt, synthetic construct
  source 1..21: mol_type = other RNA
gtagaagactcagcagtttta

SEQ ID NO: 93418 - RNA, 21 nt, synthetic construct
  source 1..21: mol_type = other RNA
gtagaagagtaatggttggcc

SEQ ID NO: 93419 - RNA, 21 nt, synthetic construct
  source 1..21: mol_type = other RNA
gtagaagcagcaagggtggct

SEQ ID NO: 93420 - RNA, 21 nt, synthetic construct
  source 1..21: mol_type = other RNA
gtagaaggatatgttttctaa

SEQ ID NO: 93421 - RNA, 21 nt, synthetic construct
  source 1..21: mol_type = other RNA
gtagaaggccctatgccttca

SEQ ID NO: 93422 - RNA, 21 nt, synthetic construct
  source 1..21: mol_type = other RNA
gtagaaggtcaatctaggagg

SEQ ID NO: 93423 - RNA, 21 nt, synthetic construct
  source 1..21: mol_type = other RNA
gtagaagtacaaacattacag

SEQ ID NO: 93424 - RNA, 21 nt, synthetic construct
  source 1..21: mol_type = other RNA
gtagaatatccaagcacaaac

SEQ ID NO: 93425 - RNA, 21 nt, synthetic construct
  source 1..21: mol_type = other RNA
gtagaatgtttttccgtctag

SEQ ID NO: 93426 - RNA, 21 nt, synthetic construct
  source 1..21: mol_type = other RNA
gtagacatgagtaaaaagaaa

SEQ ID NO: 93427 - RNA, 21 nt, synthetic construct
  source 1..21: mol_type = other RNA
gtagaccatataatctaaccc

SEQ ID NO: 93428 - RNA, 21 nt, synthetic construct
  source 1..21: mol_type = other RNA
gtagaccctgttagtccccta

SEQ ID NO: 93429 - RNA, 21 nt, synthetic construct
  source 1..21: mol_type = other RNA
gtagaccgaggaaacccgctc

SEQ ID NO: 93430 - RNA, 21 nt, synthetic construct
  source 1..21: mol_type = other RNA
gtagactgtaaaaattttctc

SEQ ID NO: 93431 - RNA, 21 nt, synthetic construct
  source 1..21: mol_type = other RNA
gtagagaaaatgttatacagc

SEQ ID NO: 93432 - RNA, 21 nt, synthetic construct
  source 1..21: mol_type = other RNA
gtagagaaacaggattacaat

SEQ ID NO: 93433 - RNA, 21 nt, synthetic construct
  source 1..21: mol_type = other RNA
gtagagaaggctttgtgttgg

SEQ ID NO: 93434 - RNA, 21 nt, synthetic construct
  source 1..21: mol_type = other RNA
gtagagacagaatcttactgg

SEQ ID NO: 93435 - RNA, 21 nt, synthetic construct
  source 1..21: mol_type = other RNA
gtagagactggatcctggagg

SEQ ID NO: 93436 - RNA, 21 nt, synthetic construct
  source 1..21: mol_type = other RNA
gtagagatgaggttttacgat

SEQ ID NO: 93437 - RNA, 21 nt, synthetic construct
  source 1..21: mol_type = other RNA
gtagagcaagcaacaccagat

SEQ ID NO: 93438 - RNA, 21 nt, synthetic construct
  source 1..21: mol_type = other RNA
gtagagcactttcgtattttt

SEQ ID NO: 93439 - RNA, 21 nt, synthetic construct
  source 1..21: mol_type = other RNA
gtagaggactgcctattttgt

SEQ ID NO: 93440 - RNA, 21 nt, synthetic construct
  source 1..21: mol_type = other RNA
gtagaggaggagggttagatt

SEQ ID NO: 93441 - RNA, 21 nt, synthetic construct
  source 1..21: mol_type = other RNA
gtagaggattccaggtttaca

SEQ ID NO: 93442 - RNA, 21 nt, synthetic construct
  source 1..21: mol_type = other RNA
gtagaggcagttgagttttca

SEQ ID NO: 93443 - RNA, 21 nt, synthetic construct
  source 1..21: mol_type = other RNA
gtagaggccgagggttgaaca

SEQ ID NO: 93444 - RNA, 21 nt, synthetic construct
  source 1..21: mol_type = other RNA
gtagagggaatttgttttacc

SEQ ID NO: 93445 - RNA, 21 nt, synthetic construct
  source 1..21: mol_type = other RNA
gtagaggtgaagttaagggcc

SEQ ID NO: 93446 - RNA, 21 nt, synthetic construct
  source 1..21: mol_type = other RNA
gtagataccagaccctttatc

SEQ ID NO: 93447 - RNA, 21 nt, synthetic construct
  source 1..21: mol_type = other RNA
gtagatatgggagtccctgct

SEQ ID NO: 93448 - RNA, 21 nt, synthetic construct
  source 1..21: mol_type = other RNA
gtagatattttctgtcattct

SEQ ID NO: 93449 - RNA, 21 nt, synthetic construct
  source 1..21: mol_type = other RNA
gtagatcaagtatttcctatg

SEQ ID NO: 93450 - RNA, 21 nt, synthetic construct
  source 1..21: mol_type = other RNA
gtagatcctgaggaagctaat

SEQ ID NO: 93451 - RNA, 21 nt, synthetic construct
  source 1..21: mol_type = other RNA
gtagattagcttttacgagga

SEQ ID NO: 93452 - RNA, 21 nt, synthetic construct
  source 1..21: mol_type = other RNA
gtagattcccccttatgtgtg

SEQ ID NO: 93453 - RNA, 21 nt, synthetic construct
  source 1..21: mol_type = other RNA
gtagattgggcttttcatata

SEQ ID NO: 93454 - RNA, 21 nt, synthetic construct
  source 1..21: mol_type = other RNA
gtagattgttttaggtagtct

SEQ ID NO: 93455 - RNA, 21 nt, synthetic construct
  source 1..21: mol_type = other RNA
gtagatttctgcatagagatc

SEQ ID NO: 93456 - RNA, 21 nt, synthetic construct
  source 1..21: mol_type = other RNA
gtagcacaactagtaagtaaa

SEQ ID NO: 93457 - RNA, 21 nt, synthetic construct
  source 1..21: mol_type = other RNA
gtagcaccctatttatgttgc

SEQ ID NO: 93458 - RNA, 21 nt, synthetic construct
  source 1..21: mol_type = other RNA
gtagcagaatccccaaataac

SEQ ID NO: 93459 - RNA, 21 nt, synthetic construct
  source 1..21: mol_type = other RNA
gtagcagacactgggttctca

SEQ ID NO: 93460 - RNA, 21 nt, synthetic construct
  source 1..21: mol_type = other RNA
gtagcagggactacagtcaca

SEQ ID NO: 93461 - RNA, 21 nt, synthetic construct
  source 1..21: mol_type = other RNA
gtagcaggtttaggaagcaca

SEQ ID NO: 93462 - RNA, 21 nt, synthetic construct
  source 1..21: mol_type = other RNA
gtagcattgaagtatagtttg

SEQ ID NO: 93463 - RNA, 21 nt, synthetic construct
  source 1..21: mol_type = other RNA
gtagccaaaggtagaaacatc

SEQ ID NO: 93464 - RNA, 21 nt, synthetic construct
  source 1..21: mol_type = other RNA
gtagccacaagccacatgtgg

SEQ ID NO: 93465 - RNA, 21 nt, synthetic construct
  source 1..21: mol_type = other RNA
gtagcgctttaagcatcccat

SEQ ID NO: 93466 - RNA, 21 nt, synthetic construct
  source 1..21: mol_type = other RNA
gtagcgggaaaaaataatatg

SEQ ID NO: 93467 - RNA, 21 nt, synthetic construct
  source 1..21: mol_type = other RNA
gtagctaatatctttggggag

SEQ ID NO: 93468 - RNA, 21 nt, synthetic construct
  source 1..21: mol_type = other RNA
gtagctaggaccataggcacg

SEQ ID NO: 93469 - RNA, 21 nt, synthetic construct
  source 1..21: mol_type = other RNA
gtagctatatcccaaattggc

SEQ ID NO: 93470 - RNA, 21 nt, synthetic construct
  source 1..21: mol_type = other RNA
gtagctcaaagcatatgaatc

SEQ ID NO: 93471 - RNA, 21 nt, synthetic construct
  source 1..21: mol_type = other RNA
gtagctcatcatttataccca

SEQ ID NO: 93472 - RNA, 21 nt, synthetic construct
  source 1..21: mol_type = other RNA
gtagctgggatcacaggcgtt

SEQ ID NO: 93473 - RNA, 21 nt, synthetic construct
  source 1..21: mol_type = other RNA
gtagctgggatggctgaaaga

SEQ ID NO: 93474 - RNA, 21 nt, synthetic construct
  source 1..21: mol_type = other RNA
gtagctgggattacacacacc

SEQ ID NO: 93475 - RNA, 21 nt, synthetic construct
  source 1..21: mol_type = other RNA
gtagctgtcgctctcctgtgc

SEQ ID NO: 93476 - RNA, 21 nt, synthetic construct
  source 1..21: mol_type = other RNA
gtagctgtctttaatgtaaaa

SEQ ID NO: 93477 - RNA, 21 nt, synthetic construct
  source 1..21: mol_type = other RNA
gtagctgtgattaccggcatc

SEQ ID NO: 93478 - RNA, 21 nt, synthetic construct
  source 1..21: mol_type = other RNA
gtagctgtggctcactcattt

SEQ ID NO: 93479 - RNA, 21 nt, synthetic construct
  source 1..21: mol_type = other RNA
gtagctgttgaattgttgcgc

SEQ ID NO: 93480 - RNA, 21 nt, synthetic construct
  source 1..21: mol_type = other RNA
gtagcttcaatgagggcagag

SEQ ID NO: 93481 - RNA, 21 nt, synthetic construct
  source 1..21: mol_type = other RNA
gtagcttcacgtgcattcata

SEQ ID NO: 93482 - RNA, 21 nt, synthetic construct
  source 1..21: mol_type = other RNA
gtagcttgggctaaggtggag

SEQ ID NO: 93483 - RNA, 21 nt, synthetic construct
  source 1..21: mol_type = other RNA
gtagctttgatgcccccaccc

SEQ ID NO: 93484 - RNA, 21 nt, synthetic construct
  source 1..21: mol_type = other RNA
gtagcttttcctgctgtcgtt

SEQ ID NO: 93485 - RNA, 21 nt, synthetic construct
  source 1..21: mol_type = other RNA
gtaggaaaaccatgtcatgta

SEQ ID NO: 93486 - RNA, 21 nt, synthetic construct
  source 1..21: mol_type = other RNA
gtaggaaaagacttctcaaac

SEQ ID NO: 93487 - RNA, 21 nt, synthetic construct
  source 1..21: mol_type = other RNA
gtaggaaactttgcattcctg

SEQ ID NO: 93488 - RNA, 21 nt, synthetic construct
  source 1..21: mol_type = other RNA
gtaggaaagcctgtgacagta

SEQ ID NO: 93489 - RNA, 21 nt, synthetic construct
  source 1..21: mol_type = other RNA
gtaggaagctgatcaaggaag

SEQ ID NO: 93490 - RNA, 21 nt, synthetic construct
  source 1..21: mol_type = other RNA
gtaggaaggaacacacaccta

SEQ ID NO: 93491 - RNA, 21 nt, synthetic construct
  source 1..21: mol_type = other RNA
gtaggaaggcggtggggacag

SEQ ID NO: 93492 - RNA, 21 nt, synthetic construct
  source 1..21: mol_type = other RNA
gtaggaattaaacatttctga

SEQ ID NO: 93493 - RNA, 21 nt, synthetic construct
  source 1..21: mol_type = other RNA
gtaggagggtgtgatcaggaa

SEQ ID NO: 93494 - RNA, 21 nt, synthetic construct
  source 1..21: mol_type = other RNA
gtaggatgaattacaaatgaa

SEQ ID NO: 93495 - RNA, 21 nt, synthetic construct
  source 1..21: mol_type = other RNA
gtaggcaacatccctatgcaa

SEQ ID NO: 93496 - RNA, 21 nt, synthetic construct
  source 1..21: mol_type = other RNA
gtaggcacattcaagcagaaa

SEQ ID NO: 93497 - RNA, 21 nt, synthetic construct
  source 1..21: mol_type = other RNA
gtaggccaaggcgggaggatc

SEQ ID NO: 93498 - RNA, 21 nt, synthetic construct
  source 1..21: mol_type = other RNA
gtaggccccgatgccatgtgt

SEQ ID NO: 93499 - RNA, 21 nt, synthetic construct
  source 1..21: mol_type = other RNA
gtaggcttagataggatgggc

SEQ ID NO: 93500 - RNA, 21 nt, synthetic construct
  source 1..21: mol_type = other RNA
gtaggcttagatgagcccagg

SEQ ID NO: 93501 - RNA, 21 nt, synthetic construct
  source 1..21: mol_type = other RNA
gtagggaaggtgcccgcgaag

SEQ ID NO: 93502 - RNA, 21 nt, synthetic construct
  source 1..21: mol_type = other RNA
gtagggaatagacaaagacaa

SEQ ID NO: 93503 - RNA, 21 nt, synthetic construct
  source 1..21: mol_type = other RNA
gtagggacggggttttgccat

SEQ ID NO: 93504 - RNA, 21 nt, synthetic construct
  source 1..21: mol_type = other RNA
gtagggagggggctgaggatt

SEQ ID NO: 93505 - RNA, 21 nt, synthetic construct
  source 1..21: mol_type = other RNA
gtagggaggggtattcagggg

SEQ ID NO: 93506 - RNA, 21 nt, synthetic construct
  source 1..21: mol_type = other RNA
gtagggataagaataccaaat

SEQ ID NO: 93507 - RNA, 21 nt, synthetic construct
  source 1..21: mol_type = other RNA
gtagggcaccgtgacagaaca

SEQ ID NO: 93508 - RNA, 21 nt, synthetic construct
  source 1..21: mol_type = other RNA
gtagggggaaaactccaagtg

SEQ ID NO: 93509 - RNA, 21 nt, synthetic construct
  source 1..21: mol_type = other RNA
gtaggggtaaatctttgtaca

SEQ ID NO: 93510 - RNA, 21 nt, synthetic construct
  source 1..21: mol_type = other RNA
gtagggtgactagtgtgaatg

SEQ ID NO: 93511 - RNA, 21 nt, synthetic construct
  source 1..21: mol_type = other RNA
gtagggttggggtatgtttga

SEQ ID NO: 93512 - RNA, 21 nt, synthetic construct
  source 1..21: mol_type = other RNA
gtagggtttggcagtttaaga

SEQ ID NO: 93513 - RNA, 21 nt, synthetic construct
  source 1..21: mol_type = other RNA
gtaggtctccttgtatggaga

SEQ ID NO: 93514 - RNA, 21 nt, synthetic construct
  source 1..21: mol_type = other RNA
gtaggtgctttttgtatcctg

SEQ ID NO: 93515 - RNA, 21 nt, synthetic construct
  source 1..21: mol_type = other RNA
gtaggtgtctcatttaataac

SEQ ID NO: 93516 - RNA, 21 nt, synthetic construct
  source 1..21: mol_type = other RNA
gtaggtgtctgatgtgtgtct

SEQ ID NO: 93517 - RNA, 21 nt, synthetic construct
  source 1..21: mol_type = other RNA
gtaggtgtgtgtaatcccagc

SEQ ID NO: 93518 - RNA, 21 nt, synthetic construct
  source 1..21: mol_type = other RNA
gtaggttgagacttagattta

SEQ ID NO: 93519 - RNA, 21 nt, synthetic construct
  source 1..21: mol_type = other RNA
gtagtaaaaccaaatgtggat

SEQ ID NO: 93520 - RNA, 21 nt, synthetic construct
  source 1..21: mol_type = other RNA
gtagtaaagcaaatgtgacta

SEQ ID NO: 93521 - RNA, 21 nt, synthetic construct
  source 1..21: mol_type = other RNA
gtagtaaggatcgttagtatt

SEQ ID NO: 93522 - RNA, 21 nt, synthetic construct
  source 1..21: mol_type = other RNA
gtagtaagttgtgtcattttt

SEQ ID NO: 93523 - RNA, 21 nt, synthetic construct
  source 1..21: mol_type = other RNA
gtagtacaaaagtgctgttga

SEQ ID NO: 93524 - RNA, 21 nt, synthetic construct
  source 1..21: mol_type = other RNA
gtagtacagtgagtagaagag

SEQ ID NO: 93525 - RNA, 21 nt, synthetic construct
  source 1..21: mol_type = other RNA
gtagtacatattcattgtaag

SEQ ID NO: 93526 - RNA, 21 nt, synthetic construct
  source 1..21: mol_type = other RNA
gtagtacttctgagtgttact

SEQ ID NO: 93527 - RNA, 21 nt, synthetic construct
  source 1..21: mol_type = other RNA
gtagtatctcatgcttaggat

SEQ ID NO: 93528 - RNA, 21 nt, synthetic construct
  source 1..21: mol_type = other RNA
gtagtattgaactgttacttg

SEQ ID NO: 93529 - RNA, 21 nt, synthetic construct
  source 1..21: mol_type = other RNA
gtagtcaacacttttccagtc

SEQ ID NO: 93530 - RNA, 21 nt, synthetic construct
  source 1..21: mol_type = other RNA
gtagtcaatgcaatgcgtgtg

SEQ ID NO: 93531 - RNA, 21 nt, synthetic construct
  source 1..21: mol_type = other RNA
gtagtcagacacactagctga

SEQ ID NO: 93532 - RNA, 21 nt, synthetic construct
  source 1..21: mol_type = other RNA
gtagtcagtgaagatgctgaa

SEQ ID NO: 93533 - RNA, 21 nt, synthetic construct
  source 1..21: mol_type = other RNA
gtagtcttgtcataacagtat

SEQ ID NO: 93534 - RNA, 21 nt, synthetic construct
  source 1..21: mol_type = other RNA
gtagtgagccaaaatcgtgcc

SEQ ID NO: 93535 - RNA, 21 nt, synthetic construct
  source 1..21: mol_type = other RNA
gtagtgattcacttttgagtt

SEQ ID NO: 93536 - RNA, 21 nt, synthetic construct
  source 1..21: mol_type = other RNA
gtagtggcagccccgcttcag

SEQ ID NO: 93537 - RNA, 21 nt, synthetic construct
  source 1..21: mol_type = other RNA
gtagtggtgtgtgactgtagt

SEQ ID NO: 93538 - RNA, 21 nt, synthetic construct
  source 1..21: mol_type = other RNA
gtagtgtcttaatcctatttt

SEQ ID NO: 93539 - RNA, 21 nt, synthetic construct
  source 1..21: mol_type = other RNA
gtagttacaactactcgggag

SEQ ID NO: 93540 - RNA, 21 nt, synthetic construct
  source 1..21: mol_type = other RNA
gtagttacacaagtgtttcat

SEQ ID NO: 93541 - RNA, 21 nt, synthetic construct
  source 1..21: mol_type = other RNA
gtagttaggtggtttgaaccc

SEQ ID NO: 93542 - RNA, 21 nt, synthetic construct
  source 1..21: mol_type = other RNA
gtagttattattgtcattacc

SEQ ID NO: 93543 - RNA, 21 nt, synthetic construct
  source 1..21: mol_type = other RNA
gtagttcagtttttctttctt

SEQ ID NO: 93544 - RNA, 21 nt, synthetic construct
  source 1..21: mol_type = other RNA
gtagttcatcagcataaataa

SEQ ID NO: 93545 - RNA, 21 nt, synthetic construct
  source 1..21: mol_type = other RNA
gtagttcatgttagcataatt

SEQ ID NO: 93546 - RNA, 21 nt, synthetic construct
  source 1..21: mol_type = other RNA
gtagttctggtgtcgtttatt

SEQ ID NO: 93547 - RNA, 21 nt, synthetic construct
  source 1..21: mol_type = other RNA
gtagttgctcagaaaattttc

SEQ ID NO: 93548 - RNA, 21 nt, synthetic construct
  source 1..21: mol_type = other RNA
gtagttgtaactacagacatg

SEQ ID NO: 93549 - RNA, 21 nt, synthetic construct
  source 1..21: mol_type = other RNA
gtagtttccatggaggggcca

SEQ ID NO: 93550 - RNA, 21 nt, synthetic construct
  source 1..21: mol_type = other RNA
gtagtttgcacgtttttagaa

SEQ ID NO: 93551 - RNA, 21 nt, synthetic construct
  source 1..21: mol_type = other RNA
gtagtttgctagtggtaacta

SEQ ID NO: 93552 - RNA, 21 nt, synthetic construct
  source 1..21: mol_type = other RNA
gtagttttccctgtgtatgtg

SEQ ID NO: 93553 - RNA, 21 nt, synthetic construct
  source 1..21: mol_type = other RNA
gtagttttggtgtcattttta

SEQ ID NO: 93554 - RNA, 21 nt, synthetic construct
  source 1..21: mol_type = other RNA
gtagttttttggtagatacca

SEQ ID NO: 93555 - RNA, 21 nt, synthetic construct
  source 1..21: mol_type = other RNA
gtataaaggatgcacaagaca

SEQ ID NO: 93556 - RNA, 21 nt, synthetic construct
  source 1..21: mol_type = other RNA
gtataaagtttccgttttgca

SEQ ID NO: 93557 - RNA, 21 nt, synthetic construct
  source 1..21: mol_type = other RNA
gtataaataaaatgtctggcc

SEQ ID NO: 93558 - RNA, 21 nt, synthetic construct
  source 1..21: mol_type = other RNA
gtataaatgaggtatcatttc

SEQ ID NO: 93559 - RNA, 21 nt, synthetic construct
  source 1..21: mol_type = other RNA
gtataaatgatgagctactgc

SEQ ID NO: 93560 - RNA, 21 nt, synthetic construct
  source 1..21: mol_type = other RNA
gtataaatgttcagtttatgg

SEQ ID NO: 93561 - RNA, 21 nt, synthetic construct
  source 1..21: mol_type = other RNA
gtataaattactgtctgtgaa

SEQ ID NO: 93562 - RNA, 21 nt, synthetic construct
  source 1..21: mol_type = other RNA
gtataacattttctctacagt

SEQ ID NO: 93563 - RNA, 21 nt, synthetic construct
  source 1..21: mol_type = other RNA
gtataacccgttttttccttc

SEQ ID NO: 93564 - RNA, 21 nt, synthetic construct
  source 1..21: mol_type = other RNA
gtataagagaaggaagcacca

SEQ ID NO: 93565 - RNA, 21 nt, synthetic construct
  source 1..21: mol_type = other RNA
gtatacatgtttagcaagatt

SEQ ID NO: 93566 - RNA, 21 nt, synthetic construct
  source 1..21: mol_type = other RNA
gtatacccaggtgtgagattg

SEQ ID NO: 93567 - RNA, 21 nt, synthetic construct
  source 1..21: mol_type = other RNA
gtatactgggtgtgatggcgc

SEQ ID NO: 93568 - RNA, 21 nt, synthetic construct
  source 1..21: mol_type = other RNA
gtatagaaaggagaccagtta

SEQ ID NO: 93569 - RNA, 21 nt, synthetic construct
  source 1..21: mol_type = other RNA
gtataggggaactcttgtagt

SEQ ID NO: 93570 - RNA, 21 nt, synthetic construct
  source 1..21: mol_type = other RNA
gtatatacccttctgttaata

SEQ ID NO: 93571 - RNA, 21 nt, synthetic construct
  source 1..21: mol_type = other RNA
gtatatatcatagagtaccag

SEQ ID NO: 93572 - RNA, 21 nt, synthetic construct
  source 1..21: mol_type = other RNA
gtatatatgctccctaaatac

SEQ ID NO: 93573 - RNA, 21 nt, synthetic construct
  source 1..21: mol_type = other RNA
gtatatattttctaagagcca

SEQ ID NO: 93574 - RNA, 21 nt, synthetic construct
  source 1..21: mol_type = other RNA
gtatatctccttttaagagtg

SEQ ID NO: 93575 - RNA, 21 nt, synthetic construct
  source 1..21: mol_type = other RNA
gtatatgaaaagcccaatcta

SEQ ID NO: 93576 - RNA, 21 nt, synthetic construct
  source 1..21: mol_type = other RNA
gtatatgaaaagcttcccccc

SEQ ID NO: 93577 - RNA, 21 nt, synthetic construct
  source 1..21: mol_type = other RNA
gtatatgctgtttttgaaaag

SEQ ID NO: 93578 - RNA, 21 nt, synthetic construct
  source 1..21: mol_type = other RNA
gtatatggtttaaggtaaggg

SEQ ID NO: 93579 - RNA, 21 nt, synthetic construct
  source 1..21: mol_type = other RNA
gtatattcatagtagctgttg

SEQ ID NO: 93580 - RNA, 21 nt, synthetic construct
  source 1..21: mol_type = other RNA
gtatattctgtgaattgtgac

SEQ ID NO: 93581 - RNA, 21 nt, synthetic construct
  source 1..21: mol_type = other RNA
gtatatttactgcttgctgca

SEQ ID NO: 93582 - RNA, 21 nt, synthetic construct
  source 1..21: mol_type = other RNA
gtatattttcaaggcttgtgc

SEQ ID NO: 93583 - RNA, 21 nt, synthetic construct
  source 1..21: mol_type = other RNA
gtatcaacctgcaggtatttc

SEQ ID NO: 93584 - RNA, 21 nt, synthetic construct
  source 1..21: mol_type = other RNA
gtatcacagtgaggacgctga

SEQ ID NO: 93585 - RNA, 21 nt, synthetic construct
  source 1..21: mol_type = other RNA
gtatcaccatctgataagccc

SEQ ID NO: 93586 - RNA, 21 nt, synthetic construct
  source 1..21: mol_type = other RNA
gtatcactttttgtatttcct

SEQ ID NO: 93587 - RNA, 21 nt, synthetic construct
  source 1..21: mol_type = other RNA
gtatcagatgcttctagccaa

SEQ ID NO: 93588 - RNA, 21 nt, synthetic construct
  source 1..21: mol_type = other RNA
gtatcatttccaagattgaaa

SEQ ID NO: 93589 - RNA, 21 nt, synthetic construct
  source 1..21: mol_type = other RNA
gtatccagtaatcttgctaaa

SEQ ID NO: 93590 - RNA, 21 nt, synthetic construct
  source 1..21: mol_type = other RNA
gtatccagtggttttttgttt

SEQ ID NO: 93591 - RNA, 21 nt, synthetic construct
  source 1..21: mol_type = other RNA
gtatcccagatggggattgag

SEQ ID NO: 93592 - RNA, 21 nt, synthetic construct
  source 1..21: mol_type = other RNA
gtatcctgagacttaggcaaa

SEQ ID NO: 93593 - RNA, 21 nt, synthetic construct
  source 1..21: mol_type = other RNA
gtatcctgtttgagaagtctt

SEQ ID NO: 93594 - RNA, 21 nt, synthetic construct
  source 1..21: mol_type = other RNA
gtatcctttcaaggtatctcc

SEQ ID NO: 93595 - RNA, 21 nt, synthetic construct
  source 1..21: mol_type = other RNA
gtatcgtgagactattatgag

SEQ ID NO: 93596 - RNA, 21 nt, synthetic construct
  source 1..21: mol_type = other RNA
gtatctaccaaaaaactacga

SEQ ID NO: 93597 - RNA, 21 nt, synthetic construct
  source 1..21: mol_type = other RNA
gtatctaggagtacagtgcat

SEQ ID NO: 93598 - RNA, 21 nt, synthetic construct
  source 1..21: mol_type = other RNA
gtatctcagtcataatttgtg

SEQ ID NO: 93599 - RNA, 21 nt, synthetic construct
  source 1..21: mol_type = other RNA
gtatctcatgcttaggatccc

SEQ ID NO: 93600 - RNA, 21 nt, synthetic construct
  source 1..21: mol_type = other RNA
gtatctccccaaagatattag

SEQ ID NO: 93601 - RNA, 21 nt, synthetic construct
  source 1..21: mol_type = other RNA
gtatctccctgtgcgtgaatc

SEQ ID NO: 93602 - RNA, 21 nt, synthetic construct
  source 1..21: mol_type = other RNA
gtatctcctttccttccttgc

SEQ ID NO: 93603 - RNA, 21 nt, synthetic construct
  source 1..21: mol_type = other RNA
gtatctcggtcattctggagt

SEQ ID NO: 93604 - RNA, 21 nt, synthetic construct
  source 1..21: mol_type = other RNA
gtatctgggaaaaaataagaa

SEQ ID NO: 93605 - RNA, 21 nt, synthetic construct
  source 1..21: mol_type = other RNA
gtatctggtgctggcagcctt

SEQ ID NO: 93606 - RNA, 21 nt, synthetic construct
  source 1..21: mol_type = other RNA
gtatctggtgttgcttgctct

SEQ ID NO: 93607 - RNA, 21 nt, synthetic construct
  source 1..21: mol_type = other RNA
gtatctgtgatccctgatatg

SEQ ID NO: 93608 - RNA, 21 nt, synthetic construct
  source 1..21: mol_type = other RNA
gtatcttcacaaacaaatcct

SEQ ID NO: 93609 - RNA, 21 nt, synthetic construct
  source 1..21: mol_type = other RNA
gtatcttgaagaaaccaagag

SEQ ID NO: 93610 - RNA, 21 nt, synthetic construct
  source 1..21: mol_type = other RNA
gtatcttttaacagatggtcc

SEQ ID NO: 93611 - RNA, 21 nt, synthetic construct
  source 1..21: mol_type = other RNA
gtatcttttcagtccagatat

SEQ ID NO: 93612 - RNA, 21 nt, synthetic construct
  source 1..21: mol_type = other RNA
gtatcttttcatgttgaccat

SEQ ID NO: 93613 - RNA, 21 nt, synthetic construct
  source 1..21: mol_type = other RNA
gtatctttttcagcagcagag

SEQ ID NO: 93614 - RNA, 21 nt, synthetic construct
  source 1..21: mol_type = other RNA
gtatgaatgcacgtgaagcta

SEQ ID NO: 93615 - RNA, 21 nt, synthetic construct
  source 1..21: mol_type = other RNA
gtatgacctcctcccacttac

SEQ ID NO: 93616 - RNA, 21 nt, synthetic construct
  source 1..21: mol_type = other RNA
gtatgagaaatgtctggtttg

SEQ ID NO: 93617 - RNA, 21 nt, synthetic construct
  source 1..21: mol_type = other RNA
gtatgagaagactggaaaagt

SEQ ID NO: 93618 - RNA, 21 nt, synthetic construct
  source 1..21: mol_type = other RNA
gtatgagccactagtcagtat

SEQ ID NO: 93619 - RNA, 21 nt, synthetic construct
  source 1..21: mol_type = other RNA
gtatgagtcttccgtctcaag

SEQ ID NO: 93620 - RNA, 21 nt, synthetic construct
  source 1..21: mol_type = other RNA
gtatgagtgtttcccttaaaa

SEQ ID NO: 93621 - RNA, 21 nt, synthetic construct
  source 1..21: mol_type = other RNA
gtatgatcaaagtgaaaggca

SEQ ID NO: 93622 - RNA, 21 nt, synthetic construct
  source 1..21: mol_type = other RNA
gtatgatgccactcaaaactg

SEQ ID NO: 93623 - RNA, 21 nt, synthetic construct
  source 1..21: mol_type = other RNA
gtatgatttctaggccctaac

SEQ ID NO: 93624 - RNA, 21 nt, synthetic construct
  source 1..21: mol_type = other RNA
gtatgattttctaggaaactt

SEQ ID NO: 93625 - RNA, 21 nt, synthetic construct
  source 1..21: mol_type = other RNA
gtatgcaacttactctcaaat

SEQ ID NO: 93626 - RNA, 21 nt, synthetic construct
  source 1..21: mol_type = other RNA
gtatgcacaaataattaacac

SEQ ID NO: 93627 - RNA, 21 nt, synthetic construct
  source 1..21: mol_type = other RNA
gtatgcactgtactcctagat

SEQ ID NO: 93628 - RNA, 21 nt, synthetic construct
  source 1..21: mol_type = other RNA
gtatgcagaaaccagttgtaa

SEQ ID NO: 93629 - RNA, 21 nt, synthetic construct
  source 1..21: mol_type = other RNA
gtatgcagggaaatcattcag

SEQ ID NO: 93630 - RNA, 21 nt, synthetic construct
  source 1..21: mol_type = other RNA
gtatgcatagatcacaaggac

SEQ ID NO: 93631 - RNA, 21 nt, synthetic construct
  source 1..21: mol_type = other RNA
gtatgcatagcagggtcatgc

SEQ ID NO: 93632 - RNA, 21 nt, synthetic construct
  source 1..21: mol_type = other RNA
gtatgcatcttgaactaagtg

SEQ ID NO: 93633 - RNA, 21 nt, synthetic construct
  source 1..21: mol_type = other RNA
gtatgccgctggtgaaaaaat

SEQ ID NO: 93634 - RNA, 21 nt, synthetic construct
  source 1..21: mol_type = other RNA
gtatgcggggtttcagcacaa

SEQ ID NO: 93635 - RNA, 21 nt, synthetic construct
  source 1..21: mol_type = other RNA
gtatgctgtttacattagaga

SEQ ID NO: 93636 - RNA, 21 nt, synthetic construct
  source 1..21: mol_type = other RNA
gtatggaagatgggacttcac

SEQ ID NO: 93637 - RNA, 21 nt, synthetic construct
  source 1..21: mol_type = other RNA
gtatggagacactagggactg

SEQ ID NO: 93638 - RNA, 21 nt, synthetic construct
  source 1..21: mol_type = other RNA
gtatggagactagtacactgt

SEQ ID NO: 93639 - RNA, 21 nt, synthetic construct
  source 1..21: mol_type = other RNA
gtatggcgactcatgcctgta

SEQ ID NO: 93640 - RNA, 21 nt, synthetic construct
  source 1..21: mol_type = other RNA
gtatgggagatgtgtaattgt

SEQ ID NO: 93641 - RNA, 21 nt, synthetic construct
  source 1..21: mol_type = other RNA
gtatgggtctccattttggtc

SEQ ID NO: 93642 - RNA, 21 nt, synthetic construct
  source 1..21: mol_type = other RNA
gtatggttcttaagatgatat

SEQ ID NO: 93643 - RNA, 21 nt, synthetic construct
  source 1..21: mol_type = other RNA
gtatggttgaagaaagtagga

SEQ ID NO: 93644 - RNA, 21 nt, synthetic construct
  source 1..21: mol_type = other RNA
gtatgtaattacaggggactt

SEQ ID NO: 93645 - RNA, 21 nt, synthetic construct
  source 1..21: mol_type = other RNA
gtatgtacccaatggattata

SEQ ID NO: 93646 - RNA, 21 nt, synthetic construct
  source 1..21: mol_type = other RNA
gtatgtaggaaactttgcatt

SEQ ID NO: 93647 - RNA, 21 nt, synthetic construct
  source 1..21: mol_type = other RNA
gtatgtcagactcattgccta

SEQ ID NO: 93648 - RNA, 21 nt, synthetic construct
  source 1..21: mol_type = other RNA
gtatgtgccatctccttaatc

SEQ ID NO: 93649 - RNA, 21 nt, synthetic construct
  source 1..21: mol_type = other RNA
gtatgtgtagtcagtgaagat

SEQ ID NO: 93650 - RNA, 21 nt, synthetic construct
  source 1..21: mol_type = other RNA
gtatgtgtctctgacatgaga

SEQ ID NO: 93651 - RNA, 21 nt, synthetic construct
  source 1..21: mol_type = other RNA
gtatgtgttaaaccattcttg

SEQ ID NO: 93652 - RNA, 21 nt, synthetic construct
  source 1..21: mol_type = other RNA
gtatgttaataaccctgtttt

SEQ ID NO: 93653 - RNA, 21 nt, synthetic construct
  source 1..21: mol_type = other RNA
gtatgttacacttccagtaca

SEQ ID NO: 93654 - RNA, 21 nt, synthetic construct
  source 1..21: mol_type = other RNA
gtatgttgtgttttcattcgt

SEQ ID NO: 93655 - RNA, 21 nt, synthetic construct
  source 1..21: mol_type = other RNA
gtatgtttctcattcttctct

SEQ ID NO: 93656 - RNA, 21 nt, synthetic construct
  source 1..21: mol_type = other RNA
gtatgtttgattagttgactc

SEQ ID NO: 93657 - RNA, 21 nt, synthetic construct
  source 1..21: mol_type = other RNA
gtattaaaagcacaagcacag

SEQ ID NO: 93658 - RNA, 21 nt, synthetic construct
  source 1..21: mol_type = other RNA
gtattaaattttctaggaacc

SEQ ID NO: 93659 - RNA, 21 nt, synthetic construct
  source 1..21: mol_type = other RNA
gtattacacagaaagcctctt

SEQ ID NO: 93660 - RNA, 21 nt, synthetic construct
  source 1..21: mol_type = other RNA
gtattaccagcttacagcaga

SEQ ID NO: 93661 - RNA, 21 nt, synthetic construct
  source 1..21: mol_type = other RNA
gtattacctatgaataggtgt

SEQ ID NO: 93662 - RNA, 21 nt, synthetic construct
  source 1..21: mol_type = other RNA
gtattacctcccatgcattcg

SEQ ID NO: 93663 - RNA, 21 nt, synthetic construct
  source 1..21: mol_type = other RNA
gtattaggatgtgtacccgtg

SEQ ID NO: 93664 - RNA, 21 nt, synthetic construct
  source 1..21: mol_type = other RNA
gtattattctaaacacacggg

SEQ ID NO: 93665 - RNA, 21 nt, synthetic construct
  source 1..21: mol_type = other RNA
gtattatttctgtcatctgaa

SEQ ID NO: 93666 - RNA, 21 nt, synthetic construct
  source 1..21: mol_type = other RNA
gtattattttcacagacagta

SEQ ID NO: 93667 - RNA, 21 nt, synthetic construct
  source 1..21: mol_type = other RNA
gtattcaagtttcaccctgcg

SEQ ID NO: 93668 - RNA, 21 nt, synthetic construct
  source 1..21: mol_type = other RNA
gtattcaggacagattaaaat

SEQ ID NO: 93669 - RNA, 21 nt, synthetic construct
  source 1..21: mol_type = other RNA
gtattcagggggctaaatgct

SEQ ID NO: 93670 - RNA, 21 nt, synthetic construct
  source 1..21: mol_type = other RNA
gtattcatccagtttaaagct

SEQ ID NO: 93671 - RNA, 21 nt, synthetic construct
  source 1..21: mol_type = other RNA
gtattcatgctgtgaatttgg

SEQ ID NO: 93672 - RNA, 21 nt, synthetic construct
  source 1..21: mol_type = other RNA
gtattccatggtatgtgccat

SEQ ID NO: 93673 - RNA, 21 nt, synthetic construct
  source 1..21: mol_type = other RNA
gtattcccaagatcataagct

SEQ ID NO: 93674 - RNA, 21 nt, synthetic construct
  source 1..21: mol_type = other RNA
gtattctagttctagctctgt

SEQ ID NO: 93675 - RNA, 21 nt, synthetic construct
  source 1..21: mol_type = other RNA
gtattctatcatcaagacaga

SEQ ID NO: 93676 - RNA, 21 nt, synthetic construct
  source 1..21: mol_type = other RNA
gtattctgaactttcaaccta

SEQ ID NO: 93677 - RNA, 21 nt, synthetic construct
  source 1..21: mol_type = other RNA
gtattctgacctaaagtttta

SEQ ID NO: 93678 - RNA, 21 nt, synthetic construct
  source 1..21: mol_type = other RNA
gtattcttatccctacctaaa

SEQ ID NO: 93679 - RNA, 21 nt, synthetic construct
  source 1..21: mol_type = other RNA
gtattgaactgttacttgact

SEQ ID NO: 93680 - RNA, 21 nt, synthetic construct
  source 1..21: mol_type = other RNA
gtattgagcctgttccgattt

SEQ ID NO: 93681 - RNA, 21 nt, synthetic construct
  source 1..21: mol_type = other RNA
gtattgagtgtagctgtggct

SEQ ID NO: 93682 - RNA, 21 nt, synthetic construct
  source 1..21: mol_type = other RNA
gtattgatttgaccatgggac

SEQ ID NO: 93683 - RNA, 21 nt, synthetic construct
  source 1..21: mol_type = other RNA
gtattgcaaactaagtggtat

SEQ ID NO: 93684 - RNA, 21 nt, synthetic construct
  source 1..21: mol_type = other RNA
gtattgcattgaatctgtaga

SEQ ID NO: 93685 - RNA, 21 nt, synthetic construct
  source 1..21: mol_type = other RNA
gtattgccaggtttgtgcttg

SEQ ID NO: 93686 - RNA, 21 nt, synthetic construct
  source 1..21: mol_type = other RNA
gtattgtaccttgatttatgg

SEQ ID NO: 93687 - RNA, 21 nt, synthetic construct
  source 1..21: mol_type = other RNA
gtattgtaggaaagcctgtga

SEQ ID NO: 93688 - RNA, 21 nt, synthetic construct
  source 1..21: mol_type = other RNA
gtattgtcttctaaccctcaa

SEQ ID NO: 93689 - RNA, 21 nt, synthetic construct
  source 1..21: mol_type = other RNA
gtattgtgctgaaaccccgca

SEQ ID NO: 93690 - RNA, 21 nt, synthetic construct
  source 1..21: mol_type = other RNA
gtattgttaactgtagagaaa

SEQ ID NO: 93691 - RNA, 21 nt, synthetic construct
  source 1..21: mol_type = other RNA
gtatttaatctgtcagcagtt

SEQ ID NO: 93692 - RNA, 21 nt, synthetic construct
  source 1..21: mol_type = other RNA
gtatttagggagcatatatac

SEQ ID NO: 93693 - RNA, 21 nt, synthetic construct
  source 1..21: mol_type = other RNA
gtatttatcatgtcttcttgg

SEQ ID NO: 93694 - RNA, 21 nt, synthetic construct
  source 1..21: mol_type = other RNA
gtatttccacgggtaaaaata

SEQ ID NO: 93695 - RNA, 21 nt, synthetic construct
  source 1..21: mol_type = other RNA
gtatttccttatagtattacc

SEQ ID NO: 93696 - RNA, 21 nt, synthetic construct
  source 1..21: mol_type = other RNA
gtatttctaaatcaacagtgt

SEQ ID NO: 93697 - RNA, 21 nt, synthetic construct
  source 1..21: mol_type = other RNA
gtatttctcatctgtcacttt

SEQ ID NO: 93698 - RNA, 21 nt, synthetic construct
  source 1..21: mol_type = other RNA
gtatttctgctttggtaccag

SEQ ID NO: 93699 - RNA, 21 nt, synthetic construct
  source 1..21: mol_type = other RNA
gtatttctgttagatggtgct

SEQ ID NO: 93700 - RNA, 21 nt, synthetic construct
  source 1..21: mol_type = other RNA
gtatttggggctaggatttca

SEQ ID NO: 93701 - RNA, 21 nt, synthetic construct
  source 1..21: mol_type = other RNA
gtattttacaccatgcaggtt

SEQ ID NO: 93702 - RNA, 21 nt, synthetic construct
  source 1..21: mol_type = other RNA
gtattttcctaaccactgtta

SEQ ID NO: 93703 - RNA, 21 nt, synthetic construct
  source 1..21: mol_type = other RNA
gtattttgttgacatcctttg

SEQ ID NO: 93704 - RNA, 21 nt, synthetic construct
  source 1..21: mol_type = other RNA
gtattttgttgttgttgtttc

SEQ ID NO: 93705 - RNA, 21 nt, synthetic construct
  source 1..21: mol_type = other RNA
gtatttttcacaaacacacaa

SEQ ID NO: 93706 - RNA, 21 nt, synthetic construct
  source 1..21: mol_type = other RNA
gtatttttgctcacacttact

SEQ ID NO: 93707 - RNA, 21 nt, synthetic construct
  source 1..21: mol_type = other RNA
gtcaaaaagagaacacacaat

SEQ ID NO: 93708 - RNA, 21 nt, synthetic construct
  source 1..21: mol_type = other RNA
gtcaaaaatgtgtctagtgaa

SEQ ID NO: 93709 - RNA, 21 nt, synthetic construct
  source 1..21: mol_type = other RNA
gtcaaaaccaaagaaagggga

SEQ ID NO: 93710 - RNA, 21 nt, synthetic construct
  source 1..21: mol_type = other RNA
gtcaaaagatgctggtggagt

SEQ ID NO: 93711 - RNA, 21 nt, synthetic construct
  source 1..21: mol_type = other RNA
gtcaaactcacttattagcaa

SEQ ID NO: 93712 - RNA, 21 nt, synthetic construct
  source 1..21: mol_type = other RNA
gtcaaagcctgtggaggcagt

SEQ ID NO: 93713 - RNA, 21 nt, synthetic construct
  source 1..21: mol_type = other RNA
gtcaaatcaatacttcatttc

SEQ ID NO: 93714 - RNA, 21 nt, synthetic construct
  source 1..21: mol_type = other RNA
gtcaaatggtaacagccaaat

SEQ ID NO: 93715 - RNA, 21 nt, synthetic construct
  source 1..21: mol_type = other RNA
gtcaaatttttcacattcttc

SEQ ID NO: 93716 - RNA, 21 nt, synthetic construct
  source 1..21: mol_type = other RNA
gtcaacaaactaactagaaaa

SEQ ID NO: 93717 - RNA, 21 nt, synthetic construct
  source 1..21: mol_type = other RNA
gtcaacacactagccactggg

SEQ ID NO: 93718 - RNA, 21 nt, synthetic construct
  source 1..21: mol_type = other RNA
gtcaacacatcagcgctaagt

SEQ ID NO: 93719 - RNA, 21 nt, synthetic construct
  source 1..21: mol_type = other RNA
gtcaacaccaagcaacactaa

SEQ ID NO: 93720 - RNA, 21 nt, synthetic construct
  source 1..21: mol_type = other RNA
gtcaacacttttccagtcttc

SEQ ID NO: 93721 - RNA, 21 nt, synthetic construct
  source 1..21: mol_type = other RNA
gtcaacagggtaagattccgt

SEQ ID NO: 93722 - RNA, 21 nt, synthetic construct
  source 1..21: mol_type = other RNA
gtcaacatgaaaagatactca

SEQ ID NO: 93723 - RNA, 21 nt, synthetic construct
  source 1..21: mol_type = other RNA
gtcaacattaagggaaacagg

SEQ ID NO: 93724 - RNA, 21 nt, synthetic construct
  source 1..21: mol_type = other RNA
gtcaaccactaaggtcaacac

SEQ ID NO: 93725 - RNA, 21 nt, synthetic construct
  source 1..21: mol_type = other RNA
gtcaacgcacccagagcgggt

SEQ ID NO: 93726 - RNA, 21 nt, synthetic construct
  source 1..21: mol_type = other RNA
gtcaactaatcaaacataccc

SEQ ID NO: 93727 - RNA, 21 nt, synthetic construct
  source 1..21: mol_type = other RNA
gtcaactgaggcagagtagag

SEQ ID NO: 93728 - RNA, 21 nt, synthetic construct
  source 1..21: mol_type = other RNA
gtcaacttttagtaggtctcc

SEQ ID NO: 93729 - RNA, 21 nt, synthetic construct
  source 1..21: mol_type = other RNA
gtcaagaaataaaacatggcc

SEQ ID NO: 93730 - RNA, 21 nt, synthetic construct
  source 1..21: mol_type = other RNA
gtcaagaatgaagtcagagat

SEQ ID NO: 93731 - RNA, 21 nt, synthetic construct
  source 1..21: mol_type = other RNA
gtcaagagagattaaataact

SEQ ID NO: 93732 - RNA, 21 nt, synthetic construct
  source 1..21: mol_type = other RNA
gtcaagagcggcctttgcctc

SEQ ID NO: 93733 - RNA, 21 nt, synthetic construct
  source 1..21: mol_type = other RNA
gtcaagatgaatctgcaacta

SEQ ID NO: 93734 - RNA, 21 nt, synthetic construct
  source 1..21: mol_type = other RNA
gtcaagctatcagaattttat

SEQ ID NO: 93735 - RNA, 21 nt, synthetic construct
  source 1..21: mol_type = other RNA
gtcaagctgtttgagctgaaa

SEQ ID NO: 93736 - RNA, 21 nt, synthetic construct
  source 1..21: mol_type = other RNA
gtcaaggggagaggcctcatg

SEQ ID NO: 93737 - RNA, 21 nt, synthetic construct
  source 1..21: mol_type = other RNA
gtcaaggtcatcctttccctt

SEQ ID NO: 93738 - RNA, 21 nt, synthetic construct
  source 1..21: mol_type = other RNA
gtcaagtaacagttcaatact

SEQ ID NO: 93739 - RNA, 21 nt, synthetic construct
  source 1..21: mol_type = other RNA
gtcaagtacaactaataattg

SEQ ID NO: 93740 - RNA, 21 nt, synthetic construct
  source 1..21: mol_type = other RNA
gtcaagtgactccaagcacac

SEQ ID NO: 93741 - RNA, 21 nt, synthetic construct
  source 1..21: mol_type = other RNA
gtcaagttctgatttcaaagt

SEQ ID NO: 93742 - RNA, 21 nt, synthetic construct
  source 1..21: mol_type = other RNA
gtcaataatttggatgaacgc

SEQ ID NO: 93743 - RNA, 21 nt, synthetic construct
  source 1..21: mol_type = other RNA
gtcaatctaggaggtctaaga

SEQ ID NO: 93744 - RNA, 21 nt, synthetic construct
  source 1..21: mol_type = other RNA
gtcaatgcaatgcgtgtgaaa

SEQ ID NO: 93745 - RNA, 21 nt, synthetic construct
  source 1..21: mol_type = other RNA
gtcaatggggaactttatttt

SEQ ID NO: 93746 - RNA, 21 nt, synthetic construct
  source 1..21: mol_type = other RNA
gtcaattctagttaataaagg

SEQ ID NO: 93747 - RNA, 21 nt, synthetic construct
  source 1..21: mol_type = other RNA
gtcaattgatctgccaggaca

SEQ ID NO: 93748 - RNA, 21 nt, synthetic construct
  source 1..21: mol_type = other RNA
gtcaatttcagatctctgaca

SEQ ID NO: 93749 - RNA, 21 nt, synthetic construct
  source 1..21: mol_type = other RNA
gtcaatttcatcgtaaaaagc

SEQ ID NO: 93750 - RNA, 21 nt, synthetic construct
  source 1..21: mol_type = other RNA
gtcaattttcccccaattaaa

SEQ ID NO: 93751 - RNA, 21 nt, synthetic construct
  source 1..21: mol_type = other RNA
gtcacaaaaagacaagtactg

SEQ ID NO: 93752 - RNA, 21 nt, synthetic construct
  source 1..21: mol_type = other RNA
gtcacaaaatgtggatgcatg

SEQ ID NO: 93753 - RNA, 21 nt, synthetic construct
  source 1..21: mol_type = other RNA
gtcacaaacacaaaacaaatg

SEQ ID NO: 93754 - RNA, 21 nt, synthetic construct
  source 1..21: mol_type = other RNA
gtcacaaagctttaaactgga

SEQ ID NO: 93755 - RNA, 21 nt, synthetic construct
  source 1..21: mol_type = other RNA
gtcacaagccagggtctgtct

SEQ ID NO: 93756 - RNA, 21 nt, synthetic construct
  source 1..21: mol_type = other RNA
gtcacaattcacagaatatac

SEQ ID NO: 93757 - RNA, 21 nt, synthetic construct
  source 1..21: mol_type = other RNA
gtcacacaccactacacccgg

SEQ ID NO: 93758 - RNA, 21 nt, synthetic construct
  source 1..21: mol_type = other RNA
gtcacacggaaaacattattt

SEQ ID NO: 93759 - RNA, 21 nt, synthetic construct
  source 1..21: mol_type = other RNA
gtcacactttttgtgagtttt

SEQ ID NO: 93760 - RNA, 21 nt, synthetic construct
  source 1..21: mol_type = other RNA
gtcacaggctttcctacaata

SEQ ID NO: 93761 - RNA, 21 nt, synthetic construct
  source 1..21: mol_type = other RNA
gtcacagtgaattctgactta

SEQ ID NO: 93762 - RNA, 21 nt, synthetic construct
  source 1..21: mol_type = other RNA
gtcacatagaagcgctcttca

SEQ ID NO: 93763 - RNA, 21 nt, synthetic construct
  source 1..21: mol_type = other RNA
gtcacatagacctgaatgact

SEQ ID NO: 93764 - RNA, 21 nt, synthetic construct
  source 1..21: mol_type = other RNA
gtcacattcagaggtatttgg

SEQ ID NO: 93765 - RNA, 21 nt, synthetic construct
  source 1..21: mol_type = other RNA
gtcacattctagtgatgggag

SEQ ID NO: 93766 - RNA, 21 nt, synthetic construct
  source 1..21: mol_type = other RNA
gtcacattctgcctgcagact

SEQ ID NO: 93767 - RNA, 21 nt, synthetic construct
  source 1..21: mol_type = other RNA
gtcacatttgaaagaaagaag

SEQ ID NO: 93768 - RNA, 21 nt, synthetic construct
  source 1..21: mol_type = other RNA
gtcacatttgctttactactg

SEQ ID NO: 93769 - RNA, 21 nt, synthetic construct
  source 1..21: mol_type = other RNA
gtcacattttcttatctaggc

SEQ ID NO: 93770 - RNA, 21 nt, synthetic construct
  source 1..21: mol_type = other RNA
gtcaccaaacgtttagatgaa

SEQ ID NO: 93771 - RNA, 21 nt, synthetic construct
  source 1..21: mol_type = other RNA
gtcaccaggctggaatgcagc

SEQ ID NO: 93772 - RNA, 21 nt, synthetic construct
  source 1..21: mol_type = other RNA
gtcacccaagccacagcgtgg

SEQ ID NO: 93773 - RNA, 21 nt, synthetic construct
  source 1..21: mol_type = other RNA
gtcacccacgtggagtgcaat

SEQ ID NO: 93774 - RNA, 21 nt, synthetic construct
  source 1..21: mol_type = other RNA
gtcaccctacagactcaataa

SEQ ID NO: 93775 - RNA, 21 nt, synthetic construct
  source 1..21: mol_type = other RNA
gtcacccttgtaatcaagtat

SEQ ID NO: 93776 - RNA, 21 nt, synthetic construct
  source 1..21: mol_type = other RNA
gtcaccgcaacctccgcctcc

SEQ ID NO: 93777 - RNA, 21 nt, synthetic construct
  source 1..21: mol_type = other RNA
gtcacctagcctctctgggct

SEQ ID NO: 93778 - RNA, 21 nt, synthetic construct
  source 1..21: mol_type = other RNA
gtcacggtgccctacatatgg

SEQ ID NO: 93779 - RNA, 21 nt, synthetic construct
  source 1..21: mol_type = other RNA
gtcactaaaaatcagattaag

SEQ ID NO: 93780 - RNA, 21 nt, synthetic construct
  source 1..21: mol_type = other RNA
gtcactattaaccatatggtt

SEQ ID NO: 93781 - RNA, 21 nt, synthetic construct
  source 1..21: mol_type = other RNA
gtcactccatttgtggcatct

SEQ ID NO: 93782 - RNA, 21 nt, synthetic construct
  source 1..21: mol_type = other RNA
gtcactctctttaggaagctt

SEQ ID NO: 93783 - RNA, 21 nt, synthetic construct
  source 1..21: mol_type = other RNA
gtcactgacacaggctgaagg

SEQ ID NO: 93784 - RNA, 21 nt, synthetic construct
  source 1..21: mol_type = other RNA
gtcactgcagtctcaaactcc

SEQ ID NO: 93785 - RNA, 21 nt, synthetic construct
  source 1..21: mol_type = other RNA
gtcactgctgatgtaagtggg

SEQ ID NO: 93786 - RNA, 21 nt, synthetic construct
  source 1..21: mol_type = other RNA
gtcactggatagaagtgtatc

SEQ ID NO: 93787 - RNA, 21 nt, synthetic construct
  source 1..21: mol_type = other RNA
gtcactggccactgattgagt

SEQ ID NO: 93788 - RNA, 21 nt, synthetic construct
  source 1..21: mol_type = other RNA
gtcactgtaagaataatgtct

SEQ ID NO: 93789 - RNA, 21 nt, synthetic construct
  source 1..21: mol_type = other RNA
gtcactgtggaaaacagtttg

SEQ ID NO: 93790 - RNA, 21 nt, synthetic construct
  source 1..21: mol_type = other RNA
gtcactgtttggacagtaaaa

SEQ ID NO: 93791 - RNA, 21 nt, synthetic construct
  source 1..21: mol_type = other RNA
gtcacttcctctcttaaatcc

SEQ ID NO: 93792 - RNA, 21 nt, synthetic construct
  source 1..21: mol_type = other RNA
gtcactttcctattcacactg

SEQ ID NO: 93793 - RNA, 21 nt, synthetic construct
  source 1..21: mol_type = other RNA
gtcactttttattctgttcta

SEQ ID NO: 93794 - RNA, 21 nt, synthetic construct
  source 1..21: mol_type = other RNA
gtcagaaaagatcagtaaaat

SEQ ID NO: 93795 - RNA, 21 nt, synthetic construct
  source 1..21: mol_type = other RNA
gtcagaaacaccaacacaaag

SEQ ID NO: 93796 - RNA, 21 nt, synthetic construct
  source 1..21: mol_type = other RNA
gtcagaaaccatcgttcacac

SEQ ID NO: 93797 - RNA, 21 nt, synthetic construct
  source 1..21: mol_type = other RNA
gtcagaagtttggaaccagcc

SEQ ID NO: 93798 - RNA, 21 nt, synthetic construct
  source 1..21: mol_type = other RNA
gtcagaatacaaaaatgacac

SEQ ID NO: 93799 - RNA, 21 nt, synthetic construct
  source 1..21: mol_type = other RNA
gtcagaatcgtgatagtcttc

SEQ ID NO: 93800 - RNA, 21 nt, synthetic construct
  source 1..21: mol_type = other RNA
gtcagaattagaaagctggac

SEQ ID NO: 93801 - RNA, 21 nt, synthetic construct
  source 1..21: mol_type = other RNA
gtcagaattcactgtgactcc

SEQ ID NO: 93802 - RNA, 21 nt, synthetic construct
  source 1..21: mol_type = other RNA
gtcagaattccatcagtggtt

SEQ ID NO: 93803 - RNA, 21 nt, synthetic construct
  source 1..21: mol_type = other RNA
gtcagacacactagctgaccc

SEQ ID NO: 93804 - RNA, 21 nt, synthetic construct
  source 1..21: mol_type = other RNA
gtcagactaagacactagcta

SEQ ID NO: 93805 - RNA, 21 nt, synthetic construct
  source 1..21: mol_type = other RNA
gtcagactcattgcctataga

SEQ ID NO: 93806 - RNA, 21 nt, synthetic construct
  source 1..21: mol_type = other RNA
gtcagagacacatactgaaag

SEQ ID NO: 93807 - RNA, 21 nt, synthetic construct
  source 1..21: mol_type = other RNA
gtcagagatctgaaattgact

SEQ ID NO: 93808 - RNA, 21 nt, synthetic construct
  source 1..21: mol_type = other RNA
gtcagagattttcccaaagat

SEQ ID NO: 93809 - RNA, 21 nt, synthetic construct
  source 1..21: mol_type = other RNA
gtcagagcagcactgatgtgt

SEQ ID NO: 93810 - RNA, 21 nt, synthetic construct
  source 1..21: mol_type = other RNA
gtcagaggagcagttactcct

SEQ ID NO: 93811 - RNA, 21 nt, synthetic construct
  source 1..21: mol_type = other RNA
gtcagagttgtatctgtgatc

SEQ ID NO: 93812 - RNA, 21 nt, synthetic construct
  source 1..21: mol_type = other RNA
gtcagatggtaaattggtcct

SEQ ID NO: 93813 - RNA, 21 nt, synthetic construct
  source 1..21: mol_type = other RNA
gtcagattttcttgttataag

SEQ ID NO: 93814 - RNA, 21 nt, synthetic construct
  source 1..21: mol_type = other RNA
gtcagcaactcttggccattt

SEQ ID NO: 93815 - RNA, 21 nt, synthetic construct
  source 1..21: mol_type = other RNA
gtcagcacactcttaataact

SEQ ID NO: 93816 - RNA, 21 nt, synthetic construct
  source 1..21: mol_type = other RNA
gtcagcacttctgatatcctg

SEQ ID NO: 93817 - RNA, 21 nt, synthetic construct
  source 1..21: mol_type = other RNA
gtcagcagttcagcctgcaga

SEQ ID NO: 93818 - RNA, 21 nt, synthetic construct
  source 1..21: mol_type = other RNA
gtcagccacaagacataagca

SEQ ID NO: 93819 - RNA, 21 nt, synthetic construct
  source 1..21: mol_type = other RNA
gtcagccagaggaagcttata

SEQ ID NO: 93820 - RNA, 21 nt, synthetic construct
  source 1..21: mol_type = other RNA
gtcagcctgggcacacgccac

SEQ ID NO: 93821 - RNA, 21 nt, synthetic construct
  source 1..21: mol_type = other RNA
gtcagctaattttctaatctt

SEQ ID NO: 93822 - RNA, 21 nt, synthetic construct
  source 1..21: mol_type = other RNA
gtcagctaggcgtagtatctc

SEQ ID NO: 93823 - RNA, 21 nt, synthetic construct
  source 1..21: mol_type = other RNA
gtcagctagtgtgtctgacta

SEQ ID NO: 93824 - RNA, 21 nt, synthetic construct
  source 1..21: mol_type = other RNA
gtcaggaaggcaggaggcctc

SEQ ID NO: 93825 - RNA, 21 nt, synthetic construct
  source 1..21: mol_type = other RNA
gtcaggcaagggactgtcgaa

SEQ ID NO: 93826 - RNA, 21 nt, synthetic construct
  source 1..21: mol_type = other RNA
gtcaggcatgctaactgcaga

SEQ ID NO: 93827 - RNA, 21 nt, synthetic construct
  source 1..21: mol_type = other RNA
gtcaggtgggcactgggagcc

SEQ ID NO: 93828 - RNA, 21 nt, synthetic construct
  source 1..21: mol_type = other RNA
gtcagtaaaaaaggaccatct

SEQ ID NO: 93829 - RNA, 21 nt, synthetic construct
  source 1..21: mol_type = other RNA
gtcagtaatcaaaaacctccc

SEQ ID NO: 93830 - RNA, 21 nt, synthetic construct
  source 1..21: mol_type = other RNA
gtcagtaattctgcagtgaac

SEQ ID NO: 93831 - RNA, 21 nt, synthetic construct
  source 1..21: mol_type = other RNA
gtcagtactatcttccctaaa

SEQ ID NO: 93832 - RNA, 21 nt, synthetic construct
  source 1..21: mol_type = other RNA
gtcagtagaggccgagggttg

SEQ ID NO: 93833 - RNA, 21 nt, synthetic construct
  source 1..21: mol_type = other RNA
gtcagtagtacagtgagtaga

SEQ ID NO: 93834 - RNA, 21 nt, synthetic construct
  source 1..21: mol_type = other RNA
gtcagtatatttactgcttgc

SEQ ID NO: 93835 - RNA, 21 nt, synthetic construct
  source 1..21: mol_type = other RNA
gtcagtcaacacactagccac

SEQ ID NO: 93836 - RNA, 21 nt, synthetic construct
  source 1..21: mol_type = other RNA
gtcagtgaagatgctgaactt

SEQ ID NO: 93837 - RNA, 21 nt, synthetic construct
  source 1..21: mol_type = other RNA
gtcagtgacagttctgtgaat

SEQ ID NO: 93838 - RNA, 21 nt, synthetic construct
  source 1..21: mol_type = other RNA
gtcagtgatggaggtggaact

SEQ ID NO: 93839 - RNA, 21 nt, synthetic construct
  source 1..21: mol_type = other RNA
gtcagtgggactggagaacag

SEQ ID NO: 93840 - RNA, 21 nt, synthetic construct
  source 1..21: mol_type = other RNA
gtcagtgtggttcatatttcc

SEQ ID NO: 93841 - RNA, 21 nt, synthetic construct
  source 1..21: mol_type = other RNA
gtcagttaacagtgctgtgcc

SEQ ID NO: 93842 - RNA, 21 nt, synthetic construct
  source 1..21: mol_type = other RNA
gtcagttacagcatttcagcc

SEQ ID NO: 93843 - RNA, 21 nt, synthetic construct
  source 1..21: mol_type = other RNA
gtcagttctctgccccgggcc

SEQ ID NO: 93844 - RNA, 21 nt, synthetic construct
  source 1..21: mol_type = other RNA
gtcagttgtttacttgggtat

SEQ ID NO: 93845 - RNA, 21 nt, synthetic construct
  source 1..21: mol_type = other RNA
gtcagtttctgatttatcttt

SEQ ID NO: 93846 - RNA, 21 nt, synthetic construct
  source 1..21: mol_type = other RNA
gtcataaacataactttgaag

SEQ ID NO: 93847 - RNA, 21 nt, synthetic construct
  source 1..21: mol_type = other RNA
gtcataacagtattgtcttct

SEQ ID NO: 93848 - RNA, 21 nt, synthetic construct
  source 1..21: mol_type = other RNA
gtcataatttgtgtccttttt

SEQ ID NO: 93849 - RNA, 21 nt, synthetic construct
  source 1..21: mol_type = other RNA
gtcatagcagtgggaagtgga

SEQ ID NO: 93850 - RNA, 21 nt, synthetic construct
  source 1..21: mol_type = other RNA
gtcatcaaaggaaggaatttt

SEQ ID NO: 93851 - RNA, 21 nt, synthetic construct
  source 1..21: mol_type = other RNA
gtcatcacagtccaggaactt

SEQ ID NO: 93852 - RNA, 21 nt, synthetic construct
  source 1..21: mol_type = other RNA
gtcatcagcgtcctcactgtg

SEQ ID NO: 93853 - RNA, 21 nt, synthetic construct
  source 1..21: mol_type = other RNA
gtcatcattattagcaaacat

SEQ ID NO: 93854 - RNA, 21 nt, synthetic construct
  source 1..21: mol_type = other RNA
gtcatccactgcacagtatgc

SEQ ID NO: 93855 - RNA, 21 nt, synthetic construct
  source 1..21: mol_type = other RNA
gtcatcctcaacaagagagga

SEQ ID NO: 93856 - RNA, 21 nt, synthetic construct
  source 1..21: mol_type = other RNA
gtcatcctttcccttctgctc

SEQ ID NO: 93857 - RNA, 21 nt, synthetic construct
  source 1..21: mol_type = other RNA
gtcatctataaggtaatgaca

SEQ ID NO: 93858 - RNA, 21 nt, synthetic construct
  source 1..21: mol_type = other RNA
gtcatctgaatcaataagaat

SEQ ID NO: 93859 - RNA, 21 nt, synthetic construct
  source 1..21: mol_type = other RNA
gtcatctggtcctgagctttc

SEQ ID NO: 93860 - RNA, 21 nt, synthetic construct
  source 1..21: mol_type = other RNA
gtcatcttctctctctgcttc

SEQ ID NO: 93861 - RNA, 21 nt, synthetic construct
  source 1..21: mol_type = other RNA
gtcatgaatgaatgttgagtt

SEQ ID NO: 93862 - RNA, 21 nt, synthetic construct
  source 1..21: mol_type = other RNA
gtcatgacctgctttcttggg

SEQ ID NO: 93863 - RNA, 21 nt, synthetic construct
  source 1..21: mol_type = other RNA
gtcatgacttttttgcccact

SEQ ID NO: 93864 - RNA, 21 nt, synthetic construct
  source 1..21: mol_type = other RNA
gtcatgcacacgctggaaggg

SEQ ID NO: 93865 - RNA, 21 nt, synthetic construct
  source 1..21: mol_type = other RNA
gtcatgggccgggcgtagtgg

SEQ ID NO: 93866 - RNA, 21 nt, synthetic construct
  source 1..21: mol_type = other RNA
gtcatggtgtgtctgcgcctt

SEQ ID NO: 93867 - RNA, 21 nt, synthetic construct
  source 1..21: mol_type = other RNA
gtcatgtatatgctgtttttg

SEQ ID NO: 93868 - RNA, 21 nt, synthetic construct
  source 1..21: mol_type = other RNA
gtcatgtcaaatttttcacat

SEQ ID NO: 93869 - RNA, 21 nt, synthetic construct
  source 1..21: mol_type = other RNA
gtcatgtggggactttgtggc

SEQ ID NO: 93870 - RNA, 21 nt, synthetic construct
  source 1..21: mol_type = other RNA
gtcatgttcccggattggaaa

SEQ ID NO: 93871 - RNA, 21 nt, synthetic construct
  source 1..21: mol_type = other RNA
gtcatgtttgaattttccatt

SEQ ID NO: 93872 - RNA, 21 nt, synthetic construct
  source 1..21: mol_type = other RNA
gtcattacatattttgtaacg

SEQ ID NO: 93873 - RNA, 21 nt, synthetic construct
  source 1..21: mol_type = other RNA
gtcattaccttatagatgacg

SEQ ID NO: 93874 - RNA, 21 nt, synthetic construct
  source 1..21: mol_type = other RNA
gtcattcaggtctatgtgaca

SEQ ID NO: 93875 - RNA, 21 nt, synthetic construct
  source 1..21: mol_type = other RNA
gtcattccgctaaacatttta

SEQ ID NO: 93876 - RNA, 21 nt, synthetic construct
  source 1..21: mol_type = other RNA
gtcattctgcagtttgtgttt

SEQ ID NO: 93877 - RNA, 21 nt, synthetic construct
  source 1..21: mol_type = other RNA
gtcattctggagtgttttctt

SEQ ID NO: 93878 - RNA, 21 nt, synthetic construct
  source 1..21: mol_type = other RNA
gtcattgaaactcaatgttgg

SEQ ID NO: 93879 - RNA, 21 nt, synthetic construct
  source 1..21: mol_type = other RNA
gtcatttctgcttagtcttct

SEQ ID NO: 93880 - RNA, 21 nt, synthetic construct
  source 1..21: mol_type = other RNA
gtcatttgagcccaggaggtt

SEQ ID NO: 93881 - RNA, 21 nt, synthetic construct
  source 1..21: mol_type = other RNA
gtcatttgatcttttttatgc

SEQ ID NO: 93882 - RNA, 21 nt, synthetic construct
  source 1..21: mol_type = other RNA
gtcatttttaagaaatcgttg

SEQ ID NO: 93883 - RNA, 21 nt, synthetic construct
  source 1..21: mol_type = other RNA
gtcatttttcacttcttattg

SEQ ID NO: 93884 - RNA, 21 nt, synthetic construct
  source 1..21: mol_type = other RNA
gtcatttttgtattctgacct

SEQ ID NO: 93885 - RNA, 21 nt, synthetic construct
  source 1..21: mol_type = other RNA
gtccaaacagtgaccacagtt

SEQ ID NO: 93886 - RNA, 21 nt, synthetic construct
  source 1..21: mol_type = other RNA
gtccaacaagggttggtgctt

SEQ ID NO: 93887 - RNA, 21 nt, synthetic construct
  source 1..21: mol_type = other RNA
gtccaacatggcaaaaccccg

SEQ ID NO: 93888 - RNA, 21 nt, synthetic construct
  source 1..21: mol_type = other RNA
gtccaaccaatcgcagggcca

SEQ ID NO: 93889 - RNA, 21 nt, synthetic construct
  source 1..21: mol_type = other RNA
gtccaagacaggaagaattat

SEQ ID NO: 93890 - RNA, 21 nt, synthetic construct
  source 1..21: mol_type = other RNA
gtccaagtatttctcatctgt

SEQ ID NO: 93891 - RNA, 21 nt, synthetic construct
  source 1..21: mol_type = other RNA
gtccaatttctttggctgtta

SEQ ID NO: 93892 - RNA, 21 nt, synthetic construct
  source 1..21: mol_type = other RNA
gtccacacaatggtcagagtt

SEQ ID NO: 93893 - RNA, 21 nt, synthetic construct
  source 1..21: mol_type = other RNA
gtccacagaggctttttatat

SEQ ID NO: 93894 - RNA, 21 nt, synthetic construct
  source 1..21: mol_type = other RNA
gtccacagatctttttgtgta

SEQ ID NO: 93895 - RNA, 21 nt, synthetic construct
  source 1..21: mol_type = other RNA
gtccaccagacaaaaatagag

SEQ ID NO: 93896 - RNA, 21 nt, synthetic construct
  source 1..21: mol_type = other RNA
gtccacctggcaacaaaggcg

SEQ ID NO: 93897 - RNA, 21 nt, synthetic construct
  source 1..21: mol_type = other RNA
gtccactcacctgtcatgtca

SEQ ID NO: 93898 - RNA, 21 nt, synthetic construct
  source 1..21: mol_type = other RNA
gtccactgtcagtgggactgg

SEQ ID NO: 93899 - RNA, 21 nt, synthetic construct
  source 1..21: mol_type = other RNA
gtccactttccatcttaggcc

SEQ ID NO: 93900 - RNA, 21 nt, synthetic construct
  source 1..21: mol_type = other RNA
gtccagaggaggaagagatag

SEQ ID NO: 93901 - RNA, 21 nt, synthetic construct
  source 1..21: mol_type = other RNA
gtccagaggtgagctttttct

SEQ ID NO: 93902 - RNA, 21 nt, synthetic construct
  source 1..21: mol_type = other RNA
gtccagatattatcctccaat

SEQ ID NO: 93903 - RNA, 21 nt, synthetic construct
  source 1..21: mol_type = other RNA
gtccagatgaagcagggaaat

SEQ ID NO: 93904 - RNA, 21 nt, synthetic construct
  source 1..21: mol_type = other RNA
gtccagcaccacccttgatgt

SEQ ID NO: 93905 - RNA, 21 nt, synthetic construct
  source 1..21: mol_type = other RNA
gtccagcccccagttttgttg

SEQ ID NO: 93906 - RNA, 21 nt, synthetic construct
  source 1..21: mol_type = other RNA
gtccagcttcactcttctgca

SEQ ID NO: 93907 - RNA, 21 nt, synthetic construct
  source 1..21: mol_type = other RNA
gtccagctttctaattctgac

SEQ ID NO: 93908 - RNA, 21 nt, synthetic construct
  source 1..21: mol_type = other RNA
gtccaggaacttacagtaaga

SEQ ID NO: 93909 - RNA, 21 nt, synthetic construct
  source 1..21: mol_type = other RNA
gtccaggccaacagggccact

SEQ ID NO: 93910 - RNA, 21 nt, synthetic construct
  source 1..21: mol_type = other RNA
gtccaggcgcctgcattgcat

SEQ ID NO: 93911 - RNA, 21 nt, synthetic construct
  source 1..21: mol_type = other RNA
gtccagtcctgctaacacctt

SEQ ID NO: 93912 - RNA, 21 nt, synthetic construct
  source 1..21: mol_type = other RNA
gtccatagttaatgtgtgaag

SEQ ID NO: 93913 - RNA, 21 nt, synthetic construct
  source 1..21: mol_type = other RNA
gtccatcaacagcagaacaaa

SEQ ID NO: 93914 - RNA, 21 nt, synthetic construct
  source 1..21: mol_type = other RNA
gtccatcaggaaaaccagttt

SEQ ID NO: 93915 - RNA, 21 nt, synthetic construct
  source 1..21: mol_type = other RNA
gtccatcgagagatgaatgga

SEQ ID NO: 93916 - RNA, 21 nt, synthetic construct
  source 1..21: mol_type = other RNA
gtccatctcccatcactagaa

SEQ ID NO: 93917 - RNA, 21 nt, synthetic construct
  source 1..21: mol_type = other RNA
gtccatctggattatagtggt

SEQ ID NO: 93918 - RNA, 21 nt, synthetic construct
  source 1..21: mol_type = other RNA
gtccatgaaacttatttccag

SEQ ID NO: 93919 - RNA, 21 nt, synthetic construct
  source 1..21: mol_type = other RNA
gtccatgaagaaaacactcca

SEQ ID NO: 93920 - RNA, 21 nt, synthetic construct
  source 1..21: mol_type = other RNA
gtccatttccagtactttttc

SEQ ID NO: 93921 - RNA, 21 nt, synthetic construct
  source 1..21: mol_type = other RNA
gtccatttccttaagcacaga

SEQ ID NO: 93922 - RNA, 21 nt, synthetic construct
  source 1..21: mol_type = other RNA
gtcccaaatgcaccaacacct

SEQ ID NO: 93923 - RNA, 21 nt, synthetic construct
  source 1..21: mol_type = other RNA
gtcccaaatgggagcatgcac

SEQ ID NO: 93924 - RNA, 21 nt, synthetic construct
  source 1..21: mol_type = other RNA
gtcccactgacagtggacaaa

SEQ ID NO: 93925 - RNA, 21 nt, synthetic construct
  source 1..21: mol_type = other RNA
gtcccagttcaaggtgttagc

SEQ ID NO: 93926 - RNA, 21 nt, synthetic construct
  source 1..21: mol_type = other RNA
gtcccatcttccatacgaaag

SEQ ID NO: 93927 - RNA, 21 nt, synthetic construct
  source 1..21: mol_type = other RNA
gtcccatggtcaaatcaatac

SEQ ID NO: 93928 - RNA, 21 nt, synthetic construct
  source 1..21: mol_type = other RNA
gtccccaactgcaaaactttc

SEQ ID NO: 93929 - RNA, 21 nt, synthetic construct
  source 1..21: mol_type = other RNA
gtccccacatgactggccatc

SEQ ID NO: 93930 - RNA, 21 nt, synthetic construct
  source 1..21: mol_type = other RNA
gtccccaccgccttcctaccc

SEQ ID NO: 93931 - RNA, 21 nt, synthetic construct
  source 1..21: mol_type = other RNA
gtccccagcatccactagggg

SEQ ID NO: 93932 - RNA, 21 nt, synthetic construct
  source 1..21: mol_type = other RNA
gtcccccatcccctttacccc

SEQ ID NO: 93933 - RNA, 21 nt, synthetic construct
  source 1..21: mol_type = other RNA
gtccccggtctttcctgatca

SEQ ID NO: 93934 - RNA, 21 nt, synthetic construct
  source 1..21: mol_type = other RNA
gtcccctagtggatgctgggg

SEQ ID NO: 93935 - RNA, 21 nt, synthetic construct
  source 1..21: mol_type = other RNA
gtcccctggagttaattccac

SEQ ID NO: 93936 - RNA, 21 nt, synthetic construct
  source 1..21: mol_type = other RNA
gtcccctggggcctcagcatg

SEQ ID NO: 93937 - RNA, 21 nt, synthetic construct
  source 1..21: mol_type = other RNA
gtcccctgtaattacatactt

SEQ ID NO: 93938 - RNA, 21 nt, synthetic construct
  source 1..21: mol_type = other RNA
gtcccctgtccaagtatttct

SEQ ID NO: 93939 - RNA, 21 nt, synthetic construct
  source 1..21: mol_type = other RNA
gtcccggaagctgggctagag

SEQ ID NO: 93940 - RNA, 21 nt, synthetic construct
  source 1..21: mol_type = other RNA
gtcccggcatgcctctcccac

SEQ ID NO: 93941 - RNA, 21 nt, synthetic construct
  source 1..21: mol_type = other RNA
gtccctaaacactgtagttca

SEQ ID NO: 93942 - RNA, 21 nt, synthetic construct
  source 1..21: mol_type = other RNA
gtccctaacagtctcgtgaat

SEQ ID NO: 93943 - RNA, 21 nt, synthetic construct
  source 1..21: mol_type = other RNA
gtccctagtgtctccataccc

SEQ ID NO: 93944 - RNA, 21 nt, synthetic construct
  source 1..21: mol_type = other RNA
gtccctattttctacaggtat

SEQ ID NO: 93945 - RNA, 21 nt, synthetic construct
  source 1..21: mol_type = other RNA
gtccctcaccttctgctgggc

SEQ ID NO: 93946 - RNA, 21 nt, synthetic construct
  source 1..21: mol_type = other RNA
gtccctcctttctagaatgca

SEQ ID NO: 93947 - RNA, 21 nt, synthetic construct
  source 1..21: mol_type = other RNA
gtccctgctactcaggagatt

SEQ ID NO: 93948 - RNA, 21 nt, synthetic construct
  source 1..21: mol_type = other RNA
gtccctgctacttgtggggct

SEQ ID NO: 93949 - RNA, 21 nt, synthetic construct
  source 1..21: mol_type = other RNA
gtccctgcttggcgcagtgct

SEQ ID NO: 93950 - RNA, 21 nt, synthetic construct
  source 1..21: mol_type = other RNA
gtccctgctttcagttctttc

SEQ ID NO: 93951 - RNA, 21 nt, synthetic construct
  source 1..21: mol_type = other RNA
gtcccttgcctgacagcaaat

SEQ ID NO: 93952 - RNA, 21 nt, synthetic construct
  source 1..21: mol_type = other RNA
gtccgcggctgggctttctcc

SEQ ID NO: 93953 - RNA, 21 nt, synthetic construct
  source 1..21: mol_type = other RNA
gtccggctctgcggcgggtct

SEQ ID NO: 93954 - RNA, 21 nt, synthetic construct
  source 1..21: mol_type = other RNA
gtccggtcgttggatttatct

SEQ ID NO: 93955 - RNA, 21 nt, synthetic construct
  source 1..21: mol_type = other RNA
gtccgtagaccgaggaaaccc

SEQ ID NO: 93956 - RNA, 21 nt, synthetic construct
  source 1..21: mol_type = other RNA
gtccgtgcatgcctctgttac

SEQ ID NO: 93957 - RNA, 21 nt, synthetic construct
  source 1..21: mol_type = other RNA
gtccgttgaagtctttggccc

SEQ ID NO: 93958 - RNA, 21 nt, synthetic construct
  source 1..21: mol_type = other RNA
gtcctaaaattccttcctttg

SEQ ID NO: 93959 - RNA, 21 nt, synthetic construct
  source 1..21: mol_type = other RNA
gtcctcaatcatgtcaagaat

SEQ ID NO: 93960 - RNA, 21 nt, synthetic construct
  source 1..21: mol_type = other RNA
gtcctcacctcacattcacag

SEQ ID NO: 93961 - RNA, 21 nt, synthetic construct
  source 1..21: mol_type = other RNA
gtcctcactgtgatacctagt

SEQ ID NO: 93962 - RNA, 21 nt, synthetic construct
  source 1..21: mol_type = other RNA
gtcctcaggctccaggtagaa

SEQ ID NO: 93963 - RNA, 21 nt, synthetic construct
  source 1..21: mol_type = other RNA
gtcctcgtaaaagctaatcta

SEQ ID NO: 93964 - RNA, 21 nt, synthetic construct
  source 1..21: mol_type = other RNA
gtcctctactttcacataagg

SEQ ID NO: 93965 - RNA, 21 nt, synthetic construct
  source 1..21: mol_type = other RNA
gtcctctcactccaaagcaaa

SEQ ID NO: 93966 - RNA, 21 nt, synthetic construct
  source 1..21: mol_type = other RNA
gtcctctcttgttgaggatga

SEQ ID NO: 93967 - RNA, 21 nt, synthetic construct
  source 1..21: mol_type = other RNA
gtcctcttcgggtgtcagaat

SEQ ID NO: 93968 - RNA, 21 nt, synthetic construct
  source 1..21: mol_type = other RNA
gtcctgaaaattccttcccct

SEQ ID NO: 93969 - RNA, 21 nt, synthetic construct
  source 1..21: mol_type = other RNA
gtcctgaactcgtggcctcaa

SEQ ID NO: 93970 - RNA, 21 nt, synthetic construct
  source 1..21: mol_type = other RNA
gtcctgaatactattcctatt

SEQ ID NO: 93971 - RNA, 21 nt, synthetic construct
  source 1..21: mol_type = other RNA
gtcctgaatgatttccctgca

SEQ ID NO: 93972 - RNA, 21 nt, synthetic construct
  source 1..21: mol_type = other RNA
gtcctgaattctaacattatc

SEQ ID NO: 93973 - RNA, 21 nt, synthetic construct
  source 1..21: mol_type = other RNA
gtcctgaattctaatgaactc

SEQ ID NO: 93974 - RNA, 21 nt, synthetic construct
  source 1..21: mol_type = other RNA
gtcctgagctttccttagttc

SEQ ID NO: 93975 - RNA, 21 nt, synthetic construct
  source 1..21: mol_type = other RNA
gtcctgagggctttgtgaagg

SEQ ID NO: 93976 - RNA, 21 nt, synthetic construct
  source 1..21: mol_type = other RNA
gtcctgagggtgagaccacca

SEQ ID NO: 93977 - RNA, 21 nt, synthetic construct
  source 1..21: mol_type = other RNA
gtcctgcatatgtttttatta

SEQ ID NO: 93978 - RNA, 21 nt, synthetic construct
  source 1..21: mol_type = other RNA
gtcctgccttggcctccccaa

SEQ ID NO: 93979 - RNA, 21 nt, synthetic construct
  source 1..21: mol_type = other RNA
gtcctgctaacaccttgaact

SEQ ID NO: 93980 - RNA, 21 nt, synthetic construct
  source 1..21: mol_type = other RNA
gtcctggaaaaagaccataat

SEQ ID NO: 93981 - RNA, 21 nt, synthetic construct
  source 1..21: mol_type = other RNA
gtcctggcagatcaattgacc

SEQ ID NO: 93982 - RNA, 21 nt, synthetic construct
  source 1..21: mol_type = other RNA
gtcctgtcagtgtggttcata

SEQ ID NO: 93983 - RNA, 21 nt, synthetic construct
  source 1..21: mol_type = other RNA
gtcctgtcagtttctgattta

SEQ ID NO: 93984 - RNA, 21 nt, synthetic construct
  source 1..21: mol_type = other RNA
gtcctgtgtttctgctattct

SEQ ID NO: 93985 - RNA, 21 nt, synthetic construct
  source 1..21: mol_type = other RNA
gtcctgttcttttgtaatcta

SEQ ID NO: 93986 - RNA, 21 nt, synthetic construct
  source 1..21: mol_type = other RNA
gtccttaaatttctaaggttc

SEQ ID NO: 93987 - RNA, 21 nt, synthetic construct
  source 1..21: mol_type = other RNA
gtccttaatgccaccgaattg

SEQ ID NO: 93988 - RNA, 21 nt, synthetic construct
  source 1..21: mol_type = other RNA
gtccttaccactgaagtgttg

SEQ ID NO: 93989 - RNA, 21 nt, synthetic construct
  source 1..21: mol_type = other RNA
gtccttccagtatgatgccac

SEQ ID NO: 93990 - RNA, 21 nt, synthetic construct
  source 1..21: mol_type = other RNA
gtccttctcgtgtgagctcta

SEQ ID NO: 93991 - RNA, 21 nt, synthetic construct
  source 1..21: mol_type = other RNA
gtccttctgagaaggcgaaat

SEQ ID NO: 93992 - RNA, 21 nt, synthetic construct
  source 1..21: mol_type = other RNA
gtccttgctgaagaataactg

SEQ ID NO: 93993 - RNA, 21 nt, synthetic construct
  source 1..21: mol_type = other RNA
gtccttggattgctaaactgt

SEQ ID NO: 93994 - RNA, 21 nt, synthetic construct
  source 1..21: mol_type = other RNA
gtccttgtgatctatgcatac

SEQ ID NO: 93995 - RNA, 21 nt, synthetic construct
  source 1..21: mol_type = other RNA
gtccttgtgttttatttggct

SEQ ID NO: 93996 - RNA, 21 nt, synthetic construct
  source 1..21: mol_type = other RNA
gtcctttccagaggttctttt

SEQ ID NO: 93997 - RNA, 21 nt, synthetic construct
  source 1..21: mol_type = other RNA
gtcctttcttggtctgcagac

SEQ ID NO: 93998 - RNA, 21 nt, synthetic construct
  source 1..21: mol_type = other RNA
gtcctttgatgcacaaaagtt

SEQ ID NO: 93999 - RNA, 21 nt, synthetic construct
  source 1..21: mol_type = other RNA
gtcctttgggaggtcaaggca

SEQ ID NO: 94000 - RNA, 21 nt, synthetic construct
  source 1..21: mol_type = other RNA
gtcctttgtgtcaagtacaac

SEQ ID NO: 94001 - RNA, 21 nt, synthetic construct
  source 1..21: mol_type = other RNA
gtccttttcctgttccgggat

SEQ ID NO: 94002 - RNA, 21 nt, synthetic construct
  source 1..21: mol_type = other RNA
gtccttttgagtttggtgtat

SEQ ID NO: 94003 - RNA, 21 nt, synthetic construct
  source 1..21: mol_type = other RNA
gtccttttttactgacttttc

SEQ ID NO: 94004 - RNA, 21 nt, synthetic construct
  source 1..21: mol_type = other RNA
gtcgaaaacctgaaatggctt

SEQ ID NO: 94005 - RNA, 21 nt, synthetic construct
  source 1..21: mol_type = other RNA
gtcgaagcttaatttagatga

SEQ ID NO: 94006 - RNA, 21 nt, synthetic construct
  source 1..21: mol_type = other RNA
gtcgagaaaaatggggatatc

SEQ ID NO: 94007 - RNA, 21 nt, synthetic construct
  source 1..21: mol_type = other RNA
gtcgagactgtaatgagctga

SEQ ID NO: 94008 - RNA, 21 nt, synthetic construct
  source 1..21: mol_type = other RNA
gtcgagctgggtgatgttcaa

SEQ ID NO: 94009 - RNA, 21 nt, synthetic construct
  source 1..21: mol_type = other RNA
gtcgcaccctgagcatccccg

SEQ ID NO: 94010 - RNA, 21 nt, synthetic construct
  source 1..21: mol_type = other RNA
gtcgcatgaaaacagctaggt

SEQ ID NO: 94011 - RNA, 21 nt, synthetic construct
  source 1..21: mol_type = other RNA
gtcgccatacctggtccttaa

SEQ ID NO: 94012 - RNA, 21 nt, synthetic construct
  source 1..21: mol_type = other RNA
gtcgcccaggcggaatgcagt

SEQ ID NO: 94013 - RNA, 21 nt, synthetic construct
  source 1..21: mol_type = other RNA
gtcgcccaggctggagctcac

SEQ ID NO: 94014 - RNA, 21 nt, synthetic construct
  source 1..21: mol_type = other RNA
gtcgcggacgcgcatttttta

SEQ ID NO: 94015 - RNA, 21 nt, synthetic construct
  source 1..21: mol_type = other RNA
gtcgctctcctgtgccaagtc

SEQ ID NO: 94016 - RNA, 21 nt, synthetic construct
  source 1..21: mol_type = other RNA
gtcgcttgaacctgaaaaacg

SEQ ID NO: 94017 - RNA, 21 nt, synthetic construct
  source 1..21: mol_type = other RNA
gtcggaaggaatgtgcttcct

SEQ ID NO: 94018 - RNA, 21 nt, synthetic construct
  source 1..21: mol_type = other RNA
gtcgggtgtcagaaaccatcg

SEQ ID NO: 94019 - RNA, 21 nt, synthetic construct
  source 1..21: mol_type = other RNA
gtcggtatgttaataaccctg

SEQ ID NO: 94020 - RNA, 21 nt, synthetic construct
  source 1..21: mol_type = other RNA
gtcggttcttcaccgtgcaac

SEQ ID NO: 94021 - RNA, 21 nt, synthetic construct
  source 1..21: mol_type = other RNA
gtcggttttctagttagtttg

SEQ ID NO: 94022 - RNA, 21 nt, synthetic construct
  source 1..21: mol_type = other RNA
gtcgtacctttcgctatcagt

SEQ ID NO: 94023 - RNA, 21 nt, synthetic construct
  source 1..21: mol_type = other RNA
gtcgtcccccatcccctttac

SEQ ID NO: 94024 - RNA, 21 nt, synthetic construct
  source 1..21: mol_type = other RNA
gtcgttgagtacctctgggat

SEQ ID NO: 94025 - RNA, 21 nt, synthetic construct
  source 1..21: mol_type = other RNA
gtcgttggatttatctttcta

SEQ ID NO: 94026 - RNA, 21 nt, synthetic construct
  source 1..21: mol_type = other RNA
gtcgtttatgcatttattagt

SEQ ID NO: 94027 - RNA, 21 nt, synthetic construct
  source 1..21: mol_type = other RNA
gtcgtttatttcttctccctc

SEQ ID NO: 94028 - RNA, 21 nt, synthetic construct
  source 1..21: mol_type = other RNA
gtcgtttcagattgcttgaga

SEQ ID NO: 94029 - RNA, 21 nt, synthetic construct
  source 1..21: mol_type = other RNA
gtctaaccattaacagctcag

SEQ ID NO: 94030 - RNA, 21 nt, synthetic construct
  source 1..21: mol_type = other RNA
gtctaagagataactaatgag

SEQ ID NO: 94031 - RNA, 21 nt, synthetic construct
  source 1..21: mol_type = other RNA
gtctaatgggtacagggtttc

SEQ ID NO: 94032 - RNA, 21 nt, synthetic construct
  source 1..21: mol_type = other RNA
gtctaattttttagtcttgtc

SEQ ID NO: 94033 - RNA, 21 nt, synthetic construct
  source 1..21: mol_type = other RNA
gtctacaaaaggtttccagtg

SEQ ID NO: 94034 - RNA, 21 nt, synthetic construct
  source 1..21: mol_type = other RNA
gtctaccatgttgttcttttc

SEQ ID NO: 94035 - RNA, 21 nt, synthetic construct
  source 1..21: mol_type = other RNA
gtctacctgtctttcccatta

SEQ ID NO: 94036 - RNA, 21 nt, synthetic construct
  source 1..21: mol_type = other RNA
gtctacggacgcaggcaaaca

SEQ ID NO: 94037 - RNA, 21 nt, synthetic construct
  source 1..21: mol_type = other RNA
gtctagccaagggtttgtcaa

SEQ ID NO: 94038 - RNA, 21 nt, synthetic construct
  source 1..21: mol_type = other RNA
gtctagccacttcctattaga

SEQ ID NO: 94039 - RNA, 21 nt, synthetic construct
  source 1..21: mol_type = other RNA
gtctaggaaaagacttgaggt

SEQ ID NO: 94040 - RNA, 21 nt, synthetic construct
  source 1..21: mol_type = other RNA
gtctaggctaatgtgtgttcc

SEQ ID NO: 94041 - RNA, 21 nt, synthetic construct
  source 1..21: mol_type = other RNA
gtctagtccatgaagaaaaca

SEQ ID NO: 94042 - RNA, 21 nt, synthetic construct
  source 1..21: mol_type = other RNA
gtctagtgaatgagaccaaat

SEQ ID NO: 94043 - RNA, 21 nt, synthetic construct
  source 1..21: mol_type = other RNA
gtctagtgtgcatgtgttgtg

SEQ ID NO: 94044 - RNA, 21 nt, synthetic construct
  source 1..21: mol_type = other RNA
gtctataggcaatgagtctga

SEQ ID NO: 94045 - RNA, 21 nt, synthetic construct
  source 1..21: mol_type = other RNA
gtctatagtttaattggggga

SEQ ID NO: 94046 - RNA, 21 nt, synthetic construct
  source 1..21: mol_type = other RNA
gtctatctttgggaaaatctc

SEQ ID NO: 94047 - RNA, 21 nt, synthetic construct
  source 1..21: mol_type = other RNA
gtctatgctcttggtttcttc

SEQ ID NO: 94048 - RNA, 21 nt, synthetic construct
  source 1..21: mol_type = other RNA
gtctatgtgacagaatgcatc

SEQ ID NO: 94049 - RNA, 21 nt, synthetic construct
  source 1..21: mol_type = other RNA
gtctattccctacattgcctt

SEQ ID NO: 94050 - RNA, 21 nt, synthetic construct
  source 1..21: mol_type = other RNA
gtctatttctgaacaaatatc

SEQ ID NO: 94051 - RNA, 21 nt, synthetic construct
  source 1..21: mol_type = other RNA
gtctcaaaacaaacaaacaga

SEQ ID NO: 94052 - RNA, 21 nt, synthetic construct
  source 1..21: mol_type = other RNA
gtctcaaactccaagtctcat

SEQ ID NO: 94053 - RNA, 21 nt, synthetic construct
  source 1..21: mol_type = other RNA
gtctcaacctactttaaatca

SEQ ID NO: 94054 - RNA, 21 nt, synthetic construct
  source 1..21: mol_type = other RNA
gtctcaacctttgcctcctgg

SEQ ID NO: 94055 - RNA, 21 nt, synthetic construct
  source 1..21: mol_type = other RNA
gtctcaagattgtgtgatttc

SEQ ID NO: 94056 - RNA, 21 nt, synthetic construct
  source 1..21: mol_type = other RNA
gtctcaatctcctgatccacc

SEQ ID NO: 94057 - RNA, 21 nt, synthetic construct
  source 1..21: mol_type = other RNA
gtctcacactgttgtccaggc

SEQ ID NO: 94058 - RNA, 21 nt, synthetic construct
  source 1..21: mol_type = other RNA
gtctcaccctcaggactctgc

SEQ ID NO: 94059 - RNA, 21 nt, synthetic construct
  source 1..21: mol_type = other RNA
gtctcacctcaaggccaactg

SEQ ID NO: 94060 - RNA, 21 nt, synthetic construct
  source 1..21: mol_type = other RNA
gtctcacgatactttttattt

SEQ ID NO: 94061 - RNA, 21 nt, synthetic construct
  source 1..21: mol_type = other RNA
gtctcactcttaccaaggctg

SEQ ID NO: 94062 - RNA, 21 nt, synthetic construct
  source 1..21: mol_type = other RNA
gtctcagagtatatatgctcc

SEQ ID NO: 94063 - RNA, 21 nt, synthetic construct
  source 1..21: mol_type = other RNA
gtctcagatgtctccattttg

SEQ ID NO: 94064 - RNA, 21 nt, synthetic construct
  source 1..21: mol_type = other RNA
gtctcagccttttctgatttg

SEQ ID NO: 94065 - RNA, 21 nt, synthetic construct
  source 1..21: mol_type = other RNA
gtctcagctcctcagaaggcc

SEQ ID NO: 94066 - RNA, 21 nt, synthetic construct
  source 1..21: mol_type = other RNA
gtctcagtcccaaatgggagc

SEQ ID NO: 94067 - RNA, 21 nt, synthetic construct
  source 1..21: mol_type = other RNA
gtctcataaagccggattcct

SEQ ID NO: 94068 - RNA, 21 nt, synthetic construct
  source 1..21: mol_type = other RNA
gtctcatctgtcaaaaagaga

SEQ ID NO: 94069 - RNA, 21 nt, synthetic construct
  source 1..21: mol_type = other RNA
gtctcatgcaattccccagcc

SEQ ID NO: 94070 - RNA, 21 nt, synthetic construct
  source 1..21: mol_type = other RNA
gtctcattcactagacacatt

SEQ ID NO: 94071 - RNA, 21 nt, synthetic construct
  source 1..21: mol_type = other RNA
gtctcattgtggatgagatta

SEQ ID NO: 94072 - RNA, 21 nt, synthetic construct
  source 1..21: mol_type = other RNA
gtctccaacgctttttatgga

SEQ ID NO: 94073 - RNA, 21 nt, synthetic construct
  source 1..21: mol_type = other RNA
gtctccaatcctcagccccct

SEQ ID NO: 94074 - RNA, 21 nt, synthetic construct
  source 1..21: mol_type = other RNA
gtctccatacaaggagaccta

SEQ ID NO: 94075 - RNA, 21 nt, synthetic construct
  source 1..21: mol_type = other RNA
gtctccataccccctggaaat

SEQ ID NO: 94076 - RNA, 21 nt, synthetic construct
  source 1..21: mol_type = other RNA
gtctccatgtcctcacctcac

SEQ ID NO: 94077 - RNA, 21 nt, synthetic construct
  source 1..21: mol_type = other RNA
gtctccattttgccagctaac

SEQ ID NO: 94078 - RNA, 21 nt, synthetic construct
  source 1..21: mol_type = other RNA
gtctccattttggtcttaccc

SEQ ID NO: 94079 - RNA, 21 nt, synthetic construct
  source 1..21: mol_type = other RNA
gtctcccagcatgaagccctc

SEQ ID NO: 94080 - RNA, 21 nt, synthetic construct
  source 1..21: mol_type = other RNA
gtctcccccaggtggttctgc

SEQ ID NO: 94081 - RNA, 21 nt, synthetic construct
  source 1..21: mol_type = other RNA
gtctccctaaccaggcccggg

SEQ ID NO: 94082 - RNA, 21 nt, synthetic construct
  source 1..21: mol_type = other RNA
gtctccctcggccacagcagg

SEQ ID NO: 94083 - RNA, 21 nt, synthetic construct
  source 1..21: mol_type = other RNA
gtctcctatattgtcaatggg

SEQ ID NO: 94084 - RNA, 21 nt, synthetic construct
  source 1..21: mol_type = other RNA
gtctcctctttcatatctgat

SEQ ID NO: 94085 - RNA, 21 nt, synthetic construct
  source 1..21: mol_type = other RNA
gtctccttgtatggagactag

SEQ ID NO: 94086 - RNA, 21 nt, synthetic construct
  source 1..21: mol_type = other RNA
gtctcctttctatacttcatc

SEQ ID NO: 94087 - RNA, 21 nt, synthetic construct
  source 1..21: mol_type = other RNA
gtctcgaaaaggaatggaatt

SEQ ID NO: 94088 - RNA, 21 nt, synthetic construct
  source 1..21: mol_type = other RNA
gtctcgaactctcgacctcgt

SEQ ID NO: 94089 - RNA, 21 nt, synthetic construct
  source 1..21: mol_type = other RNA
gtctcgaccccctgggctcaa

SEQ ID NO: 94090 - RNA, 21 nt, synthetic construct
  source 1..21: mol_type = other RNA
gtctcgagctcctgacctcag

SEQ ID NO: 94091 - RNA, 21 nt, synthetic construct
  source 1..21: mol_type = other RNA
gtctcgctctgtcgcccaggc

SEQ ID NO: 94092 - RNA, 21 nt, synthetic construct
  source 1..21: mol_type = other RNA
gtctcggatttaagagaggaa

SEQ ID NO: 94093 - RNA, 21 nt, synthetic construct
  source 1..21: mol_type = other RNA
gtctcgtgaatttggtattct

SEQ ID NO: 94094 - RNA, 21 nt, synthetic construct
  source 1..21: mol_type = other RNA
gtctctacccagcactctgaa

SEQ ID NO: 94095 - RNA, 21 nt, synthetic construct
  source 1..21: mol_type = other RNA
gtctctctgaaattagctaag

SEQ ID NO: 94096 - RNA, 21 nt, synthetic construct
  source 1..21: mol_type = other RNA
gtctctgacatgagagctaag

SEQ ID NO: 94097 - RNA, 21 nt, synthetic construct
  source 1..21: mol_type = other RNA
gtctctgcaaaaaatgtttgt

SEQ ID NO: 94098 - RNA, 21 nt, synthetic construct
  source 1..21: mol_type = other RNA
gtctctgcaacatttgttgca

SEQ ID NO: 94099 - RNA, 21 nt, synthetic construct
  source 1..21: mol_type = other RNA
gtctctgcagagcaggctcca

SEQ ID NO: 94100 - RNA, 21 nt, synthetic construct
  source 1..21: mol_type = other RNA
gtctctgctcactgcaacctt

SEQ ID NO: 94101 - RNA, 21 nt, synthetic construct
  source 1..21: mol_type = other RNA
gtctctgctctcaagtaattg

SEQ ID NO: 94102 - RNA, 21 nt, synthetic construct
  source 1..21: mol_type = other RNA
gtctctggaaggctaagcatg

SEQ ID NO: 94103 - RNA, 21 nt, synthetic construct
  source 1..21: mol_type = other RNA
gtctcttaagaccacaaggat

SEQ ID NO: 94104 - RNA, 21 nt, synthetic construct
  source 1..21: mol_type = other RNA
gtctcttcctgtatatctcct

SEQ ID NO: 94105 - RNA, 21 nt, synthetic construct
  source 1..21: mol_type = other RNA
gtctcttcgagggggctgagt

SEQ ID NO: 94106 - RNA, 21 nt, synthetic construct
  source 1..21: mol_type = other RNA
gtctctttgaaaggaatccgg

SEQ ID NO: 94107 - RNA, 21 nt, synthetic construct
  source 1..21: mol_type = other RNA
gtctgaaagcttctgagcagt

SEQ ID NO: 94108 - RNA, 21 nt, synthetic construct
  source 1..21: mol_type = other RNA
gtctgacatactgtcacaggc

SEQ ID NO: 94109 - RNA, 21 nt, synthetic construct
  source 1..21: mol_type = other RNA
gtctgactacactgaagggaa

SEQ ID NO: 94110 - RNA, 21 nt, synthetic construct
  source 1..21: mol_type = other RNA
gtctgacttctctcagaggga

SEQ ID NO: 94111 - RNA, 21 nt, synthetic construct
  source 1..21: mol_type = other RNA
gtctgatgtgtgtctctgctc

SEQ ID NO: 94112 - RNA, 21 nt, synthetic construct
  source 1..21: mol_type = other RNA
gtctgcaagcagatctgctgt

SEQ ID NO: 94113 - RNA, 21 nt, synthetic construct
  source 1..21: mol_type = other RNA
gtctgcagaccaagaaaggac

SEQ ID NO: 94114 - RNA, 21 nt, synthetic construct
  source 1..21: mol_type = other RNA
gtctgcagactcttgtcccgg

SEQ ID NO: 94115 - RNA, 21 nt, synthetic construct
  source 1..21: mol_type = other RNA
gtctgcaggagccttgctgtt

SEQ ID NO: 94116 - RNA, 21 nt, synthetic construct
  source 1..21: mol_type = other RNA
gtctgcaggcagaatgtgacc

SEQ ID NO: 94117 - RNA, 21 nt, synthetic construct
  source 1..21: mol_type = other RNA
gtctgcccatcctatctaagc

SEQ ID NO: 94118 - RNA, 21 nt, synthetic construct
  source 1..21: mol_type = other RNA
gtctgcgccttaaagccacac

SEQ ID NO: 94119 - RNA, 21 nt, synthetic construct
  source 1..21: mol_type = other RNA
gtctgctacaggggcattccc

SEQ ID NO: 94120 - RNA, 21 nt, synthetic construct
  source 1..21: mol_type = other RNA
gtctggaacacacattagcct

SEQ ID NO: 94121 - RNA, 21 nt, synthetic construct
  source 1..21: mol_type = other RNA
gtctggaatgtgtagttctgg

SEQ ID NO: 94122 - RNA, 21 nt, synthetic construct
  source 1..21: mol_type = other RNA
gtctggattgattccagtttc

SEQ ID NO: 94123 - RNA, 21 nt, synthetic construct
  source 1..21: mol_type = other RNA
gtctgggaagttatgtagctg

SEQ ID NO: 94124 - RNA, 21 nt, synthetic construct
  source 1..21: mol_type = other RNA
gtctgggataatgagtttaat

SEQ ID NO: 94125 - RNA, 21 nt, synthetic construct
  source 1..21: mol_type = other RNA
gtctgggtgatatctgtaagt

SEQ ID NO: 94126 - RNA, 21 nt, synthetic construct
  source 1..21: mol_type = other RNA
gtctggtatctaccaaaaaac

SEQ ID NO: 94127 - RNA, 21 nt, synthetic construct
  source 1..21: mol_type = other RNA
gtctggtggacaaaaaacgcg

SEQ ID NO: 94128 - RNA, 21 nt, synthetic construct
  source 1..21: mol_type = other RNA
gtctggtttgctttggagtca

SEQ ID NO: 94129 - RNA, 21 nt, synthetic construct
  source 1..21: mol_type = other RNA
gtctgtaagcacctgtataaa

SEQ ID NO: 94130 - RNA, 21 nt, synthetic construct
  source 1..21: mol_type = other RNA
gtctgtaagtcagttaacagt

SEQ ID NO: 94131 - RNA, 21 nt, synthetic construct
  source 1..21: mol_type = other RNA
gtctgtagcttcacgtgcatt

SEQ ID NO: 94132 - RNA, 21 nt, synthetic construct
  source 1..21: mol_type = other RNA
gtctgtagggtgactagtgtg

SEQ ID NO: 94133 - RNA, 21 nt, synthetic construct
  source 1..21: mol_type = other RNA
gtctgtagttacaactactcg

SEQ ID NO: 94134 - RNA, 21 nt, synthetic construct
  source 1..21: mol_type = other RNA
gtctgtatttctgctttggta

SEQ ID NO: 94135 - RNA, 21 nt, synthetic construct
  source 1..21: mol_type = other RNA
gtctgtcctcgtaaaagctaa

SEQ ID NO: 94136 - RNA, 21 nt, synthetic construct
  source 1..21: mol_type = other RNA
gtctgtctcacctcaaggcca

SEQ ID NO: 94137 - RNA, 21 nt, synthetic construct
  source 1..21: mol_type = other RNA
gtctgtctgttcacatttcgc

SEQ ID NO: 94138 - RNA, 21 nt, synthetic construct
  source 1..21: mol_type = other RNA
gtctgtctttcagtatgtgtc

SEQ ID NO: 94139 - RNA, 21 nt, synthetic construct
  source 1..21: mol_type = other RNA
gtctgtgaaaataatacctaa

SEQ ID NO: 94140 - RNA, 21 nt, synthetic construct
  source 1..21: mol_type = other RNA
gtctgtgatgtagaggcagtt

SEQ ID NO: 94141 - RNA, 21 nt, synthetic construct
  source 1..21: mol_type = other RNA
gtctgtgattatcagggatat

SEQ ID NO: 94142 - RNA, 21 nt, synthetic construct
  source 1..21: mol_type = other RNA
gtctgtgctctgtatttaatc

SEQ ID NO: 94143 - RNA, 21 nt, synthetic construct
  source 1..21: mol_type = other RNA
gtctgtgcttaaggaaatgga

SEQ ID NO: 94144 - RNA, 21 nt, synthetic construct
  source 1..21: mol_type = other RNA
gtctgtggtctcagctcctca

SEQ ID NO: 94145 - RNA, 21 nt, synthetic construct
  source 1..21: mol_type = other RNA
gtctgtgtagttcatcagcat

SEQ ID NO: 94146 - RNA, 21 nt, synthetic construct
  source 1..21: mol_type = other RNA
gtctgttactcccgatttcag

SEQ ID NO: 94147 - RNA, 21 nt, synthetic construct
  source 1..21: mol_type = other RNA
gtctgttcacatttcgccttc

SEQ ID NO: 94148 - RNA, 21 nt, synthetic construct
  source 1..21: mol_type = other RNA
gtctgtttgccatcttcaaga

SEQ ID NO: 94149 - RNA, 21 nt, synthetic construct
  source 1..21: mol_type = other RNA
gtctgttttacatgtttaact

SEQ ID NO: 94150 - RNA, 21 nt, synthetic construct
  source 1..21: mol_type = other RNA
gtcttaaccattgagccaaag

SEQ ID NO: 94151 - RNA, 21 nt, synthetic construct
  source 1..21: mol_type = other RNA
gtcttaagaaggaaaagaaca

SEQ ID NO: 94152 - RNA, 21 nt, synthetic construct
  source 1..21: mol_type = other RNA
gtcttaagagactctcaagaa

SEQ ID NO: 94153 - RNA, 21 nt, synthetic construct
  source 1..21: mol_type = other RNA
gtcttacataggcttagtaca

SEQ ID NO: 94154 - RNA, 21 nt, synthetic construct
  source 1..21: mol_type = other RNA
gtcttaccctctagctcccca

SEQ ID NO: 94155 - RNA, 21 nt, synthetic construct
  source 1..21: mol_type = other RNA
gtcttagctcttaagcttagg

SEQ ID NO: 94156 - RNA, 21 nt, synthetic construct
  source 1..21: mol_type = other RNA
gtcttagtctgacttctctca

SEQ ID NO: 94157 - RNA, 21 nt, synthetic construct
  source 1..21: mol_type = other RNA
gtcttagttctgcttccacat

SEQ ID NO: 94158 - RNA, 21 nt, synthetic construct
  source 1..21: mol_type = other RNA
gtcttataggttgaatagggc

SEQ ID NO: 94159 - RNA, 21 nt, synthetic construct
  source 1..21: mol_type = other RNA
gtcttatgctggtgggctttg

SEQ ID NO: 94160 - RNA, 21 nt, synthetic construct
  source 1..21: mol_type = other RNA
gtcttattgttttgatttgca

SEQ ID NO: 94161 - RNA, 21 nt, synthetic construct
  source 1..21: mol_type = other RNA
gtcttcaacctcaactttagg

SEQ ID NO: 94162 - RNA, 21 nt, synthetic construct
  source 1..21: mol_type = other RNA
gtcttcagaggccctggtgct

SEQ ID NO: 94163 - RNA, 21 nt, synthetic construct
  source 1..21: mol_type = other RNA
gtcttcaggtctctctgaaat

SEQ ID NO: 94164 - RNA, 21 nt, synthetic construct
  source 1..21: mol_type = other RNA
gtcttccaaaatattgaagag

SEQ ID NO: 94165 - RNA, 21 nt, synthetic construct
  source 1..21: mol_type = other RNA
gtcttccaattgcagaaaaat

SEQ ID NO: 94166 - RNA, 21 nt, synthetic construct
  source 1..21: mol_type = other RNA
gtcttccattttagatcaagt

SEQ ID NO: 94167 - RNA, 21 nt, synthetic construct
  source 1..21: mol_type = other RNA
gtcttccgtctcaagattgtg

SEQ ID NO: 94168 - RNA, 21 nt, synthetic construct
  source 1..21: mol_type = other RNA
gtcttctaaccctcaaatgcc

SEQ ID NO: 94169 - RNA, 21 nt, synthetic construct
  source 1..21: mol_type = other RNA
gtcttctactgtgaattcact

SEQ ID NO: 94170 - RNA, 21 nt, synthetic construct
  source 1..21: mol_type = other RNA
gtcttctagctttcagcactg

SEQ ID NO: 94171 - RNA, 21 nt, synthetic construct
  source 1..21: mol_type = other RNA
gtcttctcagatctgttgcag

SEQ ID NO: 94172 - RNA, 21 nt, synthetic construct
  source 1..21: mol_type = other RNA
gtcttctcatacagattttat

SEQ ID NO: 94173 - RNA, 21 nt, synthetic construct
  source 1..21: mol_type = other RNA
gtcttctgtttttcttagtct

SEQ ID NO: 94174 - RNA, 21 nt, synthetic construct
  source 1..21: mol_type = other RNA
gtcttcttctaagctaagagt

SEQ ID NO: 94175 - RNA, 21 nt, synthetic construct
  source 1..21: mol_type = other RNA
gtcttcttggattttcttcat

SEQ ID NO: 94176 - RNA, 21 nt, synthetic construct
  source 1..21: mol_type = other RNA
gtcttgaatagcatcttagct

SEQ ID NO: 94177 - RNA, 21 nt, synthetic construct
  source 1..21: mol_type = other RNA
gtcttgatgatagaataccac

SEQ ID NO: 94178 - RNA, 21 nt, synthetic construct
  source 1..21: mol_type = other RNA
gtcttgctctgtcacccacgt

SEQ ID NO: 94179 - RNA, 21 nt, synthetic construct
  source 1..21: mol_type = other RNA
gtcttgctggaagttggccca

SEQ ID NO: 94180 - RNA, 21 nt, synthetic construct
  source 1..21: mol_type = other RNA
gtcttggacccatgcccatgt

SEQ ID NO: 94181 - RNA, 21 nt, synthetic construct
  source 1..21: mol_type = other RNA
gtcttggctattgtcagtaat

SEQ ID NO: 94182 - RNA, 21 nt, synthetic construct
  source 1..21: mol_type = other RNA
gtcttggtagtttgcacgttt

SEQ ID NO: 94183 - RNA, 21 nt, synthetic construct
  source 1..21: mol_type = other RNA
gtcttggtgtgctcttttcat

SEQ ID NO: 94184 - RNA, 21 nt, synthetic construct
  source 1..21: mol_type = other RNA
gtcttgtactcccagcctcaa

SEQ ID NO: 94185 - RNA, 21 nt, synthetic construct
  source 1..21: mol_type = other RNA
gtcttgtcaataatttggatg

SEQ ID NO: 94186 - RNA, 21 nt, synthetic construct
  source 1..21: mol_type = other RNA
gtcttgtcataacagtattgt

SEQ ID NO: 94187 - RNA, 21 nt, synthetic construct
  source 1..21: mol_type = other RNA
gtcttgtctcaacctttgcct

SEQ ID NO: 94188 - RNA, 21 nt, synthetic construct
  source 1..21: mol_type = other RNA
gtcttgtcttttctttttctt

SEQ ID NO: 94189 - RNA, 21 nt, synthetic construct
  source 1..21: mol_type = other RNA
gtcttgtgcatcctttatacc

SEQ ID NO: 94190 - RNA, 21 nt, synthetic construct
  source 1..21: mol_type = other RNA
gtcttgtggctgacatgtgta

SEQ ID NO: 94191 - RNA, 21 nt, synthetic construct
  source 1..21: mol_type = other RNA
gtcttgtttacccagtgtgtt

SEQ ID NO: 94192 - RNA, 21 nt, synthetic construct
  source 1..21: mol_type = other RNA
gtctttaaaagaaagctctca

SEQ ID NO: 94193 - RNA, 21 nt, synthetic construct
  source 1..21: mol_type = other RNA
gtctttatgccaatatcacac

SEQ ID NO: 94194 - RNA, 21 nt, synthetic construct
  source 1..21: mol_type = other RNA
gtctttcagtatgtgtctctg

SEQ ID NO: 94195 - RNA, 21 nt, synthetic construct
  source 1..21: mol_type = other RNA
gtctttcccattaccaaaacc

SEQ ID NO: 94196 - RNA, 21 nt, synthetic construct
  source 1..21: mol_type = other RNA
gtctttcctgatcagcaccct

SEQ ID NO: 94197 - RNA, 21 nt, synthetic construct
  source 1..21: mol_type = other RNA
gtctttctcccaggtcagtag

SEQ ID NO: 94198 - RNA, 21 nt, synthetic construct
  source 1..21: mol_type = other RNA
gtctttgatccattttgagtt

SEQ ID NO: 94199 - RNA, 21 nt, synthetic construct
  source 1..21: mol_type = other RNA
gtctttggcccatatcctttt

SEQ ID NO: 94200 - RNA, 21 nt, synthetic construct
  source 1..21: mol_type = other RNA
gtctttggcccattttcgaat

SEQ ID NO: 94201 - RNA, 21 nt, synthetic construct
  source 1..21: mol_type = other RNA
gtctttggctcttagaaaata

SEQ ID NO: 94202 - RNA, 21 nt, synthetic construct
  source 1..21: mol_type = other RNA
gtctttgggaaggccctgatt

SEQ ID NO: 94203 - RNA, 21 nt, synthetic construct
  source 1..21: mol_type = other RNA
gtctttgggtaatttatctcc

SEQ ID NO: 94204 - RNA, 21 nt, synthetic construct
  source 1..21: mol_type = other RNA
gtctttggtgatcctaagcca

SEQ ID NO: 94205 - RNA, 21 nt, synthetic construct
  source 1..21: mol_type = other RNA
gtctttgtctattccctacat

SEQ ID NO: 94206 - RNA, 21 nt, synthetic construct
  source 1..21: mol_type = other RNA
gtcttttaacttgctttgaat

SEQ ID NO: 94207 - RNA, 21 nt, synthetic construct
  source 1..21: mol_type = other RNA
gtcttttagccaacaaccata

SEQ ID NO: 94208 - RNA, 21 nt, synthetic construct
  source 1..21: mol_type = other RNA
gtcttttcctaccctgaggat

SEQ ID NO: 94209 - RNA, 21 nt, synthetic construct
  source 1..21: mol_type = other RNA
gtcttttcctagactgccagg

SEQ ID NO: 94210 - RNA, 21 nt, synthetic construct
  source 1..21: mol_type = other RNA
gtcttttctatctgaacattt

SEQ ID NO: 94211 - RNA, 21 nt, synthetic construct
  source 1..21: mol_type = other RNA
gtcttttgaagaagttcttaa

SEQ ID NO: 94212 - RNA, 21 nt, synthetic construct
  source 1..21: mol_type = other RNA
gtctttttacacttggagttt

SEQ ID NO: 94213 - RNA, 21 nt, synthetic construct
  source 1..21: mol_type = other RNA
gtctttttccaggaccaattt

SEQ ID NO: 94214 - RNA, 21 nt, synthetic construct
  source 1..21: mol_type = other RNA
gtctttttgtgacttgtttat

SEQ ID NO: 94215 - RNA, 21 nt, synthetic construct
  source 1..21: mol_type = other RNA
gtgaaaaaacaaaacaaaacc

SEQ ID NO: 94216 - RNA, 21 nt, synthetic construct
  source 1..21: mol_type = other RNA
gtgaaaaaatggtgcagccac

SEQ ID NO: 94217 - RNA, 21 nt, synthetic construct
  source 1..21: mol_type = other RNA
gtgaaaaatgacctaaaatct

SEQ ID NO: 94218 - RNA, 21 nt, synthetic construct
  source 1..21: mol_type = other RNA
gtgaaaaatttgacatgacag

SEQ ID NO: 94219 - RNA, 21 nt, synthetic construct
  source 1..21: mol_type = other RNA
gtgaaaacacaaactgcagaa

SEQ ID NO: 94220 - RNA, 21 nt, synthetic construct
  source 1..21: mol_type = other RNA
gtgaaaactaaggtcaagaga

SEQ ID NO: 94221 - RNA, 21 nt, synthetic construct
  source 1..21: mol_type = other RNA
gtgaaaagaaaaaggttaagg

SEQ ID NO: 94222 - RNA, 21 nt, synthetic construct
  source 1..21: mol_type = other RNA
gtgaaaagaaacaagtgaaat

SEQ ID NO: 94223 - RNA, 21 nt, synthetic construct
  source 1..21: mol_type = other RNA
gtgaaaaggcaaaccacacag

SEQ ID NO: 94224 - RNA, 21 nt, synthetic construct
  source 1..21: mol_type = other RNA
gtgaaaataatacctaacagc

SEQ ID NO: 94225 - RNA, 21 nt, synthetic construct
  source 1..21: mol_type = other RNA
gtgaaaatactaacgatcctt

SEQ ID NO: 94226 - RNA, 21 nt, synthetic construct
  source 1..21: mol_type = other RNA
gtgaaaatcattttggcaaat

SEQ ID NO: 94227 - RNA, 21 nt, synthetic construct
  source 1..21: mol_type = other RNA
gtgaaaccaagcaagtaaaag

SEQ ID NO: 94228 - RNA, 21 nt, synthetic construct
  source 1..21: mol_type = other RNA
gtgaaactctggctcagaaac

SEQ ID NO: 94229 - RNA, 21 nt, synthetic construct
  source 1..21: mol_type = other RNA
gtgaaacttgaatactcgtgt

SEQ ID NO: 94230 - RNA, 21 nt, synthetic construct
  source 1..21: mol_type = other RNA
gtgaaaggcaaaggaaaaaac

SEQ ID NO: 94231 - RNA, 21 nt, synthetic construct
  source 1..21: mol_type = other RNA
gtgaaagtagaggactgccta

SEQ ID NO: 94232 - RNA, 21 nt, synthetic construct
  source 1..21: mol_type = other RNA
gtgaaagtattaaaagcacaa

SEQ ID NO: 94233 - RNA, 21 nt, synthetic construct
  source 1..21: mol_type = other RNA
gtgaaagtctccctaaccagg

SEQ ID NO: 94234 - RNA, 21 nt, synthetic construct
  source 1..21: mol_type = other RNA
gtgaaatagttggtcagaaaa

SEQ ID NO: 94235 - RNA, 21 nt, synthetic construct
  source 1..21: mol_type = other RNA
gtgaaatcataaaatatgtcc

SEQ ID NO: 94236 - RNA, 21 nt, synthetic construct
  source 1..21: mol_type = other RNA
gtgaaatgatttcaagtaaca

SEQ ID NO: 94237 - RNA, 21 nt, synthetic construct
  source 1..21: mol_type = other RNA
gtgaacagacagacatgcatg

SEQ ID NO: 94238 - RNA, 21 nt, synthetic construct
  source 1..21: mol_type = other RNA
gtgaacaggcaaccttgggag

SEQ ID NO: 94239 - RNA, 21 nt, synthetic construct
  source 1..21: mol_type = other RNA
gtgaacatgggaatgcatata

SEQ ID NO: 94240 - RNA, 21 nt, synthetic construct
  source 1..21: mol_type = other RNA
gtgaaccaaaaaccacatttc

SEQ ID NO: 94241 - RNA, 21 nt, synthetic construct
  source 1..21: mol_type = other RNA
gtgaaccacgcatctggtcta

SEQ ID NO: 94242 - RNA, 21 nt, synthetic construct
  source 1..21: mol_type = other RNA
gtgaaccttgaagtacttcag

SEQ ID NO: 94243 - RNA, 21 nt, synthetic construct
  source 1..21: mol_type = other RNA
gtgaacgatggtttctgacac

SEQ ID NO: 94244 - RNA, 21 nt, synthetic construct
  source 1..21: mol_type = other RNA
gtgaactattagagcttttat

SEQ ID NO: 94245 - RNA, 21 nt, synthetic construct
  source 1..21: mol_type = other RNA
gtgaactccagtctgggcaac

SEQ ID NO: 94246 - RNA, 21 nt, synthetic construct
  source 1..21: mol_type = other RNA
gtgaactgggtgtagggggaa

SEQ ID NO: 94247 - RNA, 21 nt, synthetic construct
  source 1..21: mol_type = other RNA
gtgaagaaacctttctcaaag

SEQ ID NO: 94248 - RNA, 21 nt, synthetic construct
  source 1..21: mol_type = other RNA
gtgaagaaccgactgaaagga

SEQ ID NO: 94249 - RNA, 21 nt, synthetic construct
  source 1..21: mol_type = other RNA
gtgaagaaggaatgtgcactc

SEQ ID NO: 94250 - RNA, 21 nt, synthetic construct
  source 1..21: mol_type = other RNA
gtgaagaatgtgaaaaatttg

SEQ ID NO: 94251 - RNA, 21 nt, synthetic construct
  source 1..21: mol_type = other RNA
gtgaagagagcctgtggtctc

SEQ ID NO: 94252 - RNA, 21 nt, synthetic construct
  source 1..21: mol_type = other RNA
gtgaagatgctgaacttgtca

SEQ ID NO: 94253 - RNA, 21 nt, synthetic construct
  source 1..21: mol_type = other RNA
gtgaagatggagttacgctgc

SEQ ID NO: 94254 - RNA, 21 nt, synthetic construct
  source 1..21: mol_type = other RNA
gtgaagattaagcacatctgt

SEQ ID NO: 94255 - RNA, 21 nt, synthetic construct
  source 1..21: mol_type = other RNA
gtgaagcagagagagaagatg

SEQ ID NO: 94256 - RNA, 21 nt, synthetic construct
  source 1..21: mol_type = other RNA
gtgaagcccagagaggctagg

SEQ ID NO: 94257 - RNA, 21 nt, synthetic construct
  source 1..21: mol_type = other RNA
gtgaagctacagactaatatg

SEQ ID NO: 94258 - RNA, 21 nt, synthetic construct
  source 1..21: mol_type = other RNA
gtgaagctggacccttacctt

SEQ ID NO: 94259 - RNA, 21 nt, synthetic construct
  source 1..21: mol_type = other RNA
gtgaagcttcaaaccactatc

SEQ ID NO: 94260 - RNA, 21 nt, synthetic construct
  source 1..21: mol_type = other RNA
gtgaagggaggtaggcttaga

SEQ ID NO: 94261 - RNA, 21 nt, synthetic construct
  source 1..21: mol_type = other RNA
gtgaaggttcatgaacataaa

SEQ ID NO: 94262 - RNA, 21 nt, synthetic construct
  source 1..21: mol_type = other RNA
gtgaagtcaagatgaatctgc

SEQ ID NO: 94263 - RNA, 21 nt, synthetic construct
  source 1..21: mol_type = other RNA
gtgaagtcaatttcagatctc

SEQ ID NO: 94264 - RNA, 21 nt, synthetic construct
  source 1..21: mol_type = other RNA
gtgaagtcatctggtcctgag

SEQ ID NO: 94265 - RNA, 21 nt, synthetic construct
  source 1..21: mol_type = other RNA
gtgaagtcccatcttccatac

SEQ ID NO: 94266 - RNA, 21 nt, synthetic construct
  source 1..21: mol_type = other RNA
gtgaagttaagggccatttca

SEQ ID NO: 94267 - RNA, 21 nt, synthetic construct
  source 1..21: mol_type = other RNA
gtgaagttgggcttaacattt

SEQ ID NO: 94268 - RNA, 21 nt, synthetic construct
  source 1..21: mol_type = other RNA
gtgaataacccatatctttgc

SEQ ID NO: 94269 - RNA, 21 nt, synthetic construct
  source 1..21: mol_type = other RNA
gtgaataggaaagtgacagat

SEQ ID NO: 94270 - RNA, 21 nt, synthetic construct
  source 1..21: mol_type = other RNA
gtgaatatagctaagaaacag

SEQ ID NO: 94271 - RNA, 21 nt, synthetic construct
  source 1..21: mol_type = other RNA
gtgaatatcatttgaatgatg

SEQ ID NO: 94272 - RNA, 21 nt, synthetic construct
  source 1..21: mol_type = other RNA
gtgaatcactacagcatatta

SEQ ID NO: 94273 - RNA, 21 nt, synthetic construct
  source 1..21: mol_type = other RNA
gtgaatctgagtaaagggtaa

SEQ ID NO: 94274 - RNA, 21 nt, synthetic construct
  source 1..21: mol_type = other RNA
gtgaatctgttcctgggttct

SEQ ID NO: 94275 - RNA, 21 nt, synthetic construct
  source 1..21: mol_type = other RNA
gtgaatgagaccaaatgcata

SEQ ID NO: 94276 - RNA, 21 nt, synthetic construct
  source 1..21: mol_type = other RNA
gtgaatgaggagtgaattttt

SEQ ID NO: 94277 - RNA, 21 nt, synthetic construct
  source 1..21: mol_type = other RNA
gtgaatggaaaattcaaacat

SEQ ID NO: 94278 - RNA, 21 nt, synthetic construct
  source 1..21: mol_type = other RNA
gtgaatggggtaattttgggg

SEQ ID NO: 94279 - RNA, 21 nt, synthetic construct
  source 1..21: mol_type = other RNA
gtgaatgtgaggtgaggacat

SEQ ID NO: 94280 - RNA, 21 nt, synthetic construct
  source 1..21: mol_type = other RNA
gtgaattagatggcttaggat

SEQ ID NO: 94281 - RNA, 21 nt, synthetic construct
  source 1..21: mol_type = other RNA
gtgaattcacagtagaagact

SEQ ID NO: 94282 - RNA, 21 nt, synthetic construct
  source 1..21: mol_type = other RNA
gtgaattcactaatgcctcaa

SEQ ID NO: 94283 - RNA, 21 nt, synthetic construct
  source 1..21: mol_type = other RNA
gtgaattctgacttagtgagg

SEQ ID NO: 94284 - RNA, 21 nt, synthetic construct
  source 1..21: mol_type = other RNA
gtgaattgataaaagtcattg

SEQ ID NO: 94285 - RNA, 21 nt, synthetic construct
  source 1..21: mol_type = other RNA
gtgaattgtgacagttctatt

SEQ ID NO: 94286 - RNA, 21 nt, synthetic construct
  source 1..21: mol_type = other RNA
gtgaatttggatttgagtaac

SEQ ID NO: 94287 - RNA, 21 nt, synthetic construct
  source 1..21: mol_type = other RNA
gtgaatttggtattcttatcc

SEQ ID NO: 94288 - RNA, 21 nt, synthetic construct
  source 1..21: mol_type = other RNA
gtgacaaaaagtaggggtaaa

SEQ ID NO: 94289 - RNA, 21 nt, synthetic construct
  source 1..21: mol_type = other RNA
gtgacaaacacttttcaaaca

SEQ ID NO: 94290 - RNA, 21 nt, synthetic construct
  source 1..21: mol_type = other RNA
gtgacaagttcagcatcttca

SEQ ID NO: 94291 - RNA, 21 nt, synthetic construct
  source 1..21: mol_type = other RNA
gtgacacctgaggggtcttat

SEQ ID NO: 94292 - RNA, 21 nt, synthetic construct
  source 1..21: mol_type = other RNA
gtgacagaacaaactcaagtt

SEQ ID NO: 94293 - RNA, 21 nt, synthetic construct
  source 1..21: mol_type = other RNA
gtgacagaacaaataacacca

SEQ ID NO: 94294 - RNA, 21 nt, synthetic construct
  source 1..21: mol_type = other RNA
gtgacagaatgcatcttttaa

SEQ ID NO: 94295 - RNA, 21 nt, synthetic construct
  source 1..21: mol_type = other RNA
gtgacagagagagacctttct

SEQ ID NO: 94296 - RNA, 21 nt, synthetic construct
  source 1..21: mol_type = other RNA
gtgacagagccgagcagaagg

SEQ ID NO: 94297 - RNA, 21 nt, synthetic construct
  source 1..21: mol_type = other RNA
gtgacagatgagaaatacttg

SEQ ID NO: 94298 - RNA, 21 nt, synthetic construct
  source 1..21: mol_type = other RNA
gtgacagctgagtagcgcttt

SEQ ID NO: 94299 - RNA, 21 nt, synthetic construct
  source 1..21: mol_type = other RNA
gtgacagtatgtcagactcat

SEQ ID NO: 94300 - RNA, 21 nt, synthetic construct
  source 1..21: mol_type = other RNA
gtgacagttctatttctttcc

SEQ ID NO: 94301 - RNA, 21 nt, synthetic construct
  source 1..21: mol_type = other RNA
gtgacagttctgtgaatttga

SEQ ID NO: 94302 - RNA, 21 nt, synthetic construct
  source 1..21: mol_type = other RNA
gtgacatatgccggctgttag

SEQ ID NO: 94303 - RNA, 21 nt, synthetic construct
  source 1..21: mol_type = other RNA
gtgacatcaagggtggtgctg

SEQ ID NO: 94304 - RNA, 21 nt, synthetic construct
  source 1..21: mol_type = other RNA
gtgacattagtggtggtagta

SEQ ID NO: 94305 - RNA, 21 nt, synthetic construct
  source 1..21: mol_type = other RNA
gtgaccacagtttgaaacttt

SEQ ID NO: 94306 - RNA, 21 nt, synthetic construct
  source 1..21: mol_type = other RNA
gtgaccacattcccaaatgtc

SEQ ID NO: 94307 - RNA, 21 nt, synthetic construct
  source 1..21: mol_type = other RNA
gtgaccagatcaaacgtgctt

SEQ ID NO: 94308 - RNA, 21 nt, synthetic construct
  source 1..21: mol_type = other RNA
gtgaccagtgtgatgggggta

SEQ ID NO: 94309 - RNA, 21 nt, synthetic construct
  source 1..21: mol_type = other RNA
gtgaccctgagtccagaggtg

SEQ ID NO: 94310 - RNA, 21 nt, synthetic construct
  source 1..21: mol_type = other RNA
gtgaccctttgaagtatgtaa

SEQ ID NO: 94311 - RNA, 21 nt, synthetic construct
  source 1..21: mol_type = other RNA
gtgacctcatgtaactaatta

SEQ ID NO: 94312 - RNA, 21 nt, synthetic construct
  source 1..21: mol_type = other RNA
gtgacctgccagagttggcac

SEQ ID NO: 94313 - RNA, 21 nt, synthetic construct
  source 1..21: mol_type = other RNA
gtgacctgtccttgtgtttta

SEQ ID NO: 94314 - RNA, 21 nt, synthetic construct
  source 1..21: mol_type = other RNA
gtgacgtgagatcatgccact

SEQ ID NO: 94315 - RNA, 21 nt, synthetic construct
  source 1..21: mol_type = other RNA
gtgactagaagaaatgttaac

SEQ ID NO: 94316 - RNA, 21 nt, synthetic construct
  source 1..21: mol_type = other RNA
gtgactagtgtgaatgaggag

SEQ ID NO: 94317 - RNA, 21 nt, synthetic construct
  source 1..21: mol_type = other RNA
gtgactccaaagcaaaccaga

SEQ ID NO: 94318 - RNA, 21 nt, synthetic construct
  source 1..21: mol_type = other RNA
gtgactccaagcacacagttt

SEQ ID NO: 94319 - RNA, 21 nt, synthetic construct
  source 1..21: mol_type = other RNA
gtgactgaattcccacaaaat

SEQ ID NO: 94320 - RNA, 21 nt, synthetic construct
  source 1..21: mol_type = other RNA
gtgactggcttaatgcatata

SEQ ID NO: 94321 - RNA, 21 nt, synthetic construct
  source 1..21: mol_type = other RNA
gtgactgtagtccctgctact

SEQ ID NO: 94322 - RNA, 21 nt, synthetic construct
  source 1..21: mol_type = other RNA
gtgactgtgagggtaagaaag

SEQ ID NO: 94323 - RNA, 21 nt, synthetic construct
  source 1..21: mol_type = other RNA
gtgacttaagcaacagaaatt

SEQ ID NO: 94324 - RNA, 21 nt, synthetic construct
  source 1..21: mol_type = other RNA
gtgacttcgtcaaggggagag

SEQ ID NO: 94325 - RNA, 21 nt, synthetic construct
  source 1..21: mol_type = other RNA
gtgacttctggatgtgtatga

SEQ ID NO: 94326 - RNA, 21 nt, synthetic construct
  source 1..21: mol_type = other RNA
gtgactttactgttctccagt

SEQ ID NO: 94327 - RNA, 21 nt, synthetic construct
  source 1..21: mol_type = other RNA
gtgagaacccagtgtctgcta

SEQ ID NO: 94328 - RNA, 21 nt, synthetic construct
  source 1..21: mol_type = other RNA
gtgagacagaccctggcttgt

SEQ ID NO: 94329 - RNA, 21 nt, synthetic construct
  source 1..21: mol_type = other RNA
gtgagaccaccacacttgctt

SEQ ID NO: 94330 - RNA, 21 nt, synthetic construct
  source 1..21: mol_type = other RNA
gtgagactattatgagcagtt

SEQ ID NO: 94331 - RNA, 21 nt, synthetic construct
  source 1..21: mol_type = other RNA
gtgagaggactgcctggtcct

SEQ ID NO: 94332 - RNA, 21 nt, synthetic construct
  source 1..21: mol_type = other RNA
gtgagatcatgccactccact

SEQ ID NO: 94333 - RNA, 21 nt, synthetic construct
  source 1..21: mol_type = other RNA
gtgagatgggaagaaaaaata

SEQ ID NO: 94334 - RNA, 21 nt, synthetic construct
  source 1..21: mol_type = other RNA
gtgagattgatagatcatatg

SEQ ID NO: 94335 - RNA, 21 nt, synthetic construct
  source 1..21: mol_type = other RNA
gtgagcaaaaatacagctcca

SEQ ID NO: 94336 - RNA, 21 nt, synthetic construct
  source 1..21: mol_type = other RNA
gtgagcagaaggaggaaaata

SEQ ID NO: 94337 - RNA, 21 nt, synthetic construct
  source 1..21: mol_type = other RNA
gtgagcatgctgcaactgaga

SEQ ID NO: 94338 - RNA, 21 nt, synthetic construct
  source 1..21: mol_type = other RNA
gtgagcatttagccccctgaa

SEQ ID NO: 94339 - RNA, 21 nt, synthetic construct
  source 1..21: mol_type = other RNA
gtgagccacagctacactcaa

SEQ ID NO: 94340 - RNA, 21 nt, synthetic construct
  source 1..21: mol_type = other RNA
gtgagccacatacatagtatt

SEQ ID NO: 94341 - RNA, 21 nt, synthetic construct
  source 1..21: mol_type = other RNA
gtgagccaccacgtccggtcg

SEQ ID NO: 94342 - RNA, 21 nt, synthetic construct
  source 1..21: mol_type = other RNA
gtgagccaccactcccggccg

SEQ ID NO: 94343 - RNA, 21 nt, synthetic construct
  source 1..21: mol_type = other RNA
gtgagccaccgcgcctggtga

SEQ ID NO: 94344 - RNA, 21 nt, synthetic construct
  source 1..21: mol_type = other RNA
gtgagccaccgtgccgggctt

SEQ ID NO: 94345 - RNA, 21 nt, synthetic construct
  source 1..21: mol_type = other RNA
gtgagccacctcatccggtct

SEQ ID NO: 94346 - RNA, 21 nt, synthetic construct
  source 1..21: mol_type = other RNA
gtgagccactaaaacaggaag

SEQ ID NO: 94347 - RNA, 21 nt, synthetic construct
  source 1..21: mol_type = other RNA
gtgagccactacgcccggccc

SEQ ID NO: 94348 - RNA, 21 nt, synthetic construct
  source 1..21: mol_type = other RNA
gtgagccatcgcgcccagccc

SEQ ID NO: 94349 - RNA, 21 nt, synthetic construct
  source 1..21: mol_type = other RNA
gtgagcccagagatcccacca

SEQ ID NO: 94350 - RNA, 21 nt, synthetic construct
  source 1..21: mol_type = other RNA
gtgagcctccacacctggccc

SEQ ID NO: 94351 - RNA, 21 nt, synthetic construct
  source 1..21: mol_type = other RNA
gtgagctccagcctgggcgac

SEQ ID NO: 94352 - RNA, 21 nt, synthetic construct
  source 1..21: mol_type = other RNA
gtgagctctagccttgtactg

SEQ ID NO: 94353 - RNA, 21 nt, synthetic construct
  source 1..21: mol_type = other RNA
gtgagctggaagtaaggattt

SEQ ID NO: 94354 - RNA, 21 nt, synthetic construct
  source 1..21: mol_type = other RNA
gtgagctttttctttttaaac

SEQ ID NO: 94355 - RNA, 21 nt, synthetic construct
  source 1..21: mol_type = other RNA
gtgaggacatggagacagtga

SEQ ID NO: 94356 - RNA, 21 nt, synthetic construct
  source 1..21: mol_type = other RNA
gtgaggacgctgatgacagtt

SEQ ID NO: 94357 - RNA, 21 nt, synthetic construct
  source 1..21: mol_type = other RNA
gtgaggatctgttggtgctta

SEQ ID NO: 94358 - RNA, 21 nt, synthetic construct
  source 1..21: mol_type = other RNA
gtgaggattcgattaaaataa

SEQ ID NO: 94359 - RNA, 21 nt, synthetic construct
  source 1..21: mol_type = other RNA
gtgagggactgagcagtgaaa

SEQ ID NO: 94360 - RNA, 21 nt, synthetic construct
  source 1..21: mol_type = other RNA
gtgagggagatatttcgccta

SEQ ID NO: 94361 - RNA, 21 nt, synthetic construct
  source 1..21: mol_type = other RNA
gtgagggaggccatcttcatt

SEQ ID NO: 94362 - RNA, 21 nt, synthetic construct
  source 1..21: mol_type = other RNA
gtgagggtaagaaaggagttc

SEQ ID NO: 94363 - RNA, 21 nt, synthetic construct
  source 1..21: mol_type = other RNA
gtgagggtttcagtgagtagg

SEQ ID NO: 94364 - RNA, 21 nt, synthetic construct
  source 1..21: mol_type = other RNA
gtgaggtgaggacatggagac

SEQ ID NO: 94365 - RNA, 21 nt, synthetic construct
  source 1..21: mol_type = other RNA
gtgagtagaagagtaatggtt

SEQ ID NO: 94366 - RNA, 21 nt, synthetic construct
  source 1..21: mol_type = other RNA
gtgagtagggaaggtgcccgc

SEQ ID NO: 94367 - RNA, 21 nt, synthetic construct
  source 1..21: mol_type = other RNA
gtgagtccttccagtatgatg

SEQ ID NO: 94368 - RNA, 21 nt, synthetic construct
  source 1..21: mol_type = other RNA
gtgagtgagatgggaagaaaa

SEQ ID NO: 94369 - RNA, 21 nt, synthetic construct
  source 1..21: mol_type = other RNA
gtgagtgatgaaaagagcaca

SEQ ID NO: 94370 - RNA, 21 nt, synthetic construct
  source 1..21: mol_type = other RNA
gtgagtggactgtgagggaga

SEQ ID NO: 94371 - RNA, 21 nt, synthetic construct
  source 1..21: mol_type = other RNA
gtgagtggatcatttgaggtc

SEQ ID NO: 94372 - RNA, 21 nt, synthetic construct
  source 1..21: mol_type = other RNA
gtgagttcaaatgttaagccc

SEQ ID NO: 94373 - RNA, 21 nt, synthetic construct
  source 1..21: mol_type = other RNA
gtgagtttgacctgtaatttt

SEQ ID NO: 94374 - RNA, 21 nt, synthetic construct
  source 1..21: mol_type = other RNA
gtgagttttaactcttgcatt

SEQ ID NO: 94375 - RNA, 21 nt, synthetic construct
  source 1..21: mol_type = other RNA
gtgataaaaaggagggaaaat

SEQ ID NO: 94376 - RNA, 21 nt, synthetic construct
  source 1..21: mol_type = other RNA
gtgataactgatatgagggat

SEQ ID NO: 94377 - RNA, 21 nt, synthetic construct
  source 1..21: mol_type = other RNA
gtgataactggtgcttttttg

SEQ ID NO: 94378 - RNA, 21 nt, synthetic construct
  source 1..21: mol_type = other RNA
gtgataccataaagtcagagg

SEQ ID NO: 94379 - RNA, 21 nt, synthetic construct
  source 1..21: mol_type = other RNA
gtgatacctagtacgtaacct

SEQ ID NO: 94380 - RNA, 21 nt, synthetic construct
  source 1..21: mol_type = other RNA
gtgatacctcttactaaaaag

SEQ ID NO: 94381 - RNA, 21 nt, synthetic construct
  source 1..21: mol_type = other RNA
gtgatagtcttccaattgcag

SEQ ID NO: 94382 - RNA, 21 nt, synthetic construct
  source 1..21: mol_type = other RNA
gtgatatattatgaaccattg

SEQ ID NO: 94383 - RNA, 21 nt, synthetic construct
  source 1..21: mol_type = other RNA
gtgatatctgtaagtcatcaa

SEQ ID NO: 94384 - RNA, 21 nt, synthetic construct
  source 1..21: mol_type = other RNA
gtgatatgccacattttttgg

SEQ ID NO: 94385 - RNA, 21 nt, synthetic construct
  source 1..21: mol_type = other RNA
gtgatattggcataaagacag

SEQ ID NO: 94386 - RNA, 21 nt, synthetic construct
  source 1..21: mol_type = other RNA
gtgatcagaagagcactatgt

SEQ ID NO: 94387 - RNA, 21 nt, synthetic construct
  source 1..21: mol_type = other RNA
gtgatcaggaaagatgaagta

SEQ ID NO: 94388 - RNA, 21 nt, synthetic construct
  source 1..21: mol_type = other RNA
gtgatccctgatatgtcgcat

SEQ ID NO: 94389 - RNA, 21 nt, synthetic construct
  source 1..21: mol_type = other RNA
gtgatcctaagccatctaatt

SEQ ID NO: 94390 - RNA, 21 nt, synthetic construct
  source 1..21: mol_type = other RNA
gtgatctatgaatttgcctat

SEQ ID NO: 94391 - RNA, 21 nt, synthetic construct
  source 1..21: mol_type = other RNA
gtgatctatgcatactgcagc

SEQ ID NO: 94392 - RNA, 21 nt, synthetic construct
  source 1..21: mol_type = other RNA
gtgatctctgctcaccgcaac

SEQ ID NO: 94393 - RNA, 21 nt, synthetic construct
  source 1..21: mol_type = other RNA
gtgatgaaaagagcacaccaa

SEQ ID NO: 94394 - RNA, 21 nt, synthetic construct
  source 1..21: mol_type = other RNA
gtgatgactgtaagctgaact

SEQ ID NO: 94395 - RNA, 21 nt, synthetic construct
  source 1..21: mol_type = other RNA
gtgatgattttagaaggtaag

SEQ ID NO: 94396 - RNA, 21 nt, synthetic construct
  source 1..21: mol_type = other RNA
gtgatgcaactcctgggctca

SEQ ID NO: 94397 - RNA, 21 nt, synthetic construct
  source 1..21: mol_type = other RNA
gtgatgctaacgtgcttgctc

SEQ ID NO: 94398 - RNA, 21 nt, synthetic construct
  source 1..21: mol_type = other RNA
gtgatggaggtggaactctgt

SEQ ID NO: 94399 - RNA, 21 nt, synthetic construct
  source 1..21: mol_type = other RNA
gtgatggcatcattcataaac

SEQ ID NO: 94400 - RNA, 21 nt, synthetic construct
  source 1..21: mol_type = other RNA
gtgatggcgcatgcctgtggt

SEQ ID NO: 94401 - RNA, 21 nt, synthetic construct
  source 1..21: mol_type = other RNA
gtgatgggagatggacactgc

SEQ ID NO: 94402 - RNA, 21 nt, synthetic construct
  source 1..21: mol_type = other RNA
gtgatgggggtaagattgtgg

SEQ ID NO: 94403 - RNA, 21 nt, synthetic construct
  source 1..21: mol_type = other RNA
gtgatgtagaggcagttgagt

SEQ ID NO: 94404 - RNA, 21 nt, synthetic construct
  source 1..21: mol_type = other RNA
gtgatgtctcagatgtctcca

SEQ ID NO: 94405 - RNA, 21 nt, synthetic construct
  source 1..21: mol_type = other RNA
gtgatgtcttttgaagaagtt

SEQ ID NO: 94406 - RNA, 21 nt, synthetic construct
  source 1..21: mol_type = other RNA
gtgatgttcaaccctcggcct

SEQ ID NO: 94407 - RNA, 21 nt, synthetic construct
  source 1..21: mol_type = other RNA
gtgatgttgagtatcttttca

SEQ ID NO: 94408 - RNA, 21 nt, synthetic construct
  source 1..21: mol_type = other RNA
gtgattaaaggccctgattta

SEQ ID NO: 94409 - RNA, 21 nt, synthetic construct
  source 1..21: mol_type = other RNA
gtgattacaattcctttctag

SEQ ID NO: 94410 - RNA, 21 nt, synthetic construct
  source 1..21: mol_type = other RNA
gtgattaccggcatccgccac

SEQ ID NO: 94411 - RNA, 21 nt, synthetic construct
  source 1..21: mol_type = other RNA
gtgattatcagggatattggc

SEQ ID NO: 94412 - RNA, 21 nt, synthetic construct
  source 1..21: mol_type = other RNA
gtgattcacttttgagttcag

SEQ ID NO: 94413 - RNA, 21 nt, synthetic construct
  source 1..21: mol_type = other RNA
gtgattcagagtgctgggtag

SEQ ID NO: 94414 - RNA, 21 nt, synthetic construct
  source 1..21: mol_type = other RNA
gtgattgcaggtgtgggccac

SEQ ID NO: 94415 - RNA, 21 nt, synthetic construct
  source 1..21: mol_type = other RNA
gtgattggatatttgcagtag

SEQ ID NO: 94416 - RNA, 21 nt, synthetic construct
  source 1..21: mol_type = other RNA
gtgatttatgtggcatttaaa

SEQ ID NO: 94417 - RNA, 21 nt, synthetic construct
  source 1..21: mol_type = other RNA
gtgatttccagtgtttggttt

SEQ ID NO: 94418 - RNA, 21 nt, synthetic construct
  source 1..21: mol_type = other RNA
gtgatttgtagatattttctg

SEQ ID NO: 94419 - RNA, 21 nt, synthetic construct
  source 1..21: mol_type = other RNA
gtgattttaccaaggctaagt

SEQ ID NO: 94420 - RNA, 21 nt, synthetic construct
  source 1..21: mol_type = other RNA
gtgcaaacctcctggttttga

SEQ ID NO: 94421 - RNA, 21 nt, synthetic construct
  source 1..21: mol_type = other RNA
gtgcaaactaccaagactgaa

SEQ ID NO: 94422 - RNA, 21 nt, synthetic construct
  source 1..21: mol_type = other RNA
gtgcaaaggattagaaagtag

SEQ ID NO: 94423 - RNA, 21 nt, synthetic construct
  source 1..21: mol_type = other RNA
gtgcaacataaatagggtgct

SEQ ID NO: 94424 - RNA, 21 nt, synthetic construct
  source 1..21: mol_type = other RNA
gtgcaaccatccccgctgtcc

SEQ ID NO: 94425 - RNA, 21 nt, synthetic construct
  source 1..21: mol_type = other RNA
gtgcaactagagaaagcatca

SEQ ID NO: 94426 - RNA, 21 nt, synthetic construct
  source 1..21: mol_type = other RNA
gtgcaaggagagaaaaacaaa

SEQ ID NO: 94427 - RNA, 21 nt, synthetic construct
  source 1..21: mol_type = other RNA
gtgcaaggataaacaaagaga

SEQ ID NO: 94428 - RNA, 21 nt, synthetic construct
  source 1..21: mol_type = other RNA
gtgcaatcacggctgattata

SEQ ID NO: 94429 - RNA, 21 nt, synthetic construct
  source 1..21: mol_type = other RNA
gtgcaatgataggtcactgca

SEQ ID NO: 94430 - RNA, 21 nt, synthetic construct
  source 1..21: mol_type = other RNA
gtgcaatggggcaatctcagc

SEQ ID NO: 94431 - RNA, 21 nt, synthetic construct
  source 1..21: mol_type = other RNA
gtgcaatggtgggatctctgg

SEQ ID NO: 94432 - RNA, 21 nt, synthetic construct
  source 1..21: mol_type = other RNA
gtgcacaacacatgcacacta

SEQ ID NO: 94433 - RNA, 21 nt, synthetic construct
  source 1..21: mol_type = other RNA
gtgcacaagggaagaggccac

SEQ ID NO: 94434 - RNA, 21 nt, synthetic construct
  source 1..21: mol_type = other RNA
gtgcacaatgcagtattgtta

SEQ ID NO: 94435 - RNA, 21 nt, synthetic construct
  source 1..21: mol_type = other RNA
gtgcacacaacactcagatat

SEQ ID NO: 94436 - RNA, 21 nt, synthetic construct
  source 1..21: mol_type = other RNA
gtgcacacatccacgcgtaag

SEQ ID NO: 94437 - RNA, 21 nt, synthetic construct
  source 1..21: mol_type = other RNA
gtgcacacccagttatctctg

SEQ ID NO: 94438 - RNA, 21 nt, synthetic construct
  source 1..21: mol_type = other RNA
gtgcacatgttccctagaact

SEQ ID NO: 94439 - RNA, 21 nt, synthetic construct
  source 1..21: mol_type = other RNA
gtgcacattccaagagaggaa

SEQ ID NO: 94440 - RNA, 21 nt, synthetic construct
  source 1..21: mol_type = other RNA
gtgcacattccttcttcacac

SEQ ID NO: 94441 - RNA, 21 nt, synthetic construct
  source 1..21: mol_type = other RNA
gtgcacctaataaaatgttta

SEQ ID NO: 94442 - RNA, 21 nt, synthetic construct
  source 1..21: mol_type = other RNA
gtgcacctccagtgtcctgaa

SEQ ID NO: 94443 - RNA, 21 nt, synthetic construct
  source 1..21: mol_type = other RNA
gtgcacctcgggttcaagccc

SEQ ID NO: 94444 - RNA, 21 nt, synthetic construct
  source 1..21: mol_type = other RNA
gtgcaccttacattgtaatcc

SEQ ID NO: 94445 - RNA, 21 nt, synthetic construct
  source 1..21: mol_type = other RNA
gtgcacgctgtgaatgtgagg

SEQ ID NO: 94446 - RNA, 21 nt, synthetic construct
  source 1..21: mol_type = other RNA
gtgcacgtttgctttggagtg

SEQ ID NO: 94447 - RNA, 21 nt, synthetic construct
  source 1..21: mol_type = other RNA
gtgcactcttttaaacccatt

SEQ ID NO: 94448 - RNA, 21 nt, synthetic construct
  source 1..21: mol_type = other RNA
gtgcacttaaaatttagatct

SEQ ID NO: 94449 - RNA, 21 nt, synthetic construct
  source 1..21: mol_type = other RNA
gtgcagagcaggggtgggggg

SEQ ID NO: 94450 - RNA, 21 nt, synthetic construct
  source 1..21: mol_type = other RNA
gtgcagcaagcagtaaatata

SEQ ID NO: 94451 - RNA, 21 nt, synthetic construct
  source 1..21: mol_type = other RNA
gtgcagccactatagaaaata

SEQ ID NO: 94452 - RNA, 21 nt, synthetic construct
  source 1..21: mol_type = other RNA
gtgcagcctctaatcaggttg

SEQ ID NO: 94453 - RNA, 21 nt, synthetic construct
  source 1..21: mol_type = other RNA
gtgcaggaaacttccagaaac

SEQ ID NO: 94454 - RNA, 21 nt, synthetic construct
  source 1..21: mol_type = other RNA
gtgcaggagtttgagactgca

SEQ ID NO: 94455 - RNA, 21 nt, synthetic construct
  source 1..21: mol_type = other RNA
gtgcaggccagatatccataa

SEQ ID NO: 94456 - RNA, 21 nt, synthetic construct
  source 1..21: mol_type = other RNA
gtgcaggtttgttacacaggt

SEQ ID NO: 94457 - RNA, 21 nt, synthetic construct
  source 1..21: mol_type = other RNA
gtgcagtatcttgaagaaacc

SEQ ID NO: 94458 - RNA, 21 nt, synthetic construct
  source 1..21: mol_type = other RNA
gtgcagtatgtaggaaacttt

SEQ ID NO: 94459 - RNA, 21 nt, synthetic construct
  source 1..21: mol_type = other RNA
gtgcagtctaaccattaacag

SEQ ID NO: 94460 - RNA, 21 nt, synthetic construct
  source 1..21: mol_type = other RNA
gtgcagtggatgactaggctc

SEQ ID NO: 94461 - RNA, 21 nt, synthetic construct
  source 1..21: mol_type = other RNA
gtgcagtggtgtggtcttgtc

SEQ ID NO: 94462 - RNA, 21 nt, synthetic construct
  source 1..21: mol_type = other RNA
gtgcataccaccacattcggc

SEQ ID NO: 94463 - RNA, 21 nt, synthetic construct
  source 1..21: mol_type = other RNA
gtgcatactgtgatgatttta

SEQ ID NO: 94464 - RNA, 21 nt, synthetic construct
  source 1..21: mol_type = other RNA
gtgcatatataccacattttg

SEQ ID NO: 94465 - RNA, 21 nt, synthetic construct
  source 1..21: mol_type = other RNA
gtgcatcaaaggacactattg

SEQ ID NO: 94466 - RNA, 21 nt, synthetic construct
  source 1..21: mol_type = other RNA
gtgcatcagaattccattcct

SEQ ID NO: 94467 - RNA, 21 nt, synthetic construct
  source 1..21: mol_type = other RNA
gtgcatcctttatacctttta

SEQ ID NO: 94468 - RNA, 21 nt, synthetic construct
  source 1..21: mol_type = other RNA
gtgcatgaccctgctatgcat

SEQ ID NO: 94469 - RNA, 21 nt, synthetic construct
  source 1..21: mol_type = other RNA
gtgcatgcatgtctgtctgtt

SEQ ID NO: 94470 - RNA, 21 nt, synthetic construct
  source 1..21: mol_type = other RNA
gtgcatgcctctgttacagct

SEQ ID NO: 94471 - RNA, 21 nt, synthetic construct
  source 1..21: mol_type = other RNA
gtgcatgctcccatttgggac

SEQ ID NO: 94472 - RNA, 21 nt, synthetic construct
  source 1..21: mol_type = other RNA
gtgcatgtctgcaggagcctt

SEQ ID NO: 94473 - RNA, 21 nt, synthetic construct
  source 1..21: mol_type = other RNA
gtgcatgtgcaggaaacttcc

SEQ ID NO: 94474 - RNA, 21 nt, synthetic construct
  source 1..21: mol_type = other RNA
gtgcatgtgttgtgcacacat

SEQ ID NO: 94475 - RNA, 21 nt, synthetic construct
  source 1..21: mol_type = other RNA
gtgcattcatactgaaggcat

SEQ ID NO: 94476 - RNA, 21 nt, synthetic construct
  source 1..21: mol_type = other RNA
gtgcatttcggctctgtgctg

SEQ ID NO: 94477 - RNA, 21 nt, synthetic construct
  source 1..21: mol_type = other RNA
gtgcatttgggacagcctagt

SEQ ID NO: 94478 - RNA, 21 nt, synthetic construct
  source 1..21: mol_type = other RNA
gtgccaacacatggggcatta

SEQ ID NO: 94479 - RNA, 21 nt, synthetic construct
  source 1..21: mol_type = other RNA
gtgccaactctggcaggtcac

SEQ ID NO: 94480 - RNA, 21 nt, synthetic construct
  source 1..21: mol_type = other RNA
gtgccaagcaacttgatcagg

SEQ ID NO: 94481 - RNA, 21 nt, synthetic construct
  source 1..21: mol_type = other RNA
gtgccaagtccgtgcatgcct

SEQ ID NO: 94482 - RNA, 21 nt, synthetic construct
  source 1..21: mol_type = other RNA
gtgccagccacccttgctgct

SEQ ID NO: 94483 - RNA, 21 nt, synthetic construct
  source 1..21: mol_type = other RNA
gtgccagtgaactccagtctg

SEQ ID NO: 94484 - RNA, 21 nt, synthetic construct
  source 1..21: mol_type = other RNA
gtgccagtgcaaacctcctgg

SEQ ID NO: 94485 - RNA, 21 nt, synthetic construct
  source 1..21: mol_type = other RNA
gtgccatctccttaatccagt

SEQ ID NO: 94486 - RNA, 21 nt, synthetic construct
  source 1..21: mol_type = other RNA
gtgcccaaggaaggcagggta

SEQ ID NO: 94487 - RNA, 21 nt, synthetic construct
  source 1..21: mol_type = other RNA
gtgcccacctgacaagtagta

SEQ ID NO: 94488 - RNA, 21 nt, synthetic construct
  source 1..21: mol_type = other RNA
gtgcccaggctgacttagagg

SEQ ID NO: 94489 - RNA, 21 nt, synthetic construct
  source 1..21: mol_type = other RNA
gtgcccattaacagatgaatg

SEQ ID NO: 94490 - RNA, 21 nt, synthetic construct
  source 1..21: mol_type = other RNA
gtgccccactccacacacgaa

SEQ ID NO: 94491 - RNA, 21 nt, synthetic construct
  source 1..21: mol_type = other RNA
gtgcccgcgaaggcgtgtaaa

SEQ ID NO: 94492 - RNA, 21 nt, synthetic construct
  source 1..21: mol_type = other RNA
gtgcccggccagacattttat

SEQ ID NO: 94493 - RNA, 21 nt, synthetic construct
  source 1..21: mol_type = other RNA
gtgccctacatatggcaattc

SEQ ID NO: 94494 - RNA, 21 nt, synthetic construct
  source 1..21: mol_type = other RNA
gtgccgaggcagagagagtaa

SEQ ID NO: 94495 - RNA, 21 nt, synthetic construct
  source 1..21: mol_type = other RNA
gtgccgcgcgagggagcgtac

SEQ ID NO: 94496 - RNA, 21 nt, synthetic construct
  source 1..21: mol_type = other RNA
gtgccgcgttttttgtccacc

SEQ ID NO: 94497 - RNA, 21 nt, synthetic construct
  source 1..21: mol_type = other RNA
gtgccgggcttggtatgcatc

SEQ ID NO: 94498 - RNA, 21 nt, synthetic construct
  source 1..21: mol_type = other RNA
gtgcctacatagtccactttc

SEQ ID NO: 94499 - RNA, 21 nt, synthetic construct
  source 1..21: mol_type = other RNA
gtgcctcctgcctcagcctcc

SEQ ID NO: 94500 - RNA, 21 nt, synthetic construct
  source 1..21: mol_type = other RNA
gtgcctgccatagagggagca

SEQ ID NO: 94501 - RNA, 21 nt, synthetic construct
  source 1..21: mol_type = other RNA
gtgccttcagaaggagtccag

SEQ ID NO: 94502 - RNA, 21 nt, synthetic construct
  source 1..21: mol_type = other RNA
gtgccttcagctatggtgtta

SEQ ID NO: 94503 - RNA, 21 nt, synthetic construct
  source 1..21: mol_type = other RNA
gtgccttgatccattacatca

SEQ ID NO: 94504 - RNA, 21 nt, synthetic construct
  source 1..21: mol_type = other RNA
gtgcgacctcgaagcacaacc

SEQ ID NO: 94505 - RNA, 21 nt, synthetic construct
  source 1..21: mol_type = other RNA
gtgcgagtgtgaacgatggtt

SEQ ID NO: 94506 - RNA, 21 nt, synthetic construct
  source 1..21: mol_type = other RNA
gtgcgggattatttggaagag

SEQ ID NO: 94507 - RNA, 21 nt, synthetic construct
  source 1..21: mol_type = other RNA
gtgcgtgaatctgttcctggg

SEQ ID NO: 94508 - RNA, 21 nt, synthetic construct
  source 1..21: mol_type = other RNA
gtgcgttgaccgctttcgtga

SEQ ID NO: 94509 - RNA, 21 nt, synthetic construct
  source 1..21: mol_type = other RNA
gtgctaattgtttgttgggtt

SEQ ID NO: 94510 - RNA, 21 nt, synthetic construct
  source 1..21: mol_type = other RNA
gtgctacctcaaattgtgtgt

SEQ ID NO: 94511 - RNA, 21 nt, synthetic construct
  source 1..21: mol_type = other RNA
gtgctactcaaagtttagtta

SEQ ID NO: 94512 - RNA, 21 nt, synthetic construct
  source 1..21: mol_type = other RNA
gtgctagatgctaaacagtac

SEQ ID NO: 94513 - RNA, 21 nt, synthetic construct
  source 1..21: mol_type = other RNA
gtgctagccttcttggagtaa

SEQ ID NO: 94514 - RNA, 21 nt, synthetic construct
  source 1..21: mol_type = other RNA
gtgctcagtggttctgcgtgt

SEQ ID NO: 94515 - RNA, 21 nt, synthetic construct
  source 1..21: mol_type = other RNA
gtgctccatagcttcctaaga

SEQ ID NO: 94516 - RNA, 21 nt, synthetic construct
  source 1..21: mol_type = other RNA
gtgctctaccctttccaaatt

SEQ ID NO: 94517 - RNA, 21 nt, synthetic construct
  source 1..21: mol_type = other RNA
gtgctctcccccgaatccttt

SEQ ID NO: 94518 - RNA, 21 nt, synthetic construct
  source 1..21: mol_type = other RNA
gtgctctgtatttaatctttt

SEQ ID NO: 94519 - RNA, 21 nt, synthetic construct
  source 1..21: mol_type = other RNA
gtgctcttctgatcacagaag

SEQ ID NO: 94520 - RNA, 21 nt, synthetic construct
  source 1..21: mol_type = other RNA
gtgctcttttcatcactcact

SEQ ID NO: 94521 - RNA, 21 nt, synthetic construct
  source 1..21: mol_type = other RNA
gtgctgaaaccccgcatactg

SEQ ID NO: 94522 - RNA, 21 nt, synthetic construct
  source 1..21: mol_type = other RNA
gtgctgaaagctagaagacct

SEQ ID NO: 94523 - RNA, 21 nt, synthetic construct
  source 1..21: mol_type = other RNA
gtgctgactagtacgtgcaga

SEQ ID NO: 94524 - RNA, 21 nt, synthetic construct
  source 1..21: mol_type = other RNA
gtgctgagatggtcagtacta

SEQ ID NO: 94525 - RNA, 21 nt, synthetic construct
  source 1..21: mol_type = other RNA
gtgctgagattacagatgtga

SEQ ID NO: 94526 - RNA, 21 nt, synthetic construct
  source 1..21: mol_type = other RNA
gtgctgataaatggcttttta

SEQ ID NO: 94527 - RNA, 21 nt, synthetic construct
  source 1..21: mol_type = other RNA
gtgctgatcaggaaagaccgg

SEQ ID NO: 94528 - RNA, 21 nt, synthetic construct
  source 1..21: mol_type = other RNA
gtgctgatttaaaattttgct

SEQ ID NO: 94529 - RNA, 21 nt, synthetic construct
  source 1..21: mol_type = other RNA
gtgctgcacgtctgtggtctc

SEQ ID NO: 94530 - RNA, 21 nt, synthetic construct
  source 1..21: mol_type = other RNA
gtgctgcagtatgcatagatc

SEQ ID NO: 94531 - RNA, 21 nt, synthetic construct
  source 1..21: mol_type = other RNA
gtgctgctctgacgtttaaat

SEQ ID NO: 94532 - RNA, 21 nt, synthetic construct
  source 1..21: mol_type = other RNA
gtgctggactggagggatgct

SEQ ID NO: 94533 - RNA, 21 nt, synthetic construct
  source 1..21: mol_type = other RNA
gtgctggcagccttctctctt

SEQ ID NO: 94534 - RNA, 21 nt, synthetic construct
  source 1..21: mol_type = other RNA
gtgctggcttcaatatgcagt

SEQ ID NO: 94535 - RNA, 21 nt, synthetic construct
  source 1..21: mol_type = other RNA
gtgctgggctagggaagcagt

SEQ ID NO: 94536 - RNA, 21 nt, synthetic construct
  source 1..21: mol_type = other RNA
gtgctgggtagagactggatc

SEQ ID NO: 94537 - RNA, 21 nt, synthetic construct
  source 1..21: mol_type = other RNA
gtgctgtccatttccttaagc

SEQ ID NO: 94538 - RNA, 21 nt, synthetic construct
  source 1..21: mol_type = other RNA
gtgctgtgattgcaggtgtgg

SEQ ID NO: 94539 - RNA, 21 nt, synthetic construct
  source 1..21: mol_type = other RNA
gtgctgtgccagtgcaaacct

SEQ ID NO: 94540 - RNA, 21 nt, synthetic construct
  source 1..21: mol_type = other RNA
gtgctgttgaggctgggccct

SEQ ID NO: 94541 - RNA, 21 nt, synthetic construct
  source 1..21: mol_type = other RNA
gtgctgttgtattttacacca

SEQ ID NO: 94542 - RNA, 21 nt, synthetic construct
  source 1..21: mol_type = other RNA
gtgcttaaggaaatggacagc

SEQ ID NO: 94543 - RNA, 21 nt, synthetic construct
  source 1..21: mol_type = other RNA
gtgcttaatcttcacacttag

SEQ ID NO: 94544 - RNA, 21 nt, synthetic construct
  source 1..21: mol_type = other RNA
gtgcttaattcaaacaaatca

SEQ ID NO: 94545 - RNA, 21 nt, synthetic construct
  source 1..21: mol_type = other RNA
gtgcttacacacacgtttata

SEQ ID NO: 94546 - RNA, 21 nt, synthetic construct
  source 1..21: mol_type = other RNA
gtgcttacagactgattaatt

SEQ ID NO: 94547 - RNA, 21 nt, synthetic construct
  source 1..21: mol_type = other RNA
gtgcttagcgctggaggtcgg

SEQ ID NO: 94548 - RNA, 21 nt, synthetic construct
  source 1..21: mol_type = other RNA
gtgcttagctgcctcttcctg

SEQ ID NO: 94549 - RNA, 21 nt, synthetic construct
  source 1..21: mol_type = other RNA
gtgcttccacagctatcaggc

SEQ ID NO: 94550 - RNA, 21 nt, synthetic construct
  source 1..21: mol_type = other RNA
gtgcttcctaaacctgctacg

SEQ ID NO: 94551 - RNA, 21 nt, synthetic construct
  source 1..21: mol_type = other RNA
gtgcttccttctcttatacta

SEQ ID NO: 94552 - RNA, 21 nt, synthetic construct
  source 1..21: mol_type = other RNA
gtgcttcgaggtcgcaccctg

SEQ ID NO: 94553 - RNA, 21 nt, synthetic construct
  source 1..21: mol_type = other RNA
gtgcttctagtaacttggtcg

SEQ ID NO: 94554 - RNA, 21 nt, synthetic construct
  source 1..21: mol_type = other RNA
gtgcttctgataggaatatcg

SEQ ID NO: 94555 - RNA, 21 nt, synthetic construct
  source 1..21: mol_type = other RNA
gtgcttgaactgctggtctgg

SEQ ID NO: 94556 - RNA, 21 nt, synthetic construct
  source 1..21: mol_type = other RNA
gtgcttgcagccttccctgaa

SEQ ID NO: 94557 - RNA, 21 nt, synthetic construct
  source 1..21: mol_type = other RNA
gtgcttgctctgcggcaggca

SEQ ID NO: 94558 - RNA, 21 nt, synthetic construct
  source 1..21: mol_type = other RNA
gtgcttggagtcacttgacaa

SEQ ID NO: 94559 - RNA, 21 nt, synthetic construct
  source 1..21: mol_type = other RNA
gtgcttggatattctacagaa

SEQ ID NO: 94560 - RNA, 21 nt, synthetic construct
  source 1..21: mol_type = other RNA
gtgcttgggctcccttccagc

SEQ ID NO: 94561 - RNA, 21 nt, synthetic construct
  source 1..21: mol_type = other RNA
gtgcttgtctctctctttctc

SEQ ID NO: 94562 - RNA, 21 nt, synthetic construct
  source 1..21: mol_type = other RNA
gtgcttgtgcttttaatactt

SEQ ID NO: 94563 - RNA, 21 nt, synthetic construct
  source 1..21: mol_type = other RNA
gtgctttccttattgagaagc

SEQ ID NO: 94564 - RNA, 21 nt, synthetic construct
  source 1..21: mol_type = other RNA
gtgctttctatctctcagatc

SEQ ID NO: 94565 - RNA, 21 nt, synthetic construct
  source 1..21: mol_type = other RNA
gtgctttctcaacactgtgtt

SEQ ID NO: 94566 - RNA, 21 nt, synthetic construct
  source 1..21: mol_type = other RNA
gtgcttttaatactttcacac

SEQ ID NO: 94567 - RNA, 21 nt, synthetic construct
  source 1..21: mol_type = other RNA
gtgcttttctcgtgcatgtct

SEQ ID NO: 94568 - RNA, 21 nt, synthetic construct
  source 1..21: mol_type = other RNA
gtgcttttgctgcatcccaag

SEQ ID NO: 94569 - RNA, 21 nt, synthetic construct
  source 1..21: mol_type = other RNA
gtgctttttactttgcgaaac

SEQ ID NO: 94570 - RNA, 21 nt, synthetic construct
  source 1..21: mol_type = other RNA
gtgctttttgtatcctgtttg

SEQ ID NO: 94571 - RNA, 21 nt, synthetic construct
  source 1..21: mol_type = other RNA
gtgcttttttggtgtttttct

SEQ ID NO: 94572 - RNA, 21 nt, synthetic construct
  source 1..21: mol_type = other RNA
gtggaaaaactgcagcaatta

SEQ ID NO: 94573 - RNA, 21 nt, synthetic construct
  source 1..21: mol_type = other RNA
gtggaaaaatataggaacata

SEQ ID NO: 94574 - RNA, 21 nt, synthetic construct
  source 1..21: mol_type = other RNA
gtggaaaatgtatgattttct

SEQ ID NO: 94575 - RNA, 21 nt, synthetic construct
  source 1..21: mol_type = other RNA
gtggaaagagccagcctgatg

SEQ ID NO: 94576 - RNA, 21 nt, synthetic construct
  source 1..21: mol_type = other RNA
gtggaaatacttgaacattct

SEQ ID NO: 94577 - RNA, 21 nt, synthetic construct
  source 1..21: mol_type = other RNA
gtggaaattaaacacaccctt

SEQ ID NO: 94578 - RNA, 21 nt, synthetic construct
  source 1..21: mol_type = other RNA
gtggaacataatctttggtgc

SEQ ID NO: 94579 - RNA, 21 nt, synthetic construct
  source 1..21: mol_type = other RNA
gtggaactctgtcatggtgtg

SEQ ID NO: 94580 - RNA, 21 nt, synthetic construct
  source 1..21: mol_type = other RNA
gtggaagaatcaggtctcttt

SEQ ID NO: 94581 - RNA, 21 nt, synthetic construct
  source 1..21: mol_type = other RNA
gtggaagcacagtctctgcag

SEQ ID NO: 94582 - RNA, 21 nt, synthetic construct
  source 1..21: mol_type = other RNA
gtggaagcagaactaagaccc

SEQ ID NO: 94583 - RNA, 21 nt, synthetic construct
  source 1..21: mol_type = other RNA
gtggaagctgtccttctcgtg

SEQ ID NO: 94584 - RNA, 21 nt, synthetic construct
  source 1..21: mol_type = other RNA
gtggaaggcctgatagctgtg

SEQ ID NO: 94585 - RNA, 21 nt, synthetic construct
  source 1..21: mol_type = other RNA
gtggaaggccttctcctccaa

SEQ ID NO: 94586 - RNA, 21 nt, synthetic construct
  source 1..21: mol_type = other RNA
gtggaatcattccgtatatat

SEQ ID NO: 94587 - RNA, 21 nt, synthetic construct
  source 1..21: mol_type = other RNA
gtggaatggtcaatttcatcg

SEQ ID NO: 94588 - RNA, 21 nt, synthetic construct
  source 1..21: mol_type = other RNA
gtggaattaactccaggggac

SEQ ID NO: 94589 - RNA, 21 nt, synthetic construct
  source 1..21: mol_type = other RNA
gtggacaaaaaacgcggcact

SEQ ID NO: 94590 - RNA, 21 nt, synthetic construct
  source 1..21: mol_type = other RNA
gtggacacactgaaacaatcg

SEQ ID NO: 94591 - RNA, 21 nt, synthetic construct
  source 1..21: mol_type = other RNA
gtggaccatgttttaggagtc

SEQ ID NO: 94592 - RNA, 21 nt, synthetic construct
  source 1..21: mol_type = other RNA
gtggactatgtaggcacattc

SEQ ID NO: 94593 - RNA, 21 nt, synthetic construct
  source 1..21: mol_type = other RNA
gtggactgtgagggagatatt

SEQ ID NO: 94594 - RNA, 21 nt, synthetic construct
  source 1..21: mol_type = other RNA
gtggactttaggctgttcaat

SEQ ID NO: 94595 - RNA, 21 nt, synthetic construct
  source 1..21: mol_type = other RNA
gtggagaattactaaaattcc

SEQ ID NO: 94596 - RNA, 21 nt, synthetic construct
  source 1..21: mol_type = other RNA
gtggagataaagagcaggtgg

SEQ ID NO: 94597 - RNA, 21 nt, synthetic construct
  source 1..21: mol_type = other RNA
gtggagatggggacttgctct

SEQ ID NO: 94598 - RNA, 21 nt, synthetic construct
  source 1..21: mol_type = other RNA
gtggagcctgctctgcagaga

SEQ ID NO: 94599 - RNA, 21 nt, synthetic construct
  source 1..21: mol_type = other RNA
gtggagcggtgtcttattgtt

SEQ ID NO: 94600 - RNA, 21 nt, synthetic construct
  source 1..21: mol_type = other RNA
gtggaggcagtaccattcccc

SEQ ID NO: 94601 - RNA, 21 nt, synthetic construct
  source 1..21: mol_type = other RNA
gtggaggggcaggaaaggtgg

SEQ ID NO: 94602 - RNA, 21 nt, synthetic construct
  source 1..21: mol_type = other RNA
gtggagtattctagttctagc

SEQ ID NO: 94603 - RNA, 21 nt, synthetic construct
  source 1..21: mol_type = other RNA
gtggagtccaaccaatcgcag

SEQ ID NO: 94604 - RNA, 21 nt, synthetic construct
  source 1..21: mol_type = other RNA
gtggagtcctgtcagtttctg

SEQ ID NO: 94605 - RNA, 21 nt, synthetic construct
  source 1..21: mol_type = other RNA
gtggagtgcgagtgtgaacga

SEQ ID NO: 94606 - RNA, 21 nt, synthetic construct
  source 1..21: mol_type = other RNA
gtggagtggaggggcaggaaa

SEQ ID NO: 94607 - RNA, 21 nt, synthetic construct
  source 1..21: mol_type = other RNA
gtggagtggcatgatctcacg

SEQ ID NO: 94608 - RNA, 21 nt, synthetic construct
  source 1..21: mol_type = other RNA
gtggagtggggcacctaaaag

SEQ ID NO: 94609 - RNA, 21 nt, synthetic construct
  source 1..21: mol_type = other RNA
gtggagtggtggatagagaga

SEQ ID NO: 94610 - RNA, 21 nt, synthetic construct
  source 1..21: mol_type = other RNA
gtggagttctgctcttgtcgc

SEQ ID NO: 94611 - RNA, 21 nt, synthetic construct
  source 1..21: mol_type = other RNA
gtggagttggtgcaaggataa

SEQ ID NO: 94612 - RNA, 21 nt, synthetic construct
  source 1..21: mol_type = other RNA
gtggatagagagattcaagaa

SEQ ID NO: 94613 - RNA, 21 nt, synthetic construct
  source 1..21: mol_type = other RNA
gtggatagtgctttttacttt

SEQ ID NO: 94614 - RNA, 21 nt, synthetic construct
  source 1..21: mol_type = other RNA
gtggatatctgaggtcaggag

SEQ ID NO: 94615 - RNA, 21 nt, synthetic construct
  source 1..21: mol_type = other RNA
gtggatgactaggctcctgag

SEQ ID NO: 94616 - RNA, 21 nt, synthetic construct
  source 1..21: mol_type = other RNA
gtggatgagattaatgtaggt

SEQ ID NO: 94617 - RNA, 21 nt, synthetic construct
  source 1..21: mol_type = other RNA
gtggatgcatgaggcatatta

SEQ ID NO: 94618 - RNA, 21 nt, synthetic construct
  source 1..21: mol_type = other RNA
gtggatgctggggacccctcc

SEQ ID NO: 94619 - RNA, 21 nt, synthetic construct
  source 1..21: mol_type = other RNA
gtggatgggtgtagggtttgg

SEQ ID NO: 94620 - RNA, 21 nt, synthetic construct
  source 1..21: mol_type = other RNA
gtggatgtccttaatgccacc

SEQ ID NO: 94621 - RNA, 21 nt, synthetic construct
  source 1..21: mol_type = other RNA
gtggatgtgtgcacaacacat

SEQ ID NO: 94622 - RNA, 21 nt, synthetic construct
  source 1..21: mol_type = other RNA
gtggatgttggtgagaaccca

SEQ ID NO: 94623 - RNA, 21 nt, synthetic construct
  source 1..21: mol_type = other RNA
gtggcaaatttatgtgaaaag

SEQ ID NO: 94624 - RNA, 21 nt, synthetic construct
  source 1..21: mol_type = other RNA
gtggcacaatcatagctcact

SEQ ID NO: 94625 - RNA, 21 nt, synthetic construct
  source 1..21: mol_type = other RNA
gtggcagaatttacatttttt

SEQ ID NO: 94626 - RNA, 21 nt, synthetic construct
  source 1..21: mol_type = other RNA
gtggcagccccgcttcagttg

SEQ ID NO: 94627 - RNA, 21 nt, synthetic construct
  source 1..21: mol_type = other RNA
gtggcaggggctgcatcatgg

SEQ ID NO: 94628 - RNA, 21 nt, synthetic construct
  source 1..21: mol_type = other RNA
gtggcatcatactggaaggac

SEQ ID NO: 94629 - RNA, 21 nt, synthetic construct
  source 1..21: mol_type = other RNA
gtggcatctttgttacagcag

SEQ ID NO: 94630 - RNA, 21 nt, synthetic construct
  source 1..21: mol_type = other RNA
gtggcatgatctcacgtcacc

SEQ ID NO: 94631 - RNA, 21 nt, synthetic construct
  source 1..21: mol_type = other RNA
gtggcatgtctgtagttacaa

SEQ ID NO: 94632 - RNA, 21 nt, synthetic construct
  source 1..21: mol_type = other RNA
gtggcattaaggacatccaca

SEQ ID NO: 94633 - RNA, 21 nt, synthetic construct
  source 1..21: mol_type = other RNA
gtggcatttcttacacattag

SEQ ID NO: 94634 - RNA, 21 nt, synthetic construct
  source 1..21: mol_type = other RNA
gtggccaggaggaggagggtg

SEQ ID NO: 94635 - RNA, 21 nt, synthetic construct
  source 1..21: mol_type = other RNA
gtggccagtgaccagtgtgat

SEQ ID NO: 94636 - RNA, 21 nt, synthetic construct
  source 1..21: mol_type = other RNA
gtggcccacacctgcaatcac

SEQ ID NO: 94637 - RNA, 21 nt, synthetic construct
  source 1..21: mol_type = other RNA
gtggcccccctgaaaaatgag

SEQ ID NO: 94638 - RNA, 21 nt, synthetic construct
  source 1..21: mol_type = other RNA
gtggccctgttggcctggaca

SEQ ID NO: 94639 - RNA, 21 nt, synthetic construct
  source 1..21: mol_type = other RNA
gtggccgagggagacggcgag

SEQ ID NO: 94640 - RNA, 21 nt, synthetic construct
  source 1..21: mol_type = other RNA
gtggcctaaatcaggatgtct

SEQ ID NO: 94641 - RNA, 21 nt, synthetic construct
  source 1..21: mol_type = other RNA
gtggcctcaagcagtcctgcc

SEQ ID NO: 94642 - RNA, 21 nt, synthetic construct
  source 1..21: mol_type = other RNA
gtggcctcttcccttgtgcac

SEQ ID NO: 94643 - RNA, 21 nt, synthetic construct
  source 1..21: mol_type = other RNA
gtggcgcagccatggctcact

SEQ ID NO: 94644 - RNA, 21 nt, synthetic construct
  source 1..21: mol_type = other RNA
gtggcgctccctctgtgtgca

SEQ ID NO: 94645 - RNA, 21 nt, synthetic construct
  source 1..21: mol_type = other RNA
gtggcgctgtttgcctgcgtc

SEQ ID NO: 94646 - RNA, 21 nt, synthetic construct
  source 1..21: mol_type = other RNA
gtggcggatgccggtaatcac

SEQ ID NO: 94647 - RNA, 21 nt, synthetic construct
  source 1..21: mol_type = other RNA
gtggcgtgtgcccaggctgac

SEQ ID NO: 94648 - RNA, 21 nt, synthetic construct
  source 1..21: mol_type = other RNA
gtggctaacaatcaaatttaa

SEQ ID NO: 94649 - RNA, 21 nt, synthetic construct
  source 1..21: mol_type = other RNA
gtggctaatgtggcttgcaag

SEQ ID NO: 94650 - RNA, 21 nt, synthetic construct
  source 1..21: mol_type = other RNA
gtggctacaccctgggaaagc

SEQ ID NO: 94651 - RNA, 21 nt, synthetic construct
  source 1..21: mol_type = other RNA
gtggctagacggaaaaacatt

SEQ ID NO: 94652 - RNA, 21 nt, synthetic construct
  source 1..21: mol_type = other RNA
gtggctagtgtgttgactgac

SEQ ID NO: 94653 - RNA, 21 nt, synthetic construct
  source 1..21: mol_type = other RNA
gtggctcacagtgctccatag

SEQ ID NO: 94654 - RNA, 21 nt, synthetic construct
  source 1..21: mol_type = other RNA
gtggctcacattgtatttctg

SEQ ID NO: 94655 - RNA, 21 nt, synthetic construct
  source 1..21: mol_type = other RNA
gtggctcactcatttccgttg

SEQ ID NO: 94656 - RNA, 21 nt, synthetic construct
  source 1..21: mol_type = other RNA
gtggctcatacttgctttatt

SEQ ID NO: 94657 - RNA, 21 nt, synthetic construct
  source 1..21: mol_type = other RNA
gtggctgacatgtgtaaaaca

SEQ ID NO: 94658 - RNA, 21 nt, synthetic construct
  source 1..21: mol_type = other RNA
gtggctgcaccattttttcac

SEQ ID NO: 94659 - RNA, 21 nt, synthetic construct
  source 1..21: mol_type = other RNA
gtggctggcactttcctgata

SEQ ID NO: 94660 - RNA, 21 nt, synthetic construct
  source 1..21: mol_type = other RNA
gtggctgtcaaaaatgtgtct

SEQ ID NO: 94661 - RNA, 21 nt, synthetic construct
  source 1..21: mol_type = other RNA
gtggcttcctaactggtctcc

SEQ ID NO: 94662 - RNA, 21 nt, synthetic construct
  source 1..21: mol_type = other RNA
gtggcttctcaaactgtgtgc

SEQ ID NO: 94663 - RNA, 21 nt, synthetic construct
  source 1..21: mol_type = other RNA
gtggcttgcaaggcccaccat

SEQ ID NO: 94664 - RNA, 21 nt, synthetic construct
  source 1..21: mol_type = other RNA
gtggcttgggtgacctcatgt

SEQ ID NO: 94665 - RNA, 21 nt, synthetic construct
  source 1..21: mol_type = other RNA
gtggcttgtggctacaccctg

SEQ ID NO: 94666 - RNA, 21 nt, synthetic construct
  source 1..21: mol_type = other RNA
gtggctttaaggcgcagacac

SEQ ID NO: 94667 - RNA, 21 nt, synthetic construct
  source 1..21: mol_type = other RNA
gtgggaagcaaaggattcggg

SEQ ID NO: 94668 - RNA, 21 nt, synthetic construct
  source 1..21: mol_type = other RNA
gtgggaagtggagtgcgagtg

SEQ ID NO: 94669 - RNA, 21 nt, synthetic construct
  source 1..21: mol_type = other RNA
gtgggaattcagtcaccaaac

SEQ ID NO: 94670 - RNA, 21 nt, synthetic construct
  source 1..21: mol_type = other RNA
gtgggaccccgtctctgcaaa

SEQ ID NO: 94671 - RNA, 21 nt, synthetic construct
  source 1..21: mol_type = other RNA
gtgggactggagaacagtaaa

SEQ ID NO: 94672 - RNA, 21 nt, synthetic construct
  source 1..21: mol_type = other RNA
gtgggagaggcatgccgggac

SEQ ID NO: 94673 - RNA, 21 nt, synthetic construct
  source 1..21: mol_type = other RNA
gtgggaggaggtcatactgga

SEQ ID NO: 94674 - RNA, 21 nt, synthetic construct
  source 1..21: mol_type = other RNA
gtgggatcaaaccatgttcat

SEQ ID NO: 94675 - RNA, 21 nt, synthetic construct
  source 1..21: mol_type = other RNA
gtgggatctctgggctcactg

SEQ ID NO: 94676 - RNA, 21 nt, synthetic construct
  source 1..21: mol_type = other RNA
gtgggcaaaaaagtcatgacc

SEQ ID NO: 94677 - RNA, 21 nt, synthetic construct
  source 1..21: mol_type = other RNA
gtgggcaacacaatgagaccc

SEQ ID NO: 94678 - RNA, 21 nt, synthetic construct
  source 1..21: mol_type = other RNA
gtgggcactgggagccctcca

SEQ ID NO: 94679 - RNA, 21 nt, synthetic construct
  source 1..21: mol_type = other RNA
gtgggccaccaagccctgcct

SEQ ID NO: 94680 - RNA, 21 nt, synthetic construct
  source 1..21: mol_type = other RNA
gtgggcccagcagaaggtgag

SEQ ID NO: 94681 - RNA, 21 nt, synthetic construct
  source 1..21: mol_type = other RNA
gtgggccttgcaagccacatt

SEQ ID NO: 94682 - RNA, 21 nt, synthetic construct
  source 1..21: mol_type = other RNA
gtgggctttgagaaaggtttc

SEQ ID NO: 94683 - RNA, 21 nt, synthetic construct
  source 1..21: mol_type = other RNA
gtggggaatgctcataattaa

SEQ ID NO: 94684 - RNA, 21 nt, synthetic construct
  source 1..21: mol_type = other RNA
gtggggacagctcaattaagc

SEQ ID NO: 94685 - RNA, 21 nt, synthetic construct
  source 1..21: mol_type = other RNA
gtggggactttgtggcctctt

SEQ ID NO: 94686 - RNA, 21 nt, synthetic construct
  source 1..21: mol_type = other RNA
gtggggcacctaaaaggttgc

SEQ ID NO: 94687 - RNA, 21 nt, synthetic construct
  source 1..21: mol_type = other RNA
gtgggggcatcaaagctaccc

SEQ ID NO: 94688 - RNA, 21 nt, synthetic construct
  source 1..21: mol_type = other RNA
gtgggggctcacatctgtaat

SEQ ID NO: 94689 - RNA, 21 nt, synthetic construct
  source 1..21: mol_type = other RNA
gtggggggatgtagaaggata

SEQ ID NO: 94690 - RNA, 21 nt, synthetic construct
  source 1..21: mol_type = other RNA
gtgggtagaagcagcaagggt

SEQ ID NO: 94691 - RNA, 21 nt, synthetic construct
  source 1..21: mol_type = other RNA
gtgggtattttgttgttgttg

SEQ ID NO: 94692 - RNA, 21 nt, synthetic construct
  source 1..21: mol_type = other RNA
gtgggtcagctagtgtgtctg

SEQ ID NO: 94693 - RNA, 21 nt, synthetic construct
  source 1..21: mol_type = other RNA
gtgggtcgggtgtcagaaacc

SEQ ID NO: 94694 - RNA, 21 nt, synthetic construct
  source 1..21: mol_type = other RNA
gtgggtggatgggtgtagggt

SEQ ID NO: 94695 - RNA, 21 nt, synthetic construct
  source 1..21: mol_type = other RNA
gtgggttaaaagttagctggc

SEQ ID NO: 94696 - RNA, 21 nt, synthetic construct
  source 1..21: mol_type = other RNA
gtgggttcaattatgtggaaa

SEQ ID NO: 94697 - RNA, 21 nt, synthetic construct
  source 1..21: mol_type = other RNA
gtggtaactagatgcctcgaa

SEQ ID NO: 94698 - RNA, 21 nt, synthetic construct
  source 1..21: mol_type = other RNA
gtggtaactgatgtgaggatc

SEQ ID NO: 94699 - RNA, 21 nt, synthetic construct
  source 1..21: mol_type = other RNA
gtggtaaggactgaagtcctt

SEQ ID NO: 94700 - RNA, 21 nt, synthetic construct
  source 1..21: mol_type = other RNA
gtggtaaggagccaaacatca

SEQ ID NO: 94701 - RNA, 21 nt, synthetic construct
  source 1..21: mol_type = other RNA
gtggtagggagggggctgagg

SEQ ID NO: 94702 - RNA, 21 nt, synthetic construct
  source 1..21: mol_type = other RNA
gtggtaggtgtgtgtaatccc

SEQ ID NO: 94703 - RNA, 21 nt, synthetic construct
  source 1..21: mol_type = other RNA
gtggtagtaaggatcgttagt

SEQ ID NO: 94704 - RNA, 21 nt, synthetic construct
  source 1..21: mol_type = other RNA
gtggtagttacacaagtgttt

SEQ ID NO: 94705 - RNA, 21 nt, synthetic construct
  source 1..21: mol_type = other RNA
gtggtatgcactgtactccta

SEQ ID NO: 94706 - RNA, 21 nt, synthetic construct
  source 1..21: mol_type = other RNA
gtggtatgggagatgtgtaat

SEQ ID NO: 94707 - RNA, 21 nt, synthetic construct
  source 1..21: mol_type = other RNA
gtggtattctatcatcaagac

SEQ ID NO: 94708 - RNA, 21 nt, synthetic construct
  source 1..21: mol_type = other RNA
gtggtatttaatctgtcagca

SEQ ID NO: 94709 - RNA, 21 nt, synthetic construct
  source 1..21: mol_type = other RNA
gtggtcacactttttgtgagt

SEQ ID NO: 94710 - RNA, 21 nt, synthetic construct
  source 1..21: mol_type = other RNA
gtggtcactgtttggacagta

SEQ ID NO: 94711 - RNA, 21 nt, synthetic construct
  source 1..21: mol_type = other RNA
gtggtccctgctactcaggag

SEQ ID NO: 94712 - RNA, 21 nt, synthetic construct
  source 1..21: mol_type = other RNA
gtggtctcaccctcaggactc

SEQ ID NO: 94713 - RNA, 21 nt, synthetic construct
  source 1..21: mol_type = other RNA
gtggtctcagctcctcagaag

SEQ ID NO: 94714 - RNA, 21 nt, synthetic construct
  source 1..21: mol_type = other RNA
gtggtctcttcgagggggctg

SEQ ID NO: 94715 - RNA, 21 nt, synthetic construct
  source 1..21: mol_type = other RNA
gtggtcttaagagactctcaa

SEQ ID NO: 94716 - RNA, 21 nt, synthetic construct
  source 1..21: mol_type = other RNA
gtggtcttgtctcaacctttg

SEQ ID NO: 94717 - RNA, 21 nt, synthetic construct
  source 1..21: mol_type = other RNA
gtggtgcaatcacggctgatt

SEQ ID NO: 94718 - RNA, 21 nt, synthetic construct
  source 1..21: mol_type = other RNA
gtggtgcaatgataggtcact

SEQ ID NO: 94719 - RNA, 21 nt, synthetic construct
  source 1..21: mol_type = other RNA
gtggtgctgcacgtctgtggt

SEQ ID NO: 94720 - RNA, 21 nt, synthetic construct
  source 1..21: mol_type = other RNA
gtggtgctggactggagggat

SEQ ID NO: 94721 - RNA, 21 nt, synthetic construct
  source 1..21: mol_type = other RNA
gtggtgcttaattcaaacaaa

SEQ ID NO: 94722 - RNA, 21 nt, synthetic construct
  source 1..21: mol_type = other RNA
gtggtgcttgaactgctggtc

SEQ ID NO: 94723 - RNA, 21 nt, synthetic construct
  source 1..21: mol_type = other RNA
gtggtgcttttgctgcatccc

SEQ ID NO: 94724 - RNA, 21 nt, synthetic construct
  source 1..21: mol_type = other RNA
gtggtggatagagagattcaa

SEQ ID NO: 94725 - RNA, 21 nt, synthetic construct
  source 1..21: mol_type = other RNA
gtggtggcggatgccggtaat

SEQ ID NO: 94726 - RNA, 21 nt, synthetic construct
  source 1..21: mol_type = other RNA
gtggtggtagtaaggatcgtt

SEQ ID NO: 94727 - RNA, 21 nt, synthetic construct
  source 1..21: mol_type = other RNA
gtggtggtatgcactgtactc

SEQ ID NO: 94728 - RNA, 21 nt, synthetic construct
  source 1..21: mol_type = other RNA
gtggtggtctcaccctcagga

SEQ ID NO: 94729 - RNA, 21 nt, synthetic construct
  source 1..21: mol_type = other RNA
gtggtgtggcatgtctgtagt

SEQ ID NO: 94730 - RNA, 21 nt, synthetic construct
  source 1..21: mol_type = other RNA
gtggtgtggtcttgtctcaac

SEQ ID NO: 94731 - RNA, 21 nt, synthetic construct
  source 1..21: mol_type = other RNA
gtggtgtgtgactgtagtccc

SEQ ID NO: 94732 - RNA, 21 nt, synthetic construct
  source 1..21: mol_type = other RNA
gtggttaggaaaatacatgag

SEQ ID NO: 94733 - RNA, 21 nt, synthetic construct
  source 1..21: mol_type = other RNA
gtggttatagccataagagtc

SEQ ID NO: 94734 - RNA, 21 nt, synthetic construct
  source 1..21: mol_type = other RNA
gtggttattgagtctgtaggg

SEQ ID NO: 94735 - RNA, 21 nt, synthetic construct
  source 1..21: mol_type = other RNA
gtggttcacacctgtagtccc

SEQ ID NO: 94736 - RNA, 21 nt, synthetic construct
  source 1..21: mol_type = other RNA
gtggttcatatttcccttttg

SEQ ID NO: 94737 - RNA, 21 nt, synthetic construct
  source 1..21: mol_type = other RNA
gtggttccatttgttttgtgt

SEQ ID NO: 94738 - RNA, 21 nt, synthetic construct
  source 1..21: mol_type = other RNA
gtggttctgcctaatctctag

SEQ ID NO: 94739 - RNA, 21 nt, synthetic construct
  source 1..21: mol_type = other RNA
gtggttctgcgtgttatttta

SEQ ID NO: 94740 - RNA, 21 nt, synthetic construct
  source 1..21: mol_type = other RNA
gtggttgacccataaactgaa

SEQ ID NO: 94741 - RNA, 21 nt, synthetic construct
  source 1..21: mol_type = other RNA
gtggttggaaaacttttaact

SEQ ID NO: 94742 - RNA, 21 nt, synthetic construct
  source 1..21: mol_type = other RNA
gtggttgtgcttcgaggtcgc

SEQ ID NO: 94743 - RNA, 21 nt, synthetic construct
  source 1..21: mol_type = other RNA
gtggttgtggaattaactcca

SEQ ID NO: 94744 - RNA, 21 nt, synthetic construct
  source 1..21: mol_type = other RNA
gtggtttattcatataatgga

SEQ ID NO: 94745 - RNA, 21 nt, synthetic construct
  source 1..21: mol_type = other RNA
gtggtttcttgaatctctcta

SEQ ID NO: 94746 - RNA, 21 nt, synthetic construct
  source 1..21: mol_type = other RNA
gtggtttgaaccccagaaggt

SEQ ID NO: 94747 - RNA, 21 nt, synthetic construct
  source 1..21: mol_type = other RNA
gtggtttgaagcttcacttct

SEQ ID NO: 94748 - RNA, 21 nt, synthetic construct
  source 1..21: mol_type = other RNA
gtggtttgccttttcactctt

SEQ ID NO: 94749 - RNA, 21 nt, synthetic construct
  source 1..21: mol_type = other RNA
gtggttttaacctcttgaagt

SEQ ID NO: 94750 - RNA, 21 nt, synthetic construct
  source 1..21: mol_type = other RNA
gtggtttttggttcacttgaa

SEQ ID NO: 94751 - RNA, 21 nt, synthetic construct
  source 1..21: mol_type = other RNA
gtgtaaaacatctggaaggaa

SEQ ID NO: 94752 - RNA, 21 nt, synthetic construct
  source 1..21: mol_type = other RNA
gtgtaaaaggctaattttttc

SEQ ID NO: 94753 - RNA, 21 nt, synthetic construct
  source 1..21: mol_type = other RNA
gtgtaaaatacaacagcacct

SEQ ID NO: 94754 - RNA, 21 nt, synthetic construct
  source 1..21: mol_type = other RNA
gtgtaaacactgttctgcgtg

SEQ ID NO: 94755 - RNA, 21 nt, synthetic construct
  source 1..21: mol_type = other RNA
gtgtaaactgttggaaaaatc

SEQ ID NO: 94756 - RNA, 21 nt, synthetic construct
  source 1..21: mol_type = other RNA
gtgtaaagtttctctctccct

SEQ ID NO: 94757 - RNA, 21 nt, synthetic construct
  source 1..21: mol_type = other RNA
gtgtaacatacacatcagatt

SEQ ID NO: 94758 - RNA, 21 nt, synthetic construct
  source 1..21: mol_type = other RNA
gtgtaactaccactgaggtca

SEQ ID NO: 94759 - RNA, 21 nt, synthetic construct
  source 1..21: mol_type = other RNA
gtgtaagaaatgccacatttt

SEQ ID NO: 94760 - RNA, 21 nt, synthetic construct
  source 1..21: mol_type = other RNA
gtgtaagagattaattcagtc

SEQ ID NO: 94761 - RNA, 21 nt, synthetic construct
  source 1..21: mol_type = other RNA
gtgtaagcacacatgaacctg

SEQ ID NO: 94762 - RNA, 21 nt, synthetic construct
  source 1..21: mol_type = other RNA
gtgtaaggtgtttggtgaatt

SEQ ID NO: 94763 - RNA, 21 nt, synthetic construct
  source 1..21: mol_type = other RNA
gtgtaatactgtagaatgttt

SEQ ID NO: 94764 - RNA, 21 nt, synthetic construct
  source 1..21: mol_type = other RNA
gtgtaattgtaccttggagag

SEQ ID NO: 94765 - RNA, 21 nt, synthetic construct
  source 1..21: mol_type = other RNA
gtgtacaatggggctttactg

SEQ ID NO: 94766 - RNA, 21 nt, synthetic construct
  source 1..21: mol_type = other RNA
gtgtacaattaggctgtttga

SEQ ID NO: 94767 - RNA, 21 nt, synthetic construct
  source 1..21: mol_type = other RNA
gtgtacaattcggtggcatta

SEQ ID NO: 94768 - RNA, 21 nt, synthetic construct
  source 1..21: mol_type = other RNA
gtgtaccaaaagtcctgttct

SEQ ID NO: 94769 - RNA, 21 nt, synthetic construct
  source 1..21: mol_type = other RNA
gtgtacccgtgtgttttgttg

SEQ ID NO: 94770 - RNA, 21 nt, synthetic construct
  source 1..21: mol_type = other RNA
gtgtactagtctccatacaag

SEQ ID NO: 94771 - RNA, 21 nt, synthetic construct
  source 1..21: mol_type = other RNA
gtgtactgaaaccagtgctct

SEQ ID NO: 94772 - RNA, 21 nt, synthetic construct
  source 1..21: mol_type = other RNA
gtgtagaaatgtggagataaa

SEQ ID NO: 94773 - RNA, 21 nt, synthetic construct
  source 1..21: mol_type = other RNA
gtgtagaggtgaagttaaggg

SEQ ID NO: 94774 - RNA, 21 nt, synthetic construct
  source 1..21: mol_type = other RNA
gtgtagccacaagccacatgt

SEQ ID NO: 94775 - RNA, 21 nt, synthetic construct
  source 1..21: mol_type = other RNA
gtgtagcgggaaaaaataata

SEQ ID NO: 94776 - RNA, 21 nt, synthetic construct
  source 1..21: mol_type = other RNA
gtgtagctgtggctcactcat

SEQ ID NO: 94777 - RNA, 21 nt, synthetic construct
  source 1..21: mol_type = other RNA
gtgtaggaaggaacacacacc

SEQ ID NO: 94778 - RNA, 21 nt, synthetic construct
  source 1..21: mol_type = other RNA
gtgtagggggaaaactccaag

SEQ ID NO: 94779 - RNA, 21 nt, synthetic construct
  source 1..21: mol_type = other RNA
gtgtagggtttggcagtttaa

SEQ ID NO: 94780 - RNA, 21 nt, synthetic construct
  source 1..21: mol_type = other RNA
gtgtagtcagacacactagct

SEQ ID NO: 94781 - RNA, 21 nt, synthetic construct
  source 1..21: mol_type = other RNA
gtgtagtcagtgaagatgctg

SEQ ID NO: 94782 - RNA, 21 nt, synthetic construct
  source 1..21: mol_type = other RNA
gtgtagtggtgtgtgactgta

SEQ ID NO: 94783 - RNA, 21 nt, synthetic construct
  source 1..21: mol_type = other RNA
gtgtagttcatcagcataaat

SEQ ID NO: 94784 - RNA, 21 nt, synthetic construct
  source 1..21: mol_type = other RNA
gtgtagttctggtgtcgttta

SEQ ID NO: 94785 - RNA, 21 nt, synthetic construct
  source 1..21: mol_type = other RNA
gtgtataacccgttttttcct

SEQ ID NO: 94786 - RNA, 21 nt, synthetic construct
  source 1..21: mol_type = other RNA
gtgtatactgggtgtgatggc

SEQ ID NO: 94787 - RNA, 21 nt, synthetic construct
  source 1..21: mol_type = other RNA
gtgtatatggtaaaatgtaca

SEQ ID NO: 94788 - RNA, 21 nt, synthetic construct
  source 1..21: mol_type = other RNA
gtgtatcagatgcttctagcc

SEQ ID NO: 94789 - RNA, 21 nt, synthetic construct
  source 1..21: mol_type = other RNA
gtgtatgatcaaagtgaaagg

SEQ ID NO: 94790 - RNA, 21 nt, synthetic construct
  source 1..21: mol_type = other RNA
gtgtatgatcttattaatgtg

SEQ ID NO: 94791 - RNA, 21 nt, synthetic construct
  source 1..21: mol_type = other RNA
gtgtatgatttctaggcccta

SEQ ID NO: 94792 - RNA, 21 nt, synthetic construct
  source 1..21: mol_type = other RNA
gtgtatgcagggaaatcattc

SEQ ID NO: 94793 - RNA, 21 nt, synthetic construct
  source 1..21: mol_type = other RNA
gtgtatgtgtagtcagtgaag

SEQ ID NO: 94794 - RNA, 21 nt, synthetic construct
  source 1..21: mol_type = other RNA
gtgtatgttacacttccagta

SEQ ID NO: 94795 - RNA, 21 nt, synthetic construct
  source 1..21: mol_type = other RNA
gtgtattattctaaacacacg

SEQ ID NO: 94796 - RNA, 21 nt, synthetic construct
  source 1..21: mol_type = other RNA
gtgtattgagtgtagctgtgg

SEQ ID NO: 94797 - RNA, 21 nt, synthetic construct
  source 1..21: mol_type = other RNA
gtgtattgtaccttgatttat

SEQ ID NO: 94798 - RNA, 21 nt, synthetic construct
  source 1..21: mol_type = other RNA
gtgtatttagggagcatatat

SEQ ID NO: 94799 - RNA, 21 nt, synthetic construct
  source 1..21: mol_type = other RNA
gtgtatttttagtagggacgg

SEQ ID NO: 94800 - RNA, 21 nt, synthetic construct
  source 1..21: mol_type = other RNA
gtgtcaagtacaactaataat

SEQ ID NO: 94801 - RNA, 21 nt, synthetic construct
  source 1..21: mol_type = other RNA
gtgtcactggatagaagtgta

SEQ ID NO: 94802 - RNA, 21 nt, synthetic construct
  source 1..21: mol_type = other RNA
gtgtcagaaaccatcgttcac

SEQ ID NO: 94803 - RNA, 21 nt, synthetic construct
  source 1..21: mol_type = other RNA
gtgtcagaattccatcagtgg

SEQ ID NO: 94804 - RNA, 21 nt, synthetic construct
  source 1..21: mol_type = other RNA
gtgtcagtgacagttctgtga

SEQ ID NO: 94805 - RNA, 21 nt, synthetic construct
  source 1..21: mol_type = other RNA
gtgtcatttttaagaaatcgt

SEQ ID NO: 94806 - RNA, 21 nt, synthetic construct
  source 1..21: mol_type = other RNA
gtgtcatttttgtattctgac

SEQ ID NO: 94807 - RNA, 21 nt, synthetic construct
  source 1..21: mol_type = other RNA
gtgtccacacaatggtcagag

SEQ ID NO: 94808 - RNA, 21 nt, synthetic construct
  source 1..21: mol_type = other RNA
gtgtccaggccaacagggcca

SEQ ID NO: 94809 - RNA, 21 nt, synthetic construct
  source 1..21: mol_type = other RNA
gtgtccatctcccatcactag

SEQ ID NO: 94810 - RNA, 21 nt, synthetic construct
  source 1..21: mol_type = other RNA
gtgtcctcaggctccaggtag

SEQ ID NO: 94811 - RNA, 21 nt, synthetic construct
  source 1..21: mol_type = other RNA
gtgtcctgaatgatttccctg

SEQ ID NO: 94812 - RNA, 21 nt, synthetic construct
  source 1..21: mol_type = other RNA
gtgtccttctgagaaggcgaa

SEQ ID NO: 94813 - RNA, 21 nt, synthetic construct
  source 1..21: mol_type = other RNA
gtgtcctttgatgcacaaaag

SEQ ID NO: 94814 - RNA, 21 nt, synthetic construct
  source 1..21: mol_type = other RNA
gtgtcgagaaaaatggggata

SEQ ID NO: 94815 - RNA, 21 nt, synthetic construct
  source 1..21: mol_type = other RNA
gtgtcgtttatttcttctccc

SEQ ID NO: 94816 - RNA, 21 nt, synthetic construct
  source 1..21: mol_type = other RNA
gtgtctaatgggtacagggtt

SEQ ID NO: 94817 - RNA, 21 nt, synthetic construct
  source 1..21: mol_type = other RNA
gtgtctagtgaatgagaccaa

SEQ ID NO: 94818 - RNA, 21 nt, synthetic construct
  source 1..21: mol_type = other RNA
gtgtctcataaagccggattc

SEQ ID NO: 94819 - RNA, 21 nt, synthetic construct
  source 1..21: mol_type = other RNA
gtgtctccataccccctggaa

SEQ ID NO: 94820 - RNA, 21 nt, synthetic construct
  source 1..21: mol_type = other RNA
gtgtctctgacatgagagcta

SEQ ID NO: 94821 - RNA, 21 nt, synthetic construct
  source 1..21: mol_type = other RNA
gtgtctctgctctcaagtaat

SEQ ID NO: 94822 - RNA, 21 nt, synthetic construct
  source 1..21: mol_type = other RNA
gtgtctgactacactgaaggg

SEQ ID NO: 94823 - RNA, 21 nt, synthetic construct
  source 1..21: mol_type = other RNA
gtgtctgatgtgtgtctctgc

SEQ ID NO: 94824 - RNA, 21 nt, synthetic construct
  source 1..21: mol_type = other RNA
gtgtctgcgccttaaagccac

SEQ ID NO: 94825 - RNA, 21 nt, synthetic construct
  source 1..21: mol_type = other RNA
gtgtctgctacaggggcattc

SEQ ID NO: 94826 - RNA, 21 nt, synthetic construct
  source 1..21: mol_type = other RNA
gtgtcttaatcctattttgtt

SEQ ID NO: 94827 - RNA, 21 nt, synthetic construct
  source 1..21: mol_type = other RNA
gtgtcttagtctgacttctct

SEQ ID NO: 94828 - RNA, 21 nt, synthetic construct
  source 1..21: mol_type = other RNA
gtgtcttattgttttgatttg

SEQ ID NO: 94829 - RNA, 21 nt, synthetic construct
  source 1..21: mol_type = other RNA
gtgtcttctgtttttcttagt

SEQ ID NO: 94830 - RNA, 21 nt, synthetic construct
  source 1..21: mol_type = other RNA
gtgtctttttatattatgtgc

SEQ ID NO: 94831 - RNA, 21 nt, synthetic construct
  source 1..21: mol_type = other RNA
gtgtgaaaccaagcaagtaaa

SEQ ID NO: 94832 - RNA, 21 nt, synthetic construct
  source 1..21: mol_type = other RNA
gtgtgaaagtattaaaagcac

SEQ ID NO: 94833 - RNA, 21 nt, synthetic construct
  source 1..21: mol_type = other RNA
gtgtgaaccacgcatctggtc

SEQ ID NO: 94834 - RNA, 21 nt, synthetic construct
  source 1..21: mol_type = other RNA
gtgtgaacgatggtttctgac

SEQ ID NO: 94835 - RNA, 21 nt, synthetic construct
  source 1..21: mol_type = other RNA
gtgtgaagaaggaatgtgcac

SEQ ID NO: 94836 - RNA, 21 nt, synthetic construct
  source 1..21: mol_type = other RNA
gtgtgaagattaagcacatct

SEQ ID NO: 94837 - RNA, 21 nt, synthetic construct
  source 1..21: mol_type = other RNA
gtgtgaagttgggcttaacat

SEQ ID NO: 94838 - RNA, 21 nt, synthetic construct
  source 1..21: mol_type = other RNA
gtgtgaataggaaagtgacag

SEQ ID NO: 94839 - RNA, 21 nt, synthetic construct
  source 1..21: mol_type = other RNA
gtgtgaatgaggagtgaattt

SEQ ID NO: 94840 - RNA, 21 nt, synthetic construct
  source 1..21: mol_type = other RNA
gtgtgaatggaaaattcaaac

SEQ ID NO: 94841 - RNA, 21 nt, synthetic construct
  source 1..21: mol_type = other RNA
gtgtgacaaaaagtaggggta

SEQ ID NO: 94842 - RNA, 21 nt, synthetic construct
  source 1..21: mol_type = other RNA
gtgtgaccacattcccaaatg

SEQ ID NO: 94843 - RNA, 21 nt, synthetic construct
  source 1..21: mol_type = other RNA
gtgtgactgtagtccctgcta

SEQ ID NO: 94844 - RNA, 21 nt, synthetic construct
  source 1..21: mol_type = other RNA
gtgtgagattgatagatcata

SEQ ID NO: 94845 - RNA, 21 nt, synthetic construct
  source 1..21: mol_type = other RNA
gtgtgagcaaaaatacagctc

SEQ ID NO: 94846 - RNA, 21 nt, synthetic construct
  source 1..21: mol_type = other RNA
gtgtgagccaccgtgccgggc

SEQ ID NO: 94847 - RNA, 21 nt, synthetic construct
  source 1..21: mol_type = other RNA
gtgtgagccactacgcccggc

SEQ ID NO: 94848 - RNA, 21 nt, synthetic construct
  source 1..21: mol_type = other RNA
gtgtgagctctagccttgtac

SEQ ID NO: 94849 - RNA, 21 nt, synthetic construct
  source 1..21: mol_type = other RNA
gtgtgataactgatatgaggg

SEQ ID NO: 94850 - RNA, 21 nt, synthetic construct
  source 1..21: mol_type = other RNA
gtgtgatcaggaaagatgaag

SEQ ID NO: 94851 - RNA, 21 nt, synthetic construct
  source 1..21: mol_type = other RNA
gtgtgatctctgctcaccgca

SEQ ID NO: 94852 - RNA, 21 nt, synthetic construct
  source 1..21: mol_type = other RNA
gtgtgatggcgcatgcctgtg

SEQ ID NO: 94853 - RNA, 21 nt, synthetic construct
  source 1..21: mol_type = other RNA
gtgtgatgggggtaagattgt

SEQ ID NO: 94854 - RNA, 21 nt, synthetic construct
  source 1..21: mol_type = other RNA
gtgtgcaaaggattagaaagt

SEQ ID NO: 94855 - RNA, 21 nt, synthetic construct
  source 1..21: mol_type = other RNA
gtgtgcacaacacatgcacac

SEQ ID NO: 94856 - RNA, 21 nt, synthetic construct
  source 1..21: mol_type = other RNA
gtgtgcacctaataaaatgtt

SEQ ID NO: 94857 - RNA, 21 nt, synthetic construct
  source 1..21: mol_type = other RNA
gtgtgcacgtttgctttggag

SEQ ID NO: 94858 - RNA, 21 nt, synthetic construct
  source 1..21: mol_type = other RNA
gtgtgcatgaccctgctatgc

SEQ ID NO: 94859 - RNA, 21 nt, synthetic construct
  source 1..21: mol_type = other RNA
gtgtgcatgcatgtctgtctg

SEQ ID NO: 94860 - RNA, 21 nt, synthetic construct
  source 1..21: mol_type = other RNA
gtgtgcatgctcccatttggg

SEQ ID NO: 94861 - RNA, 21 nt, synthetic construct
  source 1..21: mol_type = other RNA
gtgtgcatgtgttgtgcacac

SEQ ID NO: 94862 - RNA, 21 nt, synthetic construct
  source 1..21: mol_type = other RNA
gtgtgcccaaggaaggcaggg

SEQ ID NO: 94863 - RNA, 21 nt, synthetic construct
  source 1..21: mol_type = other RNA
gtgtgcccaggctgacttaga

SEQ ID NO: 94864 - RNA, 21 nt, synthetic construct
  source 1..21: mol_type = other RNA
gtgtgctcttttcatcactca

SEQ ID NO: 94865 - RNA, 21 nt, synthetic construct
  source 1..21: mol_type = other RNA
gtgtgctgactagtacgtgca

SEQ ID NO: 94866 - RNA, 21 nt, synthetic construct
  source 1..21: mol_type = other RNA
gtgtgcttacacacacgttta

SEQ ID NO: 94867 - RNA, 21 nt, synthetic construct
  source 1..21: mol_type = other RNA
gtgtgcttctgataggaatat

SEQ ID NO: 94868 - RNA, 21 nt, synthetic construct
  source 1..21: mol_type = other RNA
gtgtgcttggagtcacttgac

SEQ ID NO: 94869 - RNA, 21 nt, synthetic construct
  source 1..21: mol_type = other RNA
gtgtgcttgggctcccttcca

SEQ ID NO: 94870 - RNA, 21 nt, synthetic construct
  source 1..21: mol_type = other RNA
gtgtggacacactgaaacaat

SEQ ID NO: 94871 - RNA, 21 nt, synthetic construct
  source 1..21: mol_type = other RNA
gtgtggagtggggcacctaaa

SEQ ID NO: 94872 - RNA, 21 nt, synthetic construct
  source 1..21: mol_type = other RNA
gtgtggcaggggctgcatcat

SEQ ID NO: 94873 - RNA, 21 nt, synthetic construct
  source 1..21: mol_type = other RNA
gtgtggcatgtctgtagttac

SEQ ID NO: 94874 - RNA, 21 nt, synthetic construct
  source 1..21: mol_type = other RNA
gtgtggcttctcaaactgtgt

SEQ ID NO: 94875 - RNA, 21 nt, synthetic construct
  source 1..21: mol_type = other RNA
gtgtggctttaaggcgcagac

SEQ ID NO: 94876 - RNA, 21 nt, synthetic construct
  source 1..21: mol_type = other RNA
gtgtgggccaccaagccctgc

SEQ ID NO: 94877 - RNA, 21 nt, synthetic construct
  source 1..21: mol_type = other RNA
gtgtggtcttgtctcaacctt

SEQ ID NO: 94878 - RNA, 21 nt, synthetic construct
  source 1..21: mol_type = other RNA
gtgtggtgctgcacgtctgtg

SEQ ID NO: 94879 - RNA, 21 nt, synthetic construct
  source 1..21: mol_type = other RNA
gtgtggtggtctcaccctcag

SEQ ID NO: 94880 - RNA, 21 nt, synthetic construct
  source 1..21: mol_type = other RNA
gtgtggttcatatttcccttt

SEQ ID NO: 94881 - RNA, 21 nt, synthetic construct
  source 1..21: mol_type = other RNA
gtgtggtttgccttttcactc

SEQ ID NO: 94882 - RNA, 21 nt, synthetic construct
  source 1..21: mol_type = other RNA
gtgtgtaaacactgttctgcg

SEQ ID NO: 94883 - RNA, 21 nt, synthetic construct
  source 1..21: mol_type = other RNA
gtgtgtaagcacacatgaacc

SEQ ID NO: 94884 - RNA, 21 nt, synthetic construct
  source 1..21: mol_type = other RNA
gtgtgtataacccgttttttc

SEQ ID NO: 94885 - RNA, 21 nt, synthetic construct
  source 1..21: mol_type = other RNA
gtgtgtccacacaatggtcag

SEQ ID NO: 94886 - RNA, 21 nt, synthetic construct
  source 1..21: mol_type = other RNA
gtgtgtccaggccaacagggc

SEQ ID NO: 94887 - RNA, 21 nt, synthetic construct
  source 1..21: mol_type = other RNA
gtgtgtcgagaaaaatgggga

SEQ ID NO: 94888 - RNA, 21 nt, synthetic construct
  source 1..21: mol_type = other RNA
gtgtgtctcataaagccggat

SEQ ID NO: 94889 - RNA, 21 nt, synthetic construct
  source 1..21: mol_type = other RNA
gtgtgtctctgctctcaagta

SEQ ID NO: 94890 - RNA, 21 nt, synthetic construct
  source 1..21: mol_type = other RNA
gtgtgtctgactacactgaag

SEQ ID NO: 94891 - RNA, 21 nt, synthetic construct
  source 1..21: mol_type = other RNA
gtgtgtctgcgccttaaagcc

SEQ ID NO: 94892 - RNA, 21 nt, synthetic construct
  source 1..21: mol_type = other RNA
gtgtgtgaatggaaaattcaa

SEQ ID NO: 94893 - RNA, 21 nt, synthetic construct
  source 1..21: mol_type = other RNA
gtgtgtgactgtagtccctgc

SEQ ID NO: 94894 - RNA, 21 nt, synthetic construct
  source 1..21: mol_type = other RNA
gtgtgtgcaaaggattagaaa

SEQ ID NO: 94895 - RNA, 21 nt, synthetic construct
  source 1..21: mol_type = other RNA
gtgtgtggagtggggcaccta

SEQ ID NO: 94896 - RNA, 21 nt, synthetic construct
  source 1..21: mol_type = other RNA
gtgtgtgtaagcacacatgaa

SEQ ID NO: 94897 - RNA, 21 nt, synthetic construct
  source 1..21: mol_type = other RNA
gtgtgtgtccaggccaacagg

SEQ ID NO: 94898 - RNA, 21 nt, synthetic construct
  source 1..21: mol_type = other RNA
gtgtgtgttccttcctacaca

SEQ ID NO: 94899 - RNA, 21 nt, synthetic construct
  source 1..21: mol_type = other RNA
gtgtgttccagacaaaaattt

SEQ ID NO: 94900 - RNA, 21 nt, synthetic construct
  source 1..21: mol_type = other RNA
gtgtgttccttcctacacata

SEQ ID NO: 94901 - RNA, 21 nt, synthetic construct
  source 1..21: mol_type = other RNA
gtgtgttctctttttgacaga

SEQ ID NO: 94902 - RNA, 21 nt, synthetic construct
  source 1..21: mol_type = other RNA
gtgtgttctgccttgaggtga

SEQ ID NO: 94903 - RNA, 21 nt, synthetic construct
  source 1..21: mol_type = other RNA
gtgtgttgactgacataactg

SEQ ID NO: 94904 - RNA, 21 nt, synthetic construct
  source 1..21: mol_type = other RNA
gtgtgtttaatttccacccat

SEQ ID NO: 94905 - RNA, 21 nt, synthetic construct
  source 1..21: mol_type = other RNA
gtgtgtttagaataatacact

SEQ ID NO: 94906 - RNA, 21 nt, synthetic construct
  source 1..21: mol_type = other RNA
gtgtgtttcgcaaagtaaaaa

SEQ ID NO: 94907 - RNA, 21 nt, synthetic construct
  source 1..21: mol_type = other RNA
gtgtgtttgtgaaaaatacaa

SEQ ID NO: 94908 - RNA, 21 nt, synthetic construct
  source 1..21: mol_type = other RNA
gtgtgtttgtttgctagagct

SEQ ID NO: 94909 - RNA, 21 nt, synthetic construct
  source 1..21: mol_type = other RNA
gtgtgtttttgtaaatgaaac

SEQ ID NO: 94910 - RNA, 21 nt, synthetic construct
  source 1..21: mol_type = other RNA
gtgttaaaccattcttgcatc

SEQ ID NO: 94911 - RNA, 21 nt, synthetic construct
  source 1..21: mol_type = other RNA
gtgttaaatttgattgttagc

SEQ ID NO: 94912 - RNA, 21 nt, synthetic construct
  source 1..21: mol_type = other RNA
gtgttaagccgttccatcaga

SEQ ID NO: 94913 - RNA, 21 nt, synthetic construct
  source 1..21: mol_type = other RNA
gtgttaattatttgtgcatac

SEQ ID NO: 94914 - RNA, 21 nt, synthetic construct
  source 1..21: mol_type = other RNA
gtgttaattcttccttaatgt

SEQ ID NO: 94915 - RNA, 21 nt, synthetic construct
  source 1..21: mol_type = other RNA
gtgttacaactctaataacag

SEQ ID NO: 94916 - RNA, 21 nt, synthetic construct
  source 1..21: mol_type = other RNA
gtgttacattgccttcgcagg

SEQ ID NO: 94917 - RNA, 21 nt, synthetic construct
  source 1..21: mol_type = other RNA
gtgttacttgaaatcatttca

SEQ ID NO: 94918 - RNA, 21 nt, synthetic construct
  source 1..21: mol_type = other RNA
gtgttagaattacaggcatga

SEQ ID NO: 94919 - RNA, 21 nt, synthetic construct
  source 1..21: mol_type = other RNA
gtgttagcaggactggactcc

SEQ ID NO: 94920 - RNA, 21 nt, synthetic construct
  source 1..21: mol_type = other RNA
gtgttaggcaatccttccgcc

SEQ ID NO: 94921 - RNA, 21 nt, synthetic construct
  source 1..21: mol_type = other RNA
gtgttatttgttctgtcacgg

SEQ ID NO: 94922 - RNA, 21 nt, synthetic construct
  source 1..21: mol_type = other RNA
gtgttattttaatcgaatcct

SEQ ID NO: 94923 - RNA, 21 nt, synthetic construct
  source 1..21: mol_type = other RNA
gtgttcaaaagccccaaacca

SEQ ID NO: 94924 - RNA, 21 nt, synthetic construct
  source 1..21: mol_type = other RNA
gtgttccagacaaaaattttc

SEQ ID NO: 94925 - RNA, 21 nt, synthetic construct
  source 1..21: mol_type = other RNA
gtgttcccttcttaaatgtga

SEQ ID NO: 94926 - RNA, 21 nt, synthetic construct
  source 1..21: mol_type = other RNA
gtgttcctgaagtctttggtg

SEQ ID NO: 94927 - RNA, 21 nt, synthetic construct
  source 1..21: mol_type = other RNA
gtgttccttcctacacatatc

SEQ ID NO: 94928 - RNA, 21 nt, synthetic construct
  source 1..21: mol_type = other RNA
gtgttctctttttgacagatg

SEQ ID NO: 94929 - RNA, 21 nt, synthetic construct
  source 1..21: mol_type = other RNA
gtgttctgccttgaggtgatt

SEQ ID NO: 94930 - RNA, 21 nt, synthetic construct
  source 1..21: mol_type = other RNA
gtgttctgtgtttatgaatga

SEQ ID NO: 94931 - RNA, 21 nt, synthetic construct
  source 1..21: mol_type = other RNA
gtgttcttttccttcttaaga

SEQ ID NO: 94932 - RNA, 21 nt, synthetic construct
  source 1..21: mol_type = other RNA
gtgttgaccttagtggttgac

SEQ ID NO: 94933 - RNA, 21 nt, synthetic construct
  source 1..21: mol_type = other RNA
gtgttgactaccatctctcca

SEQ ID NO: 94934 - RNA, 21 nt, synthetic construct
  source 1..21: mol_type = other RNA
gtgttgactgaattaatctct

SEQ ID NO: 94935 - RNA, 21 nt, synthetic construct
  source 1..21: mol_type = other RNA
gtgttgactgacataactgta

SEQ ID NO: 94936 - RNA, 21 nt, synthetic construct
  source 1..21: mol_type = other RNA
gtgttgagaaagcacataaaa

SEQ ID NO: 94937 - RNA, 21 nt, synthetic construct
  source 1..21: mol_type = other RNA
gtgttgagaggctttaagcag

SEQ ID NO: 94938 - RNA, 21 nt, synthetic construct
  source 1..21: mol_type = other RNA
gtgttgataaatatgtgttac

SEQ ID NO: 94939 - RNA, 21 nt, synthetic construct
  source 1..21: mol_type = other RNA
gtgttgcccacgctggtctca

SEQ ID NO: 94940 - RNA, 21 nt, synthetic construct
  source 1..21: mol_type = other RNA
gtgttgcttgctctacaaacc

SEQ ID NO: 94941 - RNA, 21 nt, synthetic construct
  source 1..21: mol_type = other RNA
gtgttgcttggtgttgactga

SEQ ID NO: 94942 - RNA, 21 nt, synthetic construct
  source 1..21: mol_type = other RNA
gtgttggcactgaagccagtc

SEQ ID NO: 94943 - RNA, 21 nt, synthetic construct
  source 1..21: mol_type = other RNA
gtgttggtgcatttgggacag

SEQ ID NO: 94944 - RNA, 21 nt, synthetic construct
  source 1..21: mol_type = other RNA
gtgttggtgtttctgacaggt

SEQ ID NO: 94945 - RNA, 21 nt, synthetic construct
  source 1..21: mol_type = other RNA
gtgttgtctgattcagtttgc

SEQ ID NO: 94946 - RNA, 21 nt, synthetic construct
  source 1..21: mol_type = other RNA
gtgttgtgcacacatccacgc

SEQ ID NO: 94947 - RNA, 21 nt, synthetic construct
  source 1..21: mol_type = other RNA
gtgttgtgtgcacctaataaa

SEQ ID NO: 94948 - RNA, 21 nt, synthetic construct
  source 1..21: mol_type = other RNA
gtgttgtttttaaacaatagg

SEQ ID NO: 94949 - RNA, 21 nt, synthetic construct
  source 1..21: mol_type = other RNA
gtgtttaatttccacccatga

SEQ ID NO: 94950 - RNA, 21 nt, synthetic construct
  source 1..21: mol_type = other RNA
gtgtttacacacctgaaattc

SEQ ID NO: 94951 - RNA, 21 nt, synthetic construct
  source 1..21: mol_type = other RNA
gtgtttaggatataagagtgg

SEQ ID NO: 94952 - RNA, 21 nt, synthetic construct
  source 1..21: mol_type = other RNA
gtgtttagggacgaatgcatg

SEQ ID NO: 94953 - RNA, 21 nt, synthetic construct
  source 1..21: mol_type = other RNA
gtgtttatgaatgatgccatc

SEQ ID NO: 94954 - RNA, 21 nt, synthetic construct
  source 1..21: mol_type = other RNA
gtgtttcatttacaaaaacac

SEQ ID NO: 94955 - RNA, 21 nt, synthetic construct
  source 1..21: mol_type = other RNA
gtgtttcccttaaaaggaact

SEQ ID NO: 94956 - RNA, 21 nt, synthetic construct
  source 1..21: mol_type = other RNA
gtgtttcctagattccctctg

SEQ ID NO: 94957 - RNA, 21 nt, synthetic construct
  source 1..21: mol_type = other RNA
gtgtttccttccagatgtttt

SEQ ID NO: 94958 - RNA, 21 nt, synthetic construct
  source 1..21: mol_type = other RNA
gtgtttcgcaaagtaaaaagc

SEQ ID NO: 94959 - RNA, 21 nt, synthetic construct
  source 1..21: mol_type = other RNA
gtgtttctgacaggtggtatg

SEQ ID NO: 94960 - RNA, 21 nt, synthetic construct
  source 1..21: mol_type = other RNA
gtgtttctgctattctctttc

SEQ ID NO: 94961 - RNA, 21 nt, synthetic construct
  source 1..21: mol_type = other RNA
gtgtttgaaaagtgtttgtca

SEQ ID NO: 94962 - RNA, 21 nt, synthetic construct
  source 1..21: mol_type = other RNA
gtgtttggtgaattttattct

SEQ ID NO: 94963 - RNA, 21 nt, synthetic construct
  source 1..21: mol_type = other RNA
gtgtttggtttttatggaata

SEQ ID NO: 94964 - RNA, 21 nt, synthetic construct
  source 1..21: mol_type = other RNA
gtgtttgtcacatagaagcgc

SEQ ID NO: 94965 - RNA, 21 nt, synthetic construct
  source 1..21: mol_type = other RNA
gtgtttgtgaccagatcaaac

SEQ ID NO: 94966 - RNA, 21 nt, synthetic construct
  source 1..21: mol_type = other RNA
gtgtttgtttgctagagctgc

SEQ ID NO: 94967 - RNA, 21 nt, synthetic construct
  source 1..21: mol_type = other RNA
gtgttttaaagcagggagggg

SEQ ID NO: 94968 - RNA, 21 nt, synthetic construct
  source 1..21: mol_type = other RNA
gtgttttaggggggaaaacac

SEQ ID NO: 94969 - RNA, 21 nt, synthetic construct
  source 1..21: mol_type = other RNA
gtgttttatttaggccctcta

SEQ ID NO: 94970 - RNA, 21 nt, synthetic construct
  source 1..21: mol_type = other RNA
gtgttttatttggctgttacc

SEQ ID NO: 94971 - RNA, 21 nt, synthetic construct
  source 1..21: mol_type = other RNA
gtgttttcactctcaatagtg

SEQ ID NO: 94972 - RNA, 21 nt, synthetic construct
  source 1..21: mol_type = other RNA
gtgttttcattcgttcaaaac

SEQ ID NO: 94973 - RNA, 21 nt, synthetic construct
  source 1..21: mol_type = other RNA
gtgttttcccccctaaaacac

SEQ ID NO: 94974 - RNA, 21 nt, synthetic construct
  source 1..21: mol_type = other RNA
gtgttttcttcatggactaga

SEQ ID NO: 94975 - RNA, 21 nt, synthetic construct
  source 1..21: mol_type = other RNA
gtgttttgatagttgcagatt

SEQ ID NO: 94976 - RNA, 21 nt, synthetic construct
  source 1..21: mol_type = other RNA
gtgttttgttgttgttgttgt

SEQ ID NO: 94977 - RNA, 21 nt, synthetic construct
  source 1..21: mol_type = other RNA
gtgttttgttttgaataacct

SEQ ID NO: 94978 - RNA, 21 nt, synthetic construct
  source 1..21: mol_type = other RNA
gtgtttttcagccctgataga

SEQ ID NO: 94979 - RNA, 21 nt, synthetic construct
  source 1..21: mol_type = other RNA
gtgtttttctaggtagtttct

SEQ ID NO: 94980 - RNA, 21 nt, synthetic construct
  source 1..21: mol_type = other RNA
gtgtttttgaattctgcttat

SEQ ID NO: 94981 - RNA, 21 nt, synthetic construct
  source 1..21: mol_type = other RNA
gtgtttttgtaaatgaaacac

SEQ ID NO: 94982 - RNA, 21 nt, synthetic construct
  source 1..21: mol_type = other RNA
gtgttttttccttctttgggg

SEQ ID NO: 94983 - RNA, 21 nt, synthetic construct
  source 1..21: mol_type = other RNA
gttaaaaacttaagtatctcg

SEQ ID NO: 94984 - RNA, 21 nt, synthetic construct
  source 1..21: mol_type = other RNA
gttaaaaccacaaacatgaat

SEQ ID NO: 94985 - RNA, 21 nt, synthetic construct
  source 1..21: mol_type = other RNA
gttaaaactcacaaaaagtgt

SEQ ID NO: 94986 - RNA, 21 nt, synthetic construct
  source 1..21: mol_type = other RNA
gttaaaacttgtagaggagga

SEQ ID NO: 94987 - RNA, 21 nt, synthetic construct
  source 1..21: mol_type = other RNA
gttaaaagacatctttcctgt

SEQ ID NO: 94988 - RNA, 21 nt, synthetic construct
  source 1..21: mol_type = other RNA
gttaaaagatacgaaaatcct

SEQ ID NO: 94989 - RNA, 21 nt, synthetic construct
  source 1..21: mol_type = other RNA
gttaaaagttagctggcaaaa

SEQ ID NO: 94990 - RNA, 21 nt, synthetic construct
  source 1..21: mol_type = other RNA
gttaaaagttttccaaccact

SEQ ID NO: 94991 - RNA, 21 nt, synthetic construct
  source 1..21: mol_type = other RNA
gttaaaatgaaaatgttccct

SEQ ID NO: 94992 - RNA, 21 nt, synthetic construct
  source 1..21: mol_type = other RNA
gttaaacatgtaaaacagacc

SEQ ID NO: 94993 - RNA, 21 nt, synthetic construct
  source 1..21: mol_type = other RNA
gttaaacccaacaaacaatta

SEQ ID NO: 94994 - RNA, 21 nt, synthetic construct
  source 1..21: mol_type = other RNA
gttaaacttggtctgggtgat

SEQ ID NO: 94995 - RNA, 21 nt, synthetic construct
  source 1..21: mol_type = other RNA
gttaaacttttgtgcatcaaa

SEQ ID NO: 94996 - RNA, 21 nt, synthetic construct
  source 1..21: mol_type = other RNA
gttaaagcaacaggaagaggc

SEQ ID NO: 94997 - RNA, 21 nt, synthetic construct
  source 1..21: mol_type = other RNA
gttaaaggaaaagagatctag

SEQ ID NO: 94998 - RNA, 21 nt, synthetic construct
  source 1..21: mol_type = other RNA
gttaaatgaaggaaaaaacgg

SEQ ID NO: 94999 - RNA, 21 nt, synthetic construct
  source 1..21: mol_type = other RNA
gttaaatttgattgttagcca

SEQ ID NO: 95000 - RNA, 21 nt, synthetic construct
  source 1..21: mol_type = other RNA
gttaacaatactgcattgtgc

SEQ ID NO: 95001 - RNA, 21 nt, synthetic construct
  source 1..21: mol_type = other RNA
gttaacaattggtgaatctga

SEQ ID NO: 95002 - RNA, 21 nt, synthetic construct
  source 1..21: mol_type = other RNA
gttaacagtgctgtgccagtg

SEQ ID NO: 95003 - RNA, 21 nt, synthetic construct
  source 1..21: mol_type = other RNA
gttaacatttcttctagtcac

SEQ ID NO: 95004 - RNA, 21 nt, synthetic construct
  source 1..21: mol_type = other RNA
gttaaccttctggggttcaaa

SEQ ID NO: 95005 - RNA, 21 nt, synthetic construct
  source 1..21: mol_type = other RNA
gttaacgtttatctacagagg

SEQ ID NO: 95006 - RNA, 21 nt, synthetic construct
  source 1..21: mol_type = other RNA
gttaactaatagccagtgcag

SEQ ID NO: 95007 - RNA, 21 nt, synthetic construct
  source 1..21: mol_type = other RNA
gttaactgaaatcgggagtaa

SEQ ID NO: 95008 - RNA, 21 nt, synthetic construct
  source 1..21: mol_type = other RNA
gttaactgacttacagacctt

SEQ ID NO: 95009 - RNA, 21 nt, synthetic construct
  source 1..21: mol_type = other RNA
gttaactgtagagaaaatgtt

SEQ ID NO: 95010 - RNA, 21 nt, synthetic construct
  source 1..21: mol_type = other RNA
gttaactgtattgcaaactaa

SEQ ID NO: 95011 - RNA, 21 nt, synthetic construct
  source 1..21: mol_type = other RNA
gttaacttattggaaaactct

SEQ ID NO: 95012 - RNA, 21 nt, synthetic construct
  source 1..21: mol_type = other RNA
gttaagactgctgtttaccaa

SEQ ID NO: 95013 - RNA, 21 nt, synthetic construct
  source 1..21: mol_type = other RNA
gttaagattcaacaaaactgg

SEQ ID NO: 95014 - RNA, 21 nt, synthetic construct
  source 1..21: mol_type = other RNA
gttaagcattttccggttgta

SEQ ID NO: 95015 - RNA, 21 nt, synthetic construct
  source 1..21: mol_type = other RNA
gttaagcccaacttcacacca

SEQ ID NO: 95016 - RNA, 21 nt, synthetic construct
  source 1..21: mol_type = other RNA
gttaagccgttccatcagaga

SEQ ID NO: 95017 - RNA, 21 nt, synthetic construct
  source 1..21: mol_type = other RNA
gttaagggaagagctaagatg

SEQ ID NO: 95018 - RNA, 21 nt, synthetic construct
  source 1..21: mol_type = other RNA
gttaagggccatttcatttct

SEQ ID NO: 95019 - RNA, 21 nt, synthetic construct
  source 1..21: mol_type = other RNA
gttaagtctgaaagcttctga

SEQ ID NO: 95020 - RNA, 21 nt, synthetic construct
  source 1..21: mol_type = other RNA
gttaagtgtttgaaaagtgtt

SEQ ID NO: 95021 - RNA, 21 nt, synthetic construct
  source 1..21: mol_type = other RNA
gttaataaaggtgctaattgt

SEQ ID NO: 95022 - RNA, 21 nt, synthetic construct
  source 1..21: mol_type = other RNA
gttaataaccctgttttgtag

SEQ ID NO: 95023 - RNA, 21 nt, synthetic construct
  source 1..21: mol_type = other RNA
gttaatacttgtgtagcggga

SEQ ID NO: 95024 - RNA, 21 nt, synthetic construct
  source 1..21: mol_type = other RNA
gttaatagataggtcatgtac

SEQ ID NO: 95025 - RNA, 21 nt, synthetic construct
  source 1..21: mol_type = other RNA
gttaatagcctcctaagtttt

SEQ ID NO: 95026 - RNA, 21 nt, synthetic construct
  source 1..21: mol_type = other RNA
gttaatagtgaccctttgaag

SEQ ID NO: 95027 - RNA, 21 nt, synthetic construct
  source 1..21: mol_type = other RNA
gttaatattgtaggtgtctca

SEQ ID NO: 95028 - RNA, 21 nt, synthetic construct
  source 1..21: mol_type = other RNA
gttaatgggcacttgggatgt

SEQ ID NO: 95029 - RNA, 21 nt, synthetic construct
  source 1..21: mol_type = other RNA
gttaatggttagactgcacat

SEQ ID NO: 95030 - RNA, 21 nt, synthetic construct
  source 1..21: mol_type = other RNA
gttaatgtgatatgccacatt

SEQ ID NO: 95031 - RNA, 21 nt, synthetic construct
  source 1..21: mol_type = other RNA
gttaatgtgtgaagaaggaat

SEQ ID NO: 95032 - RNA, 21 nt, synthetic construct
  source 1..21: mol_type = other RNA
gttaattatttgtgcatactg

SEQ ID NO: 95033 - RNA, 21 nt, synthetic construct
  source 1..21: mol_type = other RNA
gttaattccacaaccactggg

SEQ ID NO: 95034 - RNA, 21 nt, synthetic construct
  source 1..21: mol_type = other RNA
gttacaaaatatgtaatgacc

SEQ ID NO: 95035 - RNA, 21 nt, synthetic construct
  source 1..21: mol_type = other RNA
gttacaaacatatgcatgtta

SEQ ID NO: 95036 - RNA, 21 nt, synthetic construct
  source 1..21: mol_type = other RNA
gttacaactactcgggaggct

SEQ ID NO: 95037 - RNA, 21 nt, synthetic construct
  source 1..21: mol_type = other RNA
gttacaactctaataacagcc

SEQ ID NO: 95038 - RNA, 21 nt, synthetic construct
  source 1..21: mol_type = other RNA
gttacaaggattgaatggaaa

SEQ ID NO: 95039 - RNA, 21 nt, synthetic construct
  source 1..21: mol_type = other RNA
gttacaataatatgcctcatg

SEQ ID NO: 95040 - RNA, 21 nt, synthetic construct
  source 1..21: mol_type = other RNA
gttacacaagtgtttcattta

SEQ ID NO: 95041 - RNA, 21 nt, synthetic construct
  source 1..21: mol_type = other RNA
gttacacaggtagacatgtgc

SEQ ID NO: 95042 - RNA, 21 nt, synthetic construct
  source 1..21: mol_type = other RNA
gttacacttccagtacatctc

SEQ ID NO: 95043 - RNA, 21 nt, synthetic construct
  source 1..21: mol_type = other RNA
gttacagcagctctagcaaac

SEQ ID NO: 95044 - RNA, 21 nt, synthetic construct
  source 1..21: mol_type = other RNA
gttacagcatttcagccaaag

SEQ ID NO: 95045 - RNA, 21 nt, synthetic construct
  source 1..21: mol_type = other RNA
gttacagctcttctcagttgc

SEQ ID NO: 95046 - RNA, 21 nt, synthetic construct
  source 1..21: mol_type = other RNA
gttacagtataggggaactct

SEQ ID NO: 95047 - RNA, 21 nt, synthetic construct
  source 1..21: mol_type = other RNA
gttacatgaggtcacccaagc

SEQ ID NO: 95048 - RNA, 21 nt, synthetic construct
  source 1..21: mol_type = other RNA
gttacatgcttagccttccag

SEQ ID NO: 95049 - RNA, 21 nt, synthetic construct
  source 1..21: mol_type = other RNA
gttacatggttctgtgctaga

SEQ ID NO: 95050 - RNA, 21 nt, synthetic construct
  source 1..21: mol_type = other RNA
gttacattgccttcgcagggt

SEQ ID NO: 95051 - RNA, 21 nt, synthetic construct
  source 1..21: mol_type = other RNA
gttaccaccaagaaaaagcag

SEQ ID NO: 95052 - RNA, 21 nt, synthetic construct
  source 1..21: mol_type = other RNA
gttaccactagcaaactactg

SEQ ID NO: 95053 - RNA, 21 nt, synthetic construct
  source 1..21: mol_type = other RNA
gttaccataaaaccatttttc

SEQ ID NO: 95054 - RNA, 21 nt, synthetic construct
  source 1..21: mol_type = other RNA
gttaccatttgaccttccttg

SEQ ID NO: 95055 - RNA, 21 nt, synthetic construct
  source 1..21: mol_type = other RNA
gttaccctctggaatgcccat

SEQ ID NO: 95056 - RNA, 21 nt, synthetic construct
  source 1..21: mol_type = other RNA
gttacgctgccaaaagccaag

SEQ ID NO: 95057 - RNA, 21 nt, synthetic construct
  source 1..21: mol_type = other RNA
gttacggttccctgtagagat

SEQ ID NO: 95058 - RNA, 21 nt, synthetic construct
  source 1..21: mol_type = other RNA
gttacgtactaggtatcacag

SEQ ID NO: 95059 - RNA, 21 nt, synthetic construct
  source 1..21: mol_type = other RNA
gttactagaagcactttttac

SEQ ID NO: 95060 - RNA, 21 nt, synthetic construct
  source 1..21: mol_type = other RNA
gttactcaaatccaaattcac

SEQ ID NO: 95061 - RNA, 21 nt, synthetic construct
  source 1..21: mol_type = other RNA
gttactcattatggttgttgg

SEQ ID NO: 95062 - RNA, 21 nt, synthetic construct
  source 1..21: mol_type = other RNA
gttactcccgatttcagttaa

SEQ ID NO: 95063 - RNA, 21 nt, synthetic construct
  source 1..21: mol_type = other RNA
gttactcctgagcaaggaagg

SEQ ID NO: 95064 - RNA, 21 nt, synthetic construct
  source 1..21: mol_type = other RNA
gttactctctctgcctcggca

SEQ ID NO: 95065 - RNA, 21 nt, synthetic construct
  source 1..21: mol_type = other RNA
gttactgatctgctcaagttt

SEQ ID NO: 95066 - RNA, 21 nt, synthetic construct
  source 1..21: mol_type = other RNA
gttactgattagaaggattgt

SEQ ID NO: 95067 - RNA, 21 nt, synthetic construct
  source 1..21: mol_type = other RNA
gttacttctcagctatagctt

SEQ ID NO: 95068 - RNA, 21 nt, synthetic construct
  source 1..21: mol_type = other RNA
gttacttctggaaagttcaaa

SEQ ID NO: 95069 - RNA, 21 nt, synthetic construct
  source 1..21: mol_type = other RNA
gttacttgaaatcatttcact

SEQ ID NO: 95070 - RNA, 21 nt, synthetic construct
  source 1..21: mol_type = other RNA
gttacttgactattttaccct

SEQ ID NO: 95071 - RNA, 21 nt, synthetic construct
  source 1..21: mol_type = other RNA
gttagaacaattttgaatgtg

SEQ ID NO: 95072 - RNA, 21 nt, synthetic construct
  source 1..21: mol_type = other RNA
gttagaagacaatactgttat

SEQ ID NO: 95073 - RNA, 21 nt, synthetic construct
  source 1..21: mol_type = other RNA
gttagaagtatcccagatggg

SEQ ID NO: 95074 - RNA, 21 nt, synthetic construct
  source 1..21: mol_type = other RNA
gttagaattacaggcatgagt

SEQ ID NO: 95075 - RNA, 21 nt, synthetic construct
  source 1..21: mol_type = other RNA
gttagaattcaggacagttat

SEQ ID NO: 95076 - RNA, 21 nt, synthetic construct
  source 1..21: mol_type = other RNA
gttagaattttgcttttgctt

SEQ ID NO: 95077 - RNA, 21 nt, synthetic construct
  source 1..21: mol_type = other RNA
gttagactgcacataaaagga

SEQ ID NO: 95078 - RNA, 21 nt, synthetic construct
  source 1..21: mol_type = other RNA
gttagatatcccatataaggg

SEQ ID NO: 95079 - RNA, 21 nt, synthetic construct
  source 1..21: mol_type = other RNA
gttagatctgggataatgcta

SEQ ID NO: 95080 - RNA, 21 nt, synthetic construct
  source 1..21: mol_type = other RNA
gttagatggtgctgatttaaa

SEQ ID NO: 95081 - RNA, 21 nt, synthetic construct
  source 1..21: mol_type = other RNA
gttagattaggaaacagattg

SEQ ID NO: 95082 - RNA, 21 nt, synthetic construct
  source 1..21: mol_type = other RNA
gttagattatatggtctacca

SEQ ID NO: 95083 - RNA, 21 nt, synthetic construct
  source 1..21: mol_type = other RNA
gttagatttttcctttgccta

SEQ ID NO: 95084 - RNA, 21 nt, synthetic construct
  source 1..21: mol_type = other RNA
gttagcaggactggactcctt

SEQ ID NO: 95085 - RNA, 21 nt, synthetic construct
  source 1..21: mol_type = other RNA
gttagcatcaccatcatcatc

SEQ ID NO: 95086 - RNA, 21 nt, synthetic construct
  source 1..21: mol_type = other RNA
gttagcatgcctgacaaagta

SEQ ID NO: 95087 - RNA, 21 nt, synthetic construct
  source 1..21: mol_type = other RNA
gttagccacagcgttgttcag

SEQ ID NO: 95088 - RNA, 21 nt, synthetic construct
  source 1..21: mol_type = other RNA
gttagccttgccattctccca

SEQ ID NO: 95089 - RNA, 21 nt, synthetic construct
  source 1..21: mol_type = other RNA
gttagctggcaaaatggagac

SEQ ID NO: 95090 - RNA, 21 nt, synthetic construct
  source 1..21: mol_type = other RNA
gttaggaaaatacatgaggcc

SEQ ID NO: 95091 - RNA, 21 nt, synthetic construct
  source 1..21: mol_type = other RNA
gttaggaagccactgcattca

SEQ ID NO: 95092 - RNA, 21 nt, synthetic construct
  source 1..21: mol_type = other RNA
gttaggaatttacatttccat

SEQ ID NO: 95093 - RNA, 21 nt, synthetic construct
  source 1..21: mol_type = other RNA
gttaggcaatccttccgcctc

SEQ ID NO: 95094 - RNA, 21 nt, synthetic construct
  source 1..21: mol_type = other RNA
gttagggacttatggagataa

SEQ ID NO: 95095 - RNA, 21 nt, synthetic construct
  source 1..21: mol_type = other RNA
gttagggagactttcactgct

SEQ ID NO: 95096 - RNA, 21 nt, synthetic construct
  source 1..21: mol_type = other RNA
gttagggcctagaaatcatac

SEQ ID NO: 95097 - RNA, 21 nt, synthetic construct
  source 1..21: mol_type = other RNA
gttaggtattattttcacaga

SEQ ID NO: 95098 - RNA, 21 nt, synthetic construct
  source 1..21: mol_type = other RNA
gttaggtgctggcttcaatat

SEQ ID NO: 95099 - RNA, 21 nt, synthetic construct
  source 1..21: mol_type = other RNA
gttaggtggtttgaaccccag

SEQ ID NO: 95100 - RNA, 21 nt, synthetic construct
  source 1..21: mol_type = other RNA
gttaggttgaaagttcagaat

SEQ ID NO: 95101 - RNA, 21 nt, synthetic construct
  source 1..21: mol_type = other RNA
gttagtaggaaaaccatgtca

SEQ ID NO: 95102 - RNA, 21 nt, synthetic construct
  source 1..21: mol_type = other RNA
gttagtcccctagtggatgct

SEQ ID NO: 95103 - RNA, 21 nt, synthetic construct
  source 1..21: mol_type = other RNA
gttagtgaagcagagagagaa

SEQ ID NO: 95104 - RNA, 21 nt, synthetic construct
  source 1..21: mol_type = other RNA
gttagtgccttcagaaggagt

SEQ ID NO: 95105 - RNA, 21 nt, synthetic construct
  source 1..21: mol_type = other RNA
gttagtgtctaatgggtacag

SEQ ID NO: 95106 - RNA, 21 nt, synthetic construct
  source 1..21: mol_type = other RNA
gttagtttgttgacccaatca

SEQ ID NO: 95107 - RNA, 21 nt, synthetic construct
  source 1..21: mol_type = other RNA
gttataagcaaagatatgggt

SEQ ID NO: 95108 - RNA, 21 nt, synthetic construct
  source 1..21: mol_type = other RNA
gttataatcagccgtgattgc

SEQ ID NO: 95109 - RNA, 21 nt, synthetic construct
  source 1..21: mol_type = other RNA
gttataatgagatagaccaga

SEQ ID NO: 95110 - RNA, 21 nt, synthetic construct
  source 1..21: mol_type = other RNA
gttatacacacataaggggga

SEQ ID NO: 95111 - RNA, 21 nt, synthetic construct
  source 1..21: mol_type = other RNA
gttatacagcaaatctctaga

SEQ ID NO: 95112 - RNA, 21 nt, synthetic construct
  source 1..21: mol_type = other RNA
gttatagccataagagtcccc

SEQ ID NO: 95113 - RNA, 21 nt, synthetic construct
  source 1..21: mol_type = other RNA
gttatatccagattgatatct

SEQ ID NO: 95114 - RNA, 21 nt, synthetic construct
  source 1..21: mol_type = other RNA
gttatatcctcagggtaggaa

SEQ ID NO: 95115 - RNA, 21 nt, synthetic construct
  source 1..21: mol_type = other RNA
gttatatttccgtatccagtg

SEQ ID NO: 95116 - RNA, 21 nt, synthetic construct
  source 1..21: mol_type = other RNA
gttatcacacctaggcctatt

SEQ ID NO: 95117 - RNA, 21 nt, synthetic construct
  source 1..21: mol_type = other RNA
gttatcaccatgtgcttatca

SEQ ID NO: 95118 - RNA, 21 nt, synthetic construct
  source 1..21: mol_type = other RNA
gttatccaattttttggcata

SEQ ID NO: 95119 - RNA, 21 nt, synthetic construct
  source 1..21: mol_type = other RNA
gttatctctgccctcattgaa

SEQ ID NO: 95120 - RNA, 21 nt, synthetic construct
  source 1..21: mol_type = other RNA
gttatctcttagacctcctag

SEQ ID NO: 95121 - RNA, 21 nt, synthetic construct
  source 1..21: mol_type = other RNA
gttatctgaacgtctttaaat

SEQ ID NO: 95122 - RNA, 21 nt, synthetic construct
  source 1..21: mol_type = other RNA
gttatctgggaacagccccta

SEQ ID NO: 95123 - RNA, 21 nt, synthetic construct
  source 1..21: mol_type = other RNA
gttatctgttttcttactgat

SEQ ID NO: 95124 - RNA, 21 nt, synthetic construct
  source 1..21: mol_type = other RNA
gttatgaagcttttctcctaa

SEQ ID NO: 95125 - RNA, 21 nt, synthetic construct
  source 1..21: mol_type = other RNA
gttatgacaagactacctaaa

SEQ ID NO: 95126 - RNA, 21 nt, synthetic construct
  source 1..21: mol_type = other RNA
gttatgataaaaataacgggc

SEQ ID NO: 95127 - RNA, 21 nt, synthetic construct
  source 1..21: mol_type = other RNA
gttatgcaagatgtcaacatt

SEQ ID NO: 95128 - RNA, 21 nt, synthetic construct
  source 1..21: mol_type = other RNA
gttatgccccctcttctctcc

SEQ ID NO: 95129 - RNA, 21 nt, synthetic construct
  source 1..21: mol_type = other RNA
gttatggtaggtgctttttgt

SEQ ID NO: 95130 - RNA, 21 nt, synthetic construct
  source 1..21: mol_type = other RNA
gttatgtagctgggatggctg

SEQ ID NO: 95131 - RNA, 21 nt, synthetic construct
  source 1..21: mol_type = other RNA
gttatgtcagtcaacacacta

SEQ ID NO: 95132 - RNA, 21 nt, synthetic construct
  source 1..21: mol_type = other RNA
gttattaaatgagacacctac

SEQ ID NO: 95133 - RNA, 21 nt, synthetic construct
  source 1..21: mol_type = other RNA
gttattaacataccgacggct

SEQ ID NO: 95134 - RNA, 21 nt, synthetic construct
  source 1..21: mol_type = other RNA
gttattaagagtgtgctgact

SEQ ID NO: 95135 - RNA, 21 nt, synthetic construct
  source 1..21: mol_type = other RNA
gttattaagataatgctgttc

SEQ ID NO: 95136 - RNA, 21 nt, synthetic construct
  source 1..21: mol_type = other RNA
gttattagagttgtaacacat

SEQ ID NO: 95137 - RNA, 21 nt, synthetic construct
  source 1..21: mol_type = other RNA
gttattagggtaatgctggct

SEQ ID NO: 95138 - RNA, 21 nt, synthetic construct
  source 1..21: mol_type = other RNA
gttattcacccaagaatttca

SEQ ID NO: 95139 - RNA, 21 nt, synthetic construct
  source 1..21: mol_type = other RNA
gttattcatgtttgtggtttt

SEQ ID NO: 95140 - RNA, 21 nt, synthetic construct
  source 1..21: mol_type = other RNA
gttattcttcagcaaggacca

SEQ ID NO: 95141 - RNA, 21 nt, synthetic construct
  source 1..21: mol_type = other RNA
gttattgagtctgtagggtga

SEQ ID NO: 95142 - RNA, 21 nt, synthetic construct
  source 1..21: mol_type = other RNA
gttattgcatagggatgttgc

SEQ ID NO: 95143 - RNA, 21 nt, synthetic construct
  source 1..21: mol_type = other RNA
gttatttaatctctcttgacc

SEQ ID NO: 95144 - RNA, 21 nt, synthetic construct
  source 1..21: mol_type = other RNA
gttatttggggattctgctac

SEQ ID NO: 95145 - RNA, 21 nt, synthetic construct
  source 1..21: mol_type = other RNA
gttatttgttctgtcacggtg

SEQ ID NO: 95146 - RNA, 21 nt, synthetic construct
  source 1..21: mol_type = other RNA
gttattttaatcgaatcctca

SEQ ID NO: 95147 - RNA, 21 nt, synthetic construct
  source 1..21: mol_type = other RNA
gttcaaaaaccttttttaagg

SEQ ID NO: 95148 - RNA, 21 nt, synthetic construct
  source 1..21: mol_type = other RNA
gttcaaaagccccaaaccatc

SEQ ID NO: 95149 - RNA, 21 nt, synthetic construct
  source 1..21: mol_type = other RNA
gttcaaaatacagtgtttttg

SEQ ID NO: 95150 - RNA, 21 nt, synthetic construct
  source 1..21: mol_type = other RNA
gttcaaaccacctaactacta

SEQ ID NO: 95151 - RNA, 21 nt, synthetic construct
  source 1..21: mol_type = other RNA
gttcaaagaaactacctagaa

SEQ ID NO: 95152 - RNA, 21 nt, synthetic construct
  source 1..21: mol_type = other RNA
gttcaaatgaggcttttattg

SEQ ID NO: 95153 - RNA, 21 nt, synthetic construct
  source 1..21: mol_type = other RNA
gttcaaatgttaagcccaact

SEQ ID NO: 95154 - RNA, 21 nt, synthetic construct
  source 1..21: mol_type = other RNA
gttcaaccctcggcctctact

SEQ ID NO: 95155 - RNA, 21 nt, synthetic construct
  source 1..21: mol_type = other RNA
gttcaagatgcataccaagcc

SEQ ID NO: 95156 - RNA, 21 nt, synthetic construct
  source 1..21: mol_type = other RNA
gttcaagcaccacttcgagaa

SEQ ID NO: 95157 - RNA, 21 nt, synthetic construct
  source 1..21: mol_type = other RNA
gttcaagccccagttctgcgc

SEQ ID NO: 95158 - RNA, 21 nt, synthetic construct
  source 1..21: mol_type = other RNA
gttcaagcgctgaagtacttc

SEQ ID NO: 95159 - RNA, 21 nt, synthetic construct
  source 1..21: mol_type = other RNA
gttcaaggtgttagcaggact

SEQ ID NO: 95160 - RNA, 21 nt, synthetic construct
  source 1..21: mol_type = other RNA
gttcaaggtgttcctgaagtc

SEQ ID NO: 95161 - RNA, 21 nt, synthetic construct
  source 1..21: mol_type = other RNA
gttcaaggttataatcagccg

SEQ ID NO: 95162 - RNA, 21 nt, synthetic construct
  source 1..21: mol_type = other RNA
gttcaagtatttccacgggta

SEQ ID NO: 95163 - RNA, 21 nt, synthetic construct
  source 1..21: mol_type = other RNA
gttcaagtttggctcccatga

SEQ ID NO: 95164 - RNA, 21 nt, synthetic construct
  source 1..21: mol_type = other RNA
gttcaatactactgcaaatat

SEQ ID NO: 95165 - RNA, 21 nt, synthetic construct
  source 1..21: mol_type = other RNA
gttcacacctgtagtcccagc

SEQ ID NO: 95166 - RNA, 21 nt, synthetic construct
  source 1..21: mol_type = other RNA
gttcacactcgcactccactt

SEQ ID NO: 95167 - RNA, 21 nt, synthetic construct
  source 1..21: mol_type = other RNA
gttcacatttcgccttctcag

SEQ ID NO: 95168 - RNA, 21 nt, synthetic construct
  source 1..21: mol_type = other RNA
gttcaccagtttctaattaga

SEQ ID NO: 95169 - RNA, 21 nt, synthetic construct
  source 1..21: mol_type = other RNA
gttcacctctccgggtaaaaa

SEQ ID NO: 95170 - RNA, 21 nt, synthetic construct
  source 1..21: mol_type = other RNA
gttcactgcagaattactgac

SEQ ID NO: 95171 - RNA, 21 nt, synthetic construct
  source 1..21: mol_type = other RNA
gttcacttgaaacctgccatg

SEQ ID NO: 95172 - RNA, 21 nt, synthetic construct
  source 1..21: mol_type = other RNA
gttcagaaagattaatccttg

SEQ ID NO: 95173 - RNA, 21 nt, synthetic construct
  source 1..21: mol_type = other RNA
gttcagaaatagactcccaac

SEQ ID NO: 95174 - RNA, 21 nt, synthetic construct
  source 1..21: mol_type = other RNA
gttcagaataccagagattgg

SEQ ID NO: 95175 - RNA, 21 nt, synthetic construct
  source 1..21: mol_type = other RNA
gttcagataacaaagggttct

SEQ ID NO: 95176 - RNA, 21 nt, synthetic construct
  source 1..21: mol_type = other RNA
gttcagatagaaaagacaata

SEQ ID NO: 95177 - RNA, 21 nt, synthetic construct
  source 1..21: mol_type = other RNA
gttcagcatcttcactgacta

SEQ ID NO: 95178 - RNA, 21 nt, synthetic construct
  source 1..21: mol_type = other RNA
gttcagcctgcagaaggagaa

SEQ ID NO: 95179 - RNA, 21 nt, synthetic construct
  source 1..21: mol_type = other RNA
gttcagcttacagtcatcaca

SEQ ID NO: 95180 - RNA, 21 nt, synthetic construct
  source 1..21: mol_type = other RNA
gttcagctttaaagagaaata

SEQ ID NO: 95181 - RNA, 21 nt, synthetic construct
  source 1..21: mol_type = other RNA
gttcaggaccagcttgggcaa

SEQ ID NO: 95182 - RNA, 21 nt, synthetic construct
  source 1..21: mol_type = other RNA
gttcaggagttttgcctcttt

SEQ ID NO: 95183 - RNA, 21 nt, synthetic construct
  source 1..21: mol_type = other RNA
gttcagggaaggctgcaagca

SEQ ID NO: 95184 - RNA, 21 nt, synthetic construct
  source 1..21: mol_type = other RNA
gttcaggtgcctcctgcctca

SEQ ID NO: 95185 - RNA, 21 nt, synthetic construct
  source 1..21: mol_type = other RNA
gttcagtggtgcaatcacggc

SEQ ID NO: 95186 - RNA, 21 nt, synthetic construct
  source 1..21: mol_type = other RNA
gttcagttgaaaagtatggtt

SEQ ID NO: 95187 - RNA, 21 nt, synthetic construct
  source 1..21: mol_type = other RNA
gttcagtttagtaaatctttg

SEQ ID NO: 95188 - RNA, 21 nt, synthetic construct
  source 1..21: mol_type = other RNA
gttcagtttatgggtcaacca

SEQ ID NO: 95189 - RNA, 21 nt, synthetic construct
  source 1..21: mol_type = other RNA
gttcagttttgtatatggttt

SEQ ID NO: 95190 - RNA, 21 nt, synthetic construct
  source 1..21: mol_type = other RNA
gttcatatttcccttttggat

SEQ ID NO: 95191 - RNA, 21 nt, synthetic construct
  source 1..21: mol_type = other RNA
gttcatcatcttttgcctgga

SEQ ID NO: 95192 - RNA, 21 nt, synthetic construct
  source 1..21: mol_type = other RNA
gttcatccaaattattgacaa

SEQ ID NO: 95193 - RNA, 21 nt, synthetic construct
  source 1..21: mol_type = other RNA
gttcatccatgttgttgaatg

SEQ ID NO: 95194 - RNA, 21 nt, synthetic construct
  source 1..21: mol_type = other RNA
gttcatgaaatcccctttagt

SEQ ID NO: 95195 - RNA, 21 nt, synthetic construct
  source 1..21: mol_type = other RNA
gttcatgaaccttcaccaaag

SEQ ID NO: 95196 - RNA, 21 nt, synthetic construct
  source 1..21: mol_type = other RNA
gttcatgggaagatgctccct

SEQ ID NO: 95197 - RNA, 21 nt, synthetic construct
  source 1..21: mol_type = other RNA
gttcatgtctgtgtagttcat

SEQ ID NO: 95198 - RNA, 21 nt, synthetic construct
  source 1..21: mol_type = other RNA
gttcatgtgtgcttacacaca

SEQ ID NO: 95199 - RNA, 21 nt, synthetic construct
  source 1..21: mol_type = other RNA
gttcatgttagcataattcga

SEQ ID NO: 95200 - RNA, 21 nt, synthetic construct
  source 1..21: mol_type = other RNA
gttcatgttcaaggtgttcct

SEQ ID NO: 95201 - RNA, 21 nt, synthetic construct
  source 1..21: mol_type = other RNA
gttcattagaattcaggacag

SEQ ID NO: 95202 - RNA, 21 nt, synthetic construct
  source 1..21: mol_type = other RNA
gttcattcatctgttaatggg

SEQ ID NO: 95203 - RNA, 21 nt, synthetic construct
  source 1..21: mol_type = other RNA
gttcattcgtagcaggtttag

SEQ ID NO: 95204 - RNA, 21 nt, synthetic construct
  source 1..21: mol_type = other RNA
gttcatttcaggaatgcaaag

SEQ ID NO: 95205 - RNA, 21 nt, synthetic construct
  source 1..21: mol_type = other RNA
gttcatttgagaatttcaggt

SEQ ID NO: 95206 - RNA, 21 nt, synthetic construct
  source 1..21: mol_type = other RNA
gttcattttaataagcttcga

SEQ ID NO: 95207 - RNA, 21 nt, synthetic construct
  source 1..21: mol_type = other RNA
gttccaaacttctgaccttgt

SEQ ID NO: 95208 - RNA, 21 nt, synthetic construct
  source 1..21: mol_type = other RNA
gttccaactgtataaatgttc

SEQ ID NO: 95209 - RNA, 21 nt, synthetic construct
  source 1..21: mol_type = other RNA
gttccaagattttcccaatct

SEQ ID NO: 95210 - RNA, 21 nt, synthetic construct
  source 1..21: mol_type = other RNA
gttccacatgttactcattat

SEQ ID NO: 95211 - RNA, 21 nt, synthetic construct
  source 1..21: mol_type = other RNA
gttccacctccatcactgact

SEQ ID NO: 95212 - RNA, 21 nt, synthetic construct
  source 1..21: mol_type = other RNA
gttccagacaaaaattttcat

SEQ ID NO: 95213 - RNA, 21 nt, synthetic construct
  source 1..21: mol_type = other RNA
gttccagcagggtaaagtcaa

SEQ ID NO: 95214 - RNA, 21 nt, synthetic construct
  source 1..21: mol_type = other RNA
gttccaggcctcgctcttggc

SEQ ID NO: 95215 - RNA, 21 nt, synthetic construct
  source 1..21: mol_type = other RNA
gttccaggggggaaaaaacca

SEQ ID NO: 95216 - RNA, 21 nt, synthetic construct
  source 1..21: mol_type = other RNA
gttccagtcctttgtgtcaag

SEQ ID NO: 95217 - RNA, 21 nt, synthetic construct
  source 1..21: mol_type = other RNA
gttccatcagagaggcttttt

SEQ ID NO: 95218 - RNA, 21 nt, synthetic construct
  source 1..21: mol_type = other RNA
gttccatcggtctgtatttct

SEQ ID NO: 95219 - RNA, 21 nt, synthetic construct
  source 1..21: mol_type = other RNA
gttccatctgttatagtgtga

SEQ ID NO: 95220 - RNA, 21 nt, synthetic construct
  source 1..21: mol_type = other RNA
gttccattattccataaaaac

SEQ ID NO: 95221 - RNA, 21 nt, synthetic construct
  source 1..21: mol_type = other RNA
gttccatttgttttgtgtttg

SEQ ID NO: 95222 - RNA, 21 nt, synthetic construct
  source 1..21: mol_type = other RNA
gttcccaagcaagtgtggtgg

SEQ ID NO: 95223 - RNA, 21 nt, synthetic construct
  source 1..21: mol_type = other RNA
gttcccagataacagtggtta

SEQ ID NO: 95224 - RNA, 21 nt, synthetic construct
  source 1..21: mol_type = other RNA
gttccccaagccaaattaata

SEQ ID NO: 95225 - RNA, 21 nt, synthetic construct
  source 1..21: mol_type = other RNA
gttccccattgacaatatagg

SEQ ID NO: 95226 - RNA, 21 nt, synthetic construct
  source 1..21: mol_type = other RNA
gttcccctatactgtaaccct

SEQ ID NO: 95227 - RNA, 21 nt, synthetic construct
  source 1..21: mol_type = other RNA
gttcccggattggaaaactag

SEQ ID NO: 95228 - RNA, 21 nt, synthetic construct
  source 1..21: mol_type = other RNA
gttccctagaacttaaaatat

SEQ ID NO: 95229 - RNA, 21 nt, synthetic construct
  source 1..21: mol_type = other RNA
gttccctcttcaatattttgg

SEQ ID NO: 95230 - RNA, 21 nt, synthetic construct
  source 1..21: mol_type = other RNA
gttccctgtagagatttttat

SEQ ID NO: 95231 - RNA, 21 nt, synthetic construct
  source 1..21: mol_type = other RNA
gttcccttcttaaatgtgaat

SEQ ID NO: 95232 - RNA, 21 nt, synthetic construct
  source 1..21: mol_type = other RNA
gttccgatttctcggccgggc

SEQ ID NO: 95233 - RNA, 21 nt, synthetic construct
  source 1..21: mol_type = other RNA
gttccgattttacttactagt

SEQ ID NO: 95234 - RNA, 21 nt, synthetic construct
  source 1..21: mol_type = other RNA
gttccgggatcctgtccaggc

SEQ ID NO: 95235 - RNA, 21 nt, synthetic construct
  source 1..21: mol_type = other RNA
gttccggttctcaggagccta

SEQ ID NO: 95236 - RNA, 21 nt, synthetic construct
  source 1..21: mol_type = other RNA
gttcctatatttttccacata

SEQ ID NO: 95237 - RNA, 21 nt, synthetic construct
  source 1..21: mol_type = other RNA
gttcctccttttgtagaggga

SEQ ID NO: 95238 - RNA, 21 nt, synthetic construct
  source 1..21: mol_type = other RNA
gttcctgaagtctttggtgat

SEQ ID NO: 95239 - RNA, 21 nt, synthetic construct
  source 1..21: mol_type = other RNA
gttcctgcttcccccaaagaa

SEQ ID NO: 95240 - RNA, 21 nt, synthetic construct
  source 1..21: mol_type = other RNA
gttcctggactgtgatgactg

SEQ ID NO: 95241 - RNA, 21 nt, synthetic construct
  source 1..21: mol_type = other RNA
gttcctgggttctcccttcta

SEQ ID NO: 95242 - RNA, 21 nt, synthetic construct
  source 1..21: mol_type = other RNA
gttccttcctacacatatctt

SEQ ID NO: 95243 - RNA, 21 nt, synthetic construct
  source 1..21: mol_type = other RNA
gttccttttaagggaaacact

SEQ ID NO: 95244 - RNA, 21 nt, synthetic construct
  source 1..21: mol_type = other RNA
gttcgtttgaggcttttcata

SEQ ID NO: 95245 - RNA, 21 nt, synthetic construct
  source 1..21: mol_type = other RNA
gttctaaagttagaagtatcc

SEQ ID NO: 95246 - RNA, 21 nt, synthetic construct
  source 1..21: mol_type = other RNA
gttctaataaacgcggaatga

SEQ ID NO: 95247 - RNA, 21 nt, synthetic construct
  source 1..21: mol_type = other RNA
gttctaatttgtgaaccttga

SEQ ID NO: 95248 - RNA, 21 nt, synthetic construct
  source 1..21: mol_type = other RNA
gttctagagatttgctgtata

SEQ ID NO: 95249 - RNA, 21 nt, synthetic construct
  source 1..21: mol_type = other RNA
gttctagctcctgggaaaagg

SEQ ID NO: 95250 - RNA, 21 nt, synthetic construct
  source 1..21: mol_type = other RNA
gttctagttctaataaacgcg

SEQ ID NO: 95251 - RNA, 21 nt, synthetic construct
  source 1..21: mol_type = other RNA
gttctatttctttccattcaa

SEQ ID NO: 95252 - RNA, 21 nt, synthetic construct
  source 1..21: mol_type = other RNA
gttctcaccaacatccacagc

SEQ ID NO: 95253 - RNA, 21 nt, synthetic construct
  source 1..21: mol_type = other RNA
gttctcaggagcctagtcatc

SEQ ID NO: 95254 - RNA, 21 nt, synthetic construct
  source 1..21: mol_type = other RNA
gttctcaggggtaaaggggat

SEQ ID NO: 95255 - RNA, 21 nt, synthetic construct
  source 1..21: mol_type = other RNA
gttctcagtatcctttcaagg

SEQ ID NO: 95256 - RNA, 21 nt, synthetic construct
  source 1..21: mol_type = other RNA
gttctccaagttattacaaaa

SEQ ID NO: 95257 - RNA, 21 nt, synthetic construct
  source 1..21: mol_type = other RNA
gttctccagtcccactgacag

SEQ ID NO: 95258 - RNA, 21 nt, synthetic construct
  source 1..21: mol_type = other RNA
gttctcccttctattccattg

SEQ ID NO: 95259 - RNA, 21 nt, synthetic construct
  source 1..21: mol_type = other RNA
gttctcctgtgtgcatgctcc

SEQ ID NO: 95260 - RNA, 21 nt, synthetic construct
  source 1..21: mol_type = other RNA
gttctcgttcatgttcaaggt

SEQ ID NO: 95261 - RNA, 21 nt, synthetic construct
  source 1..21: mol_type = other RNA
gttctctgccccgggcctggt

SEQ ID NO: 95262 - RNA, 21 nt, synthetic construct
  source 1..21: mol_type = other RNA
gttctctgtgtggtttgcctt

SEQ ID NO: 95263 - RNA, 21 nt, synthetic construct
  source 1..21: mol_type = other RNA
gttctctttgtttatccttgc

SEQ ID NO: 95264 - RNA, 21 nt, synthetic construct
  source 1..21: mol_type = other RNA
gttctcttttcctcgttttca

SEQ ID NO: 95265 - RNA, 21 nt, synthetic construct
  source 1..21: mol_type = other RNA
gttctctttttgacagatgag

SEQ ID NO: 95266 - RNA, 21 nt, synthetic construct
  source 1..21: mol_type = other RNA
gttctgaaggctcagcccctc

SEQ ID NO: 95267 - RNA, 21 nt, synthetic construct
  source 1..21: mol_type = other RNA
gttctgcctaatctctaggct

SEQ ID NO: 95268 - RNA, 21 nt, synthetic construct
  source 1..21: mol_type = other RNA
gttctgccttgaggtgattca

SEQ ID NO: 95269 - RNA, 21 nt, synthetic construct
  source 1..21: mol_type = other RNA
gttctgcgcaattgcagccag

SEQ ID NO: 95270 - RNA, 21 nt, synthetic construct
  source 1..21: mol_type = other RNA
gttctgcgtgttattttaatc

SEQ ID NO: 95271 - RNA, 21 nt, synthetic construct
  source 1..21: mol_type = other RNA
gttctgctatgctgaaaggca

SEQ ID NO: 95272 - RNA, 21 nt, synthetic construct
  source 1..21: mol_type = other RNA
gttctgctgttgatggacgtt

SEQ ID NO: 95273 - RNA, 21 nt, synthetic construct
  source 1..21: mol_type = other RNA
gttctgcttccacatttctaa

SEQ ID NO: 95274 - RNA, 21 nt, synthetic construct
  source 1..21: mol_type = other RNA
gttctgggagttcattagaat

SEQ ID NO: 95275 - RNA, 21 nt, synthetic construct
  source 1..21: mol_type = other RNA
gttctggtgtcgtttatttct

SEQ ID NO: 95276 - RNA, 21 nt, synthetic construct
  source 1..21: mol_type = other RNA
gttctgtacccttacgcgtgg

SEQ ID NO: 95277 - RNA, 21 nt, synthetic construct
  source 1..21: mol_type = other RNA
gttctgtcacatttgaaagaa

SEQ ID NO: 95278 - RNA, 21 nt, synthetic construct
  source 1..21: mol_type = other RNA
gttctgtcacggtgccctaca

SEQ ID NO: 95279 - RNA, 21 nt, synthetic construct
  source 1..21: mol_type = other RNA
gttctgtgaatttgattatgt

SEQ ID NO: 95280 - RNA, 21 nt, synthetic construct
  source 1..21: mol_type = other RNA
gttctgtgctagatgctaaac

SEQ ID NO: 95281 - RNA, 21 nt, synthetic construct
  source 1..21: mol_type = other RNA
gttctgtgtttatgaatgatg

SEQ ID NO: 95282 - RNA, 21 nt, synthetic construct
  source 1..21: mol_type = other RNA
gttctgttccatcggtctgta

SEQ ID NO: 95283 - RNA, 21 nt, synthetic construct
  source 1..21: mol_type = other RNA
gttcttacctcaaaggagaga

SEQ ID NO: 95284 - RNA, 21 nt, synthetic construct
  source 1..21: mol_type = other RNA
gttcttatgaggttattcaaa

SEQ ID NO: 95285 - RNA, 21 nt, synthetic construct
  source 1..21: mol_type = other RNA
gttcttcaccgtgcaactaga

SEQ ID NO: 95286 - RNA, 21 nt, synthetic construct
  source 1..21: mol_type = other RNA
gttcttcatcagtccctgtgt

SEQ ID NO: 95287 - RNA, 21 nt, synthetic construct
  source 1..21: mol_type = other RNA
gttcttggaaattagaaatgt

SEQ ID NO: 95288 - RNA, 21 nt, synthetic construct
  source 1..21: mol_type = other RNA
gttcttggttaatattacaga

SEQ ID NO: 95289 - RNA, 21 nt, synthetic construct
  source 1..21: mol_type = other RNA
gttctttatatattctggatg

SEQ ID NO: 95290 - RNA, 21 nt, synthetic construct
  source 1..21: mol_type = other RNA
gttctttcggatatttactaa

SEQ ID NO: 95291 - RNA, 21 nt, synthetic construct
  source 1..21: mol_type = other RNA
gttctttggagctgtattttt

SEQ ID NO: 95292 - RNA, 21 nt, synthetic construct
  source 1..21: mol_type = other RNA
gttcttttaaatgccaatttg

SEQ ID NO: 95293 - RNA, 21 nt, synthetic construct
  source 1..21: mol_type = other RNA
gttcttttcaaaaacagcata

SEQ ID NO: 95294 - RNA, 21 nt, synthetic construct
  source 1..21: mol_type = other RNA
gttcttttccttcttaagaca

SEQ ID NO: 95295 - RNA, 21 nt, synthetic construct
  source 1..21: mol_type = other RNA
gttcttttgtaatctaaggat

SEQ ID NO: 95296 - RNA, 21 nt, synthetic construct
  source 1..21: mol_type = other RNA
gttgaaaacgaggaaaagaga

SEQ ID NO: 95297 - RNA, 21 nt, synthetic construct
  source 1..21: mol_type = other RNA
gttgaaaactcaactgcctct

SEQ ID NO: 95298 - RNA, 21 nt, synthetic construct
  source 1..21: mol_type = other RNA
gttgaaaagtatggttgaaga

SEQ ID NO: 95299 - RNA, 21 nt, synthetic construct
  source 1..21: mol_type = other RNA
gttgaaagttcagaataccag

SEQ ID NO: 95300 - RNA, 21 nt, synthetic construct
  source 1..21: mol_type = other RNA
gttgaacatcacccagctcga

SEQ ID NO: 95301 - RNA, 21 nt, synthetic construct
  source 1..21: mol_type = other RNA
gttgaagaaagtaggaattaa

SEQ ID NO: 95302 - RNA, 21 nt, synthetic construct
  source 1..21: mol_type = other RNA
gttgaagacctgcagtctgca

SEQ ID NO: 95303 - RNA, 21 nt, synthetic construct
  source 1..21: mol_type = other RNA
gttgaagctctagtgagctat

SEQ ID NO: 95304 - RNA, 21 nt, synthetic construct
  source 1..21: mol_type = other RNA
gttgaagtctttggcccattt

SEQ ID NO: 95305 - RNA, 21 nt, synthetic construct
  source 1..21: mol_type = other RNA
gttgaatagcaactgtttttt

SEQ ID NO: 95306 - RNA, 21 nt, synthetic construct
  source 1..21: mol_type = other RNA
gttgaatagggcctcaaattt

SEQ ID NO: 95307 - RNA, 21 nt, synthetic construct
  source 1..21: mol_type = other RNA
gttgaatcttaacatttctca

SEQ ID NO: 95308 - RNA, 21 nt, synthetic construct
  source 1..21: mol_type = other RNA
gttgaatgtggcagaatttac

SEQ ID NO: 95309 - RNA, 21 nt, synthetic construct
  source 1..21: mol_type = other RNA
gttgaattgttgcgcgtcaaa

SEQ ID NO: 95310 - RNA, 21 nt, synthetic construct
  source 1..21: mol_type = other RNA
gttgaattgttggagttcttt

SEQ ID NO: 95311 - RNA, 21 nt, synthetic construct
  source 1..21: mol_type = other RNA
gttgaatttctgtccttggat

SEQ ID NO: 95312 - RNA, 21 nt, synthetic construct
  source 1..21: mol_type = other RNA
gttgacatcctttaatttggg

SEQ ID NO: 95313 - RNA, 21 nt, synthetic construct
  source 1..21: mol_type = other RNA
gttgacatcctttgcgtctgt

SEQ ID NO: 95314 - RNA, 21 nt, synthetic construct
  source 1..21: mol_type = other RNA
gttgacatcttgcataactcg

SEQ ID NO: 95315 - RNA, 21 nt, synthetic construct
  source 1..21: mol_type = other RNA
gttgacccaatcatgttcttt

SEQ ID NO: 95316 - RNA, 21 nt, synthetic construct
  source 1..21: mol_type = other RNA
gttgacccataaactgaacat

SEQ ID NO: 95317 - RNA, 21 nt, synthetic construct
  source 1..21: mol_type = other RNA
gttgaccgctttcgtgagggt

SEQ ID NO: 95318 - RNA, 21 nt, synthetic construct
  source 1..21: mol_type = other RNA
gttgaccttagtggttgaccc

SEQ ID NO: 95319 - RNA, 21 nt, synthetic construct
  source 1..21: mol_type = other RNA
gttgactaccatctctccaac

SEQ ID NO: 95320 - RNA, 21 nt, synthetic construct
  source 1..21: mol_type = other RNA
gttgactcctaaaacatggtc

SEQ ID NO: 95321 - RNA, 21 nt, synthetic construct
  source 1..21: mol_type = other RNA
gttgactgaattaatctctta

SEQ ID NO: 95322 - RNA, 21 nt, synthetic construct
  source 1..21: mol_type = other RNA
gttgactgacataactgtaaa

SEQ ID NO: 95323 - RNA, 21 nt, synthetic construct
  source 1..21: mol_type = other RNA
gttgagaaactatccaacatg

SEQ ID NO: 95324 - RNA, 21 nt, synthetic construct
  source 1..21: mol_type = other RNA
gttgagaaagagggaagtact

SEQ ID NO: 95325 - RNA, 21 nt, synthetic construct
  source 1..21: mol_type = other RNA
gttgagaaagcacataaaaaa

SEQ ID NO: 95326 - RNA, 21 nt, synthetic construct
  source 1..21: mol_type = other RNA
gttgagacaagaccacaccac

SEQ ID NO: 95327 - RNA, 21 nt, synthetic construct
  source 1..21: mol_type = other RNA
gttgagagagaattctaaatt

SEQ ID NO: 95328 - RNA, 21 nt, synthetic construct
  source 1..21: mol_type = other RNA
gttgagaggctttaagcagaa

SEQ ID NO: 95329 - RNA, 21 nt, synthetic construct
  source 1..21: mol_type = other RNA
gttgagccatcatgcctgggt

SEQ ID NO: 95330 - RNA, 21 nt, synthetic construct
  source 1..21: mol_type = other RNA
gttgaggatgactgtcctgaa

SEQ ID NO: 95331 - RNA, 21 nt, synthetic construct
  source 1..21: mol_type = other RNA
gttgaggctgggccctgtggc

SEQ ID NO: 95332 - RNA, 21 nt, synthetic construct
  source 1..21: mol_type = other RNA
gttgaggttgaagacctgcag

SEQ ID NO: 95333 - RNA, 21 nt, synthetic construct
  source 1..21: mol_type = other RNA
gttgagtacctctgggatgct

SEQ ID NO: 95334 - RNA, 21 nt, synthetic construct
  source 1..21: mol_type = other RNA
gttgagtatcttttcatgttg

SEQ ID NO: 95335 - RNA, 21 nt, synthetic construct
  source 1..21: mol_type = other RNA
gttgagtcttgtttacccagt

SEQ ID NO: 95336 - RNA, 21 nt, synthetic construct
  source 1..21: mol_type = other RNA
gttgagttcatgtcctttgta

SEQ ID NO: 95337 - RNA, 21 nt, synthetic construct
  source 1..21: mol_type = other RNA
gttgagttttcaacctttgtt

SEQ ID NO: 95338 - RNA, 21 nt, synthetic construct
  source 1..21: mol_type = other RNA
gttgatactagtttagtgcag

SEQ ID NO: 95339 - RNA, 21 nt, synthetic construct
  source 1..21: mol_type = other RNA
gttgatgcaatttgttttcca

SEQ ID NO: 95340 - RNA, 21 nt, synthetic construct
  source 1..21: mol_type = other RNA
gttgatggctgtactaagcct

SEQ ID NO: 95341 - RNA, 21 nt, synthetic construct
  source 1..21: mol_type = other RNA
gttgatgtaatggatcaaggc

SEQ ID NO: 95342 - RNA, 21 nt, synthetic construct
  source 1..21: mol_type = other RNA
gttgattatttttacccaaca

SEQ ID NO: 95343 - RNA, 21 nt, synthetic construct
  source 1..21: mol_type = other RNA
gttgattgttgccatcatttt

SEQ ID NO: 95344 - RNA, 21 nt, synthetic construct
  source 1..21: mol_type = other RNA
gttgatttagaaatacctgca

SEQ ID NO: 95345 - RNA, 21 nt, synthetic construct
  source 1..21: mol_type = other RNA
gttgattttgaggcagagaga

SEQ ID NO: 95346 - RNA, 21 nt, synthetic construct
  source 1..21: mol_type = other RNA
gttgcaaaaatactacaagag

SEQ ID NO: 95347 - RNA, 21 nt, synthetic construct
  source 1..21: mol_type = other RNA
gttgcaaattattttcctcct

SEQ ID NO: 95348 - RNA, 21 nt, synthetic construct
  source 1..21: mol_type = other RNA
gttgcacaaaagtgaaaacta

SEQ ID NO: 95349 - RNA, 21 nt, synthetic construct
  source 1..21: mol_type = other RNA
gttgcacaatgttgtggatgt

SEQ ID NO: 95350 - RNA, 21 nt, synthetic construct
  source 1..21: mol_type = other RNA
gttgcacggtgaagaaccgac

SEQ ID NO: 95351 - RNA, 21 nt, synthetic construct
  source 1..21: mol_type = other RNA
gttgcagagactggatagcaa

SEQ ID NO: 95352 - RNA, 21 nt, synthetic construct
  source 1..21: mol_type = other RNA
gttgcagattcatcttgactt

SEQ ID NO: 95353 - RNA, 21 nt, synthetic construct
  source 1..21: mol_type = other RNA
gttgcagcatgctcactgtct

SEQ ID NO: 95354 - RNA, 21 nt, synthetic construct
  source 1..21: mol_type = other RNA
gttgcagtccccggtctttcc

SEQ ID NO: 95355 - RNA, 21 nt, synthetic construct
  source 1..21: mol_type = other RNA
gttgcagtgagcccagagatc

SEQ ID NO: 95356 - RNA, 21 nt, synthetic construct
  source 1..21: mol_type = other RNA
gttgcatacgtcgtcccccat

SEQ ID NO: 95357 - RNA, 21 nt, synthetic construct
  source 1..21: mol_type = other RNA
gttgcatcacttgaggtgatt

SEQ ID NO: 95358 - RNA, 21 nt, synthetic construct
  source 1..21: mol_type = other RNA
gttgcatccccattcaattgt

SEQ ID NO: 95359 - RNA, 21 nt, synthetic construct
  source 1..21: mol_type = other RNA
gttgcatgaatttgttttctt

SEQ ID NO: 95360 - RNA, 21 nt, synthetic construct
  source 1..21: mol_type = other RNA
gttgcattaatgcttcatatt

SEQ ID NO: 95361 - RNA, 21 nt, synthetic construct
  source 1..21: mol_type = other RNA
gttgccaatatctatcagggc

SEQ ID NO: 95362 - RNA, 21 nt, synthetic construct
  source 1..21: mol_type = other RNA
gttgccaggtggacgcggccc

SEQ ID NO: 95363 - RNA, 21 nt, synthetic construct
  source 1..21: mol_type = other RNA
gttgccatcattttatgaaac

SEQ ID NO: 95364 - RNA, 21 nt, synthetic construct
  source 1..21: mol_type = other RNA
gttgcccagactggagttcac

SEQ ID NO: 95365 - RNA, 21 nt, synthetic construct
  source 1..21: mol_type = other RNA
gttgcctactagccagtgatt

SEQ ID NO: 95366 - RNA, 21 nt, synthetic construct
  source 1..21: mol_type = other RNA
gttgcctctgtgctagccttc

SEQ ID NO: 95367 - RNA, 21 nt, synthetic construct
  source 1..21: mol_type = other RNA
gttgcctgtagttttggtgtc

SEQ ID NO: 95368 - RNA, 21 nt, synthetic construct
  source 1..21: mol_type = other RNA
gttgcgcgtcaaaagatgctg

SEQ ID NO: 95369 - RNA, 21 nt, synthetic construct
  source 1..21: mol_type = other RNA
gttgcggtgacgtgagatcat

SEQ ID NO: 95370 - RNA, 21 nt, synthetic construct
  source 1..21: mol_type = other RNA
gttgctatccagtctctgcaa

SEQ ID NO: 95371 - RNA, 21 nt, synthetic construct
  source 1..21: mol_type = other RNA
gttgctattgttgaattgttg

SEQ ID NO: 95372 - RNA, 21 nt, synthetic construct
  source 1..21: mol_type = other RNA
gttgctcagaaaattttcttt

SEQ ID NO: 95373 - RNA, 21 nt, synthetic construct
  source 1..21: mol_type = other RNA
gttgctgacttcctggctcta

SEQ ID NO: 95374 - RNA, 21 nt, synthetic construct
  source 1..21: mol_type = other RNA
gttgctgcatagtactccatt

SEQ ID NO: 95375 - RNA, 21 nt, synthetic construct
  source 1..21: mol_type = other RNA
gttgcttaagtcactccattt

SEQ ID NO: 95376 - RNA, 21 nt, synthetic construct
  source 1..21: mol_type = other RNA
gttgcttaattgagctgtccc

SEQ ID NO: 95377 - RNA, 21 nt, synthetic construct
  source 1..21: mol_type = other RNA
gttgcttactctaatggggaa

SEQ ID NO: 95378 - RNA, 21 nt, synthetic construct
  source 1..21: mol_type = other RNA
gttgcttgctctacaaacctt

SEQ ID NO: 95379 - RNA, 21 nt, synthetic construct
  source 1..21: mol_type = other RNA
gttgcttggcacagaattatt

SEQ ID NO: 95380 - RNA, 21 nt, synthetic construct
  source 1..21: mol_type = other RNA
gttgcttggtgttgactgaat

SEQ ID NO: 95381 - RNA, 21 nt, synthetic construct
  source 1..21: mol_type = other RNA
gttgctttaacctctggtatt

SEQ ID NO: 95382 - RNA, 21 nt, synthetic construct
  source 1..21: mol_type = other RNA
gttgctttgcgaaatagtagt

SEQ ID NO: 95383 - RNA, 21 nt, synthetic construct
  source 1..21: mol_type = other RNA
gttgcttttacttggctcctc

SEQ ID NO: 95384 - RNA, 21 nt, synthetic construct
  source 1..21: mol_type = other RNA
gttgctttttcttcttgtttt

SEQ ID NO: 95385 - RNA, 21 nt, synthetic construct
  source 1..21: mol_type = other RNA
gttggaaaaatcgtcctcttc

SEQ ID NO: 95386 - RNA, 21 nt, synthetic construct
  source 1..21: mol_type = other RNA
gttggaaaacttttaactgaa

SEQ ID NO: 95387 - RNA, 21 nt, synthetic construct
  source 1..21: mol_type = other RNA
gttggaaaagaaagctgtgga

SEQ ID NO: 95388 - RNA, 21 nt, synthetic construct
  source 1..21: mol_type = other RNA
gttggaactcttgcggtcttt

SEQ ID NO: 95389 - RNA, 21 nt, synthetic construct
  source 1..21: mol_type = other RNA
gttggaagtttctggaagttt

SEQ ID NO: 95390 - RNA, 21 nt, synthetic construct
  source 1..21: mol_type = other RNA
gttggacagctgggagaaagc

SEQ ID NO: 95391 - RNA, 21 nt, synthetic construct
  source 1..21: mol_type = other RNA
gttggactccaccctgcccct

SEQ ID NO: 95392 - RNA, 21 nt, synthetic construct
  source 1..21: mol_type = other RNA
gttggagacagcctaaaccat

SEQ ID NO: 95393 - RNA, 21 nt, synthetic construct
  source 1..21: mol_type = other RNA
gttggagagatggtagtcaac

SEQ ID NO: 95394 - RNA, 21 nt, synthetic construct
  source 1..21: mol_type = other RNA
gttggaggagaaggccttcca

SEQ ID NO: 95395 - RNA, 21 nt, synthetic construct
  source 1..21: mol_type = other RNA
gttggatagtttctcaactta

SEQ ID NO: 95396 - RNA, 21 nt, synthetic construct
  source 1..21: mol_type = other RNA
gttggattatatgttctaaag

SEQ ID NO: 95397 - RNA, 21 nt, synthetic construct
  source 1..21: mol_type = other RNA
gttggattcccaggtattttg

SEQ ID NO: 95398 - RNA, 21 nt, synthetic construct
  source 1..21: mol_type = other RNA
gttggatttatctttctagat

SEQ ID NO: 95399 - RNA, 21 nt, synthetic construct
  source 1..21: mol_type = other RNA
gttggcacagccagtcagtga

SEQ ID NO: 95400 - RNA, 21 nt, synthetic construct
  source 1..21: mol_type = other RNA
gttggcactgaagccagtcct

SEQ ID NO: 95401 - RNA, 21 nt, synthetic construct
  source 1..21: mol_type = other RNA
gttggcccaacatgctcttaa

SEQ ID NO: 95402 - RNA, 21 nt, synthetic construct
  source 1..21: mol_type = other RNA
gttggccgaggccagtcccta

SEQ ID NO: 95403 - RNA, 21 nt, synthetic construct
  source 1..21: mol_type = other RNA
gttggcctggacacacacagt

SEQ ID NO: 95404 - RNA, 21 nt, synthetic construct
  source 1..21: mol_type = other RNA
gttggccttgaggtgagacag

SEQ ID NO: 95405 - RNA, 21 nt, synthetic construct
  source 1..21: mol_type = other RNA
gttggctaaaagaccgcaaga

SEQ ID NO: 95406 - RNA, 21 nt, synthetic construct
  source 1..21: mol_type = other RNA
gttgggaggtttttgattact

SEQ ID NO: 95407 - RNA, 21 nt, synthetic construct
  source 1..21: mol_type = other RNA
gttgggagtctatttctgaac

SEQ ID NO: 95408 - RNA, 21 nt, synthetic construct
  source 1..21: mol_type = other RNA
gttgggccaacttccagcaag

SEQ ID NO: 95409 - RNA, 21 nt, synthetic construct
  source 1..21: mol_type = other RNA
gttgggctattaagtattgca

SEQ ID NO: 95410 - RNA, 21 nt, synthetic construct
  source 1..21: mol_type = other RNA
gttgggcttaacatttgaact

SEQ ID NO: 95411 - RNA, 21 nt, synthetic construct
  source 1..21: mol_type = other RNA
gttgggcttatcagatggtga

SEQ ID NO: 95412 - RNA, 21 nt, synthetic construct
  source 1..21: mol_type = other RNA
gttgggcttggttggaaaaga

SEQ ID NO: 95413 - RNA, 21 nt, synthetic construct
  source 1..21: mol_type = other RNA
gttggggactcttatggctat

SEQ ID NO: 95414 - RNA, 21 nt, synthetic construct
  source 1..21: mol_type = other RNA
gttgggggctgggtcggccga

SEQ ID NO: 95415 - RNA, 21 nt, synthetic construct
  source 1..21: mol_type = other RNA
gttggggtatgtttgattagt

SEQ ID NO: 95416 - RNA, 21 nt, synthetic construct
  source 1..21: mol_type = other RNA
gttgggtaaaaataatcaact

SEQ ID NO: 95417 - RNA, 21 nt, synthetic construct
  source 1..21: mol_type = other RNA
gttgggtttaactgaggtgtt

SEQ ID NO: 95418 - RNA, 21 nt, synthetic construct
  source 1..21: mol_type = other RNA
gttggtcagaaaaatggaata

SEQ ID NO: 95419 - RNA, 21 nt, synthetic construct
  source 1..21: mol_type = other RNA
gttggtcctgcatatgttttt

SEQ ID NO: 95420 - RNA, 21 nt, synthetic construct
  source 1..21: mol_type = other RNA
gttggtgaagagagcctgtgg

SEQ ID NO: 95421 - RNA, 21 nt, synthetic construct
  source 1..21: mol_type = other RNA
gttggtgagaacccagtgtct

SEQ ID NO: 95422 - RNA, 21 nt, synthetic construct
  source 1..21: mol_type = other RNA
gttggtgcaaggataaacaaa

SEQ ID NO: 95423 - RNA, 21 nt, synthetic construct
  source 1..21: mol_type = other RNA
gttggtgcatttgggacagcc

SEQ ID NO: 95424 - RNA, 21 nt, synthetic construct
  source 1..21: mol_type = other RNA
gttggtgcttagctgcctctt

SEQ ID NO: 95425 - RNA, 21 nt, synthetic construct
  source 1..21: mol_type = other RNA
gttggtgcttccttctcttat

SEQ ID NO: 95426 - RNA, 21 nt, synthetic construct
  source 1..21: mol_type = other RNA
gttggtgtttctgacaggtgg

SEQ ID NO: 95427 - RNA, 21 nt, synthetic construct
  source 1..21: mol_type = other RNA
gttggttagtgttgtttttaa

SEQ ID NO: 95428 - RNA, 21 nt, synthetic construct
  source 1..21: mol_type = other RNA
gttggtttgtgtgtttgtgaa

SEQ ID NO: 95429 - RNA, 21 nt, synthetic construct
  source 1..21: mol_type = other RNA
gttgtaactacagacatgcca

SEQ ID NO: 95430 - RNA, 21 nt, synthetic construct
  source 1..21: mol_type = other RNA
gttgtaatgttacttctcagc

SEQ ID NO: 95431 - RNA, 21 nt, synthetic construct
  source 1..21: mol_type = other RNA
gttgtaatttttaaaagagcg

SEQ ID NO: 95432 - RNA, 21 nt, synthetic construct
  source 1..21: mol_type = other RNA
gttgtacatttaaaattgcag

SEQ ID NO: 95433 - RNA, 21 nt, synthetic construct
  source 1..21: mol_type = other RNA
gttgtacttgacacaaaggac

SEQ ID NO: 95434 - RNA, 21 nt, synthetic construct
  source 1..21: mol_type = other RNA
gttgtatagcagtaaaatgaa

SEQ ID NO: 95435 - RNA, 21 nt, synthetic construct
  source 1..21: mol_type = other RNA
gttgtatctgtgatccctgat

SEQ ID NO: 95436 - RNA, 21 nt, synthetic construct
  source 1..21: mol_type = other RNA
gttgtatgccaaaaaattgga

SEQ ID NO: 95437 - RNA, 21 nt, synthetic construct
  source 1..21: mol_type = other RNA
gttgtattttacaccatgcag

SEQ ID NO: 95438 - RNA, 21 nt, synthetic construct
  source 1..21: mol_type = other RNA
gttgtcagaattagaaagctg

SEQ ID NO: 95439 - RNA, 21 nt, synthetic construct
  source 1..21: mol_type = other RNA
gttgtctgattcagtttgcta

SEQ ID NO: 95440 - RNA, 21 nt, synthetic construct
  source 1..21: mol_type = other RNA
gttgtgaggattcgattaaaa

SEQ ID NO: 95441 - RNA, 21 nt, synthetic construct
  source 1..21: mol_type = other RNA
gttgtgatatattatgaacca

SEQ ID NO: 95442 - RNA, 21 nt, synthetic construct
  source 1..21: mol_type = other RNA
gttgtgcacacatccacgcgt

SEQ ID NO: 95443 - RNA, 21 nt, synthetic construct
  source 1..21: mol_type = other RNA
gttgtgctacctcaaattgtg

SEQ ID NO: 95444 - RNA, 21 nt, synthetic construct
  source 1..21: mol_type = other RNA
gttgtgcttcgaggtcgcacc

SEQ ID NO: 95445 - RNA, 21 nt, synthetic construct
  source 1..21: mol_type = other RNA
gttgtggaattaactccaggg

SEQ ID NO: 95446 - RNA, 21 nt, synthetic construct
  source 1..21: mol_type = other RNA
gttgtggatgtccttaatgcc

SEQ ID NO: 95447 - RNA, 21 nt, synthetic construct
  source 1..21: mol_type = other RNA
gttgtgtagaaatgtggagat

SEQ ID NO: 95448 - RNA, 21 nt, synthetic construct
  source 1..21: mol_type = other RNA
gttgtgtcatttttgtattct

SEQ ID NO: 95449 - RNA, 21 nt, synthetic construct
  source 1..21: mol_type = other RNA
gttgtgtgcacctaataaaat

SEQ ID NO: 95450 - RNA, 21 nt, synthetic construct
  source 1..21: mol_type = other RNA
gttgtgtgttaaatttgattg

SEQ ID NO: 95451 - RNA, 21 nt, synthetic construct
  source 1..21: mol_type = other RNA
gttgtgttttcattcgttcaa

SEQ ID NO: 95452 - RNA, 21 nt, synthetic construct
  source 1..21: mol_type = other RNA
gttgttcagttgaaaagtatg

SEQ ID NO: 95453 - RNA, 21 nt, synthetic construct
  source 1..21: mol_type = other RNA
gttgttcttggttaatattac

SEQ ID NO: 95454 - RNA, 21 nt, synthetic construct
  source 1..21: mol_type = other RNA
gttgttcttttcaaaaacagc

SEQ ID NO: 95455 - RNA, 21 nt, synthetic construct
  source 1..21: mol_type = other RNA
gttgttgaatgtggcagaatt

SEQ ID NO: 95456 - RNA, 21 nt, synthetic construct
  source 1..21: mol_type = other RNA
gttgttggctaaaagaccgca

SEQ ID NO: 95457 - RNA, 21 nt, synthetic construct
  source 1..21: mol_type = other RNA
gttgttggtttgtgtgtttgt

SEQ ID NO: 95458 - RNA, 21 nt, synthetic construct
  source 1..21: mol_type = other RNA
gttgttgttgtttctgagcca

SEQ ID NO: 95459 - RNA, 21 nt, synthetic construct
  source 1..21: mol_type = other RNA
gttgttgtttctgagccagag

SEQ ID NO: 95460 - RNA, 21 nt, synthetic construct
  source 1..21: mol_type = other RNA
gttgtttacttgggtataaat

SEQ ID NO: 95461 - RNA, 21 nt, synthetic construct
  source 1..21: mol_type = other RNA
gttgtttccactttgaggtta

SEQ ID NO: 95462 - RNA, 21 nt, synthetic construct
  source 1..21: mol_type = other RNA
gttgtttccatgtcttggcta

SEQ ID NO: 95463 - RNA, 21 nt, synthetic construct
  source 1..21: mol_type = other RNA
gttgtttctgagccagagttt

SEQ ID NO: 95464 - RNA, 21 nt, synthetic construct
  source 1..21: mol_type = other RNA
gtttaaaaacaacactaacca

SEQ ID NO: 95465 - RNA, 21 nt, synthetic construct
  source 1..21: mol_type = other RNA
gtttaaaaagaaaaagctcac

SEQ ID NO: 95466 - RNA, 21 nt, synthetic construct
  source 1..21: mol_type = other RNA
gtttaaaagagtgcacattcc

SEQ ID NO: 95467 - RNA, 21 nt, synthetic construct
  source 1..21: mol_type = other RNA
gtttaaagctttgtgactgtg

SEQ ID NO: 95468 - RNA, 21 nt, synthetic construct
  source 1..21: mol_type = other RNA
gtttaacacatacaaaccaaa

SEQ ID NO: 95469 - RNA, 21 nt, synthetic construct
  source 1..21: mol_type = other RNA
gtttaaccaattatgctgagt

SEQ ID NO: 95470 - RNA, 21 nt, synthetic construct
  source 1..21: mol_type = other RNA
gtttaactatcctatgtgggg

SEQ ID NO: 95471 - RNA, 21 nt, synthetic construct
  source 1..21: mol_type = other RNA
gtttaactgaggtgtttttca

SEQ ID NO: 95472 - RNA, 21 nt, synthetic construct
  source 1..21: mol_type = other RNA
gtttaactttgatgaattcca

SEQ ID NO: 95473 - RNA, 21 nt, synthetic construct
  source 1..21: mol_type = other RNA
gtttaaggtaagggtccagct

SEQ ID NO: 95474 - RNA, 21 nt, synthetic construct
  source 1..21: mol_type = other RNA
gtttaattacccaggcatgat

SEQ ID NO: 95475 - RNA, 21 nt, synthetic construct
  source 1..21: mol_type = other RNA
gtttaattagccgggtgtagt

SEQ ID NO: 95476 - RNA, 21 nt, synthetic construct
  source 1..21: mol_type = other RNA
gtttaattcctactttcttca

SEQ ID NO: 95477 - RNA, 21 nt, synthetic construct
  source 1..21: mol_type = other RNA
gtttaattctgtttaccctta

SEQ ID NO: 95478 - RNA, 21 nt, synthetic construct
  source 1..21: mol_type = other RNA
gtttaattgggggaaaattga

SEQ ID NO: 95479 - RNA, 21 nt, synthetic construct
  source 1..21: mol_type = other RNA
gtttaatttccacccatgaag

SEQ ID NO: 95480 - RNA, 21 nt, synthetic construct
  source 1..21: mol_type = other RNA
gtttacacacctgaaattctc

SEQ ID NO: 95481 - RNA, 21 nt, synthetic construct
  source 1..21: mol_type = other RNA
gtttacacgccttcgcgggca

SEQ ID NO: 95482 - RNA, 21 nt, synthetic construct
  source 1..21: mol_type = other RNA
gtttacactatggcttttgag

SEQ ID NO: 95483 - RNA, 21 nt, synthetic construct
  source 1..21: mol_type = other RNA
gtttacaggatatcagaagtg

SEQ ID NO: 95484 - RNA, 21 nt, synthetic construct
  source 1..21: mol_type = other RNA
gtttacagtagccaaaggtag

SEQ ID NO: 95485 - RNA, 21 nt, synthetic construct
  source 1..21: mol_type = other RNA
gtttacattagagaagaatga

SEQ ID NO: 95486 - RNA, 21 nt, synthetic construct
  source 1..21: mol_type = other RNA
gtttaccaagggtgtgtttaa

SEQ ID NO: 95487 - RNA, 21 nt, synthetic construct
  source 1..21: mol_type = other RNA
gtttacccagtgtgtttgttt

SEQ ID NO: 95488 - RNA, 21 nt, synthetic construct
  source 1..21: mol_type = other RNA
gtttacccttactaaattttg

SEQ ID NO: 95489 - RNA, 21 nt, synthetic construct
  source 1..21: mol_type = other RNA
gtttactccaagaaggctagc

SEQ ID NO: 95490 - RNA, 21 nt, synthetic construct
  source 1..21: mol_type = other RNA
gtttacttggggagagtgggc

SEQ ID NO: 95491 - RNA, 21 nt, synthetic construct
  source 1..21: mol_type = other RNA
gtttacttgggtataaatgat

SEQ ID NO: 95492 - RNA, 21 nt, synthetic construct
  source 1..21: mol_type = other RNA
gtttagaaaacatatccttct

SEQ ID NO: 95493 - RNA, 21 nt, synthetic construct
  source 1..21: mol_type = other RNA
gtttagcaagattactggata

SEQ ID NO: 95494 - RNA, 21 nt, synthetic construct
  source 1..21: mol_type = other RNA
gtttagcaatccaaggacaga

SEQ ID NO: 95495 - RNA, 21 nt, synthetic construct
  source 1..21: mol_type = other RNA
gtttagcatctagcacagaac

SEQ ID NO: 95496 - RNA, 21 nt, synthetic construct
  source 1..21: mol_type = other RNA
gtttagcggaatgactataga

SEQ ID NO: 95497 - RNA, 21 nt, synthetic construct
  source 1..21: mol_type = other RNA
gtttaggaagcacattccttc

SEQ ID NO: 95498 - RNA, 21 nt, synthetic construct
  source 1..21: mol_type = other RNA
gtttaggatataagagtgggc

SEQ ID NO: 95499 - RNA, 21 nt, synthetic construct
  source 1..21: mol_type = other RNA
gtttaggctgtctccaacgct

SEQ ID NO: 95500 - RNA, 21 nt, synthetic construct
  source 1..21: mol_type = other RNA
gtttagggacgaatgcatggg

SEQ ID NO: 95501 - RNA, 21 nt, synthetic construct
  source 1..21: mol_type = other RNA
gtttaggtttttcttgtgggt

SEQ ID NO: 95502 - RNA, 21 nt, synthetic construct
  source 1..21: mol_type = other RNA
gtttagtaaatctttggtgaa

SEQ ID NO: 95503 - RNA, 21 nt, synthetic construct
  source 1..21: mol_type = other RNA
gtttagtagaattctccagtg

SEQ ID NO: 95504 - RNA, 21 nt, synthetic construct
  source 1..21: mol_type = other RNA
gtttagtagctgtctttaatg

SEQ ID NO: 95505 - RNA, 21 nt, synthetic construct
  source 1..21: mol_type = other RNA
gtttagtgcagtatcttgaag

SEQ ID NO: 95506 - RNA, 21 nt, synthetic construct
  source 1..21: mol_type = other RNA
gtttagttactcaaatccaaa

SEQ ID NO: 95507 - RNA, 21 nt, synthetic construct
  source 1..21: mol_type = other RNA
gtttatatgcctagatgattc

SEQ ID NO: 95508 - RNA, 21 nt, synthetic construct
  source 1..21: mol_type = other RNA
gtttatattctaagtttgcca

SEQ ID NO: 95509 - RNA, 21 nt, synthetic construct
  source 1..21: mol_type = other RNA
gtttatcagtctccaatcctc

SEQ ID NO: 95510 - RNA, 21 nt, synthetic construct
  source 1..21: mol_type = other RNA
gtttatccttgcaccaactcc

SEQ ID NO: 95511 - RNA, 21 nt, synthetic construct
  source 1..21: mol_type = other RNA
gtttatctacagaggattttg

SEQ ID NO: 95512 - RNA, 21 nt, synthetic construct
  source 1..21: mol_type = other RNA
gtttatgaatgatgccatcac

SEQ ID NO: 95513 - RNA, 21 nt, synthetic construct
  source 1..21: mol_type = other RNA
gtttatgggtcaaccactaag

SEQ ID NO: 95514 - RNA, 21 nt, synthetic construct
  source 1..21: mol_type = other RNA
gtttattagaactagaactgt

SEQ ID NO: 95515 - RNA, 21 nt, synthetic construct
  source 1..21: mol_type = other RNA
gtttattcatacgttaactgt

SEQ ID NO: 95516 - RNA, 21 nt, synthetic construct
  source 1..21: mol_type = other RNA
gtttatttcttctccctcttc

SEQ ID NO: 95517 - RNA, 21 nt, synthetic construct
  source 1..21: mol_type = other RNA
gtttatttgctgtcaggcaag

SEQ ID NO: 95518 - RNA, 21 nt, synthetic construct
  source 1..21: mol_type = other RNA
gtttattttctgcatttggtt

SEQ ID NO: 95519 - RNA, 21 nt, synthetic construct
  source 1..21: mol_type = other RNA
gtttcaaaagctccccggatg

SEQ ID NO: 95520 - RNA, 21 nt, synthetic construct
  source 1..21: mol_type = other RNA
gtttcaaactgtggtcactgt

SEQ ID NO: 95521 - RNA, 21 nt, synthetic construct
  source 1..21: mol_type = other RNA
gtttcaagtgaaccaaaaacc

SEQ ID NO: 95522 - RNA, 21 nt, synthetic construct
  source 1..21: mol_type = other RNA
gtttcaatattaagagtctca

SEQ ID NO: 95523 - RNA, 21 nt, synthetic construct
  source 1..21: mol_type = other RNA
gtttcacacgcattgcattga

SEQ ID NO: 95524 - RNA, 21 nt, synthetic construct
  source 1..21: mol_type = other RNA
gtttcaccctgcgaaggcaat

SEQ ID NO: 95525 - RNA, 21 nt, synthetic construct
  source 1..21: mol_type = other RNA
gtttcacttttctggttttct

SEQ ID NO: 95526 - RNA, 21 nt, synthetic construct
  source 1..21: mol_type = other RNA
gtttcagattgcttgagagag

SEQ ID NO: 95527 - RNA, 21 nt, synthetic construct
  source 1..21: mol_type = other RNA
gtttcagcacaatactgtctc

SEQ ID NO: 95528 - RNA, 21 nt, synthetic construct
  source 1..21: mol_type = other RNA
gtttcagtacacgaaaatatc

SEQ ID NO: 95529 - RNA, 21 nt, synthetic construct
  source 1..21: mol_type = other RNA
gtttcagtccctcctttctag

SEQ ID NO: 95530 - RNA, 21 nt, synthetic construct
  source 1..21: mol_type = other RNA
gtttcagtgagtagggaaggt

SEQ ID NO: 95531 - RNA, 21 nt, synthetic construct
  source 1..21: mol_type = other RNA
gtttcagtgtgtccacacaat

SEQ ID NO: 95532 - RNA, 21 nt, synthetic construct
  source 1..21: mol_type = other RNA
gtttcataaaatgatggcaac

SEQ ID NO: 95533 - RNA, 21 nt, synthetic construct
  source 1..21: mol_type = other RNA
gtttcatctatgtcccctggg

SEQ ID NO: 95534 - RNA, 21 nt, synthetic construct
  source 1..21: mol_type = other RNA
gtttcatggacttcctatttt

SEQ ID NO: 95535 - RNA, 21 nt, synthetic construct
  source 1..21: mol_type = other RNA
gtttcatttacaaaaacacac

SEQ ID NO: 95536 - RNA, 21 nt, synthetic construct
  source 1..21: mol_type = other RNA
gtttccactttgaggttatta

SEQ ID NO: 95537 - RNA, 21 nt, synthetic construct
  source 1..21: mol_type = other RNA
gtttccagaaaactggcaatc

SEQ ID NO: 95538 - RNA, 21 nt, synthetic construct
  source 1..21: mol_type = other RNA
gtttccagtggcccccctgaa

SEQ ID NO: 95539 - RNA, 21 nt, synthetic construct
  source 1..21: mol_type = other RNA
gtttccataaaaagcgttgga

SEQ ID NO: 95540 - RNA, 21 nt, synthetic construct
  source 1..21: mol_type = other RNA
gtttccatggaggggccagtt

SEQ ID NO: 95541 - RNA, 21 nt, synthetic construct
  source 1..21: mol_type = other RNA
gtttccatgtcttggctattg

SEQ ID NO: 95542 - RNA, 21 nt, synthetic construct
  source 1..21: mol_type = other RNA
gtttccctctgagagaagtca

SEQ ID NO: 95543 - RNA, 21 nt, synthetic construct
  source 1..21: mol_type = other RNA
gtttccctggggaataagatt

SEQ ID NO: 95544 - RNA, 21 nt, synthetic construct
  source 1..21: mol_type = other RNA
gtttcccttaaaaggaactaa

SEQ ID NO: 95545 - RNA, 21 nt, synthetic construct
  source 1..21: mol_type = other RNA
gtttcccttaatgttgacatc

SEQ ID NO: 95546 - RNA, 21 nt, synthetic construct
  source 1..21: mol_type = other RNA
gtttccgttttgcaagatgca

SEQ ID NO: 95547 - RNA, 21 nt, synthetic construct
  source 1..21: mol_type = other RNA
gtttcctaatctaacatgtta

SEQ ID NO: 95548 - RNA, 21 nt, synthetic construct
  source 1..21: mol_type = other RNA
gtttcctacatactgcactct

SEQ ID NO: 95549 - RNA, 21 nt, synthetic construct
  source 1..21: mol_type = other RNA
gtttcctagaaaatcatacat

SEQ ID NO: 95550 - RNA, 21 nt, synthetic construct
  source 1..21: mol_type = other RNA
gtttcctagattccctctggc

SEQ ID NO: 95551 - RNA, 21 nt, synthetic construct
  source 1..21: mol_type = other RNA
gtttcctcggtctacggacgc

SEQ ID NO: 95552 - RNA, 21 nt, synthetic construct
  source 1..21: mol_type = other RNA
gtttcctgcacatgcacaagg

SEQ ID NO: 95553 - RNA, 21 nt, synthetic construct
  source 1..21: mol_type = other RNA
gtttccttaccagtgcttgca

SEQ ID NO: 95554 - RNA, 21 nt, synthetic construct
  source 1..21: mol_type = other RNA
gtttccttacctttatctttg

SEQ ID NO: 95555 - RNA, 21 nt, synthetic construct
  source 1..21: mol_type = other RNA
gtttccttccagatgttttac

SEQ ID NO: 95556 - RNA, 21 nt, synthetic construct
  source 1..21: mol_type = other RNA
gtttcgcaaagtaaaaagcac

SEQ ID NO: 95557 - RNA, 21 nt, synthetic construct
  source 1..21: mol_type = other RNA
gtttctacctttggctactgt

SEQ ID NO: 95558 - RNA, 21 nt, synthetic construct
  source 1..21: mol_type = other RNA
gtttctagccataatccttag

SEQ ID NO: 95559 - RNA, 21 nt, synthetic construct
  source 1..21: mol_type = other RNA
gtttctcaacttagccttggt

SEQ ID NO: 95560 - RNA, 21 nt, synthetic construct
  source 1..21: mol_type = other RNA
gtttctcattcttctctaatg

SEQ ID NO: 95561 - RNA, 21 nt, synthetic construct
  source 1..21: mol_type = other RNA
gtttctcatttttcagggggg

SEQ ID NO: 95562 - RNA, 21 nt, synthetic construct
  source 1..21: mol_type = other RNA
gtttctcctgcatggggagtt

SEQ ID NO: 95563 - RNA, 21 nt, synthetic construct
  source 1..21: mol_type = other RNA
gtttctccttctgcaggctga

SEQ ID NO: 95564 - RNA, 21 nt, synthetic construct
  source 1..21: mol_type = other RNA
gtttctctacatctggatcct

SEQ ID NO: 95565 - RNA, 21 nt, synthetic construct
  source 1..21: mol_type = other RNA
gtttctctccaaggtacaatt

SEQ ID NO: 95566 - RNA, 21 nt, synthetic construct
  source 1..21: mol_type = other RNA
gtttctctctccctgccctgt

SEQ ID NO: 95567 - RNA, 21 nt, synthetic construct
  source 1..21: mol_type = other RNA
gtttctctgctttttcttggt

SEQ ID NO: 95568 - RNA, 21 nt, synthetic construct
  source 1..21: mol_type = other RNA
gtttctgacacccgacccact

SEQ ID NO: 95569 - RNA, 21 nt, synthetic construct
  source 1..21: mol_type = other RNA
gtttctgacaggtggtatggg

SEQ ID NO: 95570 - RNA, 21 nt, synthetic construct
  source 1..21: mol_type = other RNA
gtttctgagccagagtttcac

SEQ ID NO: 95571 - RNA, 21 nt, synthetic construct
  source 1..21: mol_type = other RNA
gtttctgaggtggagttctgc

SEQ ID NO: 95572 - RNA, 21 nt, synthetic construct
  source 1..21: mol_type = other RNA
gtttctgcatacttagctaat

SEQ ID NO: 95573 - RNA, 21 nt, synthetic construct
  source 1..21: mol_type = other RNA
gtttctgctattctctttctg

SEQ ID NO: 95574 - RNA, 21 nt, synthetic construct
  source 1..21: mol_type = other RNA
gtttctggaagtttcctgcac

SEQ ID NO: 95575 - RNA, 21 nt, synthetic construct
  source 1..21: mol_type = other RNA
gtttctgtgaaaaaacaaaac

SEQ ID NO: 95576 - RNA, 21 nt, synthetic construct
  source 1..21: mol_type = other RNA
gtttctgtttggatgaaaaag

SEQ ID NO: 95577 - RNA, 21 nt, synthetic construct
  source 1..21: mol_type = other RNA
gtttcttagctatattcactt

SEQ ID NO: 95578 - RNA, 21 nt, synthetic construct
  source 1..21: mol_type = other RNA
gtttcttcaagatactgcact

SEQ ID NO: 95579 - RNA, 21 nt, synthetic construct
  source 1..21: mol_type = other RNA
gtttcttcactcttaaaagga

SEQ ID NO: 95580 - RNA, 21 nt, synthetic construct
  source 1..21: mol_type = other RNA
gtttcttgaatctctctatcc

SEQ ID NO: 95581 - RNA, 21 nt, synthetic construct
  source 1..21: mol_type = other RNA
gtttcttttcactctaatatg

SEQ ID NO: 95582 - RNA, 21 nt, synthetic construct
  source 1..21: mol_type = other RNA
gtttctttttgttttctcctt

SEQ ID NO: 95583 - RNA, 21 nt, synthetic construct
  source 1..21: mol_type = other RNA
gtttgaaaagtgtttgtcaca

SEQ ID NO: 95584 - RNA, 21 nt, synthetic construct
  source 1..21: mol_type = other RNA
gtttgaaactttaagagtatc

SEQ ID NO: 95585 - RNA, 21 nt, synthetic construct
  source 1..21: mol_type = other RNA
gtttgaaatgatcttttgtag

SEQ ID NO: 95586 - RNA, 21 nt, synthetic construct
  source 1..21: mol_type = other RNA
gtttgaaatttaaagacgttc

SEQ ID NO: 95587 - RNA, 21 nt, synthetic construct
  source 1..21: mol_type = other RNA
gtttgaaccccagaaggttaa

SEQ ID NO: 95588 - RNA, 21 nt, synthetic construct
  source 1..21: mol_type = other RNA
gtttgaagcttcacttctctg

SEQ ID NO: 95589 - RNA, 21 nt, synthetic construct
  source 1..21: mol_type = other RNA
gtttgaattaagcaccactag

SEQ ID NO: 95590 - RNA, 21 nt, synthetic construct
  source 1..21: mol_type = other RNA
gtttgaattttccattcacac

SEQ ID NO: 95591 - RNA, 21 nt, synthetic construct
  source 1..21: mol_type = other RNA
gtttgacctgtaatttttctc

SEQ ID NO: 95592 - RNA, 21 nt, synthetic construct
  source 1..21: mol_type = other RNA
gtttgagaagccacacagtac

SEQ ID NO: 95593 - RNA, 21 nt, synthetic construct
  source 1..21: mol_type = other RNA
gtttgagaagtcttttcctac

SEQ ID NO: 95594 - RNA, 21 nt, synthetic construct
  source 1..21: mol_type = other RNA
gtttgagaccagcgtgggcaa

SEQ ID NO: 95595 - RNA, 21 nt, synthetic construct
  source 1..21: mol_type = other RNA
gtttgagactgcagtgaccta

SEQ ID NO: 95596 - RNA, 21 nt, synthetic construct
  source 1..21: mol_type = other RNA
gtttgagctgaaagtaaagat

SEQ ID NO: 95597 - RNA, 21 nt, synthetic construct
  source 1..21: mol_type = other RNA
gtttgaggccgcagtgagcca

SEQ ID NO: 95598 - RNA, 21 nt, synthetic construct
  source 1..21: mol_type = other RNA
gtttgaggctgggagtacaag

SEQ ID NO: 95599 - RNA, 21 nt, synthetic construct
  source 1..21: mol_type = other RNA
gtttgaggcttttcatagtca

SEQ ID NO: 95600 - RNA, 21 nt, synthetic construct
  source 1..21: mol_type = other RNA
gtttgaggtgtacaattaggc

SEQ ID NO: 95601 - RNA, 21 nt, synthetic construct
  source 1..21: mol_type = other RNA
gtttgagtatttcatgtactt

SEQ ID NO: 95602 - RNA, 21 nt, synthetic construct
  source 1..21: mol_type = other RNA
gtttgagttgtttccactttg

SEQ ID NO: 95603 - RNA, 21 nt, synthetic construct
  source 1..21: mol_type = other RNA
gtttgagtttccagaaaactg

SEQ ID NO: 95604 - RNA, 21 nt, synthetic construct
  source 1..21: mol_type = other RNA
gtttgatcccactagtggaag

SEQ ID NO: 95605 - RNA, 21 nt, synthetic construct
  source 1..21: mol_type = other RNA
gtttgatctggtcacaaacac

SEQ ID NO: 95606 - RNA, 21 nt, synthetic construct
  source 1..21: mol_type = other RNA
gtttgattagttgactcctaa

SEQ ID NO: 95607 - RNA, 21 nt, synthetic construct
  source 1..21: mol_type = other RNA
gtttgattgttccagggggga

SEQ ID NO: 95608 - RNA, 21 nt, synthetic construct
  source 1..21: mol_type = other RNA
gtttgcaaaaattttgttcag

SEQ ID NO: 95609 - RNA, 21 nt, synthetic construct
  source 1..21: mol_type = other RNA
gtttgcaatacagttaacgta

SEQ ID NO: 95610 - RNA, 21 nt, synthetic construct
  source 1..21: mol_type = other RNA
gtttgcacgtttttagaaatt

SEQ ID NO: 95611 - RNA, 21 nt, synthetic construct
  source 1..21: mol_type = other RNA
gtttgcactggcacagcactg

SEQ ID NO: 95612 - RNA, 21 nt, synthetic construct
  source 1..21: mol_type = other RNA
gtttgcattacatgaatggaa

SEQ ID NO: 95613 - RNA, 21 nt, synthetic construct
  source 1..21: mol_type = other RNA
gtttgccaaagattcttgtca

SEQ ID NO: 95614 - RNA, 21 nt, synthetic construct
  source 1..21: mol_type = other RNA
gtttgccatcttcaagatttc

SEQ ID NO: 95615 - RNA, 21 nt, synthetic construct
  source 1..21: mol_type = other RNA
gtttgcctgcgtccgtagacc

SEQ ID NO: 95616 - RNA, 21 nt, synthetic construct
  source 1..21: mol_type = other RNA
gtttgccttttcactcttagt

SEQ ID NO: 95617 - RNA, 21 nt, synthetic construct
  source 1..21: mol_type = other RNA
gtttgctaataatgatgacta

SEQ ID NO: 95618 - RNA, 21 nt, synthetic construct
  source 1..21: mol_type = other RNA
gtttgctagagctgctgtaac

SEQ ID NO: 95619 - RNA, 21 nt, synthetic construct
  source 1..21: mol_type = other RNA
gtttgctagtattttgttgac

SEQ ID NO: 95620 - RNA, 21 nt, synthetic construct
  source 1..21: mol_type = other RNA
gtttgctagtggtaactagat

SEQ ID NO: 95621 - RNA, 21 nt, synthetic construct
  source 1..21: mol_type = other RNA
gtttgctctgcaaatgaggtt

SEQ ID NO: 95622 - RNA, 21 nt, synthetic construct
  source 1..21: mol_type = other RNA
gtttgctttggagtcacagtg

SEQ ID NO: 95623 - RNA, 21 nt, synthetic construct
  source 1..21: mol_type = other RNA
gtttgctttggagtgagagga

SEQ ID NO: 95624 - RNA, 21 nt, synthetic construct
  source 1..21: mol_type = other RNA
gtttggaaccagcctggccaa

SEQ ID NO: 95625 - RNA, 21 nt, synthetic construct
  source 1..21: mol_type = other RNA
gtttggagtttgtagctcaaa

SEQ ID NO: 95626 - RNA, 21 nt, synthetic construct
  source 1..21: mol_type = other RNA
gtttggatgaaaaagtactgg

SEQ ID NO: 95627 - RNA, 21 nt, synthetic construct
  source 1..21: mol_type = other RNA
gtttggcaatttctcaaaaat

SEQ ID NO: 95628 - RNA, 21 nt, synthetic construct
  source 1..21: mol_type = other RNA
gtttggcagtttaagaattaa

SEQ ID NO: 95629 - RNA, 21 nt, synthetic construct
  source 1..21: mol_type = other RNA
gtttggctcccatgattcaaa

SEQ ID NO: 95630 - RNA, 21 nt, synthetic construct
  source 1..21: mol_type = other RNA
gtttggctccttaccactata

SEQ ID NO: 95631 - RNA, 21 nt, synthetic construct
  source 1..21: mol_type = other RNA
gtttggctgggagcttatcag

SEQ ID NO: 95632 - RNA, 21 nt, synthetic construct
  source 1..21: mol_type = other RNA
gtttggggcttttgaacactc

SEQ ID NO: 95633 - RNA, 21 nt, synthetic construct
  source 1..21: mol_type = other RNA
gtttgggtgacagagagagac

SEQ ID NO: 95634 - RNA, 21 nt, synthetic construct
  source 1..21: mol_type = other RNA
gtttggtagatttctgcatag

SEQ ID NO: 95635 - RNA, 21 nt, synthetic construct
  source 1..21: mol_type = other RNA
gtttggtcaattgatctgcca

SEQ ID NO: 95636 - RNA, 21 nt, synthetic construct
  source 1..21: mol_type = other RNA
gtttggtgactgaattcccac

SEQ ID NO: 95637 - RNA, 21 nt, synthetic construct
  source 1..21: mol_type = other RNA
gtttggttcatttcaggaatg

SEQ ID NO: 95638 - RNA, 21 nt, synthetic construct
  source 1..21: mol_type = other RNA
gtttgtaacttgttcatgttt

SEQ ID NO: 95639 - RNA, 21 nt, synthetic construct
  source 1..21: mol_type = other RNA
gtttgtacttctaccttgaaa

SEQ ID NO: 95640 - RNA, 21 nt, synthetic construct
  source 1..21: mol_type = other RNA
gtttgtagagcaagcaacacc

SEQ ID NO: 95641 - RNA, 21 nt, synthetic construct
  source 1..21: mol_type = other RNA
gtttgtagctcaaagcatatg

SEQ ID NO: 95642 - RNA, 21 nt, synthetic construct
  source 1..21: mol_type = other RNA
gtttgtatgtgttaaaccatt

SEQ ID NO: 95643 - RNA, 21 nt, synthetic construct
  source 1..21: mol_type = other RNA
gtttgtcacatagaagcgctc

SEQ ID NO: 95644 - RNA, 21 nt, synthetic construct
  source 1..21: mol_type = other RNA
gtttgtgaagatacaaatagt

SEQ ID NO: 95645 - RNA, 21 nt, synthetic construct
  source 1..21: mol_type = other RNA
gtttgtgaccagatcaaacgt

SEQ ID NO: 95646 - RNA, 21 nt, synthetic construct
  source 1..21: mol_type = other RNA
gtttgtgcttggatattctac

SEQ ID NO: 95647 - RNA, 21 nt, synthetic construct
  source 1..21: mol_type = other RNA
gtttgtggttttaacctcttg

SEQ ID NO: 95648 - RNA, 21 nt, synthetic construct
  source 1..21: mol_type = other RNA
gtttgtgtgtttgtgaaaaat

SEQ ID NO: 95649 - RNA, 21 nt, synthetic construct
  source 1..21: mol_type = other RNA
gtttgtgttttcactctcaat

SEQ ID NO: 95650 - RNA, 21 nt, synthetic construct
  source 1..21: mol_type = other RNA
gtttgttagatctgggataat

SEQ ID NO: 95651 - RNA, 21 nt, synthetic construct
  source 1..21: mol_type = other RNA
gtttgttctgctgttgatgga

SEQ ID NO: 95652 - RNA, 21 nt, synthetic construct
  source 1..21: mol_type = other RNA
gtttgttctgtcacatttgaa

SEQ ID NO: 95653 - RNA, 21 nt, synthetic construct
  source 1..21: mol_type = other RNA
gtttgttgacccaatcatgtt

SEQ ID NO: 95654 - RNA, 21 nt, synthetic construct
  source 1..21: mol_type = other RNA
gtttgttgggtttaactgagg

SEQ ID NO: 95655 - RNA, 21 nt, synthetic construct
  source 1..21: mol_type = other RNA
gtttgtttaattagccgggtg

SEQ ID NO: 95656 - RNA, 21 nt, synthetic construct
  source 1..21: mol_type = other RNA
gtttgtttctgaggtggagtt

SEQ ID NO: 95657 - RNA, 21 nt, synthetic construct
  source 1..21: mol_type = other RNA
gtttgtttgctagagctgctg

SEQ ID NO: 95658 - RNA, 21 nt, synthetic construct
  source 1..21: mol_type = other RNA
gtttgttttttgttttggtca

SEQ ID NO: 95659 - RNA, 21 nt, synthetic construct
  source 1..21: mol_type = other RNA
gttttaaagcagggaggggtc

SEQ ID NO: 95660 - RNA, 21 nt, synthetic construct
  source 1..21: mol_type = other RNA
gttttaacctcttgaagtcag

SEQ ID NO: 95661 - RNA, 21 nt, synthetic construct
  source 1..21: mol_type = other RNA
gttttaactcttgcattagag

SEQ ID NO: 95662 - RNA, 21 nt, synthetic construct
  source 1..21: mol_type = other RNA
gttttaagaaaagaagttacg

SEQ ID NO: 95663 - RNA, 21 nt, synthetic construct
  source 1..21: mol_type = other RNA
gttttaaggcagggcttggtg

SEQ ID NO: 95664 - RNA, 21 nt, synthetic construct
  source 1..21: mol_type = other RNA
gttttaatgggcattagaagt

SEQ ID NO: 95665 - RNA, 21 nt, synthetic construct
  source 1..21: mol_type = other RNA
gttttacacatgtcagccaca

SEQ ID NO: 95666 - RNA, 21 nt, synthetic construct
  source 1..21: mol_type = other RNA
gttttacatgtttaactatcc

SEQ ID NO: 95667 - RNA, 21 nt, synthetic construct
  source 1..21: mol_type = other RNA
gttttaccatctaaagccagg

SEQ ID NO: 95668 - RNA, 21 nt, synthetic construct
  source 1..21: mol_type = other RNA
gttttactactgtactgttta

SEQ ID NO: 95669 - RNA, 21 nt, synthetic construct
  source 1..21: mol_type = other RNA
gttttaggaaaatagagttcc

SEQ ID NO: 95670 - RNA, 21 nt, synthetic construct
  source 1..21: mol_type = other RNA
gttttaggagtcaactaatca

SEQ ID NO: 95671 - RNA, 21 nt, synthetic construct
  source 1..21: mol_type = other RNA
gttttaggggggaaaacaccc

SEQ ID NO: 95672 - RNA, 21 nt, synthetic construct
  source 1..21: mol_type = other RNA
gttttaggtagtcttgtcata

SEQ ID NO: 95673 - RNA, 21 nt, synthetic construct
  source 1..21: mol_type = other RNA
gttttagtggctcacagtgct

SEQ ID NO: 95674 - RNA, 21 nt, synthetic construct
  source 1..21: mol_type = other RNA
gttttatagtcttagctctta

SEQ ID NO: 95675 - RNA, 21 nt, synthetic construct
  source 1..21: mol_type = other RNA
gttttatcaattagttcctcc

SEQ ID NO: 95676 - RNA, 21 nt, synthetic construct
  source 1..21: mol_type = other RNA
gttttatctctctcaagcaat

SEQ ID NO: 95677 - RNA, 21 nt, synthetic construct
  source 1..21: mol_type = other RNA
gttttatggtaactcctgttc

SEQ ID NO: 95678 - RNA, 21 nt, synthetic construct
  source 1..21: mol_type = other RNA
gttttatttagcccatgtcta

SEQ ID NO: 95679 - RNA, 21 nt, synthetic construct
  source 1..21: mol_type = other RNA
gttttatttaggccctctata

SEQ ID NO: 95680 - RNA, 21 nt, synthetic construct
  source 1..21: mol_type = other RNA
gttttatttcttgacctcagt

SEQ ID NO: 95681 - RNA, 21 nt, synthetic construct
  source 1..21: mol_type = other RNA
gttttatttggctgttaccat

SEQ ID NO: 95682 - RNA, 21 nt, synthetic construct
  source 1..21: mol_type = other RNA
gttttcaacaaaggttgaaaa

SEQ ID NO: 95683 - RNA, 21 nt, synthetic construct
  source 1..21: mol_type = other RNA
gttttcaacctttgttgaaaa

SEQ ID NO: 95684 - RNA, 21 nt, synthetic construct
  source 1..21: mol_type = other RNA
gttttcactctcaatagtgtc

SEQ ID NO: 95685 - RNA, 21 nt, synthetic construct
  source 1..21: mol_type = other RNA
gttttcacttttgtgcaacat

SEQ ID NO: 95686 - RNA, 21 nt, synthetic construct
  source 1..21: mol_type = other RNA
gttttcagttgcatgaatttg

SEQ ID NO: 95687 - RNA, 21 nt, synthetic construct
  source 1..21: mol_type = other RNA
gttttcatgcgacatatcagg

SEQ ID NO: 95688 - RNA, 21 nt, synthetic construct
  source 1..21: mol_type = other RNA
gttttcattcgttcaaaacat

SEQ ID NO: 95689 - RNA, 21 nt, synthetic construct
  source 1..21: mol_type = other RNA
gttttcatttattctgttgca

SEQ ID NO: 95690 - RNA, 21 nt, synthetic construct
  source 1..21: mol_type = other RNA
gttttccaaccactgaatcag

SEQ ID NO: 95691 - RNA, 21 nt, synthetic construct
  source 1..21: mol_type = other RNA
gttttccaataagttaactga

SEQ ID NO: 95692 - RNA, 21 nt, synthetic construct
  source 1..21: mol_type = other RNA
gttttccaatccgggaacatg

SEQ ID NO: 95693 - RNA, 21 nt, synthetic construct
  source 1..21: mol_type = other RNA
gttttccacagtgactttact

SEQ ID NO: 95694 - RNA, 21 nt, synthetic construct
  source 1..21: mol_type = other RNA
gttttccaggaaaagcaaatg

SEQ ID NO: 95695 - RNA, 21 nt, synthetic construct
  source 1..21: mol_type = other RNA
gttttccagtatattcatagt

SEQ ID NO: 95696 - RNA, 21 nt, synthetic construct
  source 1..21: mol_type = other RNA
gttttcccccctaaaacactg

SEQ ID NO: 95697 - RNA, 21 nt, synthetic construct
  source 1..21: mol_type = other RNA
gttttccccctacacccagtt

SEQ ID NO: 95698 - RNA, 21 nt, synthetic construct
  source 1..21: mol_type = other RNA
gttttccctgtgtatgtgtag

SEQ ID NO: 95699 - RNA, 21 nt, synthetic construct
  source 1..21: mol_type = other RNA
gttttcccttttgtagctaat

SEQ ID NO: 95700 - RNA, 21 nt, synthetic construct
  source 1..21: mol_type = other RNA
gttttccgtgtgacaaaaagt

SEQ ID NO: 95701 - RNA, 21 nt, synthetic construct
  source 1..21: mol_type = other RNA
gttttcctactaacaagaaag

SEQ ID NO: 95702 - RNA, 21 nt, synthetic construct
  source 1..21: mol_type = other RNA
gttttcctgatggacattctg

SEQ ID NO: 95703 - RNA, 21 nt, synthetic construct
  source 1..21: mol_type = other RNA
gttttcctgcctcagccccct

SEQ ID NO: 95704 - RNA, 21 nt, synthetic construct
  source 1..21: mol_type = other RNA
gttttcgaccaagttactaga

SEQ ID NO: 95705 - RNA, 21 nt, synthetic construct
  source 1..21: mol_type = other RNA
gttttctaaaccttaaaagag

SEQ ID NO: 95706 - RNA, 21 nt, synthetic construct
  source 1..21: mol_type = other RNA
gttttctagttagtttgttga

SEQ ID NO: 95707 - RNA, 21 nt, synthetic construct
  source 1..21: mol_type = other RNA
gttttctccttctggaagatt

SEQ ID NO: 95708 - RNA, 21 nt, synthetic construct
  source 1..21: mol_type = other RNA
gttttctggaaactcaaaccc

SEQ ID NO: 95709 - RNA, 21 nt, synthetic construct
  source 1..21: mol_type = other RNA
gttttctggaggctagaagtc

SEQ ID NO: 95710 - RNA, 21 nt, synthetic construct
  source 1..21: mol_type = other RNA
gttttctgtagaatatccaag

SEQ ID NO: 95711 - RNA, 21 nt, synthetic construct
  source 1..21: mol_type = other RNA
gttttcttattttttcccaga

SEQ ID NO: 95712 - RNA, 21 nt, synthetic construct
  source 1..21: mol_type = other RNA
gttttcttcatggactagact

SEQ ID NO: 95713 - RNA, 21 nt, synthetic construct
  source 1..21: mol_type = other RNA
gttttgaacgaatgaaaacac

SEQ ID NO: 95714 - RNA, 21 nt, synthetic construct
  source 1..21: mol_type = other RNA
gttttgaataacctcataaga

SEQ ID NO: 95715 - RNA, 21 nt, synthetic construct
  source 1..21: mol_type = other RNA
gttttgaccaaaacaaaaaac

SEQ ID NO: 95716 - RNA, 21 nt, synthetic construct
  source 1..21: mol_type = other RNA
gttttgactcagtacttccct

SEQ ID NO: 95717 - RNA, 21 nt, synthetic construct
  source 1..21: mol_type = other RNA
gttttgagtggcatcatactg

SEQ ID NO: 95718 - RNA, 21 nt, synthetic construct
  source 1..21: mol_type = other RNA
gttttgatagttgcagattca

SEQ ID NO: 95719 - RNA, 21 nt, synthetic construct
  source 1..21: mol_type = other RNA
gttttgatcatcgcattacga

SEQ ID NO: 95720 - RNA, 21 nt, synthetic construct
  source 1..21: mol_type = other RNA
gttttgcaagatgcataagtt

SEQ ID NO: 95721 - RNA, 21 nt, synthetic construct
  source 1..21: mol_type = other RNA
gttttgcaagattaatcttgt

SEQ ID NO: 95722 - RNA, 21 nt, synthetic construct
  source 1..21: mol_type = other RNA
gttttgcagagatgaggtctc

SEQ ID NO: 95723 - RNA, 21 nt, synthetic construct
  source 1..21: mol_type = other RNA
gttttgcagttggggactctt

SEQ ID NO: 95724 - RNA, 21 nt, synthetic construct
  source 1..21: mol_type = other RNA
gttttgcctctttgctaataa

SEQ ID NO: 95725 - RNA, 21 nt, synthetic construct
  source 1..21: mol_type = other RNA
gttttgcttactgtagcattg

SEQ ID NO: 95726 - RNA, 21 nt, synthetic construct
  source 1..21: mol_type = other RNA
gttttgcttcgaagcttatta

SEQ ID NO: 95727 - RNA, 21 nt, synthetic construct
  source 1..21: mol_type = other RNA
gttttgggggaagagagcatt

SEQ ID NO: 95728 - RNA, 21 nt, synthetic construct
  source 1..21: mol_type = other RNA
gttttggtaaaatgtggcaaa

SEQ ID NO: 95729 - RNA, 21 nt, synthetic construct
  source 1..21: mol_type = other RNA
gttttggtaatgggaaagaca

SEQ ID NO: 95730 - RNA, 21 nt, synthetic construct
  source 1..21: mol_type = other RNA
gttttggtatgttgtgttttc

SEQ ID NO: 95731 - RNA, 21 nt, synthetic construct
  source 1..21: mol_type = other RNA
gttttggtcaaaactgtattt

SEQ ID NO: 95732 - RNA, 21 nt, synthetic construct
  source 1..21: mol_type = other RNA
gttttggtgtcatttttaaga

SEQ ID NO: 95733 - RNA, 21 nt, synthetic construct
  source 1..21: mol_type = other RNA
gttttgtatatggtttaaggt

SEQ ID NO: 95734 - RNA, 21 nt, synthetic construct
  source 1..21: mol_type = other RNA
gttttgtgtttgtgaccagat

SEQ ID NO: 95735 - RNA, 21 nt, synthetic construct
  source 1..21: mol_type = other RNA
gttttgttctcgttcatgttc

SEQ ID NO: 95736 - RNA, 21 nt, synthetic construct
  source 1..21: mol_type = other RNA
gttttgttgctattgttgaat

SEQ ID NO: 95737 - RNA, 21 nt, synthetic construct
  source 1..21: mol_type = other RNA
gttttgttttgaataacctca

SEQ ID NO: 95738 - RNA, 21 nt, synthetic construct
  source 1..21: mol_type = other RNA
gttttgtttttctctccttgc

SEQ ID NO: 95739 - RNA, 21 nt, synthetic construct
  source 1..21: mol_type = other RNA
gttttgttttttcacagaaac

SEQ ID NO: 95740 - RNA, 21 nt, synthetic construct
  source 1..21: mol_type = other RNA
gtttttaaaagatgcattctg

SEQ ID NO: 95741 - RNA, 21 nt, synthetic construct
  source 1..21: mol_type = other RNA
gtttttaattcttaaactgcc

SEQ ID NO: 95742 - RNA, 21 nt, synthetic construct
  source 1..21: mol_type = other RNA
gtttttacatgtagttttccc

SEQ ID NO: 95743 - RNA, 21 nt, synthetic construct
  source 1..21: mol_type = other RNA
gtttttagagagatgcctgtg

SEQ ID NO: 95744 - RNA, 21 nt, synthetic construct
  source 1..21: mol_type = other RNA
gtttttatatgcattaagcca

SEQ ID NO: 95745 - RNA, 21 nt, synthetic construct
  source 1..21: mol_type = other RNA
gtttttatggaataatggaac

SEQ ID NO: 95746 - RNA, 21 nt, synthetic construct
  source 1..21: mol_type = other RNA
gtttttcagccctgatagata

SEQ ID NO: 95747 - RNA, 21 nt, synthetic construct
  source 1..21: mol_type = other RNA
gtttttcaggttcaagcgact

SEQ ID NO: 95748 - RNA, 21 nt, synthetic construct
  source 1..21: mol_type = other RNA
gtttttccgtctagccacttc

SEQ ID NO: 95749 - RNA, 21 nt, synthetic construct
  source 1..21: mol_type = other RNA
gtttttctaggtagtttcttt

SEQ ID NO: 95750 - RNA, 21 nt, synthetic construct
  source 1..21: mol_type = other RNA
gtttttctctccttgcacatt

SEQ ID NO: 95751 - RNA, 21 nt, synthetic construct
  source 1..21: mol_type = other RNA
gtttttcttagtctagccaag

SEQ ID NO: 95752 - RNA, 21 nt, synthetic construct
  source 1..21: mol_type = other RNA
gtttttcttgtgggtattttg

SEQ ID NO: 95753 - RNA, 21 nt, synthetic construct
  source 1..21: mol_type = other RNA
gtttttcttttttgagttgga

SEQ ID NO: 95754 - RNA, 21 nt, synthetic construct
  source 1..21: mol_type = other RNA
gtttttgaaaagaacaacatg

SEQ ID NO: 95755 - RNA, 21 nt, synthetic construct
  source 1..21: mol_type = other RNA
gtttttgaacaagagcgtcgt

SEQ ID NO: 95756 - RNA, 21 nt, synthetic construct
  source 1..21: mol_type = other RNA
gtttttgattactgactcaat

SEQ ID NO: 95757 - RNA, 21 nt, synthetic construct
  source 1..21: mol_type = other RNA
gtttttggttcacttgaaacc

SEQ ID NO: 95758 - RNA, 21 nt, synthetic construct
  source 1..21: mol_type = other RNA
gttttttcacagaaacagaaa

SEQ ID NO: 95759 - RNA, 21 nt, synthetic construct
  source 1..21: mol_type = other RNA
gttttttcccccctggaacaa

SEQ ID NO: 95760 - RNA, 21 nt, synthetic construct
  source 1..21: mol_type = other RNA
gttttttcctcccttcagcct

SEQ ID NO: 95761 - RNA, 21 nt, synthetic construct
  source 1..21: mol_type = other RNA
gttttttccttctttggggga

SEQ ID NO: 95762 - RNA, 21 nt, synthetic construct
  source 1..21: mol_type = other RNA
gttttttcctttgcctttcac

SEQ ID NO: 95763 - RNA, 21 nt, synthetic construct
  source 1..21: mol_type = other RNA
gttttttggtagataccagac

SEQ ID NO: 95764 - RNA, 21 nt, synthetic construct
  source 1..21: mol_type = other RNA
gttttttgtccaccagacaaa

SEQ ID NO: 95765 - RNA, 21 nt, synthetic construct
  source 1..21: mol_type = other RNA
gttttttgttttggtcaaaac

SEQ ID NO: 95766 - RNA, 21 nt, synthetic construct
  source 1..21: mol_type = other RNA
taaaaaaggaatctgggccgg

SEQ ID NO: 95767 - RNA, 21 nt, synthetic construct
  source 1..21: mol_type = other RNA
taaaaaaggaccatctgttaa

SEQ ID NO: 95768 - RNA, 21 nt, synthetic construct
  source 1..21: mol_type = other RNA
taaaaaatgcgcgtccgcgac

SEQ ID NO: 95769 - RNA, 21 nt, synthetic construct
  source 1..21: mol_type = other RNA
taaaaacaacactaaccaaca

SEQ ID NO: 95770 - RNA, 21 nt, synthetic construct
  source 1..21: mol_type = other RNA
taaaaacatatgcaggaccaa

SEQ ID NO: 95771 - RNA, 21 nt, synthetic construct
  source 1..21: mol_type = other RNA
taaaaacatccattactcgtg

SEQ ID NO: 95772 - RNA, 21 nt, synthetic construct
  source 1..21: mol_type = other RNA
taaaaaccaaacactggaaat

SEQ ID NO: 95773 - RNA, 21 nt, synthetic construct
  source 1..21: mol_type = other RNA
taaaaacctttttgggatctg

SEQ ID NO: 95774 - RNA, 21 nt, synthetic construct
  source 1..21: mol_type = other RNA
taaaaacgtgcaaactaccaa

SEQ ID NO: 95775 - RNA, 21 nt, synthetic construct
  source 1..21: mol_type = other RNA
taaaaactgagaccggatgag

SEQ ID NO: 95776 - RNA, 21 nt, synthetic construct
  source 1..21: mol_type = other RNA
taaaaactgtttggctgggag

SEQ ID NO: 95777 - RNA, 21 nt, synthetic construct
  source 1..21: mol_type = other RNA
taaaaacttaagtatctcggt

SEQ ID NO: 95778 - RNA, 21 nt, synthetic construct
  source 1..21: mol_type = other RNA
taaaaactttttgggcctttc

SEQ ID NO: 95779 - RNA, 21 nt, synthetic construct
  source 1..21: mol_type = other RNA
taaaaagaaaaagctcacctc

SEQ ID NO: 95780 - RNA, 21 nt, synthetic construct
  source 1..21: mol_type = other RNA
taaaaagaaaaagttgggctt

SEQ ID NO: 95781 - RNA, 21 nt, synthetic construct
  source 1..21: mol_type = other RNA
taaaaagaaatctgcatccaa

SEQ ID NO: 95782 - RNA, 21 nt, synthetic construct
  source 1..21: mol_type = other RNA
taaaaagacacaaaagagctg

SEQ ID NO: 95783 - RNA, 21 nt, synthetic construct
  source 1..21: mol_type = other RNA
taaaaagcactatccacattt

SEQ ID NO: 95784 - RNA, 21 nt, synthetic construct
  source 1..21: mol_type = other RNA
taaaaagcagctacctgttga

SEQ ID NO: 95785 - RNA, 21 nt, synthetic construct
  source 1..21: mol_type = other RNA
taaaaagccatttatcagcac

SEQ ID NO: 95786 - RNA, 21 nt, synthetic construct
  source 1..21: mol_type = other RNA
taaaaagcctctctgatggaa

SEQ ID NO: 95787 - RNA, 21 nt, synthetic construct
  source 1..21: mol_type = other RNA
taaaaagcctctgtggaccat

SEQ ID NO: 95788 - RNA, 21 nt, synthetic construct
  source 1..21: mol_type = other RNA
taaaaagcctgcttcagccta

SEQ ID NO: 95789 - RNA, 21 nt, synthetic construct
  source 1..21: mol_type = other RNA
taaaaagcgttggagacagcc

SEQ ID NO: 95790 - RNA, 21 nt, synthetic construct
  source 1..21: mol_type = other RNA
taaaaaggagggaaaatgttt

SEQ ID NO: 95791 - RNA, 21 nt, synthetic construct
  source 1..21: mol_type = other RNA
taaaaagggagtcagtagagg

SEQ ID NO: 95792 - RNA, 21 nt, synthetic construct
  source 1..21: mol_type = other RNA
taaaaaggttgagttcatgtc

SEQ ID NO: 95793 - RNA, 21 nt, synthetic construct
  source 1..21: mol_type = other RNA
taaaaagtatcgtgagactat

SEQ ID NO: 95794 - RNA, 21 nt, synthetic construct
  source 1..21: mol_type = other RNA
taaaaagtgacttctggatgt

SEQ ID NO: 95795 - RNA, 21 nt, synthetic construct
  source 1..21: mol_type = other RNA
taaaaagtgcttctagtaact

SEQ ID NO: 95796 - RNA, 21 nt, synthetic construct
  source 1..21: mol_type = other RNA
taaaaataacgggccgggcgc

SEQ ID NO: 95797 - RNA, 21 nt, synthetic construct
  source 1..21: mol_type = other RNA
taaaaatatagaaggccagag

SEQ ID NO: 95798 - RNA, 21 nt, synthetic construct
  source 1..21: mol_type = other RNA
taaaaatctctacagggaacc

SEQ ID NO: 95799 - RNA, 21 nt, synthetic construct
  source 1..21: mol_type = other RNA
taaaaatgacaccaaaactac

SEQ ID NO: 95800 - RNA, 21 nt, synthetic construct
  source 1..21: mol_type = other RNA
taaaaatggcacatactgcat

SEQ ID NO: 95801 - RNA, 21 nt, synthetic construct
  source 1..21: mol_type = other RNA
taaaaattccgctctggtttt

SEQ ID NO: 95802 - RNA, 21 nt, synthetic construct
  source 1..21: mol_type = other RNA
taaaaattttctcccaaggtt

SEQ ID NO: 95803 - RNA, 21 nt, synthetic construct
  source 1..21: mol_type = other RNA
taaaacaaattccctctacaa

SEQ ID NO: 95804 - RNA, 21 nt, synthetic construct
  source 1..21: mol_type = other RNA
taaaacacaaggacaggtcac

SEQ ID NO: 95805 - RNA, 21 nt, synthetic construct
  source 1..21: mol_type = other RNA
taaaacacatgtcatgggccg

SEQ ID NO: 95806 - RNA, 21 nt, synthetic construct
  source 1..21: mol_type = other RNA
taaaacactggaagtaattgg

SEQ ID NO: 95807 - RNA, 21 nt, synthetic construct
  source 1..21: mol_type = other RNA
taaaacactggcaaaaatcat

SEQ ID NO: 95808 - RNA, 21 nt, synthetic construct
  source 1..21: mol_type = other RNA
taaaacagacccttatgtcca

SEQ ID NO: 95809 - RNA, 21 nt, synthetic construct
  source 1..21: mol_type = other RNA
taaaacaggaagttgagaaag

SEQ ID NO: 95810 - RNA, 21 nt, synthetic construct
  source 1..21: mol_type = other RNA
taaaacatcaaagtcccctgt

SEQ ID NO: 95811 - RNA, 21 nt, synthetic construct
  source 1..21: mol_type = other RNA
taaaacatctggaaggaaaca

SEQ ID NO: 95812 - RNA, 21 nt, synthetic construct
  source 1..21: mol_type = other RNA
taaaacatggatatttggccg

SEQ ID NO: 95813 - RNA, 21 nt, synthetic construct
  source 1..21: mol_type = other RNA
taaaacatggccagtatctcc

SEQ ID NO: 95814 - RNA, 21 nt, synthetic construct
  source 1..21: mol_type = other RNA
taaaacatggtccacagaggc

SEQ ID NO: 95815 - RNA, 21 nt, synthetic construct
  source 1..21: mol_type = other RNA
taaaaccaaatgtggatagtg

SEQ ID NO: 95816 - RNA, 21 nt, synthetic construct
  source 1..21: mol_type = other RNA
taaaaccagagcggaattttt

SEQ ID NO: 95817 - RNA, 21 nt, synthetic construct
  source 1..21: mol_type = other RNA
taaaacccatgatctttggaa

SEQ ID NO: 95818 - RNA, 21 nt, synthetic construct
  source 1..21: mol_type = other RNA
taaaacctggaatgggttgga

SEQ ID NO: 95819 - RNA, 21 nt, synthetic construct
  source 1..21: mol_type = other RNA
taaaactcacaaaaagtgtga

SEQ ID NO: 95820 - RNA, 21 nt, synthetic construct
  source 1..21: mol_type = other RNA
taaaactccccatgcaggaga

SEQ ID NO: 95821 - RNA, 21 nt, synthetic construct
  source 1..21: mol_type = other RNA
taaaactcttagcttagaaga

SEQ ID NO: 95822 - RNA, 21 nt, synthetic construct
  source 1..21: mol_type = other RNA
taaaactgctgagtcttctac

SEQ ID NO: 95823 - RNA, 21 nt, synthetic construct
  source 1..21: mol_type = other RNA
taaaacttgtagaggaggagg

SEQ ID NO: 95824 - RNA, 21 nt, synthetic construct
  source 1..21: mol_type = other RNA
taaaactttaggtcagaatac

SEQ ID NO: 95825 - RNA, 21 nt, synthetic construct
  source 1..21: mol_type = other RNA
taaaagaaaatggccaagagt

SEQ ID NO: 95826 - RNA, 21 nt, synthetic construct
  source 1..21: mol_type = other RNA
taaaagaacctctggaaagga

SEQ ID NO: 95827 - RNA, 21 nt, synthetic construct
  source 1..21: mol_type = other RNA
taaaagaagatgcagttgctt

SEQ ID NO: 95828 - RNA, 21 nt, synthetic construct
  source 1..21: mol_type = other RNA
taaaagacatctttcctgtga

SEQ ID NO: 95829 - RNA, 21 nt, synthetic construct
  source 1..21: mol_type = other RNA
taaaagaccgcaagagttcca

SEQ ID NO: 95830 - RNA, 21 nt, synthetic construct
  source 1..21: mol_type = other RNA
taaaagagcgaagagggagaa

SEQ ID NO: 95831 - RNA, 21 nt, synthetic construct
  source 1..21: mol_type = other RNA
taaaagagtgcacattccttc

SEQ ID NO: 95832 - RNA, 21 nt, synthetic construct
  source 1..21: mol_type = other RNA
taaaagatatccacagtatgc

SEQ ID NO: 95833 - RNA, 21 nt, synthetic construct
  source 1..21: mol_type = other RNA
taaaagatgcattctgtcaca

SEQ ID NO: 95834 - RNA, 21 nt, synthetic construct
  source 1..21: mol_type = other RNA
taaaagcaacctcatttgcag

SEQ ID NO: 95835 - RNA, 21 nt, synthetic construct
  source 1..21: mol_type = other RNA
taaaagcacaagcacagagtc

SEQ ID NO: 95836 - RNA, 21 nt, synthetic construct
  source 1..21: mol_type = other RNA
taaaagcctcatttgaacttt

SEQ ID NO: 95837 - RNA, 21 nt, synthetic construct
  source 1..21: mol_type = other RNA
taaaagcgtactgtgattaca

SEQ ID NO: 95838 - RNA, 21 nt, synthetic construct
  source 1..21: mol_type = other RNA
taaaagctctaatagttcacc

SEQ ID NO: 95839 - RNA, 21 nt, synthetic construct
  source 1..21: mol_type = other RNA
taaaagctggagttatttgta

SEQ ID NO: 95840 - RNA, 21 nt, synthetic construct
  source 1..21: mol_type = other RNA
taaaagcttatgatcttggga

SEQ ID NO: 95841 - RNA, 21 nt, synthetic construct
  source 1..21: mol_type = other RNA
taaaaggaatataaacgtgtg

SEQ ID NO: 95842 - RNA, 21 nt, synthetic construct
  source 1..21: mol_type = other RNA
taaaaggagatatacaggaag

SEQ ID NO: 95843 - RNA, 21 nt, synthetic construct
  source 1..21: mol_type = other RNA
taaaaggatatgggccaaaga

SEQ ID NO: 95844 - RNA, 21 nt, synthetic construct
  source 1..21: mol_type = other RNA
taaaaggtataaaggatgcac

SEQ ID NO: 95845 - RNA, 21 nt, synthetic construct
  source 1..21: mol_type = other RNA
taaaaggttgcttaattgagc

SEQ ID NO: 95846 - RNA, 21 nt, synthetic construct
  source 1..21: mol_type = other RNA
taaaagtaaattcgcataacc

SEQ ID NO: 95847 - RNA, 21 nt, synthetic construct
  source 1..21: mol_type = other RNA
taaaagtcagctaggcgtagt

SEQ ID NO: 95848 - RNA, 21 nt, synthetic construct
  source 1..21: mol_type = other RNA
taaaagtgctgcagtatgcat

SEQ ID NO: 95849 - RNA, 21 nt, synthetic construct
  source 1..21: mol_type = other RNA
taaaagttagctggcaaaatg

SEQ ID NO: 95850 - RNA, 21 nt, synthetic construct
  source 1..21: mol_type = other RNA
taaaagttccaagattttccc

SEQ ID NO: 95851 - RNA, 21 nt, synthetic construct
  source 1..21: mol_type = other RNA
taaaagttttccaaccactga

SEQ ID NO: 95852 - RNA, 21 nt, synthetic construct
  source 1..21: mol_type = other RNA
taaaataaacattttccctcc

SEQ ID NO: 95853 - RNA, 21 nt, synthetic construct
  source 1..21: mol_type = other RNA
taaaataacacgcagaaccac

SEQ ID NO: 95854 - RNA, 21 nt, synthetic construct
  source 1..21: mol_type = other RNA
taaaatacaacagcacctttt

SEQ ID NO: 95855 - RNA, 21 nt, synthetic construct
  source 1..21: mol_type = other RNA
taaaataccagaggttaaagc

SEQ ID NO: 95856 - RNA, 21 nt, synthetic construct
  source 1..21: mol_type = other RNA
taaaatagcaggattcttgtt

SEQ ID NO: 95857 - RNA, 21 nt, synthetic construct
  source 1..21: mol_type = other RNA
taaaataggaagtccatgaaa

SEQ ID NO: 95858 - RNA, 21 nt, synthetic construct
  source 1..21: mol_type = other RNA
taaaataggcctaggtgtgat

SEQ ID NO: 95859 - RNA, 21 nt, synthetic construct
  source 1..21: mol_type = other RNA
taaaatcatcacagtatgcac

SEQ ID NO: 95860 - RNA, 21 nt, synthetic construct
  source 1..21: mol_type = other RNA
taaaatcggaacaggctcaat

SEQ ID NO: 95861 - RNA, 21 nt, synthetic construct
  source 1..21: mol_type = other RNA
taaaatctgattcagtggttg

SEQ ID NO: 95862 - RNA, 21 nt, synthetic construct
  source 1..21: mol_type = other RNA
taaaatctgtatgagaagact

SEQ ID NO: 95863 - RNA, 21 nt, synthetic construct
  source 1..21: mol_type = other RNA
taaaatcttattccccaggga

SEQ ID NO: 95864 - RNA, 21 nt, synthetic construct
  source 1..21: mol_type = other RNA
taaaatgaaaatgttccctct

SEQ ID NO: 95865 - RNA, 21 nt, synthetic construct
  source 1..21: mol_type = other RNA
taaaatgaacctgctttctac

SEQ ID NO: 95866 - RNA, 21 nt, synthetic construct
  source 1..21: mol_type = other RNA
taaaatgagggtaaaatagtc

SEQ ID NO: 95867 - RNA, 21 nt, synthetic construct
  source 1..21: mol_type = other RNA
taaaatgatagcattatccca

SEQ ID NO: 95868 - RNA, 21 nt, synthetic construct
  source 1..21: mol_type = other RNA
taaaatgatggcaacaatcaa

SEQ ID NO: 95869 - RNA, 21 nt, synthetic construct
  source 1..21: mol_type = other RNA
taaaatggaagactttatggt

SEQ ID NO: 95870 - RNA, 21 nt, synthetic construct
  source 1..21: mol_type = other RNA
taaaatggaatattgttcagc

SEQ ID NO: 95871 - RNA, 21 nt, synthetic construct
  source 1..21: mol_type = other RNA
taaaatgtttagcggaatgac

SEQ ID NO: 95872 - RNA, 21 nt, synthetic construct
  source 1..21: mol_type = other RNA
taaaattcaccaaacacctta

SEQ ID NO: 95873 - RNA, 21 nt, synthetic construct
  source 1..21: mol_type = other RNA
taaaattcccttcagtgtagt

SEQ ID NO: 95874 - RNA, 21 nt, synthetic construct
  source 1..21: mol_type = other RNA
taaaattccttcctttgatga

SEQ ID NO: 95875 - RNA, 21 nt, synthetic construct
  source 1..21: mol_type = other RNA
taaaattctgaccctttattc

SEQ ID NO: 95876 - RNA, 21 nt, synthetic construct
  source 1..21: mol_type = other RNA
taaaattctgatagcttgaca

SEQ ID NO: 95877 - RNA, 21 nt, synthetic construct
  source 1..21: mol_type = other RNA
taaaattcttccagcctggta

SEQ ID NO: 95878 - RNA, 21 nt, synthetic construct
  source 1..21: mol_type = other RNA
taaaattgcagagtgttcaaa

SEQ ID NO: 95879 - RNA, 21 nt, synthetic construct
  source 1..21: mol_type = other RNA
taaacaaagagaacaatggaa

SEQ ID NO: 95880 - RNA, 21 nt, synthetic construct
  source 1..21: mol_type = other RNA
taaacaaatcagatttcaggt

SEQ ID NO: 95881 - RNA, 21 nt, synthetic construct
  source 1..21: mol_type = other RNA
taaacaactgactctaaagtc

SEQ ID NO: 95882 - RNA, 21 nt, synthetic construct
  source 1..21: mol_type = other RNA
taaacaagactcaacatgtgt

SEQ ID NO: 95883 - RNA, 21 nt, synthetic construct
  source 1..21: mol_type = other RNA
taaacaagtcacaaaaagaca

SEQ ID NO: 95884 - RNA, 21 nt, synthetic construct
  source 1..21: mol_type = other RNA
taaacaatcttgaaaggggcc

SEQ ID NO: 95885 - RNA, 21 nt, synthetic construct
  source 1..21: mol_type = other RNA
taaacaatgctgctatgaaaa

SEQ ID NO: 95886 - RNA, 21 nt, synthetic construct
  source 1..21: mol_type = other RNA
taaacacacccttggtaaaca

SEQ ID NO: 95887 - RNA, 21 nt, synthetic construct
  source 1..21: mol_type = other RNA
taaacacacgggctgggcgcg

SEQ ID NO: 95888 - RNA, 21 nt, synthetic construct
  source 1..21: mol_type = other RNA
taaacacagaacactaaaggg

SEQ ID NO: 95889 - RNA, 21 nt, synthetic construct
  source 1..21: mol_type = other RNA
taaacactgtagttcagtttt

SEQ ID NO: 95890 - RNA, 21 nt, synthetic construct
  source 1..21: mol_type = other RNA
taaacactgttctgcgtggtt

SEQ ID NO: 95891 - RNA, 21 nt, synthetic construct
  source 1..21: mol_type = other RNA
taaacacttagcatgttgctt

SEQ ID NO: 95892 - RNA, 21 nt, synthetic construct
  source 1..21: mol_type = other RNA
taaacagcagtcttaaccatt

SEQ ID NO: 95893 - RNA, 21 nt, synthetic construct
  source 1..21: mol_type = other RNA
taaacagcatactgtggatat

SEQ ID NO: 95894 - RNA, 21 nt, synthetic construct
  source 1..21: mol_type = other RNA
taaacaggtgtaagagattaa

SEQ ID NO: 95895 - RNA, 21 nt, synthetic construct
  source 1..21: mol_type = other RNA
taaacagtacagtagtaaaac

SEQ ID NO: 95896 - RNA, 21 nt, synthetic construct
  source 1..21: mol_type = other RNA
taaacatgtaaaacagaccct

SEQ ID NO: 95897 - RNA, 21 nt, synthetic construct
  source 1..21: mol_type = other RNA
taaacattttattaggtgcac

SEQ ID NO: 95898 - RNA, 21 nt, synthetic construct
  source 1..21: mol_type = other RNA
taaacattttccctccttttt

SEQ ID NO: 95899 - RNA, 21 nt, synthetic construct
  source 1..21: mol_type = other RNA
taaaccaagtttggttcattt

SEQ ID NO: 95900 - RNA, 21 nt, synthetic construct
  source 1..21: mol_type = other RNA
taaaccacgcagtttgttctg

SEQ ID NO: 95901 - RNA, 21 nt, synthetic construct
  source 1..21: mol_type = other RNA
taaaccatatggttaatagtg

SEQ ID NO: 95902 - RNA, 21 nt, synthetic construct
  source 1..21: mol_type = other RNA
taaaccattttcaatcttgga

SEQ ID NO: 95903 - RNA, 21 nt, synthetic construct
  source 1..21: mol_type = other RNA
taaacccaacaaacaattagc

SEQ ID NO: 95904 - RNA, 21 nt, synthetic construct
  source 1..21: mol_type = other RNA
taaacccatttcatgccatcc

SEQ ID NO: 95905 - RNA, 21 nt, synthetic construct
  source 1..21: mol_type = other RNA
taaacctcaagtcttttccta

SEQ ID NO: 95906 - RNA, 21 nt, synthetic construct
  source 1..21: mol_type = other RNA
taaacctgaggtctttaaaag

SEQ ID NO: 95907 - RNA, 21 nt, synthetic construct
  source 1..21: mol_type = other RNA
taaacctgctacgaatgaact

SEQ ID NO: 95908 - RNA, 21 nt, synthetic construct
  source 1..21: mol_type = other RNA
taaacctggaatcctctacca

SEQ ID NO: 95909 - RNA, 21 nt, synthetic construct
  source 1..21: mol_type = other RNA
taaacctgtgatttccagtgt

SEQ ID NO: 95910 - RNA, 21 nt, synthetic construct
  source 1..21: mol_type = other RNA
taaacctgttacatggttctg

SEQ ID NO: 95911 - RNA, 21 nt, synthetic construct
  source 1..21: mol_type = other RNA
taaacgacaccagaactacac

SEQ ID NO: 95912 - RNA, 21 nt, synthetic construct
  source 1..21: mol_type = other RNA
taaacgacagcaggaaaagct

SEQ ID NO: 95913 - RNA, 21 nt, synthetic construct
  source 1..21: mol_type = other RNA
taaacgcggaatgaagcaggc

SEQ ID NO: 95914 - RNA, 21 nt, synthetic construct
  source 1..21: mol_type = other RNA
taaacgtcagagcagcactga

SEQ ID NO: 95915 - RNA, 21 nt, synthetic construct
  source 1..21: mol_type = other RNA
taaacgtgtgtgtaagcacac

SEQ ID NO: 95916 - RNA, 21 nt, synthetic construct
  source 1..21: mol_type = other RNA
taaacgtttggtgactgaatt

SEQ ID NO: 95917 - RNA, 21 nt, synthetic construct
  source 1..21: mol_type = other RNA
taaactaacaaagaacaggaa

SEQ ID NO: 95918 - RNA, 21 nt, synthetic construct
  source 1..21: mol_type = other RNA
taaactagattaccttgaagt

SEQ ID NO: 95919 - RNA, 21 nt, synthetic construct
  source 1..21: mol_type = other RNA
taaactagtatcaacctgcag

SEQ ID NO: 95920 - RNA, 21 nt, synthetic construct
  source 1..21: mol_type = other RNA
taaactatagacccaaagcaa

SEQ ID NO: 95921 - RNA, 21 nt, synthetic construct
  source 1..21: mol_type = other RNA
taaactcattatcccagacag

SEQ ID NO: 95922 - RNA, 21 nt, synthetic construct
  source 1..21: mol_type = other RNA
taaactcttccttatccgata

SEQ ID NO: 95923 - RNA, 21 nt, synthetic construct
  source 1..21: mol_type = other RNA
taaactgaacgaagtgaaaaa

SEQ ID NO: 95924 - RNA, 21 nt, synthetic construct
  source 1..21: mol_type = other RNA
taaactgccaaaccctacacc

SEQ ID NO: 95925 - RNA, 21 nt, synthetic construct
  source 1..21: mol_type = other RNA
taaactggaaggaaataagaa

SEQ ID NO: 95926 - RNA, 21 nt, synthetic construct
  source 1..21: mol_type = other RNA
taaactggaattcatcaaagt

SEQ ID NO: 95927 - RNA, 21 nt, synthetic construct
  source 1..21: mol_type = other RNA
taaactggatgaatacaaagg

SEQ ID NO: 95928 - RNA, 21 nt, synthetic construct
  source 1..21: mol_type = other RNA
taaactggttttcctgatgga

SEQ ID NO: 95929 - RNA, 21 nt, synthetic construct
  source 1..21: mol_type = other RNA
taaactgttccccaagccaaa

SEQ ID NO: 95930 - RNA, 21 nt, synthetic construct
  source 1..21: mol_type = other RNA
taaactgttggaaaaatcgtc

SEQ ID NO: 95931 - RNA, 21 nt, synthetic construct
  source 1..21: mol_type = other RNA
taaacttcaaggtaatctagt

SEQ ID NO: 95932 - RNA, 21 nt, synthetic construct
  source 1..21: mol_type = other RNA
taaacttcagttttgagtggc

SEQ ID NO: 95933 - RNA, 21 nt, synthetic construct
  source 1..21: mol_type = other RNA
taaacttccctctcagtggtg

SEQ ID NO: 95934 - RNA, 21 nt, synthetic construct
  source 1..21: mol_type = other RNA
taaacttggtctgggtgatat

SEQ ID NO: 95935 - RNA, 21 nt, synthetic construct
  source 1..21: mol_type = other RNA
taaactttgagtagcacccta

SEQ ID NO: 95936 - RNA, 21 nt, synthetic construct
  source 1..21: mol_type = other RNA
taaagaaaggtctctctctgt

SEQ ID NO: 95937 - RNA, 21 nt, synthetic construct
  source 1..21: mol_type = other RNA
taaagaaattagaacatctgg

SEQ ID NO: 95938 - RNA, 21 nt, synthetic construct
  source 1..21: mol_type = other RNA
taaagaacatgattgggtcaa

SEQ ID NO: 95939 - RNA, 21 nt, synthetic construct
  source 1..21: mol_type = other RNA
taaagaactccaacaattcaa

SEQ ID NO: 95940 - RNA, 21 nt, synthetic construct
  source 1..21: mol_type = other RNA
taaagacagacatttggaata

SEQ ID NO: 95941 - RNA, 21 nt, synthetic construct
  source 1..21: mol_type = other RNA
taaagacagctactaaacaaa

SEQ ID NO: 95942 - RNA, 21 nt, synthetic construct
  source 1..21: mol_type = other RNA
taaagacctcaggtttagaat

SEQ ID NO: 95943 - RNA, 21 nt, synthetic construct
  source 1..21: mol_type = other RNA
taaagacgttcagataacaaa

SEQ ID NO: 95944 - RNA, 21 nt, synthetic construct
  source 1..21: mol_type = other RNA
taaagacttcacgatgcttag

SEQ ID NO: 95945 - RNA, 21 nt, synthetic construct
  source 1..21: mol_type = other RNA
taaagagagtgacagctgagt

SEQ ID NO: 95946 - RNA, 21 nt, synthetic construct
  source 1..21: mol_type = other RNA
taaagagcaggtggaaggcct

SEQ ID NO: 95947 - RNA, 21 nt, synthetic construct
  source 1..21: mol_type = other RNA
taaagatagccccttatcagg

SEQ ID NO: 95948 - RNA, 21 nt, synthetic construct
  source 1..21: mol_type = other RNA
taaagatatgtgtaggaagga

SEQ ID NO: 95949 - RNA, 21 nt, synthetic construct
  source 1..21: mol_type = other RNA
taaagatcaagctcgccgtct

SEQ ID NO: 95950 - RNA, 21 nt, synthetic construct
  source 1..21: mol_type = other RNA
taaagcaaatgtgactagaag

SEQ ID NO: 95951 - RNA, 21 nt, synthetic construct
  source 1..21: mol_type = other RNA
taaagcaacaggaagaggcag

SEQ ID NO: 95952 - RNA, 21 nt, synthetic construct
  source 1..21: mol_type = other RNA
taaagcaagtatgagccacta

SEQ ID NO: 95953 - RNA, 21 nt, synthetic construct
  source 1..21: mol_type = other RNA
taaagcagggaggggtcccca

SEQ ID NO: 95954 - RNA, 21 nt, synthetic construct
  source 1..21: mol_type = other RNA
taaagccaatcttcccaatcc

SEQ ID NO: 95955 - RNA, 21 nt, synthetic construct
  source 1..21: mol_type = other RNA
taaagccacactcttggtctt

SEQ ID NO: 95956 - RNA, 21 nt, synthetic construct
  source 1..21: mol_type = other RNA
taaagccaggctttcccaggg

SEQ ID NO: 95957 - RNA, 21 nt, synthetic construct
  source 1..21: mol_type = other RNA
taaagccccattgtacacata

SEQ ID NO: 95958 - RNA, 21 nt, synthetic construct
  source 1..21: mol_type = other RNA
taaagccggattcctttcaaa

SEQ ID NO: 95959 - RNA, 21 nt, synthetic construct
  source 1..21: mol_type = other RNA
taaagcctctcaacacttcag

SEQ ID NO: 95960 - RNA, 21 nt, synthetic construct
  source 1..21: mol_type = other RNA
taaagcgctactcagctgtca

SEQ ID NO: 95961 - RNA, 21 nt, synthetic construct
  source 1..21: mol_type = other RNA
taaagctctaataaaagctgg

SEQ ID NO: 95962 - RNA, 21 nt, synthetic construct
  source 1..21: mol_type = other RNA
taaagctctatggcatttgag

SEQ ID NO: 95963 - RNA, 21 nt, synthetic construct
  source 1..21: mol_type = other RNA
taaagctgaactcctttctta

SEQ ID NO: 95964 - RNA, 21 nt, synthetic construct
  source 1..21: mol_type = other RNA
taaagctttgtgactgtgagg

SEQ ID NO: 95965 - RNA, 21 nt, synthetic construct
  source 1..21: mol_type = other RNA
taaaggaaaagagatctagtg

SEQ ID NO: 95966 - RNA, 21 nt, synthetic construct
  source 1..21: mol_type = other RNA
taaaggatgcacaagacagat

SEQ ID NO: 95967 - RNA, 21 nt, synthetic construct
  source 1..21: mol_type = other RNA
taaaggatgtcaactgaggca

SEQ ID NO: 95968 - RNA, 21 nt, synthetic construct
  source 1..21: mol_type = other RNA
taaaggcaatgctctcttccc

SEQ ID NO: 95969 - RNA, 21 nt, synthetic construct
  source 1..21: mol_type = other RNA
taaaggccctgatttaaagta

SEQ ID NO: 95970 - RNA, 21 nt, synthetic construct
  source 1..21: mol_type = other RNA
taaaggctggaaataatttcc

SEQ ID NO: 95971 - RNA, 21 nt, synthetic construct
  source 1..21: mol_type = other RNA
taaaggctttcgtatggaaga

SEQ ID NO: 95972 - RNA, 21 nt, synthetic construct
  source 1..21: mol_type = other RNA
taaagggataatgctatccag

SEQ ID NO: 95973 - RNA, 21 nt, synthetic construct
  source 1..21: mol_type = other RNA
taaaggggatgggggacgacg

SEQ ID NO: 95974 - RNA, 21 nt, synthetic construct
  source 1..21: mol_type = other RNA
taaaggggatttcatgaacaa

SEQ ID NO: 95975 - RNA, 21 nt, synthetic construct
  source 1..21: mol_type = other RNA
taaagggtaagaaaattgtac

SEQ ID NO: 95976 - RNA, 21 nt, synthetic construct
  source 1..21: mol_type = other RNA
taaagggtctggtatctacca

SEQ ID NO: 95977 - RNA, 21 nt, synthetic construct
  source 1..21: mol_type = other RNA
taaaggtaaggaaaccccagg

SEQ ID NO: 95978 - RNA, 21 nt, synthetic construct
  source 1..21: mol_type = other RNA
taaaggtgctaattgtttgtt

SEQ ID NO: 95979 - RNA, 21 nt, synthetic construct
  source 1..21: mol_type = other RNA
taaaggtttggagtttgtagc

SEQ ID NO: 95980 - RNA, 21 nt, synthetic construct
  source 1..21: mol_type = other RNA
taaagtagaaggccctatgcc

SEQ ID NO: 95981 - RNA, 21 nt, synthetic construct
  source 1..21: mol_type = other RNA
taaagtaggttgagacttaga

SEQ ID NO: 95982 - RNA, 21 nt, synthetic construct
  source 1..21: mol_type = other RNA
taaagtcactgtggaaaacag

SEQ ID NO: 95983 - RNA, 21 nt, synthetic construct
  source 1..21: mol_type = other RNA
taaagtcagaggagcagttac

SEQ ID NO: 95984 - RNA, 21 nt, synthetic construct
  source 1..21: mol_type = other RNA
taaagtccacagatctttttg

SEQ ID NO: 95985 - RNA, 21 nt, synthetic construct
  source 1..21: mol_type = other RNA
taaagtctatgctcttggttt

SEQ ID NO: 95986 - RNA, 21 nt, synthetic construct
  source 1..21: mol_type = other RNA
taaagtcttccattttagatc

SEQ ID NO: 95987 - RNA, 21 nt, synthetic construct
  source 1..21: mol_type = other RNA
taaagtcttgctggaagttgg

SEQ ID NO: 95988 - RNA, 21 nt, synthetic construct
  source 1..21: mol_type = other RNA
taaagtgtaaagtttctctct

SEQ ID NO: 95989 - RNA, 21 nt, synthetic construct
  source 1..21: mol_type = other RNA
taaagttagaagtatcccaga

SEQ ID NO: 95990 - RNA, 21 nt, synthetic construct
  source 1..21: mol_type = other RNA
taaagttagtgaagcagagag

SEQ ID NO: 95991 - RNA, 21 nt, synthetic construct
  source 1..21: mol_type = other RNA
taaagttccccattgacaata

SEQ ID NO: 95992 - RNA, 21 nt, synthetic construct
  source 1..21: mol_type = other RNA
taaagttgaggttgaagacct

SEQ ID NO: 95993 - RNA, 21 nt, synthetic construct
  source 1..21: mol_type = other RNA
taaagttggtcctgcatatgt

SEQ ID NO: 95994 - RNA, 21 nt, synthetic construct
  source 1..21: mol_type = other RNA
taaagtttcaaactgtggtca

SEQ ID NO: 95995 - RNA, 21 nt, synthetic construct
  source 1..21: mol_type = other RNA
taaagtttccgttttgcaaga

SEQ ID NO: 95996 - RNA, 21 nt, synthetic construct
  source 1..21: mol_type = other RNA
taaagtttctctctccctgcc

SEQ ID NO: 95997 - RNA, 21 nt, synthetic construct
  source 1..21: mol_type = other RNA
taaataaaacacatgtcatgg

SEQ ID NO: 95998 - RNA, 21 nt, synthetic construct
  source 1..21: mol_type = other RNA
taaataaaatgtctggccggg

SEQ ID NO: 95999 - RNA, 21 nt, synthetic construct
  source 1..21: mol_type = other RNA
taaataagggcattttcaagg

SEQ ID NO: 96000 - RNA, 21 nt, synthetic construct
  source 1..21: mol_type = other RNA
taaatacacatgttgagtctt

SEQ ID NO: 96001 - RNA, 21 nt, synthetic construct
  source 1..21: mol_type = other RNA
taaatacaccaaactcaaaag

SEQ ID NO: 96002 - RNA, 21 nt, synthetic construct
  source 1..21: mol_type = other RNA
taaatacagagcacagactca

SEQ ID NO: 96003 - RNA, 21 nt, synthetic construct
  source 1..21: mol_type = other RNA
taaataccacctgaaatctga

SEQ ID NO: 96004 - RNA, 21 nt, synthetic construct
  source 1..21: mol_type = other RNA
taaatacgtatatgaaaagcc

SEQ ID NO: 96005 - RNA, 21 nt, synthetic construct
  source 1..21: mol_type = other RNA
taaatacgtgtatactgggtg

SEQ ID NO: 96006 - RNA, 21 nt, synthetic construct
  source 1..21: mol_type = other RNA
taaatagggtgctactcaaag

SEQ ID NO: 96007 - RNA, 21 nt, synthetic construct
  source 1..21: mol_type = other RNA
taaataggtattcatgctgtg

SEQ ID NO: 96008 - RNA, 21 nt, synthetic construct
  source 1..21: mol_type = other RNA
taaatatactgactagtggct

SEQ ID NO: 96009 - RNA, 21 nt, synthetic construct
  source 1..21: mol_type = other RNA
taaatatccgaaagaactgaa

SEQ ID NO: 96010 - RNA, 21 nt, synthetic construct
  source 1..21: mol_type = other RNA
taaatatttaacaccatggca

SEQ ID NO: 96011 - RNA, 21 nt, synthetic construct
  source 1..21: mol_type = other RNA
taaatcaacagtgtactagtc

SEQ ID NO: 96012 - RNA, 21 nt, synthetic construct
  source 1..21: mol_type = other RNA
taaatcaaggtacaatacact

SEQ ID NO: 96013 - RNA, 21 nt, synthetic construct
  source 1..21: mol_type = other RNA
taaatcacaggaaagatgtct

SEQ ID NO: 96014 - RNA, 21 nt, synthetic construct
  source 1..21: mol_type = other RNA
taaatcagaaactgacaggac

SEQ ID NO: 96015 - RNA, 21 nt, synthetic construct
  source 1..21: mol_type = other RNA
taaatcagactgtattaccag

SEQ ID NO: 96016 - RNA, 21 nt, synthetic construct
  source 1..21: mol_type = other RNA
taaatcagcaccatctaacag

SEQ ID NO: 96017 - RNA, 21 nt, synthetic construct
  source 1..21: mol_type = other RNA
taaatcaggatgtctttggga

SEQ ID NO: 96018 - RNA, 21 nt, synthetic construct
  source 1..21: mol_type = other RNA
taaatcagggcctttaatcac

SEQ ID NO: 96019 - RNA, 21 nt, synthetic construct
  source 1..21: mol_type = other RNA
taaatcatgatgtttggctcc

SEQ ID NO: 96020 - RNA, 21 nt, synthetic construct
  source 1..21: mol_type = other RNA
taaatccaacgaccggacgtg

SEQ ID NO: 96021 - RNA, 21 nt, synthetic construct
  source 1..21: mol_type = other RNA
taaatcccacttgatccaggt

SEQ ID NO: 96022 - RNA, 21 nt, synthetic construct
  source 1..21: mol_type = other RNA
taaatcccggccaggtgcggt

SEQ ID NO: 96023 - RNA, 21 nt, synthetic construct
  source 1..21: mol_type = other RNA
taaatccgagacaagttctcc

SEQ ID NO: 96024 - RNA, 21 nt, synthetic construct
  source 1..21: mol_type = other RNA
taaatcctcacatgtttggtc

SEQ ID NO: 96025 - RNA, 21 nt, synthetic construct
  source 1..21: mol_type = other RNA
taaatctaaagccaatcttcc

SEQ ID NO: 96026 - RNA, 21 nt, synthetic construct
  source 1..21: mol_type = other RNA
taaatctaagtctcaacctac

SEQ ID NO: 96027 - RNA, 21 nt, synthetic construct
  source 1..21: mol_type = other RNA
taaatctttggtgaaggttca

SEQ ID NO: 96028 - RNA, 21 nt, synthetic construct
  source 1..21: mol_type = other RNA
taaatgaaacacttgtgtaac

SEQ ID NO: 96029 - RNA, 21 nt, synthetic construct
  source 1..21: mol_type = other RNA
taaatgaaatttgaggcccta

SEQ ID NO: 96030 - RNA, 21 nt, synthetic construct
  source 1..21: mol_type = other RNA
taaatgaaggaaaaaacgggt

SEQ ID NO: 96031 - RNA, 21 nt, synthetic construct
  source 1..21: mol_type = other RNA
taaatgaatattcgttccagc

SEQ ID NO: 96032 - RNA, 21 nt, synthetic construct
  source 1..21: mol_type = other RNA
taaatgagacacctacaatat

SEQ ID NO: 96033 - RNA, 21 nt, synthetic construct
  source 1..21: mol_type = other RNA
taaatgaggtatcatttccaa

SEQ ID NO: 96034 - RNA, 21 nt, synthetic construct
  source 1..21: mol_type = other RNA
taaatgatctttcaaggggcc

SEQ ID NO: 96035 - RNA, 21 nt, synthetic construct
  source 1..21: mol_type = other RNA
taaatgatgagctactgcatg

SEQ ID NO: 96036 - RNA, 21 nt, synthetic construct
  source 1..21: mol_type = other RNA
taaatgcaatgcaggcgcctg

SEQ ID NO: 96037 - RNA, 21 nt, synthetic construct
  source 1..21: mol_type = other RNA
taaatgcataaacgacagcag

SEQ ID NO: 96038 - RNA, 21 nt, synthetic construct
  source 1..21: mol_type = other RNA
taaatgccaatttgggatata

SEQ ID NO: 96039 - RNA, 21 nt, synthetic construct
  source 1..21: mol_type = other RNA
taaatgccacataaatcacag

SEQ ID NO: 96040 - RNA, 21 nt, synthetic construct
  source 1..21: mol_type = other RNA
taaatgctcacatttagtttc

SEQ ID NO: 96041 - RNA, 21 nt, synthetic construct
  source 1..21: mol_type = other RNA
taaatgctcagtgggttcaat

SEQ ID NO: 96042 - RNA, 21 nt, synthetic construct
  source 1..21: mol_type = other RNA
taaatggctttttacgatgaa

SEQ ID NO: 96043 - RNA, 21 nt, synthetic construct
  source 1..21: mol_type = other RNA
taaatggtagcttgggctaag

SEQ ID NO: 96044 - RNA, 21 nt, synthetic construct
  source 1..21: mol_type = other RNA
taaatggtgcaggccagatat

SEQ ID NO: 96045 - RNA, 21 nt, synthetic construct
  source 1..21: mol_type = other RNA
taaatggtgtgaagttgggct

SEQ ID NO: 96046 - RNA, 21 nt, synthetic construct
  source 1..21: mol_type = other RNA
taaatggtttctccttctgca

SEQ ID NO: 96047 - RNA, 21 nt, synthetic construct
  source 1..21: mol_type = other RNA
taaatgtacaacattcatccc

SEQ ID NO: 96048 - RNA, 21 nt, synthetic construct
  source 1..21: mol_type = other RNA
taaatgtccatcgagagatga

SEQ ID NO: 96049 - RNA, 21 nt, synthetic construct
  source 1..21: mol_type = other RNA
taaatgtgaattagatggctt

SEQ ID NO: 96050 - RNA, 21 nt, synthetic construct
  source 1..21: mol_type = other RNA
taaatgtgagcatttagcccc

SEQ ID NO: 96051 - RNA, 21 nt, synthetic construct
  source 1..21: mol_type = other RNA
taaatgttcagtttatgggtc

SEQ ID NO: 96052 - RNA, 21 nt, synthetic construct
  source 1..21: mol_type = other RNA
taaatgttttgcagagatgag

SEQ ID NO: 96053 - RNA, 21 nt, synthetic construct
  source 1..21: mol_type = other RNA
taaattaaaaactgagaccgg

SEQ ID NO: 96054 - RNA, 21 nt, synthetic construct
  source 1..21: mol_type = other RNA
taaattaagcttcgacagtcc

SEQ ID NO: 96055 - RNA, 21 nt, synthetic construct
  source 1..21: mol_type = other RNA
taaattacaaaataggcagtc

SEQ ID NO: 96056 - RNA, 21 nt, synthetic construct
  source 1..21: mol_type = other RNA
taaattacccaaagactttgt

SEQ ID NO: 96057 - RNA, 21 nt, synthetic construct
  source 1..21: mol_type = other RNA
taaattatagctccaaaagcg

SEQ ID NO: 96058 - RNA, 21 nt, synthetic construct
  source 1..21: mol_type = other RNA
taaattcctaactcaagagtt

SEQ ID NO: 96059 - RNA, 21 nt, synthetic construct
  source 1..21: mol_type = other RNA
taaattctgccacattcaaca

SEQ ID NO: 96060 - RNA, 21 nt, synthetic construct
  source 1..21: mol_type = other RNA
taaattgaacagcctaaagtc

SEQ ID NO: 96061 - RNA, 21 nt, synthetic construct
  source 1..21: mol_type = other RNA
taaattgcaaaaacagtttcc

SEQ ID NO: 96062 - RNA, 21 nt, synthetic construct
  source 1..21: mol_type = other RNA
taaattggtcctggaaaaaga

SEQ ID NO: 96063 - RNA, 21 nt, synthetic construct
  source 1..21: mol_type = other RNA
taaatttcattaggttgatgg

SEQ ID NO: 96064 - RNA, 21 nt, synthetic construct
  source 1..21: mol_type = other RNA
taaatttctaaggttctgcta

SEQ ID NO: 96065 - RNA, 21 nt, synthetic construct
  source 1..21: mol_type = other RNA
taaatttctgttgcttaagtc

SEQ ID NO: 96066 - RNA, 21 nt, synthetic construct
  source 1..21: mol_type = other RNA
taaatttgattgttagccaca

SEQ ID NO: 96067 - RNA, 21 nt, synthetic construct
  source 1..21: mol_type = other RNA
taaatttgccacattttacca

SEQ ID NO: 96068 - RNA, 21 nt, synthetic construct
  source 1..21: mol_type = other RNA
taaattttaagtgcacaatgc

SEQ ID NO: 96069 - RNA, 21 nt, synthetic construct
  source 1..21: mol_type = other RNA
taaattttgagacctcaggca

SEQ ID NO: 96070 - RNA, 21 nt, synthetic construct
  source 1..21: mol_type = other RNA
taaattttgaggcttttggat

SEQ ID NO: 96071 - RNA, 21 nt, synthetic construct
  source 1..21: mol_type = other RNA
taacaaaaatacgaaagtgct

SEQ ID NO: 96072 - RNA, 21 nt, synthetic construct
  source 1..21: mol_type = other RNA
taacaaaactaggctgtccca

SEQ ID NO: 96073 - RNA, 21 nt, synthetic construct
  source 1..21: mol_type = other RNA
taacaaaagatacacaagatc

SEQ ID NO: 96074 - RNA, 21 nt, synthetic construct
  source 1..21: mol_type = other RNA
taacaaacgcattgtgatgtc

SEQ ID NO: 96075 - RNA, 21 nt, synthetic construct
  source 1..21: mol_type = other RNA
taacaaagaacaggaagggag

SEQ ID NO: 96076 - RNA, 21 nt, synthetic construct
  source 1..21: mol_type = other RNA
taacaaagatgccacaaatgg

SEQ ID NO: 96077 - RNA, 21 nt, synthetic construct
  source 1..21: mol_type = other RNA
taacaaagctctgatgctttc

SEQ ID NO: 96078 - RNA, 21 nt, synthetic construct
  source 1..21: mol_type = other RNA
taacaaagggcctgttccagg

SEQ ID NO: 96079 - RNA, 21 nt, synthetic construct
  source 1..21: mol_type = other RNA
taacaaagggttcttggaaat

SEQ ID NO: 96080 - RNA, 21 nt, synthetic construct
  source 1..21: mol_type = other RNA
taacaagaaagggtagctttg

SEQ ID NO: 96081 - RNA, 21 nt, synthetic construct
  source 1..21: mol_type = other RNA
taacaagaagctgttttggta

SEQ ID NO: 96082 - RNA, 21 nt, synthetic construct
  source 1..21: mol_type = other RNA
taacaagaatcctgctatttt

SEQ ID NO: 96083 - RNA, 21 nt, synthetic construct
  source 1..21: mol_type = other RNA
taacaattggtgaatctgagt

SEQ ID NO: 96084 - RNA, 21 nt, synthetic construct
  source 1..21: mol_type = other RNA
taacacacaacaatgaattct

SEQ ID NO: 96085 - RNA, 21 nt, synthetic construct
  source 1..21: mol_type = other RNA
taacacagttctagttctaat

SEQ ID NO: 96086 - RNA, 21 nt, synthetic construct
  source 1..21: mol_type = other RNA
taacaccagtaagattctgtc

SEQ ID NO: 96087 - RNA, 21 nt, synthetic construct
  source 1..21: mol_type = other RNA
taacaccatagctgaaggcac

SEQ ID NO: 96088 - RNA, 21 nt, synthetic construct
  source 1..21: mol_type = other RNA
taacaccatggcaggtttcaa

SEQ ID NO: 96089 - RNA, 21 nt, synthetic construct
  source 1..21: mol_type = other RNA
taacaccttgaactgggactt

SEQ ID NO: 96090 - RNA, 21 nt, synthetic construct
  source 1..21: mol_type = other RNA
taacacctttgtattcatcca

SEQ ID NO: 96091 - RNA, 21 nt, synthetic construct
  source 1..21: mol_type = other RNA
taacacgcagaaccactgagc

SEQ ID NO: 96092 - RNA, 21 nt, synthetic construct
  source 1..21: mol_type = other RNA
taacactaatccttctcatag

SEQ ID NO: 96093 - RNA, 21 nt, synthetic construct
  source 1..21: mol_type = other RNA
taacactcagaagtactactc

SEQ ID NO: 96094 - RNA, 21 nt, synthetic construct
  source 1..21: mol_type = other RNA
taacagaagggtatatacaat

SEQ ID NO: 96095 - RNA, 21 nt, synthetic construct
  source 1..21: mol_type = other RNA
taacagacctctgaagagtct

SEQ ID NO: 96096 - RNA, 21 nt, synthetic construct
  source 1..21: mol_type = other RNA
taacagaggcatgcacggact

SEQ ID NO: 96097 - RNA, 21 nt, synthetic construct
  source 1..21: mol_type = other RNA
taacagatggaactctatttt

SEQ ID NO: 96098 - RNA, 21 nt, synthetic construct
  source 1..21: mol_type = other RNA
taacagatggtccttttttac

SEQ ID NO: 96099 - RNA, 21 nt, synthetic construct
  source 1..21: mol_type = other RNA
taacagccaaagaaattggac

SEQ ID NO: 96100 - RNA, 21 nt, synthetic construct
  source 1..21: mol_type = other RNA
taacagccaaataaaacacaa

SEQ ID NO: 96101 - RNA, 21 nt, synthetic construct
  source 1..21: mol_type = other RNA
taacagccggcatatgtcact

SEQ ID NO: 96102 - RNA, 21 nt, synthetic construct
  source 1..21: mol_type = other RNA
taacagcctaagcaaatgtaa

SEQ ID NO: 96103 - RNA, 21 nt, synthetic construct
  source 1..21: mol_type = other RNA
taacagctcagaagctatagc

SEQ ID NO: 96104 - RNA, 21 nt, synthetic construct
  source 1..21: mol_type = other RNA
taacagggtctacaaaaggtt

SEQ ID NO: 96105 - RNA, 21 nt, synthetic construct
  source 1..21: mol_type = other RNA
taacagtattgtcttctaacc

SEQ ID NO: 96106 - RNA, 21 nt, synthetic construct
  source 1..21: mol_type = other RNA
taacagtctcgtgaatttggt

SEQ ID NO: 96107 - RNA, 21 nt, synthetic construct
  source 1..21: mol_type = other RNA
taacagtgctgtgccagtgca

SEQ ID NO: 96108 - RNA, 21 nt, synthetic construct
  source 1..21: mol_type = other RNA
taacagtggttaggaaaatac

SEQ ID NO: 96109 - RNA, 21 nt, synthetic construct
  source 1..21: mol_type = other RNA
taacagttcaatactactgca

SEQ ID NO: 96110 - RNA, 21 nt, synthetic construct
  source 1..21: mol_type = other RNA
taacataaaagcgtactgtga

SEQ ID NO: 96111 - RNA, 21 nt, synthetic construct
  source 1..21: mol_type = other RNA
taacatacacatcagattttg

SEQ ID NO: 96112 - RNA, 21 nt, synthetic construct
  source 1..21: mol_type = other RNA
taacataccgacggctcaggc

SEQ ID NO: 96113 - RNA, 21 nt, synthetic construct
  source 1..21: mol_type = other RNA
taacatgaactactcaaagaa

SEQ ID NO: 96114 - RNA, 21 nt, synthetic construct
  source 1..21: mol_type = other RNA
taacatgcatatgtttgtaac

SEQ ID NO: 96115 - RNA, 21 nt, synthetic construct
  source 1..21: mol_type = other RNA
taacatgtcttggtgtgctct

SEQ ID NO: 96116 - RNA, 21 nt, synthetic construct
  source 1..21: mol_type = other RNA
taacatgtggaacataatctt

SEQ ID NO: 96117 - RNA, 21 nt, synthetic construct
  source 1..21: mol_type = other RNA
taacatgttagattaggaaac

SEQ ID NO: 96118 - RNA, 21 nt, synthetic construct
  source 1..21: mol_type = other RNA
taacattacaacagcaaggct

SEQ ID NO: 96119 - RNA, 21 nt, synthetic construct
  source 1..21: mol_type = other RNA
taacattaccaataaaagcct

SEQ ID NO: 96120 - RNA, 21 nt, synthetic construct
  source 1..21: mol_type = other RNA
taacattgatacaatacttgg

SEQ ID NO: 96121 - RNA, 21 nt, synthetic construct
  source 1..21: mol_type = other RNA
taacatttcttctagtcacat

SEQ ID NO: 96122 - RNA, 21 nt, synthetic construct
  source 1..21: mol_type = other RNA
taacatttgaactcactggcc

SEQ ID NO: 96123 - RNA, 21 nt, synthetic construct
  source 1..21: mol_type = other RNA
taaccaacattgagtttcaat

SEQ ID NO: 96124 - RNA, 21 nt, synthetic construct
  source 1..21: mol_type = other RNA
taaccaagaacaaccttatct

SEQ ID NO: 96125 - RNA, 21 nt, synthetic construct
  source 1..21: mol_type = other RNA
taaccaatgtcagagatctga

SEQ ID NO: 96126 - RNA, 21 nt, synthetic construct
  source 1..21: mol_type = other RNA
taaccaattatgctgagtgaa

SEQ ID NO: 96127 - RNA, 21 nt, synthetic construct
  source 1..21: mol_type = other RNA
taaccacatgtggcttgtggc

SEQ ID NO: 96128 - RNA, 21 nt, synthetic construct
  source 1..21: mol_type = other RNA
taaccacgagtaatggatgtt

SEQ ID NO: 96129 - RNA, 21 nt, synthetic construct
  source 1..21: mol_type = other RNA
taaccactgaaacttttcttt

SEQ ID NO: 96130 - RNA, 21 nt, synthetic construct
  source 1..21: mol_type = other RNA
taaccactgttatctgggaac

SEQ ID NO: 96131 - RNA, 21 nt, synthetic construct
  source 1..21: mol_type = other RNA
taaccaggcccggggcagaga

SEQ ID NO: 96132 - RNA, 21 nt, synthetic construct
  source 1..21: mol_type = other RNA
taaccatatggtttacaatgg

SEQ ID NO: 96133 - RNA, 21 nt, synthetic construct
  source 1..21: mol_type = other RNA
taaccattaacagctcagaag

SEQ ID NO: 96134 - RNA, 21 nt, synthetic construct
  source 1..21: mol_type = other RNA
taaccattgagccaaagaaga

SEQ ID NO: 96135 - RNA, 21 nt, synthetic construct
  source 1..21: mol_type = other RNA
taacccacagataatttcttc

SEQ ID NO: 96136 - RNA, 21 nt, synthetic construct
  source 1..21: mol_type = other RNA
taacccatatctttgcttata

SEQ ID NO: 96137 - RNA, 21 nt, synthetic construct
  source 1..21: mol_type = other RNA
taaccccagagattgtcgttg

SEQ ID NO: 96138 - RNA, 21 nt, synthetic construct
  source 1..21: mol_type = other RNA
taacccgttttttccttcatt

SEQ ID NO: 96139 - RNA, 21 nt, synthetic construct
  source 1..21: mol_type = other RNA
taaccctcaaatgccatagag

SEQ ID NO: 96140 - RNA, 21 nt, synthetic construct
  source 1..21: mol_type = other RNA
taaccctcaatccccatctgg

SEQ ID NO: 96141 - RNA, 21 nt, synthetic construct
  source 1..21: mol_type = other RNA
taaccctcctcctctacaagt

SEQ ID NO: 96142 - RNA, 21 nt, synthetic construct
  source 1..21: mol_type = other RNA
taaccctgtttcccttaatgt

SEQ ID NO: 96143 - RNA, 21 nt, synthetic construct
  source 1..21: mol_type = other RNA
taaccctgttttgtagattaa

SEQ ID NO: 96144 - RNA, 21 nt, synthetic construct
  source 1..21: mol_type = other RNA
taacctaaagttgaggttgaa

SEQ ID NO: 96145 - RNA, 21 nt, synthetic construct
  source 1..21: mol_type = other RNA
taacctcaaagtggaaacaac

SEQ ID NO: 96146 - RNA, 21 nt, synthetic construct
  source 1..21: mol_type = other RNA
taacctcataagaactcctgg

SEQ ID NO: 96147 - RNA, 21 nt, synthetic construct
  source 1..21: mol_type = other RNA
taacctccacctcccagattc

SEQ ID NO: 96148 - RNA, 21 nt, synthetic construct
  source 1..21: mol_type = other RNA
taacctctggtattttaagat

SEQ ID NO: 96149 - RNA, 21 nt, synthetic construct
  source 1..21: mol_type = other RNA
taacctcttgaagtcagttac

SEQ ID NO: 96150 - RNA, 21 nt, synthetic construct
  source 1..21: mol_type = other RNA
taaccttctggggttcaaacc

SEQ ID NO: 96151 - RNA, 21 nt, synthetic construct
  source 1..21: mol_type = other RNA
taacgaattctttaaaactgc

SEQ ID NO: 96152 - RNA, 21 nt, synthetic construct
  source 1..21: mol_type = other RNA
taacgatagtctcctatattg

SEQ ID NO: 96153 - RNA, 21 nt, synthetic construct
  source 1..21: mol_type = other RNA
taacgatccttactaccacca

SEQ ID NO: 96154 - RNA, 21 nt, synthetic construct
  source 1..21: mol_type = other RNA
taacgtatctgggaaaaaata

SEQ ID NO: 96155 - RNA, 21 nt, synthetic construct
  source 1..21: mol_type = other RNA
taacgtgagctggaagtaagg

SEQ ID NO: 96156 - RNA, 21 nt, synthetic construct
  source 1..21: mol_type = other RNA
taacgtgcttgctctgcggca

SEQ ID NO: 96157 - RNA, 21 nt, synthetic construct
  source 1..21: mol_type = other RNA
taacgtttatctacagaggat

SEQ ID NO: 96158 - RNA, 21 nt, synthetic construct
  source 1..21: mol_type = other RNA
taactaaactttgagtagcac

SEQ ID NO: 96159 - RNA, 21 nt, synthetic construct
  source 1..21: mol_type = other RNA
taactaatagccagtgcagca

SEQ ID NO: 96160 - RNA, 21 nt, synthetic construct
  source 1..21: mol_type = other RNA
taactacacatcagtgctgct

SEQ ID NO: 96161 - RNA, 21 nt, synthetic construct
  source 1..21: mol_type = other RNA
taactacagacatgccacacc

SEQ ID NO: 96162 - RNA, 21 nt, synthetic construct
  source 1..21: mol_type = other RNA
taactaccactgaggtcaaga

SEQ ID NO: 96163 - RNA, 21 nt, synthetic construct
  source 1..21: mol_type = other RNA
taactagaaaaccgacagcag

SEQ ID NO: 96164 - RNA, 21 nt, synthetic construct
  source 1..21: mol_type = other RNA
taactagaaacttcttctgtt

SEQ ID NO: 96165 - RNA, 21 nt, synthetic construct
  source 1..21: mol_type = other RNA
taactagaattgactttaccc

SEQ ID NO: 96166 - RNA, 21 nt, synthetic construct
  source 1..21: mol_type = other RNA
taactagatgcctcgaaggcc

SEQ ID NO: 96167 - RNA, 21 nt, synthetic construct
  source 1..21: mol_type = other RNA
taactataggagttcattcgt

SEQ ID NO: 96168 - RNA, 21 nt, synthetic construct
  source 1..21: mol_type = other RNA
taactatcctatgtggggaat

SEQ ID NO: 96169 - RNA, 21 nt, synthetic construct
  source 1..21: mol_type = other RNA
taactatggacatgaggaaag

SEQ ID NO: 96170 - RNA, 21 nt, synthetic construct
  source 1..21: mol_type = other RNA
taactcaagagttacttctgg

SEQ ID NO: 96171 - RNA, 21 nt, synthetic construct
  source 1..21: mol_type = other RNA
taactcatttaaacgtcagag

SEQ ID NO: 96172 - RNA, 21 nt, synthetic construct
  source 1..21: mol_type = other RNA
taactccagcttttattagag

SEQ ID NO: 96173 - RNA, 21 nt, synthetic construct
  source 1..21: mol_type = other RNA
taactccaggggacatgctct

SEQ ID NO: 96174 - RNA, 21 nt, synthetic construct
  source 1..21: mol_type = other RNA
taactccatcttcacgtggcg

SEQ ID NO: 96175 - RNA, 21 nt, synthetic construct
  source 1..21: mol_type = other RNA
taactcctgttctttggagct

SEQ ID NO: 96176 - RNA, 21 nt, synthetic construct
  source 1..21: mol_type = other RNA
taactcgtaatgcgatgatca

SEQ ID NO: 96177 - RNA, 21 nt, synthetic construct
  source 1..21: mol_type = other RNA
taactcttgagttaggaattt

SEQ ID NO: 96178 - RNA, 21 nt, synthetic construct
  source 1..21: mol_type = other RNA
taactcttgcattagagcccc

SEQ ID NO: 96179 - RNA, 21 nt, synthetic construct
  source 1..21: mol_type = other RNA
taactgaaatcgggagtaaca

SEQ ID NO: 96180 - RNA, 21 nt, synthetic construct
  source 1..21: mol_type = other RNA
taactgaacatgtatgtttct

SEQ ID NO: 96181 - RNA, 21 nt, synthetic construct
  source 1..21: mol_type = other RNA
taactgacttacagaccttat

SEQ ID NO: 96182 - RNA, 21 nt, synthetic construct
  source 1..21: mol_type = other RNA
taactgacttcaagaggttaa

SEQ ID NO: 96183 - RNA, 21 nt, synthetic construct
  source 1..21: mol_type = other RNA
taactgaggtgtttttcagcc

SEQ ID NO: 96184 - RNA, 21 nt, synthetic construct
  source 1..21: mol_type = other RNA
taactgatatgagggatgagg

SEQ ID NO: 96185 - RNA, 21 nt, synthetic construct
  source 1..21: mol_type = other RNA
taactgatgtgaggatctgtt

SEQ ID NO: 96186 - RNA, 21 nt, synthetic construct
  source 1..21: mol_type = other RNA
taactgcagaggtcaggaagg

SEQ ID NO: 96187 - RNA, 21 nt, synthetic construct
  source 1..21: mol_type = other RNA
taactgcctaagtaatgctgg

SEQ ID NO: 96188 - RNA, 21 nt, synthetic construct
  source 1..21: mol_type = other RNA
taactgctcctctgactttat

SEQ ID NO: 96189 - RNA, 21 nt, synthetic construct
  source 1..21: mol_type = other RNA
taactgggtgtgcacgtttgc

SEQ ID NO: 96190 - RNA, 21 nt, synthetic construct
  source 1..21: mol_type = other RNA
taactggtccagatgaagcag

SEQ ID NO: 96191 - RNA, 21 nt, synthetic construct
  source 1..21: mol_type = other RNA
taactggtctcctttctatac

SEQ ID NO: 96192 - RNA, 21 nt, synthetic construct
  source 1..21: mol_type = other RNA
taactggtgcttttttggtgt

SEQ ID NO: 96193 - RNA, 21 nt, synthetic construct
  source 1..21: mol_type = other RNA
taactgtaaagtaatcaagtg

SEQ ID NO: 96194 - RNA, 21 nt, synthetic construct
  source 1..21: mol_type = other RNA
taactgtattgcaaactaagt

SEQ ID NO: 96195 - RNA, 21 nt, synthetic construct
  source 1..21: mol_type = other RNA
taactgtcatcagcgtcctca

SEQ ID NO: 96196 - RNA, 21 nt, synthetic construct
  source 1..21: mol_type = other RNA
taactgtcctgaattctaaca

SEQ ID NO: 96197 - RNA, 21 nt, synthetic construct
  source 1..21: mol_type = other RNA
taacttattggaaaactctgt

SEQ ID NO: 96198 - RNA, 21 nt, synthetic construct
  source 1..21: mol_type = other RNA
taacttcacctctacacaaaa

SEQ ID NO: 96199 - RNA, 21 nt, synthetic construct
  source 1..21: mol_type = other RNA
taacttccatgagattacata

SEQ ID NO: 96200 - RNA, 21 nt, synthetic construct
  source 1..21: mol_type = other RNA
taacttcccagacagggaatg

SEQ ID NO: 96201 - RNA, 21 nt, synthetic construct
  source 1..21: mol_type = other RNA
taacttctaatgcccattaaa

SEQ ID NO: 96202 - RNA, 21 nt, synthetic construct
  source 1..21: mol_type = other RNA
taacttgaattcagatggccc

SEQ ID NO: 96203 - RNA, 21 nt, synthetic construct
  source 1..21: mol_type = other RNA
taacttgcttaggctgaagca

SEQ ID NO: 96204 - RNA, 21 nt, synthetic construct
  source 1..21: mol_type = other RNA
taacttgctttgaatttggaa

SEQ ID NO: 96205 - RNA, 21 nt, synthetic construct
  source 1..21: mol_type = other RNA
taacttggagaacttaaaggt

SEQ ID NO: 96206 - RNA, 21 nt, synthetic construct
  source 1..21: mol_type = other RNA
taacttggtcgaaaacctgaa

SEQ ID NO: 96207 - RNA, 21 nt, synthetic construct
  source 1..21: mol_type = other RNA
taacttgttcatgtttacaga

SEQ ID NO: 96208 - RNA, 21 nt, synthetic construct
  source 1..21: mol_type = other RNA
taactttaaagctctatggca

SEQ ID NO: 96209 - RNA, 21 nt, synthetic construct
  source 1..21: mol_type = other RNA
taactttaatcaccaggcgcg

SEQ ID NO: 96210 - RNA, 21 nt, synthetic construct
  source 1..21: mol_type = other RNA
taactttctattcccctggat

SEQ ID NO: 96211 - RNA, 21 nt, synthetic construct
  source 1..21: mol_type = other RNA
taactttctgcttaaagcctc

SEQ ID NO: 96212 - RNA, 21 nt, synthetic construct
  source 1..21: mol_type = other RNA
taactttgaaatcagaacttg

SEQ ID NO: 96213 - RNA, 21 nt, synthetic construct
  source 1..21: mol_type = other RNA
taactttgatgaattccagtt

SEQ ID NO: 96214 - RNA, 21 nt, synthetic construct
  source 1..21: mol_type = other RNA
taacttttaacccacagataa

SEQ ID NO: 96215 - RNA, 21 nt, synthetic construct
  source 1..21: mol_type = other RNA
taagaaaaacagaagacacaa

SEQ ID NO: 96216 - RNA, 21 nt, synthetic construct
  source 1..21: mol_type = other RNA
taagaaaaattccctcagcaa

SEQ ID NO: 96217 - RNA, 21 nt, synthetic construct
  source 1..21: mol_type = other RNA
taagaaaacagataacctaga

SEQ ID NO: 96218 - RNA, 21 nt, synthetic construct
  source 1..21: mol_type = other RNA
taagaaaagaagttacggttc

SEQ ID NO: 96219 - RNA, 21 nt, synthetic construct
  source 1..21: mol_type = other RNA
taagaaaatcattgttcaggg

SEQ ID NO: 96220 - RNA, 21 nt, synthetic construct
  source 1..21: mol_type = other RNA
taagaaaatgtgacattagtg

SEQ ID NO: 96221 - RNA, 21 nt, synthetic construct
  source 1..21: mol_type = other RNA
taagaaagatctcaaacagcc

SEQ ID NO: 96222 - RNA, 21 nt, synthetic construct
  source 1..21: mol_type = other RNA
taagaaaggagttcagcttta

SEQ ID NO: 96223 - RNA, 21 nt, synthetic construct
  source 1..21: mol_type = other RNA
taagaaagggtgtgtgaatgg

SEQ ID NO: 96224 - RNA, 21 nt, synthetic construct
  source 1..21: mol_type = other RNA
taagaaaggtctagtgtgcat

SEQ ID NO: 96225 - RNA, 21 nt, synthetic construct
  source 1..21: mol_type = other RNA
taagaacacttaacatgagat

SEQ ID NO: 96226 - RNA, 21 nt, synthetic construct
  source 1..21: mol_type = other RNA
taagaaccatacagtgccttc

SEQ ID NO: 96227 - RNA, 21 nt, synthetic construct
  source 1..21: mol_type = other RNA
taagaactcctggtctcccag

SEQ ID NO: 96228 - RNA, 21 nt, synthetic construct
  source 1..21: mol_type = other RNA
taagaacttcttcaaaagaca

SEQ ID NO: 96229 - RNA, 21 nt, synthetic construct
  source 1..21: mol_type = other RNA
taagaacttgtctttgtctat

SEQ ID NO: 96230 - RNA, 21 nt, synthetic construct
  source 1..21: mol_type = other RNA
taagaagatggttggaagttt

SEQ ID NO: 96231 - RNA, 21 nt, synthetic construct
  source 1..21: mol_type = other RNA
taagaagattgagtcagtaat

SEQ ID NO: 96232 - RNA, 21 nt, synthetic construct
  source 1..21: mol_type = other RNA
taagaaggaaaagaacacagt

SEQ ID NO: 96233 - RNA, 21 nt, synthetic construct
  source 1..21: mol_type = other RNA
taagaagggaacactaagaag

SEQ ID NO: 96234 - RNA, 21 nt, synthetic construct
  source 1..21: mol_type = other RNA
taagaaggtttgtagagcaag

SEQ ID NO: 96235 - RNA, 21 nt, synthetic construct
  source 1..21: mol_type = other RNA
taagaagtgaaaaatgaccta

SEQ ID NO: 96236 - RNA, 21 nt, synthetic construct
  source 1..21: mol_type = other RNA
taagaagtgaaactgctggat

SEQ ID NO: 96237 - RNA, 21 nt, synthetic construct
  source 1..21: mol_type = other RNA
taagaataccaaattcacgag

SEQ ID NO: 96238 - RNA, 21 nt, synthetic construct
  source 1..21: mol_type = other RNA
taagaatgtcaagctgtttga

SEQ ID NO: 96239 - RNA, 21 nt, synthetic construct
  source 1..21: mol_type = other RNA
taagacaatgtctttggctct

SEQ ID NO: 96240 - RNA, 21 nt, synthetic construct
  source 1..21: mol_type = other RNA
taagacaatgtggagttggtg

SEQ ID NO: 96241 - RNA, 21 nt, synthetic construct
  source 1..21: mol_type = other RNA
taagacacaaggaaggtcaaa

SEQ ID NO: 96242 - RNA, 21 nt, synthetic construct
  source 1..21: mol_type = other RNA
taagacaccgctccacgccca

SEQ ID NO: 96243 - RNA, 21 nt, synthetic construct
  source 1..21: mol_type = other RNA
taagacactagctattgtctt

SEQ ID NO: 96244 - RNA, 21 nt, synthetic construct
  source 1..21: mol_type = other RNA
taagacatttgggaatgtggt

SEQ ID NO: 96245 - RNA, 21 nt, synthetic construct
  source 1..21: mol_type = other RNA
taagaccaaaatggagaccca

SEQ ID NO: 96246 - RNA, 21 nt, synthetic construct
  source 1..21: mol_type = other RNA
taagaccacaaggattaatct

SEQ ID NO: 96247 - RNA, 21 nt, synthetic construct
  source 1..21: mol_type = other RNA
taagacccagtggctagtgtg

SEQ ID NO: 96248 - RNA, 21 nt, synthetic construct
  source 1..21: mol_type = other RNA
taagaccccagtagaaatctt

SEQ ID NO: 96249 - RNA, 21 nt, synthetic construct
  source 1..21: mol_type = other RNA
taagacccctcaggtgtcact

SEQ ID NO: 96250 - RNA, 21 nt, synthetic construct
  source 1..21: mol_type = other RNA
taagactataaaactcttagc

SEQ ID NO: 96251 - RNA, 21 nt, synthetic construct
  source 1..21: mol_type = other RNA
taagactgctgtttaccaagg

SEQ ID NO: 96252 - RNA, 21 nt, synthetic construct
  source 1..21: mol_type = other RNA
taagagaaggaagcaccaacc

SEQ ID NO: 96253 - RNA, 21 nt, synthetic construct
  source 1..21: mol_type = other RNA
taagagaatggaaacttgcca

SEQ ID NO: 96254 - RNA, 21 nt, synthetic construct
  source 1..21: mol_type = other RNA
taagagactctcaagaaggta

SEQ ID NO: 96255 - RNA, 21 nt, synthetic construct
  source 1..21: mol_type = other RNA
taagagaggaagtgaccctga

SEQ ID NO: 96256 - RNA, 21 nt, synthetic construct
  source 1..21: mol_type = other RNA
taagagattaattcagtcaac

SEQ ID NO: 96257 - RNA, 21 nt, synthetic construct
  source 1..21: mol_type = other RNA
taagagcatgttgggccaact

SEQ ID NO: 96258 - RNA, 21 nt, synthetic construct
  source 1..21: mol_type = other RNA
taagagccaaagacattgtct

SEQ ID NO: 96259 - RNA, 21 nt, synthetic construct
  source 1..21: mol_type = other RNA
taagaggtatcaccatctgat

SEQ ID NO: 96260 - RNA, 21 nt, synthetic construct
  source 1..21: mol_type = other RNA
taagagtatctttttcagcag

SEQ ID NO: 96261 - RNA, 21 nt, synthetic construct
  source 1..21: mol_type = other RNA
taagagtccccaactgcaaaa

SEQ ID NO: 96262 - RNA, 21 nt, synthetic construct
  source 1..21: mol_type = other RNA
taagagtctcatctgtcaaaa

SEQ ID NO: 96263 - RNA, 21 nt, synthetic construct
  source 1..21: mol_type = other RNA
taagagtgaaaaggcaaacca

SEQ ID NO: 96264 - RNA, 21 nt, synthetic construct
  source 1..21: mol_type = other RNA
taagagtgaagaaacctttct

SEQ ID NO: 96265 - RNA, 21 nt, synthetic construct
  source 1..21: mol_type = other RNA
taagagtgggcaaaaaagtca

SEQ ID NO: 96266 - RNA, 21 nt, synthetic construct
  source 1..21: mol_type = other RNA
taagagtgtgctgactagtac

SEQ ID NO: 96267 - RNA, 21 nt, synthetic construct
  source 1..21: mol_type = other RNA
taagagttttatagtcttagc

SEQ ID NO: 96268 - RNA, 21 nt, synthetic construct
  source 1..21: mol_type = other RNA
taagataatgctgttctctgt

SEQ ID NO: 96269 - RNA, 21 nt, synthetic construct
  source 1..21: mol_type = other RNA
taagatcatacacctggatca

SEQ ID NO: 96270 - RNA, 21 nt, synthetic construct
  source 1..21: mol_type = other RNA
taagatccaagtattgtatca

SEQ ID NO: 96271 - RNA, 21 nt, synthetic construct
  source 1..21: mol_type = other RNA
taagatcctggattgctagtg

SEQ ID NO: 96272 - RNA, 21 nt, synthetic construct
  source 1..21: mol_type = other RNA
taagatctgtctttggcccat

SEQ ID NO: 96273 - RNA, 21 nt, synthetic construct
  source 1..21: mol_type = other RNA
taagatgaggtctcagccttt

SEQ ID NO: 96274 - RNA, 21 nt, synthetic construct
  source 1..21: mol_type = other RNA
taagatgatctaaatggtgtg

SEQ ID NO: 96275 - RNA, 21 nt, synthetic construct
  source 1..21: mol_type = other RNA
taagatgctattcaagacaag

SEQ ID NO: 96276 - RNA, 21 nt, synthetic construct
  source 1..21: mol_type = other RNA
taagatggaaagtggactatg

SEQ ID NO: 96277 - RNA, 21 nt, synthetic construct
  source 1..21: mol_type = other RNA
taagatggatttttctgtttc

SEQ ID NO: 96278 - RNA, 21 nt, synthetic construct
  source 1..21: mol_type = other RNA
taagattcaacaaaactgggg

SEQ ID NO: 96279 - RNA, 21 nt, synthetic construct
  source 1..21: mol_type = other RNA
taagattccgtctcaaaaaat

SEQ ID NO: 96280 - RNA, 21 nt, synthetic construct
  source 1..21: mol_type = other RNA
taagattctctttagggaaga

SEQ ID NO: 96281 - RNA, 21 nt, synthetic construct
  source 1..21: mol_type = other RNA
taagattctgtctctacaaaa

SEQ ID NO: 96282 - RNA, 21 nt, synthetic construct
  source 1..21: mol_type = other RNA
taagattgtggtccagaaaaa

SEQ ID NO: 96283 - RNA, 21 nt, synthetic construct
  source 1..21: mol_type = other RNA
taagcaaaatggaagtgctgg

SEQ ID NO: 96284 - RNA, 21 nt, synthetic construct
  source 1..21: mol_type = other RNA
taagcaaaattgacaaaccct

SEQ ID NO: 96285 - RNA, 21 nt, synthetic construct
  source 1..21: mol_type = other RNA
taagcaaagatatgggttatt

SEQ ID NO: 96286 - RNA, 21 nt, synthetic construct
  source 1..21: mol_type = other RNA
taagcaaccttttaggtgccc

SEQ ID NO: 96287 - RNA, 21 nt, synthetic construct
  source 1..21: mol_type = other RNA
taagcaactgcatcttctttt

SEQ ID NO: 96288 - RNA, 21 nt, synthetic construct
  source 1..21: mol_type = other RNA
taagcaagttacatgcttagc

SEQ ID NO: 96289 - RNA, 21 nt, synthetic construct
  source 1..21: mol_type = other RNA
taagcacacatgaacctgcat

SEQ ID NO: 96290 - RNA, 21 nt, synthetic construct
  source 1..21: mol_type = other RNA
taagcacagaattactatatg

SEQ ID NO: 96291 - RNA, 21 nt, synthetic construct
  source 1..21: mol_type = other RNA
taagcacagactgtgccttga

SEQ ID NO: 96292 - RNA, 21 nt, synthetic construct
  source 1..21: mol_type = other RNA
taagcacatctgtcttgtgca

SEQ ID NO: 96293 - RNA, 21 nt, synthetic construct
  source 1..21: mol_type = other RNA
taagcacatggtgataactgg

SEQ ID NO: 96294 - RNA, 21 nt, synthetic construct
  source 1..21: mol_type = other RNA
taagcaccaacagatcctcac

SEQ ID NO: 96295 - RNA, 21 nt, synthetic construct
  source 1..21: mol_type = other RNA
taagcaccactagagtattac

SEQ ID NO: 96296 - RNA, 21 nt, synthetic construct
  source 1..21: mol_type = other RNA
taagcactgcgccaagcaggg

SEQ ID NO: 96297 - RNA, 21 nt, synthetic construct
  source 1..21: mol_type = other RNA
taagcagaaatgacaagtaaa

SEQ ID NO: 96298 - RNA, 21 nt, synthetic construct
  source 1..21: mol_type = other RNA
taagcagaattcaaaaacact

SEQ ID NO: 96299 - RNA, 21 nt, synthetic construct
  source 1..21: mol_type = other RNA
taagcatagtttgagtatttc

SEQ ID NO: 96300 - RNA, 21 nt, synthetic construct
  source 1..21: mol_type = other RNA
taagcatcccatatggaggca

SEQ ID NO: 96301 - RNA, 21 nt, synthetic construct
  source 1..21: mol_type = other RNA
taagcatcgtgaagtctttat

SEQ ID NO: 96302 - RNA, 21 nt, synthetic construct
  source 1..21: mol_type = other RNA
taagcatgagatactacgcct

SEQ ID NO: 96303 - RNA, 21 nt, synthetic construct
  source 1..21: mol_type = other RNA
taagcatgtaacttgcttagg

SEQ ID NO: 96304 - RNA, 21 nt, synthetic construct
  source 1..21: mol_type = other RNA
taagcattttccggttgtata

SEQ ID NO: 96305 - RNA, 21 nt, synthetic construct
  source 1..21: mol_type = other RNA
taagccaatatccctgataat

SEQ ID NO: 96306 - RNA, 21 nt, synthetic construct
  source 1..21: mol_type = other RNA
taagccaccgcactcagcctg

SEQ ID NO: 96307 - RNA, 21 nt, synthetic construct
  source 1..21: mol_type = other RNA
taagccagtcactaaaaatca

SEQ ID NO: 96308 - RNA, 21 nt, synthetic construct
  source 1..21: mol_type = other RNA
taagccatctaattcacattt

SEQ ID NO: 96309 - RNA, 21 nt, synthetic construct
  source 1..21: mol_type = other RNA
taagccatgtttctcctgcat

SEQ ID NO: 96310 - RNA, 21 nt, synthetic construct
  source 1..21: mol_type = other RNA
taagccatttcaggttttcga

SEQ ID NO: 96311 - RNA, 21 nt, synthetic construct
  source 1..21: mol_type = other RNA
taagcccaacctgattagagg

SEQ ID NO: 96312 - RNA, 21 nt, synthetic construct
  source 1..21: mol_type = other RNA
taagcccaacttcacaccatt

SEQ ID NO: 96313 - RNA, 21 nt, synthetic construct
  source 1..21: mol_type = other RNA
taagccgttccatcagagagg

SEQ ID NO: 96314 - RNA, 21 nt, synthetic construct
  source 1..21: mol_type = other RNA
taagcctacctcccttcacaa

SEQ ID NO: 96315 - RNA, 21 nt, synthetic construct
  source 1..21: mol_type = other RNA
taagcctactgctctgtcctg

SEQ ID NO: 96316 - RNA, 21 nt, synthetic construct
  source 1..21: mol_type = other RNA
taagcctagagattaggcaga

SEQ ID NO: 96317 - RNA, 21 nt, synthetic construct
  source 1..21: mol_type = other RNA
taagcctatgtaagacaatgt

SEQ ID NO: 96318 - RNA, 21 nt, synthetic construct
  source 1..21: mol_type = other RNA
taagctaagagttttatagtc

SEQ ID NO: 96319 - RNA, 21 nt, synthetic construct
  source 1..21: mol_type = other RNA
taagctaatcccaaagtgagc

SEQ ID NO: 96320 - RNA, 21 nt, synthetic construct
  source 1..21: mol_type = other RNA
taagctcccagccaaacagtt

SEQ ID NO: 96321 - RNA, 21 nt, synthetic construct
  source 1..21: mol_type = other RNA
taagctgaactctgtggagtc

SEQ ID NO: 96322 - RNA, 21 nt, synthetic construct
  source 1..21: mol_type = other RNA
taagctggtaatacagtctga

SEQ ID NO: 96323 - RNA, 21 nt, synthetic construct
  source 1..21: mol_type = other RNA
taagctgtgagtccttccagt

SEQ ID NO: 96324 - RNA, 21 nt, synthetic construct
  source 1..21: mol_type = other RNA
taagcttaagagctaagacta

SEQ ID NO: 96325 - RNA, 21 nt, synthetic construct
  source 1..21: mol_type = other RNA
taagcttaggtctttgatcca

SEQ ID NO: 96326 - RNA, 21 nt, synthetic construct
  source 1..21: mol_type = other RNA
taagcttcctctggctgacct

SEQ ID NO: 96327 - RNA, 21 nt, synthetic construct
  source 1..21: mol_type = other RNA
taagcttcgaagcaaaacata

SEQ ID NO: 96328 - RNA, 21 nt, synthetic construct
  source 1..21: mol_type = other RNA
taagcttcgacagtcccttgc

SEQ ID NO: 96329 - RNA, 21 nt, synthetic construct
  source 1..21: mol_type = other RNA
taagcttgggtaggaagctga

SEQ ID NO: 96330 - RNA, 21 nt, synthetic construct
  source 1..21: mol_type = other RNA
taaggaaacagagttttccaa

SEQ ID NO: 96331 - RNA, 21 nt, synthetic construct
  source 1..21: mol_type = other RNA
taaggaaaccccagggatatt

SEQ ID NO: 96332 - RNA, 21 nt, synthetic construct
  source 1..21: mol_type = other RNA
taaggaaagcacgtttgatct

SEQ ID NO: 96333 - RNA, 21 nt, synthetic construct
  source 1..21: mol_type = other RNA
taaggaaagctcaggaccaga

SEQ ID NO: 96334 - RNA, 21 nt, synthetic construct
  source 1..21: mol_type = other RNA
taaggaaatggacagcacatt

SEQ ID NO: 96335 - RNA, 21 nt, synthetic construct
  source 1..21: mol_type = other RNA
taaggaatgcctataaaatgc

SEQ ID NO: 96336 - RNA, 21 nt, synthetic construct
  source 1..21: mol_type = other RNA
taaggacatccacaacattgt

SEQ ID NO: 96337 - RNA, 21 nt, synthetic construct
  source 1..21: mol_type = other RNA
taaggaccaggtatggcgact

SEQ ID NO: 96338 - RNA, 21 nt, synthetic construct
  source 1..21: mol_type = other RNA
taaggactgaagtcctttctt

SEQ ID NO: 96339 - RNA, 21 nt, synthetic construct
  source 1..21: mol_type = other RNA
taaggagatggcacataccat

SEQ ID NO: 96340 - RNA, 21 nt, synthetic construct
  source 1..21: mol_type = other RNA
taaggagccaaacatcatgat

SEQ ID NO: 96341 - RNA, 21 nt, synthetic construct
  source 1..21: mol_type = other RNA
taaggatcgttagtattttca

SEQ ID NO: 96342 - RNA, 21 nt, synthetic construct
  source 1..21: mol_type = other RNA
taaggattatggctagaaact

SEQ ID NO: 96343 - RNA, 21 nt, synthetic construct
  source 1..21: mol_type = other RNA
taaggcagggcttggtggccc

SEQ ID NO: 96344 - RNA, 21 nt, synthetic construct
  source 1..21: mol_type = other RNA
taaggcgcagacacaccatga

SEQ ID NO: 96345 - RNA, 21 nt, synthetic construct
  source 1..21: mol_type = other RNA
taaggctaaaacatacatgag

SEQ ID NO: 96346 - RNA, 21 nt, synthetic construct
  source 1..21: mol_type = other RNA
taaggcttggaaaacaaattg

SEQ ID NO: 96347 - RNA, 21 nt, synthetic construct
  source 1..21: mol_type = other RNA
taagggaaacactcataccag

SEQ ID NO: 96348 - RNA, 21 nt, synthetic construct
  source 1..21: mol_type = other RNA
taagggaaacagggttacagt

SEQ ID NO: 96349 - RNA, 21 nt, synthetic construct
  source 1..21: mol_type = other RNA
taagggaagagctaagatgct

SEQ ID NO: 96350 - RNA, 21 nt, synthetic construct
  source 1..21: mol_type = other RNA
taagggcattttcaaggtaga

SEQ ID NO: 96351 - RNA, 21 nt, synthetic construct
  source 1..21: mol_type = other RNA
taagggccatttcatttctgt

SEQ ID NO: 96352 - RNA, 21 nt, synthetic construct
  source 1..21: mol_type = other RNA
taaggggaatcatgcagtact

SEQ ID NO: 96353 - RNA, 21 nt, synthetic construct
  source 1..21: mol_type = other RNA
taaggggcagggtggagtcca

SEQ ID NO: 96354 - RNA, 21 nt, synthetic construct
  source 1..21: mol_type = other RNA
taaggggctatctttactttc

SEQ ID NO: 96355 - RNA, 21 nt, synthetic construct
  source 1..21: mol_type = other RNA
taagggggaatctactctttt

SEQ ID NO: 96356 - RNA, 21 nt, synthetic construct
  source 1..21: mol_type = other RNA
taaggggtaaatggtttctcc

SEQ ID NO: 96357 - RNA, 21 nt, synthetic construct
  source 1..21: mol_type = other RNA
taagggtaaacagaattaaac

SEQ ID NO: 96358 - RNA, 21 nt, synthetic construct
  source 1..21: mol_type = other RNA
taagggtacagaactgctaat

SEQ ID NO: 96359 - RNA, 21 nt, synthetic construct
  source 1..21: mol_type = other RNA
taagggtccagcttcactctt

SEQ ID NO: 96360 - RNA, 21 nt, synthetic construct
  source 1..21: mol_type = other RNA
taagggtctgttttacatgtt

SEQ ID NO: 96361 - RNA, 21 nt, synthetic construct
  source 1..21: mol_type = other RNA
taagggtgataaaaaggaggg

SEQ ID NO: 96362 - RNA, 21 nt, synthetic construct
  source 1..21: mol_type = other RNA
taaggtaagggtccagcttca

SEQ ID NO: 96363 - RNA, 21 nt, synthetic construct
  source 1..21: mol_type = other RNA
taaggtcaacacatcagcgct

SEQ ID NO: 96364 - RNA, 21 nt, synthetic construct
  source 1..21: mol_type = other RNA
taaggtcaagagagattaaat

SEQ ID NO: 96365 - RNA, 21 nt, synthetic construct
  source 1..21: mol_type = other RNA
taaggtcacattcagaggtat

SEQ ID NO: 96366 - RNA, 21 nt, synthetic construct
  source 1..21: mol_type = other RNA
taaggtctgtaagtcagttaa

SEQ ID NO: 96367 - RNA, 21 nt, synthetic construct
  source 1..21: mol_type = other RNA
taaggtgcacgctgtgaatgt

SEQ ID NO: 96368 - RNA, 21 nt, synthetic construct
  source 1..21: mol_type = other RNA
taaggtggagtggtggataga

SEQ ID NO: 96369 - RNA, 21 nt, synthetic construct
  source 1..21: mol_type = other RNA
taaggtgtttggtgaatttta

SEQ ID NO: 96370 - RNA, 21 nt, synthetic construct
  source 1..21: mol_type = other RNA
taaggttctgctatgctgaaa

SEQ ID NO: 96371 - RNA, 21 nt, synthetic construct
  source 1..21: mol_type = other RNA
taaggttgttcttggttaata

SEQ ID NO: 96372 - RNA, 21 nt, synthetic construct
  source 1..21: mol_type = other RNA
taaggtttagaaaacatatcc

SEQ ID NO: 96373 - RNA, 21 nt, synthetic construct
  source 1..21: mol_type = other RNA
taaggtttccctggggaataa

SEQ ID NO: 96374 - RNA, 21 nt, synthetic construct
  source 1..21: mol_type = other RNA
taagtaaaatcggaacaggct

SEQ ID NO: 96375 - RNA, 21 nt, synthetic construct
  source 1..21: mol_type = other RNA
taagtaatgctggccagtgag

SEQ ID NO: 96376 - RNA, 21 nt, synthetic construct
  source 1..21: mol_type = other RNA
taagtagaaggtcaatctagg

SEQ ID NO: 96377 - RNA, 21 nt, synthetic construct
  source 1..21: mol_type = other RNA
taagtagtggcagccccgctt

SEQ ID NO: 96378 - RNA, 21 nt, synthetic construct
  source 1..21: mol_type = other RNA
taagtatctcggtcattctgg

SEQ ID NO: 96379 - RNA, 21 nt, synthetic construct
  source 1..21: mol_type = other RNA
taagtatgcagaaaccagttg

SEQ ID NO: 96380 - RNA, 21 nt, synthetic construct
  source 1..21: mol_type = other RNA
taagtcactccatttgtggca

SEQ ID NO: 96381 - RNA, 21 nt, synthetic construct
  source 1..21: mol_type = other RNA
taagtcagaattcactgtgac

SEQ ID NO: 96382 - RNA, 21 nt, synthetic construct
  source 1..21: mol_type = other RNA
taagtcagcctgggcacacgc

SEQ ID NO: 96383 - RNA, 21 nt, synthetic construct
  source 1..21: mol_type = other RNA
taagtcagttaacagtgctgt

SEQ ID NO: 96384 - RNA, 21 nt, synthetic construct
  source 1..21: mol_type = other RNA
taagtcatcaaaggaaggaat

SEQ ID NO: 96385 - RNA, 21 nt, synthetic construct
  source 1..21: mol_type = other RNA
taagtccctaacagtctcgtg

SEQ ID NO: 96386 - RNA, 21 nt, synthetic construct
  source 1..21: mol_type = other RNA
taagtctcaacctactttaaa

SEQ ID NO: 96387 - RNA, 21 nt, synthetic construct
  source 1..21: mol_type = other RNA
taagtctgaaagcttctgagc

SEQ ID NO: 96388 - RNA, 21 nt, synthetic construct
  source 1..21: mol_type = other RNA
taagtcttcttctaagctaag

SEQ ID NO: 96389 - RNA, 21 nt, synthetic construct
  source 1..21: mol_type = other RNA
taagtgagtttgacctgtaat

SEQ ID NO: 96390 - RNA, 21 nt, synthetic construct
  source 1..21: mol_type = other RNA
taagtgcacaatgcagtattg

SEQ ID NO: 96391 - RNA, 21 nt, synthetic construct
  source 1..21: mol_type = other RNA
taagtgcatttcggctctgtg

SEQ ID NO: 96392 - RNA, 21 nt, synthetic construct
  source 1..21: mol_type = other RNA
taagtggaatcattccgtata

SEQ ID NO: 96393 - RNA, 21 nt, synthetic construct
  source 1..21: mol_type = other RNA
taagtggcgctgtttgcctgc

SEQ ID NO: 96394 - RNA, 21 nt, synthetic construct
  source 1..21: mol_type = other RNA
taagtgggaggaggtcatact

SEQ ID NO: 96395 - RNA, 21 nt, synthetic construct
  source 1..21: mol_type = other RNA
taagtggtattctatcatcaa

SEQ ID NO: 96396 - RNA, 21 nt, synthetic construct
  source 1..21: mol_type = other RNA
taagtgtacaattcggtggca

SEQ ID NO: 96397 - RNA, 21 nt, synthetic construct
  source 1..21: mol_type = other RNA
taagtgtgaagattaagcaca

SEQ ID NO: 96398 - RNA, 21 nt, synthetic construct
  source 1..21: mol_type = other RNA
taagtgtgagcaaaaatacag

SEQ ID NO: 96399 - RNA, 21 nt, synthetic construct
  source 1..21: mol_type = other RNA
taagtgttcttaccacaaaaa

SEQ ID NO: 96400 - RNA, 21 nt, synthetic construct
  source 1..21: mol_type = other RNA
taagtgtttaggatataagag

SEQ ID NO: 96401 - RNA, 21 nt, synthetic construct
  source 1..21: mol_type = other RNA
taagtgtttgaaaagtgtttg

SEQ ID NO: 96402 - RNA, 21 nt, synthetic construct
  source 1..21: mol_type = other RNA
taagttaaaacttgtagagga

SEQ ID NO: 96403 - RNA, 21 nt, synthetic construct
  source 1..21: mol_type = other RNA
taagttaactgaaatcgggag

SEQ ID NO: 96404 - RNA, 21 nt, synthetic construct
  source 1..21: mol_type = other RNA
taagttactgattagaaggat

SEQ ID NO: 96405 - RNA, 21 nt, synthetic construct
  source 1..21: mol_type = other RNA
taagttcaaagaaactaccta

SEQ ID NO: 96406 - RNA, 21 nt, synthetic construct
  source 1..21: mol_type = other RNA
taagttcctggactgtgatga

SEQ ID NO: 96407 - RNA, 21 nt, synthetic construct
  source 1..21: mol_type = other RNA
taagttctccaagttattaca

SEQ ID NO: 96408 - RNA, 21 nt, synthetic construct
  source 1..21: mol_type = other RNA
taagttgagaaactatccaac

SEQ ID NO: 96409 - RNA, 21 nt, synthetic construct
  source 1..21: mol_type = other RNA
taagttgcatacgtcgtcccc

SEQ ID NO: 96410 - RNA, 21 nt, synthetic construct
  source 1..21: mol_type = other RNA
taagttggattcccaggtatt

SEQ ID NO: 96411 - RNA, 21 nt, synthetic construct
  source 1..21: mol_type = other RNA
taagttgggagtctatttctg

SEQ ID NO: 96412 - RNA, 21 nt, synthetic construct
  source 1..21: mol_type = other RNA
taagtttcatggacttcctat

SEQ ID NO: 96413 - RNA, 21 nt, synthetic construct
  source 1..21: mol_type = other RNA
taagtttgccaaagattcttg

SEQ ID NO: 96414 - RNA, 21 nt, synthetic construct
  source 1..21: mol_type = other RNA
taagttttgggggaagagagc

SEQ ID NO: 96415 - RNA, 21 nt, synthetic construct
  source 1..21: mol_type = other RNA
taataaaaacatatgcaggac

SEQ ID NO: 96416 - RNA, 21 nt, synthetic construct
  source 1..21: mol_type = other RNA
taataaaaagcctctctgatg

SEQ ID NO: 96417 - RNA, 21 nt, synthetic construct
  source 1..21: mol_type = other RNA
taataaacgcggaatgaagca

SEQ ID NO: 96418 - RNA, 21 nt, synthetic construct
  source 1..21: mol_type = other RNA
taataaagcaagtatgagcca

SEQ ID NO: 96419 - RNA, 21 nt, synthetic construct
  source 1..21: mol_type = other RNA
taataaaggcaatgctctctt

SEQ ID NO: 96420 - RNA, 21 nt, synthetic construct
  source 1..21: mol_type = other RNA
taataaatgcataaacgacag

SEQ ID NO: 96421 - RNA, 21 nt, synthetic construct
  source 1..21: mol_type = other RNA
taataacagcctaagcaaatg

SEQ ID NO: 96422 - RNA, 21 nt, synthetic construct
  source 1..21: mol_type = other RNA
taataaccctgttttgtagat

SEQ ID NO: 96423 - RNA, 21 nt, synthetic construct
  source 1..21: mol_type = other RNA
taataacctcaaagtggaaac

SEQ ID NO: 96424 - RNA, 21 nt, synthetic construct
  source 1..21: mol_type = other RNA
taataactacacatcagtgct

SEQ ID NO: 96425 - RNA, 21 nt, synthetic construct
  source 1..21: mol_type = other RNA
taataactgcctaagtaatgc

SEQ ID NO: 96426 - RNA, 21 nt, synthetic construct
  source 1..21: mol_type = other RNA
taataagatcatacacctgga

SEQ ID NO: 96427 - RNA, 21 nt, synthetic construct
  source 1..21: mol_type = other RNA
taataagcttcgaagcaaaac

SEQ ID NO: 96428 - RNA, 21 nt, synthetic construct
  source 1..21: mol_type = other RNA
taataagtgagtttgacctgt

SEQ ID NO: 96429 - RNA, 21 nt, synthetic construct
  source 1..21: mol_type = other RNA
taataatgaaagctcccaatg

SEQ ID NO: 96430 - RNA, 21 nt, synthetic construct
  source 1..21: mol_type = other RNA
taataattgcttttgctgagg

SEQ ID NO: 96431 - RNA, 21 nt, synthetic construct
  source 1..21: mol_type = other RNA
taatacaaatgatgaagggtt

SEQ ID NO: 96432 - RNA, 21 nt, synthetic construct
  source 1..21: mol_type = other RNA
taatacacttttcaggtattg

SEQ ID NO: 96433 - RNA, 21 nt, synthetic construct
  source 1..21: mol_type = other RNA
taatacagtaaagccccattg

SEQ ID NO: 96434 - RNA, 21 nt, synthetic construct
  source 1..21: mol_type = other RNA
taatacctaacagccggcata

SEQ ID NO: 96435 - RNA, 21 nt, synthetic construct
  source 1..21: mol_type = other RNA
taatactatgtatgtggctca

SEQ ID NO: 96436 - RNA, 21 nt, synthetic construct
  source 1..21: mol_type = other RNA
taatactctagtggtgcttaa

SEQ ID NO: 96437 - RNA, 21 nt, synthetic construct
  source 1..21: mol_type = other RNA
taatacttgtgtagcgggaaa

SEQ ID NO: 96438 - RNA, 21 nt, synthetic construct
  source 1..21: mol_type = other RNA
taatagaggtctgtctttcag

SEQ ID NO: 96439 - RNA, 21 nt, synthetic construct
  source 1..21: mol_type = other RNA
taatagataggtcatgtacat

SEQ ID NO: 96440 - RNA, 21 nt, synthetic construct
  source 1..21: mol_type = other RNA
taatagccagtgcagcaagca

SEQ ID NO: 96441 - RNA, 21 nt, synthetic construct
  source 1..21: mol_type = other RNA
taatagcccaacagggttttg

SEQ ID NO: 96442 - RNA, 21 nt, synthetic construct
  source 1..21: mol_type = other RNA
taatagcctcctaagttttgg

SEQ ID NO: 96443 - RNA, 21 nt, synthetic construct
  source 1..21: mol_type = other RNA
taatagctagtgatgttgagt

SEQ ID NO: 96444 - RNA, 21 nt, synthetic construct
  source 1..21: mol_type = other RNA
taatagctatcctaatgggcg

SEQ ID NO: 96445 - RNA, 21 nt, synthetic construct
  source 1..21: mol_type = other RNA
taataggaagtggctagacgg

SEQ ID NO: 96446 - RNA, 21 nt, synthetic construct
  source 1..21: mol_type = other RNA
taatagtaataaaggcaatgc

SEQ ID NO: 96447 - RNA, 21 nt, synthetic construct
  source 1..21: mol_type = other RNA
taatagtctcacgatactttt

SEQ ID NO: 96448 - RNA, 21 nt, synthetic construct
  source 1..21: mol_type = other RNA
taatagtgaccctttgaagta

SEQ ID NO: 96449 - RNA, 21 nt, synthetic construct
  source 1..21: mol_type = other RNA
taatagttcacctctccgggt

SEQ ID NO: 96450 - RNA, 21 nt, synthetic construct
  source 1..21: mol_type = other RNA
taatataaaaattccgctctg

SEQ ID NO: 96451 - RNA, 21 nt, synthetic construct
  source 1..21: mol_type = other RNA
taatatacttgtcaagttctg

SEQ ID NO: 96452 - RNA, 21 nt, synthetic construct
  source 1..21: mol_type = other RNA
taatatctggactgaaaagat

SEQ ID NO: 96453 - RNA, 21 nt, synthetic construct
  source 1..21: mol_type = other RNA
taatatctttggggagatacc

SEQ ID NO: 96454 - RNA, 21 nt, synthetic construct
  source 1..21: mol_type = other RNA
taatatgagttcctgcttccc

SEQ ID NO: 96455 - RNA, 21 nt, synthetic construct
  source 1..21: mol_type = other RNA
taatatgataccctcaaaaga

SEQ ID NO: 96456 - RNA, 21 nt, synthetic construct
  source 1..21: mol_type = other RNA
taatatgcctcatgcatccac

SEQ ID NO: 96457 - RNA, 21 nt, synthetic construct
  source 1..21: mol_type = other RNA
taatatgctgtagtgattcac

SEQ ID NO: 96458 - RNA, 21 nt, synthetic construct
  source 1..21: mol_type = other RNA
taatatgtgtacaatggggct

SEQ ID NO: 96459 - RNA, 21 nt, synthetic construct
  source 1..21: mol_type = other RNA
taatattaaccaagaacaacc

SEQ ID NO: 96460 - RNA, 21 nt, synthetic construct
  source 1..21: mol_type = other RNA
taatattataagttgggagtc

SEQ ID NO: 96461 - RNA, 21 nt, synthetic construct
  source 1..21: mol_type = other RNA
taatattgaaacgatgcattc

SEQ ID NO: 96462 - RNA, 21 nt, synthetic construct
  source 1..21: mol_type = other RNA
taatattgtaggtgtctcatt

SEQ ID NO: 96463 - RNA, 21 nt, synthetic construct
  source 1..21: mol_type = other RNA
taatcaaaaacctcccaacag

SEQ ID NO: 96464 - RNA, 21 nt, synthetic construct
  source 1..21: mol_type = other RNA
taatcaaacagtgtgatattg

SEQ ID NO: 96465 - RNA, 21 nt, synthetic construct
  source 1..21: mol_type = other RNA
taatcaaacataccccaaccc

SEQ ID NO: 96466 - RNA, 21 nt, synthetic construct
  source 1..21: mol_type = other RNA
taatcaaattcacagaactgt

SEQ ID NO: 96467 - RNA, 21 nt, synthetic construct
  source 1..21: mol_type = other RNA
taatcaagccgcaaataatca

SEQ ID NO: 96468 - RNA, 21 nt, synthetic construct
  source 1..21: mol_type = other RNA
taatcaagtatctccctgtgc

SEQ ID NO: 96469 - RNA, 21 nt, synthetic construct
  source 1..21: mol_type = other RNA
taatcacagacgcaaaggatg

SEQ ID NO: 96470 - RNA, 21 nt, synthetic construct
  source 1..21: mol_type = other RNA
taatcacagtacgcttttatg

SEQ ID NO: 96471 - RNA, 21 nt, synthetic construct
  source 1..21: mol_type = other RNA
taatcaccaggcgcggtggct

SEQ ID NO: 96472 - RNA, 21 nt, synthetic construct
  source 1..21: mol_type = other RNA
taatcacctcaagtgatgcaa

SEQ ID NO: 96473 - RNA, 21 nt, synthetic construct
  source 1..21: mol_type = other RNA
taatcagccgtgattgcacca

SEQ ID NO: 96474 - RNA, 21 nt, synthetic construct
  source 1..21: mol_type = other RNA
taatcaggttgggcttatcag

SEQ ID NO: 96475 - RNA, 21 nt, synthetic construct
  source 1..21: mol_type = other RNA
taatcagtctgtaagcacctg

SEQ ID NO: 96476 - RNA, 21 nt, synthetic construct
  source 1..21: mol_type = other RNA
taatcattgttaggtgctggc

SEQ ID NO: 96477 - RNA, 21 nt, synthetic construct
  source 1..21: mol_type = other RNA
taatccaactgcagtctgtcc

SEQ ID NO: 96478 - RNA, 21 nt, synthetic construct
  source 1..21: mol_type = other RNA
taatccagatggacaaattac

SEQ ID NO: 96479 - RNA, 21 nt, synthetic construct
  source 1..21: mol_type = other RNA
taatccattgggtacataccg

SEQ ID NO: 96480 - RNA, 21 nt, synthetic construct
  source 1..21: mol_type = other RNA
taatcccaaagtgagcagaag

SEQ ID NO: 96481 - RNA, 21 nt, synthetic construct
  source 1..21: mol_type = other RNA
taatcccgcaccttgattttg

SEQ ID NO: 96482 - RNA, 21 nt, synthetic construct
  source 1..21: mol_type = other RNA
taatcctgtttctctacatct

SEQ ID NO: 96483 - RNA, 21 nt, synthetic construct
  source 1..21: mol_type = other RNA
taatccttctcatagtcttcc

SEQ ID NO: 96484 - RNA, 21 nt, synthetic construct
  source 1..21: mol_type = other RNA
taatccttgtggtcttaagag

SEQ ID NO: 96485 - RNA, 21 nt, synthetic construct
  source 1..21: mol_type = other RNA
taatcctttgcacacaccaaa

SEQ ID NO: 96486 - RNA, 21 nt, synthetic construct
  source 1..21: mol_type = other RNA
taatcgaatcctcacaacagg

SEQ ID NO: 96487 - RNA, 21 nt, synthetic construct
  source 1..21: mol_type = other RNA
taatctaaccctcctcctcta

SEQ ID NO: 96488 - RNA, 21 nt, synthetic construct
  source 1..21: mol_type = other RNA
taatctaaggattatggctag

SEQ ID NO: 96489 - RNA, 21 nt, synthetic construct
  source 1..21: mol_type = other RNA
taatctacaaaacagggttat

SEQ ID NO: 96490 - RNA, 21 nt, synthetic construct
  source 1..21: mol_type = other RNA
taatctcaatcagggccttcc

SEQ ID NO: 96491 - RNA, 21 nt, synthetic construct
  source 1..21: mol_type = other RNA
taatctcatccacaatgagac

SEQ ID NO: 96492 - RNA, 21 nt, synthetic construct
  source 1..21: mol_type = other RNA
taatctcctgagtagcaggga

SEQ ID NO: 96493 - RNA, 21 nt, synthetic construct
  source 1..21: mol_type = other RNA
taatctctaggcttaaaattc

SEQ ID NO: 96494 - RNA, 21 nt, synthetic construct
  source 1..21: mol_type = other RNA
taatctctcttgaccttagtt

SEQ ID NO: 96495 - RNA, 21 nt, synthetic construct
  source 1..21: mol_type = other RNA
taatctcttacacctgtttaa

SEQ ID NO: 96496 - RNA, 21 nt, synthetic construct
  source 1..21: mol_type = other RNA
taatctgattttaatctgtcc

SEQ ID NO: 96497 - RNA, 21 nt, synthetic construct
  source 1..21: mol_type = other RNA
taatctgatttttagtgactg

SEQ ID NO: 96498 - RNA, 21 nt, synthetic construct
  source 1..21: mol_type = other RNA
taatctgtcagcagttcagcc

SEQ ID NO: 96499 - RNA, 21 nt, synthetic construct
  source 1..21: mol_type = other RNA
taatctgtcctgaatactatt

SEQ ID NO: 96500 - RNA, 21 nt, synthetic construct
  source 1..21: mol_type = other RNA
taatcttcacacttagttcaa

SEQ ID NO: 96501 - RNA, 21 nt, synthetic construct
  source 1..21: mol_type = other RNA
taatcttgcaaaacaatagcc

SEQ ID NO: 96502 - RNA, 21 nt, synthetic construct
  source 1..21: mol_type = other RNA
taatctttctgaactcaaaag

SEQ ID NO: 96503 - RNA, 21 nt, synthetic construct
  source 1..21: mol_type = other RNA
taatctttggtgctgataaat

SEQ ID NO: 96504 - RNA, 21 nt, synthetic construct
  source 1..21: mol_type = other RNA
taatgaaaattagctggatgt

SEQ ID NO: 96505 - RNA, 21 nt, synthetic construct
  source 1..21: mol_type = other RNA
taatgaaagctcccaatgctt

SEQ ID NO: 96506 - RNA, 21 nt, synthetic construct
  source 1..21: mol_type = other RNA
taatgaactcccagaactcga

SEQ ID NO: 96507 - RNA, 21 nt, synthetic construct
  source 1..21: mol_type = other RNA
taatgacctggaaattattca

SEQ ID NO: 96508 - RNA, 21 nt, synthetic construct
  source 1..21: mol_type = other RNA
taatgagaatttcagaaagag

SEQ ID NO: 96509 - RNA, 21 nt, synthetic construct
  source 1..21: mol_type = other RNA
taatgagatagaccagatgcg

SEQ ID NO: 96510 - RNA, 21 nt, synthetic construct
  source 1..21: mol_type = other RNA
taatgagctgagattgcccca

SEQ ID NO: 96511 - RNA, 21 nt, synthetic construct
  source 1..21: mol_type = other RNA
taatgagtaacatgtggaaca

SEQ ID NO: 96512 - RNA, 21 nt, synthetic construct
  source 1..21: mol_type = other RNA
taatgagtagtacttctgagt

SEQ ID NO: 96513 - RNA, 21 nt, synthetic construct
  source 1..21: mol_type = other RNA
taatgatgactatgaaaagcc

SEQ ID NO: 96514 - RNA, 21 nt, synthetic construct
  source 1..21: mol_type = other RNA
taatgcaacctgctttcctca

SEQ ID NO: 96515 - RNA, 21 nt, synthetic construct
  source 1..21: mol_type = other RNA
taatgcaagagttaaaactca

SEQ ID NO: 96516 - RNA, 21 nt, synthetic construct
  source 1..21: mol_type = other RNA
taatgcacatgggcatgggtc

SEQ ID NO: 96517 - RNA, 21 nt, synthetic construct
  source 1..21: mol_type = other RNA
taatgcccaatcaaatccagt

SEQ ID NO: 96518 - RNA, 21 nt, synthetic construct
  source 1..21: mol_type = other RNA
taatgcccattaaaaccatga

SEQ ID NO: 96519 - RNA, 21 nt, synthetic construct
  source 1..21: mol_type = other RNA
taatgccccatgtgttggcac

SEQ ID NO: 96520 - RNA, 21 nt, synthetic construct
  source 1..21: mol_type = other RNA
taatgcctcaaattagtcata

SEQ ID NO: 96521 - RNA, 21 nt, synthetic construct
  source 1..21: mol_type = other RNA
taatgcgatgatcaaaaccag

SEQ ID NO: 96522 - RNA, 21 nt, synthetic construct
  source 1..21: mol_type = other RNA
taatgctatcattttaaaggg

SEQ ID NO: 96523 - RNA, 21 nt, synthetic construct
  source 1..21: mol_type = other RNA
taatgctatccagaagagaat

SEQ ID NO: 96524 - RNA, 21 nt, synthetic construct
  source 1..21: mol_type = other RNA
taatgctggccagtgagttca

SEQ ID NO: 96525 - RNA, 21 nt, synthetic construct
  source 1..21: mol_type = other RNA
taatgctggcttcatgggtgg

SEQ ID NO: 96526 - RNA, 21 nt, synthetic construct
  source 1..21: mol_type = other RNA
taatgctgttctctgtgtggt

SEQ ID NO: 96527 - RNA, 21 nt, synthetic construct
  source 1..21: mol_type = other RNA
taatgcttcatattttgtggg

SEQ ID NO: 96528 - RNA, 21 nt, synthetic construct
  source 1..21: mol_type = other RNA
taatggagtactatgcagcaa

SEQ ID NO: 96529 - RNA, 21 nt, synthetic construct
  source 1..21: mol_type = other RNA
taatggatcaaggcacagtct

SEQ ID NO: 96530 - RNA, 21 nt, synthetic construct
  source 1..21: mol_type = other RNA
taatggatgtttttagagaga

SEQ ID NO: 96531 - RNA, 21 nt, synthetic construct
  source 1..21: mol_type = other RNA
taatgggaaagacaggtagac

SEQ ID NO: 96532 - RNA, 21 nt, synthetic construct
  source 1..21: mol_type = other RNA
taatgggcacttgggatgttt

SEQ ID NO: 96533 - RNA, 21 nt, synthetic construct
  source 1..21: mol_type = other RNA
taatgggcattagaagttaaa

SEQ ID NO: 96534 - RNA, 21 nt, synthetic construct
  source 1..21: mol_type = other RNA
taatgggcgtggagcggtgtc

SEQ ID NO: 96535 - RNA, 21 nt, synthetic construct
  source 1..21: mol_type = other RNA
taatggggaaatagatgccta

SEQ ID NO: 96536 - RNA, 21 nt, synthetic construct
  source 1..21: mol_type = other RNA
taatgggtacagggtttctgt

SEQ ID NO: 96537 - RNA, 21 nt, synthetic construct
  source 1..21: mol_type = other RNA
taatggtccttgctgaagaat

SEQ ID NO: 96538 - RNA, 21 nt, synthetic construct
  source 1..21: mol_type = other RNA
taatggttagactgcacataa

SEQ ID NO: 96539 - RNA, 21 nt, synthetic construct
  source 1..21: mol_type = other RNA
taatggttggccgaggccagt

SEQ ID NO: 96540 - RNA, 21 nt, synthetic construct
  source 1..21: mol_type = other RNA
taatgtaaacagcatactgtg

SEQ ID NO: 96541 - RNA, 21 nt, synthetic construct
  source 1..21: mol_type = other RNA
taatgtagatcctgaggaagc

SEQ ID NO: 96542 - RNA, 21 nt, synthetic construct
  source 1..21: mol_type = other RNA
taatgtaggtgtctgatgtgt

SEQ ID NO: 96543 - RNA, 21 nt, synthetic construct
  source 1..21: mol_type = other RNA
taatgtccagaggaggaagag

SEQ ID NO: 96544 - RNA, 21 nt, synthetic construct
  source 1..21: mol_type = other RNA
taatgtccttttcctgttccg

SEQ ID NO: 96545 - RNA, 21 nt, synthetic construct
  source 1..21: mol_type = other RNA
taatgtctcctctttcatatc

SEQ ID NO: 96546 - RNA, 21 nt, synthetic construct
  source 1..21: mol_type = other RNA
taatgtctttttacacttgga

SEQ ID NO: 96547 - RNA, 21 nt, synthetic construct
  source 1..21: mol_type = other RNA
taatgtgatatgccacatttt

SEQ ID NO: 96548 - RNA, 21 nt, synthetic construct
  source 1..21: mol_type = other RNA
taatgtgcaaggagagaaaaa

SEQ ID NO: 96549 - RNA, 21 nt, synthetic construct
  source 1..21: mol_type = other RNA
taatgtgctgtccatttcctt

SEQ ID NO: 96550 - RNA, 21 nt, synthetic construct
  source 1..21: mol_type = other RNA
taatgtggcttgcaaggccca

SEQ ID NO: 96551 - RNA, 21 nt, synthetic construct
  source 1..21: mol_type = other RNA
taatgtgtaagaaatgccaca

SEQ ID NO: 96552 - RNA, 21 nt, synthetic construct
  source 1..21: mol_type = other RNA
taatgtgtgaagaaggaatgt

SEQ ID NO: 96553 - RNA, 21 nt, synthetic construct
  source 1..21: mol_type = other RNA
taatgtgtgttccagacaaaa

SEQ ID NO: 96554 - RNA, 21 nt, synthetic construct
  source 1..21: mol_type = other RNA
taatgtgttgtctgattcagt

SEQ ID NO: 96555 - RNA, 21 nt, synthetic construct
  source 1..21: mol_type = other RNA
taatgttacttctcagctata

SEQ ID NO: 96556 - RNA, 21 nt, synthetic construct
  source 1..21: mol_type = other RNA
taatgttagaattcaggacag

SEQ ID NO: 96557 - RNA, 21 nt, synthetic construct
  source 1..21: mol_type = other RNA
taatgttatatttccgtatcc

SEQ ID NO: 96558 - RNA, 21 nt, synthetic construct
  source 1..21: mol_type = other RNA
taatgttatgaagcttttctc

SEQ ID NO: 96559 - RNA, 21 nt, synthetic construct
  source 1..21: mol_type = other RNA
taatgttgacatcttgcataa

SEQ ID NO: 96560 - RNA, 21 nt, synthetic construct
  source 1..21: mol_type = other RNA
taatgtttagtagaattctcc

SEQ ID NO: 96561 - RNA, 21 nt, synthetic construct
  source 1..21: mol_type = other RNA
taatgtttgtacttctacctt

SEQ ID NO: 96562 - RNA, 21 nt, synthetic construct
  source 1..21: mol_type = other RNA
taatgttttatttagcccatg

SEQ ID NO: 96563 - RNA, 21 nt, synthetic construct
  source 1..21: mol_type = other RNA
taatgttttccgtgtgacaaa

SEQ ID NO: 96564 - RNA, 21 nt, synthetic construct
  source 1..21: mol_type = other RNA
taattaagacaatgtggagtt

SEQ ID NO: 96565 - RNA, 21 nt, synthetic construct
  source 1..21: mol_type = other RNA
taattacaataatgcacatgg

SEQ ID NO: 96566 - RNA, 21 nt, synthetic construct
  source 1..21: mol_type = other RNA
taattacaggggactttgatg

SEQ ID NO: 96567 - RNA, 21 nt, synthetic construct
  source 1..21: mol_type = other RNA
taattacatacttcaaagggt

SEQ ID NO: 96568 - RNA, 21 nt, synthetic construct
  source 1..21: mol_type = other RNA
taattacccaggcatgatggc

SEQ ID NO: 96569 - RNA, 21 nt, synthetic construct
  source 1..21: mol_type = other RNA
taattagaaactggtgaactg

SEQ ID NO: 96570 - RNA, 21 nt, synthetic construct
  source 1..21: mol_type = other RNA
taattagccgggtgtagtggt

SEQ ID NO: 96571 - RNA, 21 nt, synthetic construct
  source 1..21: mol_type = other RNA
taattagttacatgaggtcac

SEQ ID NO: 96572 - RNA, 21 nt, synthetic construct
  source 1..21: mol_type = other RNA
taattatgagcattccccaca

SEQ ID NO: 96573 - RNA, 21 nt, synthetic construct
  source 1..21: mol_type = other RNA
taattatttgtgcatactgtg

SEQ ID NO: 96574 - RNA, 21 nt, synthetic construct
  source 1..21: mol_type = other RNA
taattcaattttcatgggttg

SEQ ID NO: 96575 - RNA, 21 nt, synthetic construct
  source 1..21: mol_type = other RNA
taattcacatttaagaaggga

SEQ ID NO: 96576 - RNA, 21 nt, synthetic construct
  source 1..21: mol_type = other RNA
taattcagtcaacaccaagca

SEQ ID NO: 96577 - RNA, 21 nt, synthetic construct
  source 1..21: mol_type = other RNA
taattcattgtacatgaagtc

SEQ ID NO: 96578 - RNA, 21 nt, synthetic construct
  source 1..21: mol_type = other RNA
taattccaaattagctttctc

SEQ ID NO: 96579 - RNA, 21 nt, synthetic construct
  source 1..21: mol_type = other RNA
taattccacaaccactgggga

SEQ ID NO: 96580 - RNA, 21 nt, synthetic construct
  source 1..21: mol_type = other RNA
taattcctactttcttcaacc

SEQ ID NO: 96581 - RNA, 21 nt, synthetic construct
  source 1..21: mol_type = other RNA
taattcgaaaatgggccaaag

SEQ ID NO: 96582 - RNA, 21 nt, synthetic construct
  source 1..21: mol_type = other RNA
taattctatctgaactttcga

SEQ ID NO: 96583 - RNA, 21 nt, synthetic construct
  source 1..21: mol_type = other RNA
taattctccactttcatgatt

SEQ ID NO: 96584 - RNA, 21 nt, synthetic construct
  source 1..21: mol_type = other RNA
taattctgacaactgggagaa

SEQ ID NO: 96585 - RNA, 21 nt, synthetic construct
  source 1..21: mol_type = other RNA
taattctgaggcctcctgcct

SEQ ID NO: 96586 - RNA, 21 nt, synthetic construct
  source 1..21: mol_type = other RNA
taattctgccttcaatgtttg

SEQ ID NO: 96587 - RNA, 21 nt, synthetic construct
  source 1..21: mol_type = other RNA
taattctgtgccaagcaactt

SEQ ID NO: 96588 - RNA, 21 nt, synthetic construct
  source 1..21: mol_type = other RNA
taattctgtttacccttacta

SEQ ID NO: 96589 - RNA, 21 nt, synthetic construct
  source 1..21: mol_type = other RNA
taattcttaaactgccaaacc

SEQ ID NO: 96590 - RNA, 21 nt, synthetic construct
  source 1..21: mol_type = other RNA
taattcttcctgtcttggacc

SEQ ID NO: 96591 - RNA, 21 nt, synthetic construct
  source 1..21: mol_type = other RNA
taattcttttgctgtataccc

SEQ ID NO: 96592 - RNA, 21 nt, synthetic construct
  source 1..21: mol_type = other RNA
taattgaacccactgagcatt

SEQ ID NO: 96593 - RNA, 21 nt, synthetic construct
  source 1..21: mol_type = other RNA
taattgagctgtccccaccgc

SEQ ID NO: 96594 - RNA, 21 nt, synthetic construct
  source 1..21: mol_type = other RNA
taattgctgcagtttttccac

SEQ ID NO: 96595 - RNA, 21 nt, synthetic construct
  source 1..21: mol_type = other RNA
taattgcttttgctgagggaa

SEQ ID NO: 96596 - RNA, 21 nt, synthetic construct
  source 1..21: mol_type = other RNA
taattgggggaaaattgacat

SEQ ID NO: 96597 - RNA, 21 nt, synthetic construct
  source 1..21: mol_type = other RNA
taattggttaaacttggtctg

SEQ ID NO: 96598 - RNA, 21 nt, synthetic construct
  source 1..21: mol_type = other RNA
taattggttcgtttgaggctt

SEQ ID NO: 96599 - RNA, 21 nt, synthetic construct
  source 1..21: mol_type = other RNA
taattgtacacctcaaactag

SEQ ID NO: 96600 - RNA, 21 nt, synthetic construct
  source 1..21: mol_type = other RNA
taattgtaccttggagagaaa

SEQ ID NO: 96601 - RNA, 21 nt, synthetic construct
  source 1..21: mol_type = other RNA
taattgtagtttccatggagg

SEQ ID NO: 96602 - RNA, 21 nt, synthetic construct
  source 1..21: mol_type = other RNA
taattgtttgttgggtttaac

SEQ ID NO: 96603 - RNA, 21 nt, synthetic construct
  source 1..21: mol_type = other RNA
taattgttttcccttttgtag

SEQ ID NO: 96604 - RNA, 21 nt, synthetic construct
  source 1..21: mol_type = other RNA
taatttacatagtgctcttct

SEQ ID NO: 96605 - RNA, 21 nt, synthetic construct
  source 1..21: mol_type = other RNA
taatttagatgagagtggcct

SEQ ID NO: 96606 - RNA, 21 nt, synthetic construct
  source 1..21: mol_type = other RNA
taatttagcgttcatccaaat

SEQ ID NO: 96607 - RNA, 21 nt, synthetic construct
  source 1..21: mol_type = other RNA
taatttatctccataagtccc

SEQ ID NO: 96608 - RNA, 21 nt, synthetic construct
  source 1..21: mol_type = other RNA
taatttcagagagacctgaag

SEQ ID NO: 96609 - RNA, 21 nt, synthetic construct
  source 1..21: mol_type = other RNA
taatttccaagaaccctttgt

SEQ ID NO: 96610 - RNA, 21 nt, synthetic construct
  source 1..21: mol_type = other RNA
taatttccacccatgaagcca

SEQ ID NO: 96611 - RNA, 21 nt, synthetic construct
  source 1..21: mol_type = other RNA
taatttccaggtcattacata

SEQ ID NO: 96612 - RNA, 21 nt, synthetic construct
  source 1..21: mol_type = other RNA
taatttccctcagaatttgag

SEQ ID NO: 96613 - RNA, 21 nt, synthetic construct
  source 1..21: mol_type = other RNA
taatttctgagagtattgcca

SEQ ID NO: 96614 - RNA, 21 nt, synthetic construct
  source 1..21: mol_type = other RNA
taatttctttaaaaccagagc

SEQ ID NO: 96615 - RNA, 21 nt, synthetic construct
  source 1..21: mol_type = other RNA
taatttgaggcattagtgaat

SEQ ID NO: 96616 - RNA, 21 nt, synthetic construct
  source 1..21: mol_type = other RNA
taatttgaggtctaggctaat

SEQ ID NO: 96617 - RNA, 21 nt, synthetic construct
  source 1..21: mol_type = other RNA
taatttggatgaacgctaaat

SEQ ID NO: 96618 - RNA, 21 nt, synthetic construct
  source 1..21: mol_type = other RNA
taatttggcaaaaaatgcagt

SEQ ID NO: 96619 - RNA, 21 nt, synthetic construct
  source 1..21: mol_type = other RNA
taatttggcttggggaacagt

SEQ ID NO: 96620 - RNA, 21 nt, synthetic construct
  source 1..21: mol_type = other RNA
taatttgggtttgagtttcca

SEQ ID NO: 96621 - RNA, 21 nt, synthetic construct
  source 1..21: mol_type = other RNA
taatttgtccatctggattat

SEQ ID NO: 96622 - RNA, 21 nt, synthetic construct
  source 1..21: mol_type = other RNA
taatttgtgaaccttgaagta

SEQ ID NO: 96623 - RNA, 21 nt, synthetic construct
  source 1..21: mol_type = other RNA
taattttctgactctgtgctt

SEQ ID NO: 96624 - RNA, 21 nt, synthetic construct
  source 1..21: mol_type = other RNA
taattttgagagtgcagtatg

SEQ ID NO: 96625 - RNA, 21 nt, synthetic construct
  source 1..21: mol_type = other RNA
taattttggggccatctgaat

SEQ ID NO: 96626 - RNA, 21 nt, synthetic construct
  source 1..21: mol_type = other RNA
taatttttgtcaagtgactcc

SEQ ID NO: 96627 - RNA, 21 nt, synthetic construct
  source 1..21: mol_type = other RNA
taattttttgagacggaatct

SEQ ID NO: 96628 - RNA, 21 nt, synthetic construct
  source 1..21: mol_type = other RNA
tacaaaaacacactgagcttt

SEQ ID NO: 96629 - RNA, 21 nt, synthetic construct
  source 1..21: mol_type = other RNA
tacaaaaagcacctaccataa

SEQ ID NO: 96630 - RNA, 21 nt, synthetic construct
  source 1..21: mol_type = other RNA
tacaaaaatgacacaacttac

SEQ ID NO: 96631 - RNA, 21 nt, synthetic construct
  source 1..21: mol_type = other RNA
tacaaaacagggttattaaca

SEQ ID NO: 96632 - RNA, 21 nt, synthetic construct
  source 1..21: mol_type = other RNA
tacaaaactgaactcaaaatg

SEQ ID NO: 96633 - RNA, 21 nt, synthetic construct
  source 1..21: mol_type = other RNA
tacaaaagaacaggacttttg

SEQ ID NO: 96634 - RNA, 21 nt, synthetic construct
  source 1..21: mol_type = other RNA
tacaaaagatcatttcaaacc

SEQ ID NO: 96635 - RNA, 21 nt, synthetic construct
  source 1..21: mol_type = other RNA
tacaaaaggaggaactaattg

SEQ ID NO: 96636 - RNA, 21 nt, synthetic construct
  source 1..21: mol_type = other RNA
tacaaaagggaaaacaattac

SEQ ID NO: 96637 - RNA, 21 nt, synthetic construct
  source 1..21: mol_type = other RNA
tacaaaaggtttccagtggcc

SEQ ID NO: 96638 - RNA, 21 nt, synthetic construct
  source 1..21: mol_type = other RNA
tacaaaagtgctgttgaggct

SEQ ID NO: 96639 - RNA, 21 nt, synthetic construct
  source 1..21: mol_type = other RNA
tacaaaataggcagtcctcta

SEQ ID NO: 96640 - RNA, 21 nt, synthetic construct
  source 1..21: mol_type = other RNA
tacaaaatatgtaatgacctg

SEQ ID NO: 96641 - RNA, 21 nt, synthetic construct
  source 1..21: mol_type = other RNA
tacaaaccaaaaaatgtggca

SEQ ID NO: 96642 - RNA, 21 nt, synthetic construct
  source 1..21: mol_type = other RNA
tacaaaccttcttatttcctt

SEQ ID NO: 96643 - RNA, 21 nt, synthetic construct
  source 1..21: mol_type = other RNA
tacaaactccaaacctttaag

SEQ ID NO: 96644 - RNA, 21 nt, synthetic construct
  source 1..21: mol_type = other RNA
tacaaagatttacccctactt

SEQ ID NO: 96645 - RNA, 21 nt, synthetic construct
  source 1..21: mol_type = other RNA
tacaaaggtgttaagccgttc

SEQ ID NO: 96646 - RNA, 21 nt, synthetic construct
  source 1..21: mol_type = other RNA
tacaaataactccagctttta

SEQ ID NO: 96647 - RNA, 21 nt, synthetic construct
  source 1..21: mol_type = other RNA
tacaaatgaaagtcagctaat

SEQ ID NO: 96648 - RNA, 21 nt, synthetic construct
  source 1..21: mol_type = other RNA
tacaaatgatgaagggttttc

SEQ ID NO: 96649 - RNA, 21 nt, synthetic construct
  source 1..21: mol_type = other RNA
tacaacagcaaggctcctgca

SEQ ID NO: 96650 - RNA, 21 nt, synthetic construct
  source 1..21: mol_type = other RNA
tacaacagcaccttttttggt

SEQ ID NO: 96651 - RNA, 21 nt, synthetic construct
  source 1..21: mol_type = other RNA
tacaacattcatccctctaaa

SEQ ID NO: 96652 - RNA, 21 nt, synthetic construct
  source 1..21: mol_type = other RNA
tacaaccggaaaatgcttaac

SEQ ID NO: 96653 - RNA, 21 nt, synthetic construct
  source 1..21: mol_type = other RNA
tacaactactcgggaggctga

SEQ ID NO: 96654 - RNA, 21 nt, synthetic construct
  source 1..21: mol_type = other RNA
tacaactctaataacagccta

SEQ ID NO: 96655 - RNA, 21 nt, synthetic construct
  source 1..21: mol_type = other RNA
tacaactctgaccattgtgtg

SEQ ID NO: 96656 - RNA, 21 nt, synthetic construct
  source 1..21: mol_type = other RNA
tacaactgctcataatagtct

SEQ ID NO: 96657 - RNA, 21 nt, synthetic construct
  source 1..21: mol_type = other RNA
tacaactggtttctgcatact

SEQ ID NO: 96658 - RNA, 21 nt, synthetic construct
  source 1..21: mol_type = other RNA
tacaagagttcccctatactg

SEQ ID NO: 96659 - RNA, 21 nt, synthetic construct
  source 1..21: mol_type = other RNA
tacaaggagacctactaaaag

SEQ ID NO: 96660 - RNA, 21 nt, synthetic construct
  source 1..21: mol_type = other RNA
tacaaggattgaatggaaaga

SEQ ID NO: 96661 - RNA, 21 nt, synthetic construct
  source 1..21: mol_type = other RNA
tacaaggctagagctcacacg

SEQ ID NO: 96662 - RNA, 21 nt, synthetic construct
  source 1..21: mol_type = other RNA
tacaagggtgacagagccgag

SEQ ID NO: 96663 - RNA, 21 nt, synthetic construct
  source 1..21: mol_type = other RNA
tacaaggtcaatctgaaaaat

SEQ ID NO: 96664 - RNA, 21 nt, synthetic construct
  source 1..21: mol_type = other RNA
tacaagtacatgaaatactca

SEQ ID NO: 96665 - RNA, 21 nt, synthetic construct
  source 1..21: mol_type = other RNA
tacaataatatgcctcatgca

SEQ ID NO: 96666 - RNA, 21 nt, synthetic construct
  source 1..21: mol_type = other RNA
tacaataatgcacatgggcat

SEQ ID NO: 96667 - RNA, 21 nt, synthetic construct
  source 1..21: mol_type = other RNA
tacaatacttggatcttatct

SEQ ID NO: 96668 - RNA, 21 nt, synthetic construct
  source 1..21: mol_type = other RNA
tacaatgaatatgtactacct

SEQ ID NO: 96669 - RNA, 21 nt, synthetic construct
  source 1..21: mol_type = other RNA
tacaatgaattagcaatgcga

SEQ ID NO: 96670 - RNA, 21 nt, synthetic construct
  source 1..21: mol_type = other RNA
tacaatggaaatgaagtattg

SEQ ID NO: 96671 - RNA, 21 nt, synthetic construct
  source 1..21: mol_type = other RNA
tacaatggggctttactgtat

SEQ ID NO: 96672 - RNA, 21 nt, synthetic construct
  source 1..21: mol_type = other RNA
tacaatggttgaactagttta

SEQ ID NO: 96673 - RNA, 21 nt, synthetic construct
  source 1..21: mol_type = other RNA
tacaatgtaaggtgcacgctg

SEQ ID NO: 96674 - RNA, 21 nt, synthetic construct
  source 1..21: mol_type = other RNA
tacaatgtgagccacatacat

SEQ ID NO: 96675 - RNA, 21 nt, synthetic construct
  source 1..21: mol_type = other RNA
tacaattacacatctcccata

SEQ ID NO: 96676 - RNA, 21 nt, synthetic construct
  source 1..21: mol_type = other RNA
tacaattaggctgtttgagat

SEQ ID NO: 96677 - RNA, 21 nt, synthetic construct
  source 1..21: mol_type = other RNA
tacaattcctttctaggcatc

SEQ ID NO: 96678 - RNA, 21 nt, synthetic construct
  source 1..21: mol_type = other RNA
tacaattcggtggcattaagg

SEQ ID NO: 96679 - RNA, 21 nt, synthetic construct
  source 1..21: mol_type = other RNA
tacaattttcttaccctttac

SEQ ID NO: 96680 - RNA, 21 nt, synthetic construct
  source 1..21: mol_type = other RNA
tacacaaaaagatctgtggac

SEQ ID NO: 96681 - RNA, 21 nt, synthetic construct
  source 1..21: mol_type = other RNA
tacacaagatctctatgcaga

SEQ ID NO: 96682 - RNA, 21 nt, synthetic construct
  source 1..21: mol_type = other RNA
tacacaagtattaacgaattc

SEQ ID NO: 96683 - RNA, 21 nt, synthetic construct
  source 1..21: mol_type = other RNA
tacacaagtgtttcatttaca

SEQ ID NO: 96684 - RNA, 21 nt, synthetic construct
  source 1..21: mol_type = other RNA
tacacacacctaccaccatgc

SEQ ID NO: 96685 - RNA, 21 nt, synthetic construct
  source 1..21: mol_type = other RNA
tacacacacgtttatattcct

SEQ ID NO: 96686 - RNA, 21 nt, synthetic construct
  source 1..21: mol_type = other RNA
tacacacataagggggaatct

SEQ ID NO: 96687 - RNA, 21 nt, synthetic construct
  source 1..21: mol_type = other RNA
tacacacctgaaattctcaaa

SEQ ID NO: 96688 - RNA, 21 nt, synthetic construct
  source 1..21: mol_type = other RNA
tacacagaaagcctcttcaga

SEQ ID NO: 96689 - RNA, 21 nt, synthetic construct
  source 1..21: mol_type = other RNA
tacacagacatgaacaatcct

SEQ ID NO: 96690 - RNA, 21 nt, synthetic construct
  source 1..21: mol_type = other RNA
tacacagggaaaactacatgt

SEQ ID NO: 96691 - RNA, 21 nt, synthetic construct
  source 1..21: mol_type = other RNA
tacacaggtagacatgtgcca

SEQ ID NO: 96692 - RNA, 21 nt, synthetic construct
  source 1..21: mol_type = other RNA
tacacatacacagggaaaact

SEQ ID NO: 96693 - RNA, 21 nt, synthetic construct
  source 1..21: mol_type = other RNA
tacacatatctttaggtgttt

SEQ ID NO: 96694 - RNA, 21 nt, synthetic construct
  source 1..21: mol_type = other RNA
tacacatcagattttgaagat

SEQ ID NO: 96695 - RNA, 21 nt, synthetic construct
  source 1..21: mol_type = other RNA
tacacatcagtgctgctctga

SEQ ID NO: 96696 - RNA, 21 nt, synthetic construct
  source 1..21: mol_type = other RNA
tacacatccagaagtcacttt

SEQ ID NO: 96697 - RNA, 21 nt, synthetic construct
  source 1..21: mol_type = other RNA
tacacatcctaatacagtaaa

SEQ ID NO: 96698 - RNA, 21 nt, synthetic construct
  source 1..21: mol_type = other RNA
tacacatctcccataccacct

SEQ ID NO: 96699 - RNA, 21 nt, synthetic construct
  source 1..21: mol_type = other RNA
tacacatgtcagccacaagac

SEQ ID NO: 96700 - RNA, 21 nt, synthetic construct
  source 1..21: mol_type = other RNA
tacacatgttgagtcttgttt

SEQ ID NO: 96701 - RNA, 21 nt, synthetic construct
  source 1..21: mol_type = other RNA
tacacattaggctctgggtca

SEQ ID NO: 96702 - RNA, 21 nt, synthetic construct
  source 1..21: mol_type = other RNA
tacacattccagaccagcagt

SEQ ID NO: 96703 - RNA, 21 nt, synthetic construct
  source 1..21: mol_type = other RNA
tacaccaaactcaaaaggaca

SEQ ID NO: 96704 - RNA, 21 nt, synthetic construct
  source 1..21: mol_type = other RNA
tacaccatgcaggttcatgtg

SEQ ID NO: 96705 - RNA, 21 nt, synthetic construct
  source 1..21: mol_type = other RNA
tacacccagttcaccagtttc

SEQ ID NO: 96706 - RNA, 21 nt, synthetic construct
  source 1..21: mol_type = other RNA
tacacccatccacccacttgt

SEQ ID NO: 96707 - RNA, 21 nt, synthetic construct
  source 1..21: mol_type = other RNA
tacacccggctaattaaacaa

SEQ ID NO: 96708 - RNA, 21 nt, synthetic construct
  source 1..21: mol_type = other RNA
tacaccctaggtagggttggg

SEQ ID NO: 96709 - RNA, 21 nt, synthetic construct
  source 1..21: mol_type = other RNA
tacaccctgggaaagcctggc

SEQ ID NO: 96710 - RNA, 21 nt, synthetic construct
  source 1..21: mol_type = other RNA
tacacctcaaactagaaaaag

SEQ ID NO: 96711 - RNA, 21 nt, synthetic construct
  source 1..21: mol_type = other RNA
tacacctggatcaagtgggat

SEQ ID NO: 96712 - RNA, 21 nt, synthetic construct
  source 1..21: mol_type = other RNA
tacacgaaaatatccctgggg

SEQ ID NO: 96713 - RNA, 21 nt, synthetic construct
  source 1..21: mol_type = other RNA
tacacgagtgtgtttcgcaaa

SEQ ID NO: 96714 - RNA, 21 nt, synthetic construct
  source 1..21: mol_type = other RNA
tacacgccttcgcgggcacct

SEQ ID NO: 96715 - RNA, 21 nt, synthetic construct
  source 1..21: mol_type = other RNA
tacacgtcttgtcaataattt

SEQ ID NO: 96716 - RNA, 21 nt, synthetic construct
  source 1..21: mol_type = other RNA
tacacgtggctgtcaaaaatg

SEQ ID NO: 96717 - RNA, 21 nt, synthetic construct
  source 1..21: mol_type = other RNA
tacactatggcttttgagtgt

SEQ ID NO: 96718 - RNA, 21 nt, synthetic construct
  source 1..21: mol_type = other RNA
tacactcaaaagccatagtgt

SEQ ID NO: 96719 - RNA, 21 nt, synthetic construct
  source 1..21: mol_type = other RNA
tacactcaatacacgtggctg

SEQ ID NO: 96720 - RNA, 21 nt, synthetic construct
  source 1..21: mol_type = other RNA
tacactcatttcctttcagtc

SEQ ID NO: 96721 - RNA, 21 nt, synthetic construct
  source 1..21: mol_type = other RNA
tacactgaagggaattttact

SEQ ID NO: 96722 - RNA, 21 nt, synthetic construct
  source 1..21: mol_type = other RNA
tacacttccagtacatctcaa

SEQ ID NO: 96723 - RNA, 21 nt, synthetic construct
  source 1..21: mol_type = other RNA
tacacttctatccagtgacac

SEQ ID NO: 96724 - RNA, 21 nt, synthetic construct
  source 1..21: mol_type = other RNA
tacacttggagttttccccct

SEQ ID NO: 96725 - RNA, 21 nt, synthetic construct
  source 1..21: mol_type = other RNA
tacacttttcaggtattgagc

SEQ ID NO: 96726 - RNA, 21 nt, synthetic construct
  source 1..21: mol_type = other RNA
tacagaaaacccttcatcatt

SEQ ID NO: 96727 - RNA, 21 nt, synthetic construct
  source 1..21: mol_type = other RNA
tacagaaatataccttatgtg

SEQ ID NO: 96728 - RNA, 21 nt, synthetic construct
  source 1..21: mol_type = other RNA
tacagaactgctaatggtcct

SEQ ID NO: 96729 - RNA, 21 nt, synthetic construct
  source 1..21: mol_type = other RNA
tacagaatgttcaagtatttc

SEQ ID NO: 96730 - RNA, 21 nt, synthetic construct
  source 1..21: mol_type = other RNA
tacagacatgccacaccacat

SEQ ID NO: 96731 - RNA, 21 nt, synthetic construct
  source 1..21: mol_type = other RNA
tacagactaatatgagttcct

SEQ ID NO: 96732 - RNA, 21 nt, synthetic construct
  source 1..21: mol_type = other RNA
tacagactcaataaccacatg

SEQ ID NO: 96733 - RNA, 21 nt, synthetic construct
  source 1..21: mol_type = other RNA
tacagactgattaatttgagg

SEQ ID NO: 96734 - RNA, 21 nt, synthetic construct
  source 1..21: mol_type = other RNA
tacagagcacagactcaagcc

SEQ ID NO: 96735 - RNA, 21 nt, synthetic construct
  source 1..21: mol_type = other RNA
tacagaggattttggattgcg

SEQ ID NO: 96736 - RNA, 21 nt, synthetic construct
  source 1..21: mol_type = other RNA
tacagataaccaataagaagt

SEQ ID NO: 96737 - RNA, 21 nt, synthetic construct
  source 1..21: mol_type = other RNA
tacagatatcacccagaccaa

SEQ ID NO: 96738 - RNA, 21 nt, synthetic construct
  source 1..21: mol_type = other RNA
tacagattcaatgcaatactt

SEQ ID NO: 96739 - RNA, 21 nt, synthetic construct
  source 1..21: mol_type = other RNA
tacagcaaaagaattaaactc

SEQ ID NO: 96740 - RNA, 21 nt, synthetic construct
  source 1..21: mol_type = other RNA
tacagcaaatctctagaactt

SEQ ID NO: 96741 - RNA, 21 nt, synthetic construct
  source 1..21: mol_type = other RNA
tacagcagatctgcttgcaga

SEQ ID NO: 96742 - RNA, 21 nt, synthetic construct
  source 1..21: mol_type = other RNA
tacagcagctctagcaaacaa

SEQ ID NO: 96743 - RNA, 21 nt, synthetic construct
  source 1..21: mol_type = other RNA
tacagcatattagctgtctgg

SEQ ID NO: 96744 - RNA, 21 nt, synthetic construct
  source 1..21: mol_type = other RNA
tacagcatttcagccaaagct

SEQ ID NO: 96745 - RNA, 21 nt, synthetic construct
  source 1..21: mol_type = other RNA
tacagccatcaacctaatgaa

SEQ ID NO: 96746 - RNA, 21 nt, synthetic construct
  source 1..21: mol_type = other RNA
tacagctccaaagaacaggag

SEQ ID NO: 96747 - RNA, 21 nt, synthetic construct
  source 1..21: mol_type = other RNA
tacagctcttctcagttgcag

SEQ ID NO: 96748 - RNA, 21 nt, synthetic construct
  source 1..21: mol_type = other RNA
tacaggaagagactatctctt

SEQ ID NO: 96749 - RNA, 21 nt, synthetic construct
  source 1..21: mol_type = other RNA
tacaggagttccgatttctcg

SEQ ID NO: 96750 - RNA, 21 nt, synthetic construct
  source 1..21: mol_type = other RNA
tacaggatatcagaagtgctg

SEQ ID NO: 96751 - RNA, 21 nt, synthetic construct
  source 1..21: mol_type = other RNA
tacaggcaacaaaagaaaaaa

SEQ ID NO: 96752 - RNA, 21 nt, synthetic construct
  source 1..21: mol_type = other RNA
tacaggcatgagccactgcgg

SEQ ID NO: 96753 - RNA, 21 nt, synthetic construct
  source 1..21: mol_type = other RNA
tacaggcatgagtcgccatac

SEQ ID NO: 96754 - RNA, 21 nt, synthetic construct
  source 1..21: mol_type = other RNA
tacaggcgcacgccatctcgc

SEQ ID NO: 96755 - RNA, 21 nt, synthetic construct
  source 1..21: mol_type = other RNA
tacaggcgtgagccacctcat

SEQ ID NO: 96756 - RNA, 21 nt, synthetic construct
  source 1..21: mol_type = other RNA
tacagggaaccgtaacttctt

SEQ ID NO: 96757 - RNA, 21 nt, synthetic construct
  source 1..21: mol_type = other RNA
tacaggggactttgatgtttt

SEQ ID NO: 96758 - RNA, 21 nt, synthetic construct
  source 1..21: mol_type = other RNA
tacaggggcattccctgtctg

SEQ ID NO: 96759 - RNA, 21 nt, synthetic construct
  source 1..21: mol_type = other RNA
tacagggtttctgtttggatg

SEQ ID NO: 96760 - RNA, 21 nt, synthetic construct
  source 1..21: mol_type = other RNA
tacaggtcaaactcacttatt

SEQ ID NO: 96761 - RNA, 21 nt, synthetic construct
  source 1..21: mol_type = other RNA
tacaggtcggaaggaatgtgc

SEQ ID NO: 96762 - RNA, 21 nt, synthetic construct
  source 1..21: mol_type = other RNA
tacaggtgcttacagactgat

SEQ ID NO: 96763 - RNA, 21 nt, synthetic construct
  source 1..21: mol_type = other RNA
tacaggtgtgaaccacgcatc

SEQ ID NO: 96764 - RNA, 21 nt, synthetic construct
  source 1..21: mol_type = other RNA
tacagtaaagccccattgtac

SEQ ID NO: 96765 - RNA, 21 nt, synthetic construct
  source 1..21: mol_type = other RNA
tacagtaagatcctggattgc

SEQ ID NO: 96766 - RNA, 21 nt, synthetic construct
  source 1..21: mol_type = other RNA
tacagtaaggtttccctgggg

SEQ ID NO: 96767 - RNA, 21 nt, synthetic construct
  source 1..21: mol_type = other RNA
tacagtaatcaaacagtgtga

SEQ ID NO: 96768 - RNA, 21 nt, synthetic construct
  source 1..21: mol_type = other RNA
tacagtaattgtagtttccat

SEQ ID NO: 96769 - RNA, 21 nt, synthetic construct
  source 1..21: mol_type = other RNA
tacagtagccaaaggtagaaa

SEQ ID NO: 96770 - RNA, 21 nt, synthetic construct
  source 1..21: mol_type = other RNA
tacagtagtaaaaccaaatgt

SEQ ID NO: 96771 - RNA, 21 nt, synthetic construct
  source 1..21: mol_type = other RNA
tacagtataggggaactcttg

SEQ ID NO: 96772 - RNA, 21 nt, synthetic construct
  source 1..21: mol_type = other RNA
tacagtattacacagaaagcc

SEQ ID NO: 96773 - RNA, 21 nt, synthetic construct
  source 1..21: mol_type = other RNA
tacagtcacacaccactacac

SEQ ID NO: 96774 - RNA, 21 nt, synthetic construct
  source 1..21: mol_type = other RNA
tacagtcatcacagtccagga

SEQ ID NO: 96775 - RNA, 21 nt, synthetic construct
  source 1..21: mol_type = other RNA
tacagtctcgaccccctgggc

SEQ ID NO: 96776 - RNA, 21 nt, synthetic construct
  source 1..21: mol_type = other RNA
tacagtgacatatgccggctg

SEQ ID NO: 96777 - RNA, 21 nt, synthetic construct
  source 1..21: mol_type = other RNA
tacagtgagtagaagagtaat

SEQ ID NO: 96778 - RNA, 21 nt, synthetic construct
  source 1..21: mol_type = other RNA
tacagtgcataccaccacatt

SEQ ID NO: 96779 - RNA, 21 nt, synthetic construct
  source 1..21: mol_type = other RNA
tacagtgccttcagctatggt

SEQ ID NO: 96780 - RNA, 21 nt, synthetic construct
  source 1..21: mol_type = other RNA
tacagtggcacgattttggct

SEQ ID NO: 96781 - RNA, 21 nt, synthetic construct
  source 1..21: mol_type = other RNA
tacagtggttccatttgtttt

SEQ ID NO: 96782 - RNA, 21 nt, synthetic construct
  source 1..21: mol_type = other RNA
tacagtgtttagggacgaatg

SEQ ID NO: 96783 - RNA, 21 nt, synthetic construct
  source 1..21: mol_type = other RNA
tacagtgtttttgaattctgc

SEQ ID NO: 96784 - RNA, 21 nt, synthetic construct
  source 1..21: mol_type = other RNA
tacagttaacaatactgcatt

SEQ ID NO: 96785 - RNA, 21 nt, synthetic construct
  source 1..21: mol_type = other RNA
tacagttatgtcagtcaacac

SEQ ID NO: 96786 - RNA, 21 nt, synthetic construct
  source 1..21: mol_type = other RNA
tacagttggaactcttgcggt

SEQ ID NO: 96787 - RNA, 21 nt, synthetic construct
  source 1..21: mol_type = other RNA
tacagttttgaccaaaacaaa

SEQ ID NO: 96788 - RNA, 21 nt, synthetic construct
  source 1..21: mol_type = other RNA
tacataacttcccagacaggg

SEQ ID NO: 96789 - RNA, 21 nt, synthetic construct
  source 1..21: mol_type = other RNA
tacatactgcactctcaaaat

SEQ ID NO: 96790 - RNA, 21 nt, synthetic construct
  source 1..21: mol_type = other RNA
tacatacttcaaagggtcact

SEQ ID NO: 96791 - RNA, 21 nt, synthetic construct
  source 1..21: mol_type = other RNA
tacatagcaaggaagcagaat

SEQ ID NO: 96792 - RNA, 21 nt, synthetic construct
  source 1..21: mol_type = other RNA
tacataggcttagtacagcca

SEQ ID NO: 96793 - RNA, 21 nt, synthetic construct
  source 1..21: mol_type = other RNA
tacatagtccactttccatct

SEQ ID NO: 96794 - RNA, 21 nt, synthetic construct
  source 1..21: mol_type = other RNA
tacatagtgctcttctgatca

SEQ ID NO: 96795 - RNA, 21 nt, synthetic construct
  source 1..21: mol_type = other RNA
tacatatagaagtaaatcccg

SEQ ID NO: 96796 - RNA, 21 nt, synthetic construct
  source 1..21: mol_type = other RNA
tacatatggcaattccataaa

SEQ ID NO: 96797 - RNA, 21 nt, synthetic construct
  source 1..21: mol_type = other RNA
tacatcacagacagggaatgg

SEQ ID NO: 96798 - RNA, 21 nt, synthetic construct
  source 1..21: mol_type = other RNA
tacatcagcagtgaccatatt

SEQ ID NO: 96799 - RNA, 21 nt, synthetic construct
  source 1..21: mol_type = other RNA
tacatccccccacccctgctc

SEQ ID NO: 96800 - RNA, 21 nt, synthetic construct
  source 1..21: mol_type = other RNA
tacatctcaattcagaagcta

SEQ ID NO: 96801 - RNA, 21 nt, synthetic construct
  source 1..21: mol_type = other RNA
tacatctggatcctgtctcag

SEQ ID NO: 96802 - RNA, 21 nt, synthetic construct
  source 1..21: mol_type = other RNA
tacatgaagtcctcaatcatg

SEQ ID NO: 96803 - RNA, 21 nt, synthetic construct
  source 1..21: mol_type = other RNA
tacatgaatggaaaattcttg

SEQ ID NO: 96804 - RNA, 21 nt, synthetic construct
  source 1..21: mol_type = other RNA
tacatgacatggttttcctac

SEQ ID NO: 96805 - RNA, 21 nt, synthetic construct
  source 1..21: mol_type = other RNA
tacatgacctatctattaaca

SEQ ID NO: 96806 - RNA, 21 nt, synthetic construct
  source 1..21: mol_type = other RNA
tacatgaggcctctccccttg

SEQ ID NO: 96807 - RNA, 21 nt, synthetic construct
  source 1..21: mol_type = other RNA
tacatgaggtcacccaagcca

SEQ ID NO: 96808 - RNA, 21 nt, synthetic construct
  source 1..21: mol_type = other RNA
tacatgcttagccttccagag

SEQ ID NO: 96809 - RNA, 21 nt, synthetic construct
  source 1..21: mol_type = other RNA
tacatggttctgtgctagatg

SEQ ID NO: 96810 - RNA, 21 nt, synthetic construct
  source 1..21: mol_type = other RNA
tacatgtaaaaactgtttggc

SEQ ID NO: 96811 - RNA, 21 nt, synthetic construct
  source 1..21: mol_type = other RNA
tacatgtacgccaattttcat

SEQ ID NO: 96812 - RNA, 21 nt, synthetic construct
  source 1..21: mol_type = other RNA
tacatgtagatatgggagtcc

SEQ ID NO: 96813 - RNA, 21 nt, synthetic construct
  source 1..21: mol_type = other RNA
tacatgtagttttccctgtgt

SEQ ID NO: 96814 - RNA, 21 nt, synthetic construct
  source 1..21: mol_type = other RNA
tacatgtcatgttcccggatt

SEQ ID NO: 96815 - RNA, 21 nt, synthetic construct
  source 1..21: mol_type = other RNA
tacatgtttaactatcctatg

SEQ ID NO: 96816 - RNA, 21 nt, synthetic construct
  source 1..21: mol_type = other RNA
tacatgtttagcaagattact

SEQ ID NO: 96817 - RNA, 21 nt, synthetic construct
  source 1..21: mol_type = other RNA
tacattaaagacagctactaa

SEQ ID NO: 96818 - RNA, 21 nt, synthetic construct
  source 1..21: mol_type = other RNA
tacattaatctcatccacaat

SEQ ID NO: 96819 - RNA, 21 nt, synthetic construct
  source 1..21: mol_type = other RNA
tacattagagaagaatgagaa

SEQ ID NO: 96820 - RNA, 21 nt, synthetic construct
  source 1..21: mol_type = other RNA
tacattgccttcaagttgctt

SEQ ID NO: 96821 - RNA, 21 nt, synthetic construct
  source 1..21: mol_type = other RNA
tacattgccttcgcagggtga

SEQ ID NO: 96822 - RNA, 21 nt, synthetic construct
  source 1..21: mol_type = other RNA
tacattgtaatcctgtttctc

SEQ ID NO: 96823 - RNA, 21 nt, synthetic construct
  source 1..21: mol_type = other RNA
tacatttaaaagaaaatggcc

SEQ ID NO: 96824 - RNA, 21 nt, synthetic construct
  source 1..21: mol_type = other RNA
tacatttaaaattgcagagtg

SEQ ID NO: 96825 - RNA, 21 nt, synthetic construct
  source 1..21: mol_type = other RNA
tacatttgcttaggctgttat

SEQ ID NO: 96826 - RNA, 21 nt, synthetic construct
  source 1..21: mol_type = other RNA
taccaaaaaactacgagtatc

SEQ ID NO: 96827 - RNA, 21 nt, synthetic construct
  source 1..21: mol_type = other RNA
taccaaaaaaggtgctgttgt

SEQ ID NO: 96828 - RNA, 21 nt, synthetic construct
  source 1..21: mol_type = other RNA
taccaaaacagcttcttgtta

SEQ ID NO: 96829 - RNA, 21 nt, synthetic construct
  source 1..21: mol_type = other RNA
taccaaaacccttgggatgca

SEQ ID NO: 96830 - RNA, 21 nt, synthetic construct
  source 1..21: mol_type = other RNA
taccaaaacctggtatgagtg

SEQ ID NO: 96831 - RNA, 21 nt, synthetic construct
  source 1..21: mol_type = other RNA
taccaaaagtcctgttctttt

SEQ ID NO: 96832 - RNA, 21 nt, synthetic construct
  source 1..21: mol_type = other RNA
taccaaacattgaaggcagaa

SEQ ID NO: 96833 - RNA, 21 nt, synthetic construct
  source 1..21: mol_type = other RNA
taccaaagcagaaatacagac

SEQ ID NO: 96834 - RNA, 21 nt, synthetic construct
  source 1..21: mol_type = other RNA
taccaaattcacgagactgtt

SEQ ID NO: 96835 - RNA, 21 nt, synthetic construct
  source 1..21: mol_type = other RNA
taccaagcccggcacggtggc

SEQ ID NO: 96836 - RNA, 21 nt, synthetic construct
  source 1..21: mol_type = other RNA
taccaaggctaagttgagaaa

SEQ ID NO: 96837 - RNA, 21 nt, synthetic construct
  source 1..21: mol_type = other RNA
taccaagggtgtgtttaattt

SEQ ID NO: 96838 - RNA, 21 nt, synthetic construct
  source 1..21: mol_type = other RNA
taccaagtgccgcgttttttg

SEQ ID NO: 96839 - RNA, 21 nt, synthetic construct
  source 1..21: mol_type = other RNA
taccaagttgaatttctgtcc

SEQ ID NO: 96840 - RNA, 21 nt, synthetic construct
  source 1..21: mol_type = other RNA
taccaataaaagcctcatttg

SEQ ID NO: 96841 - RNA, 21 nt, synthetic construct
  source 1..21: mol_type = other RNA
taccaattctccctgaaattg

SEQ ID NO: 96842 - RNA, 21 nt, synthetic construct
  source 1..21: mol_type = other RNA
taccacattttgttcattcat

SEQ ID NO: 96843 - RNA, 21 nt, synthetic construct
  source 1..21: mol_type = other RNA
taccaccaagaaaaagcagag

SEQ ID NO: 96844 - RNA, 21 nt, synthetic construct
  source 1..21: mol_type = other RNA
taccaccacattcggccaaga

SEQ ID NO: 96845 - RNA, 21 nt, synthetic construct
  source 1..21: mol_type = other RNA
taccaccactaatgtcacatt

SEQ ID NO: 96846 - RNA, 21 nt, synthetic construct
  source 1..21: mol_type = other RNA
taccacccgtccaatttcttt

SEQ ID NO: 96847 - RNA, 21 nt, synthetic construct
  source 1..21: mol_type = other RNA
taccacctgaaatctgatttg

SEQ ID NO: 96848 - RNA, 21 nt, synthetic construct
  source 1..21: mol_type = other RNA
taccacctgtcagaaacacca

SEQ ID NO: 96849 - RNA, 21 nt, synthetic construct
  source 1..21: mol_type = other RNA
taccactagcaaactactgat

SEQ ID NO: 96850 - RNA, 21 nt, synthetic construct
  source 1..21: mol_type = other RNA
taccactataatccagatgga

SEQ ID NO: 96851 - RNA, 21 nt, synthetic construct
  source 1..21: mol_type = other RNA
taccactgaagtgttgagagg

SEQ ID NO: 96852 - RNA, 21 nt, synthetic construct
  source 1..21: mol_type = other RNA
taccactgaggtcaagaaata

SEQ ID NO: 96853 - RNA, 21 nt, synthetic construct
  source 1..21: mol_type = other RNA
taccacttagtttgcaataca

SEQ ID NO: 96854 - RNA, 21 nt, synthetic construct
  source 1..21: mol_type = other RNA
taccagaccctttatcggata

SEQ ID NO: 96855 - RNA, 21 nt, synthetic construct
  source 1..21: mol_type = other RNA
taccagagattgggaaaatct

SEQ ID NO: 96856 - RNA, 21 nt, synthetic construct
  source 1..21: mol_type = other RNA
taccagaggttaaagcaacag

SEQ ID NO: 96857 - RNA, 21 nt, synthetic construct
  source 1..21: mol_type = other RNA
taccagcttacagcagatctg

SEQ ID NO: 96858 - RNA, 21 nt, synthetic construct
  source 1..21: mol_type = other RNA
taccaggctggaagaatttta

SEQ ID NO: 96859 - RNA, 21 nt, synthetic construct
  source 1..21: mol_type = other RNA
taccaggtcagccagaggaag

SEQ ID NO: 96860 - RNA, 21 nt, synthetic construct
  source 1..21: mol_type = other RNA
taccaggttttggtaatggga

SEQ ID NO: 96861 - RNA, 21 nt, synthetic construct
  source 1..21: mol_type = other RNA
taccagtgcttgcagccttcc

SEQ ID NO: 96862 - RNA, 21 nt, synthetic construct
  source 1..21: mol_type = other RNA
taccataaaaccatttttcag

SEQ ID NO: 96863 - RNA, 21 nt, synthetic construct
  source 1..21: mol_type = other RNA
taccataaagtcagaggagca

SEQ ID NO: 96864 - RNA, 21 nt, synthetic construct
  source 1..21: mol_type = other RNA
taccataaagtcttccatttt

SEQ ID NO: 96865 - RNA, 21 nt, synthetic construct
  source 1..21: mol_type = other RNA
taccatatacacaaaaagatc

SEQ ID NO: 96866 - RNA, 21 nt, synthetic construct
  source 1..21: mol_type = other RNA
taccatcagagtgaacaggca

SEQ ID NO: 96867 - RNA, 21 nt, synthetic construct
  source 1..21: mol_type = other RNA
taccatctaaagccaggcttt

SEQ ID NO: 96868 - RNA, 21 nt, synthetic construct
  source 1..21: mol_type = other RNA
taccatctctccaacagaaga

SEQ ID NO: 96869 - RNA, 21 nt, synthetic construct
  source 1..21: mol_type = other RNA
taccatctgacatatgttttg

SEQ ID NO: 96870 - RNA, 21 nt, synthetic construct
  source 1..21: mol_type = other RNA
taccatgttgttcttttcaaa

SEQ ID NO: 96871 - RNA, 21 nt, synthetic construct
  source 1..21: mol_type = other RNA
taccatgtttccataaaaagc

SEQ ID NO: 96872 - RNA, 21 nt, synthetic construct
  source 1..21: mol_type = other RNA
taccattccccttgccaaggc

SEQ ID NO: 96873 - RNA, 21 nt, synthetic construct
  source 1..21: mol_type = other RNA
taccatttattcctctcttgg

SEQ ID NO: 96874 - RNA, 21 nt, synthetic construct
  source 1..21: mol_type = other RNA
taccatttgaccttccttgtg

SEQ ID NO: 96875 - RNA, 21 nt, synthetic construct
  source 1..21: mol_type = other RNA
tacccaaagactttgttttgt

SEQ ID NO: 96876 - RNA, 21 nt, synthetic construct
  source 1..21: mol_type = other RNA
tacccaacatgagagaaaatt

SEQ ID NO: 96877 - RNA, 21 nt, synthetic construct
  source 1..21: mol_type = other RNA
tacccaagcttaggtcagatt

SEQ ID NO: 96878 - RNA, 21 nt, synthetic construct
  source 1..21: mol_type = other RNA
tacccaagtaaacaactgact

SEQ ID NO: 96879 - RNA, 21 nt, synthetic construct
  source 1..21: mol_type = other RNA
tacccacaaaagaaaattttc

SEQ ID NO: 96880 - RNA, 21 nt, synthetic construct
  source 1..21: mol_type = other RNA
tacccacaagaaaaacctaaa

SEQ ID NO: 96881 - RNA, 21 nt, synthetic construct
  source 1..21: mol_type = other RNA
tacccactattgaaagccctt

SEQ ID NO: 96882 - RNA, 21 nt, synthetic construct
  source 1..21: mol_type = other RNA
tacccagcactctgaatcacc

SEQ ID NO: 96883 - RNA, 21 nt, synthetic construct
  source 1..21: mol_type = other RNA
tacccaggcatgatggctcaa

SEQ ID NO: 96884 - RNA, 21 nt, synthetic construct
  source 1..21: mol_type = other RNA
tacccaggtgtgagattgata

SEQ ID NO: 96885 - RNA, 21 nt, synthetic construct
  source 1..21: mol_type = other RNA
tacccagtgtgtttgtttgct

SEQ ID NO: 96886 - RNA, 21 nt, synthetic construct
  source 1..21: mol_type = other RNA
tacccattagacactaacttt

SEQ ID NO: 96887 - RNA, 21 nt, synthetic construct
  source 1..21: mol_type = other RNA
taccccaaccctacctagggt

SEQ ID NO: 96888 - RNA, 21 nt, synthetic construct
  source 1..21: mol_type = other RNA
taccccattcactcagcataa

SEQ ID NO: 96889 - RNA, 21 nt, synthetic construct
  source 1..21: mol_type = other RNA
tacccccatcacactggtcac

SEQ ID NO: 96890 - RNA, 21 nt, synthetic construct
  source 1..21: mol_type = other RNA
taccccctggaaataagtttc

SEQ ID NO: 96891 - RNA, 21 nt, synthetic construct
  source 1..21: mol_type = other RNA
tacccctactttttgtcacac

SEQ ID NO: 96892 - RNA, 21 nt, synthetic construct
  source 1..21: mol_type = other RNA
tacccctccctacctggcagt

SEQ ID NO: 96893 - RNA, 21 nt, synthetic construct
  source 1..21: mol_type = other RNA
tacccctgagaacttcagtat

SEQ ID NO: 96894 - RNA, 21 nt, synthetic construct
  source 1..21: mol_type = other RNA
taccccttaaattccaaaagt

SEQ ID NO: 96895 - RNA, 21 nt, synthetic construct
  source 1..21: mol_type = other RNA
tacccggagaggtgaactatt

SEQ ID NO: 96896 - RNA, 21 nt, synthetic construct
  source 1..21: mol_type = other RNA
tacccgtggaaatacttgaac

SEQ ID NO: 96897 - RNA, 21 nt, synthetic construct
  source 1..21: mol_type = other RNA
tacccgtgtgttttgttgttg

SEQ ID NO: 96898 - RNA, 21 nt, synthetic construct
  source 1..21: mol_type = other RNA
taccctaataacaaaatagga

SEQ ID NO: 96899 - RNA, 21 nt, synthetic construct
  source 1..21: mol_type = other RNA
taccctcaaaagatgcagaaa

SEQ ID NO: 96900 - RNA, 21 nt, synthetic construct
  source 1..21: mol_type = other RNA
taccctcacagtcacaaagct

SEQ ID NO: 96901 - RNA, 21 nt, synthetic construct
  source 1..21: mol_type = other RNA
taccctcattttataagggtg

SEQ ID NO: 96902 - RNA, 21 nt, synthetic construct
  source 1..21: mol_type = other RNA
taccctcgagtaaaaagaatg

SEQ ID NO: 96903 - RNA, 21 nt, synthetic construct
  source 1..21: mol_type = other RNA
taccctctagctccccattcc

SEQ ID NO: 96904 - RNA, 21 nt, synthetic construct
  source 1..21: mol_type = other RNA
taccctctggaatgcccatcc

SEQ ID NO: 96905 - RNA, 21 nt, synthetic construct
  source 1..21: mol_type = other RNA
taccctgaggatataacgata

SEQ ID NO: 96906 - RNA, 21 nt, synthetic construct
  source 1..21: mol_type = other RNA
taccctgccttccttgggcac

SEQ ID NO: 96907 - RNA, 21 nt, synthetic construct
  source 1..21: mol_type = other RNA
taccctgctggaacgaatatt

SEQ ID NO: 96908 - RNA, 21 nt, synthetic construct
  source 1..21: mol_type = other RNA
tacccttacgcgtggatgtgt

SEQ ID NO: 96909 - RNA, 21 nt, synthetic construct
  source 1..21: mol_type = other RNA
tacccttactaaattttgagg

SEQ ID NO: 96910 - RNA, 21 nt, synthetic construct
  source 1..21: mol_type = other RNA
tacccttctgttaatagatag

SEQ ID NO: 96911 - RNA, 21 nt, synthetic construct
  source 1..21: mol_type = other RNA
taccctttactcagattcacc

SEQ ID NO: 96912 - RNA, 21 nt, synthetic construct
  source 1..21: mol_type = other RNA
taccctttccaaattcaaagc

SEQ ID NO: 96913 - RNA, 21 nt, synthetic construct
  source 1..21: mol_type = other RNA
taccctttcttgttagtagga

SEQ ID NO: 96914 - RNA, 21 nt, synthetic construct
  source 1..21: mol_type = other RNA
taccgacggctcaggcctgtt

SEQ ID NO: 96915 - RNA, 21 nt, synthetic construct
  source 1..21: mol_type = other RNA
taccgagtaatgggatggctg

SEQ ID NO: 96916 - RNA, 21 nt, synthetic construct
  source 1..21: mol_type = other RNA
taccggcatccgccaccacgc

SEQ ID NO: 96917 - RNA, 21 nt, synthetic construct
  source 1..21: mol_type = other RNA
tacctaaaaagggagtcagta

SEQ ID NO: 96918 - RNA, 21 nt, synthetic construct
  source 1..21: mol_type = other RNA
tacctaacagccggcatatgt

SEQ ID NO: 96919 - RNA, 21 nt, synthetic construct
  source 1..21: mol_type = other RNA
tacctaagcatcgtgaagtct

SEQ ID NO: 96920 - RNA, 21 nt, synthetic construct
  source 1..21: mol_type = other RNA
tacctagaaaaacaccaaaaa

SEQ ID NO: 96921 - RNA, 21 nt, synthetic construct
  source 1..21: mol_type = other RNA
tacctagggtgtaaaaggcta

SEQ ID NO: 96922 - RNA, 21 nt, synthetic construct
  source 1..21: mol_type = other RNA
tacctagtacgtaacctaaag

SEQ ID NO: 96923 - RNA, 21 nt, synthetic construct
  source 1..21: mol_type = other RNA
tacctagttttccaatccggg

SEQ ID NO: 96924 - RNA, 21 nt, synthetic construct
  source 1..21: mol_type = other RNA
tacctatagaattcttcttct

SEQ ID NO: 96925 - RNA, 21 nt, synthetic construct
  source 1..21: mol_type = other RNA
tacctatgaataggtgtgtgt

SEQ ID NO: 96926 - RNA, 21 nt, synthetic construct
  source 1..21: mol_type = other RNA
tacctatttagagggatgaat

SEQ ID NO: 96927 - RNA, 21 nt, synthetic construct
  source 1..21: mol_type = other RNA
tacctcaaaggagagaagagg

SEQ ID NO: 96928 - RNA, 21 nt, synthetic construct
  source 1..21: mol_type = other RNA
tacctcaaattgtgtgttctc

SEQ ID NO: 96929 - RNA, 21 nt, synthetic construct
  source 1..21: mol_type = other RNA
tacctcccatgcattcgtccc

SEQ ID NO: 96930 - RNA, 21 nt, synthetic construct
  source 1..21: mol_type = other RNA
tacctcccttcacaaagccct

SEQ ID NO: 96931 - RNA, 21 nt, synthetic construct
  source 1..21: mol_type = other RNA
tacctctgggatgctcagttt

SEQ ID NO: 96932 - RNA, 21 nt, synthetic construct
  source 1..21: mol_type = other RNA
tacctgaaaagtgtattattc

SEQ ID NO: 96933 - RNA, 21 nt, synthetic construct
  source 1..21: mol_type = other RNA
tacctgacttcaaactatact

SEQ ID NO: 96934 - RNA, 21 nt, synthetic construct
  source 1..21: mol_type = other RNA
tacctgcaggttgatactagt

SEQ ID NO: 96935 - RNA, 21 nt, synthetic construct
  source 1..21: mol_type = other RNA
tacctggagcctgaggacact

SEQ ID NO: 96936 - RNA, 21 nt, synthetic construct
  source 1..21: mol_type = other RNA
tacctggcagtctaggaaaag

SEQ ID NO: 96937 - RNA, 21 nt, synthetic construct
  source 1..21: mol_type = other RNA
tacctggtccttaaatttcta

SEQ ID NO: 96938 - RNA, 21 nt, synthetic construct
  source 1..21: mol_type = other RNA
tacctgtagaaaatagggacg

SEQ ID NO: 96939 - RNA, 21 nt, synthetic construct
  source 1..21: mol_type = other RNA
tacctgtctttcccattacca

SEQ ID NO: 96940 - RNA, 21 nt, synthetic construct
  source 1..21: mol_type = other RNA
tacctgttgaatagcaactgt

SEQ ID NO: 96941 - RNA, 21 nt, synthetic construct
  source 1..21: mol_type = other RNA
tacctgttgattgttgccatc

SEQ ID NO: 96942 - RNA, 21 nt, synthetic construct
  source 1..21: mol_type = other RNA
taccttatagatgacgaaagt

SEQ ID NO: 96943 - RNA, 21 nt, synthetic construct
  source 1..21: mol_type = other RNA
taccttatgtgaaagtagagg

SEQ ID NO: 96944 - RNA, 21 nt, synthetic construct
  source 1..21: mol_type = other RNA
taccttccaaagtatgcatag

SEQ ID NO: 96945 - RNA, 21 nt, synthetic construct
  source 1..21: mol_type = other RNA
taccttctaaaatcatcacag

SEQ ID NO: 96946 - RNA, 21 nt, synthetic construct
  source 1..21: mol_type = other RNA
taccttcttgagagtctctta

SEQ ID NO: 96947 - RNA, 21 nt, synthetic construct
  source 1..21: mol_type = other RNA
taccttgaaaatgcccttatt

SEQ ID NO: 96948 - RNA, 21 nt, synthetic construct
  source 1..21: mol_type = other RNA
taccttgaaaggatactgaga

SEQ ID NO: 96949 - RNA, 21 nt, synthetic construct
  source 1..21: mol_type = other RNA
taccttgatttatggcctaag

SEQ ID NO: 96950 - RNA, 21 nt, synthetic construct
  source 1..21: mol_type = other RNA
taccttggagagaaaccttgg

SEQ ID NO: 96951 - RNA, 21 nt, synthetic construct
  source 1..21: mol_type = other RNA
tacctttatctttggatatcc

SEQ ID NO: 96952 - RNA, 21 nt, synthetic construct
  source 1..21: mol_type = other RNA
tacctttcgctatcagtagtt

SEQ ID NO: 96953 - RNA, 21 nt, synthetic construct
  source 1..21: mol_type = other RNA
tacctttggctactgtaaaca

SEQ ID NO: 96954 - RNA, 21 nt, synthetic construct
  source 1..21: mol_type = other RNA
tacgaaagcctttattttttc

SEQ ID NO: 96955 - RNA, 21 nt, synthetic construct
  source 1..21: mol_type = other RNA
tacgaaagtgctctacccttt

SEQ ID NO: 96956 - RNA, 21 nt, synthetic construct
  source 1..21: mol_type = other RNA
tacgaagctacagtaatcaaa

SEQ ID NO: 96957 - RNA, 21 nt, synthetic construct
  source 1..21: mol_type = other RNA
tacgaatgaactcctatagtt

SEQ ID NO: 96958 - RNA, 21 nt, synthetic construct
  source 1..21: mol_type = other RNA
tacgacgctcttgttcaaaaa

SEQ ID NO: 96959 - RNA, 21 nt, synthetic construct
  source 1..21: mol_type = other RNA
tacgaggacagactgcagttg

SEQ ID NO: 96960 - RNA, 21 nt, synthetic construct
  source 1..21: mol_type = other RNA
tacgagtatcatataaattgc

SEQ ID NO: 96961 - RNA, 21 nt, synthetic construct
  source 1..21: mol_type = other RNA
tacgagttatgcaagatgtca

SEQ ID NO: 96962 - RNA, 21 nt, synthetic construct
  source 1..21: mol_type = other RNA
tacgatgaaattgaccattcc

SEQ ID NO: 96963 - RNA, 21 nt, synthetic construct
  source 1..21: mol_type = other RNA
tacgccaattttcatagcagc

SEQ ID NO: 96964 - RNA, 21 nt, synthetic construct
  source 1..21: mol_type = other RNA
tacgcccggcccatgacatgt

SEQ ID NO: 96965 - RNA, 21 nt, synthetic construct
  source 1..21: mol_type = other RNA
tacgcctagctgacttttaaa

SEQ ID NO: 96966 - RNA, 21 nt, synthetic construct
  source 1..21: mol_type = other RNA
tacgcgggaggctgaggcagg

SEQ ID NO: 96967 - RNA, 21 nt, synthetic construct
  source 1..21: mol_type = other RNA
tacgcgtggatgtgtgcacaa

SEQ ID NO: 96968 - RNA, 21 nt, synthetic construct
  source 1..21: mol_type = other RNA
tacgctccctcgcgcggcacc

SEQ ID NO: 96969 - RNA, 21 nt, synthetic construct
  source 1..21: mol_type = other RNA
tacgctgccaaaagccaagag

SEQ ID NO: 96970 - RNA, 21 nt, synthetic construct
  source 1..21: mol_type = other RNA
tacggaaatataacattacca

SEQ ID NO: 96971 - RNA, 21 nt, synthetic construct
  source 1..21: mol_type = other RNA
tacggaatgattccacttata

SEQ ID NO: 96972 - RNA, 21 nt, synthetic construct
  source 1..21: mol_type = other RNA
tacggacgcaggcaaacagcg

SEQ ID NO: 96973 - RNA, 21 nt, synthetic construct
  source 1..21: mol_type = other RNA
tacggaggatgaggggctgag

SEQ ID NO: 96974 - RNA, 21 nt, synthetic construct
  source 1..21: mol_type = other RNA
tacggagtctcgctctgtccc

SEQ ID NO: 96975 - RNA, 21 nt, synthetic construct
  source 1..21: mol_type = other RNA
tacggttccctgtagagattt

SEQ ID NO: 96976 - RNA, 21 nt, synthetic construct
  source 1..21: mol_type = other RNA
tacgtaacctaaagttgaggt

SEQ ID NO: 96977 - RNA, 21 nt, synthetic construct
  source 1..21: mol_type = other RNA
tacgtactaggtatcacagtg

SEQ ID NO: 96978 - RNA, 21 nt, synthetic construct
  source 1..21: mol_type = other RNA
tacgtatatgaaaagcccaat

SEQ ID NO: 96979 - RNA, 21 nt, synthetic construct
  source 1..21: mol_type = other RNA
tacgtatttatcatgtcttct

SEQ ID NO: 96980 - RNA, 21 nt, synthetic construct
  source 1..21: mol_type = other RNA
tacgtcgtcccccatcccctt

SEQ ID NO: 96981 - RNA, 21 nt, synthetic construct
  source 1..21: mol_type = other RNA
tacgtgcagagcaggggtggg

SEQ ID NO: 96982 - RNA, 21 nt, synthetic construct
  source 1..21: mol_type = other RNA
tacgtgtatactgggtgtgat

SEQ ID NO: 96983 - RNA, 21 nt, synthetic construct
  source 1..21: mol_type = other RNA
tacgttaaaggaaaagagatc

SEQ ID NO: 96984 - RNA, 21 nt, synthetic construct
  source 1..21: mol_type = other RNA
tacgttaactgtattgcaaac

SEQ ID NO: 96985 - RNA, 21 nt, synthetic construct
  source 1..21: mol_type = other RNA
tactaaaaagaaaaagttggg

SEQ ID NO: 96986 - RNA, 21 nt, synthetic construct
  source 1..21: mol_type = other RNA
tactaaactgaacgaagtgaa

SEQ ID NO: 96987 - RNA, 21 nt, synthetic construct
  source 1..21: mol_type = other RNA
tactaaatacaccaaactcaa

SEQ ID NO: 96988 - RNA, 21 nt, synthetic construct
  source 1..21: mol_type = other RNA
tactaaatgatctttcaaggg

SEQ ID NO: 96989 - RNA, 21 nt, synthetic construct
  source 1..21: mol_type = other RNA
tactaaattttgaggcttttg

SEQ ID NO: 96990 - RNA, 21 nt, synthetic construct
  source 1..21: mol_type = other RNA
tactaacaagaaagggtagct

SEQ ID NO: 96991 - RNA, 21 nt, synthetic construct
  source 1..21: mol_type = other RNA
tactaacgatccttactacca

SEQ ID NO: 96992 - RNA, 21 nt, synthetic construct
  source 1..21: mol_type = other RNA
tactaagaagtgaaactgctg

SEQ ID NO: 96993 - RNA, 21 nt, synthetic construct
  source 1..21: mol_type = other RNA
tactaagcctatgtaagacaa

SEQ ID NO: 96994 - RNA, 21 nt, synthetic construct
  source 1..21: mol_type = other RNA
tactacaagagttcccctata

SEQ ID NO: 96995 - RNA, 21 nt, synthetic construct
  source 1..21: mol_type = other RNA
tactaccaccactaatgtcac

SEQ ID NO: 96996 - RNA, 21 nt, synthetic construct
  source 1..21: mol_type = other RNA
tactacctatagaattcttct

SEQ ID NO: 96997 - RNA, 21 nt, synthetic construct
  source 1..21: mol_type = other RNA
tactacgaagctacagtaatc

SEQ ID NO: 96998 - RNA, 21 nt, synthetic construct
  source 1..21: mol_type = other RNA
tactacgcctagctgactttt

SEQ ID NO: 96999 - RNA, 21 nt, synthetic construct
  source 1..21: mol_type = other RNA
tactactgacctgggagaaag

SEQ ID NO: 97000 - RNA, 21 nt, synthetic construct
  source 1..21: mol_type = other RNA
tactactgcaaatatccaatc

SEQ ID NO: 97001 - RNA, 21 nt, synthetic construct
  source 1..21: mol_type = other RNA
tactactgcattttttgccaa

SEQ ID NO: 97002 - RNA, 21 nt, synthetic construct
  source 1..21: mol_type = other RNA
tactactgtactgtttagcat

SEQ ID NO: 97003 - RNA, 21 nt, synthetic construct
  source 1..21: mol_type = other RNA
tactacttgtcaggtgggcac

SEQ ID NO: 97004 - RNA, 21 nt, synthetic construct
  source 1..21: mol_type = other RNA
tactagaagcactttttacca

SEQ ID NO: 97005 - RNA, 21 nt, synthetic construct
  source 1..21: mol_type = other RNA
tactagatcaagcccttcctt

SEQ ID NO: 97006 - RNA, 21 nt, synthetic construct
  source 1..21: mol_type = other RNA
tactagcaaactgaatcagac

SEQ ID NO: 97007 - RNA, 21 nt, synthetic construct
  source 1..21: mol_type = other RNA
tactagccagtgattggatat

SEQ ID NO: 97008 - RNA, 21 nt, synthetic construct
  source 1..21: mol_type = other RNA
tactaggtatcacagtgagga

SEQ ID NO: 97009 - RNA, 21 nt, synthetic construct
  source 1..21: mol_type = other RNA
tactagtagaaagcaggttca

SEQ ID NO: 97010 - RNA, 21 nt, synthetic construct
  source 1..21: mol_type = other RNA
tactagtaggatgaattacaa

SEQ ID NO: 97011 - RNA, 21 nt, synthetic construct
  source 1..21: mol_type = other RNA
tactagtataagagaaggaag

SEQ ID NO: 97012 - RNA, 21 nt, synthetic construct
  source 1..21: mol_type = other RNA
tactagtcagcacactcttaa

SEQ ID NO: 97013 - RNA, 21 nt, synthetic construct
  source 1..21: mol_type = other RNA
tactagtctccatacaaggag

SEQ ID NO: 97014 - RNA, 21 nt, synthetic construct
  source 1..21: mol_type = other RNA
tactagttgtgctacctcaaa

SEQ ID NO: 97015 - RNA, 21 nt, synthetic construct
  source 1..21: mol_type = other RNA
tactagtttagtgcagtatct

SEQ ID NO: 97016 - RNA, 21 nt, synthetic construct
  source 1..21: mol_type = other RNA
tactatatgatccagcagttt

SEQ ID NO: 97017 - RNA, 21 nt, synthetic construct
  source 1..21: mol_type = other RNA
tactatcttccctaaagagaa

SEQ ID NO: 97018 - RNA, 21 nt, synthetic construct
  source 1..21: mol_type = other RNA
tactatgcagcaacggaaatg

SEQ ID NO: 97019 - RNA, 21 nt, synthetic construct
  source 1..21: mol_type = other RNA
tactatgtatgtggctcacat

SEQ ID NO: 97020 - RNA, 21 nt, synthetic construct
  source 1..21: mol_type = other RNA
tactattccaggatcaaatct

SEQ ID NO: 97021 - RNA, 21 nt, synthetic construct
  source 1..21: mol_type = other RNA
tactatttcgcaaagcaacat

SEQ ID NO: 97022 - RNA, 21 nt, synthetic construct
  source 1..21: mol_type = other RNA
tactattttctatagtggctg

SEQ ID NO: 97023 - RNA, 21 nt, synthetic construct
  source 1..21: mol_type = other RNA
tactcaaactatgcttaatct

SEQ ID NO: 97024 - RNA, 21 nt, synthetic construct
  source 1..21: mol_type = other RNA
tactcaaatccaaattcacag

SEQ ID NO: 97025 - RNA, 21 nt, synthetic construct
  source 1..21: mol_type = other RNA
tactcaacatcactagctatt

SEQ ID NO: 97026 - RNA, 21 nt, synthetic construct
  source 1..21: mol_type = other RNA
tactcaacgacaatctctggg

SEQ ID NO: 97027 - RNA, 21 nt, synthetic construct
  source 1..21: mol_type = other RNA
tactcaagggctttcaatagt

SEQ ID NO: 97028 - RNA, 21 nt, synthetic construct
  source 1..21: mol_type = other RNA
tactcaatcagtggccagtga

SEQ ID NO: 97029 - RNA, 21 nt, synthetic construct
  source 1..21: mol_type = other RNA
tactcactgaaaccctcacga

SEQ ID NO: 97030 - RNA, 21 nt, synthetic construct
  source 1..21: mol_type = other RNA
tactcactgtactactgacct

SEQ ID NO: 97031 - RNA, 21 nt, synthetic construct
  source 1..21: mol_type = other RNA
tactcagattcaccaattgtt

SEQ ID NO: 97032 - RNA, 21 nt, synthetic construct
  source 1..21: mol_type = other RNA
tactcagccccctcgaagaga

SEQ ID NO: 97033 - RNA, 21 nt, synthetic construct
  source 1..21: mol_type = other RNA
tactcagctgtcactctcttt

SEQ ID NO: 97034 - RNA, 21 nt, synthetic construct
  source 1..21: mol_type = other RNA
tactcaggagattaaggctgg

SEQ ID NO: 97035 - RNA, 21 nt, synthetic construct
  source 1..21: mol_type = other RNA
tactcaggaggctgaggcagg

SEQ ID NO: 97036 - RNA, 21 nt, synthetic construct
  source 1..21: mol_type = other RNA
tactcagtctcgaaaaggaat

SEQ ID NO: 97037 - RNA, 21 nt, synthetic construct
  source 1..21: mol_type = other RNA
tactcatgcttgctccagaga

SEQ ID NO: 97038 - RNA, 21 nt, synthetic construct
  source 1..21: mol_type = other RNA
tactcatgtctacctgtcttt

SEQ ID NO: 97039 - RNA, 21 nt, synthetic construct
  source 1..21: mol_type = other RNA
tactcattatggttgttggct

SEQ ID NO: 97040 - RNA, 21 nt, synthetic construct
  source 1..21: mol_type = other RNA
tactccaagaaggctagcaca

SEQ ID NO: 97041 - RNA, 21 nt, synthetic construct
  source 1..21: mol_type = other RNA
tactccaccagcatcttttga

SEQ ID NO: 97042 - RNA, 21 nt, synthetic construct
  source 1..21: mol_type = other RNA
tactccagcctgggcgacaag

SEQ ID NO: 97043 - RNA, 21 nt, synthetic construct
  source 1..21: mol_type = other RNA
tactcccagcctcaaacaatc

SEQ ID NO: 97044 - RNA, 21 nt, synthetic construct
  source 1..21: mol_type = other RNA
tactcccgatttcagttaact

SEQ ID NO: 97045 - RNA, 21 nt, synthetic construct
  source 1..21: mol_type = other RNA
tactcctagatactcgggagg

SEQ ID NO: 97046 - RNA, 21 nt, synthetic construct
  source 1..21: mol_type = other RNA
tactcctgagcaaggaaggaa

SEQ ID NO: 97047 - RNA, 21 nt, synthetic construct
  source 1..21: mol_type = other RNA
tactcgagggtagcttttcct

SEQ ID NO: 97048 - RNA, 21 nt, synthetic construct
  source 1..21: mol_type = other RNA
tactcggtatgtacccaatgg

SEQ ID NO: 97049 - RNA, 21 nt, synthetic construct
  source 1..21: mol_type = other RNA
tactcgtagttttttggtaga

SEQ ID NO: 97050 - RNA, 21 nt, synthetic construct
  source 1..21: mol_type = other RNA
tactcgtggttatagccataa

SEQ ID NO: 97051 - RNA, 21 nt, synthetic construct
  source 1..21: mol_type = other RNA
tactcgtgtgtctcataaagc

SEQ ID NO: 97052 - RNA, 21 nt, synthetic construct
  source 1..21: mol_type = other RNA
tactctaatggggaaatagat

SEQ ID NO: 97053 - RNA, 21 nt, synthetic construct
  source 1..21: mol_type = other RNA
tactctagtggtgcttaattc

SEQ ID NO: 97054 - RNA, 21 nt, synthetic construct
  source 1..21: mol_type = other RNA
tactctcaaataatttggcaa

SEQ ID NO: 97055 - RNA, 21 nt, synthetic construct
  source 1..21: mol_type = other RNA
tactctcagaaattataagct

SEQ ID NO: 97056 - RNA, 21 nt, synthetic construct
  source 1..21: mol_type = other RNA
tactctctctgcctcggcaca

SEQ ID NO: 97057 - RNA, 21 nt, synthetic construct
  source 1..21: mol_type = other RNA
tactctctttaattatgagca

SEQ ID NO: 97058 - RNA, 21 nt, synthetic construct
  source 1..21: mol_type = other RNA
tactctgagacaggatccaga

SEQ ID NO: 97059 - RNA, 21 nt, synthetic construct
  source 1..21: mol_type = other RNA
tactctgcctcagttgacatc

SEQ ID NO: 97060 - RNA, 21 nt, synthetic construct
  source 1..21: mol_type = other RNA
tactcttaaagtttcaaactg

SEQ ID NO: 97061 - RNA, 21 nt, synthetic construct
  source 1..21: mol_type = other RNA
tactcttctactcactgtact

SEQ ID NO: 97062 - RNA, 21 nt, synthetic construct
  source 1..21: mol_type = other RNA
tactcttttgtttttgggggg

SEQ ID NO: 97063 - RNA, 21 nt, synthetic construct
  source 1..21: mol_type = other RNA
tactgaaaccagtgctctccc

SEQ ID NO: 97064 - RNA, 21 nt, synthetic construct
  source 1..21: mol_type = other RNA
tactgaaagacagacctctat

SEQ ID NO: 97065 - RNA, 21 nt, synthetic construct
  source 1..21: mol_type = other RNA
tactgaaatcctagccccaaa

SEQ ID NO: 97066 - RNA, 21 nt, synthetic construct
  source 1..21: mol_type = other RNA
tactgaaggcatagggccttc

SEQ ID NO: 97067 - RNA, 21 nt, synthetic construct
  source 1..21: mol_type = other RNA
tactgaagttctcaggggtaa

SEQ ID NO: 97068 - RNA, 21 nt, synthetic construct
  source 1..21: mol_type = other RNA
tactgacaatagccaagacat

SEQ ID NO: 97069 - RNA, 21 nt, synthetic construct
  source 1..21: mol_type = other RNA
tactgaccatctcagcacaga

SEQ ID NO: 97070 - RNA, 21 nt, synthetic construct
  source 1..21: mol_type = other RNA
tactgacctgggagaaagacc

SEQ ID NO: 97071 - RNA, 21 nt, synthetic construct
  source 1..21: mol_type = other RNA
tactgactagtggctcatact

SEQ ID NO: 97072 - RNA, 21 nt, synthetic construct
  source 1..21: mol_type = other RNA
tactgactcaatcttcttatt

SEQ ID NO: 97073 - RNA, 21 nt, synthetic construct
  source 1..21: mol_type = other RNA
tactgactccctttttaggta

SEQ ID NO: 97074 - RNA, 21 nt, synthetic construct
  source 1..21: mol_type = other RNA
tactgagtcaaaaccaaagaa

SEQ ID NO: 97075 - RNA, 21 nt, synthetic construct
  source 1..21: mol_type = other RNA
tactgatagcgaaaggtacga

SEQ ID NO: 97076 - RNA, 21 nt, synthetic construct
  source 1..21: mol_type = other RNA
tactgatctgctcaagttttc

SEQ ID NO: 97077 - RNA, 21 nt, synthetic construct
  source 1..21: mol_type = other RNA
tactgatcttttctgacaatt

SEQ ID NO: 97078 - RNA, 21 nt, synthetic construct
  source 1..21: mol_type = other RNA
tactgattagaaggattgttc

SEQ ID NO: 97079 - RNA, 21 nt, synthetic construct
  source 1..21: mol_type = other RNA
tactgatttatagtgtttcct

SEQ ID NO: 97080 - RNA, 21 nt, synthetic construct
  source 1..21: mol_type = other RNA
tactgcaaatatccaatcact

SEQ ID NO: 97081 - RNA, 21 nt, synthetic construct
  source 1..21: mol_type = other RNA
tactgcaacctccgtttttca

SEQ ID NO: 97082 - RNA, 21 nt, synthetic construct
  source 1..21: mol_type = other RNA
tactgcactaaactagtatca

SEQ ID NO: 97083 - RNA, 21 nt, synthetic construct
  source 1..21: mol_type = other RNA
tactgcactctcaaaattaaa

SEQ ID NO: 97084 - RNA, 21 nt, synthetic construct
  source 1..21: mol_type = other RNA
tactgcagcacttttaaggct

SEQ ID NO: 97085 - RNA, 21 nt, synthetic construct
  source 1..21: mol_type = other RNA
tactgcatattgaagccagca

SEQ ID NO: 97086 - RNA, 21 nt, synthetic construct
  source 1..21: mol_type = other RNA
tactgcatgattccccttata

SEQ ID NO: 97087 - RNA, 21 nt, synthetic construct
  source 1..21: mol_type = other RNA
tactgcatgctaggggctgtt

SEQ ID NO: 97088 - RNA, 21 nt, synthetic construct
  source 1..21: mol_type = other RNA
tactgcattgtgcacttaaaa

SEQ ID NO: 97089 - RNA, 21 nt, synthetic construct
  source 1..21: mol_type = other RNA
tactgcattttttgccaaatt

SEQ ID NO: 97090 - RNA, 21 nt, synthetic construct
  source 1..21: mol_type = other RNA
tactgcctccacaggctttga

SEQ ID NO: 97091 - RNA, 21 nt, synthetic construct
  source 1..21: mol_type = other RNA
tactgctataaacttccctct

SEQ ID NO: 97092 - RNA, 21 nt, synthetic construct
  source 1..21: mol_type = other RNA
tactgctatacaaccggaaaa

SEQ ID NO: 97093 - RNA, 21 nt, synthetic construct
  source 1..21: mol_type = other RNA
tactgctctgtcctgtcagtg

SEQ ID NO: 97094 - RNA, 21 nt, synthetic construct
  source 1..21: mol_type = other RNA
tactgcttgctgcactggcta

SEQ ID NO: 97095 - RNA, 21 nt, synthetic construct
  source 1..21: mol_type = other RNA
tactggaaaactagagatggg

SEQ ID NO: 97096 - RNA, 21 nt, synthetic construct
  source 1..21: mol_type = other RNA
tactggaaatggacagcgggg

SEQ ID NO: 97097 - RNA, 21 nt, synthetic construct
  source 1..21: mol_type = other RNA
tactggaaggactcacagctt

SEQ ID NO: 97098 - RNA, 21 nt, synthetic construct
  source 1..21: mol_type = other RNA
tactggaagtgtaacatacac

SEQ ID NO: 97099 - RNA, 21 nt, synthetic construct
  source 1..21: mol_type = other RNA
tactggatacaaggtcaatct

SEQ ID NO: 97100 - RNA, 21 nt, synthetic construct
  source 1..21: mol_type = other RNA
tactggccatgttttatttct

SEQ ID NO: 97101 - RNA, 21 nt, synthetic construct
  source 1..21: mol_type = other RNA
tactggggtcttagttctgct

SEQ ID NO: 97102 - RNA, 21 nt, synthetic construct
  source 1..21: mol_type = other RNA
tactgggtgtgatggcgcatg

SEQ ID NO: 97103 - RNA, 21 nt, synthetic construct
  source 1..21: mol_type = other RNA
tactggtaccaaagcagaaat

SEQ ID NO: 97104 - RNA, 21 nt, synthetic construct
  source 1..21: mol_type = other RNA
tactggtgttaggcaatcctt

SEQ ID NO: 97105 - RNA, 21 nt, synthetic construct
  source 1..21: mol_type = other RNA
tactgtaaacaatgctgctat

SEQ ID NO: 97106 - RNA, 21 nt, synthetic construct
  source 1..21: mol_type = other RNA
tactgtaaccctgtttccctt

SEQ ID NO: 97107 - RNA, 21 nt, synthetic construct
  source 1..21: mol_type = other RNA
tactgtaagttcctggactgt

SEQ ID NO: 97108 - RNA, 21 nt, synthetic construct
  source 1..21: mol_type = other RNA
tactgtacaaagatttacccc

SEQ ID NO: 97109 - RNA, 21 nt, synthetic construct
  source 1..21: mol_type = other RNA
tactgtactgtttagcatcta

SEQ ID NO: 97110 - RNA, 21 nt, synthetic construct
  source 1..21: mol_type = other RNA
tactgtagaatgtttttccgt

SEQ ID NO: 97111 - RNA, 21 nt, synthetic construct
  source 1..21: mol_type = other RNA
tactgtattaggatgtgtacc

SEQ ID NO: 97112 - RNA, 21 nt, synthetic construct
  source 1..21: mol_type = other RNA
tactgtcacaggctttcctac

SEQ ID NO: 97113 - RNA, 21 nt, synthetic construct
  source 1..21: mol_type = other RNA
tactgtccaaacagtgaccac

SEQ ID NO: 97114 - RNA, 21 nt, synthetic construct
  source 1..21: mol_type = other RNA
tactgtctcagtcccaaatgg

SEQ ID NO: 97115 - RNA, 21 nt, synthetic construct
  source 1..21: mol_type = other RNA
tactgtctgtgaaaataatac

SEQ ID NO: 97116 - RNA, 21 nt, synthetic construct
  source 1..21: mol_type = other RNA
tactgtgaattcactaatgcc

SEQ ID NO: 97117 - RNA, 21 nt, synthetic construct
  source 1..21: mol_type = other RNA
tactgtgatgattttagaagg

SEQ ID NO: 97118 - RNA, 21 nt, synthetic construct
  source 1..21: mol_type = other RNA
tactgtgattacaattccttt

SEQ ID NO: 97119 - RNA, 21 nt, synthetic construct
  source 1..21: mol_type = other RNA
tactgtgcagtggatgactag

SEQ ID NO: 97120 - RNA, 21 nt, synthetic construct
  source 1..21: mol_type = other RNA
tactgtgtggcttctcaaact

SEQ ID NO: 97121 - RNA, 21 nt, synthetic construct
  source 1..21: mol_type = other RNA
tactgttatgacaagactacc

SEQ ID NO: 97122 - RNA, 21 nt, synthetic construct
  source 1..21: mol_type = other RNA
tactgttctccagtcccactg

SEQ ID NO: 97123 - RNA, 21 nt, synthetic construct
  source 1..21: mol_type = other RNA
tactgtttagcatctagcaca

SEQ ID NO: 97124 - RNA, 21 nt, synthetic construct
  source 1..21: mol_type = other RNA
tactgtttcttagctatattc

SEQ ID NO: 97125 - RNA, 21 nt, synthetic construct
  source 1..21: mol_type = other RNA
tacttaagagcatgttgggcc

SEQ ID NO: 97126 - RNA, 21 nt, synthetic construct
  source 1..21: mol_type = other RNA
tacttaatagcccaacagggt

SEQ ID NO: 97127 - RNA, 21 nt, synthetic construct
  source 1..21: mol_type = other RNA
tacttaatttacccacaaaag

SEQ ID NO: 97128 - RNA, 21 nt, synthetic construct
  source 1..21: mol_type = other RNA
tacttactagttgtgctacct

SEQ ID NO: 97129 - RNA, 21 nt, synthetic construct
  source 1..21: mol_type = other RNA
tacttagcccctgctgccaga

SEQ ID NO: 97130 - RNA, 21 nt, synthetic construct
  source 1..21: mol_type = other RNA
tacttagctaatttcagagag

SEQ ID NO: 97131 - RNA, 21 nt, synthetic construct
  source 1..21: mol_type = other RNA
tacttaggcagttattaagag

SEQ ID NO: 97132 - RNA, 21 nt, synthetic construct
  source 1..21: mol_type = other RNA
tacttcaaagggtcactatta

SEQ ID NO: 97133 - RNA, 21 nt, synthetic construct
  source 1..21: mol_type = other RNA
tacttcaaggttcacaaatta

SEQ ID NO: 97134 - RNA, 21 nt, synthetic construct
  source 1..21: mol_type = other RNA
tacttcaatgctacagtaagc

SEQ ID NO: 97135 - RNA, 21 nt, synthetic construct
  source 1..21: mol_type = other RNA
tacttcagcgcttgaacaaat

SEQ ID NO: 97136 - RNA, 21 nt, synthetic construct
  source 1..21: mol_type = other RNA
tacttcatagatgttatgccc

SEQ ID NO: 97137 - RNA, 21 nt, synthetic construct
  source 1..21: mol_type = other RNA
tacttcatctttcctgatcac

SEQ ID NO: 97138 - RNA, 21 nt, synthetic construct
  source 1..21: mol_type = other RNA
tacttccagctcacgttaccc

SEQ ID NO: 97139 - RNA, 21 nt, synthetic construct
  source 1..21: mol_type = other RNA
tacttccagtgttttaggggg

SEQ ID NO: 97140 - RNA, 21 nt, synthetic construct
  source 1..21: mol_type = other RNA
tacttccctctttctcaactt

SEQ ID NO: 97141 - RNA, 21 nt, synthetic construct
  source 1..21: mol_type = other RNA
tacttcccttctcgaagtggt

SEQ ID NO: 97142 - RNA, 21 nt, synthetic construct
  source 1..21: mol_type = other RNA
tacttcctgatttcaaaactt

SEQ ID NO: 97143 - RNA, 21 nt, synthetic construct
  source 1..21: mol_type = other RNA
tacttcgtgtgtggagtgggg

SEQ ID NO: 97144 - RNA, 21 nt, synthetic construct
  source 1..21: mol_type = other RNA
tacttctacagaatgttcaag

SEQ ID NO: 97145 - RNA, 21 nt, synthetic construct
  source 1..21: mol_type = other RNA
tacttctaccttgaaaatgcc

SEQ ID NO: 97146 - RNA, 21 nt, synthetic construct
  source 1..21: mol_type = other RNA
tacttctcagctatagcttct

SEQ ID NO: 97147 - RNA, 21 nt, synthetic construct
  source 1..21: mol_type = other RNA
tacttctgagtgttacttgaa

SEQ ID NO: 97148 - RNA, 21 nt, synthetic construct
  source 1..21: mol_type = other RNA
tacttctggaaagttcaaatg

SEQ ID NO: 97149 - RNA, 21 nt, synthetic construct
  source 1..21: mol_type = other RNA
tacttctttctctttcagcca

SEQ ID NO: 97150 - RNA, 21 nt, synthetic construct
  source 1..21: mol_type = other RNA
tacttgaaatcatttcactct

SEQ ID NO: 97151 - RNA, 21 nt, synthetic construct
  source 1..21: mol_type = other RNA
tacttgaacattctgtagaag

SEQ ID NO: 97152 - RNA, 21 nt, synthetic construct
  source 1..21: mol_type = other RNA
tacttgacacaaaggactgga

SEQ ID NO: 97153 - RNA, 21 nt, synthetic construct
  source 1..21: mol_type = other RNA
tacttgactattttaccctca

SEQ ID NO: 97154 - RNA, 21 nt, synthetic construct
  source 1..21: mol_type = other RNA
tacttgagagcagagacacac

SEQ ID NO: 97155 - RNA, 21 nt, synthetic construct
  source 1..21: mol_type = other RNA
tacttgagccccagaataggc

SEQ ID NO: 97156 - RNA, 21 nt, synthetic construct
  source 1..21: mol_type = other RNA
tacttgattacaagggtgaca

SEQ ID NO: 97157 - RNA, 21 nt, synthetic construct
  source 1..21: mol_type = other RNA
tacttgcttggtttcacacgc

SEQ ID NO: 97158 - RNA, 21 nt, synthetic construct
  source 1..21: mol_type = other RNA
tacttgctttattacttcagt

SEQ ID NO: 97159 - RNA, 21 nt, synthetic construct
  source 1..21: mol_type = other RNA
tacttggacaggggacatgaa

SEQ ID NO: 97160 - RNA, 21 nt, synthetic construct
  source 1..21: mol_type = other RNA
tacttggatcttatctgctgt

SEQ ID NO: 97161 - RNA, 21 nt, synthetic construct
  source 1..21: mol_type = other RNA
tacttggctcctcccggctaa

SEQ ID NO: 97162 - RNA, 21 nt, synthetic construct
  source 1..21: mol_type = other RNA
tacttggggagagtgggccca

SEQ ID NO: 97163 - RNA, 21 nt, synthetic construct
  source 1..21: mol_type = other RNA
tacttgggtataaatgatgag

SEQ ID NO: 97164 - RNA, 21 nt, synthetic construct
  source 1..21: mol_type = other RNA
tacttgtcaagttctgatttc

SEQ ID NO: 97165 - RNA, 21 nt, synthetic construct
  source 1..21: mol_type = other RNA
tacttgtcaggtgggcactgg

SEQ ID NO: 97166 - RNA, 21 nt, synthetic construct
  source 1..21: mol_type = other RNA
tacttgtcatttctgcttagt

SEQ ID NO: 97167 - RNA, 21 nt, synthetic construct
  source 1..21: mol_type = other RNA
tacttgtctttttgtgacttg

SEQ ID NO: 97168 - RNA, 21 nt, synthetic construct
  source 1..21: mol_type = other RNA
tacttgtgtagcgggaaaaaa

SEQ ID NO: 97169 - RNA, 21 nt, synthetic construct
  source 1..21: mol_type = other RNA
tactttaaatcagggccttta

SEQ ID NO: 97170 - RNA, 21 nt, synthetic construct
  source 1..21: mol_type = other RNA
tactttacagttatgtcagtc

SEQ ID NO: 97171 - RNA, 21 nt, synthetic construct
  source 1..21: mol_type = other RNA
tactttagacatgggctaaat

SEQ ID NO: 97172 - RNA, 21 nt, synthetic construct
  source 1..21: mol_type = other RNA
tactttcacactgattttctg

SEQ ID NO: 97173 - RNA, 21 nt, synthetic construct
  source 1..21: mol_type = other RNA
tactttcagctcaaacagctt

SEQ ID NO: 97174 - RNA, 21 nt, synthetic construct
  source 1..21: mol_type = other RNA
tactttcccatctctagtttt

SEQ ID NO: 97175 - RNA, 21 nt, synthetic construct
  source 1..21: mol_type = other RNA
tactttctaatcctttgcaca

SEQ ID NO: 97176 - RNA, 21 nt, synthetic construct
  source 1..21: mol_type = other RNA
tactttcttcaaccatacttt

SEQ ID NO: 97177 - RNA, 21 nt, synthetic construct
  source 1..21: mol_type = other RNA
tactttgcgaaacacactcgt

SEQ ID NO: 97178 - RNA, 21 nt, synthetic construct
  source 1..21: mol_type = other RNA
tactttggaaggtaggagggt

SEQ ID NO: 97179 - RNA, 21 nt, synthetic construct
  source 1..21: mol_type = other RNA
tactttgtcaggcatgctaac

SEQ ID NO: 97180 - RNA, 21 nt, synthetic construct
  source 1..21: mol_type = other RNA
tacttttaaagaaaggtctct

SEQ ID NO: 97181 - RNA, 21 nt, synthetic construct
  source 1..21: mol_type = other RNA
tacttttagtttacactatgg

SEQ ID NO: 97182 - RNA, 21 nt, synthetic construct
  source 1..21: mol_type = other RNA
tacttttcaactgaacaacgc

SEQ ID NO: 97183 - RNA, 21 nt, synthetic construct
  source 1..21: mol_type = other RNA
tactttttcatccaaacagaa

SEQ ID NO: 97184 - RNA, 21 nt, synthetic construct
  source 1..21: mol_type = other RNA
tactttttgtcacacggaaaa

SEQ ID NO: 97185 - RNA, 21 nt, synthetic construct
  source 1..21: mol_type = other RNA
tacttttttgtagagacagaa

SEQ ID NO: 97186 - RNA, 21 nt, synthetic construct
  source 1..21: mol_type = other RNA
tagaaaaacaccaaaaaagca

SEQ ID NO: 97187 - RNA, 21 nt, synthetic construct
  source 1..21: mol_type = other RNA
tagaaaacatatccttctaca

SEQ ID NO: 97188 - RNA, 21 nt, synthetic construct
  source 1..21: mol_type = other RNA
tagaaaaccgacagcagataa

SEQ ID NO: 97189 - RNA, 21 nt, synthetic construct
  source 1..21: mol_type = other RNA
tagaaaacttgagcagatcag

SEQ ID NO: 97190 - RNA, 21 nt, synthetic construct
  source 1..21: mol_type = other RNA
tagaaaagacaatagctagtg

SEQ ID NO: 97191 - RNA, 21 nt, synthetic construct
  source 1..21: mol_type = other RNA
tagaaaagataagtagaaggt

SEQ ID NO: 97192 - RNA, 21 nt, synthetic construct
  source 1..21: mol_type = other RNA
tagaaaatacagttttgacca

SEQ ID NO: 97193 - RNA, 21 nt, synthetic construct
  source 1..21: mol_type = other RNA
tagaaaatagggacggccttc

SEQ ID NO: 97194 - RNA, 21 nt, synthetic construct
  source 1..21: mol_type = other RNA
tagaaaatagtatgaaggttc

SEQ ID NO: 97195 - RNA, 21 nt, synthetic construct
  source 1..21: mol_type = other RNA
tagaaaatccttacttccagc

SEQ ID NO: 97196 - RNA, 21 nt, synthetic construct
  source 1..21: mol_type = other RNA
tagaaaatgcttatgtcttgt

SEQ ID NO: 97197 - RNA, 21 nt, synthetic construct
  source 1..21: mol_type = other RNA
tagaaaattagctgactttca

SEQ ID NO: 97198 - RNA, 21 nt, synthetic construct
  source 1..21: mol_type = other RNA
tagaaacatcccaagtgccca

SEQ ID NO: 97199 - RNA, 21 nt, synthetic construct
  source 1..21: mol_type = other RNA
tagaaactggtgaactgggtg

SEQ ID NO: 97200 - RNA, 21 nt, synthetic construct
  source 1..21: mol_type = other RNA
tagaaacttcttctgttggag

SEQ ID NO: 97201 - RNA, 21 nt, synthetic construct
  source 1..21: mol_type = other RNA
tagaaacttggattgtgtgtc

SEQ ID NO: 97202 - RNA, 21 nt, synthetic construct
  source 1..21: mol_type = other RNA
tagaaagaaaatccaaaagcc

SEQ ID NO: 97203 - RNA, 21 nt, synthetic construct
  source 1..21: mol_type = other RNA
tagaaagataaatccaacgac

SEQ ID NO: 97204 - RNA, 21 nt, synthetic construct
  source 1..21: mol_type = other RNA
tagaaagcaccagggcctctg

SEQ ID NO: 97205 - RNA, 21 nt, synthetic construct
  source 1..21: mol_type = other RNA
tagaaagcaggttcattttaa

SEQ ID NO: 97206 - RNA, 21 nt, synthetic construct
  source 1..21: mol_type = other RNA
tagaaagctggactcattcca

SEQ ID NO: 97207 - RNA, 21 nt, synthetic construct
  source 1..21: mol_type = other RNA
tagaaaggaattgtaatcaca

SEQ ID NO: 97208 - RNA, 21 nt, synthetic construct
  source 1..21: mol_type = other RNA
tagaaaggagaccagttagga

SEQ ID NO: 97209 - RNA, 21 nt, synthetic construct
  source 1..21: mol_type = other RNA
tagaaaggagggactgaaacc

SEQ ID NO: 97210 - RNA, 21 nt, synthetic construct
  source 1..21: mol_type = other RNA
tagaaagttagtgtctaatgg

SEQ ID NO: 97211 - RNA, 21 nt, synthetic construct
  source 1..21: mol_type = other RNA
tagaaatacctgcaggttgat

SEQ ID NO: 97212 - RNA, 21 nt, synthetic construct
  source 1..21: mol_type = other RNA
tagaaatcatacacgagtgtg

SEQ ID NO: 97213 - RNA, 21 nt, synthetic construct
  source 1..21: mol_type = other RNA
tagaaatcttccagaaggaga

SEQ ID NO: 97214 - RNA, 21 nt, synthetic construct
  source 1..21: mol_type = other RNA
tagaaatgaagatggcctccc

SEQ ID NO: 97215 - RNA, 21 nt, synthetic construct
  source 1..21: mol_type = other RNA
tagaaatgtggaagcagaact

SEQ ID NO: 97216 - RNA, 21 nt, synthetic construct
  source 1..21: mol_type = other RNA
tagaaatgtggagataaagag

SEQ ID NO: 97217 - RNA, 21 nt, synthetic construct
  source 1..21: mol_type = other RNA
tagaaatttaaggaccaggta

SEQ ID NO: 97218 - RNA, 21 nt, synthetic construct
  source 1..21: mol_type = other RNA
tagaacagaataaaaagtgac

SEQ ID NO: 97219 - RNA, 21 nt, synthetic construct
  source 1..21: mol_type = other RNA
tagaacatataatccaactgc

SEQ ID NO: 97220 - RNA, 21 nt, synthetic construct
  source 1..21: mol_type = other RNA
tagaacatctggcagcagggg

SEQ ID NO: 97221 - RNA, 21 nt, synthetic construct
  source 1..21: mol_type = other RNA
tagaactagaactgtgttaca

SEQ ID NO: 97222 - RNA, 21 nt, synthetic construct
  source 1..21: mol_type = other RNA
tagaactagaatactccacca

SEQ ID NO: 97223 - RNA, 21 nt, synthetic construct
  source 1..21: mol_type = other RNA
tagaactgtcacaattcacag

SEQ ID NO: 97224 - RNA, 21 nt, synthetic construct
  source 1..21: mol_type = other RNA
tagaactgtgttacattgcct

SEQ ID NO: 97225 - RNA, 21 nt, synthetic construct
  source 1..21: mol_type = other RNA
tagaacttatgcatcttgcaa

SEQ ID NO: 97226 - RNA, 21 nt, synthetic construct
  source 1..21: mol_type = other RNA
tagaagaaatgggtaaatttc

SEQ ID NO: 97227 - RNA, 21 nt, synthetic construct
  source 1..21: mol_type = other RNA
tagaagaagacttaggagaaa

SEQ ID NO: 97228 - RNA, 21 nt, synthetic construct
  source 1..21: mol_type = other RNA
tagaagaatgattatttgcgg

SEQ ID NO: 97229 - RNA, 21 nt, synthetic construct
  source 1..21: mol_type = other RNA
tagaagacaatactgttatga

SEQ ID NO: 97230 - RNA, 21 nt, synthetic construct
  source 1..21: mol_type = other RNA
tagaagacctcaaattctgag

SEQ ID NO: 97231 - RNA, 21 nt, synthetic construct
  source 1..21: mol_type = other RNA
tagaagactcagcagttttaa

SEQ ID NO: 97232 - RNA, 21 nt, synthetic construct
  source 1..21: mol_type = other RNA
tagaagagcagtgtgttctgc

SEQ ID NO: 97233 - RNA, 21 nt, synthetic construct
  source 1..21: mol_type = other RNA
tagaagagtaatggttggccg

SEQ ID NO: 97234 - RNA, 21 nt, synthetic construct
  source 1..21: mol_type = other RNA
tagaagcactttttaccaagt

SEQ ID NO: 97235 - RNA, 21 nt, synthetic construct
  source 1..21: mol_type = other RNA
tagaagcagcaagggtggctg

SEQ ID NO: 97236 - RNA, 21 nt, synthetic construct
  source 1..21: mol_type = other RNA
tagaagcatctgatacacttc

SEQ ID NO: 97237 - RNA, 21 nt, synthetic construct
  source 1..21: mol_type = other RNA
tagaagcgctcttcaagcatt

SEQ ID NO: 97238 - RNA, 21 nt, synthetic construct
  source 1..21: mol_type = other RNA
tagaaggattgttcatgtctg

SEQ ID NO: 97239 - RNA, 21 nt, synthetic construct
  source 1..21: mol_type = other RNA
tagaaggccagagggaatcta

SEQ ID NO: 97240 - RNA, 21 nt, synthetic construct
  source 1..21: mol_type = other RNA
tagaaggccctatgccttcag

SEQ ID NO: 97241 - RNA, 21 nt, synthetic construct
  source 1..21: mol_type = other RNA
tagaagggagaacccaggaac

SEQ ID NO: 97242 - RNA, 21 nt, synthetic construct
  source 1..21: mol_type = other RNA
tagaaggtaagaatgtcaagc

SEQ ID NO: 97243 - RNA, 21 nt, synthetic construct
  source 1..21: mol_type = other RNA
tagaaggtcaatctaggaggt

SEQ ID NO: 97244 - RNA, 21 nt, synthetic construct
  source 1..21: mol_type = other RNA
tagaagtaaatcccggccagg

SEQ ID NO: 97245 - RNA, 21 nt, synthetic construct
  source 1..21: mol_type = other RNA
tagaagtacaaacattacaga

SEQ ID NO: 97246 - RNA, 21 nt, synthetic construct
  source 1..21: mol_type = other RNA
tagaagtatcccagatgggga

SEQ ID NO: 97247 - RNA, 21 nt, synthetic construct
  source 1..21: mol_type = other RNA
tagaagtcccagttcaaggtg

SEQ ID NO: 97248 - RNA, 21 nt, synthetic construct
  source 1..21: mol_type = other RNA
tagaagtgtatcagatgcttc

SEQ ID NO: 97249 - RNA, 21 nt, synthetic construct
  source 1..21: mol_type = other RNA
tagaataatacacttttcagg

SEQ ID NO: 97250 - RNA, 21 nt, synthetic construct
  source 1..21: mol_type = other RNA
tagaataccacttagtttgca

SEQ ID NO: 97251 - RNA, 21 nt, synthetic construct
  source 1..21: mol_type = other RNA
tagaatactccaccagcatct

SEQ ID NO: 97252 - RNA, 21 nt, synthetic construct
  source 1..21: mol_type = other RNA
tagaatatccaagcacaaacc

SEQ ID NO: 97253 - RNA, 21 nt, synthetic construct
  source 1..21: mol_type = other RNA
tagaatcatccggggagcttt

SEQ ID NO: 97254 - RNA, 21 nt, synthetic construct
  source 1..21: mol_type = other RNA
tagaatgcatccctcctctgg

SEQ ID NO: 97255 - RNA, 21 nt, synthetic construct
  source 1..21: mol_type = other RNA
tagaatgtgacttcgtcaagg

SEQ ID NO: 97256 - RNA, 21 nt, synthetic construct
  source 1..21: mol_type = other RNA
tagaatgtttttccgtctagc

SEQ ID NO: 97257 - RNA, 21 nt, synthetic construct
  source 1..21: mol_type = other RNA
tagaattacaggcatgagtcg

SEQ ID NO: 97258 - RNA, 21 nt, synthetic construct
  source 1..21: mol_type = other RNA
tagaattcaggacagtcatcc

SEQ ID NO: 97259 - RNA, 21 nt, synthetic construct
  source 1..21: mol_type = other RNA
tagaattcaggacagttattc

SEQ ID NO: 97260 - RNA, 21 nt, synthetic construct
  source 1..21: mol_type = other RNA
tagaattctctctcaactggc

SEQ ID NO: 97261 - RNA, 21 nt, synthetic construct
  source 1..21: mol_type = other RNA
tagaattgactttaccctgct

SEQ ID NO: 97262 - RNA, 21 nt, synthetic construct
  source 1..21: mol_type = other RNA
tagaattttgcttttgctttg

SEQ ID NO: 97263 - RNA, 21 nt, synthetic construct
  source 1..21: mol_type = other RNA
tagacaaagacaagttcttac

SEQ ID NO: 97264 - RNA, 21 nt, synthetic construct
  source 1..21: mol_type = other RNA
tagacacatttttgacagcca

SEQ ID NO: 97265 - RNA, 21 nt, synthetic construct
  source 1..21: mol_type = other RNA
tagacactaactttctattcc

SEQ ID NO: 97266 - RNA, 21 nt, synthetic construct
  source 1..21: mol_type = other RNA
tagacagcatccccagaaaga

SEQ ID NO: 97267 - RNA, 21 nt, synthetic construct
  source 1..21: mol_type = other RNA
tagacatgggctaaataaaac

SEQ ID NO: 97268 - RNA, 21 nt, synthetic construct
  source 1..21: mol_type = other RNA
tagaccagatgcgtggttcac

SEQ ID NO: 97269 - RNA, 21 nt, synthetic construct
  source 1..21: mol_type = other RNA
tagaccatataatctaaccct

SEQ ID NO: 97270 - RNA, 21 nt, synthetic construct
  source 1..21: mol_type = other RNA
tagacccaaagcaaaagcaaa

SEQ ID NO: 97271 - RNA, 21 nt, synthetic construct
  source 1..21: mol_type = other RNA
tagaccctgttagtcccctag

SEQ ID NO: 97272 - RNA, 21 nt, synthetic construct
  source 1..21: mol_type = other RNA
tagaccgaggaaacccgctct

SEQ ID NO: 97273 - RNA, 21 nt, synthetic construct
  source 1..21: mol_type = other RNA
tagacctcaaattaatcagtc

SEQ ID NO: 97274 - RNA, 21 nt, synthetic construct
  source 1..21: mol_type = other RNA
tagacctcctagattgacctt

SEQ ID NO: 97275 - RNA, 21 nt, synthetic construct
  source 1..21: mol_type = other RNA
tagacctgaatgactgttgcc

SEQ ID NO: 97276 - RNA, 21 nt, synthetic construct
  source 1..21: mol_type = other RNA
tagacctttcttaggtttctc

SEQ ID NO: 97277 - RNA, 21 nt, synthetic construct
  source 1..21: mol_type = other RNA
tagacggaaaaacattctaca

SEQ ID NO: 97278 - RNA, 21 nt, synthetic construct
  source 1..21: mol_type = other RNA
tagactaagaaaaacagaaga

SEQ ID NO: 97279 - RNA, 21 nt, synthetic construct
  source 1..21: mol_type = other RNA
tagactcccaacttataatat

SEQ ID NO: 97280 - RNA, 21 nt, synthetic construct
  source 1..21: mol_type = other RNA
tagactcttcagaggtctgtt

SEQ ID NO: 97281 - RNA, 21 nt, synthetic construct
  source 1..21: mol_type = other RNA
tagactgcacataaaaggata

SEQ ID NO: 97282 - RNA, 21 nt, synthetic construct
  source 1..21: mol_type = other RNA
tagactgccaggtagggaggg

SEQ ID NO: 97283 - RNA, 21 nt, synthetic construct
  source 1..21: mol_type = other RNA
tagactgcctgaggtctcaaa

SEQ ID NO: 97284 - RNA, 21 nt, synthetic construct
  source 1..21: mol_type = other RNA
tagactggattaaggagatgg

SEQ ID NO: 97285 - RNA, 21 nt, synthetic construct
  source 1..21: mol_type = other RNA
tagactgtaaaaattttctcc

SEQ ID NO: 97286 - RNA, 21 nt, synthetic construct
  source 1..21: mol_type = other RNA
tagactttagagtcagttgtt

SEQ ID NO: 97287 - RNA, 21 nt, synthetic construct
  source 1..21: mol_type = other RNA
tagagaaaatgttatacagca

SEQ ID NO: 97288 - RNA, 21 nt, synthetic construct
  source 1..21: mol_type = other RNA
tagagaaacaggattacaatg

SEQ ID NO: 97289 - RNA, 21 nt, synthetic construct
  source 1..21: mol_type = other RNA
tagagaaagcatcagagcttt

SEQ ID NO: 97290 - RNA, 21 nt, synthetic construct
  source 1..21: mol_type = other RNA
tagagaagaatgagaaacata

SEQ ID NO: 97291 - RNA, 21 nt, synthetic construct
  source 1..21: mol_type = other RNA
tagagaaggctttgtgttggt

SEQ ID NO: 97292 - RNA, 21 nt, synthetic construct
  source 1..21: mol_type = other RNA
tagagacagaatcttactggt

SEQ ID NO: 97293 - RNA, 21 nt, synthetic construct
  source 1..21: mol_type = other RNA
tagagactggatcctggaggg

SEQ ID NO: 97294 - RNA, 21 nt, synthetic construct
  source 1..21: mol_type = other RNA
tagagagatgcctgtgcttgt

SEQ ID NO: 97295 - RNA, 21 nt, synthetic construct
  source 1..21: mol_type = other RNA
tagagagattcaagaaaccac

SEQ ID NO: 97296 - RNA, 21 nt, synthetic construct
  source 1..21: mol_type = other RNA
tagagatcttgtgtatctttt

SEQ ID NO: 97297 - RNA, 21 nt, synthetic construct
  source 1..21: mol_type = other RNA
tagagatgaggttttacgatg

SEQ ID NO: 97298 - RNA, 21 nt, synthetic construct
  source 1..21: mol_type = other RNA
tagagatgggaaagtattccc

SEQ ID NO: 97299 - RNA, 21 nt, synthetic construct
  source 1..21: mol_type = other RNA
tagagattaggcagaaccacc

SEQ ID NO: 97300 - RNA, 21 nt, synthetic construct
  source 1..21: mol_type = other RNA
tagagatttgctgtataacat

SEQ ID NO: 97301 - RNA, 21 nt, synthetic construct
  source 1..21: mol_type = other RNA
tagagcaagcaacaccagata

SEQ ID NO: 97302 - RNA, 21 nt, synthetic construct
  source 1..21: mol_type = other RNA
tagagcactttcgtatttttg

SEQ ID NO: 97303 - RNA, 21 nt, synthetic construct
  source 1..21: mol_type = other RNA
tagagccaggaagtcagcaac

SEQ ID NO: 97304 - RNA, 21 nt, synthetic construct
  source 1..21: mol_type = other RNA
tagagccccaagaaagcaggt

SEQ ID NO: 97305 - RNA, 21 nt, synthetic construct
  source 1..21: mol_type = other RNA
tagagctcacacgagaaggac

SEQ ID NO: 97306 - RNA, 21 nt, synthetic construct
  source 1..21: mol_type = other RNA
tagagctgctgtaacaaagat

SEQ ID NO: 97307 - RNA, 21 nt, synthetic construct
  source 1..21: mol_type = other RNA
tagagcttcaacctcctgggc

SEQ ID NO: 97308 - RNA, 21 nt, synthetic construct
  source 1..21: mol_type = other RNA
tagagcttttattttactctc

SEQ ID NO: 97309 - RNA, 21 nt, synthetic construct
  source 1..21: mol_type = other RNA
tagaggactgcctattttgta

SEQ ID NO: 97310 - RNA, 21 nt, synthetic construct
  source 1..21: mol_type = other RNA
tagaggaggagggttagatta

SEQ ID NO: 97311 - RNA, 21 nt, synthetic construct
  source 1..21: mol_type = other RNA
tagaggatgggcattccagag

SEQ ID NO: 97312 - RNA, 21 nt, synthetic construct
  source 1..21: mol_type = other RNA
tagaggattccaggtttacag

SEQ ID NO: 97313 - RNA, 21 nt, synthetic construct
  source 1..21: mol_type = other RNA
tagaggcagttgagttttcaa

SEQ ID NO: 97314 - RNA, 21 nt, synthetic construct
  source 1..21: mol_type = other RNA
tagaggccgagggttgaacat

SEQ ID NO: 97315 - RNA, 21 nt, synthetic construct
  source 1..21: mol_type = other RNA
tagaggctgcaccctcctcct

SEQ ID NO: 97316 - RNA, 21 nt, synthetic construct
  source 1..21: mol_type = other RNA
tagaggctgtattgtaggaaa

SEQ ID NO: 97317 - RNA, 21 nt, synthetic construct
  source 1..21: mol_type = other RNA
tagagggaatttgttttacca

SEQ ID NO: 97318 - RNA, 21 nt, synthetic construct
  source 1..21: mol_type = other RNA
tagagggagcatcttcccatg

SEQ ID NO: 97319 - RNA, 21 nt, synthetic construct
  source 1..21: mol_type = other RNA
tagagggatgaatgttgtaca

SEQ ID NO: 97320 - RNA, 21 nt, synthetic construct
  source 1..21: mol_type = other RNA
tagagggcctaaataaaacac

SEQ ID NO: 97321 - RNA, 21 nt, synthetic construct
  source 1..21: mol_type = other RNA
tagagggcttcatgctgggag

SEQ ID NO: 97322 - RNA, 21 nt, synthetic construct
  source 1..21: mol_type = other RNA
tagagggtaagaccaaaatgg

SEQ ID NO: 97323 - RNA, 21 nt, synthetic construct
  source 1..21: mol_type = other RNA
tagaggtctgtctttcagtat

SEQ ID NO: 97324 - RNA, 21 nt, synthetic construct
  source 1..21: mol_type = other RNA
tagaggtgaagttaagggcca

SEQ ID NO: 97325 - RNA, 21 nt, synthetic construct
  source 1..21: mol_type = other RNA
tagagtaactgtcatcagcgt

SEQ ID NO: 97326 - RNA, 21 nt, synthetic construct
  source 1..21: mol_type = other RNA
tagagtaagcaactgcatctt

SEQ ID NO: 97327 - RNA, 21 nt, synthetic construct
  source 1..21: mol_type = other RNA
tagagtaccaggtcagccaga

SEQ ID NO: 97328 - RNA, 21 nt, synthetic construct
  source 1..21: mol_type = other RNA
tagagtattacctatgaatag

SEQ ID NO: 97329 - RNA, 21 nt, synthetic construct
  source 1..21: mol_type = other RNA
tagagtcagttgtttacttgg

SEQ ID NO: 97330 - RNA, 21 nt, synthetic construct
  source 1..21: mol_type = other RNA
tagagtgaaaagaaacaagtg

SEQ ID NO: 97331 - RNA, 21 nt, synthetic construct
  source 1..21: mol_type = other RNA
tagagttccatctgttatagt

SEQ ID NO: 97332 - RNA, 21 nt, synthetic construct
  source 1..21: mol_type = other RNA
tagagtttgcattacatgaat

SEQ ID NO: 97333 - RNA, 21 nt, synthetic construct
  source 1..21: mol_type = other RNA
tagataaactggaattcatca

SEQ ID NO: 97334 - RNA, 21 nt, synthetic construct
  source 1..21: mol_type = other RNA
tagataaggttgttcttggtt

SEQ ID NO: 97335 - RNA, 21 nt, synthetic construct
  source 1..21: mol_type = other RNA
tagataccagaccctttatcg

SEQ ID NO: 97336 - RNA, 21 nt, synthetic construct
  source 1..21: mol_type = other RNA
tagataggatgggcagactcc

SEQ ID NO: 97337 - RNA, 21 nt, synthetic construct
  source 1..21: mol_type = other RNA
tagataggtcatgtacataaa

SEQ ID NO: 97338 - RNA, 21 nt, synthetic construct
  source 1..21: mol_type = other RNA
tagatagtggtttgaagcttc

SEQ ID NO: 97339 - RNA, 21 nt, synthetic construct
  source 1..21: mol_type = other RNA
tagatatcccatataagggga

SEQ ID NO: 97340 - RNA, 21 nt, synthetic construct
  source 1..21: mol_type = other RNA
tagatatgggagtccctgctt

SEQ ID NO: 97341 - RNA, 21 nt, synthetic construct
  source 1..21: mol_type = other RNA
tagatattttctgtcattctg

SEQ ID NO: 97342 - RNA, 21 nt, synthetic construct
  source 1..21: mol_type = other RNA
tagatcaagcccttccttgct

SEQ ID NO: 97343 - RNA, 21 nt, synthetic construct
  source 1..21: mol_type = other RNA
tagatcaagtatttcctatga

SEQ ID NO: 97344 - RNA, 21 nt, synthetic construct
  source 1..21: mol_type = other RNA
tagatcaagtcctttccagag

SEQ ID NO: 97345 - RNA, 21 nt, synthetic construct
  source 1..21: mol_type = other RNA
tagatcacaaggactggcttc

SEQ ID NO: 97346 - RNA, 21 nt, synthetic construct
  source 1..21: mol_type = other RNA
tagatcaccaggggctggggg

SEQ ID NO: 97347 - RNA, 21 nt, synthetic construct
  source 1..21: mol_type = other RNA
tagatcctgaggaagctaatc

SEQ ID NO: 97348 - RNA, 21 nt, synthetic construct
  source 1..21: mol_type = other RNA
tagatctcttttcctttaacg

SEQ ID NO: 97349 - RNA, 21 nt, synthetic construct
  source 1..21: mol_type = other RNA
tagatctgggataatgctatc

SEQ ID NO: 97350 - RNA, 21 nt, synthetic construct
  source 1..21: mol_type = other RNA
tagatgaaactaaatgtgagc

SEQ ID NO: 97351 - RNA, 21 nt, synthetic construct
  source 1..21: mol_type = other RNA
tagatgacgaaagtgaagccc

SEQ ID NO: 97352 - RNA, 21 nt, synthetic construct
  source 1..21: mol_type = other RNA
tagatgagagtggcctaaatc

SEQ ID NO: 97353 - RNA, 21 nt, synthetic construct
  source 1..21: mol_type = other RNA
tagatgagcccaggagttgca

SEQ ID NO: 97354 - RNA, 21 nt, synthetic construct
  source 1..21: mol_type = other RNA
tagatgatgttttgaacgaat

SEQ ID NO: 97355 - RNA, 21 nt, synthetic construct
  source 1..21: mol_type = other RNA
tagatgattcgcattgctaat

SEQ ID NO: 97356 - RNA, 21 nt, synthetic construct
  source 1..21: mol_type = other RNA
tagatgcctagaaaggaattg

SEQ ID NO: 97357 - RNA, 21 nt, synthetic construct
  source 1..21: mol_type = other RNA
tagatgcctcgaaggcctgct

SEQ ID NO: 97358 - RNA, 21 nt, synthetic construct
  source 1..21: mol_type = other RNA
tagatgctaaacagtacagta

SEQ ID NO: 97359 - RNA, 21 nt, synthetic construct
  source 1..21: mol_type = other RNA
tagatggcttaggatcaccaa

SEQ ID NO: 97360 - RNA, 21 nt, synthetic construct
  source 1..21: mol_type = other RNA
tagatggtaaaacaaattccc

SEQ ID NO: 97361 - RNA, 21 nt, synthetic construct
  source 1..21: mol_type = other RNA
tagatggtgctgatttaaaat

SEQ ID NO: 97362 - RNA, 21 nt, synthetic construct
  source 1..21: mol_type = other RNA
tagatgttatgccccctcttc

SEQ ID NO: 97363 - RNA, 21 nt, synthetic construct
  source 1..21: mol_type = other RNA
tagattacaaaagaacaggac

SEQ ID NO: 97364 - RNA, 21 nt, synthetic construct
  source 1..21: mol_type = other RNA
tagattagcttttacgaggac

SEQ ID NO: 97365 - RNA, 21 nt, synthetic construct
  source 1..21: mol_type = other RNA
tagattaggaaacagattgat

SEQ ID NO: 97366 - RNA, 21 nt, synthetic construct
  source 1..21: mol_type = other RNA
tagattatatggtctaccatg

SEQ ID NO: 97367 - RNA, 21 nt, synthetic construct
  source 1..21: mol_type = other RNA
tagattcatatgctttgagct

SEQ ID NO: 97368 - RNA, 21 nt, synthetic construct
  source 1..21: mol_type = other RNA
tagattcccccttatgtgtgt

SEQ ID NO: 97369 - RNA, 21 nt, synthetic construct
  source 1..21: mol_type = other RNA
tagattccctctggccttcta

SEQ ID NO: 97370 - RNA, 21 nt, synthetic construct
  source 1..21: mol_type = other RNA
tagattgaccttctacttatc

SEQ ID NO: 97371 - RNA, 21 nt, synthetic construct
  source 1..21: mol_type = other RNA
tagattgggcttttcatatac

SEQ ID NO: 97372 - RNA, 21 nt, synthetic construct
  source 1..21: mol_type = other RNA
tagattgttttaggtagtctt

SEQ ID NO: 97373 - RNA, 21 nt, synthetic construct
  source 1..21: mol_type = other RNA
tagattgttttgttgctattg

SEQ ID NO: 97374 - RNA, 21 nt, synthetic construct
  source 1..21: mol_type = other RNA
tagatttatcaatagcagtgc

SEQ ID NO: 97375 - RNA, 21 nt, synthetic construct
  source 1..21: mol_type = other RNA
tagatttatttttacccgtgg

SEQ ID NO: 97376 - RNA, 21 nt, synthetic construct
  source 1..21: mol_type = other RNA
tagatttcaatctggaatgca

SEQ ID NO: 97377 - RNA, 21 nt, synthetic construct
  source 1..21: mol_type = other RNA
tagatttctgcatagagatct

SEQ ID NO: 97378 - RNA, 21 nt, synthetic construct
  source 1..21: mol_type = other RNA
tagatttttcctttgcctaag

SEQ ID NO: 97379 - RNA, 21 nt, synthetic construct
  source 1..21: mol_type = other RNA
tagcaaacaaacacactgggt

SEQ ID NO: 97380 - RNA, 21 nt, synthetic construct
  source 1..21: mol_type = other RNA
tagcaaacatttatggaattg

SEQ ID NO: 97381 - RNA, 21 nt, synthetic construct
  source 1..21: mol_type = other RNA
tagcaaactactgatagcgaa

SEQ ID NO: 97382 - RNA, 21 nt, synthetic construct
  source 1..21: mol_type = other RNA
tagcaaactgaatcagacaac

SEQ ID NO: 97383 - RNA, 21 nt, synthetic construct
  source 1..21: mol_type = other RNA
tagcaaagaggcaaaactcct

SEQ ID NO: 97384 - RNA, 21 nt, synthetic construct
  source 1..21: mol_type = other RNA
tagcaactgttttttcctccc

SEQ ID NO: 97385 - RNA, 21 nt, synthetic construct
  source 1..21: mol_type = other RNA
tagcaacttgcagaagagtga

SEQ ID NO: 97386 - RNA, 21 nt, synthetic construct
  source 1..21: mol_type = other RNA
tagcaagattactggatacaa

SEQ ID NO: 97387 - RNA, 21 nt, synthetic construct
  source 1..21: mol_type = other RNA
tagcaaggaagcagaatgtcc

SEQ ID NO: 97388 - RNA, 21 nt, synthetic construct
  source 1..21: mol_type = other RNA
tagcaatccaaggacagaaat

SEQ ID NO: 97389 - RNA, 21 nt, synthetic construct
  source 1..21: mol_type = other RNA
tagcaatccaggatcttactg

SEQ ID NO: 97390 - RNA, 21 nt, synthetic construct
  source 1..21: mol_type = other RNA
tagcaatgcgaatcatctagg

SEQ ID NO: 97391 - RNA, 21 nt, synthetic construct
  source 1..21: mol_type = other RNA
tagcacaactagtaagtaaaa

SEQ ID NO: 97392 - RNA, 21 nt, synthetic construct
  source 1..21: mol_type = other RNA
tagcacagaaccatgtaacag

SEQ ID NO: 97393 - RNA, 21 nt, synthetic construct
  source 1..21: mol_type = other RNA
tagcacagaggcaacagtcat

SEQ ID NO: 97394 - RNA, 21 nt, synthetic construct
  source 1..21: mol_type = other RNA
tagcaccctatttatgttgca

SEQ ID NO: 97395 - RNA, 21 nt, synthetic construct
  source 1..21: mol_type = other RNA
tagcacctttattaactagaa

SEQ ID NO: 97396 - RNA, 21 nt, synthetic construct
  source 1..21: mol_type = other RNA
tagcagaaacacaggactgtg

SEQ ID NO: 97397 - RNA, 21 nt, synthetic construct
  source 1..21: mol_type = other RNA
tagcagaaccttagaaattta

SEQ ID NO: 97398 - RNA, 21 nt, synthetic construct
  source 1..21: mol_type = other RNA
tagcagaatccccaaataaca

SEQ ID NO: 97399 - RNA, 21 nt, synthetic construct
  source 1..21: mol_type = other RNA
tagcagaatggccctgcgatt

SEQ ID NO: 97400 - RNA, 21 nt, synthetic construct
  source 1..21: mol_type = other RNA
tagcagacactgggttctcac

SEQ ID NO: 97401 - RNA, 21 nt, synthetic construct
  source 1..21: mol_type = other RNA
tagcagcattgtttacagtag

SEQ ID NO: 97402 - RNA, 21 nt, synthetic construct
  source 1..21: mol_type = other RNA
tagcaggactggactccttct

SEQ ID NO: 97403 - RNA, 21 nt, synthetic construct
  source 1..21: mol_type = other RNA
tagcaggattcttgttaagca

SEQ ID NO: 97404 - RNA, 21 nt, synthetic construct
  source 1..21: mol_type = other RNA
tagcagggaccacaggcatgc

SEQ ID NO: 97405 - RNA, 21 nt, synthetic construct
  source 1..21: mol_type = other RNA
tagcagggactacagtcacac

SEQ ID NO: 97406 - RNA, 21 nt, synthetic construct
  source 1..21: mol_type = other RNA
tagcagggtcatgcacacgct

SEQ ID NO: 97407 - RNA, 21 nt, synthetic construct
  source 1..21: mol_type = other RNA
tagcaggtttaggaagcacat

SEQ ID NO: 97408 - RNA, 21 nt, synthetic construct
  source 1..21: mol_type = other RNA
tagcagtaaaatgaaaaaacc

SEQ ID NO: 97409 - RNA, 21 nt, synthetic construct
  source 1..21: mol_type = other RNA
tagcagtgctgaaagctagaa

SEQ ID NO: 97410 - RNA, 21 nt, synthetic construct
  source 1..21: mol_type = other RNA
tagcagtgggaagtggagtgc

SEQ ID NO: 97411 - RNA, 21 nt, synthetic construct
  source 1..21: mol_type = other RNA
tagcagttctgtacccttacg

SEQ ID NO: 97412 - RNA, 21 nt, synthetic construct
  source 1..21: mol_type = other RNA
tagcatcaccatcatcatcag

SEQ ID NO: 97413 - RNA, 21 nt, synthetic construct
  source 1..21: mol_type = other RNA
tagcatctagcacagaaccat

SEQ ID NO: 97414 - RNA, 21 nt, synthetic construct
  source 1..21: mol_type = other RNA
tagcatcttagctcttccctt

SEQ ID NO: 97415 - RNA, 21 nt, synthetic construct
  source 1..21: mol_type = other RNA
tagcatgcagtagctcatcat

SEQ ID NO: 97416 - RNA, 21 nt, synthetic construct
  source 1..21: mol_type = other RNA
tagcatgcctgacaaagtatg

SEQ ID NO: 97417 - RNA, 21 nt, synthetic construct
  source 1..21: mol_type = other RNA
tagcatgttgctttgcgaaat

SEQ ID NO: 97418 - RNA, 21 nt, synthetic construct
  source 1..21: mol_type = other RNA
tagcattatcccagatctaac

SEQ ID NO: 97419 - RNA, 21 nt, synthetic construct
  source 1..21: mol_type = other RNA
tagcattatccctttaaaatg

SEQ ID NO: 97420 - RNA, 21 nt, synthetic construct
  source 1..21: mol_type = other RNA
tagcattgaagtatagtttga

SEQ ID NO: 97421 - RNA, 21 nt, synthetic construct
  source 1..21: mol_type = other RNA
tagccaaagcaagccttggca

SEQ ID NO: 97422 - RNA, 21 nt, synthetic construct
  source 1..21: mol_type = other RNA
tagccaaaggtagaaacatcc

SEQ ID NO: 97423 - RNA, 21 nt, synthetic construct
  source 1..21: mol_type = other RNA
tagccaacaaccataatgagt

SEQ ID NO: 97424 - RNA, 21 nt, synthetic construct
  source 1..21: mol_type = other RNA
tagccaagcatggtggtaggt

SEQ ID NO: 97425 - RNA, 21 nt, synthetic construct
  source 1..21: mol_type = other RNA
tagccaagggtttgtcaattt

SEQ ID NO: 97426 - RNA, 21 nt, synthetic construct
  source 1..21: mol_type = other RNA
tagccacaagccacatgtggt

SEQ ID NO: 97427 - RNA, 21 nt, synthetic construct
  source 1..21: mol_type = other RNA
tagccacagcgttgttcagtt

SEQ ID NO: 97428 - RNA, 21 nt, synthetic construct
  source 1..21: mol_type = other RNA
tagccactctgaattctctgg

SEQ ID NO: 97429 - RNA, 21 nt, synthetic construct
  source 1..21: mol_type = other RNA
tagccactgggtcttataggt

SEQ ID NO: 97430 - RNA, 21 nt, synthetic construct
  source 1..21: mol_type = other RNA
tagccacttcctattagaaga

SEQ ID NO: 97431 - RNA, 21 nt, synthetic construct
  source 1..21: mol_type = other RNA
tagccaggcatgggggcgcgt

SEQ ID NO: 97432 - RNA, 21 nt, synthetic construct
  source 1..21: mol_type = other RNA
tagccaggcgtggtggcggat

SEQ ID NO: 97433 - RNA, 21 nt, synthetic construct
  source 1..21: mol_type = other RNA
tagccagtgattggatatttg

SEQ ID NO: 97434 - RNA, 21 nt, synthetic construct
  source 1..21: mol_type = other RNA
tagccagtgcagcaagcagta

SEQ ID NO: 97435 - RNA, 21 nt, synthetic construct
  source 1..21: mol_type = other RNA
tagccataagagtccccaact

SEQ ID NO: 97436 - RNA, 21 nt, synthetic construct
  source 1..21: mol_type = other RNA
tagccataatccttagattac

SEQ ID NO: 97437 - RNA, 21 nt, synthetic construct
  source 1..21: mol_type = other RNA
tagcccaacagggttttgttt

SEQ ID NO: 97438 - RNA, 21 nt, synthetic construct
  source 1..21: mol_type = other RNA
tagcccaagctaccatttatt

SEQ ID NO: 97439 - RNA, 21 nt, synthetic construct
  source 1..21: mol_type = other RNA
tagcccacttgttgatggggt

SEQ ID NO: 97440 - RNA, 21 nt, synthetic construct
  source 1..21: mol_type = other RNA
tagcccagcacttccattttg

SEQ ID NO: 97441 - RNA, 21 nt, synthetic construct
  source 1..21: mol_type = other RNA
tagcccagcttccgggacttg

SEQ ID NO: 97442 - RNA, 21 nt, synthetic construct
  source 1..21: mol_type = other RNA
tagcccatgtctaaagtattg

SEQ ID NO: 97443 - RNA, 21 nt, synthetic construct
  source 1..21: mol_type = other RNA
tagccccaaatacctctgaat

SEQ ID NO: 97444 - RNA, 21 nt, synthetic construct
  source 1..21: mol_type = other RNA
tagccccctgaatacccctcc

SEQ ID NO: 97445 - RNA, 21 nt, synthetic construct
  source 1..21: mol_type = other RNA
tagcccctgctgccagatgtt

SEQ ID NO: 97446 - RNA, 21 nt, synthetic construct
  source 1..21: mol_type = other RNA
tagccccttatcaggaaagtg

SEQ ID NO: 97447 - RNA, 21 nt, synthetic construct
  source 1..21: mol_type = other RNA
tagccgggaggagccaagtaa

SEQ ID NO: 97448 - RNA, 21 nt, synthetic construct
  source 1..21: mol_type = other RNA
tagccgggtgtagtggtgtgt

SEQ ID NO: 97449 - RNA, 21 nt, synthetic construct
  source 1..21: mol_type = other RNA
tagcctagacctcaaattaat

SEQ ID NO: 97450 - RNA, 21 nt, synthetic construct
  source 1..21: mol_type = other RNA
tagcctccagaaaaccagaaa

SEQ ID NO: 97451 - RNA, 21 nt, synthetic construct
  source 1..21: mol_type = other RNA
tagcctcctaagttttggggg

SEQ ID NO: 97452 - RNA, 21 nt, synthetic construct
  source 1..21: mol_type = other RNA
tagcctctctgggcttcactt

SEQ ID NO: 97453 - RNA, 21 nt, synthetic construct
  source 1..21: mol_type = other RNA
tagccttccagagacaaagca

SEQ ID NO: 97454 - RNA, 21 nt, synthetic construct
  source 1..21: mol_type = other RNA
tagccttcttggagtaaacct

SEQ ID NO: 97455 - RNA, 21 nt, synthetic construct
  source 1..21: mol_type = other RNA
tagccttgccattctcccagt

SEQ ID NO: 97456 - RNA, 21 nt, synthetic construct
  source 1..21: mol_type = other RNA
tagccttggtaaaatcactaa

SEQ ID NO: 97457 - RNA, 21 nt, synthetic construct
  source 1..21: mol_type = other RNA
tagccttgtactgtgtggctt

SEQ ID NO: 97458 - RNA, 21 nt, synthetic construct
  source 1..21: mol_type = other RNA
tagccttttacaccctaggta

SEQ ID NO: 97459 - RNA, 21 nt, synthetic construct
  source 1..21: mol_type = other RNA
tagcgaaagggattctggcca

SEQ ID NO: 97460 - RNA, 21 nt, synthetic construct
  source 1..21: mol_type = other RNA
tagcgaaaggtacgacgctct

SEQ ID NO: 97461 - RNA, 21 nt, synthetic construct
  source 1..21: mol_type = other RNA
tagcgagacctcatctctgca

SEQ ID NO: 97462 - RNA, 21 nt, synthetic construct
  source 1..21: mol_type = other RNA
tagcgctgatgtgttgacctt

SEQ ID NO: 97463 - RNA, 21 nt, synthetic construct
  source 1..21: mol_type = other RNA
tagcgctggaggtcgggctgc

SEQ ID NO: 97464 - RNA, 21 nt, synthetic construct
  source 1..21: mol_type = other RNA
tagcgctttaagcatcccata

SEQ ID NO: 97465 - RNA, 21 nt, synthetic construct
  source 1..21: mol_type = other RNA
tagcggaatgactatagaaat

SEQ ID NO: 97466 - RNA, 21 nt, synthetic construct
  source 1..21: mol_type = other RNA
tagcgggaaaaaataatatga

SEQ ID NO: 97467 - RNA, 21 nt, synthetic construct
  source 1..21: mol_type = other RNA
tagcgttcatccaaattattg

SEQ ID NO: 97468 - RNA, 21 nt, synthetic construct
  source 1..21: mol_type = other RNA
tagctaagaaacagtaattag

SEQ ID NO: 97469 - RNA, 21 nt, synthetic construct
  source 1..21: mol_type = other RNA
tagctaagtatgcagaaacca

SEQ ID NO: 97470 - RNA, 21 nt, synthetic construct
  source 1..21: mol_type = other RNA
tagctaatatctttggggaga

SEQ ID NO: 97471 - RNA, 21 nt, synthetic construct
  source 1..21: mol_type = other RNA
tagctaatttcagagagacct

SEQ ID NO: 97472 - RNA, 21 nt, synthetic construct
  source 1..21: mol_type = other RNA
tagctacaaaagggaaaacaa

SEQ ID NO: 97473 - RNA, 21 nt, synthetic construct
  source 1..21: mol_type = other RNA
tagctacttgggaggctgaga

SEQ ID NO: 97474 - RNA, 21 nt, synthetic construct
  source 1..21: mol_type = other RNA
tagctaggaccataggcacgc

SEQ ID NO: 97475 - RNA, 21 nt, synthetic construct
  source 1..21: mol_type = other RNA
tagctagtgatgttgagtatc

SEQ ID NO: 97476 - RNA, 21 nt, synthetic construct
  source 1..21: mol_type = other RNA
tagctagtgtcttagtctgac

SEQ ID NO: 97477 - RNA, 21 nt, synthetic construct
  source 1..21: mol_type = other RNA
tagctatatcccaaattggca

SEQ ID NO: 97478 - RNA, 21 nt, synthetic construct
  source 1..21: mol_type = other RNA
tagctatattcacttttggaa

SEQ ID NO: 97479 - RNA, 21 nt, synthetic construct
  source 1..21: mol_type = other RNA
tagctatcctaatgggcgtgg

SEQ ID NO: 97480 - RNA, 21 nt, synthetic construct
  source 1..21: mol_type = other RNA
tagctattagagaaatgcaaa

SEQ ID NO: 97481 - RNA, 21 nt, synthetic construct
  source 1..21: mol_type = other RNA
tagctattgtcttttctatct

SEQ ID NO: 97482 - RNA, 21 nt, synthetic construct
  source 1..21: mol_type = other RNA
tagctcaaagcatatgaatct

SEQ ID NO: 97483 - RNA, 21 nt, synthetic construct
  source 1..21: mol_type = other RNA
tagctcactagagcttcaacc

SEQ ID NO: 97484 - RNA, 21 nt, synthetic construct
  source 1..21: mol_type = other RNA
tagctcatcatttatacccaa

SEQ ID NO: 97485 - RNA, 21 nt, synthetic construct
  source 1..21: mol_type = other RNA
tagctccaaaagcgaaaggca

SEQ ID NO: 97486 - RNA, 21 nt, synthetic construct
  source 1..21: mol_type = other RNA
tagctccccattccctgtctg

SEQ ID NO: 97487 - RNA, 21 nt, synthetic construct
  source 1..21: mol_type = other RNA
tagctcctgggaaaaggattt

SEQ ID NO: 97488 - RNA, 21 nt, synthetic construct
  source 1..21: mol_type = other RNA
tagctctcatgtcagagacac

SEQ ID NO: 97489 - RNA, 21 nt, synthetic construct
  source 1..21: mol_type = other RNA
tagctcttaagcttaggtctt

SEQ ID NO: 97490 - RNA, 21 nt, synthetic construct
  source 1..21: mol_type = other RNA
tagctcttcccttaacctttt

SEQ ID NO: 97491 - RNA, 21 nt, synthetic construct
  source 1..21: mol_type = other RNA
tagctgaaggcactgtatggt

SEQ ID NO: 97492 - RNA, 21 nt, synthetic construct
  source 1..21: mol_type = other RNA
tagctgacccactggtttcag

SEQ ID NO: 97493 - RNA, 21 nt, synthetic construct
  source 1..21: mol_type = other RNA
tagctgactttcatttgtaat

SEQ ID NO: 97494 - RNA, 21 nt, synthetic construct
  source 1..21: mol_type = other RNA
tagctgagaagtaacattaca

SEQ ID NO: 97495 - RNA, 21 nt, synthetic construct
  source 1..21: mol_type = other RNA
tagctgcctcttcctgttgct

SEQ ID NO: 97496 - RNA, 21 nt, synthetic construct
  source 1..21: mol_type = other RNA
tagctggatgtggtgtggcat

SEQ ID NO: 97497 - RNA, 21 nt, synthetic construct
  source 1..21: mol_type = other RNA
tagctggcaaaatggagacat

SEQ ID NO: 97498 - RNA, 21 nt, synthetic construct
  source 1..21: mol_type = other RNA
tagctgggatcacaggcgttg

SEQ ID NO: 97499 - RNA, 21 nt, synthetic construct
  source 1..21: mol_type = other RNA
tagctgggatggctgaaagag

SEQ ID NO: 97500 - RNA, 21 nt, synthetic construct
  source 1..21: mol_type = other RNA
tagctgggattacacacacct

SEQ ID NO: 97501 - RNA, 21 nt, synthetic construct
  source 1..21: mol_type = other RNA
tagctgggcgagatggcgtgc

SEQ ID NO: 97502 - RNA, 21 nt, synthetic construct
  source 1..21: mol_type = other RNA
tagctggggcagcaaagcaag

SEQ ID NO: 97503 - RNA, 21 nt, synthetic construct
  source 1..21: mol_type = other RNA
tagctgtcgctctcctgtgcc

SEQ ID NO: 97504 - RNA, 21 nt, synthetic construct
  source 1..21: mol_type = other RNA
tagctgtctggattgattcca

SEQ ID NO: 97505 - RNA, 21 nt, synthetic construct
  source 1..21: mol_type = other RNA
tagctgtgattaccggcatcc

SEQ ID NO: 97506 - RNA, 21 nt, synthetic construct
  source 1..21: mol_type = other RNA
tagctgtggaagcacagtctc

SEQ ID NO: 97507 - RNA, 21 nt, synthetic construct
  source 1..21: mol_type = other RNA
tagctgtggctcactcatttc

SEQ ID NO: 97508 - RNA, 21 nt, synthetic construct
  source 1..21: mol_type = other RNA
tagctgttgaattgttgcgcg

SEQ ID NO: 97509 - RNA, 21 nt, synthetic construct
  source 1..21: mol_type = other RNA
tagctgttttcatgcgacata

SEQ ID NO: 97510 - RNA, 21 nt, synthetic construct
  source 1..21: mol_type = other RNA
tagcttagaagaagacttagg

SEQ ID NO: 97511 - RNA, 21 nt, synthetic construct
  source 1..21: mol_type = other RNA
tagcttcaatgagggcagaga

SEQ ID NO: 97512 - RNA, 21 nt, synthetic construct
  source 1..21: mol_type = other RNA
tagcttcacgtgcattcatac

SEQ ID NO: 97513 - RNA, 21 nt, synthetic construct
  source 1..21: mol_type = other RNA
tagcttcatataagtggaatc

SEQ ID NO: 97514 - RNA, 21 nt, synthetic construct
  source 1..21: mol_type = other RNA
tagcttcctaagaaagggtgt

SEQ ID NO: 97515 - RNA, 21 nt, synthetic construct
  source 1..21: mol_type = other RNA
tagcttcctcaggatctacat

SEQ ID NO: 97516 - RNA, 21 nt, synthetic construct
  source 1..21: mol_type = other RNA
tagcttctgaattgagatgta

SEQ ID NO: 97517 - RNA, 21 nt, synthetic construct
  source 1..21: mol_type = other RNA
tagcttctgagctgttaatgg

SEQ ID NO: 97518 - RNA, 21 nt, synthetic construct
  source 1..21: mol_type = other RNA
tagcttgacaaaaggcccctt

SEQ ID NO: 97519 - RNA, 21 nt, synthetic construct
  source 1..21: mol_type = other RNA
tagcttgctagtagcagaatc

SEQ ID NO: 97520 - RNA, 21 nt, synthetic construct
  source 1..21: mol_type = other RNA
tagcttgggctaaggtggagt

SEQ ID NO: 97521 - RNA, 21 nt, synthetic construct
  source 1..21: mol_type = other RNA
tagctttcagcactgctattg

SEQ ID NO: 97522 - RNA, 21 nt, synthetic construct
  source 1..21: mol_type = other RNA
tagctttctcccagctgtcca

SEQ ID NO: 97523 - RNA, 21 nt, synthetic construct
  source 1..21: mol_type = other RNA
tagctttgatgcccccaccct

SEQ ID NO: 97524 - RNA, 21 nt, synthetic construct
  source 1..21: mol_type = other RNA
tagcttttacgaggacagact

SEQ ID NO: 97525 - RNA, 21 nt, synthetic construct
  source 1..21: mol_type = other RNA
tagcttttcctgctgtcgttt

SEQ ID NO: 97526 - RNA, 21 nt, synthetic construct
  source 1..21: mol_type = other RNA
taggaaaaccatgtcatgtat

SEQ ID NO: 97527 - RNA, 21 nt, synthetic construct
  source 1..21: mol_type = other RNA
taggaaaagacttctcaaaca

SEQ ID NO: 97528 - RNA, 21 nt, synthetic construct
  source 1..21: mol_type = other RNA
taggaaaagacttgaggttta

SEQ ID NO: 97529 - RNA, 21 nt, synthetic construct
  source 1..21: mol_type = other RNA
taggaaaatacatgaggcctc

SEQ ID NO: 97530 - RNA, 21 nt, synthetic construct
  source 1..21: mol_type = other RNA
taggaaaatagagttccatct

SEQ ID NO: 97531 - RNA, 21 nt, synthetic construct
  source 1..21: mol_type = other RNA
taggaaacactgctcagaagc

SEQ ID NO: 97532 - RNA, 21 nt, synthetic construct
  source 1..21: mol_type = other RNA
taggaaactttgcattcctga

SEQ ID NO: 97533 - RNA, 21 nt, synthetic construct
  source 1..21: mol_type = other RNA
taggaaagcctgtgacagtat

SEQ ID NO: 97534 - RNA, 21 nt, synthetic construct
  source 1..21: mol_type = other RNA
taggaaagtgacagatgagaa

SEQ ID NO: 97535 - RNA, 21 nt, synthetic construct
  source 1..21: mol_type = other RNA
taggaaatacttgatctacat

SEQ ID NO: 97536 - RNA, 21 nt, synthetic construct
  source 1..21: mol_type = other RNA
taggaaccatattagagtgaa

SEQ ID NO: 97537 - RNA, 21 nt, synthetic construct
  source 1..21: mol_type = other RNA
taggaagcacattccttccga

SEQ ID NO: 97538 - RNA, 21 nt, synthetic construct
  source 1..21: mol_type = other RNA
taggaagccactgcattcatc

SEQ ID NO: 97539 - RNA, 21 nt, synthetic construct
  source 1..21: mol_type = other RNA
taggaagctatggagcactgt

SEQ ID NO: 97540 - RNA, 21 nt, synthetic construct
  source 1..21: mol_type = other RNA
taggaagctgatcaaggaagc

SEQ ID NO: 97541 - RNA, 21 nt, synthetic construct
  source 1..21: mol_type = other RNA
taggaagcttccttgatcagc

SEQ ID NO: 97542 - RNA, 21 nt, synthetic construct
  source 1..21: mol_type = other RNA
taggaaggaacacacacctat

SEQ ID NO: 97543 - RNA, 21 nt, synthetic construct
  source 1..21: mol_type = other RNA
taggaaggcggtggggacagc

SEQ ID NO: 97544 - RNA, 21 nt, synthetic construct
  source 1..21: mol_type = other RNA
taggaagtccatgaaacttat

SEQ ID NO: 97545 - RNA, 21 nt, synthetic construct
  source 1..21: mol_type = other RNA
taggaagtggctagacggaaa

SEQ ID NO: 97546 - RNA, 21 nt, synthetic construct
  source 1..21: mol_type = other RNA
taggaatagtattcaggacag

SEQ ID NO: 97547 - RNA, 21 nt, synthetic construct
  source 1..21: mol_type = other RNA
taggaatttacatttccattc

SEQ ID NO: 97548 - RNA, 21 nt, synthetic construct
  source 1..21: mol_type = other RNA
taggacaaggaaaggatggtt

SEQ ID NO: 97549 - RNA, 21 nt, synthetic construct
  source 1..21: mol_type = other RNA
taggaccataggcacgcgccc

SEQ ID NO: 97550 - RNA, 21 nt, synthetic construct
  source 1..21: mol_type = other RNA
taggagaaaagcttcataaca

SEQ ID NO: 97551 - RNA, 21 nt, synthetic construct
  source 1..21: mol_type = other RNA
taggagactatcgttatatcc

SEQ ID NO: 97552 - RNA, 21 nt, synthetic construct
  source 1..21: mol_type = other RNA
taggaggctattaactttgaa

SEQ ID NO: 97553 - RNA, 21 nt, synthetic construct
  source 1..21: mol_type = other RNA
taggagggtgtgatcaggaaa

SEQ ID NO: 97554 - RNA, 21 nt, synthetic construct
  source 1..21: mol_type = other RNA
taggaggtctaagagataact

SEQ ID NO: 97555 - RNA, 21 nt, synthetic construct
  source 1..21: mol_type = other RNA
taggagtacagtgcataccac

SEQ ID NO: 97556 - RNA, 21 nt, synthetic construct
  source 1..21: mol_type = other RNA
taggagtcaactaatcaaaca

SEQ ID NO: 97557 - RNA, 21 nt, synthetic construct
  source 1..21: mol_type = other RNA
taggagttcattcgtagcagg

SEQ ID NO: 97558 - RNA, 21 nt, synthetic construct
  source 1..21: mol_type = other RNA
taggataatgtccagaggagg

SEQ ID NO: 97559 - RNA, 21 nt, synthetic construct
  source 1..21: mol_type = other RNA
taggatataagagtgggcaaa

SEQ ID NO: 97560 - RNA, 21 nt, synthetic construct
  source 1..21: mol_type = other RNA
taggatcaccaaagacttcag

SEQ ID NO: 97561 - RNA, 21 nt, synthetic construct
  source 1..21: mol_type = other RNA
taggatcccagtcctttggga

SEQ ID NO: 97562 - RNA, 21 nt, synthetic construct
  source 1..21: mol_type = other RNA
taggatgggcagactccttcc

SEQ ID NO: 97563 - RNA, 21 nt, synthetic construct
  source 1..21: mol_type = other RNA
taggatgtgtacccgtgtgtt

SEQ ID NO: 97564 - RNA, 21 nt, synthetic construct
  source 1..21: mol_type = other RNA
taggattaagacactacaaaa

SEQ ID NO: 97565 - RNA, 21 nt, synthetic construct
  source 1..21: mol_type = other RNA
taggcaaaggaaaaatctaac

SEQ ID NO: 97566 - RNA, 21 nt, synthetic construct
  source 1..21: mol_type = other RNA
taggcaaattcatagatcacc

SEQ ID NO: 97567 - RNA, 21 nt, synthetic construct
  source 1..21: mol_type = other RNA
taggcaacatccctatgcaat

SEQ ID NO: 97568 - RNA, 21 nt, synthetic construct
  source 1..21: mol_type = other RNA
taggcaagagagcaagactca

SEQ ID NO: 97569 - RNA, 21 nt, synthetic construct
  source 1..21: mol_type = other RNA
taggcaatccttccgcctcag

SEQ ID NO: 97570 - RNA, 21 nt, synthetic construct
  source 1..21: mol_type = other RNA
taggcaatgagtctgacatac

SEQ ID NO: 97571 - RNA, 21 nt, synthetic construct
  source 1..21: mol_type = other RNA
taggcaatttagaattctctc

SEQ ID NO: 97572 - RNA, 21 nt, synthetic construct
  source 1..21: mol_type = other RNA
taggcacattcaagcagaaat

SEQ ID NO: 97573 - RNA, 21 nt, synthetic construct
  source 1..21: mol_type = other RNA
taggcacgcgcccccatgcct

SEQ ID NO: 97574 - RNA, 21 nt, synthetic construct
  source 1..21: mol_type = other RNA
taggcagaaccacctggggga

SEQ ID NO: 97575 - RNA, 21 nt, synthetic construct
  source 1..21: mol_type = other RNA
taggcagtcctctactttcac

SEQ ID NO: 97576 - RNA, 21 nt, synthetic construct
  source 1..21: mol_type = other RNA
taggcagttattaagagtgtg

SEQ ID NO: 97577 - RNA, 21 nt, synthetic construct
  source 1..21: mol_type = other RNA
taggcatataaactggaagga

SEQ ID NO: 97578 - RNA, 21 nt, synthetic construct
  source 1..21: mol_type = other RNA
taggcatataataagcagaat

SEQ ID NO: 97579 - RNA, 21 nt, synthetic construct
  source 1..21: mol_type = other RNA
taggcatctatttccccatta

SEQ ID NO: 97580 - RNA, 21 nt, synthetic construct
  source 1..21: mol_type = other RNA
taggcatctctcccttcctgt

SEQ ID NO: 97581 - RNA, 21 nt, synthetic construct
  source 1..21: mol_type = other RNA
taggccactctcatctaaatt

SEQ ID NO: 97582 - RNA, 21 nt, synthetic construct
  source 1..21: mol_type = other RNA
taggccataaatcaaggtaca

SEQ ID NO: 97583 - RNA, 21 nt, synthetic construct
  source 1..21: mol_type = other RNA
taggccccgatgccatgtgtt

SEQ ID NO: 97584 - RNA, 21 nt, synthetic construct
  source 1..21: mol_type = other RNA
taggccctaaccccagagatt

SEQ ID NO: 97585 - RNA, 21 nt, synthetic construct
  source 1..21: mol_type = other RNA
taggccctctataattctgcc

SEQ ID NO: 97586 - RNA, 21 nt, synthetic construct
  source 1..21: mol_type = other RNA
taggcctaggtgtgataactg

SEQ ID NO: 97587 - RNA, 21 nt, synthetic construct
  source 1..21: mol_type = other RNA
taggcctattttaggctctgt

SEQ ID NO: 97588 - RNA, 21 nt, synthetic construct
  source 1..21: mol_type = other RNA
taggcgaaatatctccctcac

SEQ ID NO: 97589 - RNA, 21 nt, synthetic construct
  source 1..21: mol_type = other RNA
taggcgtagtatctcatgctt

SEQ ID NO: 97590 - RNA, 21 nt, synthetic construct
  source 1..21: mol_type = other RNA
taggcgtgagccatcgcgccc

SEQ ID NO: 97591 - RNA, 21 nt, synthetic construct
  source 1..21: mol_type = other RNA
taggctaatgtgtgttccaga

SEQ ID NO: 97592 - RNA, 21 nt, synthetic construct
  source 1..21: mol_type = other RNA
taggctcctgagaaccggaac

SEQ ID NO: 97593 - RNA, 21 nt, synthetic construct
  source 1..21: mol_type = other RNA
taggctctgggtcagaatcgt

SEQ ID NO: 97594 - RNA, 21 nt, synthetic construct
  source 1..21: mol_type = other RNA
taggctctgtggtttcttgaa

SEQ ID NO: 97595 - RNA, 21 nt, synthetic construct
  source 1..21: mol_type = other RNA
taggctgaagcaggcttttta

SEQ ID NO: 97596 - RNA, 21 nt, synthetic construct
  source 1..21: mol_type = other RNA
taggctggagtgcaattgtgc

SEQ ID NO: 97597 - RNA, 21 nt, synthetic construct
  source 1..21: mol_type = other RNA
taggctgtcccaaatgcacca

SEQ ID NO: 97598 - RNA, 21 nt, synthetic construct
  source 1..21: mol_type = other RNA
taggctgtctccaacgctttt

SEQ ID NO: 97599 - RNA, 21 nt, synthetic construct
  source 1..21: mol_type = other RNA
taggctgttattagagttgta

SEQ ID NO: 97600 - RNA, 21 nt, synthetic construct
  source 1..21: mol_type = other RNA
taggctgttcaatttagaaaa

SEQ ID NO: 97601 - RNA, 21 nt, synthetic construct
  source 1..21: mol_type = other RNA
taggctgtttgagatctttct

SEQ ID NO: 97602 - RNA, 21 nt, synthetic construct
  source 1..21: mol_type = other RNA
taggcttaaaattcttccagc

SEQ ID NO: 97603 - RNA, 21 nt, synthetic construct
  source 1..21: mol_type = other RNA
taggcttagataggatgggca

SEQ ID NO: 97604 - RNA, 21 nt, synthetic construct
  source 1..21: mol_type = other RNA
taggcttagatgagcccagga

SEQ ID NO: 97605 - RNA, 21 nt, synthetic construct
  source 1..21: mol_type = other RNA
taggcttagtacagccatcaa

SEQ ID NO: 97606 - RNA, 21 nt, synthetic construct
  source 1..21: mol_type = other RNA
tagggaagatagtactgacca

SEQ ID NO: 97607 - RNA, 21 nt, synthetic construct
  source 1..21: mol_type = other RNA
tagggaagcagttgatgcaat

SEQ ID NO: 97608 - RNA, 21 nt, synthetic construct
  source 1..21: mol_type = other RNA
tagggaaggtgcccgcgaagg

SEQ ID NO: 97609 - RNA, 21 nt, synthetic construct
  source 1..21: mol_type = other RNA
tagggaatagacaaagacaag

SEQ ID NO: 97610 - RNA, 21 nt, synthetic construct
  source 1..21: mol_type = other RNA
tagggacgaatgcatgggagg

SEQ ID NO: 97611 - RNA, 21 nt, synthetic construct
  source 1..21: mol_type = other RNA
tagggacggggttttgccatg

SEQ ID NO: 97612 - RNA, 21 nt, synthetic construct
  source 1..21: mol_type = other RNA
tagggactggcctcggccaac

SEQ ID NO: 97613 - RNA, 21 nt, synthetic construct
  source 1..21: mol_type = other RNA
tagggacttatggagataaat

SEQ ID NO: 97614 - RNA, 21 nt, synthetic construct
  source 1..21: mol_type = other RNA
tagggagactttcactgctca

SEQ ID NO: 97615 - RNA, 21 nt, synthetic construct
  source 1..21: mol_type = other RNA
tagggagcatatatactctga

SEQ ID NO: 97616 - RNA, 21 nt, synthetic construct
  source 1..21: mol_type = other RNA
tagggagggggctgaggattg

SEQ ID NO: 97617 - RNA, 21 nt, synthetic construct
  source 1..21: mol_type = other RNA
tagggaggggtattcaggggg

SEQ ID NO: 97618 - RNA, 21 nt, synthetic construct
  source 1..21: mol_type = other RNA
tagggataagaataccaaatt

SEQ ID NO: 97619 - RNA, 21 nt, synthetic construct
  source 1..21: mol_type = other RNA
tagggatgttgcctactagcc

SEQ ID NO: 97620 - RNA, 21 nt, synthetic construct
  source 1..21: mol_type = other RNA
tagggcaccgtgacagaacaa

SEQ ID NO: 97621 - RNA, 21 nt, synthetic construct
  source 1..21: mol_type = other RNA
tagggcctagaaatcatacac

SEQ ID NO: 97622 - RNA, 21 nt, synthetic construct
  source 1..21: mol_type = other RNA
tagggcctcaaatttcattta

SEQ ID NO: 97623 - RNA, 21 nt, synthetic construct
  source 1..21: mol_type = other RNA
tagggccttctactttaataa

SEQ ID NO: 97624 - RNA, 21 nt, synthetic construct
  source 1..21: mol_type = other RNA
taggggaactcttgtagtatt

SEQ ID NO: 97625 - RNA, 21 nt, synthetic construct
  source 1..21: mol_type = other RNA
taggggactaacagggtctac

SEQ ID NO: 97626 - RNA, 21 nt, synthetic construct
  source 1..21: mol_type = other RNA
taggggctgttcccagataac

SEQ ID NO: 97627 - RNA, 21 nt, synthetic construct
  source 1..21: mol_type = other RNA
tagggggaaaactccaagtgt

SEQ ID NO: 97628 - RNA, 21 nt, synthetic construct
  source 1..21: mol_type = other RNA
taggggggaaaacacccttga

SEQ ID NO: 97629 - RNA, 21 nt, synthetic construct
  source 1..21: mol_type = other RNA
taggggtaaatctttgtacag

SEQ ID NO: 97630 - RNA, 21 nt, synthetic construct
  source 1..21: mol_type = other RNA
tagggtaatgctggcttcatg

SEQ ID NO: 97631 - RNA, 21 nt, synthetic construct
  source 1..21: mol_type = other RNA
tagggtgactagtgtgaatga

SEQ ID NO: 97632 - RNA, 21 nt, synthetic construct
  source 1..21: mol_type = other RNA
tagggtgctactcaaagttta

SEQ ID NO: 97633 - RNA, 21 nt, synthetic construct
  source 1..21: mol_type = other RNA
tagggtgtaaaaggctaattt

SEQ ID NO: 97634 - RNA, 21 nt, synthetic construct
  source 1..21: mol_type = other RNA
tagggttggggtatgtttgat

SEQ ID NO: 97635 - RNA, 21 nt, synthetic construct
  source 1..21: mol_type = other RNA
tagggtttggcagtttaagaa

SEQ ID NO: 97636 - RNA, 21 nt, synthetic construct
  source 1..21: mol_type = other RNA
taggtaagaaaaattccctca

SEQ ID NO: 97637 - RNA, 21 nt, synthetic construct
  source 1..21: mol_type = other RNA
taggtaatactctagtggtgc

SEQ ID NO: 97638 - RNA, 21 nt, synthetic construct
  source 1..21: mol_type = other RNA
taggtagggataagaatacca

SEQ ID NO: 97639 - RNA, 21 nt, synthetic construct
  source 1..21: mol_type = other RNA
taggtagggttggggtatgtt

SEQ ID NO: 97640 - RNA, 21 nt, synthetic construct
  source 1..21: mol_type = other RNA
taggtagtacatattcattgt

SEQ ID NO: 97641 - RNA, 21 nt, synthetic construct
  source 1..21: mol_type = other RNA
taggtagtcttgtcataacag

SEQ ID NO: 97642 - RNA, 21 nt, synthetic construct
  source 1..21: mol_type = other RNA
taggtagtttctttgaactta

SEQ ID NO: 97643 - RNA, 21 nt, synthetic construct
  source 1..21: mol_type = other RNA
taggtatcacagtgaggacgc

SEQ ID NO: 97644 - RNA, 21 nt, synthetic construct
  source 1..21: mol_type = other RNA
taggtattattttcacagaca

SEQ ID NO: 97645 - RNA, 21 nt, synthetic construct
  source 1..21: mol_type = other RNA
taggtattcatgctgtgaatt

SEQ ID NO: 97646 - RNA, 21 nt, synthetic construct
  source 1..21: mol_type = other RNA
taggtcactgcagtctcaaac

SEQ ID NO: 97647 - RNA, 21 nt, synthetic construct
  source 1..21: mol_type = other RNA
taggtcagaatacaaaaatga

SEQ ID NO: 97648 - RNA, 21 nt, synthetic construct
  source 1..21: mol_type = other RNA
taggtcatttttcacttctta

SEQ ID NO: 97649 - RNA, 21 nt, synthetic construct
  source 1..21: mol_type = other RNA
taggtctccttgtatggagac

SEQ ID NO: 97650 - RNA, 21 nt, synthetic construct
  source 1..21: mol_type = other RNA
taggtctttgatccattttga

SEQ ID NO: 97651 - RNA, 21 nt, synthetic construct
  source 1..21: mol_type = other RNA
taggtgacctgccagagttgg

SEQ ID NO: 97652 - RNA, 21 nt, synthetic construct
  source 1..21: mol_type = other RNA
taggtgagtgagatgggaaga

SEQ ID NO: 97653 - RNA, 21 nt, synthetic construct
  source 1..21: mol_type = other RNA
taggtgcacacaacactcaga

SEQ ID NO: 97654 - RNA, 21 nt, synthetic construct
  source 1..21: mol_type = other RNA
taggtgccccactccacacac

SEQ ID NO: 97655 - RNA, 21 nt, synthetic construct
  source 1..21: mol_type = other RNA
taggtgctggcttcaatatgc

SEQ ID NO: 97656 - RNA, 21 nt, synthetic construct
  source 1..21: mol_type = other RNA
taggtgctttttgtatcctgt

SEQ ID NO: 97657 - RNA, 21 nt, synthetic construct
  source 1..21: mol_type = other RNA
taggtggtttgaaccccagaa

SEQ ID NO: 97658 - RNA, 21 nt, synthetic construct
  source 1..21: mol_type = other RNA
taggtgtctcatttaataact

SEQ ID NO: 97659 - RNA, 21 nt, synthetic construct
  source 1..21: mol_type = other RNA
taggtgtctgatgtgtgtctc

SEQ ID NO: 97660 - RNA, 21 nt, synthetic construct
  source 1..21: mol_type = other RNA
taggtgtgataactgatatga

SEQ ID NO: 97661 - RNA, 21 nt, synthetic construct
  source 1..21: mol_type = other RNA
taggtgtgtgtaatcccagct

SEQ ID NO: 97662 - RNA, 21 nt, synthetic construct
  source 1..21: mol_type = other RNA
taggtgtgtgttccttcctac

SEQ ID NO: 97663 - RNA, 21 nt, synthetic construct
  source 1..21: mol_type = other RNA
taggtgttttttccttctttg

SEQ ID NO: 97664 - RNA, 21 nt, synthetic construct
  source 1..21: mol_type = other RNA
taggttacgtactaggtatca

SEQ ID NO: 97665 - RNA, 21 nt, synthetic construct
  source 1..21: mol_type = other RNA
taggttatctgttttcttact

SEQ ID NO: 97666 - RNA, 21 nt, synthetic construct
  source 1..21: mol_type = other RNA
taggttgaaagttcagaatac

SEQ ID NO: 97667 - RNA, 21 nt, synthetic construct
  source 1..21: mol_type = other RNA
taggttgaatagggcctcaaa

SEQ ID NO: 97668 - RNA, 21 nt, synthetic construct
  source 1..21: mol_type = other RNA
taggttgagacttagatttat

SEQ ID NO: 97669 - RNA, 21 nt, synthetic construct
  source 1..21: mol_type = other RNA
taggttgatggctgtactaag

SEQ ID NO: 97670 - RNA, 21 nt, synthetic construct
  source 1..21: mol_type = other RNA
taggtttctcatttttcaggg

SEQ ID NO: 97671 - RNA, 21 nt, synthetic construct
  source 1..21: mol_type = other RNA
taggtttttcttgtgggtatt

SEQ ID NO: 97672 - RNA, 21 nt, synthetic construct
  source 1..21: mol_type = other RNA
taggttttttcattttactgc

SEQ ID NO: 97673 - RNA, 21 nt, synthetic construct
  source 1..21: mol_type = other RNA
tagtaaaaccaaatgtggata

SEQ ID NO: 97674 - RNA, 21 nt, synthetic construct
  source 1..21: mol_type = other RNA
tagtaaagcaaatgtgactag

SEQ ID NO: 97675 - RNA, 21 nt, synthetic construct
  source 1..21: mol_type = other RNA
tagtaaatatccgaaagaact

SEQ ID NO: 97676 - RNA, 21 nt, synthetic construct
  source 1..21: mol_type = other RNA
tagtaaatctttggtgaaggt

SEQ ID NO: 97677 - RNA, 21 nt, synthetic construct
  source 1..21: mol_type = other RNA
tagtaacttggtcgaaaacct

SEQ ID NO: 97678 - RNA, 21 nt, synthetic construct
  source 1..21: mol_type = other RNA
tagtaactttctgcttaaagc

SEQ ID NO: 97679 - RNA, 21 nt, synthetic construct
  source 1..21: mol_type = other RNA
tagtaagaggtatcaccatct

SEQ ID NO: 97680 - RNA, 21 nt, synthetic construct
  source 1..21: mol_type = other RNA
tagtaaggatcgttagtattt

SEQ ID NO: 97681 - RNA, 21 nt, synthetic construct
  source 1..21: mol_type = other RNA
tagtaagggtaaacagaatta

SEQ ID NO: 97682 - RNA, 21 nt, synthetic construct
  source 1..21: mol_type = other RNA
tagtaagtaaaatcggaacag

SEQ ID NO: 97683 - RNA, 21 nt, synthetic construct
  source 1..21: mol_type = other RNA
tagtaagtgtgagcaaaaata

SEQ ID NO: 97684 - RNA, 21 nt, synthetic construct
  source 1..21: mol_type = other RNA
tagtaagttgtgtcatttttg

SEQ ID NO: 97685 - RNA, 21 nt, synthetic construct
  source 1..21: mol_type = other RNA
tagtaataaaggcaatgctct

SEQ ID NO: 97686 - RNA, 21 nt, synthetic construct
  source 1..21: mol_type = other RNA
tagtaattctccactttcatg

SEQ ID NO: 97687 - RNA, 21 nt, synthetic construct
  source 1..21: mol_type = other RNA
tagtacaaaagtgctgttgag

SEQ ID NO: 97688 - RNA, 21 nt, synthetic construct
  source 1..21: mol_type = other RNA
tagtacactgttgatttagaa

SEQ ID NO: 97689 - RNA, 21 nt, synthetic construct
  source 1..21: mol_type = other RNA
tagtacagccatcaacctaat

SEQ ID NO: 97690 - RNA, 21 nt, synthetic construct
  source 1..21: mol_type = other RNA
tagtacagtgagtagaagagt

SEQ ID NO: 97691 - RNA, 21 nt, synthetic construct
  source 1..21: mol_type = other RNA
tagtacgtaacctaaagttga

SEQ ID NO: 97692 - RNA, 21 nt, synthetic construct
  source 1..21: mol_type = other RNA
tagtacgtgcagagcaggggt

SEQ ID NO: 97693 - RNA, 21 nt, synthetic construct
  source 1..21: mol_type = other RNA
tagtactgaccatctcagcac

SEQ ID NO: 97694 - RNA, 21 nt, synthetic construct
  source 1..21: mol_type = other RNA
tagtacttctgagtgttactt

SEQ ID NO: 97695 - RNA, 21 nt, synthetic construct
  source 1..21: mol_type = other RNA
tagtagaaagcaggttcattt

SEQ ID NO: 97696 - RNA, 21 nt, synthetic construct
  source 1..21: mol_type = other RNA
tagtagaattctccagtgaag

SEQ ID NO: 97697 - RNA, 21 nt, synthetic construct
  source 1..21: mol_type = other RNA
tagtagagatgaggttttacg

SEQ ID NO: 97698 - RNA, 21 nt, synthetic construct
  source 1..21: mol_type = other RNA
tagtagcagaatccccaaata

SEQ ID NO: 97699 - RNA, 21 nt, synthetic construct
  source 1..21: mol_type = other RNA
tagtagctgtctttaatgtaa

SEQ ID NO: 97700 - RNA, 21 nt, synthetic construct
  source 1..21: mol_type = other RNA
tagtagctgttgaattgttgc

SEQ ID NO: 97701 - RNA, 21 nt, synthetic construct
  source 1..21: mol_type = other RNA
tagtagcttcaatgagggcag

SEQ ID NO: 97702 - RNA, 21 nt, synthetic construct
  source 1..21: mol_type = other RNA
tagtaggaaaaccatgtcatg

SEQ ID NO: 97703 - RNA, 21 nt, synthetic construct
  source 1..21: mol_type = other RNA
tagtaggatgaattacaaatg

SEQ ID NO: 97704 - RNA, 21 nt, synthetic construct
  source 1..21: mol_type = other RNA
tagtaggcaacatccctatgc

SEQ ID NO: 97705 - RNA, 21 nt, synthetic construct
  source 1..21: mol_type = other RNA
tagtaggtctccttgtatgga

SEQ ID NO: 97706 - RNA, 21 nt, synthetic construct
  source 1..21: mol_type = other RNA
tagtagtaagttgtgtcattt

SEQ ID NO: 97707 - RNA, 21 nt, synthetic construct
  source 1..21: mol_type = other RNA
tagtagttaggtggtttgaac

SEQ ID NO: 97708 - RNA, 21 nt, synthetic construct
  source 1..21: mol_type = other RNA
tagtagttgctcagaaaattt

SEQ ID NO: 97709 - RNA, 21 nt, synthetic construct
  source 1..21: mol_type = other RNA
tagtataagagaaggaagcac

SEQ ID NO: 97710 - RNA, 21 nt, synthetic construct
  source 1..21: mol_type = other RNA
tagtatacatgtttagcaaga

SEQ ID NO: 97711 - RNA, 21 nt, synthetic construct
  source 1..21: mol_type = other RNA
tagtatattttcaaggcttgt

SEQ ID NO: 97712 - RNA, 21 nt, synthetic construct
  source 1..21: mol_type = other RNA
tagtatcaacctgcaggtatt

SEQ ID NO: 97713 - RNA, 21 nt, synthetic construct
  source 1..21: mol_type = other RNA
tagtatctcatgcttaggatc

SEQ ID NO: 97714 - RNA, 21 nt, synthetic construct
  source 1..21: mol_type = other RNA
tagtattacctcccatgcatt

SEQ ID NO: 97715 - RNA, 21 nt, synthetic construct
  source 1..21: mol_type = other RNA
tagtattcaggacagattaaa

SEQ ID NO: 97716 - RNA, 21 nt, synthetic construct
  source 1..21: mol_type = other RNA
tagtattccatggtatgtgcc

SEQ ID NO: 97717 - RNA, 21 nt, synthetic construct
  source 1..21: mol_type = other RNA
tagtattgaactgttacttga

SEQ ID NO: 97718 - RNA, 21 nt, synthetic construct
  source 1..21: mol_type = other RNA
tagtattttgttgacatcctt

SEQ ID NO: 97719 - RNA, 21 nt, synthetic construct
  source 1..21: mol_type = other RNA
tagtcaacacttttccagtct

SEQ ID NO: 97720 - RNA, 21 nt, synthetic construct
  source 1..21: mol_type = other RNA
tagtcaagtaacagttcaata

SEQ ID NO: 97721 - RNA, 21 nt, synthetic construct
  source 1..21: mol_type = other RNA
tagtcaatgcaatgcgtgtga

SEQ ID NO: 97722 - RNA, 21 nt, synthetic construct
  source 1..21: mol_type = other RNA
tagtcacatttgctttactac

SEQ ID NO: 97723 - RNA, 21 nt, synthetic construct
  source 1..21: mol_type = other RNA
tagtcaccctacagactcaat

SEQ ID NO: 97724 - RNA, 21 nt, synthetic construct
  source 1..21: mol_type = other RNA
tagtcagacacactagctgac

SEQ ID NO: 97725 - RNA, 21 nt, synthetic construct
  source 1..21: mol_type = other RNA
tagtcagcacactcttaataa

SEQ ID NO: 97726 - RNA, 21 nt, synthetic construct
  source 1..21: mol_type = other RNA
tagtcagtatatttactgctt

SEQ ID NO: 97727 - RNA, 21 nt, synthetic construct
  source 1..21: mol_type = other RNA
tagtcagtgaagatgctgaac

SEQ ID NO: 97728 - RNA, 21 nt, synthetic construct
  source 1..21: mol_type = other RNA
tagtcatagcagtgggaagtg

SEQ ID NO: 97729 - RNA, 21 nt, synthetic construct
  source 1..21: mol_type = other RNA
tagtcatcattattagcaaac

SEQ ID NO: 97730 - RNA, 21 nt, synthetic construct
  source 1..21: mol_type = other RNA
tagtcatccactgcacagtat

SEQ ID NO: 97731 - RNA, 21 nt, synthetic construct
  source 1..21: mol_type = other RNA
tagtcattccgctaaacattt

SEQ ID NO: 97732 - RNA, 21 nt, synthetic construct
  source 1..21: mol_type = other RNA
tagtccactttccatcttagg

SEQ ID NO: 97733 - RNA, 21 nt, synthetic construct
  source 1..21: mol_type = other RNA
tagtccatgaagaaaacactc

SEQ ID NO: 97734 - RNA, 21 nt, synthetic construct
  source 1..21: mol_type = other RNA
tagtcccctagtggatgctgg

SEQ ID NO: 97735 - RNA, 21 nt, synthetic construct
  source 1..21: mol_type = other RNA
tagtctcacgatactttttat

SEQ ID NO: 97736 - RNA, 21 nt, synthetic construct
  source 1..21: mol_type = other RNA
tagtctccatacaaggagacc

SEQ ID NO: 97737 - RNA, 21 nt, synthetic construct
  source 1..21: mol_type = other RNA
tagtctcctatattgtcaatg

SEQ ID NO: 97738 - RNA, 21 nt, synthetic construct
  source 1..21: mol_type = other RNA
tagtctcttcctgtatatctc

SEQ ID NO: 97739 - RNA, 21 nt, synthetic construct
  source 1..21: mol_type = other RNA
tagtctgacttctctcagagg

SEQ ID NO: 97740 - RNA, 21 nt, synthetic construct
  source 1..21: mol_type = other RNA
tagtctgtagcttcacgtgca

SEQ ID NO: 97741 - RNA, 21 nt, synthetic construct
  source 1..21: mol_type = other RNA
tagtcttagctcttaagctta

SEQ ID NO: 97742 - RNA, 21 nt, synthetic construct
  source 1..21: mol_type = other RNA
tagtcttccaaaatattgaag

SEQ ID NO: 97743 - RNA, 21 nt, synthetic construct
  source 1..21: mol_type = other RNA
tagtcttccaattgcagaaaa

SEQ ID NO: 97744 - RNA, 21 nt, synthetic construct
  source 1..21: mol_type = other RNA
tagtcttctcagatctgttgc

SEQ ID NO: 97745 - RNA, 21 nt, synthetic construct
  source 1..21: mol_type = other RNA
tagtcttgtcataacagtatt

SEQ ID NO: 97746 - RNA, 21 nt, synthetic construct
  source 1..21: mol_type = other RNA
tagtcttgtcttttctttttc

SEQ ID NO: 97747 - RNA, 21 nt, synthetic construct
  source 1..21: mol_type = other RNA
tagtgaaatagttggtcagaa

SEQ ID NO: 97748 - RNA, 21 nt, synthetic construct
  source 1..21: mol_type = other RNA
tagtgaagcagagagagaaga

SEQ ID NO: 97749 - RNA, 21 nt, synthetic construct
  source 1..21: mol_type = other RNA
tagtgaagtcaatttcagatc

SEQ ID NO: 97750 - RNA, 21 nt, synthetic construct
  source 1..21: mol_type = other RNA
tagtgaagtcccatcttccat

SEQ ID NO: 97751 - RNA, 21 nt, synthetic construct
  source 1..21: mol_type = other RNA
tagtgaatgagaccaaatgca

SEQ ID NO: 97752 - RNA, 21 nt, synthetic construct
  source 1..21: mol_type = other RNA
tagtgaattcacagtagaaga

SEQ ID NO: 97753 - RNA, 21 nt, synthetic construct
  source 1..21: mol_type = other RNA
tagtgaccctttgaagtatgt

SEQ ID NO: 97754 - RNA, 21 nt, synthetic construct
  source 1..21: mol_type = other RNA
tagtgactggcttaatgcata

SEQ ID NO: 97755 - RNA, 21 nt, synthetic construct
  source 1..21: mol_type = other RNA
tagtgagccaaaatcgtgcca

SEQ ID NO: 97756 - RNA, 21 nt, synthetic construct
  source 1..21: mol_type = other RNA
tagtgagggaggccatcttca

SEQ ID NO: 97757 - RNA, 21 nt, synthetic construct
  source 1..21: mol_type = other RNA
tagtgatgggagatggacact

SEQ ID NO: 97758 - RNA, 21 nt, synthetic construct
  source 1..21: mol_type = other RNA
tagtgatgtcttttgaagaag

SEQ ID NO: 97759 - RNA, 21 nt, synthetic construct
  source 1..21: mol_type = other RNA
tagtgatgttgagtatctttt

SEQ ID NO: 97760 - RNA, 21 nt, synthetic construct
  source 1..21: mol_type = other RNA
tagtgattcacttttgagttc

SEQ ID NO: 97761 - RNA, 21 nt, synthetic construct
  source 1..21: mol_type = other RNA
tagtgattttaccaaggctaa

SEQ ID NO: 97762 - RNA, 21 nt, synthetic construct
  source 1..21: mol_type = other RNA
tagtgcagtatcttgaagaaa

SEQ ID NO: 97763 - RNA, 21 nt, synthetic construct
  source 1..21: mol_type = other RNA
tagtgccttcagaaggagtcc

SEQ ID NO: 97764 - RNA, 21 nt, synthetic construct
  source 1..21: mol_type = other RNA
tagtgctcttctgatcacaga

SEQ ID NO: 97765 - RNA, 21 nt, synthetic construct
  source 1..21: mol_type = other RNA
tagtgctttttactttgcgaa

SEQ ID NO: 97766 - RNA, 21 nt, synthetic construct
  source 1..21: mol_type = other RNA
tagtggaaaaactgcagcaat

SEQ ID NO: 97767 - RNA, 21 nt, synthetic construct
  source 1..21: mol_type = other RNA
tagtggaagaatcaggtctct

SEQ ID NO: 97768 - RNA, 21 nt, synthetic construct
  source 1..21: mol_type = other RNA
tagtggatgctggggacccct

SEQ ID NO: 97769 - RNA, 21 nt, synthetic construct
  source 1..21: mol_type = other RNA
tagtggcagccccgcttcagt

SEQ ID NO: 97770 - RNA, 21 nt, synthetic construct
  source 1..21: mol_type = other RNA
tagtggctcacagtgctccat

SEQ ID NO: 97771 - RNA, 21 nt, synthetic construct
  source 1..21: mol_type = other RNA
tagtggctcatacttgcttta

SEQ ID NO: 97772 - RNA, 21 nt, synthetic construct
  source 1..21: mol_type = other RNA
tagtggctgcaccattttttc

SEQ ID NO: 97773 - RNA, 21 nt, synthetic construct
  source 1..21: mol_type = other RNA
tagtgggaccccgtctctgca

SEQ ID NO: 97774 - RNA, 21 nt, synthetic construct
  source 1..21: mol_type = other RNA
tagtgggatcaaaccatgttc

SEQ ID NO: 97775 - RNA, 21 nt, synthetic construct
  source 1..21: mol_type = other RNA
tagtgggtagaagcagcaagg

SEQ ID NO: 97776 - RNA, 21 nt, synthetic construct
  source 1..21: mol_type = other RNA
tagtgggtcgggtgtcagaaa

SEQ ID NO: 97777 - RNA, 21 nt, synthetic construct
  source 1..21: mol_type = other RNA
tagtggtaactagatgcctcg

SEQ ID NO: 97778 - RNA, 21 nt, synthetic construct
  source 1..21: mol_type = other RNA
tagtggtaaggagccaaacat

SEQ ID NO: 97779 - RNA, 21 nt, synthetic construct
  source 1..21: mol_type = other RNA
tagtggtgcttaattcaaaca

SEQ ID NO: 97780 - RNA, 21 nt, synthetic construct
  source 1..21: mol_type = other RNA
tagtggtggtagtaaggatcg

SEQ ID NO: 97781 - RNA, 21 nt, synthetic construct
  source 1..21: mol_type = other RNA
tagtggtgtgtgactgtagtc

SEQ ID NO: 97782 - RNA, 21 nt, synthetic construct
  source 1..21: mol_type = other RNA
tagtggttgacccataaactg

SEQ ID NO: 97783 - RNA, 21 nt, synthetic construct
  source 1..21: mol_type = other RNA
tagtggtttgaagcttcactt

SEQ ID NO: 97784 - RNA, 21 nt, synthetic construct
  source 1..21: mol_type = other RNA
tagtgtattgtaccttgattt

SEQ ID NO: 97785 - RNA, 21 nt, synthetic construct
  source 1..21: mol_type = other RNA
tagtgtcctcaggctccaggt

SEQ ID NO: 97786 - RNA, 21 nt, synthetic construct
  source 1..21: mol_type = other RNA
tagtgtctaatgggtacaggg

SEQ ID NO: 97787 - RNA, 21 nt, synthetic construct
  source 1..21: mol_type = other RNA
tagtgtctcagcctcccaagt

SEQ ID NO: 97788 - RNA, 21 nt, synthetic construct
  source 1..21: mol_type = other RNA
tagtgtctccataccccctgg

SEQ ID NO: 97789 - RNA, 21 nt, synthetic construct
  source 1..21: mol_type = other RNA
tagtgtcttaatcctattttg

SEQ ID NO: 97790 - RNA, 21 nt, synthetic construct
  source 1..21: mol_type = other RNA
tagtgtcttagtctgacttct

SEQ ID NO: 97791 - RNA, 21 nt, synthetic construct
  source 1..21: mol_type = other RNA
tagtgtgaatgaggagtgaat

SEQ ID NO: 97792 - RNA, 21 nt, synthetic construct
  source 1..21: mol_type = other RNA
tagtgtgcatgtgttgtgcac

SEQ ID NO: 97793 - RNA, 21 nt, synthetic construct
  source 1..21: mol_type = other RNA
tagtgtgtctgactacactga

SEQ ID NO: 97794 - RNA, 21 nt, synthetic construct
  source 1..21: mol_type = other RNA
tagtgtgttgactgacataac

SEQ ID NO: 97795 - RNA, 21 nt, synthetic construct
  source 1..21: mol_type = other RNA
tagtgttcccttcttaaatgt

SEQ ID NO: 97796 - RNA, 21 nt, synthetic construct
  source 1..21: mol_type = other RNA
tagtgttctgtgtttatgaat

SEQ ID NO: 97797 - RNA, 21 nt, synthetic construct
  source 1..21: mol_type = other RNA
tagtgttgcttggtgttgact

SEQ ID NO: 97798 - RNA, 21 nt, synthetic construct
  source 1..21: mol_type = other RNA
tagtgtttccttccagatgtt

SEQ ID NO: 97799 - RNA, 21 nt, synthetic construct
  source 1..21: mol_type = other RNA
tagttaaccttctggggttca

SEQ ID NO: 97800 - RNA, 21 nt, synthetic construct
  source 1..21: mol_type = other RNA
tagttaacgtttatctacaga

SEQ ID NO: 97801 - RNA, 21 nt, synthetic construct
  source 1..21: mol_type = other RNA
tagttaagtctgaaagcttct

SEQ ID NO: 97802 - RNA, 21 nt, synthetic construct
  source 1..21: mol_type = other RNA
tagttaatgtgtgaagaagga

SEQ ID NO: 97803 - RNA, 21 nt, synthetic construct
  source 1..21: mol_type = other RNA
tagttacaactactcgggagg

SEQ ID NO: 97804 - RNA, 21 nt, synthetic construct
  source 1..21: mol_type = other RNA
tagttacacaagtgtttcatt

SEQ ID NO: 97805 - RNA, 21 nt, synthetic construct
  source 1..21: mol_type = other RNA
tagttacatgaggtcacccaa

SEQ ID NO: 97806 - RNA, 21 nt, synthetic construct
  source 1..21: mol_type = other RNA
tagttaccactagcaaactac

SEQ ID NO: 97807 - RNA, 21 nt, synthetic construct
  source 1..21: mol_type = other RNA
tagttactcaaatccaaattc

SEQ ID NO: 97808 - RNA, 21 nt, synthetic construct
  source 1..21: mol_type = other RNA
tagttaggtggtttgaacccc

SEQ ID NO: 97809 - RNA, 21 nt, synthetic construct
  source 1..21: mol_type = other RNA
tagttagtttgttgacccaat

SEQ ID NO: 97810 - RNA, 21 nt, synthetic construct
  source 1..21: mol_type = other RNA
tagttatctcttagacctcct

SEQ ID NO: 97811 - RNA, 21 nt, synthetic construct
  source 1..21: mol_type = other RNA
tagttattaaatgagacacct

SEQ ID NO: 97812 - RNA, 21 nt, synthetic construct
  source 1..21: mol_type = other RNA
tagttcaagatgcataccaag

SEQ ID NO: 97813 - RNA, 21 nt, synthetic construct
  source 1..21: mol_type = other RNA
tagttcacctctccgggtaaa

SEQ ID NO: 97814 - RNA, 21 nt, synthetic construct
  source 1..21: mol_type = other RNA
tagttcatgttagcataattc

SEQ ID NO: 97815 - RNA, 21 nt, synthetic construct
  source 1..21: mol_type = other RNA
tagttcctccttttgtagagg

SEQ ID NO: 97816 - RNA, 21 nt, synthetic construct
  source 1..21: mol_type = other RNA
tagttccttttaagggaaaca

SEQ ID NO: 97817 - RNA, 21 nt, synthetic construct
  source 1..21: mol_type = other RNA
tagttctaataaacgcggaat

SEQ ID NO: 97818 - RNA, 21 nt, synthetic construct
  source 1..21: mol_type = other RNA
tagttctagctctgtcttttt

SEQ ID NO: 97819 - RNA, 21 nt, synthetic construct
  source 1..21: mol_type = other RNA
tagttctgcttccacatttct

SEQ ID NO: 97820 - RNA, 21 nt, synthetic construct
  source 1..21: mol_type = other RNA
tagttctggtgtcgtttattt

SEQ ID NO: 97821 - RNA, 21 nt, synthetic construct
  source 1..21: mol_type = other RNA
tagttgactcctaaaacatgg

SEQ ID NO: 97822 - RNA, 21 nt, synthetic construct
  source 1..21: mol_type = other RNA
tagttgcacggtgaagaaccg

SEQ ID NO: 97823 - RNA, 21 nt, synthetic construct
  source 1..21: mol_type = other RNA
tagttgcagattcatcttgac

SEQ ID NO: 97824 - RNA, 21 nt, synthetic construct
  source 1..21: mol_type = other RNA
tagttgctcagaaaattttct

SEQ ID NO: 97825 - RNA, 21 nt, synthetic construct
  source 1..21: mol_type = other RNA
tagttggtcagaaaaatggaa

SEQ ID NO: 97826 - RNA, 21 nt, synthetic construct
  source 1..21: mol_type = other RNA
tagttgtaactacagacatgc

SEQ ID NO: 97827 - RNA, 21 nt, synthetic construct
  source 1..21: mol_type = other RNA
tagttgtacttgacacaaagg

SEQ ID NO: 97828 - RNA, 21 nt, synthetic construct
  source 1..21: mol_type = other RNA
tagttgtgctacctcaaattg

SEQ ID NO: 97829 - RNA, 21 nt, synthetic construct
  source 1..21: mol_type = other RNA
tagtttaattgggggaaaatt

SEQ ID NO: 97830 - RNA, 21 nt, synthetic construct
  source 1..21: mol_type = other RNA
tagtttacactatggcttttg

SEQ ID NO: 97831 - RNA, 21 nt, synthetic construct
  source 1..21: mol_type = other RNA
tagtttagtgcagtatcttga

SEQ ID NO: 97832 - RNA, 21 nt, synthetic construct
  source 1..21: mol_type = other RNA
tagtttagttactcaaatcca

SEQ ID NO: 97833 - RNA, 21 nt, synthetic construct
  source 1..21: mol_type = other RNA
tagtttcatctatgtcccctg

SEQ ID NO: 97834 - RNA, 21 nt, synthetic construct
  source 1..21: mol_type = other RNA
tagtttccatggaggggccag

SEQ ID NO: 97835 - RNA, 21 nt, synthetic construct
  source 1..21: mol_type = other RNA
tagtttctcaacttagccttg

SEQ ID NO: 97836 - RNA, 21 nt, synthetic construct
  source 1..21: mol_type = other RNA
tagtttctttttgttttctcc

SEQ ID NO: 97837 - RNA, 21 nt, synthetic construct
  source 1..21: mol_type = other RNA
tagtttgaggtgtacaattag

SEQ ID NO: 97838 - RNA, 21 nt, synthetic construct
  source 1..21: mol_type = other RNA
tagtttgagtatttcatgtac

SEQ ID NO: 97839 - RNA, 21 nt, synthetic construct
  source 1..21: mol_type = other RNA
tagtttgcaatacagttaacg

SEQ ID NO: 97840 - RNA, 21 nt, synthetic construct
  source 1..21: mol_type = other RNA
tagtttgcacgtttttagaaa

SEQ ID NO: 97841 - RNA, 21 nt, synthetic construct
  source 1..21: mol_type = other RNA
tagtttgctagtggtaactag

SEQ ID NO: 97842 - RNA, 21 nt, synthetic construct
  source 1..21: mol_type = other RNA
tagtttgttgacccaatcatg

SEQ ID NO: 97843 - RNA, 21 nt, synthetic construct
  source 1..21: mol_type = other RNA
tagttttcacttttgtgcaac

SEQ ID NO: 97844 - RNA, 21 nt, synthetic construct
  source 1..21: mol_type = other RNA
tagttttccaatccgggaaca

SEQ ID NO: 97845 - RNA, 21 nt, synthetic construct
  source 1..21: mol_type = other RNA
tagttttccctgtgtatgtgt

SEQ ID NO: 97846 - RNA, 21 nt, synthetic construct
  source 1..21: mol_type = other RNA
tagttttttggtagataccag

SEQ ID NO: 97847 - RNA, 21 nt, synthetic construct
  source 1..21: mol_type = other RNA
tataaaaagacacaaaagagc

SEQ ID NO: 97848 - RNA, 21 nt, synthetic construct
  source 1..21: mol_type = other RNA
tataaaaagcctctgtggacc

SEQ ID NO: 97849 - RNA, 21 nt, synthetic construct
  source 1..21: mol_type = other RNA
tataaaaatggcacatactgc

SEQ ID NO: 97850 - RNA, 21 nt, synthetic construct
  source 1..21: mol_type = other RNA
tataaaaattccgctctggtt

SEQ ID NO: 97851 - RNA, 21 nt, synthetic construct
  source 1..21: mol_type = other RNA
tataaaataggaagtccatga

SEQ ID NO: 97852 - RNA, 21 nt, synthetic construct
  source 1..21: mol_type = other RNA
tataaacgtgtgtgtaagcac

SEQ ID NO: 97853 - RNA, 21 nt, synthetic construct
  source 1..21: mol_type = other RNA
tataaactcttccttatccga

SEQ ID NO: 97854 - RNA, 21 nt, synthetic construct
  source 1..21: mol_type = other RNA
tataaactggaaggaaataag

SEQ ID NO: 97855 - RNA, 21 nt, synthetic construct
  source 1..21: mol_type = other RNA
tataaacttccctctcagtgg

SEQ ID NO: 97856 - RNA, 21 nt, synthetic construct
  source 1..21: mol_type = other RNA
tataaagaacatgattgggtc

SEQ ID NO: 97857 - RNA, 21 nt, synthetic construct
  source 1..21: mol_type = other RNA
tataaagaactccaacaattc

SEQ ID NO: 97858 - RNA, 21 nt, synthetic construct
  source 1..21: mol_type = other RNA
tataaaggatgcacaagacag

SEQ ID NO: 97859 - RNA, 21 nt, synthetic construct
  source 1..21: mol_type = other RNA
tataaagtttccgttttgcaa

SEQ ID NO: 97860 - RNA, 21 nt, synthetic construct
  source 1..21: mol_type = other RNA
tataaataaaatgtctggccg

SEQ ID NO: 97861 - RNA, 21 nt, synthetic construct
  source 1..21: mol_type = other RNA
tataaatacgtgtatactggg

SEQ ID NO: 97862 - RNA, 21 nt, synthetic construct
  source 1..21: mol_type = other RNA
tataaatgaggtatcatttcc

SEQ ID NO: 97863 - RNA, 21 nt, synthetic construct
  source 1..21: mol_type = other RNA
tataaatgatgagctactgca

SEQ ID NO: 97864 - RNA, 21 nt, synthetic construct
  source 1..21: mol_type = other RNA
tataaatgctcagtgggttca

SEQ ID NO: 97865 - RNA, 21 nt, synthetic construct
  source 1..21: mol_type = other RNA
tataaatgttcagtttatggg

SEQ ID NO: 97866 - RNA, 21 nt, synthetic construct
  source 1..21: mol_type = other RNA
tataacagatggaactctatt

SEQ ID NO: 97867 - RNA, 21 nt, synthetic construct
  source 1..21: mol_type = other RNA
tataacataaaagcgtactgt

SEQ ID NO: 97868 - RNA, 21 nt, synthetic construct
  source 1..21: mol_type = other RNA
tataaccacgagtaatggatg

SEQ ID NO: 97869 - RNA, 21 nt, synthetic construct
  source 1..21: mol_type = other RNA
tataacccgttttttccttca

SEQ ID NO: 97870 - RNA, 21 nt, synthetic construct
  source 1..21: mol_type = other RNA
tataaccttgaacttccaggc

SEQ ID NO: 97871 - RNA, 21 nt, synthetic construct
  source 1..21: mol_type = other RNA
tataacgatagtctcctatat

SEQ ID NO: 97872 - RNA, 21 nt, synthetic construct
  source 1..21: mol_type = other RNA
tataagacccagtggctagtg

SEQ ID NO: 97873 - RNA, 21 nt, synthetic construct
  source 1..21: mol_type = other RNA
tataagagaaggaagcaccaa

SEQ ID NO: 97874 - RNA, 21 nt, synthetic construct
  source 1..21: mol_type = other RNA
tataagagtgggcaaaaaagt

SEQ ID NO: 97875 - RNA, 21 nt, synthetic construct
  source 1..21: mol_type = other RNA
tataagatgatctaaatggtg

SEQ ID NO: 97876 - RNA, 21 nt, synthetic construct
  source 1..21: mol_type = other RNA
tataagcaaagatatgggtta

SEQ ID NO: 97877 - RNA, 21 nt, synthetic construct
  source 1..21: mol_type = other RNA
tataagccaatatccctgata

SEQ ID NO: 97878 - RNA, 21 nt, synthetic construct
  source 1..21: mol_type = other RNA
tataagcttcctctggctgac

SEQ ID NO: 97879 - RNA, 21 nt, synthetic construct
  source 1..21: mol_type = other RNA
tataaggggaatcatgcagta

SEQ ID NO: 97880 - RNA, 21 nt, synthetic construct
  source 1..21: mol_type = other RNA
tataagggtgataaaaaggag

SEQ ID NO: 97881 - RNA, 21 nt, synthetic construct
  source 1..21: mol_type = other RNA
tataagtggaatcattccgta

SEQ ID NO: 97882 - RNA, 21 nt, synthetic construct
  source 1..21: mol_type = other RNA
tataagttcaaagaaactacc

SEQ ID NO: 97883 - RNA, 21 nt, synthetic construct
  source 1..21: mol_type = other RNA
tataagttgggagtctatttc

SEQ ID NO: 97884 - RNA, 21 nt, synthetic construct
  source 1..21: mol_type = other RNA
tataatcagccgtgattgcac

SEQ ID NO: 97885 - RNA, 21 nt, synthetic construct
  source 1..21: mol_type = other RNA
tataatccaactgcagtctgt

SEQ ID NO: 97886 - RNA, 21 nt, synthetic construct
  source 1..21: mol_type = other RNA
tataatccagatggacaaatt

SEQ ID NO: 97887 - RNA, 21 nt, synthetic construct
  source 1..21: mol_type = other RNA
tataatccattgggtacatac

SEQ ID NO: 97888 - RNA, 21 nt, synthetic construct
  source 1..21: mol_type = other RNA
tataatctaaccctcctcctc

SEQ ID NO: 97889 - RNA, 21 nt, synthetic construct
  source 1..21: mol_type = other RNA
tataatgagatagaccagatg

SEQ ID NO: 97890 - RNA, 21 nt, synthetic construct
  source 1..21: mol_type = other RNA
tataatggagtactatgcagc

SEQ ID NO: 97891 - RNA, 21 nt, synthetic construct
  source 1..21: mol_type = other RNA
tataatgggcaatcagaaaaa

SEQ ID NO: 97892 - RNA, 21 nt, synthetic construct
  source 1..21: mol_type = other RNA
tataattctgccttcaatgtt

SEQ ID NO: 97893 - RNA, 21 nt, synthetic construct
  source 1..21: mol_type = other RNA
tataatttctgagagtattgc

SEQ ID NO: 97894 - RNA, 21 nt, synthetic construct
  source 1..21: mol_type = other RNA
tatacaaataactccagcttt

SEQ ID NO: 97895 - RNA, 21 nt, synthetic construct
  source 1..21: mol_type = other RNA
tatacaaccggaaaatgctta

SEQ ID NO: 97896 - RNA, 21 nt, synthetic construct
  source 1..21: mol_type = other RNA
tatacacaaaaagatctgtgg

SEQ ID NO: 97897 - RNA, 21 nt, synthetic construct
  source 1..21: mol_type = other RNA
tatacacacataagggggaat

SEQ ID NO: 97898 - RNA, 21 nt, synthetic construct
  source 1..21: mol_type = other RNA
tatacagcaaatctctagaac

SEQ ID NO: 97899 - RNA, 21 nt, synthetic construct
  source 1..21: mol_type = other RNA
tatacaggaagagactatctc

SEQ ID NO: 97900 - RNA, 21 nt, synthetic construct
  source 1..21: mol_type = other RNA
tatacaggtgcttacagactg

SEQ ID NO: 97901 - RNA, 21 nt, synthetic construct
  source 1..21: mol_type = other RNA
tatacagttggaactcttgcg

SEQ ID NO: 97902 - RNA, 21 nt, synthetic construct
  source 1..21: mol_type = other RNA
tatacatgacatggttttcct

SEQ ID NO: 97903 - RNA, 21 nt, synthetic construct
  source 1..21: mol_type = other RNA
tatacccaagtaaacaactga

SEQ ID NO: 97904 - RNA, 21 nt, synthetic construct
  source 1..21: mol_type = other RNA
tatacccaggtgtgagattga

SEQ ID NO: 97905 - RNA, 21 nt, synthetic construct
  source 1..21: mol_type = other RNA
tatacccttctgttaatagat

SEQ ID NO: 97906 - RNA, 21 nt, synthetic construct
  source 1..21: mol_type = other RNA
tatacctgtagaaaataggga

SEQ ID NO: 97907 - RNA, 21 nt, synthetic construct
  source 1..21: mol_type = other RNA
tatacctgttgaatagcaact

SEQ ID NO: 97908 - RNA, 21 nt, synthetic construct
  source 1..21: mol_type = other RNA
tataccttatgtgaaagtaga

SEQ ID NO: 97909 - RNA, 21 nt, synthetic construct
  source 1..21: mol_type = other RNA
tatacggaatgattccactta

SEQ ID NO: 97910 - RNA, 21 nt, synthetic construct
  source 1..21: mol_type = other RNA
tatactaaatacaccaaactc

SEQ ID NO: 97911 - RNA, 21 nt, synthetic construct
  source 1..21: mol_type = other RNA
tatactagtagaaagcaggtt

SEQ ID NO: 97912 - RNA, 21 nt, synthetic construct
  source 1..21: mol_type = other RNA
tatactctgagacaggatcca

SEQ ID NO: 97913 - RNA, 21 nt, synthetic construct
  source 1..21: mol_type = other RNA
tatactgaagttctcaggggt

SEQ ID NO: 97914 - RNA, 21 nt, synthetic construct
  source 1..21: mol_type = other RNA
tatactgactagtggctcata

SEQ ID NO: 97915 - RNA, 21 nt, synthetic construct
  source 1..21: mol_type = other RNA
tatactggaaaactagagatg

SEQ ID NO: 97916 - RNA, 21 nt, synthetic construct
  source 1..21: mol_type = other RNA
tatactgggtgtgatggcgca

SEQ ID NO: 97917 - RNA, 21 nt, synthetic construct
  source 1..21: mol_type = other RNA
tatactgtaaccctgtttccc

SEQ ID NO: 97918 - RNA, 21 nt, synthetic construct
  source 1..21: mol_type = other RNA
tatacttcaatgctacagtaa

SEQ ID NO: 97919 - RNA, 21 nt, synthetic construct
  source 1..21: mol_type = other RNA
tatacttcatctttcctgatc

SEQ ID NO: 97920 - RNA, 21 nt, synthetic construct
  source 1..21: mol_type = other RNA
tatacttgtcaagttctgatt

SEQ ID NO: 97921 - RNA, 21 nt, synthetic construct
  source 1..21: mol_type = other RNA
tatagaaaggagaccagttag

SEQ ID NO: 97922 - RNA, 21 nt, synthetic construct
  source 1..21: mol_type = other RNA
tatagaaggccagagggaatc

SEQ ID NO: 97923 - RNA, 21 nt, synthetic construct
  source 1..21: mol_type = other RNA
tatagaagtaaatcccggcca

SEQ ID NO: 97924 - RNA, 21 nt, synthetic construct
  source 1..21: mol_type = other RNA
tatagacagcatccccagaaa

SEQ ID NO: 97925 - RNA, 21 nt, synthetic construct
  source 1..21: mol_type = other RNA
tatagacccaaagcaaaagca

SEQ ID NO: 97926 - RNA, 21 nt, synthetic construct
  source 1..21: mol_type = other RNA
tatagagggcctaaataaaac

SEQ ID NO: 97927 - RNA, 21 nt, synthetic construct
  source 1..21: mol_type = other RNA
tatagatgacgaaagtgaagc

SEQ ID NO: 97928 - RNA, 21 nt, synthetic construct
  source 1..21: mol_type = other RNA
tatagccataagagtccccaa

SEQ ID NO: 97929 - RNA, 21 nt, synthetic construct
  source 1..21: mol_type = other RNA
tatagcgagacctcatctctg

SEQ ID NO: 97930 - RNA, 21 nt, synthetic construct
  source 1..21: mol_type = other RNA
tatagctccaaaagcgaaagg

SEQ ID NO: 97931 - RNA, 21 nt, synthetic construct
  source 1..21: mol_type = other RNA
tatagctgagaagtaacatta

SEQ ID NO: 97932 - RNA, 21 nt, synthetic construct
  source 1..21: mol_type = other RNA
tatagcttctgagctgttaat

SEQ ID NO: 97933 - RNA, 21 nt, synthetic construct
  source 1..21: mol_type = other RNA
tataggagactatcgttatat

SEQ ID NO: 97934 - RNA, 21 nt, synthetic construct
  source 1..21: mol_type = other RNA
tataggagttcattcgtagca

SEQ ID NO: 97935 - RNA, 21 nt, synthetic construct
  source 1..21: mol_type = other RNA
tataggcaatgagtctgacat

SEQ ID NO: 97936 - RNA, 21 nt, synthetic construct
  source 1..21: mol_type = other RNA
tataggcaatttagaattctc

SEQ ID NO: 97937 - RNA, 21 nt, synthetic construct
  source 1..21: mol_type = other RNA
tataggggaactcttgtagta

SEQ ID NO: 97938 - RNA, 21 nt, synthetic construct
  source 1..21: mol_type = other RNA
tataggttgaatagggcctca

SEQ ID NO: 97939 - RNA, 21 nt, synthetic construct
  source 1..21: mol_type = other RNA
tatagtattacctcccatgca

SEQ ID NO: 97940 - RNA, 21 nt, synthetic construct
  source 1..21: mol_type = other RNA
tatagtcattccgctaaacat

SEQ ID NO: 97941 - RNA, 21 nt, synthetic construct
  source 1..21: mol_type = other RNA
tatagtcttagctcttaagct

SEQ ID NO: 97942 - RNA, 21 nt, synthetic construct
  source 1..21: mol_type = other RNA
tatagtggctgcaccattttt

SEQ ID NO: 97943 - RNA, 21 nt, synthetic construct
  source 1..21: mol_type = other RNA
tatagtgggaccccgtctctg

SEQ ID NO: 97944 - RNA, 21 nt, synthetic construct
  source 1..21: mol_type = other RNA
tatagtggtaaggagccaaac

SEQ ID NO: 97945 - RNA, 21 nt, synthetic construct
  source 1..21: mol_type = other RNA
tatagtgtttccttccagatg

SEQ ID NO: 97946 - RNA, 21 nt, synthetic construct
  source 1..21: mol_type = other RNA
tatagttaagtctgaaagctt

SEQ ID NO: 97947 - RNA, 21 nt, synthetic construct
  source 1..21: mol_type = other RNA
tatagtttaattgggggaaaa

SEQ ID NO: 97948 - RNA, 21 nt, synthetic construct
  source 1..21: mol_type = other RNA
tatataaatgctcagtgggtt

SEQ ID NO: 97949 - RNA, 21 nt, synthetic construct
  source 1..21: mol_type = other RNA
tatatacccttctgttaatag

SEQ ID NO: 97950 - RNA, 21 nt, synthetic construct
  source 1..21: mol_type = other RNA
tatatacggaatgattccact

SEQ ID NO: 97951 - RNA, 21 nt, synthetic construct
  source 1..21: mol_type = other RNA
tatatactctgagacaggatc

SEQ ID NO: 97952 - RNA, 21 nt, synthetic construct
  source 1..21: mol_type = other RNA
tatatactgaagttctcaggg

SEQ ID NO: 97953 - RNA, 21 nt, synthetic construct
  source 1..21: mol_type = other RNA
tatatatcatagagtaccagg

SEQ ID NO: 97954 - RNA, 21 nt, synthetic construct
  source 1..21: mol_type = other RNA
tatatatgctccctaaataca

SEQ ID NO: 97955 - RNA, 21 nt, synthetic construct
  source 1..21: mol_type = other RNA
tatatcatagagtaccaggtc

SEQ ID NO: 97956 - RNA, 21 nt, synthetic construct
  source 1..21: mol_type = other RNA
tatatccagattgatatctga

SEQ ID NO: 97957 - RNA, 21 nt, synthetic construct
  source 1..21: mol_type = other RNA
tatatcccaaattggcattta

SEQ ID NO: 97958 - RNA, 21 nt, synthetic construct
  source 1..21: mol_type = other RNA
tatatcctaaacacttagcat

SEQ ID NO: 97959 - RNA, 21 nt, synthetic construct
  source 1..21: mol_type = other RNA
tatatcctcagggtaggaaaa

SEQ ID NO: 97960 - RNA, 21 nt, synthetic construct
  source 1..21: mol_type = other RNA
tatatctccttttaagagtga

SEQ ID NO: 97961 - RNA, 21 nt, synthetic construct
  source 1..21: mol_type = other RNA
tatatctgtctgggataatga

SEQ ID NO: 97962 - RNA, 21 nt, synthetic construct
  source 1..21: mol_type = other RNA
tatatctttggaaaaatgtcc

SEQ ID NO: 97963 - RNA, 21 nt, synthetic construct
  source 1..21: mol_type = other RNA
tatatgaaaagcccaatctac

SEQ ID NO: 97964 - RNA, 21 nt, synthetic construct
  source 1..21: mol_type = other RNA
tatatgaaaagcttcccccct

SEQ ID NO: 97965 - RNA, 21 nt, synthetic construct
  source 1..21: mol_type = other RNA
tatatgaataaaccacgcagt

SEQ ID NO: 97966 - RNA, 21 nt, synthetic construct
  source 1..21: mol_type = other RNA
tatatgatccagcagtttcac

SEQ ID NO: 97967 - RNA, 21 nt, synthetic construct
  source 1..21: mol_type = other RNA
tatatgatgatttttgccagt

SEQ ID NO: 97968 - RNA, 21 nt, synthetic construct
  source 1..21: mol_type = other RNA
tatatgcattaagccagtcac

SEQ ID NO: 97969 - RNA, 21 nt, synthetic construct
  source 1..21: mol_type = other RNA
tatatgcattcccatgttcac

SEQ ID NO: 97970 - RNA, 21 nt, synthetic construct
  source 1..21: mol_type = other RNA
tatatgcctagatgattcgca

SEQ ID NO: 97971 - RNA, 21 nt, synthetic construct
  source 1..21: mol_type = other RNA
tatatgcctagatttcaatct

SEQ ID NO: 97972 - RNA, 21 nt, synthetic construct
  source 1..21: mol_type = other RNA
tatatgctccctaaatacaca

SEQ ID NO: 97973 - RNA, 21 nt, synthetic construct
  source 1..21: mol_type = other RNA
tatatggtctaccatgttgtt

SEQ ID NO: 97974 - RNA, 21 nt, synthetic construct
  source 1..21: mol_type = other RNA
tatatggtttaaggtaagggt

SEQ ID NO: 97975 - RNA, 21 nt, synthetic construct
  source 1..21: mol_type = other RNA
tatatgttgatgtaatggatc

SEQ ID NO: 97976 - RNA, 21 nt, synthetic construct
  source 1..21: mol_type = other RNA
tatattaattctgaggcctcc

SEQ ID NO: 97977 - RNA, 21 nt, synthetic construct
  source 1..21: mol_type = other RNA
tatattatggtctttttccag

SEQ ID NO: 97978 - RNA, 21 nt, synthetic construct
  source 1..21: mol_type = other RNA
tatattatgtgcaagttctct

SEQ ID NO: 97979 - RNA, 21 nt, synthetic construct
  source 1..21: mol_type = other RNA
tatattcatagtagctgttga

SEQ ID NO: 97980 - RNA, 21 nt, synthetic construct
  source 1..21: mol_type = other RNA
tatattctaaacctgaggtct

SEQ ID NO: 97981 - RNA, 21 nt, synthetic construct
  source 1..21: mol_type = other RNA
tatattctaagtttgccaaag

SEQ ID NO: 97982 - RNA, 21 nt, synthetic construct
  source 1..21: mol_type = other RNA
tatattctgtgaattgtgaca

SEQ ID NO: 97983 - RNA, 21 nt, synthetic construct
  source 1..21: mol_type = other RNA
tatattgtcaatggggaactt

SEQ ID NO: 97984 - RNA, 21 nt, synthetic construct
  source 1..21: mol_type = other RNA
tatatttactagatcaagccc

SEQ ID NO: 97985 - RNA, 21 nt, synthetic construct
  source 1..21: mol_type = other RNA
tatatttactgcttgctgcac

SEQ ID NO: 97986 - RNA, 21 nt, synthetic construct
  source 1..21: mol_type = other RNA
tatatttccgatgataccttc

SEQ ID NO: 97987 - RNA, 21 nt, synthetic construct
  source 1..21: mol_type = other RNA
tatatttccgtatccagtggt

SEQ ID NO: 97988 - RNA, 21 nt, synthetic construct
  source 1..21: mol_type = other RNA
tatattttcaaggcttgtgca

SEQ ID NO: 97989 - RNA, 21 nt, synthetic construct
  source 1..21: mol_type = other RNA
tatattttctaagagccaaag

SEQ ID NO: 97990 - RNA, 21 nt, synthetic construct
  source 1..21: mol_type = other RNA
tatattttggtagagatgggg

SEQ ID NO: 97991 - RNA, 21 nt, synthetic construct
  source 1..21: mol_type = other RNA
tatcaaaacacttctgtgatc

SEQ ID NO: 97992 - RNA, 21 nt, synthetic construct
  source 1..21: mol_type = other RNA
tatcaaaatcaaggtgcggga

SEQ ID NO: 97993 - RNA, 21 nt, synthetic construct
  source 1..21: mol_type = other RNA
tatcaacctgcaggtatttct

SEQ ID NO: 97994 - RNA, 21 nt, synthetic construct
  source 1..21: mol_type = other RNA
tatcaatagcagtgctgaaag

SEQ ID NO: 97995 - RNA, 21 nt, synthetic construct
  source 1..21: mol_type = other RNA
tatcaatctcacacctgggta

SEQ ID NO: 97996 - RNA, 21 nt, synthetic construct
  source 1..21: mol_type = other RNA
tatcaattagttcctcctttt

SEQ ID NO: 97997 - RNA, 21 nt, synthetic construct
  source 1..21: mol_type = other RNA
tatcacacctaggcctatttt

SEQ ID NO: 97998 - RNA, 21 nt, synthetic construct
  source 1..21: mol_type = other RNA
tatcacactgtttgattactg

SEQ ID NO: 97999 - RNA, 21 nt, synthetic construct
  source 1..21: mol_type = other RNA
tatcacagtgaggacgctgat

SEQ ID NO: 98000 - RNA, 21 nt, synthetic construct
  source 1..21: mol_type = other RNA
tatcaccatctgataagccca

SEQ ID NO: 98001 - RNA, 21 nt, synthetic construct
  source 1..21: mol_type = other RNA
tatcaccatgtgcttatcaat

SEQ ID NO: 98002 - RNA, 21 nt, synthetic construct
  source 1..21: mol_type = other RNA
tatcacccagaccaagtttaa

SEQ ID NO: 98003 - RNA, 21 nt, synthetic construct
  source 1..21: mol_type = other RNA
tatcacccttataaaatgagg

SEQ ID NO: 98004 - RNA, 21 nt, synthetic construct
  source 1..21: mol_type = other RNA
tatcacgattctgacccagag

SEQ ID NO: 98005 - RNA, 21 nt, synthetic construct
  source 1..21: mol_type = other RNA
tatcagaagcacaccaaggtt

SEQ ID NO: 98006 - RNA, 21 nt, synthetic construct
  source 1..21: mol_type = other RNA
tatcagaagtgctgacttggc

SEQ ID NO: 98007 - RNA, 21 nt, synthetic construct
  source 1..21: mol_type = other RNA
tatcagagcatgtcccctgga

SEQ ID NO: 98008 - RNA, 21 nt, synthetic construct
  source 1..21: mol_type = other RNA
tatcagatcccaattacttcc

SEQ ID NO: 98009 - RNA, 21 nt, synthetic construct
  source 1..21: mol_type = other RNA
tatcagatgcttctagccaaa

SEQ ID NO: 98010 - RNA, 21 nt, synthetic construct
  source 1..21: mol_type = other RNA
tatcagatggtgatacctctt

SEQ ID NO: 98011 - RNA, 21 nt, synthetic construct
  source 1..21: mol_type = other RNA
tatcagcaccaaagattatgt

SEQ ID NO: 98012 - RNA, 21 nt, synthetic construct
  source 1..21: mol_type = other RNA
tatcaggaaagtgccagccac

SEQ ID NO: 98013 - RNA, 21 nt, synthetic construct
  source 1..21: mol_type = other RNA
tatcaggccttccacctgctc

SEQ ID NO: 98014 - RNA, 21 nt, synthetic construct
  source 1..21: mol_type = other RNA
tatcaggcttgagtctgtgct

SEQ ID NO: 98015 - RNA, 21 nt, synthetic construct
  source 1..21: mol_type = other RNA
tatcagggatattggcttata

SEQ ID NO: 98016 - RNA, 21 nt, synthetic construct
  source 1..21: mol_type = other RNA
tatcagggatcacagatacaa

SEQ ID NO: 98017 - RNA, 21 nt, synthetic construct
  source 1..21: mol_type = other RNA
tatcagggctgaaaaacacct

SEQ ID NO: 98018 - RNA, 21 nt, synthetic construct
  source 1..21: mol_type = other RNA
tatcagtagtttgctagtggt

SEQ ID NO: 98019 - RNA, 21 nt, synthetic construct
  source 1..21: mol_type = other RNA
tatcagtctccaatcctcagc

SEQ ID NO: 98020 - RNA, 21 nt, synthetic construct
  source 1..21: mol_type = other RNA
tatcagttatcacacctaggc

SEQ ID NO: 98021 - RNA, 21 nt, synthetic construct
  source 1..21: mol_type = other RNA
tatcatagagtaccaggtcag

SEQ ID NO: 98022 - RNA, 21 nt, synthetic construct
  source 1..21: mol_type = other RNA
tatcatcaagacagagctccc

SEQ ID NO: 98023 - RNA, 21 nt, synthetic construct
  source 1..21: mol_type = other RNA
tatcatcatcttatacttggc

SEQ ID NO: 98024 - RNA, 21 nt, synthetic construct
  source 1..21: mol_type = other RNA
tatcatcttaagaaccataca

SEQ ID NO: 98025 - RNA, 21 nt, synthetic construct
  source 1..21: mol_type = other RNA
tatcatgtcttcttggatttt

SEQ ID NO: 98026 - RNA, 21 nt, synthetic construct
  source 1..21: mol_type = other RNA
tatcattgcaccactgcactc

SEQ ID NO: 98027 - RNA, 21 nt, synthetic construct
  source 1..21: mol_type = other RNA
tatcatttgaatgatgcgaaa

SEQ ID NO: 98028 - RNA, 21 nt, synthetic construct
  source 1..21: mol_type = other RNA
tatccaaagataaaggtaagg

SEQ ID NO: 98029 - RNA, 21 nt, synthetic construct
  source 1..21: mol_type = other RNA
tatccaacatgccagctttgg

SEQ ID NO: 98030 - RNA, 21 nt, synthetic construct
  source 1..21: mol_type = other RNA
tatccaagcacaaacctggca

SEQ ID NO: 98031 - RNA, 21 nt, synthetic construct
  source 1..21: mol_type = other RNA
tatccaatcactggctagtag

SEQ ID NO: 98032 - RNA, 21 nt, synthetic construct
  source 1..21: mol_type = other RNA
tatccaattttttggcataca

SEQ ID NO: 98033 - RNA, 21 nt, synthetic construct
  source 1..21: mol_type = other RNA
tatccacagtatgctgtttac

SEQ ID NO: 98034 - RNA, 21 nt, synthetic construct
  source 1..21: mol_type = other RNA
tatccacatttggttttacta

SEQ ID NO: 98035 - RNA, 21 nt, synthetic construct
  source 1..21: mol_type = other RNA
tatccaccactccaccttagc

SEQ ID NO: 98036 - RNA, 21 nt, synthetic construct
  source 1..21: mol_type = other RNA
tatccagaagagaatggctgg

SEQ ID NO: 98037 - RNA, 21 nt, synthetic construct
  source 1..21: mol_type = other RNA
tatccagattgatatctgagt

SEQ ID NO: 98038 - RNA, 21 nt, synthetic construct
  source 1..21: mol_type = other RNA
tatccagtaatcttgctaaac

SEQ ID NO: 98039 - RNA, 21 nt, synthetic construct
  source 1..21: mol_type = other RNA
tatccagtctctgcaacattt

SEQ ID NO: 98040 - RNA, 21 nt, synthetic construct
  source 1..21: mol_type = other RNA
tatccagtgacacctgagggg

SEQ ID NO: 98041 - RNA, 21 nt, synthetic construct
  source 1..21: mol_type = other RNA
tatccagtggttttttgtttt

SEQ ID NO: 98042 - RNA, 21 nt, synthetic construct
  source 1..21: mol_type = other RNA
tatccattcatctctcgatgg

SEQ ID NO: 98043 - RNA, 21 nt, synthetic construct
  source 1..21: mol_type = other RNA
tatcccaaattggcatttaaa

SEQ ID NO: 98044 - RNA, 21 nt, synthetic construct
  source 1..21: mol_type = other RNA
tatcccagacagatatatgca

SEQ ID NO: 98045 - RNA, 21 nt, synthetic construct
  source 1..21: mol_type = other RNA
tatcccagatctaacaaacgc

SEQ ID NO: 98046 - RNA, 21 nt, synthetic construct
  source 1..21: mol_type = other RNA
tatcccagatggggattgagg

SEQ ID NO: 98047 - RNA, 21 nt, synthetic construct
  source 1..21: mol_type = other RNA
tatcccatataaggggaatca

SEQ ID NO: 98048 - RNA, 21 nt, synthetic construct
  source 1..21: mol_type = other RNA
tatccccatttttctcgacac

SEQ ID NO: 98049 - RNA, 21 nt, synthetic construct
  source 1..21: mol_type = other RNA
tatccctacctaaaaagggag

SEQ ID NO: 98050 - RNA, 21 nt, synthetic construct
  source 1..21: mol_type = other RNA
tatccctgataatcacagacg

SEQ ID NO: 98051 - RNA, 21 nt, synthetic construct
  source 1..21: mol_type = other RNA
tatccctggggtttccttacc

SEQ ID NO: 98052 - RNA, 21 nt, synthetic construct
  source 1..21: mol_type = other RNA
tatccctttaaaatgatagca

SEQ ID NO: 98053 - RNA, 21 nt, synthetic construct
  source 1..21: mol_type = other RNA
tatccgaaagaactgaaagca

SEQ ID NO: 98054 - RNA, 21 nt, synthetic construct
  source 1..21: mol_type = other RNA
tatccgataaagggtctggta

SEQ ID NO: 98055 - RNA, 21 nt, synthetic construct
  source 1..21: mol_type = other RNA
tatcctaaacacttagcatgt

SEQ ID NO: 98056 - RNA, 21 nt, synthetic construct
  source 1..21: mol_type = other RNA
tatcctaatgggcgtggagcg

SEQ ID NO: 98057 - RNA, 21 nt, synthetic construct
  source 1..21: mol_type = other RNA
tatcctatcagagcatgtccc

SEQ ID NO: 98058 - RNA, 21 nt, synthetic construct
  source 1..21: mol_type = other RNA
tatcctatgtggggaatgctc

SEQ ID NO: 98059 - RNA, 21 nt, synthetic construct
  source 1..21: mol_type = other RNA
tatcctcagggtaggaaaaga

SEQ ID NO: 98060 - RNA, 21 nt, synthetic construct
  source 1..21: mol_type = other RNA
tatcctcttctgaagaggctt

SEQ ID NO: 98061 - RNA, 21 nt, synthetic construct
  source 1..21: mol_type = other RNA
tatcctgagacttaggcaaag

SEQ ID NO: 98062 - RNA, 21 nt, synthetic construct
  source 1..21: mol_type = other RNA
tatcctgtaaacctggaatcc

SEQ ID NO: 98063 - RNA, 21 nt, synthetic construct
  source 1..21: mol_type = other RNA
tatcctgtttgagaagtcttt

SEQ ID NO: 98064 - RNA, 21 nt, synthetic construct
  source 1..21: mol_type = other RNA
tatccttctacatccccccac

SEQ ID NO: 98065 - RNA, 21 nt, synthetic construct
  source 1..21: mol_type = other RNA
tatccttgcaccaactccaca

SEQ ID NO: 98066 - RNA, 21 nt, synthetic construct
  source 1..21: mol_type = other RNA
tatcctttcaaggtatctccc

SEQ ID NO: 98067 - RNA, 21 nt, synthetic construct
  source 1..21: mol_type = other RNA
tatccttttatgtgcagtcta

SEQ ID NO: 98068 - RNA, 21 nt, synthetic construct
  source 1..21: mol_type = other RNA
tatcggataaggaagagttta

SEQ ID NO: 98069 - RNA, 21 nt, synthetic construct
  source 1..21: mol_type = other RNA
tatcgtgagactattatgagc

SEQ ID NO: 98070 - RNA, 21 nt, synthetic construct
  source 1..21: mol_type = other RNA
tatcgttatatcctcagggta

SEQ ID NO: 98071 - RNA, 21 nt, synthetic construct
  source 1..21: mol_type = other RNA
tatctaagcctactgctctgt

SEQ ID NO: 98072 - RNA, 21 nt, synthetic construct
  source 1..21: mol_type = other RNA
tatctacagaggattttggat

SEQ ID NO: 98073 - RNA, 21 nt, synthetic construct
  source 1..21: mol_type = other RNA
tatctacatgtacgccaattt

SEQ ID NO: 98074 - RNA, 21 nt, synthetic construct
  source 1..21: mol_type = other RNA
tatctaccaaaaaactacgag

SEQ ID NO: 98075 - RNA, 21 nt, synthetic construct
  source 1..21: mol_type = other RNA
tatctaggagtacagtgcata

SEQ ID NO: 98076 - RNA, 21 nt, synthetic construct
  source 1..21: mol_type = other RNA
tatctaggcgaaatatctccc

SEQ ID NO: 98077 - RNA, 21 nt, synthetic construct
  source 1..21: mol_type = other RNA
tatctatcagggctgaaaaac

SEQ ID NO: 98078 - RNA, 21 nt, synthetic construct
  source 1..21: mol_type = other RNA
tatctattaacagaagggtat

SEQ ID NO: 98079 - RNA, 21 nt, synthetic construct
  source 1..21: mol_type = other RNA
tatctcagtcataatttgtgt

SEQ ID NO: 98080 - RNA, 21 nt, synthetic construct
  source 1..21: mol_type = other RNA
tatctcatgcttaggatccca

SEQ ID NO: 98081 - RNA, 21 nt, synthetic construct
  source 1..21: mol_type = other RNA
tatctcattaaaaatcaaccc

SEQ ID NO: 98082 - RNA, 21 nt, synthetic construct
  source 1..21: mol_type = other RNA
tatctccacatttctacacaa

SEQ ID NO: 98083 - RNA, 21 nt, synthetic construct
  source 1..21: mol_type = other RNA
tatctccataagtccctaaca

SEQ ID NO: 98084 - RNA, 21 nt, synthetic construct
  source 1..21: mol_type = other RNA
tatctccccaaagatattagc

SEQ ID NO: 98085 - RNA, 21 nt, synthetic construct
  source 1..21: mol_type = other RNA
tatctccctcacagtccactc

SEQ ID NO: 98086 - RNA, 21 nt, synthetic construct
  source 1..21: mol_type = other RNA
tatctccctgtgcgtgaatct

SEQ ID NO: 98087 - RNA, 21 nt, synthetic construct
  source 1..21: mol_type = other RNA
tatctcctttccttccttgct

SEQ ID NO: 98088 - RNA, 21 nt, synthetic construct
  source 1..21: mol_type = other RNA
tatctccttttaagagtgaag

SEQ ID NO: 98089 - RNA, 21 nt, synthetic construct
  source 1..21: mol_type = other RNA
tatctcggtcattctggagtg

SEQ ID NO: 98090 - RNA, 21 nt, synthetic construct
  source 1..21: mol_type = other RNA
tatctctcagatctgagtttg

SEQ ID NO: 98091 - RNA, 21 nt, synthetic construct
  source 1..21: mol_type = other RNA
tatctctctcaagcaatctga

SEQ ID NO: 98092 - RNA, 21 nt, synthetic construct
  source 1..21: mol_type = other RNA
tatctctgccctcattgaagc

SEQ ID NO: 98093 - RNA, 21 nt, synthetic construct
  source 1..21: mol_type = other RNA
tatctcttagacctcctagat

SEQ ID NO: 98094 - RNA, 21 nt, synthetic construct
  source 1..21: mol_type = other RNA
tatctcttcctcctctggaca

SEQ ID NO: 98095 - RNA, 21 nt, synthetic construct
  source 1..21: mol_type = other RNA
tatctgaacattttagctggg

SEQ ID NO: 98096 - RNA, 21 nt, synthetic construct
  source 1..21: mol_type = other RNA
tatctgaactttcgaagtggg

SEQ ID NO: 98097 - RNA, 21 nt, synthetic construct
  source 1..21: mol_type = other RNA
tatctgagtgttgtgtgcacc

SEQ ID NO: 98098 - RNA, 21 nt, synthetic construct
  source 1..21: mol_type = other RNA
tatctgattttgtgtcttctg

SEQ ID NO: 98099 - RNA, 21 nt, synthetic construct
  source 1..21: mol_type = other RNA
tatctgctgtcggttttctag

SEQ ID NO: 98100 - RNA, 21 nt, synthetic construct
  source 1..21: mol_type = other RNA
tatctggactgaaaagataca

SEQ ID NO: 98101 - RNA, 21 nt, synthetic construct
  source 1..21: mol_type = other RNA
tatctggatttttgtgtagag

SEQ ID NO: 98102 - RNA, 21 nt, synthetic construct
  source 1..21: mol_type = other RNA
tatctggcctgcaccatttat

SEQ ID NO: 98103 - RNA, 21 nt, synthetic construct
  source 1..21: mol_type = other RNA
tatctgggaacagcccctagc

SEQ ID NO: 98104 - RNA, 21 nt, synthetic construct
  source 1..21: mol_type = other RNA
tatctggtgctggcagccttc

SEQ ID NO: 98105 - RNA, 21 nt, synthetic construct
  source 1..21: mol_type = other RNA
tatctggtgttgcttgctcta

SEQ ID NO: 98106 - RNA, 21 nt, synthetic construct
  source 1..21: mol_type = other RNA
tatctgtaagtcatcaaagga

SEQ ID NO: 98107 - RNA, 21 nt, synthetic construct
  source 1..21: mol_type = other RNA
tatctgtctgggataatgagt

SEQ ID NO: 98108 - RNA, 21 nt, synthetic construct
  source 1..21: mol_type = other RNA
tatctgtgatccctgatatgt

SEQ ID NO: 98109 - RNA, 21 nt, synthetic construct
  source 1..21: mol_type = other RNA
tatctgtgggttaaaagttag

SEQ ID NO: 98110 - RNA, 21 nt, synthetic construct
  source 1..21: mol_type = other RNA
tatcttaataacctcaaagtg

SEQ ID NO: 98111 - RNA, 21 nt, synthetic construct
  source 1..21: mol_type = other RNA
tatcttcacaaacaaatcctt

SEQ ID NO: 98112 - RNA, 21 nt, synthetic construct
  source 1..21: mol_type = other RNA
tatcttccctaaagagaatct

SEQ ID NO: 98113 - RNA, 21 nt, synthetic construct
  source 1..21: mol_type = other RNA
tatcttgaagaaaccaagagc

SEQ ID NO: 98114 - RNA, 21 nt, synthetic construct
  source 1..21: mol_type = other RNA
tatctttactttcagctcaaa

SEQ ID NO: 98115 - RNA, 21 nt, synthetic construct
  source 1..21: mol_type = other RNA
tatctttaggtgttttttcct

SEQ ID NO: 98116 - RNA, 21 nt, synthetic construct
  source 1..21: mol_type = other RNA
tatctttctagattcatatgc

SEQ ID NO: 98117 - RNA, 21 nt, synthetic construct
  source 1..21: mol_type = other RNA
tatctttggaaaaatgtccgt

SEQ ID NO: 98118 - RNA, 21 nt, synthetic construct
  source 1..21: mol_type = other RNA
tatctttggatatccccattt

SEQ ID NO: 98119 - RNA, 21 nt, synthetic construct
  source 1..21: mol_type = other RNA
tatctttgggaaaatctctga

SEQ ID NO: 98120 - RNA, 21 nt, synthetic construct
  source 1..21: mol_type = other RNA
tatctttggggagataccttg

SEQ ID NO: 98121 - RNA, 21 nt, synthetic construct
  source 1..21: mol_type = other RNA
tatcttttaacagatggtcct

SEQ ID NO: 98122 - RNA, 21 nt, synthetic construct
  source 1..21: mol_type = other RNA
tatcttttcaaaaacccaact

SEQ ID NO: 98123 - RNA, 21 nt, synthetic construct
  source 1..21: mol_type = other RNA
tatcttttcagtccagatatt

SEQ ID NO: 98124 - RNA, 21 nt, synthetic construct
  source 1..21: mol_type = other RNA
tatcttttcatgttgaccatt

SEQ ID NO: 98125 - RNA, 21 nt, synthetic construct
  source 1..21: mol_type = other RNA
tatctttttcagcagcagaga

SEQ ID NO: 98126 - RNA, 21 nt, synthetic construct
  source 1..21: mol_type = other RNA
tatgaaaagcccaatctacag

SEQ ID NO: 98127 - RNA, 21 nt, synthetic construct
  source 1..21: mol_type = other RNA
tatgaaaagcctcaaacgaac

SEQ ID NO: 98128 - RNA, 21 nt, synthetic construct
  source 1..21: mol_type = other RNA
tatgaaaagcttcccccctct

SEQ ID NO: 98129 - RNA, 21 nt, synthetic construct
  source 1..21: mol_type = other RNA
tatgaaaattggcgtacatgt

SEQ ID NO: 98130 - RNA, 21 nt, synthetic construct
  source 1..21: mol_type = other RNA
tatgaaagaggagacattaca

SEQ ID NO: 98131 - RNA, 21 nt, synthetic construct
  source 1..21: mol_type = other RNA
tatgaaatcacacaatcttga

SEQ ID NO: 98132 - RNA, 21 nt, synthetic construct
  source 1..21: mol_type = other RNA
tatgaaatcttgaagatggca

SEQ ID NO: 98133 - RNA, 21 nt, synthetic construct
  source 1..21: mol_type = other RNA
tatgaaatgtggtttttggtt

SEQ ID NO: 98134 - RNA, 21 nt, synthetic construct
  source 1..21: mol_type = other RNA
tatgaaccacactgacaggac

SEQ ID NO: 98135 - RNA, 21 nt, synthetic construct
  source 1..21: mol_type = other RNA
tatgaaccattgtaaaccata

SEQ ID NO: 98136 - RNA, 21 nt, synthetic construct
  source 1..21: mol_type = other RNA
tatgaagcattaatgcaacct

SEQ ID NO: 98137 - RNA, 21 nt, synthetic construct
  source 1..21: mol_type = other RNA
tatgaagcttttctcctaagt

SEQ ID NO: 98138 - RNA, 21 nt, synthetic construct
  source 1..21: mol_type = other RNA
tatgaataaaccacgcagttt

SEQ ID NO: 98139 - RNA, 21 nt, synthetic construct
  source 1..21: mol_type = other RNA
tatgaataggtgtgtgttcct

SEQ ID NO: 98140 - RNA, 21 nt, synthetic construct
  source 1..21: mol_type = other RNA
tatgaatgatgccatcacatt

SEQ ID NO: 98141 - RNA, 21 nt, synthetic construct
  source 1..21: mol_type = other RNA
tatgaatgcacgtgaagctac

SEQ ID NO: 98142 - RNA, 21 nt, synthetic construct
  source 1..21: mol_type = other RNA
tatgaatttgcctattctggg

SEQ ID NO: 98143 - RNA, 21 nt, synthetic construct
  source 1..21: mol_type = other RNA
tatgacaagactacctaaaac

SEQ ID NO: 98144 - RNA, 21 nt, synthetic construct
  source 1..21: mol_type = other RNA
tatgacctcctcccacttaca

SEQ ID NO: 98145 - RNA, 21 nt, synthetic construct
  source 1..21: mol_type = other RNA
tatgactaatttgaggcatta

SEQ ID NO: 98146 - RNA, 21 nt, synthetic construct
  source 1..21: mol_type = other RNA
tatgactgagatacttaagtt

SEQ ID NO: 98147 - RNA, 21 nt, synthetic construct
  source 1..21: mol_type = other RNA
tatgactggtgtccttctgag

SEQ ID NO: 98148 - RNA, 21 nt, synthetic construct
  source 1..21: mol_type = other RNA
tatgagaaatgtctggtttgc

SEQ ID NO: 98149 - RNA, 21 nt, synthetic construct
  source 1..21: mol_type = other RNA
tatgagaagactggaaaagtg

SEQ ID NO: 98150 - RNA, 21 nt, synthetic construct
  source 1..21: mol_type = other RNA
tatgagaaggattagtgttaa

SEQ ID NO: 98151 - RNA, 21 nt, synthetic construct
  source 1..21: mol_type = other RNA
tatgagaattcattgttgtgt

SEQ ID NO: 98152 - RNA, 21 nt, synthetic construct
  source 1..21: mol_type = other RNA
tatgagacacacgagtattca

SEQ ID NO: 98153 - RNA, 21 nt, synthetic construct
  source 1..21: mol_type = other RNA
tatgagcagttgtatgccaaa

SEQ ID NO: 98154 - RNA, 21 nt, synthetic construct
  source 1..21: mol_type = other RNA
tatgagcattccccacatagg

SEQ ID NO: 98155 - RNA, 21 nt, synthetic construct
  source 1..21: mol_type = other RNA
tatgagccactagtcagtata

SEQ ID NO: 98156 - RNA, 21 nt, synthetic construct
  source 1..21: mol_type = other RNA
tatgagggatgaggaagagga

SEQ ID NO: 98157 - RNA, 21 nt, synthetic construct
  source 1..21: mol_type = other RNA
tatgagtcttccgtctcaaga

SEQ ID NO: 98158 - RNA, 21 nt, synthetic construct
  source 1..21: mol_type = other RNA
tatgagtgtttcccttaaaag

SEQ ID NO: 98159 - RNA, 21 nt, synthetic construct
  source 1..21: mol_type = other RNA
tatgagttcctgcttccccca

SEQ ID NO: 98160 - RNA, 21 nt, synthetic construct
  source 1..21: mol_type = other RNA
tatgataaaaataacgggccg

SEQ ID NO: 98161 - RNA, 21 nt, synthetic construct
  source 1..21: mol_type = other RNA
tatgataccctcaaaagatgc

SEQ ID NO: 98162 - RNA, 21 nt, synthetic construct
  source 1..21: mol_type = other RNA
tatgatactcgtagttttttg

SEQ ID NO: 98163 - RNA, 21 nt, synthetic construct
  source 1..21: mol_type = other RNA
tatgatcaaagtgaaaggcaa

SEQ ID NO: 98164 - RNA, 21 nt, synthetic construct
  source 1..21: mol_type = other RNA
tatgatccagcagtttcactt

SEQ ID NO: 98165 - RNA, 21 nt, synthetic construct
  source 1..21: mol_type = other RNA
tatgatctatcaatctcacac

SEQ ID NO: 98166 - RNA, 21 nt, synthetic construct
  source 1..21: mol_type = other RNA
tatgatcttgggaatactttc

SEQ ID NO: 98167 - RNA, 21 nt, synthetic construct
  source 1..21: mol_type = other RNA
tatgatgatttttgccagtgt

SEQ ID NO: 98168 - RNA, 21 nt, synthetic construct
  source 1..21: mol_type = other RNA
tatgatgccactcaaaactga

SEQ ID NO: 98169 - RNA, 21 nt, synthetic construct
  source 1..21: mol_type = other RNA
tatgatttcacttacttgagc

SEQ ID NO: 98170 - RNA, 21 nt, synthetic construct
  source 1..21: mol_type = other RNA
tatgatttctaggccctaacc

SEQ ID NO: 98171 - RNA, 21 nt, synthetic construct
  source 1..21: mol_type = other RNA
tatgcaacttactctcaaata

SEQ ID NO: 98172 - RNA, 21 nt, synthetic construct
  source 1..21: mol_type = other RNA
tatgcaagatggcaagtttcc

SEQ ID NO: 98173 - RNA, 21 nt, synthetic construct
  source 1..21: mol_type = other RNA
tatgcaagatgtcaacattaa

SEQ ID NO: 98174 - RNA, 21 nt, synthetic construct
  source 1..21: mol_type = other RNA
tatgcacaatggaatattact

SEQ ID NO: 98175 - RNA, 21 nt, synthetic construct
  source 1..21: mol_type = other RNA
tatgcactgtactcctagata

SEQ ID NO: 98176 - RNA, 21 nt, synthetic construct
  source 1..21: mol_type = other RNA
tatgcagaaaccagttgtaat

SEQ ID NO: 98177 - RNA, 21 nt, synthetic construct
  source 1..21: mol_type = other RNA
tatgcagaaatctaccaaaca

SEQ ID NO: 98178 - RNA, 21 nt, synthetic construct
  source 1..21: mol_type = other RNA
tatgcagcaacggaaatgagt

SEQ ID NO: 98179 - RNA, 21 nt, synthetic construct
  source 1..21: mol_type = other RNA
tatgcaggaccaactttaagc

SEQ ID NO: 98180 - RNA, 21 nt, synthetic construct
  source 1..21: mol_type = other RNA
tatgcagggaaatcattcagg

SEQ ID NO: 98181 - RNA, 21 nt, synthetic construct
  source 1..21: mol_type = other RNA
tatgcagtatgtgccattttt

SEQ ID NO: 98182 - RNA, 21 nt, synthetic construct
  source 1..21: mol_type = other RNA
tatgcatactgcagcactttt

SEQ ID NO: 98183 - RNA, 21 nt, synthetic construct
  source 1..21: mol_type = other RNA
tatgcatactttggaaggtag

SEQ ID NO: 98184 - RNA, 21 nt, synthetic construct
  source 1..21: mol_type = other RNA
tatgcatagatcacaaggact

SEQ ID NO: 98185 - RNA, 21 nt, synthetic construct
  source 1..21: mol_type = other RNA
tatgcatagcagggtcatgca

SEQ ID NO: 98186 - RNA, 21 nt, synthetic construct
  source 1..21: mol_type = other RNA
tatgcatcttgaactaagtgt

SEQ ID NO: 98187 - RNA, 21 nt, synthetic construct
  source 1..21: mol_type = other RNA
tatgcatcttgcaaaacggaa

SEQ ID NO: 98188 - RNA, 21 nt, synthetic construct
  source 1..21: mol_type = other RNA
tatgcatgttatttggggatt

SEQ ID NO: 98189 - RNA, 21 nt, synthetic construct
  source 1..21: mol_type = other RNA
tatgcattaagccagtcacta

SEQ ID NO: 98190 - RNA, 21 nt, synthetic construct
  source 1..21: mol_type = other RNA
tatgcattcccatgttcactg

SEQ ID NO: 98191 - RNA, 21 nt, synthetic construct
  source 1..21: mol_type = other RNA
tatgcatttggtctcattcac

SEQ ID NO: 98192 - RNA, 21 nt, synthetic construct
  source 1..21: mol_type = other RNA
tatgccaatatcacactgttt

SEQ ID NO: 98193 - RNA, 21 nt, synthetic construct
  source 1..21: mol_type = other RNA
tatgccacattttttggtttg

SEQ ID NO: 98194 - RNA, 21 nt, synthetic construct
  source 1..21: mol_type = other RNA
tatgccccctcttctctcctt

SEQ ID NO: 98195 - RNA, 21 nt, synthetic construct
  source 1..21: mol_type = other RNA
tatgccgctggtgaaaaaatg

SEQ ID NO: 98196 - RNA, 21 nt, synthetic construct
  source 1..21: mol_type = other RNA
tatgccggctgttaggtatta

SEQ ID NO: 98197 - RNA, 21 nt, synthetic construct
  source 1..21: mol_type = other RNA
tatgcctagatgattcgcatt

SEQ ID NO: 98198 - RNA, 21 nt, synthetic construct
  source 1..21: mol_type = other RNA
tatgcctagatttcaatctgg

SEQ ID NO: 98199 - RNA, 21 nt, synthetic construct
  source 1..21: mol_type = other RNA
tatgcctcatgcatccacatt

SEQ ID NO: 98200 - RNA, 21 nt, synthetic construct
  source 1..21: mol_type = other RNA
tatgccttcagtatgaatgca

SEQ ID NO: 98201 - RNA, 21 nt, synthetic construct
  source 1..21: mol_type = other RNA
tatgcggggtttcagcacaat

SEQ ID NO: 98202 - RNA, 21 nt, synthetic construct
  source 1..21: mol_type = other RNA
tatgctaacatgaactactca

SEQ ID NO: 98203 - RNA, 21 nt, synthetic construct
  source 1..21: mol_type = other RNA
tatgctattataaatggcatc

SEQ ID NO: 98204 - RNA, 21 nt, synthetic construct
  source 1..21: mol_type = other RNA
tatgctccctaaatacacatg

SEQ ID NO: 98205 - RNA, 21 nt, synthetic construct
  source 1..21: mol_type = other RNA
tatgctcctgcctcagcctcc

SEQ ID NO: 98206 - RNA, 21 nt, synthetic construct
  source 1..21: mol_type = other RNA
tatgctcttggtttcttcaag

SEQ ID NO: 98207 - RNA, 21 nt, synthetic construct
  source 1..21: mol_type = other RNA
tatgctgaaaggcatgaaatt

SEQ ID NO: 98208 - RNA, 21 nt, synthetic construct
  source 1..21: mol_type = other RNA
tatgctgagtgaatggggtaa

SEQ ID NO: 98209 - RNA, 21 nt, synthetic construct
  source 1..21: mol_type = other RNA
tatgctgatgaactacacaga

SEQ ID NO: 98210 - RNA, 21 nt, synthetic construct
  source 1..21: mol_type = other RNA
tatgctggtgggctttgagaa

SEQ ID NO: 98211 - RNA, 21 nt, synthetic construct
  source 1..21: mol_type = other RNA
tatgctgtagtgattcacttt

SEQ ID NO: 98212 - RNA, 21 nt, synthetic construct
  source 1..21: mol_type = other RNA
tatgctgtttacattagagaa

SEQ ID NO: 98213 - RNA, 21 nt, synthetic construct
  source 1..21: mol_type = other RNA
tatgctgtttttgaaaagaac

SEQ ID NO: 98214 - RNA, 21 nt, synthetic construct
  source 1..21: mol_type = other RNA
tatgctttgagctacaaactc

SEQ ID NO: 98215 - RNA, 21 nt, synthetic construct
  source 1..21: mol_type = other RNA
tatgctttgtctctggaaggc

SEQ ID NO: 98216 - RNA, 21 nt, synthetic construct
  source 1..21: mol_type = other RNA
tatggaaacatggtaatttgt

SEQ ID NO: 98217 - RNA, 21 nt, synthetic construct
  source 1..21: mol_type = other RNA
tatggaagatgggacttcact

SEQ ID NO: 98218 - RNA, 21 nt, synthetic construct
  source 1..21: mol_type = other RNA
tatggaataatggaactaaga

SEQ ID NO: 98219 - RNA, 21 nt, synthetic construct
  source 1..21: mol_type = other RNA
tatggaattgccatatgtagg

SEQ ID NO: 98220 - RNA, 21 nt, synthetic construct
  source 1..21: mol_type = other RNA
tatggacatgaggaaagcagg

SEQ ID NO: 98221 - RNA, 21 nt, synthetic construct
  source 1..21: mol_type = other RNA
tatggagacactagggactgg

SEQ ID NO: 98222 - RNA, 21 nt, synthetic construct
  source 1..21: mol_type = other RNA
tatggagactagtacactgtt

SEQ ID NO: 98223 - RNA, 21 nt, synthetic construct
  source 1..21: mol_type = other RNA
tatggagataaattacccaaa

SEQ ID NO: 98224 - RNA, 21 nt, synthetic construct
  source 1..21: mol_type = other RNA
tatggagcactgtgagccact

SEQ ID NO: 98225 - RNA, 21 nt, synthetic construct
  source 1..21: mol_type = other RNA
tatggaggcaatgttgatttt

SEQ ID NO: 98226 - RNA, 21 nt, synthetic construct
  source 1..21: mol_type = other RNA
tatggatatctggcctgcacc

SEQ ID NO: 98227 - RNA, 21 nt, synthetic construct
  source 1..21: mol_type = other RNA
tatggcaattccataaatgtt

SEQ ID NO: 98228 - RNA, 21 nt, synthetic construct
  source 1..21: mol_type = other RNA
tatggcaggcaccttcagaag

SEQ ID NO: 98229 - RNA, 21 nt, synthetic construct
  source 1..21: mol_type = other RNA
tatggcatttgagggttagaa

SEQ ID NO: 98230 - RNA, 21 nt, synthetic construct
  source 1..21: mol_type = other RNA
tatggcctaagatggaaagtg

SEQ ID NO: 98231 - RNA, 21 nt, synthetic construct
  source 1..21: mol_type = other RNA
tatggcgactcatgcctgtaa

SEQ ID NO: 98232 - RNA, 21 nt, synthetic construct
  source 1..21: mol_type = other RNA
tatggctagaaacttggattg

SEQ ID NO: 98233 - RNA, 21 nt, synthetic construct
  source 1..21: mol_type = other RNA
tatggctataaccacgagtaa

SEQ ID NO: 98234 - RNA, 21 nt, synthetic construct
  source 1..21: mol_type = other RNA
tatggcttttgagtgtaaggt

SEQ ID NO: 98235 - RNA, 21 nt, synthetic construct
  source 1..21: mol_type = other RNA
tatgggagatgtgtaattgta

SEQ ID NO: 98236 - RNA, 21 nt, synthetic construct
  source 1..21: mol_type = other RNA
tatgggagtccctgctttcag

SEQ ID NO: 98237 - RNA, 21 nt, synthetic construct
  source 1..21: mol_type = other RNA
tatgggatatctaacataatc

SEQ ID NO: 98238 - RNA, 21 nt, synthetic construct
  source 1..21: mol_type = other RNA
tatgggatgcttaaagcgcta

SEQ ID NO: 98239 - RNA, 21 nt, synthetic construct
  source 1..21: mol_type = other RNA
tatgggccaaagacagatctt

SEQ ID NO: 98240 - RNA, 21 nt, synthetic construct
  source 1..21: mol_type = other RNA
tatgggtcaaccactaaggtc

SEQ ID NO: 98241 - RNA, 21 nt, synthetic construct
  source 1..21: mol_type = other RNA
tatgggtctccattttggtct

SEQ ID NO: 98242 - RNA, 21 nt, synthetic construct
  source 1..21: mol_type = other RNA
tatgggttattcacccaagaa

SEQ ID NO: 98243 - RNA, 21 nt, synthetic construct
  source 1..21: mol_type = other RNA
tatggtaactcctgttctttg

SEQ ID NO: 98244 - RNA, 21 nt, synthetic construct
  source 1..21: mol_type = other RNA
tatggtaattggttcgtttga

SEQ ID NO: 98245 - RNA, 21 nt, synthetic construct
  source 1..21: mol_type = other RNA
tatggtaggtgctttttgtat

SEQ ID NO: 98246 - RNA, 21 nt, synthetic construct
  source 1..21: mol_type = other RNA
tatggtcactgctgatgtaag

SEQ ID NO: 98247 - RNA, 21 nt, synthetic construct
  source 1..21: mol_type = other RNA
tatggtctaccatgttgttct

SEQ ID NO: 98248 - RNA, 21 nt, synthetic construct
  source 1..21: mol_type = other RNA
tatggtctttttccaggacca

SEQ ID NO: 98249 - RNA, 21 nt, synthetic construct
  source 1..21: mol_type = other RNA
tatggtgttatttgttctgtc

SEQ ID NO: 98250 - RNA, 21 nt, synthetic construct
  source 1..21: mol_type = other RNA
tatggttaatagtgacccttt

SEQ ID NO: 98251 - RNA, 21 nt, synthetic construct
  source 1..21: mol_type = other RNA
tatggttgaagaaagtaggaa

SEQ ID NO: 98252 - RNA, 21 nt, synthetic construct
  source 1..21: mol_type = other RNA
tatggttgttggctaaaagac

SEQ ID NO: 98253 - RNA, 21 nt, synthetic construct
  source 1..21: mol_type = other RNA
tatggtttaaggtaagggtcc

SEQ ID NO: 98254 - RNA, 21 nt, synthetic construct
  source 1..21: mol_type = other RNA
tatggtttacaatggttcata

SEQ ID NO: 98255 - RNA, 21 nt, synthetic construct
  source 1..21: mol_type = other RNA
tatggttttttcccccctgga

SEQ ID NO: 98256 - RNA, 21 nt, synthetic construct
  source 1..21: mol_type = other RNA
tatgtaagacaatgtctttgg

SEQ ID NO: 98257 - RNA, 21 nt, synthetic construct
  source 1..21: mol_type = other RNA
tatgtaatctcatggaagtta

SEQ ID NO: 98258 - RNA, 21 nt, synthetic construct
  source 1..21: mol_type = other RNA
tatgtaatgacctggaaatta

SEQ ID NO: 98259 - RNA, 21 nt, synthetic construct
  source 1..21: mol_type = other RNA
tatgtaattacaggggacttt

SEQ ID NO: 98260 - RNA, 21 nt, synthetic construct
  source 1..21: mol_type = other RNA
tatgtacacgtcttgtcaata

SEQ ID NO: 98261 - RNA, 21 nt, synthetic construct
  source 1..21: mol_type = other RNA
tatgtacatgacctatctatt

SEQ ID NO: 98262 - RNA, 21 nt, synthetic construct
  source 1..21: mol_type = other RNA
tatgtacccaatggattataa

SEQ ID NO: 98263 - RNA, 21 nt, synthetic construct
  source 1..21: mol_type = other RNA
tatgtactacctatagaattc

SEQ ID NO: 98264 - RNA, 21 nt, synthetic construct
  source 1..21: mol_type = other RNA
tatgtagctgggatggctgaa

SEQ ID NO: 98265 - RNA, 21 nt, synthetic construct
  source 1..21: mol_type = other RNA
tatgtaggaaactttgcattc

SEQ ID NO: 98266 - RNA, 21 nt, synthetic construct
  source 1..21: mol_type = other RNA
tatgtaggcacattcaagcag

SEQ ID NO: 98267 - RNA, 21 nt, synthetic construct
  source 1..21: mol_type = other RNA
tatgtagggcaccgtgacaga

SEQ ID NO: 98268 - RNA, 21 nt, synthetic construct
  source 1..21: mol_type = other RNA
tatgtcactgtaagaataatg

SEQ ID NO: 98269 - RNA, 21 nt, synthetic construct
  source 1..21: mol_type = other RNA
tatgtcagactcattgcctat

SEQ ID NO: 98270 - RNA, 21 nt, synthetic construct
  source 1..21: mol_type = other RNA
tatgtcagatggtaaattggt

SEQ ID NO: 98271 - RNA, 21 nt, synthetic construct
  source 1..21: mol_type = other RNA
tatgtcagtcaacacactagc

SEQ ID NO: 98272 - RNA, 21 nt, synthetic construct
  source 1..21: mol_type = other RNA
tatgtccagcccccagttttg

SEQ ID NO: 98273 - RNA, 21 nt, synthetic construct
  source 1..21: mol_type = other RNA
tatgtcccctggggcctcagc

SEQ ID NO: 98274 - RNA, 21 nt, synthetic construct
  source 1..21: mol_type = other RNA
tatgtccttttgagtttggtg

SEQ ID NO: 98275 - RNA, 21 nt, synthetic construct
  source 1..21: mol_type = other RNA
tatgtcgcatgaaaacagcta

SEQ ID NO: 98276 - RNA, 21 nt, synthetic construct
  source 1..21: mol_type = other RNA
tatgtcttgtggctgacatgt

SEQ ID NO: 98277 - RNA, 21 nt, synthetic construct
  source 1..21: mol_type = other RNA
tatgtgaaaatactaacgatc

SEQ ID NO: 98278 - RNA, 21 nt, synthetic construct
  source 1..21: mol_type = other RNA
tatgtgaaagtagaggactgc

SEQ ID NO: 98279 - RNA, 21 nt, synthetic construct
  source 1..21: mol_type = other RNA
tatgtgacaaacacttttcaa

SEQ ID NO: 98280 - RNA, 21 nt, synthetic construct
  source 1..21: mol_type = other RNA
tatgtgacagaatgcatcttt

SEQ ID NO: 98281 - RNA, 21 nt, synthetic construct
  source 1..21: mol_type = other RNA
tatgtgcaagttctctttttt

SEQ ID NO: 98282 - RNA, 21 nt, synthetic construct
  source 1..21: mol_type = other RNA
tatgtgcagtctaaccattaa

SEQ ID NO: 98283 - RNA, 21 nt, synthetic construct
  source 1..21: mol_type = other RNA
tatgtgccatctccttaatcc

SEQ ID NO: 98284 - RNA, 21 nt, synthetic construct
  source 1..21: mol_type = other RNA
tatgtgctttctcaacactgt

SEQ ID NO: 98285 - RNA, 21 nt, synthetic construct
  source 1..21: mol_type = other RNA
tatgtggaaaaatataggaac

SEQ ID NO: 98286 - RNA, 21 nt, synthetic construct
  source 1..21: mol_type = other RNA
tatgtggggaatgctcataat

SEQ ID NO: 98287 - RNA, 21 nt, synthetic construct
  source 1..21: mol_type = other RNA
tatgtgtacaatggggcttta

SEQ ID NO: 98288 - RNA, 21 nt, synthetic construct
  source 1..21: mol_type = other RNA
tatgtgtaggaaggaacacac

SEQ ID NO: 98289 - RNA, 21 nt, synthetic construct
  source 1..21: mol_type = other RNA
tatgtgtagtcagtgaagatg

SEQ ID NO: 98290 - RNA, 21 nt, synthetic construct
  source 1..21: mol_type = other RNA
tatgtgtctctgacatgagag

SEQ ID NO: 98291 - RNA, 21 nt, synthetic construct
  source 1..21: mol_type = other RNA
tatgtgtgtataacccgtttt

SEQ ID NO: 98292 - RNA, 21 nt, synthetic construct
  source 1..21: mol_type = other RNA
tatgtgttaaaccattcttgc

SEQ ID NO: 98293 - RNA, 21 nt, synthetic construct
  source 1..21: mol_type = other RNA
tatgttaataaccctgttttg

SEQ ID NO: 98294 - RNA, 21 nt, synthetic construct
  source 1..21: mol_type = other RNA
tatgttacacttccagtacat

SEQ ID NO: 98295 - RNA, 21 nt, synthetic construct
  source 1..21: mol_type = other RNA
tatgttataatgagatagacc

SEQ ID NO: 98296 - RNA, 21 nt, synthetic construct
  source 1..21: mol_type = other RNA
tatgttcatgaaccttcacca

SEQ ID NO: 98297 - RNA, 21 nt, synthetic construct
  source 1..21: mol_type = other RNA
tatgttccacatgttactcat

SEQ ID NO: 98298 - RNA, 21 nt, synthetic construct
  source 1..21: mol_type = other RNA
tatgttcctatatttttccac

SEQ ID NO: 98299 - RNA, 21 nt, synthetic construct
  source 1..21: mol_type = other RNA
tatgttgatgtaatggatcaa

SEQ ID NO: 98300 - RNA, 21 nt, synthetic construct
  source 1..21: mol_type = other RNA
tatgttgcacaaaagtgaaaa

SEQ ID NO: 98301 - RNA, 21 nt, synthetic construct
  source 1..21: mol_type = other RNA
tatgttgtgttttcattcgtt

SEQ ID NO: 98302 - RNA, 21 nt, synthetic construct
  source 1..21: mol_type = other RNA
tatgtttctcattcttctcta

SEQ ID NO: 98303 - RNA, 21 nt, synthetic construct
  source 1..21: mol_type = other RNA
tatgtttgattagttgactcc

SEQ ID NO: 98304 - RNA, 21 nt, synthetic construct
  source 1..21: mol_type = other RNA
tatgtttgtaacttgttcatg

SEQ ID NO: 98305 - RNA, 21 nt, synthetic construct
  source 1..21: mol_type = other RNA
tatgttttgcttcgaagctta

SEQ ID NO: 98306 - RNA, 21 nt, synthetic construct
  source 1..21: mol_type = other RNA
tattaaaacccatgatctttg

SEQ ID NO: 98307 - RNA, 21 nt, synthetic construct
  source 1..21: mol_type = other RNA
tattaaaagcacaagcacaga

SEQ ID NO: 98308 - RNA, 21 nt, synthetic construct
  source 1..21: mol_type = other RNA
tattaaaatgaacctgctttc

SEQ ID NO: 98309 - RNA, 21 nt, synthetic construct
  source 1..21: mol_type = other RNA
tattaaacctgttacatggtt

SEQ ID NO: 98310 - RNA, 21 nt, synthetic construct
  source 1..21: mol_type = other RNA
tattaaagtagaaggccctat

SEQ ID NO: 98311 - RNA, 21 nt, synthetic construct
  source 1..21: mol_type = other RNA
tattaaatcatgatgtttggc

SEQ ID NO: 98312 - RNA, 21 nt, synthetic construct
  source 1..21: mol_type = other RNA
tattaaatgagacacctacaa

SEQ ID NO: 98313 - RNA, 21 nt, synthetic construct
  source 1..21: mol_type = other RNA
tattaacagaagggtatatac

SEQ ID NO: 98314 - RNA, 21 nt, synthetic construct
  source 1..21: mol_type = other RNA
tattaacataccgacggctca

SEQ ID NO: 98315 - RNA, 21 nt, synthetic construct
  source 1..21: mol_type = other RNA
tattaaccaagaacaacctta

SEQ ID NO: 98316 - RNA, 21 nt, synthetic construct
  source 1..21: mol_type = other RNA
tattaaccactgaaacttttc

SEQ ID NO: 98317 - RNA, 21 nt, synthetic construct
  source 1..21: mol_type = other RNA
tattaagagtctcatctgtca

SEQ ID NO: 98318 - RNA, 21 nt, synthetic construct
  source 1..21: mol_type = other RNA
tattaagagtgtgctgactag

SEQ ID NO: 98319 - RNA, 21 nt, synthetic construct
  source 1..21: mol_type = other RNA
tattaagataatgctgttctc

SEQ ID NO: 98320 - RNA, 21 nt, synthetic construct
  source 1..21: mol_type = other RNA
tattaagcaaaatggaagtgc

SEQ ID NO: 98321 - RNA, 21 nt, synthetic construct
  source 1..21: mol_type = other RNA
tattaatgtgttgtctgattc

SEQ ID NO: 98322 - RNA, 21 nt, synthetic construct
  source 1..21: mol_type = other RNA
tattaattctgaggcctcctg

SEQ ID NO: 98323 - RNA, 21 nt, synthetic construct
  source 1..21: mol_type = other RNA
tattaatttggcttggggaac

SEQ ID NO: 98324 - RNA, 21 nt, synthetic construct
  source 1..21: mol_type = other RNA
tattacacagaaagcctcttc

SEQ ID NO: 98325 - RNA, 21 nt, synthetic construct
  source 1..21: mol_type = other RNA
tattacagtaaggtttccctg

SEQ ID NO: 98326 - RNA, 21 nt, synthetic construct
  source 1..21: mol_type = other RNA
tattaccagcttacagcagat

SEQ ID NO: 98327 - RNA, 21 nt, synthetic construct
  source 1..21: mol_type = other RNA
tattacctatgaataggtgtg

SEQ ID NO: 98328 - RNA, 21 nt, synthetic construct
  source 1..21: mol_type = other RNA
tattacctcccatgcattcgt

SEQ ID NO: 98329 - RNA, 21 nt, synthetic construct
  source 1..21: mol_type = other RNA
tattactcagtctcgaaaagg

SEQ ID NO: 98330 - RNA, 21 nt, synthetic construct
  source 1..21: mol_type = other RNA
tattagaactagaactgtgtt

SEQ ID NO: 98331 - RNA, 21 nt, synthetic construct
  source 1..21: mol_type = other RNA
tattagatagtggtttgaagc

SEQ ID NO: 98332 - RNA, 21 nt, synthetic construct
  source 1..21: mol_type = other RNA
tattagcaaagaggcaaaact

SEQ ID NO: 98333 - RNA, 21 nt, synthetic construct
  source 1..21: mol_type = other RNA
tattagctacaaaagggaaaa

SEQ ID NO: 98334 - RNA, 21 nt, synthetic construct
  source 1..21: mol_type = other RNA
tattagctgtctggattgatt

SEQ ID NO: 98335 - RNA, 21 nt, synthetic construct
  source 1..21: mol_type = other RNA
tattagcttgctagtagcaga

SEQ ID NO: 98336 - RNA, 21 nt, synthetic construct
  source 1..21: mol_type = other RNA
tattaggatgtgtacccgtgt

SEQ ID NO: 98337 - RNA, 21 nt, synthetic construct
  source 1..21: mol_type = other RNA
tattagggtaatgctggcttc

SEQ ID NO: 98338 - RNA, 21 nt, synthetic construct
  source 1..21: mol_type = other RNA
tattaggtgcacacaacactc

SEQ ID NO: 98339 - RNA, 21 nt, synthetic construct
  source 1..21: mol_type = other RNA
tattagtagttaggtggtttg

SEQ ID NO: 98340 - RNA, 21 nt, synthetic construct
  source 1..21: mol_type = other RNA
tattagtctgtagcttcacgt

SEQ ID NO: 98341 - RNA, 21 nt, synthetic construct
  source 1..21: mol_type = other RNA
tattagttaaccttctggggt

SEQ ID NO: 98342 - RNA, 21 nt, synthetic construct
  source 1..21: mol_type = other RNA
tattagttgtacttgacacaa

SEQ ID NO: 98343 - RNA, 21 nt, synthetic construct
  source 1..21: mol_type = other RNA
tattataagttgggagtctat

SEQ ID NO: 98344 - RNA, 21 nt, synthetic construct
  source 1..21: mol_type = other RNA
tattatgaaccattgtaaacc

SEQ ID NO: 98345 - RNA, 21 nt, synthetic construct
  source 1..21: mol_type = other RNA
tattatgagcagttgtatgcc

SEQ ID NO: 98346 - RNA, 21 nt, synthetic construct
  source 1..21: mol_type = other RNA
tattatggtctttttccagga

SEQ ID NO: 98347 - RNA, 21 nt, synthetic construct
  source 1..21: mol_type = other RNA
tattatgtgcaagttctcttt

SEQ ID NO: 98348 - RNA, 21 nt, synthetic construct
  source 1..21: mol_type = other RNA
tattattctaaacacacgggc

SEQ ID NO: 98349 - RNA, 21 nt, synthetic construct
  source 1..21: mol_type = other RNA
tattattttttcccgctacac

SEQ ID NO: 98350 - RNA, 21 nt, synthetic construct
  source 1..21: mol_type = other RNA
tattcaaaacaaaacacatgg

SEQ ID NO: 98351 - RNA, 21 nt, synthetic construct
  source 1..21: mol_type = other RNA
tattcaaataattgctgcagt

SEQ ID NO: 98352 - RNA, 21 nt, synthetic construct
  source 1..21: mol_type = other RNA
tattcaacctataagacccag

SEQ ID NO: 98353 - RNA, 21 nt, synthetic construct
  source 1..21: mol_type = other RNA
tattcaagacaagcaaggaag

SEQ ID NO: 98354 - RNA, 21 nt, synthetic construct
  source 1..21: mol_type = other RNA
tattcaagtttcaccctgcga

SEQ ID NO: 98355 - RNA, 21 nt, synthetic construct
  source 1..21: mol_type = other RNA
tattcacactgctcctgcctt

SEQ ID NO: 98356 - RNA, 21 nt, synthetic construct
  source 1..21: mol_type = other RNA
tattcacccaagaatttcatg

SEQ ID NO: 98357 - RNA, 21 nt, synthetic construct
  source 1..21: mol_type = other RNA
tattcaggacagattaaaatc

SEQ ID NO: 98358 - RNA, 21 nt, synthetic construct
  source 1..21: mol_type = other RNA
tattcagggggctaaatgctc

SEQ ID NO: 98359 - RNA, 21 nt, synthetic construct
  source 1..21: mol_type = other RNA
tattcataggtaatactctag

SEQ ID NO: 98360 - RNA, 21 nt, synthetic construct
  source 1..21: mol_type = other RNA
tattcatagtagctgttgaat

SEQ ID NO: 98361 - RNA, 21 nt, synthetic construct
  source 1..21: mol_type = other RNA
tattcatccagtttaaagctt

SEQ ID NO: 98362 - RNA, 21 nt, synthetic construct
  source 1..21: mol_type = other RNA
tattcatgctgtgaatttgga

SEQ ID NO: 98363 - RNA, 21 nt, synthetic construct
  source 1..21: mol_type = other RNA
tattcattaccaggctggaag

SEQ ID NO: 98364 - RNA, 21 nt, synthetic construct
  source 1..21: mol_type = other RNA
tattcattctttttactcgag

SEQ ID NO: 98365 - RNA, 21 nt, synthetic construct
  source 1..21: mol_type = other RNA
tattcatttccaaagatcatg

SEQ ID NO: 98366 - RNA, 21 nt, synthetic construct
  source 1..21: mol_type = other RNA
tattccaaatgtctgtcttta

SEQ ID NO: 98367 - RNA, 21 nt, synthetic construct
  source 1..21: mol_type = other RNA
tattccagagaattcagagtg

SEQ ID NO: 98368 - RNA, 21 nt, synthetic construct
  source 1..21: mol_type = other RNA
tattccaggatcaaatctggc

SEQ ID NO: 98369 - RNA, 21 nt, synthetic construct
  source 1..21: mol_type = other RNA
tattccataaaaaccaaacac

SEQ ID NO: 98370 - RNA, 21 nt, synthetic construct
  source 1..21: mol_type = other RNA
tattccataagatctgtcttt

SEQ ID NO: 98371 - RNA, 21 nt, synthetic construct
  source 1..21: mol_type = other RNA
tattccatggtatgtgccatc

SEQ ID NO: 98372 - RNA, 21 nt, synthetic construct
  source 1..21: mol_type = other RNA
tattccattgttctctttgtt

SEQ ID NO: 98373 - RNA, 21 nt, synthetic construct
  source 1..21: mol_type = other RNA
tattccatttttctgaccaac

SEQ ID NO: 98374 - RNA, 21 nt, synthetic construct
  source 1..21: mol_type = other RNA
tattcccaagatcataagctt

SEQ ID NO: 98375 - RNA, 21 nt, synthetic construct
  source 1..21: mol_type = other RNA
tattccccagggaaaccttac

SEQ ID NO: 98376 - RNA, 21 nt, synthetic construct
  source 1..21: mol_type = other RNA
tattcccctggatcccccagc

SEQ ID NO: 98377 - RNA, 21 nt, synthetic construct
  source 1..21: mol_type = other RNA
tattccctacattgccttcaa

SEQ ID NO: 98378 - RNA, 21 nt, synthetic construct
  source 1..21: mol_type = other RNA
tattcctatcagaagcacacc

SEQ ID NO: 98379 - RNA, 21 nt, synthetic construct
  source 1..21: mol_type = other RNA
tattcctctcttggaatgtgc

SEQ ID NO: 98380 - RNA, 21 nt, synthetic construct
  source 1..21: mol_type = other RNA
tattcgttccagcagggtaaa

SEQ ID NO: 98381 - RNA, 21 nt, synthetic construct
  source 1..21: mol_type = other RNA
tattctaaacacacgggctgg

SEQ ID NO: 98382 - RNA, 21 nt, synthetic construct
  source 1..21: mol_type = other RNA
tattctaaacctgaggtcttt

SEQ ID NO: 98383 - RNA, 21 nt, synthetic construct
  source 1..21: mol_type = other RNA
tattctaagtttgccaaagat

SEQ ID NO: 98384 - RNA, 21 nt, synthetic construct
  source 1..21: mol_type = other RNA
tattctacagaaaacccttca

SEQ ID NO: 98385 - RNA, 21 nt, synthetic construct
  source 1..21: mol_type = other RNA
tattctagttctagctctgtc

SEQ ID NO: 98386 - RNA, 21 nt, synthetic construct
  source 1..21: mol_type = other RNA
tattctatcatcaagacagag

SEQ ID NO: 98387 - RNA, 21 nt, synthetic construct
  source 1..21: mol_type = other RNA
tattctctttctgaaattctc

SEQ ID NO: 98388 - RNA, 21 nt, synthetic construct
  source 1..21: mol_type = other RNA
tattctgaactttcaacctaa

SEQ ID NO: 98389 - RNA, 21 nt, synthetic construct
  source 1..21: mol_type = other RNA
tattctggggctcaagtaagt

SEQ ID NO: 98390 - RNA, 21 nt, synthetic construct
  source 1..21: mol_type = other RNA
tattctgtgaattgtgacagt

SEQ ID NO: 98391 - RNA, 21 nt, synthetic construct
  source 1..21: mol_type = other RNA
tattctgttctagctcctggg

SEQ ID NO: 98392 - RNA, 21 nt, synthetic construct
  source 1..21: mol_type = other RNA
tattcttacagtgacatatgc

SEQ ID NO: 98393 - RNA, 21 nt, synthetic construct
  source 1..21: mol_type = other RNA
tattcttatccctacctaaaa

SEQ ID NO: 98394 - RNA, 21 nt, synthetic construct
  source 1..21: mol_type = other RNA
tattcttcagcaaggaccatt

SEQ ID NO: 98395 - RNA, 21 nt, synthetic construct
  source 1..21: mol_type = other RNA
tattcttgttttcttgagatg

SEQ ID NO: 98396 - RNA, 21 nt, synthetic construct
  source 1..21: mol_type = other RNA
tattcttttagagtaactgtc

SEQ ID NO: 98397 - RNA, 21 nt, synthetic construct
  source 1..21: mol_type = other RNA
tattctttttctagtttgagg

SEQ ID NO: 98398 - RNA, 21 nt, synthetic construct
  source 1..21: mol_type = other RNA
tattgaaacgatgcattccag

SEQ ID NO: 98399 - RNA, 21 nt, synthetic construct
  source 1..21: mol_type = other RNA
tattgaaagcccttgagtatt

SEQ ID NO: 98400 - RNA, 21 nt, synthetic construct
  source 1..21: mol_type = other RNA
tattgaactgttacttgacta

SEQ ID NO: 98401 - RNA, 21 nt, synthetic construct
  source 1..21: mol_type = other RNA
tattgaagagggaacattttc

SEQ ID NO: 98402 - RNA, 21 nt, synthetic construct
  source 1..21: mol_type = other RNA
tattgaagccagcacctaaca

SEQ ID NO: 98403 - RNA, 21 nt, synthetic construct
  source 1..21: mol_type = other RNA
tattgaataatttccaggtca

SEQ ID NO: 98404 - RNA, 21 nt, synthetic construct
  source 1..21: mol_type = other RNA
tattgacaagacgtgtacata

SEQ ID NO: 98405 - RNA, 21 nt, synthetic construct
  source 1..21: mol_type = other RNA
tattgagaagcagaaaatcag

SEQ ID NO: 98406 - RNA, 21 nt, synthetic construct
  source 1..21: mol_type = other RNA
tattgagagtgaaaacacaaa

SEQ ID NO: 98407 - RNA, 21 nt, synthetic construct
  source 1..21: mol_type = other RNA
tattgagcctgttccgatttt

SEQ ID NO: 98408 - RNA, 21 nt, synthetic construct
  source 1..21: mol_type = other RNA
tattgagtctgtagggtgact

SEQ ID NO: 98409 - RNA, 21 nt, synthetic construct
  source 1..21: mol_type = other RNA
tattgagtgtagctgtggctc

SEQ ID NO: 98410 - RNA, 21 nt, synthetic construct
  source 1..21: mol_type = other RNA
tattgataagcacatggtgat

SEQ ID NO: 98411 - RNA, 21 nt, synthetic construct
  source 1..21: mol_type = other RNA
tattgattcagatgacagaaa

SEQ ID NO: 98412 - RNA, 21 nt, synthetic construct
  source 1..21: mol_type = other RNA
tattgattggcaaatctttag

SEQ ID NO: 98413 - RNA, 21 nt, synthetic construct
  source 1..21: mol_type = other RNA
tattgatttgaccatgggaca

SEQ ID NO: 98414 - RNA, 21 nt, synthetic construct
  source 1..21: mol_type = other RNA
tattgcaaactaagtggtatt

SEQ ID NO: 98415 - RNA, 21 nt, synthetic construct
  source 1..21: mol_type = other RNA
tattgcatagggatgttgcct

SEQ ID NO: 98416 - RNA, 21 nt, synthetic construct
  source 1..21: mol_type = other RNA
tattgccaggtttgtgcttgg

SEQ ID NO: 98417 - RNA, 21 nt, synthetic construct
  source 1..21: mol_type = other RNA
tattgcccaggctggtcttgt

SEQ ID NO: 98418 - RNA, 21 nt, synthetic construct
  source 1..21: mol_type = other RNA
tattggaaaactctgtttcct

SEQ ID NO: 98419 - RNA, 21 nt, synthetic construct
  source 1..21: mol_type = other RNA
tattggattaagggcccaccc

SEQ ID NO: 98420 - RNA, 21 nt, synthetic construct
  source 1..21: mol_type = other RNA
tattggcaacattttaattcc

SEQ ID NO: 98421 - RNA, 21 nt, synthetic construct
  source 1..21: mol_type = other RNA
tattggcataaagacagacat

SEQ ID NO: 98422 - RNA, 21 nt, synthetic construct
  source 1..21: mol_type = other RNA
tattggccaggctggttccaa

SEQ ID NO: 98423 - RNA, 21 nt, synthetic construct
  source 1..21: mol_type = other RNA
tattggcttatagtgttcttt

SEQ ID NO: 98424 - RNA, 21 nt, synthetic construct
  source 1..21: mol_type = other RNA
tattgtaccttgatttatggc

SEQ ID NO: 98425 - RNA, 21 nt, synthetic construct
  source 1..21: mol_type = other RNA
tattgtaggaaagcctgtgac

SEQ ID NO: 98426 - RNA, 21 nt, synthetic construct
  source 1..21: mol_type = other RNA
tattgtaggtgtctcatttaa

SEQ ID NO: 98427 - RNA, 21 nt, synthetic construct
  source 1..21: mol_type = other RNA
tattgtatatacccttctgtt

SEQ ID NO: 98428 - RNA, 21 nt, synthetic construct
  source 1..21: mol_type = other RNA
tattgtcaaggtcatcctttc

SEQ ID NO: 98429 - RNA, 21 nt, synthetic construct
  source 1..21: mol_type = other RNA
tattgtcaatggggaacttta

SEQ ID NO: 98430 - RNA, 21 nt, synthetic construct
  source 1..21: mol_type = other RNA
tattgtcagtaattctgcagt

SEQ ID NO: 98431 - RNA, 21 nt, synthetic construct
  source 1..21: mol_type = other RNA
tattgtctgcaagcagatctg

SEQ ID NO: 98432 - RNA, 21 nt, synthetic construct
  source 1..21: mol_type = other RNA
tattgtcttctaaccctcaaa

SEQ ID NO: 98433 - RNA, 21 nt, synthetic construct
  source 1..21: mol_type = other RNA
tattgtcttttctatctgaac

SEQ ID NO: 98434 - RNA, 21 nt, synthetic construct
  source 1..21: mol_type = other RNA
tattgtgctgaaaccccgcat

SEQ ID NO: 98435 - RNA, 21 nt, synthetic construct
  source 1..21: mol_type = other RNA
tattgttgaattgttggagtt

SEQ ID NO: 98436 - RNA, 21 nt, synthetic construct
  source 1..21: mol_type = other RNA
tattgtttcacttttctggtt

SEQ ID NO: 98437 - RNA, 21 nt, synthetic construct
  source 1..21: mol_type = other RNA
tatttaacaccatggcaggtt

SEQ ID NO: 98438 - RNA, 21 nt, synthetic construct
  source 1..21: mol_type = other RNA
tatttaatctctcttgacctt

SEQ ID NO: 98439 - RNA, 21 nt, synthetic construct
  source 1..21: mol_type = other RNA
tatttaatctgtcagcagttc

SEQ ID NO: 98440 - RNA, 21 nt, synthetic construct
  source 1..21: mol_type = other RNA
tatttaatgtgctgtccattt

SEQ ID NO: 98441 - RNA, 21 nt, synthetic construct
  source 1..21: mol_type = other RNA
tatttactagatcaagccctt

SEQ ID NO: 98442 - RNA, 21 nt, synthetic construct
  source 1..21: mol_type = other RNA
tatttactgcttgctgcactg

SEQ ID NO: 98443 - RNA, 21 nt, synthetic construct
  source 1..21: mol_type = other RNA
tatttagagggatgaatgttg

SEQ ID NO: 98444 - RNA, 21 nt, synthetic construct
  source 1..21: mol_type = other RNA
tatttagcccatgtctaaagt

SEQ ID NO: 98445 - RNA, 21 nt, synthetic construct
  source 1..21: mol_type = other RNA
tatttaggccctctataattc

SEQ ID NO: 98446 - RNA, 21 nt, synthetic construct
  source 1..21: mol_type = other RNA
tatttagggagcatatatact

SEQ ID NO: 98447 - RNA, 21 nt, synthetic construct
  source 1..21: mol_type = other RNA
tatttagtgaaatagttggtc

SEQ ID NO: 98448 - RNA, 21 nt, synthetic construct
  source 1..21: mol_type = other RNA
tatttatacaggtgcttacag

SEQ ID NO: 98449 - RNA, 21 nt, synthetic construct
  source 1..21: mol_type = other RNA
tatttatcatgtcttcttgga

SEQ ID NO: 98450 - RNA, 21 nt, synthetic construct
  source 1..21: mol_type = other RNA
tatttatgctgatgaactaca

SEQ ID NO: 98451 - RNA, 21 nt, synthetic construct
  source 1..21: mol_type = other RNA
tatttatgttgcacaaaagtg

SEQ ID NO: 98452 - RNA, 21 nt, synthetic construct
  source 1..21: mol_type = other RNA
tatttccacgggtaaaaataa

SEQ ID NO: 98453 - RNA, 21 nt, synthetic construct
  source 1..21: mol_type = other RNA
tatttccagcctttaatttag

SEQ ID NO: 98454 - RNA, 21 nt, synthetic construct
  source 1..21: mol_type = other RNA
tatttccagggggtatggaga

SEQ ID NO: 98455 - RNA, 21 nt, synthetic construct
  source 1..21: mol_type = other RNA
tatttccccattagagtaagc

SEQ ID NO: 98456 - RNA, 21 nt, synthetic construct
  source 1..21: mol_type = other RNA
tatttcccttttggatgcaga

SEQ ID NO: 98457 - RNA, 21 nt, synthetic construct
  source 1..21: mol_type = other RNA
tatttccgatgataccttctt

SEQ ID NO: 98458 - RNA, 21 nt, synthetic construct
  source 1..21: mol_type = other RNA
tatttccgtatccagtggttt

SEQ ID NO: 98459 - RNA, 21 nt, synthetic construct
  source 1..21: mol_type = other RNA
tatttccttaagccatttcag

SEQ ID NO: 98460 - RNA, 21 nt, synthetic construct
  source 1..21: mol_type = other RNA
tatttccttccagtttatatg

SEQ ID NO: 98461 - RNA, 21 nt, synthetic construct
  source 1..21: mol_type = other RNA
tatttcgcaaagcaacatgct

SEQ ID NO: 98462 - RNA, 21 nt, synthetic construct
  source 1..21: mol_type = other RNA
tatttcgcctagataagaaaa

SEQ ID NO: 98463 - RNA, 21 nt, synthetic construct
  source 1..21: mol_type = other RNA
tatttctcatctgtcactttc

SEQ ID NO: 98464 - RNA, 21 nt, synthetic construct
  source 1..21: mol_type = other RNA
tatttctctttaaagctgaac

SEQ ID NO: 98465 - RNA, 21 nt, synthetic construct
  source 1..21: mol_type = other RNA
tatttctgggctctctattcc

SEQ ID NO: 98466 - RNA, 21 nt, synthetic construct
  source 1..21: mol_type = other RNA
tatttctgtatcttttcagtc

SEQ ID NO: 98467 - RNA, 21 nt, synthetic construct
  source 1..21: mol_type = other RNA
tatttctgtcatctgaatcaa

SEQ ID NO: 98468 - RNA, 21 nt, synthetic construct
  source 1..21: mol_type = other RNA
tatttctgttagatggtgctg

SEQ ID NO: 98469 - RNA, 21 nt, synthetic construct
  source 1..21: mol_type = other RNA
tatttcttctccctcttcgct

SEQ ID NO: 98470 - RNA, 21 nt, synthetic construct
  source 1..21: mol_type = other RNA
tatttctttccattcaatcct

SEQ ID NO: 98471 - RNA, 21 nt, synthetic construct
  source 1..21: mol_type = other RNA
tatttctttttcttgctttgc

SEQ ID NO: 98472 - RNA, 21 nt, synthetic construct
  source 1..21: mol_type = other RNA
tatttgaataaggtctgtaag

SEQ ID NO: 98473 - RNA, 21 nt, synthetic construct
  source 1..21: mol_type = other RNA
tatttgagagtaagttgcata

SEQ ID NO: 98474 - RNA, 21 nt, synthetic construct
  source 1..21: mol_type = other RNA
tatttgcagtagtattgaact

SEQ ID NO: 98475 - RNA, 21 nt, synthetic construct
  source 1..21: mol_type = other RNA
tatttgcggcttgattagctt

SEQ ID NO: 98476 - RNA, 21 nt, synthetic construct
  source 1..21: mol_type = other RNA
tatttgctgtcaggcaaggga

SEQ ID NO: 98477 - RNA, 21 nt, synthetic construct
  source 1..21: mol_type = other RNA
tatttggaaatatggtcactg

SEQ ID NO: 98478 - RNA, 21 nt, synthetic construct
  source 1..21: mol_type = other RNA
tatttggaagagagaaggctg

SEQ ID NO: 98479 - RNA, 21 nt, synthetic construct
  source 1..21: mol_type = other RNA
tatttggctgttaccatttga

SEQ ID NO: 98480 - RNA, 21 nt, synthetic construct
  source 1..21: mol_type = other RNA
tatttggggattctgctacta

SEQ ID NO: 98481 - RNA, 21 nt, synthetic construct
  source 1..21: mol_type = other RNA
tatttggggctaggatttcag

SEQ ID NO: 98482 - RNA, 21 nt, synthetic construct
  source 1..21: mol_type = other RNA
tatttgtgcatactgtgatga

SEQ ID NO: 98483 - RNA, 21 nt, synthetic construct
  source 1..21: mol_type = other RNA
tatttgttactgatctgctca

SEQ ID NO: 98484 - RNA, 21 nt, synthetic construct
  source 1..21: mol_type = other RNA
tatttgttcaagcgctgaagt

SEQ ID NO: 98485 - RNA, 21 nt, synthetic construct
  source 1..21: mol_type = other RNA
tatttgttcagaaatagactc

SEQ ID NO: 98486 - RNA, 21 nt, synthetic construct
  source 1..21: mol_type = other RNA
tatttgttctgtcacggtgcc

SEQ ID NO: 98487 - RNA, 21 nt, synthetic construct
  source 1..21: mol_type = other RNA
tattttaaaagtcagctaggc

SEQ ID NO: 98488 - RNA, 21 nt, synthetic construct
  source 1..21: mol_type = other RNA
tattttaagttctagggaaca

SEQ ID NO: 98489 - RNA, 21 nt, synthetic construct
  source 1..21: mol_type = other RNA
tattttaatcgaatcctcaca

SEQ ID NO: 98490 - RNA, 21 nt, synthetic construct
  source 1..21: mol_type = other RNA
tattttacaccatgcaggttc

SEQ ID NO: 98491 - RNA, 21 nt, synthetic construct
  source 1..21: mol_type = other RNA
tattttaggctctgtggtttc

SEQ ID NO: 98492 - RNA, 21 nt, synthetic construct
  source 1..21: mol_type = other RNA
tattttataatgggcaatcag

SEQ ID NO: 98493 - RNA, 21 nt, synthetic construct
  source 1..21: mol_type = other RNA
tattttatgctttgtctctgg

SEQ ID NO: 98494 - RNA, 21 nt, synthetic construct
  source 1..21: mol_type = other RNA
tattttatgtacacgtcttgt

SEQ ID NO: 98495 - RNA, 21 nt, synthetic construct
  source 1..21: mol_type = other RNA
tattttcaaggcttgtgcatc

SEQ ID NO: 98496 - RNA, 21 nt, synthetic construct
  source 1..21: mol_type = other RNA
tattttcataacaaagctctg

SEQ ID NO: 98497 - RNA, 21 nt, synthetic construct
  source 1..21: mol_type = other RNA
tattttcatggttttaatggg

SEQ ID NO: 98498 - RNA, 21 nt, synthetic construct
  source 1..21: mol_type = other RNA
tattttcctaaaactccccat

SEQ ID NO: 98499 - RNA, 21 nt, synthetic construct
  source 1..21: mol_type = other RNA
tattttcctaaccactgttat

SEQ ID NO: 98500 - RNA, 21 nt, synthetic construct
  source 1..21: mol_type = other RNA
tattttcctccttctgctcac

SEQ ID NO: 98501 - RNA, 21 nt, synthetic construct
  source 1..21: mol_type = other RNA
tattttccttatccattcatc

SEQ ID NO: 98502 - RNA, 21 nt, synthetic construct
  source 1..21: mol_type = other RNA
tattttcgtgtactgaaacca

SEQ ID NO: 98503 - RNA, 21 nt, synthetic construct
  source 1..21: mol_type = other RNA
tattttctaagagccaaagac

SEQ ID NO: 98504 - RNA, 21 nt, synthetic construct
  source 1..21: mol_type = other RNA
tattttctgcatttggtttgc

SEQ ID NO: 98505 - RNA, 21 nt, synthetic construct
  source 1..21: mol_type = other RNA
tattttctgtcattctgcagt

SEQ ID NO: 98506 - RNA, 21 nt, synthetic construct
  source 1..21: mol_type = other RNA
tattttggaagactatgagaa

SEQ ID NO: 98507 - RNA, 21 nt, synthetic construct
  source 1..21: mol_type = other RNA
tattttggtagagatggggtc

SEQ ID NO: 98508 - RNA, 21 nt, synthetic construct
  source 1..21: mol_type = other RNA
tattttgtaacgtgtatagct

SEQ ID NO: 98509 - RNA, 21 nt, synthetic construct
  source 1..21: mol_type = other RNA
tattttgtgggaattcagtca

SEQ ID NO: 98510 - RNA, 21 nt, synthetic construct
  source 1..21: mol_type = other RNA
tattttgttgacatcctttgc

SEQ ID NO: 98511 - RNA, 21 nt, synthetic construct
  source 1..21: mol_type = other RNA
tatttttacccaacatgagag

SEQ ID NO: 98512 - RNA, 21 nt, synthetic construct
  source 1..21: mol_type = other RNA
tatttttacccgtggaaatac

SEQ ID NO: 98513 - RNA, 21 nt, synthetic construct
  source 1..21: mol_type = other RNA
tatttttagtagagatgaggt

SEQ ID NO: 98514 - RNA, 21 nt, synthetic construct
  source 1..21: mol_type = other RNA
tatttttatgcatttggtctc

SEQ ID NO: 98515 - RNA, 21 nt, synthetic construct
  source 1..21: mol_type = other RNA
tatttttcagattgaccttgt

SEQ ID NO: 98516 - RNA, 21 nt, synthetic construct
  source 1..21: mol_type = other RNA
tatttttctgcaattggaaga

SEQ ID NO: 98517 - RNA, 21 nt, synthetic construct
  source 1..21: mol_type = other RNA
tatttttgagacaggttgttg

SEQ ID NO: 98518 - RNA, 21 nt, synthetic construct
  source 1..21: mol_type = other RNA
tatttttgctcacacttacta

SEQ ID NO: 98519 - RNA, 21 nt, synthetic construct
  source 1..21: mol_type = other RNA
tatttttgtctggtggacaaa

SEQ ID NO: 98520 - RNA, 21 nt, synthetic construct
  source 1..21: mol_type = other RNA
tattttttcccagatacgtta

SEQ ID NO: 98521 - RNA, 21 nt, synthetic construct
  source 1..21: mol_type = other RNA
tattttttcccgctacacaag

SEQ ID NO: 98522 - RNA, 21 nt, synthetic construct
  source 1..21: mol_type = other RNA
tattttttcttcccatctcac

SEQ ID NO: 98523 - RNA, 21 nt, synthetic construct
  source 1..21: mol_type = other RNA
tcaaaaacagcatatacatga

SEQ ID NO: 98524 - RNA, 21 nt, synthetic construct
  source 1..21: mol_type = other RNA
tcaaaaacccaactctttctt

SEQ ID NO: 98525 - RNA, 21 nt, synthetic construct
  source 1..21: mol_type = other RNA
tcaaaaacctcccaacaggct

SEQ ID NO: 98526 - RNA, 21 nt, synthetic construct
  source 1..21: mol_type = other RNA
tcaaaaagagaacacacaatt

SEQ ID NO: 98527 - RNA, 21 nt, synthetic construct
  source 1..21: mol_type = other RNA
tcaaaaatactcaagggcttt

SEQ ID NO: 98528 - RNA, 21 nt, synthetic construct
  source 1..21: mol_type = other RNA
tcaaaaatgtgtctagtgaat

SEQ ID NO: 98529 - RNA, 21 nt, synthetic construct
  source 1..21: mol_type = other RNA
tcaaaacaaaacacatggcat

SEQ ID NO: 98530 - RNA, 21 nt, synthetic construct
  source 1..21: mol_type = other RNA
tcaaaacaaacaaacagaaag

SEQ ID NO: 98531 - RNA, 21 nt, synthetic construct
  source 1..21: mol_type = other RNA
tcaaaacaataagacaccgct

SEQ ID NO: 98532 - RNA, 21 nt, synthetic construct
  source 1..21: mol_type = other RNA
tcaaaacacttctgtgatcag

SEQ ID NO: 98533 - RNA, 21 nt, synthetic construct
  source 1..21: mol_type = other RNA
tcaaaacatcatctaatttcc

SEQ ID NO: 98534 - RNA, 21 nt, synthetic construct
  source 1..21: mol_type = other RNA
tcaaaaccaaagaaaggggaa

SEQ ID NO: 98535 - RNA, 21 nt, synthetic construct
  source 1..21: mol_type = other RNA
tcaaaaccaggaggtttgcac

SEQ ID NO: 98536 - RNA, 21 nt, synthetic construct
  source 1..21: mol_type = other RNA
tcaaaactgaagtttatcagt

SEQ ID NO: 98537 - RNA, 21 nt, synthetic construct
  source 1..21: mol_type = other RNA
tcaaaagacatcactaagagt

SEQ ID NO: 98538 - RNA, 21 nt, synthetic construct
  source 1..21: mol_type = other RNA
tcaaaagaccaagaattttcc

SEQ ID NO: 98539 - RNA, 21 nt, synthetic construct
  source 1..21: mol_type = other RNA
tcaaaagatgcagaaaaagca

SEQ ID NO: 98540 - RNA, 21 nt, synthetic construct
  source 1..21: mol_type = other RNA
tcaaaagatgctggtggagta

SEQ ID NO: 98541 - RNA, 21 nt, synthetic construct
  source 1..21: mol_type = other RNA
tcaaaagccatagtgtaaact

SEQ ID NO: 98542 - RNA, 21 nt, synthetic construct
  source 1..21: mol_type = other RNA
tcaaaagccccaaaccatcaa

SEQ ID NO: 98543 - RNA, 21 nt, synthetic construct
  source 1..21: mol_type = other RNA
tcaaaagctccccggatgatt

SEQ ID NO: 98544 - RNA, 21 nt, synthetic construct
  source 1..21: mol_type = other RNA
tcaaaagtgaatcactacagc

SEQ ID NO: 98545 - RNA, 21 nt, synthetic construct
  source 1..21: mol_type = other RNA
tcaaaatcaacattgcctcca

SEQ ID NO: 98546 - RNA, 21 nt, synthetic construct
  source 1..21: mol_type = other RNA
tcaaaatcaaggtgcgggatt

SEQ ID NO: 98547 - RNA, 21 nt, synthetic construct
  source 1..21: mol_type = other RNA
tcaaaatctgatgtgtatgtt

SEQ ID NO: 98548 - RNA, 21 nt, synthetic construct
  source 1..21: mol_type = other RNA
tcaaaatggatcaaagaccta

SEQ ID NO: 98549 - RNA, 21 nt, synthetic construct
  source 1..21: mol_type = other RNA
tcaaaatgtgatggcatcatt

SEQ ID NO: 98550 - RNA, 21 nt, synthetic construct
  source 1..21: mol_type = other RNA
tcaaacagcctaattgtacac

SEQ ID NO: 98551 - RNA, 21 nt, synthetic construct
  source 1..21: mol_type = other RNA
tcaaacagcttgacattctta

SEQ ID NO: 98552 - RNA, 21 nt, synthetic construct
  source 1..21: mol_type = other RNA
tcaaacaggatacaaaaagca

SEQ ID NO: 98553 - RNA, 21 nt, synthetic construct
  source 1..21: mol_type = other RNA
tcaaacagtgtgatattggca

SEQ ID NO: 98554 - RNA, 21 nt, synthetic construct
  source 1..21: mol_type = other RNA
tcaaacataccccaaccctac

SEQ ID NO: 98555 - RNA, 21 nt, synthetic construct
  source 1..21: mol_type = other RNA
tcaaacatgacagatcccaaa

SEQ ID NO: 98556 - RNA, 21 nt, synthetic construct
  source 1..21: mol_type = other RNA
tcaaaccaatgttctcttttc

SEQ ID NO: 98557 - RNA, 21 nt, synthetic construct
  source 1..21: mol_type = other RNA
tcaaaccacctaactactaat

SEQ ID NO: 98558 - RNA, 21 nt, synthetic construct
  source 1..21: mol_type = other RNA
tcaaaccatcctttccttgtc

SEQ ID NO: 98559 - RNA, 21 nt, synthetic construct
  source 1..21: mol_type = other RNA
tcaaaccatgttcatgggaag

SEQ ID NO: 98560 - RNA, 21 nt, synthetic construct
  source 1..21: mol_type = other RNA
tcaaacccaaattaaaggatg

SEQ ID NO: 98561 - RNA, 21 nt, synthetic construct
  source 1..21: mol_type = other RNA
tcaaacgaaccaattaccata

SEQ ID NO: 98562 - RNA, 21 nt, synthetic construct
  source 1..21: mol_type = other RNA
tcaaacgtccatcaacagcag

SEQ ID NO: 98563 - RNA, 21 nt, synthetic construct
  source 1..21: mol_type = other RNA
tcaaacgtgctttccttattg

SEQ ID NO: 98564 - RNA, 21 nt, synthetic construct
  source 1..21: mol_type = other RNA
tcaaactatgcttaatctgat

SEQ ID NO: 98565 - RNA, 21 nt, synthetic construct
  source 1..21: mol_type = other RNA
tcaaactcacttattagcaaa

SEQ ID NO: 98566 - RNA, 21 nt, synthetic construct
  source 1..21: mol_type = other RNA
tcaaactccaagtctcatgca

SEQ ID NO: 98567 - RNA, 21 nt, synthetic construct
  source 1..21: mol_type = other RNA
tcaaactgtggtcactgtttg

SEQ ID NO: 98568 - RNA, 21 nt, synthetic construct
  source 1..21: mol_type = other RNA
tcaaactgtgtgcttggagtc

SEQ ID NO: 98569 - RNA, 21 nt, synthetic construct
  source 1..21: mol_type = other RNA
tcaaagaaactacctagaaaa

SEQ ID NO: 98570 - RNA, 21 nt, synthetic construct
  source 1..21: mol_type = other RNA
tcaaagaaagagttgggtttt

SEQ ID NO: 98571 - RNA, 21 nt, synthetic construct
  source 1..21: mol_type = other RNA
tcaaagacctaagcttaagag

SEQ ID NO: 98572 - RNA, 21 nt, synthetic construct
  source 1..21: mol_type = other RNA
tcaaagagaacaaaatacctg

SEQ ID NO: 98573 - RNA, 21 nt, synthetic construct
  source 1..21: mol_type = other RNA
tcaaagagacctgattcttcc

SEQ ID NO: 98574 - RNA, 21 nt, synthetic construct
  source 1..21: mol_type = other RNA
tcaaagatcatttcacttgat

SEQ ID NO: 98575 - RNA, 21 nt, synthetic construct
  source 1..21: mol_type = other RNA
tcaaagcaagttaaaagacat

SEQ ID NO: 98576 - RNA, 21 nt, synthetic construct
  source 1..21: mol_type = other RNA
tcaaagcatatgaatctagaa

SEQ ID NO: 98577 - RNA, 21 nt, synthetic construct
  source 1..21: mol_type = other RNA
tcaaagcccaccagcataaga

SEQ ID NO: 98578 - RNA, 21 nt, synthetic construct
  source 1..21: mol_type = other RNA
tcaaagcctgtggaggcagta

SEQ ID NO: 98579 - RNA, 21 nt, synthetic construct
  source 1..21: mol_type = other RNA
tcaaagctaccctttcttgtt

SEQ ID NO: 98580 - RNA, 21 nt, synthetic construct
  source 1..21: mol_type = other RNA
tcaaaggaaggaattttagga

SEQ ID NO: 98581 - RNA, 21 nt, synthetic construct
  source 1..21: mol_type = other RNA
tcaaaggacactattgagagt

SEQ ID NO: 98582 - RNA, 21 nt, synthetic construct
  source 1..21: mol_type = other RNA
tcaaaggagagaagagggggc

SEQ ID NO: 98583 - RNA, 21 nt, synthetic construct
  source 1..21: mol_type = other RNA
tcaaaggggcattccgtggaa

SEQ ID NO: 98584 - RNA, 21 nt, synthetic construct
  source 1..21: mol_type = other RNA
tcaaagggtcactattaacca

SEQ ID NO: 98585 - RNA, 21 nt, synthetic construct
  source 1..21: mol_type = other RNA
tcaaagtcccctgtaattaca

SEQ ID NO: 98586 - RNA, 21 nt, synthetic construct
  source 1..21: mol_type = other RNA
tcaaagtgaaaggcaaaggaa

SEQ ID NO: 98587 - RNA, 21 nt, synthetic construct
  source 1..21: mol_type = other RNA
tcaaagtggaaacaactcaaa

SEQ ID NO: 98588 - RNA, 21 nt, synthetic construct
  source 1..21: mol_type = other RNA
tcaaagttaaacttttgtgca

SEQ ID NO: 98589 - RNA, 21 nt, synthetic construct
  source 1..21: mol_type = other RNA
tcaaagttaatagcctcctaa

SEQ ID NO: 98590 - RNA, 21 nt, synthetic construct
  source 1..21: mol_type = other RNA
tcaaataattgctgcagtttt

SEQ ID NO: 98591 - RNA, 21 nt, synthetic construct
  source 1..21: mol_type = other RNA
tcaaatacctagttttccaat

SEQ ID NO: 98592 - RNA, 21 nt, synthetic construct
  source 1..21: mol_type = other RNA
tcaaatcaatacttcatttcc

SEQ ID NO: 98593 - RNA, 21 nt, synthetic construct
  source 1..21: mol_type = other RNA
tcaaatccaaattcacagcat

SEQ ID NO: 98594 - RNA, 21 nt, synthetic construct
  source 1..21: mol_type = other RNA
tcaaatccagtcttcaggtct

SEQ ID NO: 98595 - RNA, 21 nt, synthetic construct
  source 1..21: mol_type = other RNA
tcaaatctggctgcagggctt

SEQ ID NO: 98596 - RNA, 21 nt, synthetic construct
  source 1..21: mol_type = other RNA
tcaaatgaacaggttcttcat

SEQ ID NO: 98597 - RNA, 21 nt, synthetic construct
  source 1..21: mol_type = other RNA
tcaaatgaggcttttattggt

SEQ ID NO: 98598 - RNA, 21 nt, synthetic construct
  source 1..21: mol_type = other RNA
tcaaatgccatagagctttaa

SEQ ID NO: 98599 - RNA, 21 nt, synthetic construct
  source 1..21: mol_type = other RNA
tcaaatgctataaagaacatg

SEQ ID NO: 98600 - RNA, 21 nt, synthetic construct
  source 1..21: mol_type = other RNA
tcaaatggccttctttctttc

SEQ ID NO: 98601 - RNA, 21 nt, synthetic construct
  source 1..21: mol_type = other RNA
tcaaatgggaaattagatgat

SEQ ID NO: 98602 - RNA, 21 nt, synthetic construct
  source 1..21: mol_type = other RNA
tcaaatggtaacagccaaata

SEQ ID NO: 98603 - RNA, 21 nt, synthetic construct
  source 1..21: mol_type = other RNA
tcaaatgtctcattgtggatg

SEQ ID NO: 98604 - RNA, 21 nt, synthetic construct
  source 1..21: mol_type = other RNA
tcaaatgtgacagaacaaact

SEQ ID NO: 98605 - RNA, 21 nt, synthetic construct
  source 1..21: mol_type = other RNA
tcaaatgttaagcccaacttc

SEQ ID NO: 98606 - RNA, 21 nt, synthetic construct
  source 1..21: mol_type = other RNA
tcaaattaatcagtctgtaag

SEQ ID NO: 98607 - RNA, 21 nt, synthetic construct
  source 1..21: mol_type = other RNA
tcaaattagtcatagcagtgg

SEQ ID NO: 98608 - RNA, 21 nt, synthetic construct
  source 1..21: mol_type = other RNA
tcaaattcacagaactgtcac

SEQ ID NO: 98609 - RNA, 21 nt, synthetic construct
  source 1..21: mol_type = other RNA
tcaaattctgagggaaattat

SEQ ID NO: 98610 - RNA, 21 nt, synthetic construct
  source 1..21: mol_type = other RNA
tcaaattgtgtgttctctttt

SEQ ID NO: 98611 - RNA, 21 nt, synthetic construct
  source 1..21: mol_type = other RNA
tcaacaaaactgggggctgga

SEQ ID NO: 98612 - RNA, 21 nt, synthetic construct
  source 1..21: mol_type = other RNA
tcaacaaactaactagaaaac

SEQ ID NO: 98613 - RNA, 21 nt, synthetic construct
  source 1..21: mol_type = other RNA
tcaacaaaggttgaaaactca

SEQ ID NO: 98614 - RNA, 21 nt, synthetic construct
  source 1..21: mol_type = other RNA
tcaacaagagaggacagttgg

SEQ ID NO: 98615 - RNA, 21 nt, synthetic construct
  source 1..21: mol_type = other RNA
tcaacaatagcaacaaaacaa

SEQ ID NO: 98616 - RNA, 21 nt, synthetic construct
  source 1..21: mol_type = other RNA
tcaacacactagccactgggt

SEQ ID NO: 98617 - RNA, 21 nt, synthetic construct
  source 1..21: mol_type = other RNA
tcaacacatcagcgctaagtg

SEQ ID NO: 98618 - RNA, 21 nt, synthetic construct
  source 1..21: mol_type = other RNA
tcaacacattcaaaattgttc

SEQ ID NO: 98619 - RNA, 21 nt, synthetic construct
  source 1..21: mol_type = other RNA
tcaacaccaagcaacactaaa

SEQ ID NO: 98620 - RNA, 21 nt, synthetic construct
  source 1..21: mol_type = other RNA
tcaacactgtgttcttttcct

SEQ ID NO: 98621 - RNA, 21 nt, synthetic construct
  source 1..21: mol_type = other RNA
tcaacacttcagtggtaagga

SEQ ID NO: 98622 - RNA, 21 nt, synthetic construct
  source 1..21: mol_type = other RNA
tcaacacttttccagtcttct

SEQ ID NO: 98623 - RNA, 21 nt, synthetic construct
  source 1..21: mol_type = other RNA
tcaacagcacttttgtactac

SEQ ID NO: 98624 - RNA, 21 nt, synthetic construct
  source 1..21: mol_type = other RNA
tcaacagcagaacaaactgcg

SEQ ID NO: 98625 - RNA, 21 nt, synthetic construct
  source 1..21: mol_type = other RNA
tcaacagctactatgaatata

SEQ ID NO: 98626 - RNA, 21 nt, synthetic construct
  source 1..21: mol_type = other RNA
tcaacagggtaagattccgtc

SEQ ID NO: 98627 - RNA, 21 nt, synthetic construct
  source 1..21: mol_type = other RNA
tcaacaggtagctgcttttta

SEQ ID NO: 98628 - RNA, 21 nt, synthetic construct
  source 1..21: mol_type = other RNA
tcaacaggtataaagtttccg

SEQ ID NO: 98629 - RNA, 21 nt, synthetic construct
  source 1..21: mol_type = other RNA
tcaacagtgtactagtctcca

SEQ ID NO: 98630 - RNA, 21 nt, synthetic construct
  source 1..21: mol_type = other RNA
tcaacatcactagctattaga

SEQ ID NO: 98631 - RNA, 21 nt, synthetic construct
  source 1..21: mol_type = other RNA
tcaacatgaaaagatactcaa

SEQ ID NO: 98632 - RNA, 21 nt, synthetic construct
  source 1..21: mol_type = other RNA
tcaacatgtgtatttagggag

SEQ ID NO: 98633 - RNA, 21 nt, synthetic construct
  source 1..21: mol_type = other RNA
tcaacattaagggaaacaggg

SEQ ID NO: 98634 - RNA, 21 nt, synthetic construct
  source 1..21: mol_type = other RNA
tcaacattcattcatgacaag

SEQ ID NO: 98635 - RNA, 21 nt, synthetic construct
  source 1..21: mol_type = other RNA
tcaacattgcctccatatggg

SEQ ID NO: 98636 - RNA, 21 nt, synthetic construct
  source 1..21: mol_type = other RNA
tcaaccactaaggtcaacaca

SEQ ID NO: 98637 - RNA, 21 nt, synthetic construct
  source 1..21: mol_type = other RNA
tcaaccatacttttcaactga

SEQ ID NO: 98638 - RNA, 21 nt, synthetic construct
  source 1..21: mol_type = other RNA
tcaacccatgaaaattgaatt

SEQ ID NO: 98639 - RNA, 21 nt, synthetic construct
  source 1..21: mol_type = other RNA
tcaaccccatcaacaagtggg

SEQ ID NO: 98640 - RNA, 21 nt, synthetic construct
  source 1..21: mol_type = other RNA
tcaaccctcggcctctactga

SEQ ID NO: 98641 - RNA, 21 nt, synthetic construct
  source 1..21: mol_type = other RNA
tcaacctaacatgtcttggtg

SEQ ID NO: 98642 - RNA, 21 nt, synthetic construct
  source 1..21: mol_type = other RNA
tcaacctactttaaatcaggg

SEQ ID NO: 98643 - RNA, 21 nt, synthetic construct
  source 1..21: mol_type = other RNA
tcaacctataagacccagtgg

SEQ ID NO: 98644 - RNA, 21 nt, synthetic construct
  source 1..21: mol_type = other RNA
tcaacctcaactttaggttac

SEQ ID NO: 98645 - RNA, 21 nt, synthetic construct
  source 1..21: mol_type = other RNA
tcaacctgcaggtatttctaa

SEQ ID NO: 98646 - RNA, 21 nt, synthetic construct
  source 1..21: mol_type = other RNA
tcaacctttgcctcctgggtt

SEQ ID NO: 98647 - RNA, 21 nt, synthetic construct
  source 1..21: mol_type = other RNA
tcaacctttgttgaaaacgag

SEQ ID NO: 98648 - RNA, 21 nt, synthetic construct
  source 1..21: mol_type = other RNA
tcaacgacaatctctggggtt

SEQ ID NO: 98649 - RNA, 21 nt, synthetic construct
  source 1..21: mol_type = other RNA
tcaacgcacccagagcgggtt

SEQ ID NO: 98650 - RNA, 21 nt, synthetic construct
  source 1..21: mol_type = other RNA
tcaacgcctgtgatcccagct

SEQ ID NO: 98651 - RNA, 21 nt, synthetic construct
  source 1..21: mol_type = other RNA
tcaacggacatttttccaaag

SEQ ID NO: 98652 - RNA, 21 nt, synthetic construct
  source 1..21: mol_type = other RNA
tcaactaatcaaacatacccc

SEQ ID NO: 98653 - RNA, 21 nt, synthetic construct
  source 1..21: mol_type = other RNA
tcaactattccataagatctg

SEQ ID NO: 98654 - RNA, 21 nt, synthetic construct
  source 1..21: mol_type = other RNA
tcaactgaacaacgctgtggc

SEQ ID NO: 98655 - RNA, 21 nt, synthetic construct
  source 1..21: mol_type = other RNA
tcaactgaggcagagtagaga

SEQ ID NO: 98656 - RNA, 21 nt, synthetic construct
  source 1..21: mol_type = other RNA
tcaactgcctctacatcacag

SEQ ID NO: 98657 - RNA, 21 nt, synthetic construct
  source 1..21: mol_type = other RNA
tcaactgcttccctagcccag

SEQ ID NO: 98658 - RNA, 21 nt, synthetic construct
  source 1..21: mol_type = other RNA
tcaactggcccctccatggaa

SEQ ID NO: 98659 - RNA, 21 nt, synthetic construct
  source 1..21: mol_type = other RNA
tcaacttagccttggtaaaat

SEQ ID NO: 98660 - RNA, 21 nt, synthetic construct
  source 1..21: mol_type = other RNA
tcaacttcctgttttagtggc

SEQ ID NO: 98661 - RNA, 21 nt, synthetic construct
  source 1..21: mol_type = other RNA
tcaacttggtaaaaagtgctt

SEQ ID NO: 98662 - RNA, 21 nt, synthetic construct
  source 1..21: mol_type = other RNA
tcaactttaggttacgtacta

SEQ ID NO: 98663 - RNA, 21 nt, synthetic construct
  source 1..21: mol_type = other RNA
tcaacttttagtaggtctcct

SEQ ID NO: 98664 - RNA, 21 nt, synthetic construct
  source 1..21: mol_type = other RNA
tcaagaaaccacagagcctaa

SEQ ID NO: 98665 - RNA, 21 nt, synthetic construct
  source 1..21: mol_type = other RNA
tcaagaaataaaacatggcca

SEQ ID NO: 98666 - RNA, 21 nt, synthetic construct
  source 1..21: mol_type = other RNA
tcaagaaggtatcatcggaaa

SEQ ID NO: 98667 - RNA, 21 nt, synthetic construct
  source 1..21: mol_type = other RNA
tcaagaatgaagtcagagatt

SEQ ID NO: 98668 - RNA, 21 nt, synthetic construct
  source 1..21: mol_type = other RNA
tcaagacaagcaaggaagggc

SEQ ID NO: 98669 - RNA, 21 nt, synthetic construct
  source 1..21: mol_type = other RNA
tcaagacagagctccctctcc

SEQ ID NO: 98670 - RNA, 21 nt, synthetic construct
  source 1..21: mol_type = other RNA
tcaagagcggcctttgcctct

SEQ ID NO: 98671 - RNA, 21 nt, synthetic construct
  source 1..21: mol_type = other RNA
tcaagaggttaaaaccacaaa

SEQ ID NO: 98672 - RNA, 21 nt, synthetic construct
  source 1..21: mol_type = other RNA
tcaagagttacttctggaaag

SEQ ID NO: 98673 - RNA, 21 nt, synthetic construct
  source 1..21: mol_type = other RNA
tcaagatactgcactaaacta

SEQ ID NO: 98674 - RNA, 21 nt, synthetic construct
  source 1..21: mol_type = other RNA
tcaagatgaatctgcaactat

SEQ ID NO: 98675 - RNA, 21 nt, synthetic construct
  source 1..21: mol_type = other RNA
tcaagatgcataccaagcccg

SEQ ID NO: 98676 - RNA, 21 nt, synthetic construct
  source 1..21: mol_type = other RNA
tcaagattgtgtgatttcata

SEQ ID NO: 98677 - RNA, 21 nt, synthetic construct
  source 1..21: mol_type = other RNA
tcaagatttcataggcatctc

SEQ ID NO: 98678 - RNA, 21 nt, synthetic construct
  source 1..21: mol_type = other RNA
tcaagcaatctgaaacgacct

SEQ ID NO: 98679 - RNA, 21 nt, synthetic construct
  source 1..21: mol_type = other RNA
tcaagcaccacttcgagaagg

SEQ ID NO: 98680 - RNA, 21 nt, synthetic construct
  source 1..21: mol_type = other RNA
tcaagcagaaatgagttccag

SEQ ID NO: 98681 - RNA, 21 nt, synthetic construct
  source 1..21: mol_type = other RNA
tcaagcagtcctgccttggcc

SEQ ID NO: 98682 - RNA, 21 nt, synthetic construct
  source 1..21: mol_type = other RNA
tcaagcattgggagctttcat

SEQ ID NO: 98683 - RNA, 21 nt, synthetic construct
  source 1..21: mol_type = other RNA
tcaagccatcctccagcctta

SEQ ID NO: 98684 - RNA, 21 nt, synthetic construct
  source 1..21: mol_type = other RNA
tcaagccccagttctgcgcaa

SEQ ID NO: 98685 - RNA, 21 nt, synthetic construct
  source 1..21: mol_type = other RNA
tcaagcccttccttgcttgtc

SEQ ID NO: 98686 - RNA, 21 nt, synthetic construct
  source 1..21: mol_type = other RNA
tcaagccgcaaataatcattc

SEQ ID NO: 98687 - RNA, 21 nt, synthetic construct
  source 1..21: mol_type = other RNA
tcaagcctgataagctcccag

SEQ ID NO: 98688 - RNA, 21 nt, synthetic construct
  source 1..21: mol_type = other RNA
tcaagcgctgaagtacttcaa

SEQ ID NO: 98689 - RNA, 21 nt, synthetic construct
  source 1..21: mol_type = other RNA
tcaagctcgccgtctccctcg

SEQ ID NO: 98690 - RNA, 21 nt, synthetic construct
  source 1..21: mol_type = other RNA
tcaagctgtttgagctgaaag

SEQ ID NO: 98691 - RNA, 21 nt, synthetic construct
  source 1..21: mol_type = other RNA
tcaaggaagcttcctaaagag

SEQ ID NO: 98692 - RNA, 21 nt, synthetic construct
  source 1..21: mol_type = other RNA
tcaaggcacagtctgtgctta

SEQ ID NO: 98693 - RNA, 21 nt, synthetic construct
  source 1..21: mol_type = other RNA
tcaaggcagaacacactgctc

SEQ ID NO: 98694 - RNA, 21 nt, synthetic construct
  source 1..21: mol_type = other RNA
tcaaggccaactgtcctctct

SEQ ID NO: 98695 - RNA, 21 nt, synthetic construct
  source 1..21: mol_type = other RNA
tcaaggcttgtgcatcagaat

SEQ ID NO: 98696 - RNA, 21 nt, synthetic construct
  source 1..21: mol_type = other RNA
tcaagggctttcaatagtggg

SEQ ID NO: 98697 - RNA, 21 nt, synthetic construct
  source 1..21: mol_type = other RNA
tcaaggggagaggcctcatgt

SEQ ID NO: 98698 - RNA, 21 nt, synthetic construct
  source 1..21: mol_type = other RNA
tcaaggggccttttgtcaagc

SEQ ID NO: 98699 - RNA, 21 nt, synthetic construct
  source 1..21: mol_type = other RNA
tcaagggtggtgctggactgg

SEQ ID NO: 98700 - RNA, 21 nt, synthetic construct
  source 1..21: mol_type = other RNA
tcaagggtgttttccccccta

SEQ ID NO: 98701 - RNA, 21 nt, synthetic construct
  source 1..21: mol_type = other RNA
tcaaggtaatctagtttatct

SEQ ID NO: 98702 - RNA, 21 nt, synthetic construct
  source 1..21: mol_type = other RNA
tcaaggtacaatacactaaat

SEQ ID NO: 98703 - RNA, 21 nt, synthetic construct
  source 1..21: mol_type = other RNA
tcaaggtagaagtacaaacat

SEQ ID NO: 98704 - RNA, 21 nt, synthetic construct
  source 1..21: mol_type = other RNA
tcaaggtatctccccaaagat

SEQ ID NO: 98705 - RNA, 21 nt, synthetic construct
  source 1..21: mol_type = other RNA
tcaaggtcatcctttcccttc

SEQ ID NO: 98706 - RNA, 21 nt, synthetic construct
  source 1..21: mol_type = other RNA
tcaaggtgcgggattatttgg

SEQ ID NO: 98707 - RNA, 21 nt, synthetic construct
  source 1..21: mol_type = other RNA
tcaaggtgttagcaggactgg

SEQ ID NO: 98708 - RNA, 21 nt, synthetic construct
  source 1..21: mol_type = other RNA
tcaaggtgttcctgaagtctt

SEQ ID NO: 98709 - RNA, 21 nt, synthetic construct
  source 1..21: mol_type = other RNA
tcaaggttataatcagccgtg

SEQ ID NO: 98710 - RNA, 21 nt, synthetic construct
  source 1..21: mol_type = other RNA
tcaaggttcacaaattagaac

SEQ ID NO: 98711 - RNA, 21 nt, synthetic construct
  source 1..21: mol_type = other RNA
tcaagtaacactcagaagtac

SEQ ID NO: 98712 - RNA, 21 nt, synthetic construct
  source 1..21: mol_type = other RNA
tcaagtaacagttcaatacta

SEQ ID NO: 98713 - RNA, 21 nt, synthetic construct
  source 1..21: mol_type = other RNA
tcaagtaattgttttcccttt

SEQ ID NO: 98714 - RNA, 21 nt, synthetic construct
  source 1..21: mol_type = other RNA
tcaagtacaactaataattgc

SEQ ID NO: 98715 - RNA, 21 nt, synthetic construct
  source 1..21: mol_type = other RNA
tcaagtatctccctgtgcgtg

SEQ ID NO: 98716 - RNA, 21 nt, synthetic construct
  source 1..21: mol_type = other RNA
tcaagtatttccacgggtaaa

SEQ ID NO: 98717 - RNA, 21 nt, synthetic construct
  source 1..21: mol_type = other RNA
tcaagtcctttccagaggttc

SEQ ID NO: 98718 - RNA, 21 nt, synthetic construct
  source 1..21: mol_type = other RNA
tcaagtcttttcctagactgc

SEQ ID NO: 98719 - RNA, 21 nt, synthetic construct
  source 1..21: mol_type = other RNA
tcaagtgaaatgatctttgaa

SEQ ID NO: 98720 - RNA, 21 nt, synthetic construct
  source 1..21: mol_type = other RNA
tcaagtgaaccaaaaaccaca

SEQ ID NO: 98721 - RNA, 21 nt, synthetic construct
  source 1..21: mol_type = other RNA
tcaagtgactccaagcacaca

SEQ ID NO: 98722 - RNA, 21 nt, synthetic construct
  source 1..21: mol_type = other RNA
tcaagtgatgcaactcctggg

SEQ ID NO: 98723 - RNA, 21 nt, synthetic construct
  source 1..21: mol_type = other RNA
tcaagttacaataatatgcct

SEQ ID NO: 98724 - RNA, 21 nt, synthetic construct
  source 1..21: mol_type = other RNA
tcaagttccggttctcaggag

SEQ ID NO: 98725 - RNA, 21 nt, synthetic construct
  source 1..21: mol_type = other RNA
tcaagttctgatttcaaagtt

SEQ ID NO: 98726 - RNA, 21 nt, synthetic construct
  source 1..21: mol_type = other RNA
tcaagttgcttggcacagaat

SEQ ID NO: 98727 - RNA, 21 nt, synthetic construct
  source 1..21: mol_type = other RNA
tcaagttgctttttcttcttg

SEQ ID NO: 98728 - RNA, 21 nt, synthetic construct
  source 1..21: mol_type = other RNA
tcaagtttcaccctgcgaagg

SEQ ID NO: 98729 - RNA, 21 nt, synthetic construct
  source 1..21: mol_type = other RNA
tcaagtttggctcccatgatt

SEQ ID NO: 98730 - RNA, 21 nt, synthetic construct
  source 1..21: mol_type = other RNA
tcaataaccacatgtggcttg

SEQ ID NO: 98731 - RNA, 21 nt, synthetic construct
  source 1..21: mol_type = other RNA
tcaataaggaaagcacgtttg

SEQ ID NO: 98732 - RNA, 21 nt, synthetic construct
  source 1..21: mol_type = other RNA
tcaataattctgtgccaagca

SEQ ID NO: 98733 - RNA, 21 nt, synthetic construct
  source 1..21: mol_type = other RNA
tcaataatttggatgaacgct

SEQ ID NO: 98734 - RNA, 21 nt, synthetic construct
  source 1..21: mol_type = other RNA
tcaatacacgtggctgtcaaa

SEQ ID NO: 98735 - RNA, 21 nt, synthetic construct
  source 1..21: mol_type = other RNA
tcaatacctgaaaagtgtatt

SEQ ID NO: 98736 - RNA, 21 nt, synthetic construct
  source 1..21: mol_type = other RNA
tcaatactactgcaaatatcc

SEQ ID NO: 98737 - RNA, 21 nt, synthetic construct
  source 1..21: mol_type = other RNA
tcaatacttcatttccattgt

SEQ ID NO: 98738 - RNA, 21 nt, synthetic construct
  source 1..21: mol_type = other RNA
tcaatagcagtgctgaaagct

SEQ ID NO: 98739 - RNA, 21 nt, synthetic construct
  source 1..21: mol_type = other RNA
tcaatagtgggtagaagcagc

SEQ ID NO: 98740 - RNA, 21 nt, synthetic construct
  source 1..21: mol_type = other RNA
tcaatatgcagtatgtgccat

SEQ ID NO: 98741 - RNA, 21 nt, synthetic construct
  source 1..21: mol_type = other RNA
tcaatattaagagtctcatct

SEQ ID NO: 98742 - RNA, 21 nt, synthetic construct
  source 1..21: mol_type = other RNA
tcaatattttggaagactatg

SEQ ID NO: 98743 - RNA, 21 nt, synthetic construct
  source 1..21: mol_type = other RNA
tcaatcagggccttcccaaag

SEQ ID NO: 98744 - RNA, 21 nt, synthetic construct
  source 1..21: mol_type = other RNA
tcaatcagtggccagtgacca

SEQ ID NO: 98745 - RNA, 21 nt, synthetic construct
  source 1..21: mol_type = other RNA
tcaatcatgtcaagaatgaag

SEQ ID NO: 98746 - RNA, 21 nt, synthetic construct
  source 1..21: mol_type = other RNA
tcaatccagacagctaatatg

SEQ ID NO: 98747 - RNA, 21 nt, synthetic construct
  source 1..21: mol_type = other RNA
tcaatccccatctgggatact

SEQ ID NO: 98748 - RNA, 21 nt, synthetic construct
  source 1..21: mol_type = other RNA
tcaatcccttccccacctttc

SEQ ID NO: 98749 - RNA, 21 nt, synthetic construct
  source 1..21: mol_type = other RNA
tcaatctaggaggtctaagag

SEQ ID NO: 98750 - RNA, 21 nt, synthetic construct
  source 1..21: mol_type = other RNA
tcaatctcacacctgggtata

SEQ ID NO: 98751 - RNA, 21 nt, synthetic construct
  source 1..21: mol_type = other RNA
tcaatctcctgatccacctgc

SEQ ID NO: 98752 - RNA, 21 nt, synthetic construct
  source 1..21: mol_type = other RNA
tcaatctggaatgcatcgttt

SEQ ID NO: 98753 - RNA, 21 nt, synthetic construct
  source 1..21: mol_type = other RNA
tcaatctggatataacaaatc

SEQ ID NO: 98754 - RNA, 21 nt, synthetic construct
  source 1..21: mol_type = other RNA
tcaatctgtttcctaatctaa

SEQ ID NO: 98755 - RNA, 21 nt, synthetic construct
  source 1..21: mol_type = other RNA
tcaatcttggaaatgatacct

SEQ ID NO: 98756 - RNA, 21 nt, synthetic construct
  source 1..21: mol_type = other RNA
tcaatgagggcagagataact

SEQ ID NO: 98757 - RNA, 21 nt, synthetic construct
  source 1..21: mol_type = other RNA
tcaatgatagactggattaag

SEQ ID NO: 98758 - RNA, 21 nt, synthetic construct
  source 1..21: mol_type = other RNA
tcaatgcaatacttaatagcc

SEQ ID NO: 98759 - RNA, 21 nt, synthetic construct
  source 1..21: mol_type = other RNA
tcaatgcaatgcgtgtgaaac

SEQ ID NO: 98760 - RNA, 21 nt, synthetic construct
  source 1..21: mol_type = other RNA
tcaatgctacagtaagcaaaa

SEQ ID NO: 98761 - RNA, 21 nt, synthetic construct
  source 1..21: mol_type = other RNA
tcaatggggaactttattttt

SEQ ID NO: 98762 - RNA, 21 nt, synthetic construct
  source 1..21: mol_type = other RNA
tcaatggttaagactgctgtt

SEQ ID NO: 98763 - RNA, 21 nt, synthetic construct
  source 1..21: mol_type = other RNA
tcaatgttggttagtgttgtt

SEQ ID NO: 98764 - RNA, 21 nt, synthetic construct
  source 1..21: mol_type = other RNA
tcaatgtttggtagatttctg

SEQ ID NO: 98765 - RNA, 21 nt, synthetic construct
  source 1..21: mol_type = other RNA
tcaattaagcaaccttttagg

SEQ ID NO: 98766 - RNA, 21 nt, synthetic construct
  source 1..21: mol_type = other RNA
tcaattaatgcccaatcaaat

SEQ ID NO: 98767 - RNA, 21 nt, synthetic construct
  source 1..21: mol_type = other RNA
tcaattagttcctccttttgt

SEQ ID NO: 98768 - RNA, 21 nt, synthetic construct
  source 1..21: mol_type = other RNA
tcaattgaccaaacatgtgag

SEQ ID NO: 98769 - RNA, 21 nt, synthetic construct
  source 1..21: mol_type = other RNA
tcaattgatctgccaggacaa

SEQ ID NO: 98770 - RNA, 21 nt, synthetic construct
  source 1..21: mol_type = other RNA
tcaattgtaatgtctcctctt

SEQ ID NO: 98771 - RNA, 21 nt, synthetic construct
  source 1..21: mol_type = other RNA
tcaattgtcctggcagatcaa

SEQ ID NO: 98772 - RNA, 21 nt, synthetic construct
  source 1..21: mol_type = other RNA
tcaatttaacttctaatgccc

SEQ ID NO: 98773 - RNA, 21 nt, synthetic construct
  source 1..21: mol_type = other RNA
tcaatttcagatctctgacat

SEQ ID NO: 98774 - RNA, 21 nt, synthetic construct
  source 1..21: mol_type = other RNA
tcaatttcatcgtaaaaagcc

SEQ ID NO: 98775 - RNA, 21 nt, synthetic construct
  source 1..21: mol_type = other RNA
tcaattttcatgggttgattt

SEQ ID NO: 98776 - RNA, 21 nt, synthetic construct
  source 1..21: mol_type = other RNA
tcaattttcccccaattaaac

SEQ ID NO: 98777 - RNA, 21 nt, synthetic construct
  source 1..21: mol_type = other RNA
tcacaaaaagacaagtactgc

SEQ ID NO: 98778 - RNA, 21 nt, synthetic construct
  source 1..21: mol_type = other RNA
tcacaaaaagtgtgaccacat

SEQ ID NO: 98779 - RNA, 21 nt, synthetic construct
  source 1..21: mol_type = other RNA
tcacaaaatgtggatgcatga

SEQ ID NO: 98780 - RNA, 21 nt, synthetic construct
  source 1..21: mol_type = other RNA
tcacaaacaaatccttttccc

SEQ ID NO: 98781 - RNA, 21 nt, synthetic construct
  source 1..21: mol_type = other RNA
tcacaaacacaaaacaaatgg

SEQ ID NO: 98782 - RNA, 21 nt, synthetic construct
  source 1..21: mol_type = other RNA
tcacaaacacacaaaccaaca

SEQ ID NO: 98783 - RNA, 21 nt, synthetic construct
  source 1..21: mol_type = other RNA
tcacaaagccctcaggaccag

SEQ ID NO: 98784 - RNA, 21 nt, synthetic construct
  source 1..21: mol_type = other RNA
tcacaaagctttaaactggat

SEQ ID NO: 98785 - RNA, 21 nt, synthetic construct
  source 1..21: mol_type = other RNA
tcacaacaggcctgagccgtc

SEQ ID NO: 98786 - RNA, 21 nt, synthetic construct
  source 1..21: mol_type = other RNA
tcacaacttgtatgaaattag

SEQ ID NO: 98787 - RNA, 21 nt, synthetic construct
  source 1..21: mol_type = other RNA
tcacaagattaatcttgcaaa

SEQ ID NO: 98788 - RNA, 21 nt, synthetic construct
  source 1..21: mol_type = other RNA
tcacaagccagggtctgtctc

SEQ ID NO: 98789 - RNA, 21 nt, synthetic construct
  source 1..21: mol_type = other RNA
tcacaaggactggcttcagtg

SEQ ID NO: 98790 - RNA, 21 nt, synthetic construct
  source 1..21: mol_type = other RNA
tcacaaggtcagaagtttgga

SEQ ID NO: 98791 - RNA, 21 nt, synthetic construct
  source 1..21: mol_type = other RNA
tcacaatgcgtttgttagatc

SEQ ID NO: 98792 - RNA, 21 nt, synthetic construct
  source 1..21: mol_type = other RNA
tcacaattcacagaatatact

SEQ ID NO: 98793 - RNA, 21 nt, synthetic construct
  source 1..21: mol_type = other RNA
tcacacaatcttgagacggaa

SEQ ID NO: 98794 - RNA, 21 nt, synthetic construct
  source 1..21: mol_type = other RNA
tcacacaccactacacccggc

SEQ ID NO: 98795 - RNA, 21 nt, synthetic construct
  source 1..21: mol_type = other RNA
tcacacaccctttcttaggaa

SEQ ID NO: 98796 - RNA, 21 nt, synthetic construct
  source 1..21: mol_type = other RNA
tcacacattaactatggacat

SEQ ID NO: 98797 - RNA, 21 nt, synthetic construct
  source 1..21: mol_type = other RNA
tcacaccatttagatcatctt

SEQ ID NO: 98798 - RNA, 21 nt, synthetic construct
  source 1..21: mol_type = other RNA
tcacacccagtatacacgtat

SEQ ID NO: 98799 - RNA, 21 nt, synthetic construct
  source 1..21: mol_type = other RNA
tcacaccctcctaccttccaa

SEQ ID NO: 98800 - RNA, 21 nt, synthetic construct
  source 1..21: mol_type = other RNA
tcacaccgctgcattccagcc

SEQ ID NO: 98801 - RNA, 21 nt, synthetic construct
  source 1..21: mol_type = other RNA
tcacacctaggcctattttag

SEQ ID NO: 98802 - RNA, 21 nt, synthetic construct
  source 1..21: mol_type = other RNA
tcacacctgggtatacagcaa

SEQ ID NO: 98803 - RNA, 21 nt, synthetic construct
  source 1..21: mol_type = other RNA
tcacacgagaaggacagcttc

SEQ ID NO: 98804 - RNA, 21 nt, synthetic construct
  source 1..21: mol_type = other RNA
tcacacgcattgcattgacta

SEQ ID NO: 98805 - RNA, 21 nt, synthetic construct
  source 1..21: mol_type = other RNA
tcacacggaaaacattatttt

SEQ ID NO: 98806 - RNA, 21 nt, synthetic construct
  source 1..21: mol_type = other RNA
tcacactagtcaccctacaga

SEQ ID NO: 98807 - RNA, 21 nt, synthetic construct
  source 1..21: mol_type = other RNA
tcacactataacagatggaac

SEQ ID NO: 98808 - RNA, 21 nt, synthetic construct
  source 1..21: mol_type = other RNA
tcacactcgcactccacttcc

SEQ ID NO: 98809 - RNA, 21 nt, synthetic construct
  source 1..21: mol_type = other RNA
tcacactgattttctgcttct

SEQ ID NO: 98810 - RNA, 21 nt, synthetic construct
  source 1..21: mol_type = other RNA
tcacactgctcctgcctttgt

SEQ ID NO: 98811 - RNA, 21 nt, synthetic construct
  source 1..21: mol_type = other RNA
tcacactggtcactggccact

SEQ ID NO: 98812 - RNA, 21 nt, synthetic construct
  source 1..21: mol_type = other RNA
tcacactgttgtccaggccag

SEQ ID NO: 98813 - RNA, 21 nt, synthetic construct
  source 1..21: mol_type = other RNA
tcacactgtttgattactgta

SEQ ID NO: 98814 - RNA, 21 nt, synthetic construct
  source 1..21: mol_type = other RNA
tcacacttactaaatgatctt

SEQ ID NO: 98815 - RNA, 21 nt, synthetic construct
  source 1..21: mol_type = other RNA
tcacacttagttcaagatgca

SEQ ID NO: 98816 - RNA, 21 nt, synthetic construct
  source 1..21: mol_type = other RNA
tcacacttgatggtttggggc

SEQ ID NO: 98817 - RNA, 21 nt, synthetic construct
  source 1..21: mol_type = other RNA
tcacactttttgtgagtttta

SEQ ID NO: 98818 - RNA, 21 nt, synthetic construct
  source 1..21: mol_type = other RNA
tcacagaaacagaaaaatcca

SEQ ID NO: 98819 - RNA, 21 nt, synthetic construct
  source 1..21: mol_type = other RNA
tcacagaactgtcactgacac

SEQ ID NO: 98820 - RNA, 21 nt, synthetic construct
  source 1..21: mol_type = other RNA
tcacagaagtgttttgatagt

SEQ ID NO: 98821 - RNA, 21 nt, synthetic construct
  source 1..21: mol_type = other RNA
tcacagaatatactcagaaaa

SEQ ID NO: 98822 - RNA, 21 nt, synthetic construct
  source 1..21: mol_type = other RNA
tcacagacagggaatggggag

SEQ ID NO: 98823 - RNA, 21 nt, synthetic construct
  source 1..21: mol_type = other RNA
tcacagacagtaatttataca

SEQ ID NO: 98824 - RNA, 21 nt, synthetic construct
  source 1..21: mol_type = other RNA
tcacagacgcaaaggatgtca

SEQ ID NO: 98825 - RNA, 21 nt, synthetic construct
  source 1..21: mol_type = other RNA
tcacagatacaactctgacca

SEQ ID NO: 98826 - RNA, 21 nt, synthetic construct
  source 1..21: mol_type = other RNA
tcacagcatgaatacctattt

SEQ ID NO: 98827 - RNA, 21 nt, synthetic construct
  source 1..21: mol_type = other RNA
tcacagcgtgcaccttacatt

SEQ ID NO: 98828 - RNA, 21 nt, synthetic construct
  source 1..21: mol_type = other RNA
tcacagcttaccaagtgccgc

SEQ ID NO: 98829 - RNA, 21 nt, synthetic construct
  source 1..21: mol_type = other RNA
tcacaggaaagatgtctttta

SEQ ID NO: 98830 - RNA, 21 nt, synthetic construct
  source 1..21: mol_type = other RNA
tcacaggcgttgagccatcat

SEQ ID NO: 98831 - RNA, 21 nt, synthetic construct
  source 1..21: mol_type = other RNA
tcacaggctttcctacaatac

SEQ ID NO: 98832 - RNA, 21 nt, synthetic construct
  source 1..21: mol_type = other RNA
tcacagggcagggagagagaa

SEQ ID NO: 98833 - RNA, 21 nt, synthetic construct
  source 1..21: mol_type = other RNA
tcacaggtttaggtttttctt

SEQ ID NO: 98834 - RNA, 21 nt, synthetic construct
  source 1..21: mol_type = other RNA
tcacagtacgcttttatgtta

SEQ ID NO: 98835 - RNA, 21 nt, synthetic construct
  source 1..21: mol_type = other RNA
tcacagtagaagactcagcag

SEQ ID NO: 98836 - RNA, 21 nt, synthetic construct
  source 1..21: mol_type = other RNA
tcacagtatgcacaaataatt

SEQ ID NO: 98837 - RNA, 21 nt, synthetic construct
  source 1..21: mol_type = other RNA
tcacagtcacaaagctttaaa

SEQ ID NO: 98838 - RNA, 21 nt, synthetic construct
  source 1..21: mol_type = other RNA
tcacagtccactcacctgtca

SEQ ID NO: 98839 - RNA, 21 nt, synthetic construct
  source 1..21: mol_type = other RNA
tcacagtccaggaacttacag

SEQ ID NO: 98840 - RNA, 21 nt, synthetic construct
  source 1..21: mol_type = other RNA
tcacagtgaattctgacttag

SEQ ID NO: 98841 - RNA, 21 nt, synthetic construct
  source 1..21: mol_type = other RNA
tcacagtgaggacgctgatga

SEQ ID NO: 98842 - RNA, 21 nt, synthetic construct
  source 1..21: mol_type = other RNA
tcacagtgctccatagcttcc

SEQ ID NO: 98843 - RNA, 21 nt, synthetic construct
  source 1..21: mol_type = other RNA
tcacataaatttgccacattt

SEQ ID NO: 98844 - RNA, 21 nt, synthetic construct
  source 1..21: mol_type = other RNA
tcacataaggtatatttctgt

SEQ ID NO: 98845 - RNA, 21 nt, synthetic construct
  source 1..21: mol_type = other RNA
tcacatagaagcgctcttcaa

SEQ ID NO: 98846 - RNA, 21 nt, synthetic construct
  source 1..21: mol_type = other RNA
tcacatagacctgaatgactg

SEQ ID NO: 98847 - RNA, 21 nt, synthetic construct
  source 1..21: mol_type = other RNA
tcacatatctaattaacatcc

SEQ ID NO: 98848 - RNA, 21 nt, synthetic construct
  source 1..21: mol_type = other RNA
tcacatattttatgctttgtc

SEQ ID NO: 98849 - RNA, 21 nt, synthetic construct
  source 1..21: mol_type = other RNA
tcacatcagttaccaccaaga

SEQ ID NO: 98850 - RNA, 21 nt, synthetic construct
  source 1..21: mol_type = other RNA
tcacatgtttggtcaattgat

SEQ ID NO: 98851 - RNA, 21 nt, synthetic construct
  source 1..21: mol_type = other RNA
tcacattcacagcgtgcacct

SEQ ID NO: 98852 - RNA, 21 nt, synthetic construct
  source 1..21: mol_type = other RNA
tcacattcagaggtatttggg

SEQ ID NO: 98853 - RNA, 21 nt, synthetic construct
  source 1..21: mol_type = other RNA
tcacattctagtgatgggaga

SEQ ID NO: 98854 - RNA, 21 nt, synthetic construct
  source 1..21: mol_type = other RNA
tcacattctgcctgcagactg

SEQ ID NO: 98855 - RNA, 21 nt, synthetic construct
  source 1..21: mol_type = other RNA
tcacattcttcaccattccag

SEQ ID NO: 98856 - RNA, 21 nt, synthetic construct
  source 1..21: mol_type = other RNA
tcacattgcacagtctccccc

SEQ ID NO: 98857 - RNA, 21 nt, synthetic construct
  source 1..21: mol_type = other RNA
tcacattgtatttctgttaga

SEQ ID NO: 98858 - RNA, 21 nt, synthetic construct
  source 1..21: mol_type = other RNA
tcacatttaagaagggaacac

SEQ ID NO: 98859 - RNA, 21 nt, synthetic construct
  source 1..21: mol_type = other RNA
tcacatttagtttcatctatg

SEQ ID NO: 98860 - RNA, 21 nt, synthetic construct
  source 1..21: mol_type = other RNA
tcacatttcgccttctcagaa

SEQ ID NO: 98861 - RNA, 21 nt, synthetic construct
  source 1..21: mol_type = other RNA
tcacatttgaaagaaagaagg

SEQ ID NO: 98862 - RNA, 21 nt, synthetic construct
  source 1..21: mol_type = other RNA
tcacatttgctttactactgc

SEQ ID NO: 98863 - RNA, 21 nt, synthetic construct
  source 1..21: mol_type = other RNA
tcacattttcttatctaggcg

SEQ ID NO: 98864 - RNA, 21 nt, synthetic construct
  source 1..21: mol_type = other RNA
tcacattttgaatcatgggag

SEQ ID NO: 98865 - RNA, 21 nt, synthetic construct
  source 1..21: mol_type = other RNA
tcaccaaacaccttacactca

SEQ ID NO: 98866 - RNA, 21 nt, synthetic construct
  source 1..21: mol_type = other RNA
tcaccaaacgtttagatgaat

SEQ ID NO: 98867 - RNA, 21 nt, synthetic construct
  source 1..21: mol_type = other RNA
tcaccaaagacttcaggaaca

SEQ ID NO: 98868 - RNA, 21 nt, synthetic construct
  source 1..21: mol_type = other RNA
tcaccaaagatttactaaact

SEQ ID NO: 98869 - RNA, 21 nt, synthetic construct
  source 1..21: mol_type = other RNA
tcaccaacatccacagctttc

SEQ ID NO: 98870 - RNA, 21 nt, synthetic construct
  source 1..21: mol_type = other RNA
tcaccaactgaagcggggctg

SEQ ID NO: 98871 - RNA, 21 nt, synthetic construct
  source 1..21: mol_type = other RNA
tcaccaattgttaacatttct

SEQ ID NO: 98872 - RNA, 21 nt, synthetic construct
  source 1..21: mol_type = other RNA
tcaccagcggcatacaggagt

SEQ ID NO: 98873 - RNA, 21 nt, synthetic construct
  source 1..21: mol_type = other RNA
tcaccaggctggaatgcagcg

SEQ ID NO: 98874 - RNA, 21 nt, synthetic construct
  source 1..21: mol_type = other RNA
tcaccaggggctgggggatcc

SEQ ID NO: 98875 - RNA, 21 nt, synthetic construct
  source 1..21: mol_type = other RNA
tcaccagtttctaattagaat

SEQ ID NO: 98876 - RNA, 21 nt, synthetic construct
  source 1..21: mol_type = other RNA
tcaccatcatcatcaggctgg

SEQ ID NO: 98877 - RNA, 21 nt, synthetic construct
  source 1..21: mol_type = other RNA
tcaccatctgataagcccaac

SEQ ID NO: 98878 - RNA, 21 nt, synthetic construct
  source 1..21: mol_type = other RNA
tcaccatgtgcttatcaataa

SEQ ID NO: 98879 - RNA, 21 nt, synthetic construct
  source 1..21: mol_type = other RNA
tcaccattccagccattctct

SEQ ID NO: 98880 - RNA, 21 nt, synthetic construct
  source 1..21: mol_type = other RNA
tcacccaagaatttcatgcct

SEQ ID NO: 98881 - RNA, 21 nt, synthetic construct
  source 1..21: mol_type = other RNA
tcacccaagccacagcgtgga

SEQ ID NO: 98882 - RNA, 21 nt, synthetic construct
  source 1..21: mol_type = other RNA
tcacccacgtggagtgcaatg

SEQ ID NO: 98883 - RNA, 21 nt, synthetic construct
  source 1..21: mol_type = other RNA
tcacccagaccaagtttaacc

SEQ ID NO: 98884 - RNA, 21 nt, synthetic construct
  source 1..21: mol_type = other RNA
tcacccagctcgaccagggga

SEQ ID NO: 98885 - RNA, 21 nt, synthetic construct
  source 1..21: mol_type = other RNA
tcaccctacagactcaataac

SEQ ID NO: 98886 - RNA, 21 nt, synthetic construct
  source 1..21: mol_type = other RNA
tcaccctcaggactctgctca

SEQ ID NO: 98887 - RNA, 21 nt, synthetic construct
  source 1..21: mol_type = other RNA
tcaccctgcgaaggcaatgta

SEQ ID NO: 98888 - RNA, 21 nt, synthetic construct
  source 1..21: mol_type = other RNA
tcacccttataaaatgagggt

SEQ ID NO: 98889 - RNA, 21 nt, synthetic construct
  source 1..21: mol_type = other RNA
tcacccttgtaatcaagtatc

SEQ ID NO: 98890 - RNA, 21 nt, synthetic construct
  source 1..21: mol_type = other RNA
tcaccgcaacatctgcctccc

SEQ ID NO: 98891 - RNA, 21 nt, synthetic construct
  source 1..21: mol_type = other RNA
tcaccgtgcaactagagaaag

SEQ ID NO: 98892 - RNA, 21 nt, synthetic construct
  source 1..21: mol_type = other RNA
tcacctagcctctctgggctt

SEQ ID NO: 98893 - RNA, 21 nt, synthetic construct
  source 1..21: mol_type = other RNA
tcacctagctgttttcatgcg

SEQ ID NO: 98894 - RNA, 21 nt, synthetic construct
  source 1..21: mol_type = other RNA
tcacctcaaggcagaacacac

SEQ ID NO: 98895 - RNA, 21 nt, synthetic construct
  source 1..21: mol_type = other RNA
tcacctcaaggccaactgtcc

SEQ ID NO: 98896 - RNA, 21 nt, synthetic construct
  source 1..21: mol_type = other RNA
tcacctcaagtgatgcaactc

SEQ ID NO: 98897 - RNA, 21 nt, synthetic construct
  source 1..21: mol_type = other RNA
tcacctcacattcacagcgtg

SEQ ID NO: 98898 - RNA, 21 nt, synthetic construct
  source 1..21: mol_type = other RNA
tcacctctacacaaaaatcca

SEQ ID NO: 98899 - RNA, 21 nt, synthetic construct
  source 1..21: mol_type = other RNA
tcacctctccgggtaaaaagc

SEQ ID NO: 98900 - RNA, 21 nt, synthetic construct
  source 1..21: mol_type = other RNA
tcacctctggactcagggtca

SEQ ID NO: 98901 - RNA, 21 nt, synthetic construct
  source 1..21: mol_type = other RNA
tcacctgtcatgtcaaatttt

SEQ ID NO: 98902 - RNA, 21 nt, synthetic construct
  source 1..21: mol_type = other RNA
tcaccttctgctgggcccact

SEQ ID NO: 98903 - RNA, 21 nt, synthetic construct
  source 1..21: mol_type = other RNA
tcacgaaagcggtcaacgcac

SEQ ID NO: 98904 - RNA, 21 nt, synthetic construct
  source 1..21: mol_type = other RNA
tcacgagactgttagggactt

SEQ ID NO: 98905 - RNA, 21 nt, synthetic construct
  source 1..21: mol_type = other RNA
tcacgatgcttaggtaagaaa

SEQ ID NO: 98906 - RNA, 21 nt, synthetic construct
  source 1..21: mol_type = other RNA
tcacgattctgacccagagcc

SEQ ID NO: 98907 - RNA, 21 nt, synthetic construct
  source 1..21: mol_type = other RNA
tcacgcacagggagatacttg

SEQ ID NO: 98908 - RNA, 21 nt, synthetic construct
  source 1..21: mol_type = other RNA
tcacgccactgcattccgcct

SEQ ID NO: 98909 - RNA, 21 nt, synthetic construct
  source 1..21: mol_type = other RNA
tcacggctgattataaccttg

SEQ ID NO: 98910 - RNA, 21 nt, synthetic construct
  source 1..21: mol_type = other RNA
tcacggtgccctacatatggc

SEQ ID NO: 98911 - RNA, 21 nt, synthetic construct
  source 1..21: mol_type = other RNA
tcacgtcaccgcaacctccgc

SEQ ID NO: 98912 - RNA, 21 nt, synthetic construct
  source 1..21: mol_type = other RNA
tcacgtgcattcatactgaag

SEQ ID NO: 98913 - RNA, 21 nt, synthetic construct
  source 1..21: mol_type = other RNA
tcacgtggcgctccctctgtg

SEQ ID NO: 98914 - RNA, 21 nt, synthetic construct
  source 1..21: mol_type = other RNA
tcacgttaccctctggaatgc

SEQ ID NO: 98915 - RNA, 21 nt, synthetic construct
  source 1..21: mol_type = other RNA
tcactaaaaatcagattaagc

SEQ ID NO: 98916 - RNA, 21 nt, synthetic construct
  source 1..21: mol_type = other RNA
tcactaagagtgaaaaggcaa

SEQ ID NO: 98917 - RNA, 21 nt, synthetic construct
  source 1..21: mol_type = other RNA
tcactaagtcagaattcactg

SEQ ID NO: 98918 - RNA, 21 nt, synthetic construct
  source 1..21: mol_type = other RNA
tcactaatgcctcaaattagt

SEQ ID NO: 98919 - RNA, 21 nt, synthetic construct
  source 1..21: mol_type = other RNA
tcactacagcatattagctgt

SEQ ID NO: 98920 - RNA, 21 nt, synthetic construct
  source 1..21: mol_type = other RNA
tcactagaatgtgacttcgtc

SEQ ID NO: 98921 - RNA, 21 nt, synthetic construct
  source 1..21: mol_type = other RNA
tcactagacacatttttgaca

SEQ ID NO: 98922 - RNA, 21 nt, synthetic construct
  source 1..21: mol_type = other RNA
tcactagagcttcaacctcct

SEQ ID NO: 98923 - RNA, 21 nt, synthetic construct
  source 1..21: mol_type = other RNA
tcactagatctcttttccttt

SEQ ID NO: 98924 - RNA, 21 nt, synthetic construct
  source 1..21: mol_type = other RNA
tcactagctattagagaaatg

SEQ ID NO: 98925 - RNA, 21 nt, synthetic construct
  source 1..21: mol_type = other RNA
tcactagtgggtcgggtgtca

SEQ ID NO: 98926 - RNA, 21 nt, synthetic construct
  source 1..21: mol_type = other RNA
tcactattaaccatatggttt

SEQ ID NO: 98927 - RNA, 21 nt, synthetic construct
  source 1..21: mol_type = other RNA
tcactcacctagctgttttca

SEQ ID NO: 98928 - RNA, 21 nt, synthetic construct
  source 1..21: mol_type = other RNA
tcactcactggcctgagctct

SEQ ID NO: 98929 - RNA, 21 nt, synthetic construct
  source 1..21: mol_type = other RNA
tcactcagcataattggttaa

SEQ ID NO: 98930 - RNA, 21 nt, synthetic construct
  source 1..21: mol_type = other RNA
tcactcatttccgttgctgca

SEQ ID NO: 98931 - RNA, 21 nt, synthetic construct
  source 1..21: mol_type = other RNA
tcactccaaagcaaacgtgca

SEQ ID NO: 98932 - RNA, 21 nt, synthetic construct
  source 1..21: mol_type = other RNA
tcactccatttgtggcatctt

SEQ ID NO: 98933 - RNA, 21 nt, synthetic construct
  source 1..21: mol_type = other RNA
tcactcctcattcacactagt

SEQ ID NO: 98934 - RNA, 21 nt, synthetic construct
  source 1..21: mol_type = other RNA
tcactctaatatggttcctag

SEQ ID NO: 98935 - RNA, 21 nt, synthetic construct
  source 1..21: mol_type = other RNA
tcactctcaatagtgtccttt

SEQ ID NO: 98936 - RNA, 21 nt, synthetic construct
  source 1..21: mol_type = other RNA
tcactctctttaggaagcttc

SEQ ID NO: 98937 - RNA, 21 nt, synthetic construct
  source 1..21: mol_type = other RNA
tcactcttaaaaggagatata

SEQ ID NO: 98938 - RNA, 21 nt, synthetic construct
  source 1..21: mol_type = other RNA
tcactcttaccaaggctggag

SEQ ID NO: 98939 - RNA, 21 nt, synthetic construct
  source 1..21: mol_type = other RNA
tcactcttagtgatgtctttt

SEQ ID NO: 98940 - RNA, 21 nt, synthetic construct
  source 1..21: mol_type = other RNA
tcactcttctgcaagttgcta

SEQ ID NO: 98941 - RNA, 21 nt, synthetic construct
  source 1..21: mol_type = other RNA
tcactcttttaaggtttagaa

SEQ ID NO: 98942 - RNA, 21 nt, synthetic construct
  source 1..21: mol_type = other RNA
tcactgaaaccctcacgaaag

SEQ ID NO: 98943 - RNA, 21 nt, synthetic construct
  source 1..21: mol_type = other RNA
tcactgacacaggctgaaggg

SEQ ID NO: 98944 - RNA, 21 nt, synthetic construct
  source 1..21: mol_type = other RNA
tcactgactacacatacacag

SEQ ID NO: 98945 - RNA, 21 nt, synthetic construct
  source 1..21: mol_type = other RNA
tcactgactggctgtgccaac

SEQ ID NO: 98946 - RNA, 21 nt, synthetic construct
  source 1..21: mol_type = other RNA
tcactgcaagctccgcctcct

SEQ ID NO: 98947 - RNA, 21 nt, synthetic construct
  source 1..21: mol_type = other RNA
tcactgcagaattactgacaa

SEQ ID NO: 98948 - RNA, 21 nt, synthetic construct
  source 1..21: mol_type = other RNA
tcactgctcagtccctcacct

SEQ ID NO: 98949 - RNA, 21 nt, synthetic construct
  source 1..21: mol_type = other RNA
tcactgctgatgtaagtggga

SEQ ID NO: 98950 - RNA, 21 nt, synthetic construct
  source 1..21: mol_type = other RNA
tcactggagaattctactaaa

SEQ ID NO: 98951 - RNA, 21 nt, synthetic construct
  source 1..21: mol_type = other RNA
tcactggatagaagtgtatca

SEQ ID NO: 98952 - RNA, 21 nt, synthetic construct
  source 1..21: mol_type = other RNA
tcactggccactgattgagta

SEQ ID NO: 98953 - RNA, 21 nt, synthetic construct
  source 1..21: mol_type = other RNA
tcactggccagcattacttag

SEQ ID NO: 98954 - RNA, 21 nt, synthetic construct
  source 1..21: mol_type = other RNA
tcactggcctgagctctcagt

SEQ ID NO: 98955 - RNA, 21 nt, synthetic construct
  source 1..21: mol_type = other RNA
tcactggctagtaggcaacat

SEQ ID NO: 98956 - RNA, 21 nt, synthetic construct
  source 1..21: mol_type = other RNA
tcactgtaagaataatgtctt

SEQ ID NO: 98957 - RNA, 21 nt, synthetic construct
  source 1..21: mol_type = other RNA
tcactgtactactgacctggg

SEQ ID NO: 98958 - RNA, 21 nt, synthetic construct
  source 1..21: mol_type = other RNA
tcactgtctccatgtcctcac

SEQ ID NO: 98959 - RNA, 21 nt, synthetic construct
  source 1..21: mol_type = other RNA
tcactgtgactccaaagcaaa

SEQ ID NO: 98960 - RNA, 21 nt, synthetic construct
  source 1..21: mol_type = other RNA
tcactgtgatacctagtacgt

SEQ ID NO: 98961 - RNA, 21 nt, synthetic construct
  source 1..21: mol_type = other RNA
tcactgtggaaaacagtttgg

SEQ ID NO: 98962 - RNA, 21 nt, synthetic construct
  source 1..21: mol_type = other RNA
tcactgtttggacagtaaaaa

SEQ ID NO: 98963 - RNA, 21 nt, synthetic construct
  source 1..21: mol_type = other RNA
tcacttacttgagccccagaa

SEQ ID NO: 98964 - RNA, 21 nt, synthetic construct
  source 1..21: mol_type = other RNA
tcacttattagcaaagaggca

SEQ ID NO: 98965 - RNA, 21 nt, synthetic construct
  source 1..21: mol_type = other RNA
tcacttccaagtcccggaagc

SEQ ID NO: 98966 - RNA, 21 nt, synthetic construct
  source 1..21: mol_type = other RNA
tcacttcctctcttaaatccg

SEQ ID NO: 98967 - RNA, 21 nt, synthetic construct
  source 1..21: mol_type = other RNA
tcacttcgttcagtttagtaa

SEQ ID NO: 98968 - RNA, 21 nt, synthetic construct
  source 1..21: mol_type = other RNA
tcacttctctgctgctgaaaa

SEQ ID NO: 98969 - RNA, 21 nt, synthetic construct
  source 1..21: mol_type = other RNA
tcacttcttagtaaatatccg

SEQ ID NO: 98970 - RNA, 21 nt, synthetic construct
  source 1..21: mol_type = other RNA
tcacttcttattggttatctg

SEQ ID NO: 98971 - RNA, 21 nt, synthetic construct
  source 1..21: mol_type = other RNA
tcacttgaaacctgccatggt

SEQ ID NO: 98972 - RNA, 21 nt, synthetic construct
  source 1..21: mol_type = other RNA
tcacttgaggtgattaaaggc

SEQ ID NO: 98973 - RNA, 21 nt, synthetic construct
  source 1..21: mol_type = other RNA
tcacttgattactttacagtt

SEQ ID NO: 98974 - RNA, 21 nt, synthetic construct
  source 1..21: mol_type = other RNA
tcacttgtttcttttcactct

SEQ ID NO: 98975 - RNA, 21 nt, synthetic construct
  source 1..21: mol_type = other RNA
tcactttcctattcacactgc

SEQ ID NO: 98976 - RNA, 21 nt, synthetic construct
  source 1..21: mol_type = other RNA
tcactttcgtcatctataagg

SEQ ID NO: 98977 - RNA, 21 nt, synthetic construct
  source 1..21: mol_type = other RNA
tcactttgatcatacacatcc

SEQ ID NO: 98978 - RNA, 21 nt, synthetic construct
  source 1..21: mol_type = other RNA
tcactttgggattagcttatt

SEQ ID NO: 98979 - RNA, 21 nt, synthetic construct
  source 1..21: mol_type = other RNA
tcactttgttgctcaggctgg

SEQ ID NO: 98980 - RNA, 21 nt, synthetic construct
  source 1..21: mol_type = other RNA
tcacttttctggttttctgga

SEQ ID NO: 98981 - RNA, 21 nt, synthetic construct
  source 1..21: mol_type = other RNA
tcacttttgagttcagaaaga

SEQ ID NO: 98982 - RNA, 21 nt, synthetic construct
  source 1..21: mol_type = other RNA
tcacttttggaatttaagggg

SEQ ID NO: 98983 - RNA, 21 nt, synthetic construct
  source 1..21: mol_type = other RNA
tcacttttgtgcaacataaat

SEQ ID NO: 98984 - RNA, 21 nt, synthetic construct
  source 1..21: mol_type = other RNA
tcactttttattctgttctag

SEQ ID NO: 98985 - RNA, 21 nt, synthetic construct
  source 1..21: mol_type = other RNA
tcagaaaaggctgagacctca

SEQ ID NO: 98986 - RNA, 21 nt, synthetic construct
  source 1..21: mol_type = other RNA
tcagaaaattttcttttgtgg

SEQ ID NO: 98987 - RNA, 21 nt, synthetic construct
  source 1..21: mol_type = other RNA
tcagaaacaacaacaacaaaa

SEQ ID NO: 98988 - RNA, 21 nt, synthetic construct
  source 1..21: mol_type = other RNA
tcagaaacaccaacacaaagc

SEQ ID NO: 98989 - RNA, 21 nt, synthetic construct
  source 1..21: mol_type = other RNA
tcagaaaccatcgttcacact

SEQ ID NO: 98990 - RNA, 21 nt, synthetic construct
  source 1..21: mol_type = other RNA
tcagaaactgacaggactcca

SEQ ID NO: 98991 - RNA, 21 nt, synthetic construct
  source 1..21: mol_type = other RNA
tcagaaagagaatagcagaaa

SEQ ID NO: 98992 - RNA, 21 nt, synthetic construct
  source 1..21: mol_type = other RNA
tcagaaagattaatccttgtg

SEQ ID NO: 98993 - RNA, 21 nt, synthetic construct
  source 1..21: mol_type = other RNA
tcagaaatagactcccaactt

SEQ ID NO: 98994 - RNA, 21 nt, synthetic construct
  source 1..21: mol_type = other RNA
tcagaaatgtttaattcctac

SEQ ID NO: 98995 - RNA, 21 nt, synthetic construct
  source 1..21: mol_type = other RNA
tcagaaattataagcttcctc

SEQ ID NO: 98996 - RNA, 21 nt, synthetic construct
  source 1..21: mol_type = other RNA
tcagaactcttctccaaggaa

SEQ ID NO: 98997 - RNA, 21 nt, synthetic construct
  source 1..21: mol_type = other RNA
tcagaacttgacaagtatatt

SEQ ID NO: 98998 - RNA, 21 nt, synthetic construct
  source 1..21: mol_type = other RNA
tcagaagaaattacttctttc

SEQ ID NO: 98999 - RNA, 21 nt, synthetic construct
  source 1..21: mol_type = other RNA
tcagaagagcactatgtaaat

SEQ ID NO: 99000 - RNA, 21 nt, synthetic construct
  source 1..21: mol_type = other RNA
tcagaagaggataaggggcag

SEQ ID NO: 99001 - RNA, 21 nt, synthetic construct
  source 1..21: mol_type = other RNA
tcagaagcacaccaaggtttc

SEQ ID NO: 99002 - RNA, 21 nt, synthetic construct
  source 1..21: mol_type = other RNA
tcagaagccctgcagccagat

SEQ ID NO: 99003 - RNA, 21 nt, synthetic construct
  source 1..21: mol_type = other RNA
tcagaagctaaattttcatag

SEQ ID NO: 99004 - RNA, 21 nt, synthetic construct
  source 1..21: mol_type = other RNA
tcagaagctatagctgagaag

SEQ ID NO: 99005 - RNA, 21 nt, synthetic construct
  source 1..21: mol_type = other RNA
tcagaagctttcagacttaac

SEQ ID NO: 99006 - RNA, 21 nt, synthetic construct
  source 1..21: mol_type = other RNA
tcagaaggagtccagtcctgc

SEQ ID NO: 99007 - RNA, 21 nt, synthetic construct
  source 1..21: mol_type = other RNA
tcagaagtactactcattaaa

SEQ ID NO: 99008 - RNA, 21 nt, synthetic construct
  source 1..21: mol_type = other RNA
tcagaagtgctgacttggcag

SEQ ID NO: 99009 - RNA, 21 nt, synthetic construct
  source 1..21: mol_type = other RNA
tcagaagtttggaaccagcct

SEQ ID NO: 99010 - RNA, 21 nt, synthetic construct
  source 1..21: mol_type = other RNA
tcagaatacaaaaatgacaca

SEQ ID NO: 99011 - RNA, 21 nt, synthetic construct
  source 1..21: mol_type = other RNA
tcagaataccagagattggga

SEQ ID NO: 99012 - RNA, 21 nt, synthetic construct
  source 1..21: mol_type = other RNA
tcagaatcgtgatagtcttcc

SEQ ID NO: 99013 - RNA, 21 nt, synthetic construct
  source 1..21: mol_type = other RNA
tcagaattagaaagctggact

SEQ ID NO: 99014 - RNA, 21 nt, synthetic construct
  source 1..21: mol_type = other RNA
tcagaattcactgtgactcca

SEQ ID NO: 99015 - RNA, 21 nt, synthetic construct
  source 1..21: mol_type = other RNA
tcagaattccatcagtggttg

SEQ ID NO: 99016 - RNA, 21 nt, synthetic construct
  source 1..21: mol_type = other RNA
tcagaattccattccttttcg

SEQ ID NO: 99017 - RNA, 21 nt, synthetic construct
  source 1..21: mol_type = other RNA
tcagaatttgaggtcttctag

SEQ ID NO: 99018 - RNA, 21 nt, synthetic construct
  source 1..21: mol_type = other RNA
tcagacaacacattaataaga

SEQ ID NO: 99019 - RNA, 21 nt, synthetic construct
  source 1..21: mol_type = other RNA
tcagacacactagctgaccca

SEQ ID NO: 99020 - RNA, 21 nt, synthetic construct
  source 1..21: mol_type = other RNA
tcagacacctacattaatctc

SEQ ID NO: 99021 - RNA, 21 nt, synthetic construct
  source 1..21: mol_type = other RNA
tcagactaagacactagctat

SEQ ID NO: 99022 - RNA, 21 nt, synthetic construct
  source 1..21: mol_type = other RNA
tcagactcattgcctatagac

SEQ ID NO: 99023 - RNA, 21 nt, synthetic construct
  source 1..21: mol_type = other RNA
tcagactgtattaccagctta

SEQ ID NO: 99024 - RNA, 21 nt, synthetic construct
  source 1..21: mol_type = other RNA
tcagacttaactataggagtt

SEQ ID NO: 99025 - RNA, 21 nt, synthetic construct
  source 1..21: mol_type = other RNA
tcagagacacatactgaaaga

SEQ ID NO: 99026 - RNA, 21 nt, synthetic construct
  source 1..21: mol_type = other RNA
tcagagagacctgaagactgg

SEQ ID NO: 99027 - RNA, 21 nt, synthetic construct
  source 1..21: mol_type = other RNA
tcagagaggctttttattaga

SEQ ID NO: 99028 - RNA, 21 nt, synthetic construct
  source 1..21: mol_type = other RNA
tcagagatctgaaattgactt

SEQ ID NO: 99029 - RNA, 21 nt, synthetic construct
  source 1..21: mol_type = other RNA
tcagagattttcccaaagata

SEQ ID NO: 99030 - RNA, 21 nt, synthetic construct
  source 1..21: mol_type = other RNA
tcagagcagcactgatgtgta

SEQ ID NO: 99031 - RNA, 21 nt, synthetic construct
  source 1..21: mol_type = other RNA
tcagagcatgtcccctggagt

SEQ ID NO: 99032 - RNA, 21 nt, synthetic construct
  source 1..21: mol_type = other RNA
tcagagctttgttatgaaaat

SEQ ID NO: 99033 - RNA, 21 nt, synthetic construct
  source 1..21: mol_type = other RNA
tcagaggagcagttactcctg

SEQ ID NO: 99034 - RNA, 21 nt, synthetic construct
  source 1..21: mol_type = other RNA
tcagaggccctggtgctttct

SEQ ID NO: 99035 - RNA, 21 nt, synthetic construct
  source 1..21: mol_type = other RNA
tcagagggaaactgtttttgc

SEQ ID NO: 99036 - RNA, 21 nt, synthetic construct
  source 1..21: mol_type = other RNA
tcagaggtatttggggctagg

SEQ ID NO: 99037 - RNA, 21 nt, synthetic construct
  source 1..21: mol_type = other RNA
tcagaggtctgttactcccga

SEQ ID NO: 99038 - RNA, 21 nt, synthetic construct
  source 1..21: mol_type = other RNA
tcagagtatatatgctcccta

SEQ ID NO: 99039 - RNA, 21 nt, synthetic construct
  source 1..21: mol_type = other RNA
tcagagtgaacaggcaacctt

SEQ ID NO: 99040 - RNA, 21 nt, synthetic construct
  source 1..21: mol_type = other RNA
tcagagtgctgggtagagact

SEQ ID NO: 99041 - RNA, 21 nt, synthetic construct
  source 1..21: mol_type = other RNA
tcagagtggctaatgtggctt

SEQ ID NO: 99042 - RNA, 21 nt, synthetic construct
  source 1..21: mol_type = other RNA
tcagagttgtatctgtgatcc

SEQ ID NO: 99043 - RNA, 21 nt, synthetic construct
  source 1..21: mol_type = other RNA
tcagataacaaagggttcttg

SEQ ID NO: 99044 - RNA, 21 nt, synthetic construct
  source 1..21: mol_type = other RNA
tcagatagaaaagacaatagc

SEQ ID NO: 99045 - RNA, 21 nt, synthetic construct
  source 1..21: mol_type = other RNA
tcagatatcaatctggatata

SEQ ID NO: 99046 - RNA, 21 nt, synthetic construct
  source 1..21: mol_type = other RNA
tcagatatccacctgcctcag

SEQ ID NO: 99047 - RNA, 21 nt, synthetic construct
  source 1..21: mol_type = other RNA
tcagatatgaaagaggagaca

SEQ ID NO: 99048 - RNA, 21 nt, synthetic construct
  source 1..21: mol_type = other RNA
tcagatcccaattacttccag

SEQ ID NO: 99049 - RNA, 21 nt, synthetic construct
  source 1..21: mol_type = other RNA
tcagatctctgacattggtta

SEQ ID NO: 99050 - RNA, 21 nt, synthetic construct
  source 1..21: mol_type = other RNA
tcagatctgagagatagaaag

SEQ ID NO: 99051 - RNA, 21 nt, synthetic construct
  source 1..21: mol_type = other RNA
tcagatctgagtttgctctgc

SEQ ID NO: 99052 - RNA, 21 nt, synthetic construct
  source 1..21: mol_type = other RNA
tcagatctgttgcagtccccg

SEQ ID NO: 99053 - RNA, 21 nt, synthetic construct
  source 1..21: mol_type = other RNA
tcagatgacagaaataataca

SEQ ID NO: 99054 - RNA, 21 nt, synthetic construct
  source 1..21: mol_type = other RNA
tcagatgatcctcccgccttg

SEQ ID NO: 99055 - RNA, 21 nt, synthetic construct
  source 1..21: mol_type = other RNA
tcagatgcttctagccaaagc

SEQ ID NO: 99056 - RNA, 21 nt, synthetic construct
  source 1..21: mol_type = other RNA
tcagatggccccaaaattacc

SEQ ID NO: 99057 - RNA, 21 nt, synthetic construct
  source 1..21: mol_type = other RNA
tcagatggtaaattggtcctg

SEQ ID NO: 99058 - RNA, 21 nt, synthetic construct
  source 1..21: mol_type = other RNA
tcagatggtgatacctcttac

SEQ ID NO: 99059 - RNA, 21 nt, synthetic construct
  source 1..21: mol_type = other RNA
tcagatgtctccattttgcca

SEQ ID NO: 99060 - RNA, 21 nt, synthetic construct
  source 1..21: mol_type = other RNA
tcagattaagcatagtttgag

SEQ ID NO: 99061 - RNA, 21 nt, synthetic construct
  source 1..21: mol_type = other RNA
tcagattcaccaattgttaac

SEQ ID NO: 99062 - RNA, 21 nt, synthetic construct
  source 1..21: mol_type = other RNA
tcagattgaccttgtatccag

SEQ ID NO: 99063 - RNA, 21 nt, synthetic construct
  source 1..21: mol_type = other RNA
tcagattgcttgagagagata

SEQ ID NO: 99064 - RNA, 21 nt, synthetic construct
  source 1..21: mol_type = other RNA
tcagatttcaggtggtattta

SEQ ID NO: 99065 - RNA, 21 nt, synthetic construct
  source 1..21: mol_type = other RNA
tcagattttcttgttataagc

SEQ ID NO: 99066 - RNA, 21 nt, synthetic construct
  source 1..21: mol_type = other RNA
tcagcaaaagcaattattagt

SEQ ID NO: 99067 - RNA, 21 nt, synthetic construct
  source 1..21: mol_type = other RNA
tcagcaactcttggccatttt

SEQ ID NO: 99068 - RNA, 21 nt, synthetic construct
  source 1..21: mol_type = other RNA
tcagcaaggaccattagcagt

SEQ ID NO: 99069 - RNA, 21 nt, synthetic construct
  source 1..21: mol_type = other RNA
tcagcacaatactgtctcagt

SEQ ID NO: 99070 - RNA, 21 nt, synthetic construct
  source 1..21: mol_type = other RNA
tcagcacactcttaataactg

SEQ ID NO: 99071 - RNA, 21 nt, synthetic construct
  source 1..21: mol_type = other RNA
tcagcacagagccgaaatgca

SEQ ID NO: 99072 - RNA, 21 nt, synthetic construct
  source 1..21: mol_type = other RNA
tcagcaccaaagattatgttc

SEQ ID NO: 99073 - RNA, 21 nt, synthetic construct
  source 1..21: mol_type = other RNA
tcagcaccatctaacagaaat

SEQ ID NO: 99074 - RNA, 21 nt, synthetic construct
  source 1..21: mol_type = other RNA
tcagcaccctcaaatgtctca

SEQ ID NO: 99075 - RNA, 21 nt, synthetic construct
  source 1..21: mol_type = other RNA
tcagcactgctattgataaat

SEQ ID NO: 99076 - RNA, 21 nt, synthetic construct
  source 1..21: mol_type = other RNA
tcagcacttctgatatcctgt

SEQ ID NO: 99077 - RNA, 21 nt, synthetic construct
  source 1..21: mol_type = other RNA
tcagcagcagagaagtgaagc

SEQ ID NO: 99078 - RNA, 21 nt, synthetic construct
  source 1..21: mol_type = other RNA
tcagcagtgaccatatttcca

SEQ ID NO: 99079 - RNA, 21 nt, synthetic construct
  source 1..21: mol_type = other RNA
tcagcagttcagcctgcagaa

SEQ ID NO: 99080 - RNA, 21 nt, synthetic construct
  source 1..21: mol_type = other RNA
tcagcagttttaaagaattcg

SEQ ID NO: 99081 - RNA, 21 nt, synthetic construct
  source 1..21: mol_type = other RNA
tcagcataattggttaaactt

SEQ ID NO: 99082 - RNA, 21 nt, synthetic construct
  source 1..21: mol_type = other RNA
tcagcatagcagaaccttaga

SEQ ID NO: 99083 - RNA, 21 nt, synthetic construct
  source 1..21: mol_type = other RNA
tcagcatcttcactgactaca

SEQ ID NO: 99084 - RNA, 21 nt, synthetic construct
  source 1..21: mol_type = other RNA
tcagcatgtcttcagaggccc

SEQ ID NO: 99085 - RNA, 21 nt, synthetic construct
  source 1..21: mol_type = other RNA
tcagccaaagctggcatgttg

SEQ ID NO: 99086 - RNA, 21 nt, synthetic construct
  source 1..21: mol_type = other RNA
tcagccacaagacataagcat

SEQ ID NO: 99087 - RNA, 21 nt, synthetic construct
  source 1..21: mol_type = other RNA
tcagccagaggaagcttataa

SEQ ID NO: 99088 - RNA, 21 nt, synthetic construct
  source 1..21: mol_type = other RNA
tcagccatcccagctacataa

SEQ ID NO: 99089 - RNA, 21 nt, synthetic construct
  source 1..21: mol_type = other RNA
tcagccccctccctaccaccc

SEQ ID NO: 99090 - RNA, 21 nt, synthetic construct
  source 1..21: mol_type = other RNA
tcagccccctcgaagagacca

SEQ ID NO: 99091 - RNA, 21 nt, synthetic construct
  source 1..21: mol_type = other RNA
tcagccccctgagtagctgtg

SEQ ID NO: 99092 - RNA, 21 nt, synthetic construct
  source 1..21: mol_type = other RNA
tcagcccctcatcctccgtag

SEQ ID NO: 99093 - RNA, 21 nt, synthetic construct
  source 1..21: mol_type = other RNA
tcagccctgatagatattggc

SEQ ID NO: 99094 - RNA, 21 nt, synthetic construct
  source 1..21: mol_type = other RNA
tcagccgccgcagaggccaaa

SEQ ID NO: 99095 - RNA, 21 nt, synthetic construct
  source 1..21: mol_type = other RNA
tcagccgtgattgcaccactg

SEQ ID NO: 99096 - RNA, 21 nt, synthetic construct
  source 1..21: mol_type = other RNA
tcagcctaagcaagttacatg

SEQ ID NO: 99097 - RNA, 21 nt, synthetic construct
  source 1..21: mol_type = other RNA
tcagcctcccgagtagttgta

SEQ ID NO: 99098 - RNA, 21 nt, synthetic construct
  source 1..21: mol_type = other RNA
tcagcctgcagaaggagaaac

SEQ ID NO: 99099 - RNA, 21 nt, synthetic construct
  source 1..21: mol_type = other RNA
tcagcctgggcacacgccact

SEQ ID NO: 99100 - RNA, 21 nt, synthetic construct
  source 1..21: mol_type = other RNA
tcagcctgtgtcagtgacagt

SEQ ID NO: 99101 - RNA, 21 nt, synthetic construct
  source 1..21: mol_type = other RNA
tcagcctgttgggaggttttt

SEQ ID NO: 99102 - RNA, 21 nt, synthetic construct
  source 1..21: mol_type = other RNA
tcagccttttctgatttgctg

SEQ ID NO: 99103 - RNA, 21 nt, synthetic construct
  source 1..21: mol_type = other RNA
tcagcgctaagtgcatttcgg

SEQ ID NO: 99104 - RNA, 21 nt, synthetic construct
  source 1..21: mol_type = other RNA
tcagcgcttgaacaaatatga

SEQ ID NO: 99105 - RNA, 21 nt, synthetic construct
  source 1..21: mol_type = other RNA
tcagcgtcctcactgtgatac

SEQ ID NO: 99106 - RNA, 21 nt, synthetic construct
  source 1..21: mol_type = other RNA
tcagctaattttctaatcttc

SEQ ID NO: 99107 - RNA, 21 nt, synthetic construct
  source 1..21: mol_type = other RNA
tcagctaggcgtagtatctca

SEQ ID NO: 99108 - RNA, 21 nt, synthetic construct
  source 1..21: mol_type = other RNA
tcagctagtgtgtctgactac

SEQ ID NO: 99109 - RNA, 21 nt, synthetic construct
  source 1..21: mol_type = other RNA
tcagctatagcttctgagctg

SEQ ID NO: 99110 - RNA, 21 nt, synthetic construct
  source 1..21: mol_type = other RNA
tcagctatggtgttatttgtt

SEQ ID NO: 99111 - RNA, 21 nt, synthetic construct
  source 1..21: mol_type = other RNA
tcagctcaaacagcttgacat

SEQ ID NO: 99112 - RNA, 21 nt, synthetic construct
  source 1..21: mol_type = other RNA
tcagctcattacagtctcgac

SEQ ID NO: 99113 - RNA, 21 nt, synthetic construct
  source 1..21: mol_type = other RNA
tcagctcctcagaaggccaag

SEQ ID NO: 99114 - RNA, 21 nt, synthetic construct
  source 1..21: mol_type = other RNA
tcagctgtcactctctttagg

SEQ ID NO: 99115 - RNA, 21 nt, synthetic construct
  source 1..21: mol_type = other RNA
tcagcttacagtcatcacagt

SEQ ID NO: 99116 - RNA, 21 nt, synthetic construct
  source 1..21: mol_type = other RNA
tcagcttcctacccaagctta

SEQ ID NO: 99117 - RNA, 21 nt, synthetic construct
  source 1..21: mol_type = other RNA
tcagctttaaagagaaatagt

SEQ ID NO: 99118 - RNA, 21 nt, synthetic construct
  source 1..21: mol_type = other RNA
tcaggaaaaccagtttagaaa

SEQ ID NO: 99119 - RNA, 21 nt, synthetic construct
  source 1..21: mol_type = other RNA
tcaggaaagaccggggactgc

SEQ ID NO: 99120 - RNA, 21 nt, synthetic construct
  source 1..21: mol_type = other RNA
tcaggaaagatgaagtataga

SEQ ID NO: 99121 - RNA, 21 nt, synthetic construct
  source 1..21: mol_type = other RNA
tcaggaaagtgccagccaccc

SEQ ID NO: 99122 - RNA, 21 nt, synthetic construct
  source 1..21: mol_type = other RNA
tcaggaacaccttgaacatga

SEQ ID NO: 99123 - RNA, 21 nt, synthetic construct
  source 1..21: mol_type = other RNA
tcaggaaggcaggaggcctca

SEQ ID NO: 99124 - RNA, 21 nt, synthetic construct
  source 1..21: mol_type = other RNA
tcaggaagtatgagtcttccg

SEQ ID NO: 99125 - RNA, 21 nt, synthetic construct
  source 1..21: mol_type = other RNA
tcaggaatgcaaagtttccta

SEQ ID NO: 99126 - RNA, 21 nt, synthetic construct
  source 1..21: mol_type = other RNA
tcaggacactggaggtgcaca

SEQ ID NO: 99127 - RNA, 21 nt, synthetic construct
  source 1..21: mol_type = other RNA
tcaggacagattaaaatcaga

SEQ ID NO: 99128 - RNA, 21 nt, synthetic construct
  source 1..21: mol_type = other RNA
tcaggacagtcatcctcaaca

SEQ ID NO: 99129 - RNA, 21 nt, synthetic construct
  source 1..21: mol_type = other RNA
tcaggacagttattcttcagc

SEQ ID NO: 99130 - RNA, 21 nt, synthetic construct
  source 1..21: mol_type = other RNA
tcaggaccagatgacttcact

SEQ ID NO: 99131 - RNA, 21 nt, synthetic construct
  source 1..21: mol_type = other RNA
tcaggaccagcttgggcaaga

SEQ ID NO: 99132 - RNA, 21 nt, synthetic construct
  source 1..21: mol_type = other RNA
tcaggaccaggcagtcctctc

SEQ ID NO: 99133 - RNA, 21 nt, synthetic construct
  source 1..21: mol_type = other RNA
tcaggactcatgagagctgtg

SEQ ID NO: 99134 - RNA, 21 nt, synthetic construct
  source 1..21: mol_type = other RNA
tcaggactctgctcaaagggg

SEQ ID NO: 99135 - RNA, 21 nt, synthetic construct
  source 1..21: mol_type = other RNA
tcaggagattaaggctggagg

SEQ ID NO: 99136 - RNA, 21 nt, synthetic construct
  source 1..21: mol_type = other RNA
tcaggagcctagtcatccact

SEQ ID NO: 99137 - RNA, 21 nt, synthetic construct
  source 1..21: mol_type = other RNA
tcaggaggctgaggcaggagg

SEQ ID NO: 99138 - RNA, 21 nt, synthetic construct
  source 1..21: mol_type = other RNA
tcaggagtaactgctcctctg

SEQ ID NO: 99139 - RNA, 21 nt, synthetic construct
  source 1..21: mol_type = other RNA
tcaggagttttgcctctttgc

SEQ ID NO: 99140 - RNA, 21 nt, synthetic construct
  source 1..21: mol_type = other RNA
tcaggatgtctttgggaaggc

SEQ ID NO: 99141 - RNA, 21 nt, synthetic construct
  source 1..21: mol_type = other RNA
tcaggcaagggactgtcgaag

SEQ ID NO: 99142 - RNA, 21 nt, synthetic construct
  source 1..21: mol_type = other RNA
tcaggcagtctagtccatgaa

SEQ ID NO: 99143 - RNA, 21 nt, synthetic construct
  source 1..21: mol_type = other RNA
tcaggcatgctaactgcagag

SEQ ID NO: 99144 - RNA, 21 nt, synthetic construct
  source 1..21: mol_type = other RNA
tcaggccagtgagtgatgaaa

SEQ ID NO: 99145 - RNA, 21 nt, synthetic construct
  source 1..21: mol_type = other RNA
tcaggcctgttgtgaggattc

SEQ ID NO: 99146 - RNA, 21 nt, synthetic construct
  source 1..21: mol_type = other RNA
tcaggccttccacctgctctt

SEQ ID NO: 99147 - RNA, 21 nt, synthetic construct
  source 1..21: mol_type = other RNA
tcaggctccaggtagaatgaa

SEQ ID NO: 99148 - RNA, 21 nt, synthetic construct
  source 1..21: mol_type = other RNA
tcaggctggctctttccactc

SEQ ID NO: 99149 - RNA, 21 nt, synthetic construct
  source 1..21: mol_type = other RNA
tcaggcttgagtctgtgctct

SEQ ID NO: 99150 - RNA, 21 nt, synthetic construct
  source 1..21: mol_type = other RNA
tcagggaaggctgcaagcact

SEQ ID NO: 99151 - RNA, 21 nt, synthetic construct
  source 1..21: mol_type = other RNA
tcagggagaattggtagtcaa

SEQ ID NO: 99152 - RNA, 21 nt, synthetic construct
  source 1..21: mol_type = other RNA
tcagggatattggcttatagt

SEQ ID NO: 99153 - RNA, 21 nt, synthetic construct
  source 1..21: mol_type = other RNA
tcagggatcacagatacaact

SEQ ID NO: 99154 - RNA, 21 nt, synthetic construct
  source 1..21: mol_type = other RNA
tcagggatttggccagaatcc

SEQ ID NO: 99155 - RNA, 21 nt, synthetic construct
  source 1..21: mol_type = other RNA
tcagggcctgcttttggaagc

SEQ ID NO: 99156 - RNA, 21 nt, synthetic construct
  source 1..21: mol_type = other RNA
tcagggccttcccaaagacat

SEQ ID NO: 99157 - RNA, 21 nt, synthetic construct
  source 1..21: mol_type = other RNA
tcagggcctttaatcacctca

SEQ ID NO: 99158 - RNA, 21 nt, synthetic construct
  source 1..21: mol_type = other RNA
tcagggctgaaaaacacctca

SEQ ID NO: 99159 - RNA, 21 nt, synthetic construct
  source 1..21: mol_type = other RNA
tcagggggctaaatgctcaca

SEQ ID NO: 99160 - RNA, 21 nt, synthetic construct
  source 1..21: mol_type = other RNA
tcaggggggccactggaaacc

SEQ ID NO: 99161 - RNA, 21 nt, synthetic construct
  source 1..21: mol_type = other RNA
tcaggggtaaaggggatgggg

SEQ ID NO: 99162 - RNA, 21 nt, synthetic construct
  source 1..21: mol_type = other RNA
tcagggtaggaaaagacttct

SEQ ID NO: 99163 - RNA, 21 nt, synthetic construct
  source 1..21: mol_type = other RNA
tcagggtcacttcctctctta

SEQ ID NO: 99164 - RNA, 21 nt, synthetic construct
  source 1..21: mol_type = other RNA
tcagggtgcgacctcgaagca

SEQ ID NO: 99165 - RNA, 21 nt, synthetic construct
  source 1..21: mol_type = other RNA
tcaggtattgagcctgttccg

SEQ ID NO: 99166 - RNA, 21 nt, synthetic construct
  source 1..21: mol_type = other RNA
tcaggtctatgtgacagaatg

SEQ ID NO: 99167 - RNA, 21 nt, synthetic construct
  source 1..21: mol_type = other RNA
tcaggtctctctgaaattagc

SEQ ID NO: 99168 - RNA, 21 nt, synthetic construct
  source 1..21: mol_type = other RNA
tcaggtctctttgaaaggaat

SEQ ID NO: 99169 - RNA, 21 nt, synthetic construct
  source 1..21: mol_type = other RNA
tcaggtgcctcctgcctcagc

SEQ ID NO: 99170 - RNA, 21 nt, synthetic construct
  source 1..21: mol_type = other RNA
tcaggtgggcactgggagccc

SEQ ID NO: 99171 - RNA, 21 nt, synthetic construct
  source 1..21: mol_type = other RNA
tcaggtggtatttaatctgtc

SEQ ID NO: 99172 - RNA, 21 nt, synthetic construct
  source 1..21: mol_type = other RNA
tcaggtgtcactggatagaag

SEQ ID NO: 99173 - RNA, 21 nt, synthetic construct
  source 1..21: mol_type = other RNA
tcaggtgtgtaaacactgttc

SEQ ID NO: 99174 - RNA, 21 nt, synthetic construct
  source 1..21: mol_type = other RNA
tcaggttgggcttatcagatg

SEQ ID NO: 99175 - RNA, 21 nt, synthetic construct
  source 1..21: mol_type = other RNA
tcaggttttcgaccaagttac

SEQ ID NO: 99176 - RNA, 21 nt, synthetic construct
  source 1..21: mol_type = other RNA
tcagtaaaaaaggaccatctg

SEQ ID NO: 99177 - RNA, 21 nt, synthetic construct
  source 1..21: mol_type = other RNA
tcagtaaaattcccttcagtg

SEQ ID NO: 99178 - RNA, 21 nt, synthetic construct
  source 1..21: mol_type = other RNA
tcagtaaatgaaatttgaggc

SEQ ID NO: 99179 - RNA, 21 nt, synthetic construct
  source 1..21: mol_type = other RNA
tcagtaagaaaacagataacc

SEQ ID NO: 99180 - RNA, 21 nt, synthetic construct
  source 1..21: mol_type = other RNA
tcagtaattctgcagtgaaca

SEQ ID NO: 99181 - RNA, 21 nt, synthetic construct
  source 1..21: mol_type = other RNA
tcagtacacgaaaatatccct

SEQ ID NO: 99182 - RNA, 21 nt, synthetic construct
  source 1..21: mol_type = other RNA
tcagtactatcttccctaaag

SEQ ID NO: 99183 - RNA, 21 nt, synthetic construct
  source 1..21: mol_type = other RNA
tcagtacttccctctttctca

SEQ ID NO: 99184 - RNA, 21 nt, synthetic construct
  source 1..21: mol_type = other RNA
tcagtagaggccgagggttga

SEQ ID NO: 99185 - RNA, 21 nt, synthetic construct
  source 1..21: mol_type = other RNA
tcagtagtacagtgagtagaa

SEQ ID NO: 99186 - RNA, 21 nt, synthetic construct
  source 1..21: mol_type = other RNA
tcagtagtttgctagtggtaa

SEQ ID NO: 99187 - RNA, 21 nt, synthetic construct
  source 1..21: mol_type = other RNA
tcagtatatttactgcttgct

SEQ ID NO: 99188 - RNA, 21 nt, synthetic construct
  source 1..21: mol_type = other RNA
tcagtatcctttcaaggtatc

SEQ ID NO: 99189 - RNA, 21 nt, synthetic construct
  source 1..21: mol_type = other RNA
tcagtatgaatgcacgtgaag

SEQ ID NO: 99190 - RNA, 21 nt, synthetic construct
  source 1..21: mol_type = other RNA
tcagtatgtgtctctgacatg

SEQ ID NO: 99191 - RNA, 21 nt, synthetic construct
  source 1..21: mol_type = other RNA
tcagtcaacacactagccact

SEQ ID NO: 99192 - RNA, 21 nt, synthetic construct
  source 1..21: mol_type = other RNA
tcagtcaacaccaagcaacac

SEQ ID NO: 99193 - RNA, 21 nt, synthetic construct
  source 1..21: mol_type = other RNA
tcagtcaccaaacgtttagat

SEQ ID NO: 99194 - RNA, 21 nt, synthetic construct
  source 1..21: mol_type = other RNA
tcagtcagttctctgccccgg

SEQ ID NO: 99195 - RNA, 21 nt, synthetic construct
  source 1..21: mol_type = other RNA
tcagtcataatttgtgtcctt

SEQ ID NO: 99196 - RNA, 21 nt, synthetic construct
  source 1..21: mol_type = other RNA
tcagtccagatattatcctcc

SEQ ID NO: 99197 - RNA, 21 nt, synthetic construct
  source 1..21: mol_type = other RNA
tcagtcccaaatgggagcatg

SEQ ID NO: 99198 - RNA, 21 nt, synthetic construct
  source 1..21: mol_type = other RNA
tcagtccctcaccttctgctg

SEQ ID NO: 99199 - RNA, 21 nt, synthetic construct
  source 1..21: mol_type = other RNA
tcagtccctcctttctagaat

SEQ ID NO: 99200 - RNA, 21 nt, synthetic construct
  source 1..21: mol_type = other RNA
tcagtccttaccactgaagtg

SEQ ID NO: 99201 - RNA, 21 nt, synthetic construct
  source 1..21: mol_type = other RNA
tcagtcggttcttcaccgtgc

SEQ ID NO: 99202 - RNA, 21 nt, synthetic construct
  source 1..21: mol_type = other RNA
tcagtctccaatcctcagccc

SEQ ID NO: 99203 - RNA, 21 nt, synthetic construct
  source 1..21: mol_type = other RNA
tcagtctcgaaaaggaatgga

SEQ ID NO: 99204 - RNA, 21 nt, synthetic construct
  source 1..21: mol_type = other RNA
tcagtctgtaagcacctgtat

SEQ ID NO: 99205 - RNA, 21 nt, synthetic construct
  source 1..21: mol_type = other RNA
tcagtctgtttgccatcttca

SEQ ID NO: 99206 - RNA, 21 nt, synthetic construct
  source 1..21: mol_type = other RNA
tcagtcttggtagtttgcacg

SEQ ID NO: 99207 - RNA, 21 nt, synthetic construct
  source 1..21: mol_type = other RNA
tcagtgaagatgctgaacttg

SEQ ID NO: 99208 - RNA, 21 nt, synthetic construct
  source 1..21: mol_type = other RNA
tcagtgaatatcatttgaatg

SEQ ID NO: 99209 - RNA, 21 nt, synthetic construct
  source 1..21: mol_type = other RNA
tcagtgacagttctgtgaatt

SEQ ID NO: 99210 - RNA, 21 nt, synthetic construct
  source 1..21: mol_type = other RNA
tcagtgagtagggaaggtgcc

SEQ ID NO: 99211 - RNA, 21 nt, synthetic construct
  source 1..21: mol_type = other RNA
tcagtgatggaggtggaactc

SEQ ID NO: 99212 - RNA, 21 nt, synthetic construct
  source 1..21: mol_type = other RNA
tcagtgccaacacatggggca

SEQ ID NO: 99213 - RNA, 21 nt, synthetic construct
  source 1..21: mol_type = other RNA
tcagtgctgctctgacgttta

SEQ ID NO: 99214 - RNA, 21 nt, synthetic construct
  source 1..21: mol_type = other RNA
tcagtggccagtgaccagtgt

SEQ ID NO: 99215 - RNA, 21 nt, synthetic construct
  source 1..21: mol_type = other RNA
tcagtggccctgttggcctgg

SEQ ID NO: 99216 - RNA, 21 nt, synthetic construct
  source 1..21: mol_type = other RNA
tcagtgggactggagaacagt

SEQ ID NO: 99217 - RNA, 21 nt, synthetic construct
  source 1..21: mol_type = other RNA
tcagtgggttcaattatgtgg

SEQ ID NO: 99218 - RNA, 21 nt, synthetic construct
  source 1..21: mol_type = other RNA
tcagtggtaaggactgaagtc

SEQ ID NO: 99219 - RNA, 21 nt, synthetic construct
  source 1..21: mol_type = other RNA
tcagtggtagttacacaagtg

SEQ ID NO: 99220 - RNA, 21 nt, synthetic construct
  source 1..21: mol_type = other RNA
tcagtggtgcaatcacggctg

SEQ ID NO: 99221 - RNA, 21 nt, synthetic construct
  source 1..21: mol_type = other RNA
tcagtggtgcttttgctgcat

SEQ ID NO: 99222 - RNA, 21 nt, synthetic construct
  source 1..21: mol_type = other RNA
tcagtggttctgcgtgttatt

SEQ ID NO: 99223 - RNA, 21 nt, synthetic construct
  source 1..21: mol_type = other RNA
tcagtggttggaaaactttta

SEQ ID NO: 99224 - RNA, 21 nt, synthetic construct
  source 1..21: mol_type = other RNA
tcagtggttgtgcttcgaggt

SEQ ID NO: 99225 - RNA, 21 nt, synthetic construct
  source 1..21: mol_type = other RNA
tcagtgtagtcagacacacta

SEQ ID NO: 99226 - RNA, 21 nt, synthetic construct
  source 1..21: mol_type = other RNA
tcagtgtgaaagtattaaaag

SEQ ID NO: 99227 - RNA, 21 nt, synthetic construct
  source 1..21: mol_type = other RNA
tcagtgtggttcatatttccc

SEQ ID NO: 99228 - RNA, 21 nt, synthetic construct
  source 1..21: mol_type = other RNA
tcagtgtgtccacacaatggt

SEQ ID NO: 99229 - RNA, 21 nt, synthetic construct
  source 1..21: mol_type = other RNA
tcagtgtgtttttgtaaatga

SEQ ID NO: 99230 - RNA, 21 nt, synthetic construct
  source 1..21: mol_type = other RNA
tcagttaaaagttttccaacc

SEQ ID NO: 99231 - RNA, 21 nt, synthetic construct
  source 1..21: mol_type = other RNA
tcagttaaacccaacaaacaa

SEQ ID NO: 99232 - RNA, 21 nt, synthetic construct
  source 1..21: mol_type = other RNA
tcagttaacagtgctgtgcca

SEQ ID NO: 99233 - RNA, 21 nt, synthetic construct
  source 1..21: mol_type = other RNA
tcagttaacttattggaaaac

SEQ ID NO: 99234 - RNA, 21 nt, synthetic construct
  source 1..21: mol_type = other RNA
tcagttacagcatttcagcca

SEQ ID NO: 99235 - RNA, 21 nt, synthetic construct
  source 1..21: mol_type = other RNA
tcagttaccaccaagaaaaag

SEQ ID NO: 99236 - RNA, 21 nt, synthetic construct
  source 1..21: mol_type = other RNA
tcagttatcacacctaggcct

SEQ ID NO: 99237 - RNA, 21 nt, synthetic construct
  source 1..21: mol_type = other RNA
tcagttctctgccccgggcct

SEQ ID NO: 99238 - RNA, 21 nt, synthetic construct
  source 1..21: mol_type = other RNA
tcagttctttcggatatttac

SEQ ID NO: 99239 - RNA, 21 nt, synthetic construct
  source 1..21: mol_type = other RNA
tcagttgaaaagtatggttga

SEQ ID NO: 99240 - RNA, 21 nt, synthetic construct
  source 1..21: mol_type = other RNA
tcagttgacatcctttaattt

SEQ ID NO: 99241 - RNA, 21 nt, synthetic construct
  source 1..21: mol_type = other RNA
tcagttgcagcatgctcactg

SEQ ID NO: 99242 - RNA, 21 nt, synthetic construct
  source 1..21: mol_type = other RNA
tcagttgcatgaatttgtttt

SEQ ID NO: 99243 - RNA, 21 nt, synthetic construct
  source 1..21: mol_type = other RNA
tcagttggtgaagagagcctg

SEQ ID NO: 99244 - RNA, 21 nt, synthetic construct
  source 1..21: mol_type = other RNA
tcagttgtttacttgggtata

SEQ ID NO: 99245 - RNA, 21 nt, synthetic construct
  source 1..21: mol_type = other RNA
tcagtttagtaaatctttggt

SEQ ID NO: 99246 - RNA, 21 nt, synthetic construct
  source 1..21: mol_type = other RNA
tcagtttatgggtcaaccact

SEQ ID NO: 99247 - RNA, 21 nt, synthetic construct
  source 1..21: mol_type = other RNA
tcagtttcaaaagctccccgg

SEQ ID NO: 99248 - RNA, 21 nt, synthetic construct
  source 1..21: mol_type = other RNA
tcagtttctgatttatctttc

SEQ ID NO: 99249 - RNA, 21 nt, synthetic construct
  source 1..21: mol_type = other RNA
tcagtttgctagtattttgtt

SEQ ID NO: 99250 - RNA, 21 nt, synthetic construct
  source 1..21: mol_type = other RNA
tcagttttatcaattagttcc

SEQ ID NO: 99251 - RNA, 21 nt, synthetic construct
  source 1..21: mol_type = other RNA
tcagttttgagtggcatcata

SEQ ID NO: 99252 - RNA, 21 nt, synthetic construct
  source 1..21: mol_type = other RNA
tcataaaatgatggcaacaat

SEQ ID NO: 99253 - RNA, 21 nt, synthetic construct
  source 1..21: mol_type = other RNA
tcataaacacagaacactaaa

SEQ ID NO: 99254 - RNA, 21 nt, synthetic construct
  source 1..21: mol_type = other RNA
tcataaagccggattcctttc

SEQ ID NO: 99255 - RNA, 21 nt, synthetic construct
  source 1..21: mol_type = other RNA
tcataacaaagctctgatgct

SEQ ID NO: 99256 - RNA, 21 nt, synthetic construct
  source 1..21: mol_type = other RNA
tcataacagtattgtcttcta

SEQ ID NO: 99257 - RNA, 21 nt, synthetic construct
  source 1..21: mol_type = other RNA
tcataagaactcctggtctcc

SEQ ID NO: 99258 - RNA, 21 nt, synthetic construct
  source 1..21: mol_type = other RNA
tcataatagtctcacgatact

SEQ ID NO: 99259 - RNA, 21 nt, synthetic construct
  source 1..21: mol_type = other RNA
tcatacacatccagaagtcac

SEQ ID NO: 99260 - RNA, 21 nt, synthetic construct
  source 1..21: mol_type = other RNA
tcatacacctggatcaagtgg

SEQ ID NO: 99261 - RNA, 21 nt, synthetic construct
  source 1..21: mol_type = other RNA
tcatacacgagtgtgtttcgc

SEQ ID NO: 99262 - RNA, 21 nt, synthetic construct
  source 1..21: mol_type = other RNA
tcataccaggttttggtaatg

SEQ ID NO: 99263 - RNA, 21 nt, synthetic construct
  source 1..21: mol_type = other RNA
tcatacgttaactgtattgca

SEQ ID NO: 99264 - RNA, 21 nt, synthetic construct
  source 1..21: mol_type = other RNA
tcatactattttctatagtgg

SEQ ID NO: 99265 - RNA, 21 nt, synthetic construct
  source 1..21: mol_type = other RNA
tcatactgaaggcatagggcc

SEQ ID NO: 99266 - RNA, 21 nt, synthetic construct
  source 1..21: mol_type = other RNA
tcatactggaaggactcacag

SEQ ID NO: 99267 - RNA, 21 nt, synthetic construct
  source 1..21: mol_type = other RNA
tcatacttgctttattacttc

SEQ ID NO: 99268 - RNA, 21 nt, synthetic construct
  source 1..21: mol_type = other RNA
tcatactttgtcaggcatgct

SEQ ID NO: 99269 - RNA, 21 nt, synthetic construct
  source 1..21: mol_type = other RNA
tcatagagtaccaggtcagcc

SEQ ID NO: 99270 - RNA, 21 nt, synthetic construct
  source 1..21: mol_type = other RNA
tcatagatcaccaggggctgg

SEQ ID NO: 99271 - RNA, 21 nt, synthetic construct
  source 1..21: mol_type = other RNA
tcatagatgttatgccccctc

SEQ ID NO: 99272 - RNA, 21 nt, synthetic construct
  source 1..21: mol_type = other RNA
tcatagcagaatggccctgcg

SEQ ID NO: 99273 - RNA, 21 nt, synthetic construct
  source 1..21: mol_type = other RNA
tcatagcagcattgtttacag

SEQ ID NO: 99274 - RNA, 21 nt, synthetic construct
  source 1..21: mol_type = other RNA
tcatagcagtgggaagtggag

SEQ ID NO: 99275 - RNA, 21 nt, synthetic construct
  source 1..21: mol_type = other RNA
tcatagctcactagagcttca

SEQ ID NO: 99276 - RNA, 21 nt, synthetic construct
  source 1..21: mol_type = other RNA
tcataggaaatacttgatcta

SEQ ID NO: 99277 - RNA, 21 nt, synthetic construct
  source 1..21: mol_type = other RNA
tcataggcatctctcccttcc

SEQ ID NO: 99278 - RNA, 21 nt, synthetic construct
  source 1..21: mol_type = other RNA
tcataggtaatactctagtgg

SEQ ID NO: 99279 - RNA, 21 nt, synthetic construct
  source 1..21: mol_type = other RNA
tcatagtagctgttgaattgt

SEQ ID NO: 99280 - RNA, 21 nt, synthetic construct
  source 1..21: mol_type = other RNA
tcatagtcatcattattagca

SEQ ID NO: 99281 - RNA, 21 nt, synthetic construct
  source 1..21: mol_type = other RNA
tcatagtcttccaaaatattg

SEQ ID NO: 99282 - RNA, 21 nt, synthetic construct
  source 1..21: mol_type = other RNA
tcatataagtggaatcattcc

SEQ ID NO: 99283 - RNA, 21 nt, synthetic construct
  source 1..21: mol_type = other RNA
tcatataatggagtactatgc

SEQ ID NO: 99284 - RNA, 21 nt, synthetic construct
  source 1..21: mol_type = other RNA
tcatatagtaattctgtgctt

SEQ ID NO: 99285 - RNA, 21 nt, synthetic construct
  source 1..21: mol_type = other RNA
tcatatcagttatcacaccta

SEQ ID NO: 99286 - RNA, 21 nt, synthetic construct
  source 1..21: mol_type = other RNA
tcatatctgattttgtgtctt

SEQ ID NO: 99287 - RNA, 21 nt, synthetic construct
  source 1..21: mol_type = other RNA
tcatatgaaatcacacaatct

SEQ ID NO: 99288 - RNA, 21 nt, synthetic construct
  source 1..21: mol_type = other RNA
tcatatgatctatcaatctca

SEQ ID NO: 99289 - RNA, 21 nt, synthetic construct
  source 1..21: mol_type = other RNA
tcatatgctttgagctacaaa

SEQ ID NO: 99290 - RNA, 21 nt, synthetic construct
  source 1..21: mol_type = other RNA
tcatattagtctgtagcttca

SEQ ID NO: 99291 - RNA, 21 nt, synthetic construct
  source 1..21: mol_type = other RNA
tcatattattttttcccgcta

SEQ ID NO: 99292 - RNA, 21 nt, synthetic construct
  source 1..21: mol_type = other RNA
tcatattggattaagggccca

SEQ ID NO: 99293 - RNA, 21 nt, synthetic construct
  source 1..21: mol_type = other RNA
tcatatttcccttttggatgc

SEQ ID NO: 99294 - RNA, 21 nt, synthetic construct
  source 1..21: mol_type = other RNA
tcatatttgttcaagcgctga

SEQ ID NO: 99295 - RNA, 21 nt, synthetic construct
  source 1..21: mol_type = other RNA
tcatattttccttatccattc

SEQ ID NO: 99296 - RNA, 21 nt, synthetic construct
  source 1..21: mol_type = other RNA
tcatattttgtgggaattcag

SEQ ID NO: 99297 - RNA, 21 nt, synthetic construct
  source 1..21: mol_type = other RNA
tcatcaaaggaaggaatttta

SEQ ID NO: 99298 - RNA, 21 nt, synthetic construct
  source 1..21: mol_type = other RNA
tcatcaagacagagctccctc

SEQ ID NO: 99299 - RNA, 21 nt, synthetic construct
  source 1..21: mol_type = other RNA
tcatcacagtatgcacaaata

SEQ ID NO: 99300 - RNA, 21 nt, synthetic construct
  source 1..21: mol_type = other RNA
tcatcacagtccaggaactta

SEQ ID NO: 99301 - RNA, 21 nt, synthetic construct
  source 1..21: mol_type = other RNA
tcatcactcactggcctgagc

SEQ ID NO: 99302 - RNA, 21 nt, synthetic construct
  source 1..21: mol_type = other RNA
tcatcagcgtcctcactgtga

SEQ ID NO: 99303 - RNA, 21 nt, synthetic construct
  source 1..21: mol_type = other RNA
tcatcaggctggctctttcca

SEQ ID NO: 99304 - RNA, 21 nt, synthetic construct
  source 1..21: mol_type = other RNA
tcatcagtccctgtgtttttt

SEQ ID NO: 99305 - RNA, 21 nt, synthetic construct
  source 1..21: mol_type = other RNA
tcatcatcaggctggctcttt

SEQ ID NO: 99306 - RNA, 21 nt, synthetic construct
  source 1..21: mol_type = other RNA
tcatcatcttatacttggcaa

SEQ ID NO: 99307 - RNA, 21 nt, synthetic construct
  source 1..21: mol_type = other RNA
tcatcatcttttgcctggatg

SEQ ID NO: 99308 - RNA, 21 nt, synthetic construct
  source 1..21: mol_type = other RNA
tcatcatttatacccaagtaa

SEQ ID NO: 99309 - RNA, 21 nt, synthetic construct
  source 1..21: mol_type = other RNA
tcatccaaacagaaaccctgt

SEQ ID NO: 99310 - RNA, 21 nt, synthetic construct
  source 1..21: mol_type = other RNA
tcatccaaattattgacaaga

SEQ ID NO: 99311 - RNA, 21 nt, synthetic construct
  source 1..21: mol_type = other RNA
tcatccacaatgagacatttg

SEQ ID NO: 99312 - RNA, 21 nt, synthetic construct
  source 1..21: mol_type = other RNA
tcatccactgcacagtatgcg

SEQ ID NO: 99313 - RNA, 21 nt, synthetic construct
  source 1..21: mol_type = other RNA
tcatccaggcaaaagatgatg

SEQ ID NO: 99314 - RNA, 21 nt, synthetic construct
  source 1..21: mol_type = other RNA
tcatccagtttaaagctttgt

SEQ ID NO: 99315 - RNA, 21 nt, synthetic construct
  source 1..21: mol_type = other RNA
tcatccatgttgttgaatgtg

SEQ ID NO: 99316 - RNA, 21 nt, synthetic construct
  source 1..21: mol_type = other RNA
tcatccctcatatcagttatc

SEQ ID NO: 99317 - RNA, 21 nt, synthetic construct
  source 1..21: mol_type = other RNA
tcatccctctaaataggtatt

SEQ ID NO: 99318 - RNA, 21 nt, synthetic construct
  source 1..21: mol_type = other RNA
tcatccggggagcttttgaaa

SEQ ID NO: 99319 - RNA, 21 nt, synthetic construct
  source 1..21: mol_type = other RNA
tcatccggtctcagtttttaa

SEQ ID NO: 99320 - RNA, 21 nt, synthetic construct
  source 1..21: mol_type = other RNA
tcatcctcaacaagagaggac

SEQ ID NO: 99321 - RNA, 21 nt, synthetic construct
  source 1..21: mol_type = other RNA
tcatcctccgtagctgtcgct

SEQ ID NO: 99322 - RNA, 21 nt, synthetic construct
  source 1..21: mol_type = other RNA
tcatcctttcccttctgctcg

SEQ ID NO: 99323 - RNA, 21 nt, synthetic construct
  source 1..21: mol_type = other RNA
tcatcgcattacgagttatgc

SEQ ID NO: 99324 - RNA, 21 nt, synthetic construct
  source 1..21: mol_type = other RNA
tcatcggaaatataaaaagcc

SEQ ID NO: 99325 - RNA, 21 nt, synthetic construct
  source 1..21: mol_type = other RNA
tcatcgtaaaaagccatttat

SEQ ID NO: 99326 - RNA, 21 nt, synthetic construct
  source 1..21: mol_type = other RNA
tcatctaaacgtttggtgact

SEQ ID NO: 99327 - RNA, 21 nt, synthetic construct
  source 1..21: mol_type = other RNA
tcatctaaattaagcttcgac

SEQ ID NO: 99328 - RNA, 21 nt, synthetic construct
  source 1..21: mol_type = other RNA
tcatctaagcctacctccctt

SEQ ID NO: 99329 - RNA, 21 nt, synthetic construct
  source 1..21: mol_type = other RNA
tcatctaatttcccatttgat

SEQ ID NO: 99330 - RNA, 21 nt, synthetic construct
  source 1..21: mol_type = other RNA
tcatctaggcatataaactgg

SEQ ID NO: 99331 - RNA, 21 nt, synthetic construct
  source 1..21: mol_type = other RNA
tcatctataaggtaatgacaa

SEQ ID NO: 99332 - RNA, 21 nt, synthetic construct
  source 1..21: mol_type = other RNA
tcatctatgtcccctggggcc

SEQ ID NO: 99333 - RNA, 21 nt, synthetic construct
  source 1..21: mol_type = other RNA
tcatctctcgatggacattta

SEQ ID NO: 99334 - RNA, 21 nt, synthetic construct
  source 1..21: mol_type = other RNA
tcatctctgcaaaacatttaa

SEQ ID NO: 99335 - RNA, 21 nt, synthetic construct
  source 1..21: mol_type = other RNA
tcatctgaatcaataagaatg

SEQ ID NO: 99336 - RNA, 21 nt, synthetic construct
  source 1..21: mol_type = other RNA
tcatctgcagtgtccatctcc

SEQ ID NO: 99337 - RNA, 21 nt, synthetic construct
  source 1..21: mol_type = other RNA
tcatctggaccagttactctc

SEQ ID NO: 99338 - RNA, 21 nt, synthetic construct
  source 1..21: mol_type = other RNA
tcatctggtcctgagctttcc

SEQ ID NO: 99339 - RNA, 21 nt, synthetic construct
  source 1..21: mol_type = other RNA
tcatctgtcaaaaagagaaca

SEQ ID NO: 99340 - RNA, 21 nt, synthetic construct
  source 1..21: mol_type = other RNA
tcatctgtcactttcctattc

SEQ ID NO: 99341 - RNA, 21 nt, synthetic construct
  source 1..21: mol_type = other RNA
tcatctgttaatgggcacttg

SEQ ID NO: 99342 - RNA, 21 nt, synthetic construct
  source 1..21: mol_type = other RNA
tcatcttaagaaccatacagt

SEQ ID NO: 99343 - RNA, 21 nt, synthetic construct
  source 1..21: mol_type = other RNA
tcatcttagccgggaggagcc

SEQ ID NO: 99344 - RNA, 21 nt, synthetic construct
  source 1..21: mol_type = other RNA
tcatcttatacttggcaaaaa

SEQ ID NO: 99345 - RNA, 21 nt, synthetic construct
  source 1..21: mol_type = other RNA
tcatcttctctctctgcttca

SEQ ID NO: 99346 - RNA, 21 nt, synthetic construct
  source 1..21: mol_type = other RNA
tcatcttgacttcacttccaa

SEQ ID NO: 99347 - RNA, 21 nt, synthetic construct
  source 1..21: mol_type = other RNA
tcatctttcctgatcacaccc

SEQ ID NO: 99348 - RNA, 21 nt, synthetic construct
  source 1..21: mol_type = other RNA
tcatcttttgcctggatgaat

SEQ ID NO: 99349 - RNA, 21 nt, synthetic construct
  source 1..21: mol_type = other RNA
tcatgaaagtggagaattact

SEQ ID NO: 99350 - RNA, 21 nt, synthetic construct
  source 1..21: mol_type = other RNA
tcatgaaatcccctttagtgt

SEQ ID NO: 99351 - RNA, 21 nt, synthetic construct
  source 1..21: mol_type = other RNA
tcatgaacaattttctctcat

SEQ ID NO: 99352 - RNA, 21 nt, synthetic construct
  source 1..21: mol_type = other RNA
tcatgaaccttcaccaaagat

SEQ ID NO: 99353 - RNA, 21 nt, synthetic construct
  source 1..21: mol_type = other RNA
tcatgaatgaatgttgagttt

SEQ ID NO: 99354 - RNA, 21 nt, synthetic construct
  source 1..21: mol_type = other RNA
tcatgacaagaatctttggca

SEQ ID NO: 99355 - RNA, 21 nt, synthetic construct
  source 1..21: mol_type = other RNA
tcatgacctgctttcttgggg

SEQ ID NO: 99356 - RNA, 21 nt, synthetic construct
  source 1..21: mol_type = other RNA
tcatgacttttttgcccactc

SEQ ID NO: 99357 - RNA, 21 nt, synthetic construct
  source 1..21: mol_type = other RNA
tcatgagagctgtgccgaggc

SEQ ID NO: 99358 - RNA, 21 nt, synthetic construct
  source 1..21: mol_type = other RNA
tcatgagtcctgaaaattcct

SEQ ID NO: 99359 - RNA, 21 nt, synthetic construct
  source 1..21: mol_type = other RNA
tcatgatgtttggctccttac

SEQ ID NO: 99360 - RNA, 21 nt, synthetic construct
  source 1..21: mol_type = other RNA
tcatgattcagtcttggtagt

SEQ ID NO: 99361 - RNA, 21 nt, synthetic construct
  source 1..21: mol_type = other RNA
tcatgatttaatagaggtctg

SEQ ID NO: 99362 - RNA, 21 nt, synthetic construct
  source 1..21: mol_type = other RNA
tcatgatttggtgtgtgcaaa

SEQ ID NO: 99363 - RNA, 21 nt, synthetic construct
  source 1..21: mol_type = other RNA
tcatgcaactgaaaacatctt

SEQ ID NO: 99364 - RNA, 21 nt, synthetic construct
  source 1..21: mol_type = other RNA
tcatgcaattccccagcctca

SEQ ID NO: 99365 - RNA, 21 nt, synthetic construct
  source 1..21: mol_type = other RNA
tcatgcacacgctggaaggga

SEQ ID NO: 99366 - RNA, 21 nt, synthetic construct
  source 1..21: mol_type = other RNA
tcatgcagtacttgtcttttt

SEQ ID NO: 99367 - RNA, 21 nt, synthetic construct
  source 1..21: mol_type = other RNA
tcatgcatccacattttgtga

SEQ ID NO: 99368 - RNA, 21 nt, synthetic construct
  source 1..21: mol_type = other RNA
tcatgccatcctggatttggg

SEQ ID NO: 99369 - RNA, 21 nt, synthetic construct
  source 1..21: mol_type = other RNA
tcatgcctgggtaattaaaca

SEQ ID NO: 99370 - RNA, 21 nt, synthetic construct
  source 1..21: mol_type = other RNA
tcatgcctttcagcatagcag

SEQ ID NO: 99371 - RNA, 21 nt, synthetic construct
  source 1..21: mol_type = other RNA
tcatgcgacatatcagggatc

SEQ ID NO: 99372 - RNA, 21 nt, synthetic construct
  source 1..21: mol_type = other RNA
tcatgctgggagaccaggagt

SEQ ID NO: 99373 - RNA, 21 nt, synthetic construct
  source 1..21: mol_type = other RNA
tcatgctgtgaatttggattt

SEQ ID NO: 99374 - RNA, 21 nt, synthetic construct
  source 1..21: mol_type = other RNA
tcatgcttaggatcccagtcc

SEQ ID NO: 99375 - RNA, 21 nt, synthetic construct
  source 1..21: mol_type = other RNA
tcatgcttgctccagagaagt

SEQ ID NO: 99376 - RNA, 21 nt, synthetic construct
  source 1..21: mol_type = other RNA
tcatggaagttatttaatctc

SEQ ID NO: 99377 - RNA, 21 nt, synthetic construct
  source 1..21: mol_type = other RNA
tcatggactagactgcctgag

SEQ ID NO: 99378 - RNA, 21 nt, synthetic construct
  source 1..21: mol_type = other RNA
tcatggacttcctattttata

SEQ ID NO: 99379 - RNA, 21 nt, synthetic construct
  source 1..21: mol_type = other RNA
tcatgggaagatgctccctct

SEQ ID NO: 99380 - RNA, 21 nt, synthetic construct
  source 1..21: mol_type = other RNA
tcatgggagccaaacttgaac

SEQ ID NO: 99381 - RNA, 21 nt, synthetic construct
  source 1..21: mol_type = other RNA
tcatgggccgggcgtagtggc

SEQ ID NO: 99382 - RNA, 21 nt, synthetic construct
  source 1..21: mol_type = other RNA
tcatgggtggaaattaaacac

SEQ ID NO: 99383 - RNA, 21 nt, synthetic construct
  source 1..21: mol_type = other RNA
tcatgggttgatttttaatga

SEQ ID NO: 99384 - RNA, 21 nt, synthetic construct
  source 1..21: mol_type = other RNA
tcatggtatcaattgtaatgt

SEQ ID NO: 99385 - RNA, 21 nt, synthetic construct
  source 1..21: mol_type = other RNA
tcatggtgggccttgcaagcc

SEQ ID NO: 99386 - RNA, 21 nt, synthetic construct
  source 1..21: mol_type = other RNA
tcatggtgtgtctgcgcctta

SEQ ID NO: 99387 - RNA, 21 nt, synthetic construct
  source 1..21: mol_type = other RNA
tcatggttttaatgggcatta

SEQ ID NO: 99388 - RNA, 21 nt, synthetic construct
  source 1..21: mol_type = other RNA
tcatgtaatgcaaactctaaa

SEQ ID NO: 99389 - RNA, 21 nt, synthetic construct
  source 1..21: mol_type = other RNA
tcatgtacaatgaattagcaa

SEQ ID NO: 99390 - RNA, 21 nt, synthetic construct
  source 1..21: mol_type = other RNA
tcatgtatatgctgtttttga

SEQ ID NO: 99391 - RNA, 21 nt, synthetic construct
  source 1..21: mol_type = other RNA
tcatgtatgttttagccttaa

SEQ ID NO: 99392 - RNA, 21 nt, synthetic construct
  source 1..21: mol_type = other RNA
tcatgtattttcctaaccact

SEQ ID NO: 99393 - RNA, 21 nt, synthetic construct
  source 1..21: mol_type = other RNA
tcatgtcaagaatgaagtcag

SEQ ID NO: 99394 - RNA, 21 nt, synthetic construct
  source 1..21: mol_type = other RNA
tcatgtcagagacacatactg

SEQ ID NO: 99395 - RNA, 21 nt, synthetic construct
  source 1..21: mol_type = other RNA
tcatgtccatagttaatgtgt

SEQ ID NO: 99396 - RNA, 21 nt, synthetic construct
  source 1..21: mol_type = other RNA
tcatgtcccctgtccaagtat

SEQ ID NO: 99397 - RNA, 21 nt, synthetic construct
  source 1..21: mol_type = other RNA
tcatgtctacctgtctttccc

SEQ ID NO: 99398 - RNA, 21 nt, synthetic construct
  source 1..21: mol_type = other RNA
tcatgtctgtgtagttcatca

SEQ ID NO: 99399 - RNA, 21 nt, synthetic construct
  source 1..21: mol_type = other RNA
tcatgtcttcttggattttct

SEQ ID NO: 99400 - RNA, 21 nt, synthetic construct
  source 1..21: mol_type = other RNA
tcatgtggggactttgtggcc

SEQ ID NO: 99401 - RNA, 21 nt, synthetic construct
  source 1..21: mol_type = other RNA
tcatgtgtgcttacacacacg

SEQ ID NO: 99402 - RNA, 21 nt, synthetic construct
  source 1..21: mol_type = other RNA
tcatgttagcataattcgaaa

SEQ ID NO: 99403 - RNA, 21 nt, synthetic construct
  source 1..21: mol_type = other RNA
tcatgttcaaggtgttcctga

SEQ ID NO: 99404 - RNA, 21 nt, synthetic construct
  source 1..21: mol_type = other RNA
tcatgttcccggattggaaaa

SEQ ID NO: 99405 - RNA, 21 nt, synthetic construct
  source 1..21: mol_type = other RNA
tcatgttctttatagcatttg

SEQ ID NO: 99406 - RNA, 21 nt, synthetic construct
  source 1..21: mol_type = other RNA
tcatgttgggtaaaaataatc

SEQ ID NO: 99407 - RNA, 21 nt, synthetic construct
  source 1..21: mol_type = other RNA
tcatgtttacagaaatatacc

SEQ ID NO: 99408 - RNA, 21 nt, synthetic construct
  source 1..21: mol_type = other RNA
tcatgtttgaattttccattc

SEQ ID NO: 99409 - RNA, 21 nt, synthetic construct
  source 1..21: mol_type = other RNA
tcatgtttgtggttttaacct

SEQ ID NO: 99410 - RNA, 21 nt, synthetic construct
  source 1..21: mol_type = other RNA
tcattaaaaatcaacccatga

SEQ ID NO: 99411 - RNA, 21 nt, synthetic construct
  source 1..21: mol_type = other RNA
tcattacagtctcgaccccct

SEQ ID NO: 99412 - RNA, 21 nt, synthetic construct
  source 1..21: mol_type = other RNA
tcattacatttgcttaggctg

SEQ ID NO: 99413 - RNA, 21 nt, synthetic construct
  source 1..21: mol_type = other RNA
tcattaccaggctggaagaat

SEQ ID NO: 99414 - RNA, 21 nt, synthetic construct
  source 1..21: mol_type = other RNA
tcattaccttatagatgacga

SEQ ID NO: 99415 - RNA, 21 nt, synthetic construct
  source 1..21: mol_type = other RNA
tcattacttttttgtagagac

SEQ ID NO: 99416 - RNA, 21 nt, synthetic construct
  source 1..21: mol_type = other RNA
tcattagaattcaggacagtc

SEQ ID NO: 99417 - RNA, 21 nt, synthetic construct
  source 1..21: mol_type = other RNA
tcattaggttgatggctgtac

SEQ ID NO: 99418 - RNA, 21 nt, synthetic construct
  source 1..21: mol_type = other RNA
tcattagttatctcttagacc

SEQ ID NO: 99419 - RNA, 21 nt, synthetic construct
  source 1..21: mol_type = other RNA
tcattatcccagacagatata

SEQ ID NO: 99420 - RNA, 21 nt, synthetic construct
  source 1..21: mol_type = other RNA
tcattatggttgttggctaaa

SEQ ID NO: 99421 - RNA, 21 nt, synthetic construct
  source 1..21: mol_type = other RNA
tcattcaaatgatattcactg

SEQ ID NO: 99422 - RNA, 21 nt, synthetic construct
  source 1..21: mol_type = other RNA
tcattcacactagtcacccta

SEQ ID NO: 99423 - RNA, 21 nt, synthetic construct
  source 1..21: mol_type = other RNA
tcattcactagacacattttt

SEQ ID NO: 99424 - RNA, 21 nt, synthetic construct
  source 1..21: mol_type = other RNA
tcattcaggacactggaggtg

SEQ ID NO: 99425 - RNA, 21 nt, synthetic construct
  source 1..21: mol_type = other RNA
tcattcaggtctatgtgacag

SEQ ID NO: 99426 - RNA, 21 nt, synthetic construct
  source 1..21: mol_type = other RNA
tcattcataaacacagaacac

SEQ ID NO: 99427 - RNA, 21 nt, synthetic construct
  source 1..21: mol_type = other RNA
tcattcatatttgttcaagcg

SEQ ID NO: 99428 - RNA, 21 nt, synthetic construct
  source 1..21: mol_type = other RNA
tcattcatctaaacgtttggt

SEQ ID NO: 99429 - RNA, 21 nt, synthetic construct
  source 1..21: mol_type = other RNA
tcattcatctgcagtgtccat

SEQ ID NO: 99430 - RNA, 21 nt, synthetic construct
  source 1..21: mol_type = other RNA
tcattcatctgttaatgggca

SEQ ID NO: 99431 - RNA, 21 nt, synthetic construct
  source 1..21: mol_type = other RNA
tcattcatgacaagaatcttt

SEQ ID NO: 99432 - RNA, 21 nt, synthetic construct
  source 1..21: mol_type = other RNA
tcattccaatccttccttcat

SEQ ID NO: 99433 - RNA, 21 nt, synthetic construct
  source 1..21: mol_type = other RNA
tcattccgcgtttattagaac

SEQ ID NO: 99434 - RNA, 21 nt, synthetic construct
  source 1..21: mol_type = other RNA
tcattccgctaaacattttat

SEQ ID NO: 99435 - RNA, 21 nt, synthetic construct
  source 1..21: mol_type = other RNA
tcattcgtagcaggtttagga

SEQ ID NO: 99436 - RNA, 21 nt, synthetic construct
  source 1..21: mol_type = other RNA
tcattcgttcaaaacatcatc

SEQ ID NO: 99437 - RNA, 21 nt, synthetic construct
  source 1..21: mol_type = other RNA
tcattctacctggagcctgag

SEQ ID NO: 99438 - RNA, 21 nt, synthetic construct
  source 1..21: mol_type = other RNA
tcattctgcagtttgtgtttt

SEQ ID NO: 99439 - RNA, 21 nt, synthetic construct
  source 1..21: mol_type = other RNA
tcattctggagtgttttcttc

SEQ ID NO: 99440 - RNA, 21 nt, synthetic construct
  source 1..21: mol_type = other RNA
tcattcttattgattcagatg

SEQ ID NO: 99441 - RNA, 21 nt, synthetic construct
  source 1..21: mol_type = other RNA
tcattcttctaataggaagtg

SEQ ID NO: 99442 - RNA, 21 nt, synthetic construct
  source 1..21: mol_type = other RNA
tcattcttctctaatgtaaac

SEQ ID NO: 99443 - RNA, 21 nt, synthetic construct
  source 1..21: mol_type = other RNA
tcattcttgacatgattgagg

SEQ ID NO: 99444 - RNA, 21 nt, synthetic construct
  source 1..21: mol_type = other RNA
tcattctttttactcgagggt

SEQ ID NO: 99445 - RNA, 21 nt, synthetic construct
  source 1..21: mol_type = other RNA
tcattgaaactcaatgttggt

SEQ ID NO: 99446 - RNA, 21 nt, synthetic construct
  source 1..21: mol_type = other RNA
tcattgaagctactattccag

SEQ ID NO: 99447 - RNA, 21 nt, synthetic construct
  source 1..21: mol_type = other RNA
tcattgcaccactgcactcca

SEQ ID NO: 99448 - RNA, 21 nt, synthetic construct
  source 1..21: mol_type = other RNA
tcattgcctatagacagcatc

SEQ ID NO: 99449 - RNA, 21 nt, synthetic construct
  source 1..21: mol_type = other RNA
tcattgtacatgaagtcctca

SEQ ID NO: 99450 - RNA, 21 nt, synthetic construct
  source 1..21: mol_type = other RNA
tcattgtagctatatcccaaa

SEQ ID NO: 99451 - RNA, 21 nt, synthetic construct
  source 1..21: mol_type = other RNA
tcattgtggatgagattaatg

SEQ ID NO: 99452 - RNA, 21 nt, synthetic construct
  source 1..21: mol_type = other RNA
tcattgtgttgcccacgctgg

SEQ ID NO: 99453 - RNA, 21 nt, synthetic construct
  source 1..21: mol_type = other RNA
tcattgttaggtgctggcttc

SEQ ID NO: 99454 - RNA, 21 nt, synthetic construct
  source 1..21: mol_type = other RNA
tcattgttcagggaaggctgc

SEQ ID NO: 99455 - RNA, 21 nt, synthetic construct
  source 1..21: mol_type = other RNA
tcatttaaacgtcagagcagc

SEQ ID NO: 99456 - RNA, 21 nt, synthetic construct
  source 1..21: mol_type = other RNA
tcatttacaaaaacacactga

SEQ ID NO: 99457 - RNA, 21 nt, synthetic construct
  source 1..21: mol_type = other RNA
tcatttactgaaatcctagcc

SEQ ID NO: 99458 - RNA, 21 nt, synthetic construct
  source 1..21: mol_type = other RNA
tcatttagtaagtgtgagcaa

SEQ ID NO: 99459 - RNA, 21 nt, synthetic construct
  source 1..21: mol_type = other RNA
tcatttatacccaagtaaaca

SEQ ID NO: 99460 - RNA, 21 nt, synthetic construct
  source 1..21: mol_type = other RNA
tcatttattaaagtagaaggc

SEQ ID NO: 99461 - RNA, 21 nt, synthetic construct
  source 1..21: mol_type = other RNA
tcatttcaaaccaatgttctc

SEQ ID NO: 99462 - RNA, 21 nt, synthetic construct
  source 1..21: mol_type = other RNA
tcatttcactcttttaaggtt

SEQ ID NO: 99463 - RNA, 21 nt, synthetic construct
  source 1..21: mol_type = other RNA
tcatttcaggaatgcaaagtt

SEQ ID NO: 99464 - RNA, 21 nt, synthetic construct
  source 1..21: mol_type = other RNA
tcatttccaaagatcatgggt

SEQ ID NO: 99465 - RNA, 21 nt, synthetic construct
  source 1..21: mol_type = other RNA
tcatttccaagattgaaaatg

SEQ ID NO: 99466 - RNA, 21 nt, synthetic construct
  source 1..21: mol_type = other RNA
tcatttccgttgctgcatagt

SEQ ID NO: 99467 - RNA, 21 nt, synthetic construct
  source 1..21: mol_type = other RNA
tcatttcctttcagtcggttc

SEQ ID NO: 99468 - RNA, 21 nt, synthetic construct
  source 1..21: mol_type = other RNA
tcatttctaagccatgtttct

SEQ ID NO: 99469 - RNA, 21 nt, synthetic construct
  source 1..21: mol_type = other RNA
tcatttctgcttagtcttctc

SEQ ID NO: 99470 - RNA, 21 nt, synthetic construct
  source 1..21: mol_type = other RNA
tcatttctgcttgaatgtgcc

SEQ ID NO: 99471 - RNA, 21 nt, synthetic construct
  source 1..21: mol_type = other RNA
tcatttgaactttccagaagt

SEQ ID NO: 99472 - RNA, 21 nt, synthetic construct
  source 1..21: mol_type = other RNA
tcatttgaatgatgcgaaaga

SEQ ID NO: 99473 - RNA, 21 nt, synthetic construct
  source 1..21: mol_type = other RNA
tcatttgagaatttcaggtgt

SEQ ID NO: 99474 - RNA, 21 nt, synthetic construct
  source 1..21: mol_type = other RNA
tcatttgagcccaggaggttg

SEQ ID NO: 99475 - RNA, 21 nt, synthetic construct
  source 1..21: mol_type = other RNA
tcatttgcagagcaaactcag

SEQ ID NO: 99476 - RNA, 21 nt, synthetic construct
  source 1..21: mol_type = other RNA
tcatttggcctctgcggcggc

SEQ ID NO: 99477 - RNA, 21 nt, synthetic construct
  source 1..21: mol_type = other RNA
tcatttgtaattcatcctact

SEQ ID NO: 99478 - RNA, 21 nt, synthetic construct
  source 1..21: mol_type = other RNA
tcattttaaagggataatgct

SEQ ID NO: 99479 - RNA, 21 nt, synthetic construct
  source 1..21: mol_type = other RNA
tcattttaataagcttcgaag

SEQ ID NO: 99480 - RNA, 21 nt, synthetic construct
  source 1..21: mol_type = other RNA
tcattttactgctatacaacc

SEQ ID NO: 99481 - RNA, 21 nt, synthetic construct
  source 1..21: mol_type = other RNA
tcattttggcaaattgtcaga

SEQ ID NO: 99482 - RNA, 21 nt, synthetic construct
  source 1..21: mol_type = other RNA
tcatttttcacttcttattgg

SEQ ID NO: 99483 - RNA, 21 nt, synthetic construct
  source 1..21: mol_type = other RNA
tcatttttcaggggggccact

SEQ ID NO: 99484 - RNA, 21 nt, synthetic construct
  source 1..21: mol_type = other RNA
tcatttttgtattctgaccta

SEQ ID NO: 99485 - RNA, 21 nt, synthetic construct
  source 1..21: mol_type = other RNA
tccaaaagcaggccctgagaa

SEQ ID NO: 99486 - RNA, 21 nt, synthetic construct
  source 1..21: mol_type = other RNA
tccaaaagcctcaaaatttag

SEQ ID NO: 99487 - RNA, 21 nt, synthetic construct
  source 1..21: mol_type = other RNA
tccaaaagcgaaaggcaaaaa

SEQ ID NO: 99488 - RNA, 21 nt, synthetic construct
  source 1..21: mol_type = other RNA
tccaaaagggaaatatgaacc

SEQ ID NO: 99489 - RNA, 21 nt, synthetic construct
  source 1..21: mol_type = other RNA
tccaaaagtgaatatagctaa

SEQ ID NO: 99490 - RNA, 21 nt, synthetic construct
  source 1..21: mol_type = other RNA
tccaaaatattgaagagggaa

SEQ ID NO: 99491 - RNA, 21 nt, synthetic construct
  source 1..21: mol_type = other RNA
tccaaaatcctctgtagataa

SEQ ID NO: 99492 - RNA, 21 nt, synthetic construct
  source 1..21: mol_type = other RNA
tccaaacagaaaccctgtacc

SEQ ID NO: 99493 - RNA, 21 nt, synthetic construct
  source 1..21: mol_type = other RNA
tccaaacagtgaccacagttt

SEQ ID NO: 99494 - RNA, 21 nt, synthetic construct
  source 1..21: mol_type = other RNA
tccaaacctttaagttctcca

SEQ ID NO: 99495 - RNA, 21 nt, synthetic construct
  source 1..21: mol_type = other RNA
tccaaacttctgaccttgtga

SEQ ID NO: 99496 - RNA, 21 nt, synthetic construct
  source 1..21: mol_type = other RNA
tccaaagaacaggagttacca

SEQ ID NO: 99497 - RNA, 21 nt, synthetic construct
  source 1..21: mol_type = other RNA
tccaaagataaaggtaaggaa

SEQ ID NO: 99498 - RNA, 21 nt, synthetic construct
  source 1..21: mol_type = other RNA
tccaaagatataaaaatggtc

SEQ ID NO: 99499 - RNA, 21 nt, synthetic construct
  source 1..21: mol_type = other RNA
tccaaagatcatgggttttaa

SEQ ID NO: 99500 - RNA, 21 nt, synthetic construct
  source 1..21: mol_type = other RNA
tccaaagcaaaccagacattt

SEQ ID NO: 99501 - RNA, 21 nt, synthetic construct
  source 1..21: mol_type = other RNA
tccaaagcaaacgtgcacacc

SEQ ID NO: 99502 - RNA, 21 nt, synthetic construct
  source 1..21: mol_type = other RNA
tccaaagtatgcatagcaggg

SEQ ID NO: 99503 - RNA, 21 nt, synthetic construct
  source 1..21: mol_type = other RNA
tccaaataatcccgcaccttg

SEQ ID NO: 99504 - RNA, 21 nt, synthetic construct
  source 1..21: mol_type = other RNA
tccaaatgtctgtctttatgc

SEQ ID NO: 99505 - RNA, 21 nt, synthetic construct
  source 1..21: mol_type = other RNA
tccaaattagctttctcccag

SEQ ID NO: 99506 - RNA, 21 nt, synthetic construct
  source 1..21: mol_type = other RNA
tccaaattattgacaagacgt

SEQ ID NO: 99507 - RNA, 21 nt, synthetic construct
  source 1..21: mol_type = other RNA
tccaaattcaaagcaagttaa

SEQ ID NO: 99508 - RNA, 21 nt, synthetic construct
  source 1..21: mol_type = other RNA
tccaaattcacagcatgaata

SEQ ID NO: 99509 - RNA, 21 nt, synthetic construct
  source 1..21: mol_type = other RNA
tccaacaagggttggtgcttc

SEQ ID NO: 99510 - RNA, 21 nt, synthetic construct
  source 1..21: mol_type = other RNA
tccaacaattcaacaatagca

SEQ ID NO: 99511 - RNA, 21 nt, synthetic construct
  source 1..21: mol_type = other RNA
tccaacagaagaagtttctag

SEQ ID NO: 99512 - RNA, 21 nt, synthetic construct
  source 1..21: mol_type = other RNA
tccaacagtttacacgccttc

SEQ ID NO: 99513 - RNA, 21 nt, synthetic construct
  source 1..21: mol_type = other RNA
tccaacatgccagctttggct

SEQ ID NO: 99514 - RNA, 21 nt, synthetic construct
  source 1..21: mol_type = other RNA
tccaacatggcaaaaccccgt

SEQ ID NO: 99515 - RNA, 21 nt, synthetic construct
  source 1..21: mol_type = other RNA
tccaaccaagcccaacttttt

SEQ ID NO: 99516 - RNA, 21 nt, synthetic construct
  source 1..21: mol_type = other RNA
tccaaccaatcgcagggccat

SEQ ID NO: 99517 - RNA, 21 nt, synthetic construct
  source 1..21: mol_type = other RNA
tccaaccactgaatcagattt

SEQ ID NO: 99518 - RNA, 21 nt, synthetic construct
  source 1..21: mol_type = other RNA
tccaaccatcttcttagtgtt

SEQ ID NO: 99519 - RNA, 21 nt, synthetic construct
  source 1..21: mol_type = other RNA
tccaacccattccaggtttta

SEQ ID NO: 99520 - RNA, 21 nt, synthetic construct
  source 1..21: mol_type = other RNA
tccaacgaccggacgtggtgg

SEQ ID NO: 99521 - RNA, 21 nt, synthetic construct
  source 1..21: mol_type = other RNA
tccaacgctttttatggaaac

SEQ ID NO: 99522 - RNA, 21 nt, synthetic construct
  source 1..21: mol_type = other RNA
tccaactcaaaaaagaaaaac

SEQ ID NO: 99523 - RNA, 21 nt, synthetic construct
  source 1..21: mol_type = other RNA
tccaactgcagtctgtcctcg

SEQ ID NO: 99524 - RNA, 21 nt, synthetic construct
  source 1..21: mol_type = other RNA
tccaactgtataaatgttcag

SEQ ID NO: 99525 - RNA, 21 nt, synthetic construct
  source 1..21: mol_type = other RNA
tccaagaaccctttgttatct

SEQ ID NO: 99526 - RNA, 21 nt, synthetic construct
  source 1..21: mol_type = other RNA
tccaagaagacatgataaata

SEQ ID NO: 99527 - RNA, 21 nt, synthetic construct
  source 1..21: mol_type = other RNA
tccaagaaggctagcacagag

SEQ ID NO: 99528 - RNA, 21 nt, synthetic construct
  source 1..21: mol_type = other RNA
tccaagacaggaagaattatt

SEQ ID NO: 99529 - RNA, 21 nt, synthetic construct
  source 1..21: mol_type = other RNA
tccaagagaggaataaatggt

SEQ ID NO: 99530 - RNA, 21 nt, synthetic construct
  source 1..21: mol_type = other RNA
tccaagattgaaaatggttta

SEQ ID NO: 99531 - RNA, 21 nt, synthetic construct
  source 1..21: mol_type = other RNA
tccaagattttcccaatctct

SEQ ID NO: 99532 - RNA, 21 nt, synthetic construct
  source 1..21: mol_type = other RNA
tccaagcacaaacctggcaat

SEQ ID NO: 99533 - RNA, 21 nt, synthetic construct
  source 1..21: mol_type = other RNA
tccaagcacacagtttgagaa

SEQ ID NO: 99534 - RNA, 21 nt, synthetic construct
  source 1..21: mol_type = other RNA
tccaagccttaaaagtgctgc

SEQ ID NO: 99535 - RNA, 21 nt, synthetic construct
  source 1..21: mol_type = other RNA
tccaaggaaagtgtgcttggg

SEQ ID NO: 99536 - RNA, 21 nt, synthetic construct
  source 1..21: mol_type = other RNA
tccaaggacagaaattcaact

SEQ ID NO: 99537 - RNA, 21 nt, synthetic construct
  source 1..21: mol_type = other RNA
tccaaggctgcccgctccggc

SEQ ID NO: 99538 - RNA, 21 nt, synthetic construct
  source 1..21: mol_type = other RNA
tccaaggtacaattacacatc

SEQ ID NO: 99539 - RNA, 21 nt, synthetic construct
  source 1..21: mol_type = other RNA
tccaagtattgtatcaatgtt

SEQ ID NO: 99540 - RNA, 21 nt, synthetic construct
  source 1..21: mol_type = other RNA
tccaagtatttctcatctgtc

SEQ ID NO: 99541 - RNA, 21 nt, synthetic construct
  source 1..21: mol_type = other RNA
tccaagtcccggaagctgggc

SEQ ID NO: 99542 - RNA, 21 nt, synthetic construct
  source 1..21: mol_type = other RNA
tccaagtctcatgcaattccc

SEQ ID NO: 99543 - RNA, 21 nt, synthetic construct
  source 1..21: mol_type = other RNA
tccaagtgtaaaaagacatta

SEQ ID NO: 99544 - RNA, 21 nt, synthetic construct
  source 1..21: mol_type = other RNA
tccaagtttctagccataatc

SEQ ID NO: 99545 - RNA, 21 nt, synthetic construct
  source 1..21: mol_type = other RNA
tccaataagttaactgaaatc

SEQ ID NO: 99546 - RNA, 21 nt, synthetic construct
  source 1..21: mol_type = other RNA
tccaatcactggctagtaggc

SEQ ID NO: 99547 - RNA, 21 nt, synthetic construct
  source 1..21: mol_type = other RNA
tccaatccgggaacatgacat

SEQ ID NO: 99548 - RNA, 21 nt, synthetic construct
  source 1..21: mol_type = other RNA
tccaatcctcagccccctccc

SEQ ID NO: 99549 - RNA, 21 nt, synthetic construct
  source 1..21: mol_type = other RNA
tccaatccttccttcatgtcc

SEQ ID NO: 99550 - RNA, 21 nt, synthetic construct
  source 1..21: mol_type = other RNA
tccaattgcagaaaaatagaa

SEQ ID NO: 99551 - RNA, 21 nt, synthetic construct
  source 1..21: mol_type = other RNA
tccaatttctttggctgttag

SEQ ID NO: 99552 - RNA, 21 nt, synthetic construct
  source 1..21: mol_type = other RNA
tccaattttttggcatacaac

SEQ ID NO: 99553 - RNA, 21 nt, synthetic construct
  source 1..21: mol_type = other RNA
tccacaacattgtgcaaccat

SEQ ID NO: 99554 - RNA, 21 nt, synthetic construct
  source 1..21: mol_type = other RNA
tccacaaccactggggagtgt

SEQ ID NO: 99555 - RNA, 21 nt, synthetic construct
  source 1..21: mol_type = other RNA
tccacaatgagacatttgagg

SEQ ID NO: 99556 - RNA, 21 nt, synthetic construct
  source 1..21: mol_type = other RNA
tccacacaatggtcagagttg

SEQ ID NO: 99557 - RNA, 21 nt, synthetic construct
  source 1..21: mol_type = other RNA
tccacacacgaagtagttttt

SEQ ID NO: 99558 - RNA, 21 nt, synthetic construct
  source 1..21: mol_type = other RNA
tccacacctggcccctttcaa

SEQ ID NO: 99559 - RNA, 21 nt, synthetic construct
  source 1..21: mol_type = other RNA
tccacagaggctttttatatt

SEQ ID NO: 99560 - RNA, 21 nt, synthetic construct
  source 1..21: mol_type = other RNA
tccacagagttcagcttacag

SEQ ID NO: 99561 - RNA, 21 nt, synthetic construct
  source 1..21: mol_type = other RNA
tccacagatctttttgtgtat

SEQ ID NO: 99562 - RNA, 21 nt, synthetic construct
  source 1..21: mol_type = other RNA
tccacagctatcaggccttcc

SEQ ID NO: 99563 - RNA, 21 nt, synthetic construct
  source 1..21: mol_type = other RNA
tccacagctttcttttccaac

SEQ ID NO: 99564 - RNA, 21 nt, synthetic construct
  source 1..21: mol_type = other RNA
tccacaggctttgacttctca

SEQ ID NO: 99565 - RNA, 21 nt, synthetic construct
  source 1..21: mol_type = other RNA
tccacagtatgctgtttacat

SEQ ID NO: 99566 - RNA, 21 nt, synthetic construct
  source 1..21: mol_type = other RNA
tccacagtgactttactgttc

SEQ ID NO: 99567 - RNA, 21 nt, synthetic construct
  source 1..21: mol_type = other RNA
tccacataaagtcttgctgga

SEQ ID NO: 99568 - RNA, 21 nt, synthetic construct
  source 1..21: mol_type = other RNA
tccacataattgaacccactg

SEQ ID NO: 99569 - RNA, 21 nt, synthetic construct
  source 1..21: mol_type = other RNA
tccacatattttaaaagtcag

SEQ ID NO: 99570 - RNA, 21 nt, synthetic construct
  source 1..21: mol_type = other RNA
tccacatccttgccaacagtt

SEQ ID NO: 99571 - RNA, 21 nt, synthetic construct
  source 1..21: mol_type = other RNA
tccacatgttactcattatgg

SEQ ID NO: 99572 - RNA, 21 nt, synthetic construct
  source 1..21: mol_type = other RNA
tccacatttctaatttccaag

SEQ ID NO: 99573 - RNA, 21 nt, synthetic construct
  source 1..21: mol_type = other RNA
tccacatttctacacaacatg

SEQ ID NO: 99574 - RNA, 21 nt, synthetic construct
  source 1..21: mol_type = other RNA
tccacatttggttttactact

SEQ ID NO: 99575 - RNA, 21 nt, synthetic construct
  source 1..21: mol_type = other RNA
tccacattttgtgacaagttc

SEQ ID NO: 99576 - RNA, 21 nt, synthetic construct
  source 1..21: mol_type = other RNA
tccaccactccaccttagccc

SEQ ID NO: 99577 - RNA, 21 nt, synthetic construct
  source 1..21: mol_type = other RNA
tccaccagacaaaaatagagg

SEQ ID NO: 99578 - RNA, 21 nt, synthetic construct
  source 1..21: mol_type = other RNA
tccaccagcatcttttgacgc

SEQ ID NO: 99579 - RNA, 21 nt, synthetic construct
  source 1..21: mol_type = other RNA
tccacccaagtggagcctgct

SEQ ID NO: 99580 - RNA, 21 nt, synthetic construct
  source 1..21: mol_type = other RNA
tccacccacttgtcccatggt

SEQ ID NO: 99581 - RNA, 21 nt, synthetic construct
  source 1..21: mol_type = other RNA
tccacccatgaagccagcatt

SEQ ID NO: 99582 - RNA, 21 nt, synthetic construct
  source 1..21: mol_type = other RNA
tccaccctgccccttatcctc

SEQ ID NO: 99583 - RNA, 21 nt, synthetic construct
  source 1..21: mol_type = other RNA
tccacctcagaaacaaacaaa

SEQ ID NO: 99584 - RNA, 21 nt, synthetic construct
  source 1..21: mol_type = other RNA
tccacctccatcactgactgg

SEQ ID NO: 99585 - RNA, 21 nt, synthetic construct
  source 1..21: mol_type = other RNA
tccacctgctctttatctcca

SEQ ID NO: 99586 - RNA, 21 nt, synthetic construct
  source 1..21: mol_type = other RNA
tccacctggcaacaaaggcga

SEQ ID NO: 99587 - RNA, 21 nt, synthetic construct
  source 1..21: mol_type = other RNA
tccaccttagcccaagctacc

SEQ ID NO: 99588 - RNA, 21 nt, synthetic construct
  source 1..21: mol_type = other RNA
tccacgcccattaggatagct

SEQ ID NO: 99589 - RNA, 21 nt, synthetic construct
  source 1..21: mol_type = other RNA
tccacgcgtaagggtacagaa

SEQ ID NO: 99590 - RNA, 21 nt, synthetic construct
  source 1..21: mol_type = other RNA
tccacgctgtggcttgggtga

SEQ ID NO: 99591 - RNA, 21 nt, synthetic construct
  source 1..21: mol_type = other RNA
tccacggaatgcccctttgag

SEQ ID NO: 99592 - RNA, 21 nt, synthetic construct
  source 1..21: mol_type = other RNA
tccacgggtaaaaataaatct

SEQ ID NO: 99593 - RNA, 21 nt, synthetic construct
  source 1..21: mol_type = other RNA
tccacgtgggtgacagagcaa

SEQ ID NO: 99594 - RNA, 21 nt, synthetic construct
  source 1..21: mol_type = other RNA
tccactaatgtccttttcctg

SEQ ID NO: 99595 - RNA, 21 nt, synthetic construct
  source 1..21: mol_type = other RNA
tccactaggggactaacaggg

SEQ ID NO: 99596 - RNA, 21 nt, synthetic construct
  source 1..21: mol_type = other RNA
tccactagtgggatcaaacca

SEQ ID NO: 99597 - RNA, 21 nt, synthetic construct
  source 1..21: mol_type = other RNA
tccactcacctgtcatgtcaa

SEQ ID NO: 99598 - RNA, 21 nt, synthetic construct
  source 1..21: mol_type = other RNA
tccactccagcctgagcaaca

SEQ ID NO: 99599 - RNA, 21 nt, synthetic construct
  source 1..21: mol_type = other RNA
tccactctctggctgcaattg

SEQ ID NO: 99600 - RNA, 21 nt, synthetic construct
  source 1..21: mol_type = other RNA
tccactgcacagtatgcgggg

SEQ ID NO: 99601 - RNA, 21 nt, synthetic construct
  source 1..21: mol_type = other RNA
tccactgtcagtgggactgga

SEQ ID NO: 99602 - RNA, 21 nt, synthetic construct
  source 1..21: mol_type = other RNA
tccacttatatgaagctaaaa

SEQ ID NO: 99603 - RNA, 21 nt, synthetic construct
  source 1..21: mol_type = other RNA
tccacttcccactgctatgac

SEQ ID NO: 99604 - RNA, 21 nt, synthetic construct
  source 1..21: mol_type = other RNA
tccacttgggtggaagctgtc

SEQ ID NO: 99605 - RNA, 21 nt, synthetic construct
  source 1..21: mol_type = other RNA
tccactttcatgatttggtgt

SEQ ID NO: 99606 - RNA, 21 nt, synthetic construct
  source 1..21: mol_type = other RNA
tccactttccatcttaggcca

SEQ ID NO: 99607 - RNA, 21 nt, synthetic construct
  source 1..21: mol_type = other RNA
tccactttgaggttattaaga

SEQ ID NO: 99608 - RNA, 21 nt, synthetic construct
  source 1..21: mol_type = other RNA
tccagaaaaccagaaaagtga

SEQ ID NO: 99609 - RNA, 21 nt, synthetic construct
  source 1..21: mol_type = other RNA
tccagaaaactggcaatcaaa

SEQ ID NO: 99610 - RNA, 21 nt, synthetic construct
  source 1..21: mol_type = other RNA
tccagaaacttccaaccatct

SEQ ID NO: 99611 - RNA, 21 nt, synthetic construct
  source 1..21: mol_type = other RNA
tccagaagagaatggctggaa

SEQ ID NO: 99612 - RNA, 21 nt, synthetic construct
  source 1..21: mol_type = other RNA
tccagaaggagaaaacaaaaa

SEQ ID NO: 99613 - RNA, 21 nt, synthetic construct
  source 1..21: mol_type = other RNA
tccagaagtaactcttgagtt

SEQ ID NO: 99614 - RNA, 21 nt, synthetic construct
  source 1..21: mol_type = other RNA
tccagaagtcactttttattc

SEQ ID NO: 99615 - RNA, 21 nt, synthetic construct
  source 1..21: mol_type = other RNA
tccagaatgaccgagatactt

SEQ ID NO: 99616 - RNA, 21 nt, synthetic construct
  source 1..21: mol_type = other RNA
tccagacaaaaattttcattc

SEQ ID NO: 99617 - RNA, 21 nt, synthetic construct
  source 1..21: mol_type = other RNA
tccagacagctaatatgctgt

SEQ ID NO: 99618 - RNA, 21 nt, synthetic construct
  source 1..21: mol_type = other RNA
tccagaccagcagttcaagca

SEQ ID NO: 99619 - RNA, 21 nt, synthetic construct
  source 1..21: mol_type = other RNA
tccagactgggcaacagagac

SEQ ID NO: 99620 - RNA, 21 nt, synthetic construct
  source 1..21: mol_type = other RNA
tccagagaagttttccaggaa

SEQ ID NO: 99621 - RNA, 21 nt, synthetic construct
  source 1..21: mol_type = other RNA
tccagagaattcagagtggct

SEQ ID NO: 99622 - RNA, 21 nt, synthetic construct
  source 1..21: mol_type = other RNA
tccagagacaaagcataaaat

SEQ ID NO: 99623 - RNA, 21 nt, synthetic construct
  source 1..21: mol_type = other RNA
tccagaggaggaagagatagt

SEQ ID NO: 99624 - RNA, 21 nt, synthetic construct
  source 1..21: mol_type = other RNA
tccagagggtaacgtgagctg

SEQ ID NO: 99625 - RNA, 21 nt, synthetic construct
  source 1..21: mol_type = other RNA
tccagaggtgagctttttctt

SEQ ID NO: 99626 - RNA, 21 nt, synthetic construct
  source 1..21: mol_type = other RNA
tccagaggttcttttaaatgc

SEQ ID NO: 99627 - RNA, 21 nt, synthetic construct
  source 1..21: mol_type = other RNA
tccagataaattatagctcca

SEQ ID NO: 99628 - RNA, 21 nt, synthetic construct
  source 1..21: mol_type = other RNA
tccagatattatcctccaatg

SEQ ID NO: 99629 - RNA, 21 nt, synthetic construct
  source 1..21: mol_type = other RNA
tccagatgaagcagggaaatg

SEQ ID NO: 99630 - RNA, 21 nt, synthetic construct
  source 1..21: mol_type = other RNA
tccagatggacaaattaccat

SEQ ID NO: 99631 - RNA, 21 nt, synthetic construct
  source 1..21: mol_type = other RNA
tccagatgtagagaaacagga

SEQ ID NO: 99632 - RNA, 21 nt, synthetic construct
  source 1..21: mol_type = other RNA
tccagatgttttacacatgtc

SEQ ID NO: 99633 - RNA, 21 nt, synthetic construct
  source 1..21: mol_type = other RNA
tccagattgaaatctaggcat

SEQ ID NO: 99634 - RNA, 21 nt, synthetic construct
  source 1..21: mol_type = other RNA
tccagattgatatctgagtgt

SEQ ID NO: 99635 - RNA, 21 nt, synthetic construct
  source 1..21: mol_type = other RNA
tccagcaagactttatgtgga

SEQ ID NO: 99636 - RNA, 21 nt, synthetic construct
  source 1..21: mol_type = other RNA
tccagcaccacccttgatgtc

SEQ ID NO: 99637 - RNA, 21 nt, synthetic construct
  source 1..21: mol_type = other RNA
tccagcagggtaaagtcaatt

SEQ ID NO: 99638 - RNA, 21 nt, synthetic construct
  source 1..21: mol_type = other RNA
tccagcagtttcacttcttag

SEQ ID NO: 99639 - RNA, 21 nt, synthetic construct
  source 1..21: mol_type = other RNA
tccagcatccctccagtccag

SEQ ID NO: 99640 - RNA, 21 nt, synthetic construct
  source 1..21: mol_type = other RNA
tccagcattttataggcattc

SEQ ID NO: 99641 - RNA, 21 nt, synthetic construct
  source 1..21: mol_type = other RNA
tccagccattctcttctggat

SEQ ID NO: 99642 - RNA, 21 nt, synthetic construct
  source 1..21: mol_type = other RNA
tccagcccccagttttgttga

SEQ ID NO: 99643 - RNA, 21 nt, synthetic construct
  source 1..21: mol_type = other RNA
tccagcctggtaatgaataga

SEQ ID NO: 99644 - RNA, 21 nt, synthetic construct
  source 1..21: mol_type = other RNA
tccagcctggtcaacagggta

SEQ ID NO: 99645 - RNA, 21 nt, synthetic construct
  source 1..21: mol_type = other RNA
tccagccttaatctcctgagt

SEQ ID NO: 99646 - RNA, 21 nt, synthetic construct
  source 1..21: mol_type = other RNA
tccagccttggtaagagtgag

SEQ ID NO: 99647 - RNA, 21 nt, synthetic construct
  source 1..21: mol_type = other RNA
tccagcctttaatttagcgtt

SEQ ID NO: 99648 - RNA, 21 nt, synthetic construct
  source 1..21: mol_type = other RNA
tccagcgctaagcactgcgcc

SEQ ID NO: 99649 - RNA, 21 nt, synthetic construct
  source 1..21: mol_type = other RNA
tccagcgtgtgcatgaccctg

SEQ ID NO: 99650 - RNA, 21 nt, synthetic construct
  source 1..21: mol_type = other RNA
tccagctaattttcattactt

SEQ ID NO: 99651 - RNA, 21 nt, synthetic construct
  source 1..21: mol_type = other RNA
tccagctcacgttaccctctg

SEQ ID NO: 99652 - RNA, 21 nt, synthetic construct
  source 1..21: mol_type = other RNA
tccagcttcactcttctgcaa

SEQ ID NO: 99653 - RNA, 21 nt, synthetic construct
  source 1..21: mol_type = other RNA
tccagctttctaattctgaca

SEQ ID NO: 99654 - RNA, 21 nt, synthetic construct
  source 1..21: mol_type = other RNA
tccagcttttattagagcttt

SEQ ID NO: 99655 - RNA, 21 nt, synthetic construct
  source 1..21: mol_type = other RNA
tccaggaaaagcaaatgtcat

SEQ ID NO: 99656 - RNA, 21 nt, synthetic construct
  source 1..21: mol_type = other RNA
tccaggaacttacagtaagat

SEQ ID NO: 99657 - RNA, 21 nt, synthetic construct
  source 1..21: mol_type = other RNA
tccaggaccaatttaccatct

SEQ ID NO: 99658 - RNA, 21 nt, synthetic construct
  source 1..21: mol_type = other RNA
tccaggatcaaatctggctgc

SEQ ID NO: 99659 - RNA, 21 nt, synthetic construct
  source 1..21: mol_type = other RNA
tccaggatccagtctctaccc

SEQ ID NO: 99660 - RNA, 21 nt, synthetic construct
  source 1..21: mol_type = other RNA
tccaggatcttactgtaagtt

SEQ ID NO: 99661 - RNA, 21 nt, synthetic construct
  source 1..21: mol_type = other RNA
tccaggatggcatgaaatggg

SEQ ID NO: 99662 - RNA, 21 nt, synthetic construct
  source 1..21: mol_type = other RNA
tccaggcaaaagatgatgaac

SEQ ID NO: 99663 - RNA, 21 nt, synthetic construct
  source 1..21: mol_type = other RNA
tccaggccaacagggccactg

SEQ ID NO: 99664 - RNA, 21 nt, synthetic construct
  source 1..21: mol_type = other RNA
tccaggcctcgctcttggctt

SEQ ID NO: 99665 - RNA, 21 nt, synthetic construct
  source 1..21: mol_type = other RNA
tccaggcgcctgcattgcatt

SEQ ID NO: 99666 - RNA, 21 nt, synthetic construct
  source 1..21: mol_type = other RNA
tccagggaggaatccttcagt

SEQ ID NO: 99667 - RNA, 21 nt, synthetic construct
  source 1..21: mol_type = other RNA
tccaggggaatagaaagttag

SEQ ID NO: 99668 - RNA, 21 nt, synthetic construct
  source 1..21: mol_type = other RNA
tccaggggacatgctctgata

SEQ ID NO: 99669 - RNA, 21 nt, synthetic construct
  source 1..21: mol_type = other RNA
tccaggggggaaaaaaccata

SEQ ID NO: 99670 - RNA, 21 nt, synthetic construct
  source 1..21: mol_type = other RNA
tccagggggtatggagacact

SEQ ID NO: 99671 - RNA, 21 nt, synthetic construct
  source 1..21: mol_type = other RNA
tccaggtagaatgaaaatttt

SEQ ID NO: 99672 - RNA, 21 nt, synthetic construct
  source 1..21: mol_type = other RNA
tccaggtcattacatattttg

SEQ ID NO: 99673 - RNA, 21 nt, synthetic construct
  source 1..21: mol_type = other RNA
tccaggtgtatgatcttatta

SEQ ID NO: 99674 - RNA, 21 nt, synthetic construct
  source 1..21: mol_type = other RNA
tccaggttcatccatgttgtt

SEQ ID NO: 99675 - RNA, 21 nt, synthetic construct
  source 1..21: mol_type = other RNA
tccaggtttacaggatatcag

SEQ ID NO: 99676 - RNA, 21 nt, synthetic construct
  source 1..21: mol_type = other RNA
tccaggttttatctctctcaa

SEQ ID NO: 99677 - RNA, 21 nt, synthetic construct
  source 1..21: mol_type = other RNA
tccagtaatcttgctaaacat

SEQ ID NO: 99678 - RNA, 21 nt, synthetic construct
  source 1..21: mol_type = other RNA
tccagtacatctcaattcaga

SEQ ID NO: 99679 - RNA, 21 nt, synthetic construct
  source 1..21: mol_type = other RNA
tccagtactttttcatccaaa

SEQ ID NO: 99680 - RNA, 21 nt, synthetic construct
  source 1..21: mol_type = other RNA
tccagtatattcatagtagct

SEQ ID NO: 99681 - RNA, 21 nt, synthetic construct
  source 1..21: mol_type = other RNA
tccagtatgacctcctcccac

SEQ ID NO: 99682 - RNA, 21 nt, synthetic construct
  source 1..21: mol_type = other RNA
tccagtatgatgccactcaaa

SEQ ID NO: 99683 - RNA, 21 nt, synthetic construct
  source 1..21: mol_type = other RNA
tccagtccagcaccacccttg

SEQ ID NO: 99684 - RNA, 21 nt, synthetic construct
  source 1..21: mol_type = other RNA
tccagtcccactgacagtgga

SEQ ID NO: 99685 - RNA, 21 nt, synthetic construct
  source 1..21: mol_type = other RNA
tccagtcctgctaacaccttg

SEQ ID NO: 99686 - RNA, 21 nt, synthetic construct
  source 1..21: mol_type = other RNA
tccagtcctttgtgtcaagta

SEQ ID NO: 99687 - RNA, 21 nt, synthetic construct
  source 1..21: mol_type = other RNA
tccagtctctacccagcactc

SEQ ID NO: 99688 - RNA, 21 nt, synthetic construct
  source 1..21: mol_type = other RNA
tccagtctctgcaacatttgt

SEQ ID NO: 99689 - RNA, 21 nt, synthetic construct
  source 1..21: mol_type = other RNA
tccagtcttcaggtctctctg

SEQ ID NO: 99690 - RNA, 21 nt, synthetic construct
  source 1..21: mol_type = other RNA
tccagtcttctcatacagatt

SEQ ID NO: 99691 - RNA, 21 nt, synthetic construct
  source 1..21: mol_type = other RNA
tccagtgaagtcatctggtcc

SEQ ID NO: 99692 - RNA, 21 nt, synthetic construct
  source 1..21: mol_type = other RNA
tccagtgacacctgaggggtc

SEQ ID NO: 99693 - RNA, 21 nt, synthetic construct
  source 1..21: mol_type = other RNA
tccagtggcccccctgaaaaa

SEQ ID NO: 99694 - RNA, 21 nt, synthetic construct
  source 1..21: mol_type = other RNA
tccagtggttttttgtttttt

SEQ ID NO: 99695 - RNA, 21 nt, synthetic construct
  source 1..21: mol_type = other RNA
tccagtgtcctgaatgatttc

SEQ ID NO: 99696 - RNA, 21 nt, synthetic construct
  source 1..21: mol_type = other RNA
tccagtgtttggtttttatgg

SEQ ID NO: 99697 - RNA, 21 nt, synthetic construct
  source 1..21: mol_type = other RNA
tccagtgttttaggggggaaa

SEQ ID NO: 99698 - RNA, 21 nt, synthetic construct
  source 1..21: mol_type = other RNA
tccagtttaaagctttgtgac

SEQ ID NO: 99699 - RNA, 21 nt, synthetic construct
  source 1..21: mol_type = other RNA
tccagtttatatgcctagatg

SEQ ID NO: 99700 - RNA, 21 nt, synthetic construct
  source 1..21: mol_type = other RNA
tccagtttctctgctttttct

SEQ ID NO: 99701 - RNA, 21 nt, synthetic construct
  source 1..21: mol_type = other RNA
tccagtttgggtgacagagag

SEQ ID NO: 99702 - RNA, 21 nt, synthetic construct
  source 1..21: mol_type = other RNA
tccataaaaaccaaacactgg

SEQ ID NO: 99703 - RNA, 21 nt, synthetic construct
  source 1..21: mol_type = other RNA
tccataaaaagcgttggagac

SEQ ID NO: 99704 - RNA, 21 nt, synthetic construct
  source 1..21: mol_type = other RNA
tccataagatctgtctttggc

SEQ ID NO: 99705 - RNA, 21 nt, synthetic construct
  source 1..21: mol_type = other RNA
tccataagtccctaacagtct

SEQ ID NO: 99706 - RNA, 21 nt, synthetic construct
  source 1..21: mol_type = other RNA
tccatacaaggagacctacta

SEQ ID NO: 99707 - RNA, 21 nt, synthetic construct
  source 1..21: mol_type = other RNA
tccataccccctggaaataag

SEQ ID NO: 99708 - RNA, 21 nt, synthetic construct
  source 1..21: mol_type = other RNA
tccatacgaaagcctttattt

SEQ ID NO: 99709 - RNA, 21 nt, synthetic construct
  source 1..21: mol_type = other RNA
tccatagcttcctaagaaagg

SEQ ID NO: 99710 - RNA, 21 nt, synthetic construct
  source 1..21: mol_type = other RNA
tccatagttaatgtgtgaaga

SEQ ID NO: 99711 - RNA, 21 nt, synthetic construct
  source 1..21: mol_type = other RNA
tccatatgggatgcttaaagc

SEQ ID NO: 99712 - RNA, 21 nt, synthetic construct
  source 1..21: mol_type = other RNA
tccatcaacagcagaacaaac

SEQ ID NO: 99713 - RNA, 21 nt, synthetic construct
  source 1..21: mol_type = other RNA
tccatcactgactggctgtgc

SEQ ID NO: 99714 - RNA, 21 nt, synthetic construct
  source 1..21: mol_type = other RNA
tccatcagagaggctttttat

SEQ ID NO: 99715 - RNA, 21 nt, synthetic construct
  source 1..21: mol_type = other RNA
tccatcaggaaaaccagttta

SEQ ID NO: 99716 - RNA, 21 nt, synthetic construct
  source 1..21: mol_type = other RNA
tccatcagtggttgtgcttcg

SEQ ID NO: 99717 - RNA, 21 nt, synthetic construct
  source 1..21: mol_type = other RNA
tccatcgagagatgaatggat

SEQ ID NO: 99718 - RNA, 21 nt, synthetic construct
  source 1..21: mol_type = other RNA
tccatcggtctgtatttctgc

SEQ ID NO: 99719 - RNA, 21 nt, synthetic construct
  source 1..21: mol_type = other RNA
tccatctcaagaaaacaagaa

SEQ ID NO: 99720 - RNA, 21 nt, synthetic construct
  source 1..21: mol_type = other RNA
tccatctcccatcactagaat

SEQ ID NO: 99721 - RNA, 21 nt, synthetic construct
  source 1..21: mol_type = other RNA
tccatctggattatagtggta

SEQ ID NO: 99722 - RNA, 21 nt, synthetic construct
  source 1..21: mol_type = other RNA
tccatctgttatagtgtgaaa

SEQ ID NO: 99723 - RNA, 21 nt, synthetic construct
  source 1..21: mol_type = other RNA
tccatcttaggccataaatca

SEQ ID NO: 99724 - RNA, 21 nt, synthetic construct
  source 1..21: mol_type = other RNA
tccatcttcacgtggcgctcc

SEQ ID NO: 99725 - RNA, 21 nt, synthetic construct
  source 1..21: mol_type = other RNA
tccatgaaacttatttccagg

SEQ ID NO: 99726 - RNA, 21 nt, synthetic construct
  source 1..21: mol_type = other RNA
tccatgaagaaaacactccag

SEQ ID NO: 99727 - RNA, 21 nt, synthetic construct
  source 1..21: mol_type = other RNA
tccatgagattacatagcaag

SEQ ID NO: 99728 - RNA, 21 nt, synthetic construct
  source 1..21: mol_type = other RNA
tccatggaaactacaattact

SEQ ID NO: 99729 - RNA, 21 nt, synthetic construct
  source 1..21: mol_type = other RNA
tccatggaggggccagttgag

SEQ ID NO: 99730 - RNA, 21 nt, synthetic construct
  source 1..21: mol_type = other RNA
tccatggtatgtgccatctcc

SEQ ID NO: 99731 - RNA, 21 nt, synthetic construct
  source 1..21: mol_type = other RNA
tccatgtcctcacctcacatt

SEQ ID NO: 99732 - RNA, 21 nt, synthetic construct
  source 1..21: mol_type = other RNA
tccatgtcttggctattgtca

SEQ ID NO: 99733 - RNA, 21 nt, synthetic construct
  source 1..21: mol_type = other RNA
tccatgttgttgaatgtggca

SEQ ID NO: 99734 - RNA, 21 nt, synthetic construct
  source 1..21: mol_type = other RNA
tccattactcgtggttatagc

SEQ ID NO: 99735 - RNA, 21 nt, synthetic construct
  source 1..21: mol_type = other RNA
tccattatatgaataaaccac

SEQ ID NO: 99736 - RNA, 21 nt, synthetic construct
  source 1..21: mol_type = other RNA
tccattattccataaaaacca

SEQ ID NO: 99737 - RNA, 21 nt, synthetic construct
  source 1..21: mol_type = other RNA
tccattcaatccttgtaactt

SEQ ID NO: 99738 - RNA, 21 nt, synthetic construct
  source 1..21: mol_type = other RNA
tccattcacacaccctttctt

SEQ ID NO: 99739 - RNA, 21 nt, synthetic construct
  source 1..21: mol_type = other RNA
tccattcatctctcgatggac

SEQ ID NO: 99740 - RNA, 21 nt, synthetic construct
  source 1..21: mol_type = other RNA
tccattcatgtaatgcaaact

SEQ ID NO: 99741 - RNA, 21 nt, synthetic construct
  source 1..21: mol_type = other RNA
tccattccttttcgagactga

SEQ ID NO: 99742 - RNA, 21 nt, synthetic construct
  source 1..21: mol_type = other RNA
tccattgggtacataccgagt

SEQ ID NO: 99743 - RNA, 21 nt, synthetic construct
  source 1..21: mol_type = other RNA
tccattgtgcatatataccac

SEQ ID NO: 99744 - RNA, 21 nt, synthetic construct
  source 1..21: mol_type = other RNA
tccattgttctctttgtttat

SEQ ID NO: 99745 - RNA, 21 nt, synthetic construct
  source 1..21: mol_type = other RNA
tccatttccagtactttttca

SEQ ID NO: 99746 - RNA, 21 nt, synthetic construct
  source 1..21: mol_type = other RNA
tccatttccctgcttcatctg

SEQ ID NO: 99747 - RNA, 21 nt, synthetic construct
  source 1..21: mol_type = other RNA
tccatttccttaagcacagac

SEQ ID NO: 99748 - RNA, 21 nt, synthetic construct
  source 1..21: mol_type = other RNA
tccatttgtggcatctttgtt

SEQ ID NO: 99749 - RNA, 21 nt, synthetic construct
  source 1..21: mol_type = other RNA
tccatttgttttgtgtttgtg

SEQ ID NO: 99750 - RNA, 21 nt, synthetic construct
  source 1..21: mol_type = other RNA
tccattttagatcaagtcctt

SEQ ID NO: 99751 - RNA, 21 nt, synthetic construct
  source 1..21: mol_type = other RNA
tccattttgccagctaacttt

SEQ ID NO: 99752 - RNA, 21 nt, synthetic construct
  source 1..21: mol_type = other RNA
tccattttggtcttaccctct

SEQ ID NO: 99753 - RNA, 21 nt, synthetic construct
  source 1..21: mol_type = other RNA
tccatttttctgaccaactat

SEQ ID NO: 99754 - RNA, 21 nt, synthetic construct
  source 1..21: mol_type = other RNA
tcccaaagacatcctgattta

SEQ ID NO: 99755 - RNA, 21 nt, synthetic construct
  source 1..21: mol_type = other RNA
tcccaaagatagactcttcag

SEQ ID NO: 99756 - RNA, 21 nt, synthetic construct
  source 1..21: mol_type = other RNA
tcccaaaggactgggatccta

SEQ ID NO: 99757 - RNA, 21 nt, synthetic construct
  source 1..21: mol_type = other RNA
tcccaaagtgagcagaaggag

SEQ ID NO: 99758 - RNA, 21 nt, synthetic construct
  source 1..21: mol_type = other RNA
tcccaaatccaggatggcatg

SEQ ID NO: 99759 - RNA, 21 nt, synthetic construct
  source 1..21: mol_type = other RNA
tcccaaatgcaccaacacctg

SEQ ID NO: 99760 - RNA, 21 nt, synthetic construct
  source 1..21: mol_type = other RNA
tcccaaatgggagcatgcaca

SEQ ID NO: 99761 - RNA, 21 nt, synthetic construct
  source 1..21: mol_type = other RNA
tcccaaatgtcttaagaagga

SEQ ID NO: 99762 - RNA, 21 nt, synthetic construct
  source 1..21: mol_type = other RNA
tcccaaattggcatttaaaag

SEQ ID NO: 99763 - RNA, 21 nt, synthetic construct
  source 1..21: mol_type = other RNA
tcccaacaggctgagtgcggt

SEQ ID NO: 99764 - RNA, 21 nt, synthetic construct
  source 1..21: mol_type = other RNA
tcccaagatcataagctttta

SEQ ID NO: 99765 - RNA, 21 nt, synthetic construct
  source 1..21: mol_type = other RNA
tcccaagcaagtgtggtggtc

SEQ ID NO: 99766 - RNA, 21 nt, synthetic construct
  source 1..21: mol_type = other RNA
tcccaagggttttggtatgtt

SEQ ID NO: 99767 - RNA, 21 nt, synthetic construct
  source 1..21: mol_type = other RNA
tcccaaggttgcctgttcact

SEQ ID NO: 99768 - RNA, 21 nt, synthetic construct
  source 1..21: mol_type = other RNA
tcccaagtgcccattaacaga

SEQ ID NO: 99769 - RNA, 21 nt, synthetic construct
  source 1..21: mol_type = other RNA
tcccaatcctttgtgcaggtc

SEQ ID NO: 99770 - RNA, 21 nt, synthetic construct
  source 1..21: mol_type = other RNA
tcccaatctctggtattctga

SEQ ID NO: 99771 - RNA, 21 nt, synthetic construct
  source 1..21: mol_type = other RNA
tcccaatgcttgaagagcgct

SEQ ID NO: 99772 - RNA, 21 nt, synthetic construct
  source 1..21: mol_type = other RNA
tcccaattacttccagtgttt

SEQ ID NO: 99773 - RNA, 21 nt, synthetic construct
  source 1..21: mol_type = other RNA
tcccacaaaatatgaagcatt

SEQ ID NO: 99774 - RNA, 21 nt, synthetic construct
  source 1..21: mol_type = other RNA
tcccaccatctctctgcctca

SEQ ID NO: 99775 - RNA, 21 nt, synthetic construct
  source 1..21: mol_type = other RNA
tcccacctcagccccacaagt

SEQ ID NO: 99776 - RNA, 21 nt, synthetic construct
  source 1..21: mol_type = other RNA
tcccactagtggaagaatcag

SEQ ID NO: 99777 - RNA, 21 nt, synthetic construct
  source 1..21: mol_type = other RNA
tcccactgacagtggacaaag

SEQ ID NO: 99778 - RNA, 21 nt, synthetic construct
  source 1..21: mol_type = other RNA
tcccactgctatgactaattt

SEQ ID NO: 99779 - RNA, 21 nt, synthetic construct
  source 1..21: mol_type = other RNA
tcccacttacatcagcagtga

SEQ ID NO: 99780 - RNA, 21 nt, synthetic construct
  source 1..21: mol_type = other RNA
tcccacttcgaaagttcagat

SEQ ID NO: 99781 - RNA, 21 nt, synthetic construct
  source 1..21: mol_type = other RNA
tcccacttgatccaggtgtat

SEQ ID NO: 99782 - RNA, 21 nt, synthetic construct
  source 1..21: mol_type = other RNA
tcccagaactcgaagccttcc

SEQ ID NO: 99783 - RNA, 21 nt, synthetic construct
  source 1..21: mol_type = other RNA
tcccagacagatatatgcatt

SEQ ID NO: 99784 - RNA, 21 nt, synthetic construct
  source 1..21: mol_type = other RNA
tcccagacagggaatgcccct

SEQ ID NO: 99785 - RNA, 21 nt, synthetic construct
  source 1..21: mol_type = other RNA
tcccagaggtactcaacgaca

SEQ ID NO: 99786 - RNA, 21 nt, synthetic construct
  source 1..21: mol_type = other RNA
tcccagataacagtggttagg

SEQ ID NO: 99787 - RNA, 21 nt, synthetic construct
  source 1..21: mol_type = other RNA
tcccagatacgttaaaggaaa

SEQ ID NO: 99788 - RNA, 21 nt, synthetic construct
  source 1..21: mol_type = other RNA
tcccagatctaacaaacgcat

SEQ ID NO: 99789 - RNA, 21 nt, synthetic construct
  source 1..21: mol_type = other RNA
tcccagatggggattgagggt

SEQ ID NO: 99790 - RNA, 21 nt, synthetic construct
  source 1..21: mol_type = other RNA
tcccagcatgaagccctctaa

SEQ ID NO: 99791 - RNA, 21 nt, synthetic construct
  source 1..21: mol_type = other RNA
tcccagccaaacagtttttac

SEQ ID NO: 99792 - RNA, 21 nt, synthetic construct
  source 1..21: mol_type = other RNA
tcccagcctcaaacaatcctc

SEQ ID NO: 99793 - RNA, 21 nt, synthetic construct
  source 1..21: mol_type = other RNA
tcccagctacataacttccca

SEQ ID NO: 99794 - RNA, 21 nt, synthetic construct
  source 1..21: mol_type = other RNA
tcccagctgtccaacaagggt

SEQ ID NO: 99795 - RNA, 21 nt, synthetic construct
  source 1..21: mol_type = other RNA
tcccaggagctagaacagaat

SEQ ID NO: 99796 - RNA, 21 nt, synthetic construct
  source 1..21: mol_type = other RNA
tcccagggataaatcccactt

SEQ ID NO: 99797 - RNA, 21 nt, synthetic construct
  source 1..21: mol_type = other RNA
tcccagggtgtagccacaagc

SEQ ID NO: 99798 - RNA, 21 nt, synthetic construct
  source 1..21: mol_type = other RNA
tcccaggtattttgttctctt

SEQ ID NO: 99799 - RNA, 21 nt, synthetic construct
  source 1..21: mol_type = other RNA
tcccaggtcagtagtacagtg

SEQ ID NO: 99800 - RNA, 21 nt, synthetic construct
  source 1..21: mol_type = other RNA
tcccagtcctttgggaggtca

SEQ ID NO: 99801 - RNA, 21 nt, synthetic construct
  source 1..21: mol_type = other RNA
tcccagtgcccacctgacaag

SEQ ID NO: 99802 - RNA, 21 nt, synthetic construct
  source 1..21: mol_type = other RNA
tcccagttcaaggtgttagca

SEQ ID NO: 99803 - RNA, 21 nt, synthetic construct
  source 1..21: mol_type = other RNA
tcccagttgtcagaattagaa

SEQ ID NO: 99804 - RNA, 21 nt, synthetic construct
  source 1..21: mol_type = other RNA
tcccataccacctgtcagaaa

SEQ ID NO: 99805 - RNA, 21 nt, synthetic construct
  source 1..21: mol_type = other RNA
tcccatataaggggaatcatg

SEQ ID NO: 99806 - RNA, 21 nt, synthetic construct
  source 1..21: mol_type = other RNA
tcccatatctacatgtacgcc

SEQ ID NO: 99807 - RNA, 21 nt, synthetic construct
  source 1..21: mol_type = other RNA
tcccatatggaggcaatgttg

SEQ ID NO: 99808 - RNA, 21 nt, synthetic construct
  source 1..21: mol_type = other RNA
tcccatcactagaatgtgact

SEQ ID NO: 99809 - RNA, 21 nt, synthetic construct
  source 1..21: mol_type = other RNA
tcccatctcactcacctagct

SEQ ID NO: 99810 - RNA, 21 nt, synthetic construct
  source 1..21: mol_type = other RNA
tcccatctctagttttccagt

SEQ ID NO: 99811 - RNA, 21 nt, synthetic construct
  source 1..21: mol_type = other RNA
tcccatcttccatacgaaagc

SEQ ID NO: 99812 - RNA, 21 nt, synthetic construct
  source 1..21: mol_type = other RNA
tcccatgaacatggtttgatc

SEQ ID NO: 99813 - RNA, 21 nt, synthetic construct
  source 1..21: mol_type = other RNA
tcccatgattcaaaatgtgat

SEQ ID NO: 99814 - RNA, 21 nt, synthetic construct
  source 1..21: mol_type = other RNA
tcccatgcattcgtccctaaa

SEQ ID NO: 99815 - RNA, 21 nt, synthetic construct
  source 1..21: mol_type = other RNA
tcccatggtcaaatcaatact

SEQ ID NO: 99816 - RNA, 21 nt, synthetic construct
  source 1..21: mol_type = other RNA
tcccatgttcactgcagaatt

SEQ ID NO: 99817 - RNA, 21 nt, synthetic construct
  source 1..21: mol_type = other RNA
tcccattaccaaaacctggta

SEQ ID NO: 99818 - RNA, 21 nt, synthetic construct
  source 1..21: mol_type = other RNA
tcccattactcggtatgtacc

SEQ ID NO: 99819 - RNA, 21 nt, synthetic construct
  source 1..21: mol_type = other RNA
tcccatttgatttcttctttg

SEQ ID NO: 99820 - RNA, 21 nt, synthetic construct
  source 1..21: mol_type = other RNA
tcccatttgggactgagacag

SEQ ID NO: 99821 - RNA, 21 nt, synthetic construct
  source 1..21: mol_type = other RNA
tcccatttgtaacatgttaga

SEQ ID NO: 99822 - RNA, 21 nt, synthetic construct
  source 1..21: mol_type = other RNA
tccccaaagatattagctaca

SEQ ID NO: 99823 - RNA, 21 nt, synthetic construct
  source 1..21: mol_type = other RNA
tccccaaataacatgcatatg

SEQ ID NO: 99824 - RNA, 21 nt, synthetic construct
  source 1..21: mol_type = other RNA
tccccaactgcaaaactttct

SEQ ID NO: 99825 - RNA, 21 nt, synthetic construct
  source 1..21: mol_type = other RNA
tccccaagccaaattaataaa

SEQ ID NO: 99826 - RNA, 21 nt, synthetic construct
  source 1..21: mol_type = other RNA
tccccaagtaaacctcaagtc

SEQ ID NO: 99827 - RNA, 21 nt, synthetic construct
  source 1..21: mol_type = other RNA
tccccacataggatagttaaa

SEQ ID NO: 99828 - RNA, 21 nt, synthetic construct
  source 1..21: mol_type = other RNA
tccccacatgactggccatcc

SEQ ID NO: 99829 - RNA, 21 nt, synthetic construct
  source 1..21: mol_type = other RNA
tccccaccgccttcctaccct

SEQ ID NO: 99830 - RNA, 21 nt, synthetic construct
  source 1..21: mol_type = other RNA
tccccacctttcctgcccctc

SEQ ID NO: 99831 - RNA, 21 nt, synthetic construct
  source 1..21: mol_type = other RNA
tccccagaaagagagaggggg

SEQ ID NO: 99832 - RNA, 21 nt, synthetic construct
  source 1..21: mol_type = other RNA
tccccagcatccactagggga

SEQ ID NO: 99833 - RNA, 21 nt, synthetic construct
  source 1..21: mol_type = other RNA
tccccagcctcagcctcccaa

SEQ ID NO: 99834 - RNA, 21 nt, synthetic construct
  source 1..21: mol_type = other RNA
tccccagggaaaccttactgt

SEQ ID NO: 99835 - RNA, 21 nt, synthetic construct
  source 1..21: mol_type = other RNA
tccccagtggttgtggaatta

SEQ ID NO: 99836 - RNA, 21 nt, synthetic construct
  source 1..21: mol_type = other RNA
tccccatctgggatacttcta

SEQ ID NO: 99837 - RNA, 21 nt, synthetic construct
  source 1..21: mol_type = other RNA
tccccatgcaggagaaacatg

SEQ ID NO: 99838 - RNA, 21 nt, synthetic construct
  source 1..21: mol_type = other RNA
tccccattagagtaagcaact

SEQ ID NO: 99839 - RNA, 21 nt, synthetic construct
  source 1..21: mol_type = other RNA
tccccattcaattgtcctggc

SEQ ID NO: 99840 - RNA, 21 nt, synthetic construct
  source 1..21: mol_type = other RNA
tccccattccctgtctgtgat

SEQ ID NO: 99841 - RNA, 21 nt, synthetic construct
  source 1..21: mol_type = other RNA
tccccattgacaatataggag

SEQ ID NO: 99842 - RNA, 21 nt, synthetic construct
  source 1..21: mol_type = other RNA
tccccatttttctcgacacac

SEQ ID NO: 99843 - RNA, 21 nt, synthetic construct
  source 1..21: mol_type = other RNA
tcccccaaaacttaggaggct

SEQ ID NO: 99844 - RNA, 21 nt, synthetic construct
  source 1..21: mol_type = other RNA
tcccccaaagaaggaaaaaac

SEQ ID NO: 99845 - RNA, 21 nt, synthetic construct
  source 1..21: mol_type = other RNA
tcccccaattaaactatagac

SEQ ID NO: 99846 - RNA, 21 nt, synthetic construct
  source 1..21: mol_type = other RNA
tcccccagcccctggtgatct

SEQ ID NO: 99847 - RNA, 21 nt, synthetic construct
  source 1..21: mol_type = other RNA
tcccccaggtggttctgccta

SEQ ID NO: 99848 - RNA, 21 nt, synthetic construct
  source 1..21: mol_type = other RNA
tcccccatcccctttacccct

SEQ ID NO: 99849 - RNA, 21 nt, synthetic construct
  source 1..21: mol_type = other RNA
tccccccacccctgctctgca

SEQ ID NO: 99850 - RNA, 21 nt, synthetic construct
  source 1..21: mol_type = other RNA
tcccccctaaaacactggaag

SEQ ID NO: 99851 - RNA, 21 nt, synthetic construct
  source 1..21: mol_type = other RNA
tcccccctctctctttctggg

SEQ ID NO: 99852 - RNA, 21 nt, synthetic construct
  source 1..21: mol_type = other RNA
tcccccctggaacaatcaaac

SEQ ID NO: 99853 - RNA, 21 nt, synthetic construct
  source 1..21: mol_type = other RNA
tcccccgaatcctttgcttcc

SEQ ID NO: 99854 - RNA, 21 nt, synthetic construct
  source 1..21: mol_type = other RNA
tcccccgcccgtccctgcttg

SEQ ID NO: 99855 - RNA, 21 nt, synthetic construct
  source 1..21: mol_type = other RNA
tcccccgggacaatgccaggg

SEQ ID NO: 99856 - RNA, 21 nt, synthetic construct
  source 1..21: mol_type = other RNA
tcccccggggctcgcagcatc

SEQ ID NO: 99857 - RNA, 21 nt, synthetic construct
  source 1..21: mol_type = other RNA
tccccctacacccagttcacc

SEQ ID NO: 99858 - RNA, 21 nt, synthetic construct
  source 1..21: mol_type = other RNA
tcccccttatgtgtgtataac

SEQ ID NO: 99859 - RNA, 21 nt, synthetic construct
  source 1..21: mol_type = other RNA
tccccgctgcgagaaaggcga

SEQ ID NO: 99860 - RNA, 21 nt, synthetic construct
  source 1..21: mol_type = other RNA
tccccgctgtccatttccagt

SEQ ID NO: 99861 - RNA, 21 nt, synthetic construct
  source 1..21: mol_type = other RNA
tccccggatgattctaatgtg

SEQ ID NO: 99862 - RNA, 21 nt, synthetic construct
  source 1..21: mol_type = other RNA
tccccggtctttcctgatcag

SEQ ID NO: 99863 - RNA, 21 nt, synthetic construct
  source 1..21: mol_type = other RNA
tcccctagtggatgctgggga

SEQ ID NO: 99864 - RNA, 21 nt, synthetic construct
  source 1..21: mol_type = other RNA
tcccctatactgtaaccctgt

SEQ ID NO: 99865 - RNA, 21 nt, synthetic construct
  source 1..21: mol_type = other RNA
tcccctgctgttcccaagcaa

SEQ ID NO: 99866 - RNA, 21 nt, synthetic construct
  source 1..21: mol_type = other RNA
tcccctggagttaattccaca

SEQ ID NO: 99867 - RNA, 21 nt, synthetic construct
  source 1..21: mol_type = other RNA
tcccctggatcccccagcccc

SEQ ID NO: 99868 - RNA, 21 nt, synthetic construct
  source 1..21: mol_type = other RNA
tcccctggggcctcagcatgt

SEQ ID NO: 99869 - RNA, 21 nt, synthetic construct
  source 1..21: mol_type = other RNA
tcccctggtcgagctgggtga

SEQ ID NO: 99870 - RNA, 21 nt, synthetic construct
  source 1..21: mol_type = other RNA
tcccctgtaattacatacttc

SEQ ID NO: 99871 - RNA, 21 nt, synthetic construct
  source 1..21: mol_type = other RNA
tcccctgtccaagtatttctc

SEQ ID NO: 99872 - RNA, 21 nt, synthetic construct
  source 1..21: mol_type = other RNA
tccccttatatgggatatcta

SEQ ID NO: 99873 - RNA, 21 nt, synthetic construct
  source 1..21: mol_type = other RNA
tccccttgacgaagtcacatt

SEQ ID NO: 99874 - RNA, 21 nt, synthetic construct
  source 1..21: mol_type = other RNA
tccccttgccaaggcttgctt

SEQ ID NO: 99875 - RNA, 21 nt, synthetic construct
  source 1..21: mol_type = other RNA
tcccctttacccctgagaact

SEQ ID NO: 99876 - RNA, 21 nt, synthetic construct
  source 1..21: mol_type = other RNA
tcccctttagtgttctgtgtt

SEQ ID NO: 99877 - RNA, 21 nt, synthetic construct
  source 1..21: mol_type = other RNA
tcccctttctttggttttgac

SEQ ID NO: 99878 - RNA, 21 nt, synthetic construct
  source 1..21: mol_type = other RNA
tcccgagtagttgtaactaca

SEQ ID NO: 99879 - RNA, 21 nt, synthetic construct
  source 1..21: mol_type = other RNA
tcccgagtatctaggagtaca

SEQ ID NO: 99880 - RNA, 21 nt, synthetic construct
  source 1..21: mol_type = other RNA
tcccgatttcagttaacttat

SEQ ID NO: 99881 - RNA, 21 nt, synthetic construct
  source 1..21: mol_type = other RNA
tcccgcaccttgattttgata

SEQ ID NO: 99882 - RNA, 21 nt, synthetic construct
  source 1..21: mol_type = other RNA
tcccgctacacaagtattaac

SEQ ID NO: 99883 - RNA, 21 nt, synthetic construct
  source 1..21: mol_type = other RNA
tcccggaacaggaaaaggaca

SEQ ID NO: 99884 - RNA, 21 nt, synthetic construct
  source 1..21: mol_type = other RNA
tcccggaagctgggctagagc

SEQ ID NO: 99885 - RNA, 21 nt, synthetic construct
  source 1..21: mol_type = other RNA
tcccggattggaaaactaggt

SEQ ID NO: 99886 - RNA, 21 nt, synthetic construct
  source 1..21: mol_type = other RNA
tcccggcatgcctctcccacc

SEQ ID NO: 99887 - RNA, 21 nt, synthetic construct
  source 1..21: mol_type = other RNA
tcccggccaggtgcggtggct

SEQ ID NO: 99888 - RNA, 21 nt, synthetic construct
  source 1..21: mol_type = other RNA
tcccggctaagatgaggtctc

SEQ ID NO: 99889 - RNA, 21 nt, synthetic construct
  source 1..21: mol_type = other RNA
tcccgggtccaggcagttctc

SEQ ID NO: 99890 - RNA, 21 nt, synthetic construct
  source 1..21: mol_type = other RNA
tcccgggtttaagcgattctc

SEQ ID NO: 99891 - RNA, 21 nt, synthetic construct
  source 1..21: mol_type = other RNA
tccctaaacactgtagttcag

SEQ ID NO: 99892 - RNA, 21 nt, synthetic construct
  source 1..21: mol_type = other RNA
tccctaaagagaatcttaaaa

SEQ ID NO: 99893 - RNA, 21 nt, synthetic construct
  source 1..21: mol_type = other RNA
tccctaaatacacatgttgag

SEQ ID NO: 99894 - RNA, 21 nt, synthetic construct
  source 1..21: mol_type = other RNA
tccctaacagtctcgtgaatt

SEQ ID NO: 99895 - RNA, 21 nt, synthetic construct
  source 1..21: mol_type = other RNA
tccctaaccaggcccggggca

SEQ ID NO: 99896 - RNA, 21 nt, synthetic construct
  source 1..21: mol_type = other RNA
tccctacattgccttcaagtt

SEQ ID NO: 99897 - RNA, 21 nt, synthetic construct
  source 1..21: mol_type = other RNA
tccctaccacccgtccaattt

SEQ ID NO: 99898 - RNA, 21 nt, synthetic construct
  source 1..21: mol_type = other RNA
tccctacctaaaaagggagtc

SEQ ID NO: 99899 - RNA, 21 nt, synthetic construct
  source 1..21: mol_type = other RNA
tccctacctggcagtctagga

SEQ ID NO: 99900 - RNA, 21 nt, synthetic construct
  source 1..21: mol_type = other RNA
tccctactcactgaaaccctc

SEQ ID NO: 99901 - RNA, 21 nt, synthetic construct
  source 1..21: mol_type = other RNA
tccctagcccagcacttccat

SEQ ID NO: 99902 - RNA, 21 nt, synthetic construct
  source 1..21: mol_type = other RNA
tccctagtgtctccatacccc

SEQ ID NO: 99903 - RNA, 21 nt, synthetic construct
  source 1..21: mol_type = other RNA
tccctatgcaataactcaaaa

SEQ ID NO: 99904 - RNA, 21 nt, synthetic construct
  source 1..21: mol_type = other RNA
tccctattttctacaggtata

SEQ ID NO: 99905 - RNA, 21 nt, synthetic construct
  source 1..21: mol_type = other RNA
tccctcacagtccactcacct

SEQ ID NO: 99906 - RNA, 21 nt, synthetic construct
  source 1..21: mol_type = other RNA
tccctcaccttctgctgggcc

SEQ ID NO: 99907 - RNA, 21 nt, synthetic construct
  source 1..21: mol_type = other RNA
tccctcactaagtcagaattc

SEQ ID NO: 99908 - RNA, 21 nt, synthetic construct
  source 1..21: mol_type = other RNA
tccctcagaatttgaggtctt

SEQ ID NO: 99909 - RNA, 21 nt, synthetic construct
  source 1..21: mol_type = other RNA
tccctcagcaaaagcaattat

SEQ ID NO: 99910 - RNA, 21 nt, synthetic construct
  source 1..21: mol_type = other RNA
tccctcatatcagttatcaca

SEQ ID NO: 99911 - RNA, 21 nt, synthetic construct
  source 1..21: mol_type = other RNA
tccctccagtccagcaccacc

SEQ ID NO: 99912 - RNA, 21 nt, synthetic construct
  source 1..21: mol_type = other RNA
tccctccccccacggtctccc

SEQ ID NO: 99913 - RNA, 21 nt, synthetic construct
  source 1..21: mol_type = other RNA
tccctccccctccccctccct

SEQ ID NO: 99914 - RNA, 21 nt, synthetic construct
  source 1..21: mol_type = other RNA
tccctcctctggccctccatt

SEQ ID NO: 99915 - RNA, 21 nt, synthetic construct
  source 1..21: mol_type = other RNA
tccctcctttctagaatgcat

SEQ ID NO: 99916 - RNA, 21 nt, synthetic construct
  source 1..21: mol_type = other RNA
tccctcctttttatcaccctt

SEQ ID NO: 99917 - RNA, 21 nt, synthetic construct
  source 1..21: mol_type = other RNA
tccctcggccacagcagggct

SEQ ID NO: 99918 - RNA, 21 nt, synthetic construct
  source 1..21: mol_type = other RNA
tccctctaaataggtattcat

SEQ ID NO: 99919 - RNA, 21 nt, synthetic construct
  source 1..21: mol_type = other RNA
tccctctacaaaaggaggaac

SEQ ID NO: 99920 - RNA, 21 nt, synthetic construct
  source 1..21: mol_type = other RNA
tccctctatggcaggcacctt

SEQ ID NO: 99921 - RNA, 21 nt, synthetic construct
  source 1..21: mol_type = other RNA
tccctctcagtggtgcttttg

SEQ ID NO: 99922 - RNA, 21 nt, synthetic construct
  source 1..21: mol_type = other RNA
tccctctgagagaagtcagac

SEQ ID NO: 99923 - RNA, 21 nt, synthetic construct
  source 1..21: mol_type = other RNA
tccctctggccttctatattt

SEQ ID NO: 99924 - RNA, 21 nt, synthetic construct
  source 1..21: mol_type = other RNA
tccctctgtgtgcatgcatgt

SEQ ID NO: 99925 - RNA, 21 nt, synthetic construct
  source 1..21: mol_type = other RNA
tccctcttcaatattttggaa

SEQ ID NO: 99926 - RNA, 21 nt, synthetic construct
  source 1..21: mol_type = other RNA
tccctcttcgctcttttaaaa

SEQ ID NO: 99927 - RNA, 21 nt, synthetic construct
  source 1..21: mol_type = other RNA
tccctctttctcaacttcctg

SEQ ID NO: 99928 - RNA, 21 nt, synthetic construct
  source 1..21: mol_type = other RNA
tccctgaaattgtcagaaaag

SEQ ID NO: 99929 - RNA, 21 nt, synthetic construct
  source 1..21: mol_type = other RNA
tccctgaacaatgattttctt

SEQ ID NO: 99930 - RNA, 21 nt, synthetic construct
  source 1..21: mol_type = other RNA
tccctgataatcacagacgca

SEQ ID NO: 99931 - RNA, 21 nt, synthetic construct
  source 1..21: mol_type = other RNA
tccctgatatgtcgcatgaaa

SEQ ID NO: 99932 - RNA, 21 nt, synthetic construct
  source 1..21: mol_type = other RNA
tccctgatcaagttgcttggc

SEQ ID NO: 99933 - RNA, 21 nt, synthetic construct
  source 1..21: mol_type = other RNA
tccctgcatacactcatttcc

SEQ ID NO: 99934 - RNA, 21 nt, synthetic construct
  source 1..21: mol_type = other RNA
tccctgccctgtgaaaatcat

SEQ ID NO: 99935 - RNA, 21 nt, synthetic construct
  source 1..21: mol_type = other RNA
tccctgctactcaggagatta

SEQ ID NO: 99936 - RNA, 21 nt, synthetic construct
  source 1..21: mol_type = other RNA
tccctgctacttgtggggctg

SEQ ID NO: 99937 - RNA, 21 nt, synthetic construct
  source 1..21: mol_type = other RNA
tccctgcttcatctggaccag

SEQ ID NO: 99938 - RNA, 21 nt, synthetic construct
  source 1..21: mol_type = other RNA
tccctgcttggcgcagtgctt

SEQ ID NO: 99939 - RNA, 21 nt, synthetic construct
  source 1..21: mol_type = other RNA
tccctgctttaaaacactggc

SEQ ID NO: 99940 - RNA, 21 nt, synthetic construct
  source 1..21: mol_type = other RNA
tccctgctttcagttctttcg

SEQ ID NO: 99941 - RNA, 21 nt, synthetic construct
  source 1..21: mol_type = other RNA
tccctggagaggcaaaggccg

SEQ ID NO: 99942 - RNA, 21 nt, synthetic construct
  source 1..21: mol_type = other RNA
tccctggggaataagatttta

SEQ ID NO: 99943 - RNA, 21 nt, synthetic construct
  source 1..21: mol_type = other RNA
tccctggggtttccttacctt

SEQ ID NO: 99944 - RNA, 21 nt, synthetic construct
  source 1..21: mol_type = other RNA
tccctggttcaagctatgctc

SEQ ID NO: 99945 - RNA, 21 nt, synthetic construct
  source 1..21: mol_type = other RNA
tccctgtagagatttttatca

SEQ ID NO: 99946 - RNA, 21 nt, synthetic construct
  source 1..21: mol_type = other RNA
tccctgtctgggaagttatgt

SEQ ID NO: 99947 - RNA, 21 nt, synthetic construct
  source 1..21: mol_type = other RNA
tccctgtctgtgatgtagagg

SEQ ID NO: 99948 - RNA, 21 nt, synthetic construct
  source 1..21: mol_type = other RNA
tccctgtctttctgtctgctt

SEQ ID NO: 99949 - RNA, 21 nt, synthetic construct
  source 1..21: mol_type = other RNA
tccctgtgcgtgaatctgttc

SEQ ID NO: 99950 - RNA, 21 nt, synthetic construct
  source 1..21: mol_type = other RNA
tccctgtgtatgtgtagtcag

SEQ ID NO: 99951 - RNA, 21 nt, synthetic construct
  source 1..21: mol_type = other RNA
tcccttaaaaggaactaattt

SEQ ID NO: 99952 - RNA, 21 nt, synthetic construct
  source 1..21: mol_type = other RNA
tcccttaacctttttcttttc

SEQ ID NO: 99953 - RNA, 21 nt, synthetic construct
  source 1..21: mol_type = other RNA
tcccttaatgttgacatcttg

SEQ ID NO: 99954 - RNA, 21 nt, synthetic construct
  source 1..21: mol_type = other RNA
tcccttagctctcatgtcaga

SEQ ID NO: 99955 - RNA, 21 nt, synthetic construct
  source 1..21: mol_type = other RNA
tcccttcacaaagccctcagg

SEQ ID NO: 99956 - RNA, 21 nt, synthetic construct
  source 1..21: mol_type = other RNA
tcccttcagcctgtgtcagtg

SEQ ID NO: 99957 - RNA, 21 nt, synthetic construct
  source 1..21: mol_type = other RNA
tcccttcagtgtagtcagaca

SEQ ID NO: 99958 - RNA, 21 nt, synthetic construct
  source 1..21: mol_type = other RNA
tcccttccagcgtgtgcatga

SEQ ID NO: 99959 - RNA, 21 nt, synthetic construct
  source 1..21: mol_type = other RNA
tcccttccccacctttcctgc

SEQ ID NO: 99960 - RNA, 21 nt, synthetic construct
  source 1..21: mol_type = other RNA
tcccttcctgttctttgttag

SEQ ID NO: 99961 - RNA, 21 nt, synthetic construct
  source 1..21: mol_type = other RNA
tcccttctattccattgttct

SEQ ID NO: 99962 - RNA, 21 nt, synthetic construct
  source 1..21: mol_type = other RNA
tcccttctcgaagtggtgctt

SEQ ID NO: 99963 - RNA, 21 nt, synthetic construct
  source 1..21: mol_type = other RNA
tcccttctgctcggctctgtc

SEQ ID NO: 99964 - RNA, 21 nt, synthetic construct
  source 1..21: mol_type = other RNA
tcccttcttaaatgtgaatta

SEQ ID NO: 99965 - RNA, 21 nt, synthetic construct
  source 1..21: mol_type = other RNA
tcccttgcctgacagcaaata

SEQ ID NO: 99966 - RNA, 21 nt, synthetic construct
  source 1..21: mol_type = other RNA
tcccttgtgcacctcgggttc

SEQ ID NO: 99967 - RNA, 21 nt, synthetic construct
  source 1..21: mol_type = other RNA
tccctttaaaatgatagcatt

SEQ ID NO: 99968 - RNA, 21 nt, synthetic construct
  source 1..21: mol_type = other RNA
tccctttcgctaatctcaatc

SEQ ID NO: 99969 - RNA, 21 nt, synthetic construct
  source 1..21: mol_type = other RNA
tcccttttggatgcagatttc

SEQ ID NO: 99970 - RNA, 21 nt, synthetic construct
  source 1..21: mol_type = other RNA
tcccttttgtagctaatatct

SEQ ID NO: 99971 - RNA, 21 nt, synthetic construct
  source 1..21: mol_type = other RNA
tccctttttaggtagggataa

SEQ ID NO: 99972 - RNA, 21 nt, synthetic construct
  source 1..21: mol_type = other RNA
tccgaaagaactgaaagcagg

SEQ ID NO: 99973 - RNA, 21 nt, synthetic construct
  source 1..21: mol_type = other RNA
tccgacctgtagattgggctt

SEQ ID NO: 99974 - RNA, 21 nt, synthetic construct
  source 1..21: mol_type = other RNA
tccgagacaagttctcctgtg

SEQ ID NO: 99975 - RNA, 21 nt, synthetic construct
  source 1..21: mol_type = other RNA
tccgataaagggtctggtatc

SEQ ID NO: 99976 - RNA, 21 nt, synthetic construct
  source 1..21: mol_type = other RNA
tccgatgataccttcttgaga

SEQ ID NO: 99977 - RNA, 21 nt, synthetic construct
  source 1..21: mol_type = other RNA
tccgatttctcggccgggcgc

SEQ ID NO: 99978 - RNA, 21 nt, synthetic construct
  source 1..21: mol_type = other RNA
tccgattttacttactagttg

SEQ ID NO: 99979 - RNA, 21 nt, synthetic construct
  source 1..21: mol_type = other RNA
tccgccaccacgcctggctaa

SEQ ID NO: 99980 - RNA, 21 nt, synthetic construct
  source 1..21: mol_type = other RNA
tccgcctccctggttcaagct

SEQ ID NO: 99981 - RNA, 21 nt, synthetic construct
  source 1..21: mol_type = other RNA
tccgcctcctggtgggttcat

SEQ ID NO: 99982 - RNA, 21 nt, synthetic construct
  source 1..21: mol_type = other RNA
tccgcggctgggctttctcca

SEQ ID NO: 99983 - RNA, 21 nt, synthetic construct
  source 1..21: mol_type = other RNA
tccgcgtttattagaactaga

SEQ ID NO: 99984 - RNA, 21 nt, synthetic construct
  source 1..21: mol_type = other RNA
tccgctaaacattttattagg

SEQ ID NO: 99985 - RNA, 21 nt, synthetic construct
  source 1..21: mol_type = other RNA
tccgctctggttttaaagaaa

SEQ ID NO: 99986 - RNA, 21 nt, synthetic construct
  source 1..21: mol_type = other RNA
tccggagtagctgggattaca

SEQ ID NO: 99987 - RNA, 21 nt, synthetic construct
  source 1..21: mol_type = other RNA
tccggctctgcggcgggtctg

SEQ ID NO: 99988 - RNA, 21 nt, synthetic construct
  source 1..21: mol_type = other RNA
tccggctttatgagacacacg

SEQ ID NO: 99989 - RNA, 21 nt, synthetic construct
  source 1..21: mol_type = other RNA
tccgggaacatgacatgtatt

SEQ ID NO: 99990 - RNA, 21 nt, synthetic construct
  source 1..21: mol_type = other RNA
tccgggacttggaagtgaagt

SEQ ID NO: 99991 - RNA, 21 nt, synthetic construct
  source 1..21: mol_type = other RNA
tccgggatcctgtccaggcgc

SEQ ID NO: 99992 - RNA, 21 nt, synthetic construct
  source 1..21: mol_type = other RNA
tccgggcctcccacctgcgag

SEQ ID NO: 99993 - RNA, 21 nt, synthetic construct
  source 1..21: mol_type = other RNA
tccggggagcttttgaaactg

SEQ ID NO: 99994 - RNA, 21 nt, synthetic construct
  source 1..21: mol_type = other RNA
tccgggtaaaaagcctgcttc

SEQ ID NO: 99995 - RNA, 21 nt, synthetic construct
  source 1..21: mol_type = other RNA
tccggtcgttggatttatctt

SEQ ID NO: 99996 - RNA, 21 nt, synthetic construct
  source 1..21: mol_type = other RNA
tccggtctcagtttttaattt

SEQ ID NO: 99997 - RNA, 21 nt, synthetic construct
  source 1..21: mol_type = other RNA
tccggttctcaggagcctagt

SEQ ID NO: 99998 - RNA, 21 nt, synthetic construct
  source 1..21: mol_type = other RNA
tccggttgtatagcagtaaaa

SEQ ID NO: 99999 - RNA, 21 nt, synthetic construct
  source 1..21: mol_type = other RNA
tccgtagaccgaggaaacccg

SEQ ID NO: 100000 - RNA, 21 nt, synthetic construct
  source 1..21: mol_type = other RNA
tccgtagctgtcgctctcctg

SEQ ID NO: 100001 - RNA, 21 nt, synthetic construct
  source 1..21: mol_type = other RNA
tccgtatccagtggttttttg

SEQ ID NO: 100002 - RNA, 21 nt, synthetic construct
  source 1..21: mol_type = other RNA
tccgtctagccacttcctatt

SEQ ID NO: 100003 - RNA, 21 nt, synthetic construct
  source 1..21: mol_type = other RNA
tccgtctcaagattgtgtgat

SEQ ID NO: 100004 - RNA, 21 nt, synthetic construct
  source 1..21: mol_type = other RNA
tccgtgcatgcctctgttaca

SEQ ID NO: 100005 - RNA, 21 nt, synthetic construct
  source 1..21: mol_type = other RNA
tccgtggaaggccttctcctc

SEQ ID NO: 100006 - RNA, 21 nt, synthetic construct
  source 1..21: mol_type = other RNA
tccgtgtgacaaaaagtaggg

SEQ ID NO: 100007 - RNA, 21 nt, synthetic construct
  source 1..21: mol_type = other RNA
tccgttgaagtctttggccca

SEQ ID NO: 100008 - RNA, 21 nt, synthetic construct
  source 1..21: mol_type = other RNA
tccgttgctgcatagtactcc

SEQ ID NO: 100009 - RNA, 21 nt, synthetic construct
  source 1..21: mol_type = other RNA
tccgttttgcaagatgcataa

SEQ ID NO: 100010 - RNA, 21 nt, synthetic construct
  source 1..21: mol_type = other RNA
tccgtttttcaggttcaagcg

SEQ ID NO: 100011 - RNA, 21 nt, synthetic construct
  source 1..21: mol_type = other RNA
tcctaaaacatggtccacaga

SEQ ID NO: 100012 - RNA, 21 nt, synthetic construct
  source 1..21: mol_type = other RNA
tcctaaaactccccatgcagg

SEQ ID NO: 100013 - RNA, 21 nt, synthetic construct
  source 1..21: mol_type = other RNA
tcctaaaattccttcctttga

SEQ ID NO: 100014 - RNA, 21 nt, synthetic construct
  source 1..21: mol_type = other RNA
tcctaaacacttagcatgttg

SEQ ID NO: 100015 - RNA, 21 nt, synthetic construct
  source 1..21: mol_type = other RNA
tcctaaacctgctacgaatga

SEQ ID NO: 100016 - RNA, 21 nt, synthetic construct
  source 1..21: mol_type = other RNA
tcctaaagagagtgacagctg

SEQ ID NO: 100017 - RNA, 21 nt, synthetic construct
  source 1..21: mol_type = other RNA
tcctaaccactgttatctggg

SEQ ID NO: 100018 - RNA, 21 nt, synthetic construct
  source 1..21: mol_type = other RNA
tcctaactcaagagttacttc

SEQ ID NO: 100019 - RNA, 21 nt, synthetic construct
  source 1..21: mol_type = other RNA
tcctaactggtctcctttcta

SEQ ID NO: 100020 - RNA, 21 nt, synthetic construct
  source 1..21: mol_type = other RNA
tcctaagaaagggtgtgtgaa

SEQ ID NO: 100021 - RNA, 21 nt, synthetic construct
  source 1..21: mol_type = other RNA
tcctaagcatgagatactacg

SEQ ID NO: 100022 - RNA, 21 nt, synthetic construct
  source 1..21: mol_type = other RNA
tcctaagccatctaattcaca

SEQ ID NO: 100023 - RNA, 21 nt, synthetic construct
  source 1..21: mol_type = other RNA
tcctaagtcttcttctaagct

SEQ ID NO: 100024 - RNA, 21 nt, synthetic construct
  source 1..21: mol_type = other RNA
tcctaagttttgggggaagag

SEQ ID NO: 100025 - RNA, 21 nt, synthetic construct
  source 1..21: mol_type = other RNA
tcctaatacagtaaagcccca

SEQ ID NO: 100026 - RNA, 21 nt, synthetic construct
  source 1..21: mol_type = other RNA
tcctaatctaacatgttacaa

SEQ ID NO: 100027 - RNA, 21 nt, synthetic construct
  source 1..21: mol_type = other RNA
tcctaatgggcgtggagcggt

SEQ ID NO: 100028 - RNA, 21 nt, synthetic construct
  source 1..21: mol_type = other RNA
tcctacacatatctttaggtg

SEQ ID NO: 100029 - RNA, 21 nt, synthetic construct
  source 1..21: mol_type = other RNA
tcctacatactgcactctcaa

SEQ ID NO: 100030 - RNA, 21 nt, synthetic construct
  source 1..21: mol_type = other RNA
tcctacccaagcttaggtcag

SEQ ID NO: 100031 - RNA, 21 nt, synthetic construct
  source 1..21: mol_type = other RNA
tcctaccctgaggatataacg

SEQ ID NO: 100032 - RNA, 21 nt, synthetic construct
  source 1..21: mol_type = other RNA
tcctaccctgccttccttggg

SEQ ID NO: 100033 - RNA, 21 nt, synthetic construct
  source 1..21: mol_type = other RNA
tcctaccttccaaagtatgca

SEQ ID NO: 100034 - RNA, 21 nt, synthetic construct
  source 1..21: mol_type = other RNA
tcctactaacaagaaagggta

SEQ ID NO: 100035 - RNA, 21 nt, synthetic construct
  source 1..21: mol_type = other RNA
tcctactttcttcaaccatac

SEQ ID NO: 100036 - RNA, 21 nt, synthetic construct
  source 1..21: mol_type = other RNA
tcctagactgccaggtaggga

SEQ ID NO: 100037 - RNA, 21 nt, synthetic construct
  source 1..21: mol_type = other RNA
tcctagattccctctggcctt

SEQ ID NO: 100038 - RNA, 21 nt, synthetic construct
  source 1..21: mol_type = other RNA
tcctagattgaccttctactt

SEQ ID NO: 100039 - RNA, 21 nt, synthetic construct
  source 1..21: mol_type = other RNA
tcctagccccaaatacctctg

SEQ ID NO: 100040 - RNA, 21 nt, synthetic construct
  source 1..21: mol_type = other RNA
tcctatagttaagtctgaaag

SEQ ID NO: 100041 - RNA, 21 nt, synthetic construct
  source 1..21: mol_type = other RNA
tcctatattgtcaatggggaa

SEQ ID NO: 100042 - RNA, 21 nt, synthetic construct
  source 1..21: mol_type = other RNA
tcctatcagaagcacaccaag

SEQ ID NO: 100043 - RNA, 21 nt, synthetic construct
  source 1..21: mol_type = other RNA
tcctatcagagcatgtcccct

SEQ ID NO: 100044 - RNA, 21 nt, synthetic construct
  source 1..21: mol_type = other RNA
tcctatctaagcctactgctc

SEQ ID NO: 100045 - RNA, 21 nt, synthetic construct
  source 1..21: mol_type = other RNA
tcctatgaaaatttagcttct

SEQ ID NO: 100046 - RNA, 21 nt, synthetic construct
  source 1..21: mol_type = other RNA
tcctatgtggggaatgctcat

SEQ ID NO: 100047 - RNA, 21 nt, synthetic construct
  source 1..21: mol_type = other RNA
tcctattcacactgctcctgc

SEQ ID NO: 100048 - RNA, 21 nt, synthetic construct
  source 1..21: mol_type = other RNA
tcctattttataatgggcaat

SEQ ID NO: 100049 - RNA, 21 nt, synthetic construct
  source 1..21: mol_type = other RNA
tcctattttgttattagggta

SEQ ID NO: 100050 - RNA, 21 nt, synthetic construct
  source 1..21: mol_type = other RNA
tcctcaacaagagaggacagt

SEQ ID NO: 100051 - RNA, 21 nt, synthetic construct
  source 1..21: mol_type = other RNA
tcctcaatcatgtcaagaatg

SEQ ID NO: 100052 - RNA, 21 nt, synthetic construct
  source 1..21: mol_type = other RNA
tcctcacaacaggcctgagcc

SEQ ID NO: 100053 - RNA, 21 nt, synthetic construct
  source 1..21: mol_type = other RNA
tcctcacatcagttaccacca

SEQ ID NO: 100054 - RNA, 21 nt, synthetic construct
  source 1..21: mol_type = other RNA
tcctcacatgtttggtcaatt

SEQ ID NO: 100055 - RNA, 21 nt, synthetic construct
  source 1..21: mol_type = other RNA
tcctcacctcacattcacagc

SEQ ID NO: 100056 - RNA, 21 nt, synthetic construct
  source 1..21: mol_type = other RNA
tcctcactgtgatacctagta

SEQ ID NO: 100057 - RNA, 21 nt, synthetic construct
  source 1..21: mol_type = other RNA
tcctcagaaggccaaggcagg

SEQ ID NO: 100058 - RNA, 21 nt, synthetic construct
  source 1..21: mol_type = other RNA
tcctcagccccctccctacca

SEQ ID NO: 100059 - RNA, 21 nt, synthetic construct
  source 1..21: mol_type = other RNA
tcctcaggatctacattaaaa

SEQ ID NO: 100060 - RNA, 21 nt, synthetic construct
  source 1..21: mol_type = other RNA
tcctcaggctccaggtagaat

SEQ ID NO: 100061 - RNA, 21 nt, synthetic construct
  source 1..21: mol_type = other RNA
tcctcagggtaggaaaagact

SEQ ID NO: 100062 - RNA, 21 nt, synthetic construct
  source 1..21: mol_type = other RNA
tcctcatccctcatatcagtt

SEQ ID NO: 100063 - RNA, 21 nt, synthetic construct
  source 1..21: mol_type = other RNA
tcctcatgtccatagttaatg

SEQ ID NO: 100064 - RNA, 21 nt, synthetic construct
  source 1..21: mol_type = other RNA
tcctcattcacactagtcacc

SEQ ID NO: 100065 - RNA, 21 nt, synthetic construct
  source 1..21: mol_type = other RNA
tcctccaacccattccaggtt

SEQ ID NO: 100066 - RNA, 21 nt, synthetic construct
  source 1..21: mol_type = other RNA
tcctccaaggctgcccgctcc

SEQ ID NO: 100067 - RNA, 21 nt, synthetic construct
  source 1..21: mol_type = other RNA
tcctccaatgtttttaattct

SEQ ID NO: 100068 - RNA, 21 nt, synthetic construct
  source 1..21: mol_type = other RNA
tcctccagccttaatctcctg

SEQ ID NO: 100069 - RNA, 21 nt, synthetic construct
  source 1..21: mol_type = other RNA
tcctcccacttacatcagcag

SEQ ID NO: 100070 - RNA, 21 nt, synthetic construct
  source 1..21: mol_type = other RNA
tcctcccggctaagatgaggt

SEQ ID NO: 100071 - RNA, 21 nt, synthetic construct
  source 1..21: mol_type = other RNA
tcctccctggagaggcaaagg

SEQ ID NO: 100072 - RNA, 21 nt, synthetic construct
  source 1..21: mol_type = other RNA
tcctcccttcagcctgtgtca

SEQ ID NO: 100073 - RNA, 21 nt, synthetic construct
  source 1..21: mol_type = other RNA
tcctccggggacccagtgccc

SEQ ID NO: 100074 - RNA, 21 nt, synthetic construct
  source 1..21: mol_type = other RNA
tcctccgtagctgtcgctctc

SEQ ID NO: 100075 - RNA, 21 nt, synthetic construct
  source 1..21: mol_type = other RNA
tcctcctcctggccacatgct

SEQ ID NO: 100076 - RNA, 21 nt, synthetic construct
  source 1..21: mol_type = other RNA
tcctcctctacaagttttaac

SEQ ID NO: 100077 - RNA, 21 nt, synthetic construct
  source 1..21: mol_type = other RNA
tcctcctctggacattatcct

SEQ ID NO: 100078 - RNA, 21 nt, synthetic construct
  source 1..21: mol_type = other RNA
tcctcctgccttggccttctg

SEQ ID NO: 100079 - RNA, 21 nt, synthetic construct
  source 1..21: mol_type = other RNA
tcctcctggccacatgcttcc

SEQ ID NO: 100080 - RNA, 21 nt, synthetic construct
  source 1..21: mol_type = other RNA
tcctccttctgctcactttgg

SEQ ID NO: 100081 - RNA, 21 nt, synthetic construct
  source 1..21: mol_type = other RNA
tcctccttttgtagagggaat

SEQ ID NO: 100082 - RNA, 21 nt, synthetic construct
  source 1..21: mol_type = other RNA
tcctcggtctacggacgcagg

SEQ ID NO: 100083 - RNA, 21 nt, synthetic construct
  source 1..21: mol_type = other RNA
tcctcgtaaaagctaatctac

SEQ ID NO: 100084 - RNA, 21 nt, synthetic construct
  source 1..21: mol_type = other RNA
tcctcgttttcaacaaaggtt

SEQ ID NO: 100085 - RNA, 21 nt, synthetic construct
  source 1..21: mol_type = other RNA
tcctctacaagttttaactta

SEQ ID NO: 100086 - RNA, 21 nt, synthetic construct
  source 1..21: mol_type = other RNA
tcctctactttcacataaggt

SEQ ID NO: 100087 - RNA, 21 nt, synthetic construct
  source 1..21: mol_type = other RNA
tcctctatttttgtctggtgg

SEQ ID NO: 100088 - RNA, 21 nt, synthetic construct
  source 1..21: mol_type = other RNA
tcctctcactccaaagcaaac

SEQ ID NO: 100089 - RNA, 21 nt, synthetic construct
  source 1..21: mol_type = other RNA
tcctctcccgccggagtccgc

SEQ ID NO: 100090 - RNA, 21 nt, synthetic construct
  source 1..21: mol_type = other RNA
tcctctcttaaatccgagaca

SEQ ID NO: 100091 - RNA, 21 nt, synthetic construct
  source 1..21: mol_type = other RNA
tcctctcttggaatgtgcacc

SEQ ID NO: 100092 - RNA, 21 nt, synthetic construct
  source 1..21: mol_type = other RNA
tcctctcttgttgaggatgac

SEQ ID NO: 100093 - RNA, 21 nt, synthetic construct
  source 1..21: mol_type = other RNA
tcctctgactttatggtatca

SEQ ID NO: 100094 - RNA, 21 nt, synthetic construct
  source 1..21: mol_type = other RNA
tcctctggacattatcctatc

SEQ ID NO: 100095 - RNA, 21 nt, synthetic construct
  source 1..21: mol_type = other RNA
tcctctggccctccatttccc

SEQ ID NO: 100096 - RNA, 21 nt, synthetic construct
  source 1..21: mol_type = other RNA
tcctctggctgacctggtact

SEQ ID NO: 100097 - RNA, 21 nt, synthetic construct
  source 1..21: mol_type = other RNA
tcctctgtagataaacgttaa

SEQ ID NO: 100098 - RNA, 21 nt, synthetic construct
  source 1..21: mol_type = other RNA
tcctcttcctcatccctcata

SEQ ID NO: 100099 - RNA, 21 nt, synthetic construct
  source 1..21: mol_type = other RNA
tcctcttcgggtgtcagaatt

SEQ ID NO: 100100 - RNA, 21 nt, synthetic construct
  source 1..21: mol_type = other RNA
tcctcttctgaagaggctttc

SEQ ID NO: 100101 - RNA, 21 nt, synthetic construct
  source 1..21: mol_type = other RNA
tcctctttcatatctgatttt

SEQ ID NO: 100102 - RNA, 21 nt, synthetic construct
  source 1..21: mol_type = other RNA
tcctgaaaattccttcccctt

SEQ ID NO: 100103 - RNA, 21 nt, synthetic construct
  source 1..21: mol_type = other RNA
tcctgaaatgaaccaaacttg

SEQ ID NO: 100104 - RNA, 21 nt, synthetic construct
  source 1..21: mol_type = other RNA
tcctgaacaaaatttttgcaa

SEQ ID NO: 100105 - RNA, 21 nt, synthetic construct
  source 1..21: mol_type = other RNA
tcctgaactcgtggcctcaag

SEQ ID NO: 100106 - RNA, 21 nt, synthetic construct
  source 1..21: mol_type = other RNA
tcctgaagtctttggtgatcc

SEQ ID NO: 100107 - RNA, 21 nt, synthetic construct
  source 1..21: mol_type = other RNA
tcctgaatactattcctattg

SEQ ID NO: 100108 - RNA, 21 nt, synthetic construct
  source 1..21: mol_type = other RNA
tcctgaatgatttccctgcat

SEQ ID NO: 100109 - RNA, 21 nt, synthetic construct
  source 1..21: mol_type = other RNA
tcctgaattctaacattatct

SEQ ID NO: 100110 - RNA, 21 nt, synthetic construct
  source 1..21: mol_type = other RNA
tcctgaattctaatgaactcc

SEQ ID NO: 100111 - RNA, 21 nt, synthetic construct
  source 1..21: mol_type = other RNA
tcctgacctcaagcgatccag

SEQ ID NO: 100112 - RNA, 21 nt, synthetic construct
  source 1..21: mol_type = other RNA
tcctgacctcagatatccacc

SEQ ID NO: 100113 - RNA, 21 nt, synthetic construct
  source 1..21: mol_type = other RNA
tcctgacctctgcagttagca

SEQ ID NO: 100114 - RNA, 21 nt, synthetic construct
  source 1..21: mol_type = other RNA
tcctgagaaccggaacttgag

SEQ ID NO: 100115 - RNA, 21 nt, synthetic construct
  source 1..21: mol_type = other RNA
tcctgagacttaggcaaagga

SEQ ID NO: 100116 - RNA, 21 nt, synthetic construct
  source 1..21: mol_type = other RNA
tcctgagcaaggaaggaaagg

SEQ ID NO: 100117 - RNA, 21 nt, synthetic construct
  source 1..21: mol_type = other RNA
tcctgagctttccttagttcg

SEQ ID NO: 100118 - RNA, 21 nt, synthetic construct
  source 1..21: mol_type = other RNA
tcctgaggaagctaatcaagc

SEQ ID NO: 100119 - RNA, 21 nt, synthetic construct
  source 1..21: mol_type = other RNA
tcctgagggctttgtgaaggg

SEQ ID NO: 100120 - RNA, 21 nt, synthetic construct
  source 1..21: mol_type = other RNA
tcctgagggtgagaccaccac

SEQ ID NO: 100121 - RNA, 21 nt, synthetic construct
  source 1..21: mol_type = other RNA
tcctgataaggggctatcttt

SEQ ID NO: 100122 - RNA, 21 nt, synthetic construct
  source 1..21: mol_type = other RNA
tcctgatcacaccctcctacc

SEQ ID NO: 100123 - RNA, 21 nt, synthetic construct
  source 1..21: mol_type = other RNA
tcctgatcagcaccctcaaat

SEQ ID NO: 100124 - RNA, 21 nt, synthetic construct
  source 1..21: mol_type = other RNA
tcctgatggacattctgcttc

SEQ ID NO: 100125 - RNA, 21 nt, synthetic construct
  source 1..21: mol_type = other RNA
tcctgatttaggccactctca

SEQ ID NO: 100126 - RNA, 21 nt, synthetic construct
  source 1..21: mol_type = other RNA
tcctgcacatgcacaaggtca

SEQ ID NO: 100127 - RNA, 21 nt, synthetic construct
  source 1..21: mol_type = other RNA
tcctgcactcaagcaatcctc

SEQ ID NO: 100128 - RNA, 21 nt, synthetic construct
  source 1..21: mol_type = other RNA
tcctgcagacatgcacgagaa

SEQ ID NO: 100129 - RNA, 21 nt, synthetic construct
  source 1..21: mol_type = other RNA
tcctgcatatgtttttattag

SEQ ID NO: 100130 - RNA, 21 nt, synthetic construct
  source 1..21: mol_type = other RNA
tcctgcatggggagttttagg

SEQ ID NO: 100131 - RNA, 21 nt, synthetic construct
  source 1..21: mol_type = other RNA
tcctgcccctccactccacaa

SEQ ID NO: 100132 - RNA, 21 nt, synthetic construct
  source 1..21: mol_type = other RNA
tcctgccttcctgacctctgc

SEQ ID NO: 100133 - RNA, 21 nt, synthetic construct
  source 1..21: mol_type = other RNA
tcctgccttggccttctgagg

SEQ ID NO: 100134 - RNA, 21 nt, synthetic construct
  source 1..21: mol_type = other RNA
tcctgcctttgttcatcatct

SEQ ID NO: 100135 - RNA, 21 nt, synthetic construct
  source 1..21: mol_type = other RNA
tcctgctaacaccttgaactg

SEQ ID NO: 100136 - RNA, 21 nt, synthetic construct
  source 1..21: mol_type = other RNA
tcctgctattttattagatag

SEQ ID NO: 100137 - RNA, 21 nt, synthetic construct
  source 1..21: mol_type = other RNA
tcctgctgggctattgttttg

SEQ ID NO: 100138 - RNA, 21 nt, synthetic construct
  source 1..21: mol_type = other RNA
tcctgctgtcgtttatgcatt

SEQ ID NO: 100139 - RNA, 21 nt, synthetic construct
  source 1..21: mol_type = other RNA
tcctgcttcccccaaagaagg

SEQ ID NO: 100140 - RNA, 21 nt, synthetic construct
  source 1..21: mol_type = other RNA
tcctggaaaaagaccataata

SEQ ID NO: 100141 - RNA, 21 nt, synthetic construct
  source 1..21: mol_type = other RNA
tcctggaaaacttctctggag

SEQ ID NO: 100142 - RNA, 21 nt, synthetic construct
  source 1..21: mol_type = other RNA
tcctggaatagtagcttcaat

SEQ ID NO: 100143 - RNA, 21 nt, synthetic construct
  source 1..21: mol_type = other RNA
tcctggactgtgatgactgta

SEQ ID NO: 100144 - RNA, 21 nt, synthetic construct
  source 1..21: mol_type = other RNA
tcctggagggctcccagtgcc

SEQ ID NO: 100145 - RNA, 21 nt, synthetic construct
  source 1..21: mol_type = other RNA
tcctggattgctagtgtcctc

SEQ ID NO: 100146 - RNA, 21 nt, synthetic construct
  source 1..21: mol_type = other RNA
tcctggatttgggaaggatgg

SEQ ID NO: 100147 - RNA, 21 nt, synthetic construct
  source 1..21: mol_type = other RNA
tcctggcagatcaattgacca

SEQ ID NO: 100148 - RNA, 21 nt, synthetic construct
  source 1..21: mol_type = other RNA
tcctggccacatgcttccaaa

SEQ ID NO: 100149 - RNA, 21 nt, synthetic construct
  source 1..21: mol_type = other RNA
tcctggctctagcccagcttc

SEQ ID NO: 100150 - RNA, 21 nt, synthetic construct
  source 1..21: mol_type = other RNA
tcctgggaaaaggatttgttt

SEQ ID NO: 100151 - RNA, 21 nt, synthetic construct
  source 1..21: mol_type = other RNA
tcctgggctcatctaagccta

SEQ ID NO: 100152 - RNA, 21 nt, synthetic construct
  source 1..21: mol_type = other RNA
tcctgggttcaggtgcctcct

SEQ ID NO: 100153 - RNA, 21 nt, synthetic construct
  source 1..21: mol_type = other RNA
tcctgggttctcccttctatt

SEQ ID NO: 100154 - RNA, 21 nt, synthetic construct
  source 1..21: mol_type = other RNA
tcctggtctcccagcatgaag

SEQ ID NO: 100155 - RNA, 21 nt, synthetic construct
  source 1..21: mol_type = other RNA
tcctggtgggttcatgccatt

SEQ ID NO: 100156 - RNA, 21 nt, synthetic construct
  source 1..21: mol_type = other RNA
tcctggttttgatcatcgcat

SEQ ID NO: 100157 - RNA, 21 nt, synthetic construct
  source 1..21: mol_type = other RNA
tcctgtaaacctggaatcctc

SEQ ID NO: 100158 - RNA, 21 nt, synthetic construct
  source 1..21: mol_type = other RNA
tcctgtatatctccttttaag

SEQ ID NO: 100159 - RNA, 21 nt, synthetic construct
  source 1..21: mol_type = other RNA
tcctgtatgccgctggtgaaa

SEQ ID NO: 100160 - RNA, 21 nt, synthetic construct
  source 1..21: mol_type = other RNA
tcctgtcagtgtggttcatat

SEQ ID NO: 100161 - RNA, 21 nt, synthetic construct
  source 1..21: mol_type = other RNA
tcctgtcagtttctgatttat

SEQ ID NO: 100162 - RNA, 21 nt, synthetic construct
  source 1..21: mol_type = other RNA
tcctgtccaggcgcctgcatt

SEQ ID NO: 100163 - RNA, 21 nt, synthetic construct
  source 1..21: mol_type = other RNA
tcctgtctcagagtatatatg

SEQ ID NO: 100164 - RNA, 21 nt, synthetic construct
  source 1..21: mol_type = other RNA
tcctgtcttggacccatgccc

SEQ ID NO: 100165 - RNA, 21 nt, synthetic construct
  source 1..21: mol_type = other RNA
tcctgtgatttatgtggcatt

SEQ ID NO: 100166 - RNA, 21 nt, synthetic construct
  source 1..21: mol_type = other RNA
tcctgtgccaagtccgtgcat

SEQ ID NO: 100167 - RNA, 21 nt, synthetic construct
  source 1..21: mol_type = other RNA
tcctgtgtgcatgctcccatt

SEQ ID NO: 100168 - RNA, 21 nt, synthetic construct
  source 1..21: mol_type = other RNA
tcctgtgtttctgctattctc

SEQ ID NO: 100169 - RNA, 21 nt, synthetic construct
  source 1..21: mol_type = other RNA
tcctgttccgggatcctgtcc

SEQ ID NO: 100170 - RNA, 21 nt, synthetic construct
  source 1..21: mol_type = other RNA
tcctgttctttggagctgtat

SEQ ID NO: 100171 - RNA, 21 nt, synthetic construct
  source 1..21: mol_type = other RNA
tcctgttctttgttagtttat

SEQ ID NO: 100172 - RNA, 21 nt, synthetic construct
  source 1..21: mol_type = other RNA
tcctgttcttttgtaatctaa

SEQ ID NO: 100173 - RNA, 21 nt, synthetic construct
  source 1..21: mol_type = other RNA
tcctgttgctttaacctctgg

SEQ ID NO: 100174 - RNA, 21 nt, synthetic construct
  source 1..21: mol_type = other RNA
tcctgtttctctacatctgga

SEQ ID NO: 100175 - RNA, 21 nt, synthetic construct
  source 1..21: mol_type = other RNA
tcctgtttgagaagtcttttc

SEQ ID NO: 100176 - RNA, 21 nt, synthetic construct
  source 1..21: mol_type = other RNA
tcctgttttagtggctcacag

SEQ ID NO: 100177 - RNA, 21 nt, synthetic construct
  source 1..21: mol_type = other RNA
tccttaaatttctaaggttct

SEQ ID NO: 100178 - RNA, 21 nt, synthetic construct
  source 1..21: mol_type = other RNA
tccttaagcacagactgtgcc

SEQ ID NO: 100179 - RNA, 21 nt, synthetic construct
  source 1..21: mol_type = other RNA
tccttaagccatttcaggttt

SEQ ID NO: 100180 - RNA, 21 nt, synthetic construct
  source 1..21: mol_type = other RNA
tccttaatgccaccgaattgt

SEQ ID NO: 100181 - RNA, 21 nt, synthetic construct
  source 1..21: mol_type = other RNA
tccttaccactataatccaga

SEQ ID NO: 100182 - RNA, 21 nt, synthetic construct
  source 1..21: mol_type = other RNA
tccttaccactgaagtgttga

SEQ ID NO: 100183 - RNA, 21 nt, synthetic construct
  source 1..21: mol_type = other RNA
tccttaccagtgcttgcagcc

SEQ ID NO: 100184 - RNA, 21 nt, synthetic construct
  source 1..21: mol_type = other RNA
tccttacctttatctttggat

SEQ ID NO: 100185 - RNA, 21 nt, synthetic construct
  source 1..21: mol_type = other RNA
tccttactaccaccactaatg

SEQ ID NO: 100186 - RNA, 21 nt, synthetic construct
  source 1..21: mol_type = other RNA
tccttacttccagctcacgtt

SEQ ID NO: 100187 - RNA, 21 nt, synthetic construct
  source 1..21: mol_type = other RNA
tccttagattacaaaagaaca

SEQ ID NO: 100188 - RNA, 21 nt, synthetic construct
  source 1..21: mol_type = other RNA
tccttatagtattacctccca

SEQ ID NO: 100189 - RNA, 21 nt, synthetic construct
  source 1..21: mol_type = other RNA
tccttatccattcatctctcg

SEQ ID NO: 100190 - RNA, 21 nt, synthetic construct
  source 1..21: mol_type = other RNA
tccttatccgataaagggtct

SEQ ID NO: 100191 - RNA, 21 nt, synthetic construct
  source 1..21: mol_type = other RNA
tccttatggatatctggcctg

SEQ ID NO: 100192 - RNA, 21 nt, synthetic construct
  source 1..21: mol_type = other RNA
tccttattgagaagcagaaaa

SEQ ID NO: 100193 - RNA, 21 nt, synthetic construct
  source 1..21: mol_type = other RNA
tccttcagtcagttctctgcc

SEQ ID NO: 100194 - RNA, 21 nt, synthetic construct
  source 1..21: mol_type = other RNA
tccttcatgtcccctgtccaa

SEQ ID NO: 100195 - RNA, 21 nt, synthetic construct
  source 1..21: mol_type = other RNA
tccttccagatgttttacaca

SEQ ID NO: 100196 - RNA, 21 nt, synthetic construct
  source 1..21: mol_type = other RNA
tccttccagtatgatgccact

SEQ ID NO: 100197 - RNA, 21 nt, synthetic construct
  source 1..21: mol_type = other RNA
tccttccagtttatatgccta

SEQ ID NO: 100198 - RNA, 21 nt, synthetic construct
  source 1..21: mol_type = other RNA
tccttcccaaatccaggatgg

SEQ ID NO: 100199 - RNA, 21 nt, synthetic construct
  source 1..21: mol_type = other RNA
tccttcccctggtcgagctgg

SEQ ID NO: 100200 - RNA, 21 nt, synthetic construct
  source 1..21: mol_type = other RNA
tccttcccctttctttggttt

SEQ ID NO: 100201 - RNA, 21 nt, synthetic construct
  source 1..21: mol_type = other RNA
tccttccgacctgtagattgg

SEQ ID NO: 100202 - RNA, 21 nt, synthetic construct
  source 1..21: mol_type = other RNA
tccttcctacacatatcttta

SEQ ID NO: 100203 - RNA, 21 nt, synthetic construct
  source 1..21: mol_type = other RNA
tccttccttcatgtcccctgt

SEQ ID NO: 100204 - RNA, 21 nt, synthetic construct
  source 1..21: mol_type = other RNA
tccttccttgctcaggagtaa

SEQ ID NO: 100205 - RNA, 21 nt, synthetic construct
  source 1..21: mol_type = other RNA
tccttcctttgatgacttaca

SEQ ID NO: 100206 - RNA, 21 nt, synthetic construct
  source 1..21: mol_type = other RNA
tccttctaatcagtaacttaa

SEQ ID NO: 100207 - RNA, 21 nt, synthetic construct
  source 1..21: mol_type = other RNA
tccttctacatccccccaccc

SEQ ID NO: 100208 - RNA, 21 nt, synthetic construct
  source 1..21: mol_type = other RNA
tccttctcatagtcttccaaa

SEQ ID NO: 100209 - RNA, 21 nt, synthetic construct
  source 1..21: mol_type = other RNA
tccttctcgtgtgagctctag

SEQ ID NO: 100210 - RNA, 21 nt, synthetic construct
  source 1..21: mol_type = other RNA
tccttctcttatactagtaga

SEQ ID NO: 100211 - RNA, 21 nt, synthetic construct
  source 1..21: mol_type = other RNA
tccttctgaaggcactaacaa

SEQ ID NO: 100212 - RNA, 21 nt, synthetic construct
  source 1..21: mol_type = other RNA
tccttctgagaaggcgaaatg

SEQ ID NO: 100213 - RNA, 21 nt, synthetic construct
  source 1..21: mol_type = other RNA
tccttctgcaggctgaactgc

SEQ ID NO: 100214 - RNA, 21 nt, synthetic construct
  source 1..21: mol_type = other RNA
tccttctgccttgacctccca

SEQ ID NO: 100215 - RNA, 21 nt, synthetic construct
  source 1..21: mol_type = other RNA
tccttctgctcactttgggat

SEQ ID NO: 100216 - RNA, 21 nt, synthetic construct
  source 1..21: mol_type = other RNA
tccttctggaagatttctact

SEQ ID NO: 100217 - RNA, 21 nt, synthetic construct
  source 1..21: mol_type = other RNA
tccttcttaagacatttggga

SEQ ID NO: 100218 - RNA, 21 nt, synthetic construct
  source 1..21: mol_type = other RNA
tccttcttcacacattaacta

SEQ ID NO: 100219 - RNA, 21 nt, synthetic construct
  source 1..21: mol_type = other RNA
tccttctttgggggaagcagg

SEQ ID NO: 100220 - RNA, 21 nt, synthetic construct
  source 1..21: mol_type = other RNA
tccttgatcagcttcctaccc

SEQ ID NO: 100221 - RNA, 21 nt, synthetic construct
  source 1..21: mol_type = other RNA
tccttgcacattagaatcatc

SEQ ID NO: 100222 - RNA, 21 nt, synthetic construct
  source 1..21: mol_type = other RNA
tccttgcaccaactccacatt

SEQ ID NO: 100223 - RNA, 21 nt, synthetic construct
  source 1..21: mol_type = other RNA
tccttgccaacagttactttc

SEQ ID NO: 100224 - RNA, 21 nt, synthetic construct
  source 1..21: mol_type = other RNA
tccttgctatgtaatctcatg

SEQ ID NO: 100225 - RNA, 21 nt, synthetic construct
  source 1..21: mol_type = other RNA
tccttgctcaggagtaactgc

SEQ ID NO: 100226 - RNA, 21 nt, synthetic construct
  source 1..21: mol_type = other RNA
tccttgctgaagaataactgt

SEQ ID NO: 100227 - RNA, 21 nt, synthetic construct
  source 1..21: mol_type = other RNA
tccttgcttgtcttgaatagc

SEQ ID NO: 100228 - RNA, 21 nt, synthetic construct
  source 1..21: mol_type = other RNA
tccttggagaagagttctgaa

SEQ ID NO: 100229 - RNA, 21 nt, synthetic construct
  source 1..21: mol_type = other RNA
tccttggattgctaaactgtt

SEQ ID NO: 100230 - RNA, 21 nt, synthetic construct
  source 1..21: mol_type = other RNA
tccttgggcacactccccagt

SEQ ID NO: 100231 - RNA, 21 nt, synthetic construct
  source 1..21: mol_type = other RNA
tccttgtatggagactagtac

SEQ ID NO: 100232 - RNA, 21 nt, synthetic construct
  source 1..21: mol_type = other RNA
tccttgtcctaaaattccttc

SEQ ID NO: 100233 - RNA, 21 nt, synthetic construct
  source 1..21: mol_type = other RNA
tccttgtgatctatgcatact

SEQ ID NO: 100234 - RNA, 21 nt, synthetic construct
  source 1..21: mol_type = other RNA
tccttgtggtcttaagagact

SEQ ID NO: 100235 - RNA, 21 nt, synthetic construct
  source 1..21: mol_type = other RNA
tccttgtgtcttaaattcaaa

SEQ ID NO: 100236 - RNA, 21 nt, synthetic construct
  source 1..21: mol_type = other RNA
tccttgtgttttatttggctg

SEQ ID NO: 100237 - RNA, 21 nt, synthetic construct
  source 1..21: mol_type = other RNA
tcctttaacgtatctgggaaa

SEQ ID NO: 100238 - RNA, 21 nt, synthetic construct
  source 1..21: mol_type = other RNA
tcctttaatttgggtttgagt

SEQ ID NO: 100239 - RNA, 21 nt, synthetic construct
  source 1..21: mol_type = other RNA
tcctttcaaagagacctgatt

SEQ ID NO: 100240 - RNA, 21 nt, synthetic construct
  source 1..21: mol_type = other RNA
tcctttcaaggtatctcccca

SEQ ID NO: 100241 - RNA, 21 nt, synthetic construct
  source 1..21: mol_type = other RNA
tcctttcagtcggttcttcac

SEQ ID NO: 100242 - RNA, 21 nt, synthetic construct
  source 1..21: mol_type = other RNA
tcctttccagaggttctttta

SEQ ID NO: 100243 - RNA, 21 nt, synthetic construct
  source 1..21: mol_type = other RNA
tcctttcccttctgctcggct

SEQ ID NO: 100244 - RNA, 21 nt, synthetic construct
  source 1..21: mol_type = other RNA
tcctttccttccttgctcagg

SEQ ID NO: 100245 - RNA, 21 nt, synthetic construct
  source 1..21: mol_type = other RNA
tcctttccttgtcctaaaatt

SEQ ID NO: 100246 - RNA, 21 nt, synthetic construct
  source 1..21: mol_type = other RNA
tcctttctagaatgcatccct

SEQ ID NO: 100247 - RNA, 21 nt, synthetic construct
  source 1..21: mol_type = other RNA
tcctttctaggcatctatttc

SEQ ID NO: 100248 - RNA, 21 nt, synthetic construct
  source 1..21: mol_type = other RNA
tcctttctatacttcatcttt

SEQ ID NO: 100249 - RNA, 21 nt, synthetic construct
  source 1..21: mol_type = other RNA
tcctttcttaccctcacagtc

SEQ ID NO: 100250 - RNA, 21 nt, synthetic construct
  source 1..21: mol_type = other RNA
tcctttcttggtctgcagact

SEQ ID NO: 100251 - RNA, 21 nt, synthetic construct
  source 1..21: mol_type = other RNA
tcctttgaggtaagaacttgt

SEQ ID NO: 100252 - RNA, 21 nt, synthetic construct
  source 1..21: mol_type = other RNA
tcctttgatgacttacagata

SEQ ID NO: 100253 - RNA, 21 nt, synthetic construct
  source 1..21: mol_type = other RNA
tcctttgatgcacaaaagttt

SEQ ID NO: 100254 - RNA, 21 nt, synthetic construct
  source 1..21: mol_type = other RNA
tcctttgcacacaccaaatca

SEQ ID NO: 100255 - RNA, 21 nt, synthetic construct
  source 1..21: mol_type = other RNA
tcctttgcctaagtctcagga

SEQ ID NO: 100256 - RNA, 21 nt, synthetic construct
  source 1..21: mol_type = other RNA
tcctttgcctttcactttgat

SEQ ID NO: 100257 - RNA, 21 nt, synthetic construct
  source 1..21: mol_type = other RNA
tcctttgcgtctgtgattatc

SEQ ID NO: 100258 - RNA, 21 nt, synthetic construct
  source 1..21: mol_type = other RNA
tcctttgcttcccacttcgaa

SEQ ID NO: 100259 - RNA, 21 nt, synthetic construct
  source 1..21: mol_type = other RNA
tcctttgggaggtcaaggcag

SEQ ID NO: 100260 - RNA, 21 nt, synthetic construct
  source 1..21: mol_type = other RNA
tcctttgtgcaggtctgggtt

SEQ ID NO: 100261 - RNA, 21 nt, synthetic construct
  source 1..21: mol_type = other RNA
tcctttgtgtcaagtacaact

SEQ ID NO: 100262 - RNA, 21 nt, synthetic construct
  source 1..21: mol_type = other RNA
tccttttaagagtgaagaaac

SEQ ID NO: 100263 - RNA, 21 nt, synthetic construct
  source 1..21: mol_type = other RNA
tccttttaagggaaacactca

SEQ ID NO: 100264 - RNA, 21 nt, synthetic construct
  source 1..21: mol_type = other RNA
tccttttatgtgcagtctaac

SEQ ID NO: 100265 - RNA, 21 nt, synthetic construct
  source 1..21: mol_type = other RNA
tccttttcccaggagctagaa

SEQ ID NO: 100266 - RNA, 21 nt, synthetic construct
  source 1..21: mol_type = other RNA
tccttttcctgttccgggatc

SEQ ID NO: 100267 - RNA, 21 nt, synthetic construct
  source 1..21: mol_type = other RNA
tccttttcgagactgagtaat

SEQ ID NO: 100268 - RNA, 21 nt, synthetic construct
  source 1..21: mol_type = other RNA
tccttttgagtttggtgtatt

SEQ ID NO: 100269 - RNA, 21 nt, synthetic construct
  source 1..21: mol_type = other RNA
tccttttgtagagggaatttg

SEQ ID NO: 100270 - RNA, 21 nt, synthetic construct
  source 1..21: mol_type = other RNA
tcctttttatcacccttataa

SEQ ID NO: 100271 - RNA, 21 nt, synthetic construct
  source 1..21: mol_type = other RNA
tccttttttactgacttttcc

SEQ ID NO: 100272 - RNA, 21 nt, synthetic construct
  source 1..21: mol_type = other RNA
tccttttttatgtgctttctc

SEQ ID NO: 100273 - RNA, 21 nt, synthetic construct
  source 1..21: mol_type = other RNA
tcgaaaacctgaaatggctta

SEQ ID NO: 100274 - RNA, 21 nt, synthetic construct
  source 1..21: mol_type = other RNA
tcgaaaaggaatggaattctg

SEQ ID NO: 100275 - RNA, 21 nt, synthetic construct
  source 1..21: mol_type = other RNA
tcgaaaatgggccaaagactt

SEQ ID NO: 100276 - RNA, 21 nt, synthetic construct
  source 1..21: mol_type = other RNA
tcgaaagttcagatagaatta

SEQ ID NO: 100277 - RNA, 21 nt, synthetic construct
  source 1..21: mol_type = other RNA
tcgaaataatcattgttaggt

SEQ ID NO: 100278 - RNA, 21 nt, synthetic construct
  source 1..21: mol_type = other RNA
tcgaactaaggaaagctcagg

SEQ ID NO: 100279 - RNA, 21 nt, synthetic construct
  source 1..21: mol_type = other RNA
tcgaactctcgacctcgtgat

SEQ ID NO: 100280 - RNA, 21 nt, synthetic construct
  source 1..21: mol_type = other RNA
tcgaagagaccacaggctctc

SEQ ID NO: 100281 - RNA, 21 nt, synthetic construct
  source 1..21: mol_type = other RNA
tcgaagcaaaacatatgtcag

SEQ ID NO: 100282 - RNA, 21 nt, synthetic construct
  source 1..21: mol_type = other RNA
tcgaagcacaaccactgatgg

SEQ ID NO: 100283 - RNA, 21 nt, synthetic construct
  source 1..21: mol_type = other RNA
tcgaagccttcccctgctgtt

SEQ ID NO: 100284 - RNA, 21 nt, synthetic construct
  source 1..21: mol_type = other RNA
tcgaagcttaatttagatgag

SEQ ID NO: 100285 - RNA, 21 nt, synthetic construct
  source 1..21: mol_type = other RNA
tcgaagcttattaaaatgaac

SEQ ID NO: 100286 - RNA, 21 nt, synthetic construct
  source 1..21: mol_type = other RNA
tcgaaggcctgcttcattccg

SEQ ID NO: 100287 - RNA, 21 nt, synthetic construct
  source 1..21: mol_type = other RNA
tcgaagtgggaagcaaaggat

SEQ ID NO: 100288 - RNA, 21 nt, synthetic construct
  source 1..21: mol_type = other RNA
tcgaagtggtgcttgaactgc

SEQ ID NO: 100289 - RNA, 21 nt, synthetic construct
  source 1..21: mol_type = other RNA
tcgaatcctcacaacaggcct

SEQ ID NO: 100290 - RNA, 21 nt, synthetic construct
  source 1..21: mol_type = other RNA
tcgaattagattgttttgttg

SEQ ID NO: 100291 - RNA, 21 nt, synthetic construct
  source 1..21: mol_type = other RNA
tcgaattatgctaacatgaac

SEQ ID NO: 100292 - RNA, 21 nt, synthetic construct
  source 1..21: mol_type = other RNA
tcgacacacaatccaagtttc

SEQ ID NO: 100293 - RNA, 21 nt, synthetic construct
  source 1..21: mol_type = other RNA
tcgacagtcccttgcctgaca

SEQ ID NO: 100294 - RNA, 21 nt, synthetic construct
  source 1..21: mol_type = other RNA
tcgaccaagttactagaagca

SEQ ID NO: 100295 - RNA, 21 nt, synthetic construct
  source 1..21: mol_type = other RNA
tcgaccaggggaaggagtctg

SEQ ID NO: 100296 - RNA, 21 nt, synthetic construct
  source 1..21: mol_type = other RNA
tcgaccccctgggctcaagcc

SEQ ID NO: 100297 - RNA, 21 nt, synthetic construct
  source 1..21: mol_type = other RNA
tcgagaaaaatggggatatcc

SEQ ID NO: 100298 - RNA, 21 nt, synthetic construct
  source 1..21: mol_type = other RNA
tcgagaagggaagtaaagatc

SEQ ID NO: 100299 - RNA, 21 nt, synthetic construct
  source 1..21: mol_type = other RNA
tcgagactgagtaatattcca

SEQ ID NO: 100300 - RNA, 21 nt, synthetic construct
  source 1..21: mol_type = other RNA
tcgagactgtaatgagctgag

SEQ ID NO: 100301 - RNA, 21 nt, synthetic construct
  source 1..21: mol_type = other RNA
tcgagagatgaatggataagg

SEQ ID NO: 100302 - RNA, 21 nt, synthetic construct
  source 1..21: mol_type = other RNA
tcgagctcctgacctcagata

SEQ ID NO: 100303 - RNA, 21 nt, synthetic construct
  source 1..21: mol_type = other RNA
tcgagctgggtgatgttcaac

SEQ ID NO: 100304 - RNA, 21 nt, synthetic construct
  source 1..21: mol_type = other RNA
tcgaggcatctagttaccact

SEQ ID NO: 100305 - RNA, 21 nt, synthetic construct
  source 1..21: mol_type = other RNA
tcgagggggctgagtatgggt

SEQ ID NO: 100306 - RNA, 21 nt, synthetic construct
  source 1..21: mol_type = other RNA
tcgagggtagcttttcctgct

SEQ ID NO: 100307 - RNA, 21 nt, synthetic construct
  source 1..21: mol_type = other RNA
tcgaggtcgcaccctgagcat

SEQ ID NO: 100308 - RNA, 21 nt, synthetic construct
  source 1..21: mol_type = other RNA
tcgagttctgggagttcatta

SEQ ID NO: 100309 - RNA, 21 nt, synthetic construct
  source 1..21: mol_type = other RNA
tcgatggacatttaggttgtt

SEQ ID NO: 100310 - RNA, 21 nt, synthetic construct
  source 1..21: mol_type = other RNA
tcgattaaaataacacgcaga

SEQ ID NO: 100311 - RNA, 21 nt, synthetic construct
  source 1..21: mol_type = other RNA
tcgcaaagcaacatgctaagt

SEQ ID NO: 100312 - RNA, 21 nt, synthetic construct
  source 1..21: mol_type = other RNA
tcgcaaagtaaaaagcactat

SEQ ID NO: 100313 - RNA, 21 nt, synthetic construct
  source 1..21: mol_type = other RNA
tcgcaatccaaaatcctctgt

SEQ ID NO: 100314 - RNA, 21 nt, synthetic construct
  source 1..21: mol_type = other RNA
tcgcaccctgagcatccccgc

SEQ ID NO: 100315 - RNA, 21 nt, synthetic construct
  source 1..21: mol_type = other RNA
tcgcactccacttcccactgc

SEQ ID NO: 100316 - RNA, 21 nt, synthetic construct
  source 1..21: mol_type = other RNA
tcgcagcatccctgccgcgcg

SEQ ID NO: 100317 - RNA, 21 nt, synthetic construct
  source 1..21: mol_type = other RNA
tcgcagcggggatgctcaggg

SEQ ID NO: 100318 - RNA, 21 nt, synthetic construct
  source 1..21: mol_type = other RNA
tcgcagggccattctgctatg

SEQ ID NO: 100319 - RNA, 21 nt, synthetic construct
  source 1..21: mol_type = other RNA
tcgcagggtgaaacttgaata

SEQ ID NO: 100320 - RNA, 21 nt, synthetic construct
  source 1..21: mol_type = other RNA
tcgcaggtgggaggcccggag

SEQ ID NO: 100321 - RNA, 21 nt, synthetic construct
  source 1..21: mol_type = other RNA
tcgcataaccaaattatttca

SEQ ID NO: 100322 - RNA, 21 nt, synthetic construct
  source 1..21: mol_type = other RNA
tcgcatcattcaaatgatatt

SEQ ID NO: 100323 - RNA, 21 nt, synthetic construct
  source 1..21: mol_type = other RNA
tcgcatgaaaacagctaggtg

SEQ ID NO: 100324 - RNA, 21 nt, synthetic construct
  source 1..21: mol_type = other RNA
tcgcattacgagttatgcaag

SEQ ID NO: 100325 - RNA, 21 nt, synthetic construct
  source 1..21: mol_type = other RNA
tcgcattgctaattcattgta

SEQ ID NO: 100326 - RNA, 21 nt, synthetic construct
  source 1..21: mol_type = other RNA
tcgccatacctggtccttaaa

SEQ ID NO: 100327 - RNA, 21 nt, synthetic construct
  source 1..21: mol_type = other RNA
tcgcccaggcggaatgcagtg

SEQ ID NO: 100328 - RNA, 21 nt, synthetic construct
  source 1..21: mol_type = other RNA
tcgcccaggctggagctcact

SEQ ID NO: 100329 - RNA, 21 nt, synthetic construct
  source 1..21: mol_type = other RNA
tcgccgtctccctcggccaca

SEQ ID NO: 100330 - RNA, 21 nt, synthetic construct
  source 1..21: mol_type = other RNA
tcgcctagataagaaaatgtg

SEQ ID NO: 100331 - RNA, 21 nt, synthetic construct
  source 1..21: mol_type = other RNA
tcgccttctcagaaggacacc

SEQ ID NO: 100332 - RNA, 21 nt, synthetic construct
  source 1..21: mol_type = other RNA
tcgcctttctcgcagcgggga

SEQ ID NO: 100333 - RNA, 21 nt, synthetic construct
  source 1..21: mol_type = other RNA
tcgcctttgttgccaggtgga

SEQ ID NO: 100334 - RNA, 21 nt, synthetic construct
  source 1..21: mol_type = other RNA
tcgcgcccagcccgtgtgttt

SEQ ID NO: 100335 - RNA, 21 nt, synthetic construct
  source 1..21: mol_type = other RNA
tcgcgcgcggcagggatgctg

SEQ ID NO: 100336 - RNA, 21 nt, synthetic construct
  source 1..21: mol_type = other RNA
tcgcggacgcgcattttttaa

SEQ ID NO: 100337 - RNA, 21 nt, synthetic construct
  source 1..21: mol_type = other RNA
tcgcgggcaccttccctactc

SEQ ID NO: 100338 - RNA, 21 nt, synthetic construct
  source 1..21: mol_type = other RNA
tcgctaatctcaatcagggcc

SEQ ID NO: 100339 - RNA, 21 nt, synthetic construct
  source 1..21: mol_type = other RNA
tcgctatcagtagtttgctag

SEQ ID NO: 100340 - RNA, 21 nt, synthetic construct
  source 1..21: mol_type = other RNA
tcgctctcctgtgccaagtcc

SEQ ID NO: 100341 - RNA, 21 nt, synthetic construct
  source 1..21: mol_type = other RNA
tcgctctgtcgcccaggcgga

SEQ ID NO: 100342 - RNA, 21 nt, synthetic construct
  source 1..21: mol_type = other RNA
tcgctcttggcttttggcagc

SEQ ID NO: 100343 - RNA, 21 nt, synthetic construct
  source 1..21: mol_type = other RNA
tcgcttgaacctgaaaaacgg

SEQ ID NO: 100344 - RNA, 21 nt, synthetic construct
  source 1..21: mol_type = other RNA
tcgcttttggagctataattt

SEQ ID NO: 100345 - RNA, 21 nt, synthetic construct
  source 1..21: mol_type = other RNA
tcggaaatataaaaagcctct

SEQ ID NO: 100346 - RNA, 21 nt, synthetic construct
  source 1..21: mol_type = other RNA
tcggaacaggctcaatacctg

SEQ ID NO: 100347 - RNA, 21 nt, synthetic construct
  source 1..21: mol_type = other RNA
tcggaactcctgtatgccgct

SEQ ID NO: 100348 - RNA, 21 nt, synthetic construct
  source 1..21: mol_type = other RNA
tcggaaggaatgtgcttccta

SEQ ID NO: 100349 - RNA, 21 nt, synthetic construct
  source 1..21: mol_type = other RNA
tcggaaggcggaagttgcagt

SEQ ID NO: 100350 - RNA, 21 nt, synthetic construct
  source 1..21: mol_type = other RNA
tcggataaggaagagtttata

SEQ ID NO: 100351 - RNA, 21 nt, synthetic construct
  source 1..21: mol_type = other RNA
tcggatatttactaagaagtg

SEQ ID NO: 100352 - RNA, 21 nt, synthetic construct
  source 1..21: mol_type = other RNA
tcggatttaagagaggaagtg

SEQ ID NO: 100353 - RNA, 21 nt, synthetic construct
  source 1..21: mol_type = other RNA
tcggcacagctctcatgagtc

SEQ ID NO: 100354 - RNA, 21 nt, synthetic construct
  source 1..21: mol_type = other RNA
tcggccaaccattactcttct

SEQ ID NO: 100355 - RNA, 21 nt, synthetic construct
  source 1..21: mol_type = other RNA
tcggccaagatctgtttttca

SEQ ID NO: 100356 - RNA, 21 nt, synthetic construct
  source 1..21: mol_type = other RNA
tcggccacagcagggctcctc

SEQ ID NO: 100357 - RNA, 21 nt, synthetic construct
  source 1..21: mol_type = other RNA
tcggccgacccagcccccaac

SEQ ID NO: 100358 - RNA, 21 nt, synthetic construct
  source 1..21: mol_type = other RNA
tcggcctctactgactccctt

SEQ ID NO: 100359 - RNA, 21 nt, synthetic construct
  source 1..21: mol_type = other RNA
tcggctccgggcctcccacct

SEQ ID NO: 100360 - RNA, 21 nt, synthetic construct
  source 1..21: mol_type = other RNA
tcggctctgtcacccttgtaa

SEQ ID NO: 100361 - RNA, 21 nt, synthetic construct
  source 1..21: mol_type = other RNA
tcggctctgtgctgagatggt

SEQ ID NO: 100362 - RNA, 21 nt, synthetic construct
  source 1..21: mol_type = other RNA
tcggcttactgcaacctccgt

SEQ ID NO: 100363 - RNA, 21 nt, synthetic construct
  source 1..21: mol_type = other RNA
tcgggagtaacagacctctga

SEQ ID NO: 100364 - RNA, 21 nt, synthetic construct
  source 1..21: mol_type = other RNA
tcggggcctacagtggttcca

SEQ ID NO: 100365 - RNA, 21 nt, synthetic construct
  source 1..21: mol_type = other RNA
tcgggggagagcactggtttc

SEQ ID NO: 100366 - RNA, 21 nt, synthetic construct
  source 1..21: mol_type = other RNA
tcgggtgtcagaaaccatcgt

SEQ ID NO: 100367 - RNA, 21 nt, synthetic construct
  source 1..21: mol_type = other RNA
tcgggtgtcagaattccatca

SEQ ID NO: 100368 - RNA, 21 nt, synthetic construct
  source 1..21: mol_type = other RNA
tcgggttcaagccccagttct

SEQ ID NO: 100369 - RNA, 21 nt, synthetic construct
  source 1..21: mol_type = other RNA
tcggtatgtacccaatggatt

SEQ ID NO: 100370 - RNA, 21 nt, synthetic construct
  source 1..21: mol_type = other RNA
tcggtatgttaataaccctgt

SEQ ID NO: 100371 - RNA, 21 nt, synthetic construct
  source 1..21: mol_type = other RNA
tcggtcattctggagtgtttt

SEQ ID NO: 100372 - RNA, 21 nt, synthetic construct
  source 1..21: mol_type = other RNA
tcggtctacggacgcaggcaa

SEQ ID NO: 100373 - RNA, 21 nt, synthetic construct
  source 1..21: mol_type = other RNA
tcggtctcaaaacaaacaaac

SEQ ID NO: 100374 - RNA, 21 nt, synthetic construct
  source 1..21: mol_type = other RNA
tcggtctgtatttctgctttg

SEQ ID NO: 100375 - RNA, 21 nt, synthetic construct
  source 1..21: mol_type = other RNA
tcggtggcattaaggacatcc

SEQ ID NO: 100376 - RNA, 21 nt, synthetic construct
  source 1..21: mol_type = other RNA
tcggttcttcaccgtgcaact

SEQ ID NO: 100377 - RNA, 21 nt, synthetic construct
  source 1..21: mol_type = other RNA
tcggttttctagttagtttgt

SEQ ID NO: 100378 - RNA, 21 nt, synthetic construct
  source 1..21: mol_type = other RNA
tcgtaaaaagccatttatcag

SEQ ID NO: 100379 - RNA, 21 nt, synthetic construct
  source 1..21: mol_type = other RNA
tcgtaaaacctcatctctact

SEQ ID NO: 100380 - RNA, 21 nt, synthetic construct
  source 1..21: mol_type = other RNA
tcgtaaaagctaatctacttt

SEQ ID NO: 100381 - RNA, 21 nt, synthetic construct
  source 1..21: mol_type = other RNA
tcgtaatgcgatgatcaaaac

SEQ ID NO: 100382 - RNA, 21 nt, synthetic construct
  source 1..21: mol_type = other RNA
tcgtacctttcgctatcagta

SEQ ID NO: 100383 - RNA, 21 nt, synthetic construct
  source 1..21: mol_type = other RNA
tcgtagcaggtttaggaagca

SEQ ID NO: 100384 - RNA, 21 nt, synthetic construct
  source 1..21: mol_type = other RNA
tcgtagttttttggtagatac

SEQ ID NO: 100385 - RNA, 21 nt, synthetic construct
  source 1..21: mol_type = other RNA
tcgtatcttttaacagatggt

SEQ ID NO: 100386 - RNA, 21 nt, synthetic construct
  source 1..21: mol_type = other RNA
tcgtatggaagatgggacttc

SEQ ID NO: 100387 - RNA, 21 nt, synthetic construct
  source 1..21: mol_type = other RNA
tcgtcaaggggagaggcctca

SEQ ID NO: 100388 - RNA, 21 nt, synthetic construct
  source 1..21: mol_type = other RNA
tcgtcatctataaggtaatga

SEQ ID NO: 100389 - RNA, 21 nt, synthetic construct
  source 1..21: mol_type = other RNA
tcgtcccccatcccctttacc

SEQ ID NO: 100390 - RNA, 21 nt, synthetic construct
  source 1..21: mol_type = other RNA
tcgtccctaaacactgtagtt

SEQ ID NO: 100391 - RNA, 21 nt, synthetic construct
  source 1..21: mol_type = other RNA
tcgtcctcttcgggtgtcaga

SEQ ID NO: 100392 - RNA, 21 nt, synthetic construct
  source 1..21: mol_type = other RNA
tcgtgaatttggtattcttat

SEQ ID NO: 100393 - RNA, 21 nt, synthetic construct
  source 1..21: mol_type = other RNA
tcgtgagactattatgagcag

SEQ ID NO: 100394 - RNA, 21 nt, synthetic construct
  source 1..21: mol_type = other RNA
tcgtgagggtttcagtgagta

SEQ ID NO: 100395 - RNA, 21 nt, synthetic construct
  source 1..21: mol_type = other RNA
tcgtgatagtcttccaattgc

SEQ ID NO: 100396 - RNA, 21 nt, synthetic construct
  source 1..21: mol_type = other RNA
tcgtgcatgtctgcaggagcc

SEQ ID NO: 100397 - RNA, 21 nt, synthetic construct
  source 1..21: mol_type = other RNA
tcgtggcctcaagcagtcctg

SEQ ID NO: 100398 - RNA, 21 nt, synthetic construct
  source 1..21: mol_type = other RNA
tcgtggttatagccataagag

SEQ ID NO: 100399 - RNA, 21 nt, synthetic construct
  source 1..21: mol_type = other RNA
tcgtgtactgaaaccagtgct

SEQ ID NO: 100400 - RNA, 21 nt, synthetic construct
  source 1..21: mol_type = other RNA
tcgtgtatgatttctaggccc

SEQ ID NO: 100401 - RNA, 21 nt, synthetic construct
  source 1..21: mol_type = other RNA
tcgtgtgagctctagccttgt

SEQ ID NO: 100402 - RNA, 21 nt, synthetic construct
  source 1..21: mol_type = other RNA
tcgtgtgtctcataaagccgg

SEQ ID NO: 100403 - RNA, 21 nt, synthetic construct
  source 1..21: mol_type = other RNA
tcgtgtgtggagtggggcacc

SEQ ID NO: 100404 - RNA, 21 nt, synthetic construct
  source 1..21: mol_type = other RNA
tcgttaatacttgtgtagcgg

SEQ ID NO: 100405 - RNA, 21 nt, synthetic construct
  source 1..21: mol_type = other RNA
tcgttatatcctcagggtagg

SEQ ID NO: 100406 - RNA, 21 nt, synthetic construct
  source 1..21: mol_type = other RNA
tcgttcaaaacatcatctaat

SEQ ID NO: 100407 - RNA, 21 nt, synthetic construct
  source 1..21: mol_type = other RNA
tcgttcacactcgcactccac

SEQ ID NO: 100408 - RNA, 21 nt, synthetic construct
  source 1..21: mol_type = other RNA
tcgttcagtttagtaaatctt

SEQ ID NO: 100409 - RNA, 21 nt, synthetic construct
  source 1..21: mol_type = other RNA
tcgttcatgttcaaggtgttc

SEQ ID NO: 100410 - RNA, 21 nt, synthetic construct
  source 1..21: mol_type = other RNA
tcgttccagcagggtaaagtc

SEQ ID NO: 100411 - RNA, 21 nt, synthetic construct
  source 1..21: mol_type = other RNA
tcgttgagtacctctgggatg

SEQ ID NO: 100412 - RNA, 21 nt, synthetic construct
  source 1..21: mol_type = other RNA
tcgttggatttatctttctag

SEQ ID NO: 100413 - RNA, 21 nt, synthetic construct
  source 1..21: mol_type = other RNA
tcgtttatttcttctccctct

SEQ ID NO: 100414 - RNA, 21 nt, synthetic construct
  source 1..21: mol_type = other RNA
tcgtttcaatattaagagtct

SEQ ID NO: 100415 - RNA, 21 nt, synthetic construct
  source 1..21: mol_type = other RNA
tcgtttcagattgcttgagag

SEQ ID NO: 100416 - RNA, 21 nt, synthetic construct
  source 1..21: mol_type = other RNA
tcgtttgaggcttttcatagt

SEQ ID NO: 100417 - RNA, 21 nt, synthetic construct
  source 1..21: mol_type = other RNA
tcgttttcaacaaaggttgaa

SEQ ID NO: 100418 - RNA, 21 nt, synthetic construct
  source 1..21: mol_type = other RNA
tctaaaaacatccattactcg

SEQ ID NO: 100419 - RNA, 21 nt, synthetic construct
  source 1..21: mol_type = other RNA
tctaaaaacgtgcaaactacc

SEQ ID NO: 100420 - RNA, 21 nt, synthetic construct
  source 1..21: mol_type = other RNA
tctaaaatcatcacagtatgc

SEQ ID NO: 100421 - RNA, 21 nt, synthetic construct
  source 1..21: mol_type = other RNA
tctaaaatggaagactttatg

SEQ ID NO: 100422 - RNA, 21 nt, synthetic construct
  source 1..21: mol_type = other RNA
tctaaacacacgggctgggcg

SEQ ID NO: 100423 - RNA, 21 nt, synthetic construct
  source 1..21: mol_type = other RNA
tctaaacctgaggtctttaaa

SEQ ID NO: 100424 - RNA, 21 nt, synthetic construct
  source 1..21: mol_type = other RNA
tctaaaccttaaaagagtgaa

SEQ ID NO: 100425 - RNA, 21 nt, synthetic construct
  source 1..21: mol_type = other RNA
tctaaacgtttggtgactgaa

SEQ ID NO: 100426 - RNA, 21 nt, synthetic construct
  source 1..21: mol_type = other RNA
tctaaactagttcaaccattg

SEQ ID NO: 100427 - RNA, 21 nt, synthetic construct
  source 1..21: mol_type = other RNA
tctaaactggttttcctgatg

SEQ ID NO: 100428 - RNA, 21 nt, synthetic construct
  source 1..21: mol_type = other RNA
tctaaagccaatcttcccaat

SEQ ID NO: 100429 - RNA, 21 nt, synthetic construct
  source 1..21: mol_type = other RNA
tctaaagccaggctttcccag

SEQ ID NO: 100430 - RNA, 21 nt, synthetic construct
  source 1..21: mol_type = other RNA
tctaaagtctatgctcttggt

SEQ ID NO: 100431 - RNA, 21 nt, synthetic construct
  source 1..21: mol_type = other RNA
tctaaagttagaagtatccca

SEQ ID NO: 100432 - RNA, 21 nt, synthetic construct
  source 1..21: mol_type = other RNA
tctaaataggtattcatgctg

SEQ ID NO: 100433 - RNA, 21 nt, synthetic construct
  source 1..21: mol_type = other RNA
tctaaatcaacagtgtactag

SEQ ID NO: 100434 - RNA, 21 nt, synthetic construct
  source 1..21: mol_type = other RNA
tctaaatggtgtgaagttggg

SEQ ID NO: 100435 - RNA, 21 nt, synthetic construct
  source 1..21: mol_type = other RNA
tctaaattaagcttcgacagt

SEQ ID NO: 100436 - RNA, 21 nt, synthetic construct
  source 1..21: mol_type = other RNA
tctaaattgaacagcctaaag

SEQ ID NO: 100437 - RNA, 21 nt, synthetic construct
  source 1..21: mol_type = other RNA
tctaacaaaactaggctgtcc

SEQ ID NO: 100438 - RNA, 21 nt, synthetic construct
  source 1..21: mol_type = other RNA
tctaacaaaagatacacaaga

SEQ ID NO: 100439 - RNA, 21 nt, synthetic construct
  source 1..21: mol_type = other RNA
tctaacaaacgcattgtgatg

SEQ ID NO: 100440 - RNA, 21 nt, synthetic construct
  source 1..21: mol_type = other RNA
tctaacaagaagctgttttgg

SEQ ID NO: 100441 - RNA, 21 nt, synthetic construct
  source 1..21: mol_type = other RNA
tctaacagaaatacaatgtga

SEQ ID NO: 100442 - RNA, 21 nt, synthetic construct
  source 1..21: mol_type = other RNA
tctaacattatcttctacctt

SEQ ID NO: 100443 - RNA, 21 nt, synthetic construct
  source 1..21: mol_type = other RNA
tctaaccattaacagctcaga

SEQ ID NO: 100444 - RNA, 21 nt, synthetic construct
  source 1..21: mol_type = other RNA
tctaaccctcaaatgccatag

SEQ ID NO: 100445 - RNA, 21 nt, synthetic construct
  source 1..21: mol_type = other RNA
tctaaccctcaatccccatct

SEQ ID NO: 100446 - RNA, 21 nt, synthetic construct
  source 1..21: mol_type = other RNA
tctaaccctcctcctctacaa

SEQ ID NO: 100447 - RNA, 21 nt, synthetic construct
  source 1..21: mol_type = other RNA
tctaagagataactaatgaga

SEQ ID NO: 100448 - RNA, 21 nt, synthetic construct
  source 1..21: mol_type = other RNA
tctaagagccaaagacattgt

SEQ ID NO: 100449 - RNA, 21 nt, synthetic construct
  source 1..21: mol_type = other RNA
tctaagccatgtttctcctgc

SEQ ID NO: 100450 - RNA, 21 nt, synthetic construct
  source 1..21: mol_type = other RNA
tctaagcctacctcccttcac

SEQ ID NO: 100451 - RNA, 21 nt, synthetic construct
  source 1..21: mol_type = other RNA
tctaagcctactgctctgtcc

SEQ ID NO: 100452 - RNA, 21 nt, synthetic construct
  source 1..21: mol_type = other RNA
tctaagctaagagttttatag

SEQ ID NO: 100453 - RNA, 21 nt, synthetic construct
  source 1..21: mol_type = other RNA
tctaaggattatggctagaaa

SEQ ID NO: 100454 - RNA, 21 nt, synthetic construct
  source 1..21: mol_type = other RNA
tctaaggttctgctatgctga

SEQ ID NO: 100455 - RNA, 21 nt, synthetic construct
  source 1..21: mol_type = other RNA
tctaagtcagcctgggcacac

SEQ ID NO: 100456 - RNA, 21 nt, synthetic construct
  source 1..21: mol_type = other RNA
tctaagtctcaacctacttta

SEQ ID NO: 100457 - RNA, 21 nt, synthetic construct
  source 1..21: mol_type = other RNA
tctaagtttgccaaagattct

SEQ ID NO: 100458 - RNA, 21 nt, synthetic construct
  source 1..21: mol_type = other RNA
tctaataaaaagcctctctga

SEQ ID NO: 100459 - RNA, 21 nt, synthetic construct
  source 1..21: mol_type = other RNA
tctaataaaagctggagttat

SEQ ID NO: 100460 - RNA, 21 nt, synthetic construct
  source 1..21: mol_type = other RNA
tctaataaaatagcaggattc

SEQ ID NO: 100461 - RNA, 21 nt, synthetic construct
  source 1..21: mol_type = other RNA
tctaataaacgcggaatgaag

SEQ ID NO: 100462 - RNA, 21 nt, synthetic construct
  source 1..21: mol_type = other RNA
tctaataacagcctaagcaaa

SEQ ID NO: 100463 - RNA, 21 nt, synthetic construct
  source 1..21: mol_type = other RNA
tctaatagctagtgatgttga

SEQ ID NO: 100464 - RNA, 21 nt, synthetic construct
  source 1..21: mol_type = other RNA
tctaataggaagtggctagac

SEQ ID NO: 100465 - RNA, 21 nt, synthetic construct
  source 1..21: mol_type = other RNA
tctaatagttcacctctccgg

SEQ ID NO: 100466 - RNA, 21 nt, synthetic construct
  source 1..21: mol_type = other RNA
tctaatatggttcctagaaaa

SEQ ID NO: 100467 - RNA, 21 nt, synthetic construct
  source 1..21: mol_type = other RNA
tctaatcaggttgggcttatc

SEQ ID NO: 100468 - RNA, 21 nt, synthetic construct
  source 1..21: mol_type = other RNA
tctaatcctttgcacacacca

SEQ ID NO: 100469 - RNA, 21 nt, synthetic construct
  source 1..21: mol_type = other RNA
tctaatgaactcccagaactc

SEQ ID NO: 100470 - RNA, 21 nt, synthetic construct
  source 1..21: mol_type = other RNA
tctaatgcaagagttaaaact

SEQ ID NO: 100471 - RNA, 21 nt, synthetic construct
  source 1..21: mol_type = other RNA
tctaatgcccattaaaaccat

SEQ ID NO: 100472 - RNA, 21 nt, synthetic construct
  source 1..21: mol_type = other RNA
tctaatggggaaatagatgcc

SEQ ID NO: 100473 - RNA, 21 nt, synthetic construct
  source 1..21: mol_type = other RNA
tctaatgggtacagggtttct

SEQ ID NO: 100474 - RNA, 21 nt, synthetic construct
  source 1..21: mol_type = other RNA
tctaatgtaaacagcatactg

SEQ ID NO: 100475 - RNA, 21 nt, synthetic construct
  source 1..21: mol_type = other RNA
tctaatgtgcaaggagagaaa

SEQ ID NO: 100476 - RNA, 21 nt, synthetic construct
  source 1..21: mol_type = other RNA
tctaattagaaactggtgaac

SEQ ID NO: 100477 - RNA, 21 nt, synthetic construct
  source 1..21: mol_type = other RNA
tctaattcacatttaagaagg

SEQ ID NO: 100478 - RNA, 21 nt, synthetic construct
  source 1..21: mol_type = other RNA
tctaattcgaaaatgggccaa

SEQ ID NO: 100479 - RNA, 21 nt, synthetic construct
  source 1..21: mol_type = other RNA
tctaattctgacaactgggag

SEQ ID NO: 100480 - RNA, 21 nt, synthetic construct
  source 1..21: mol_type = other RNA
tctaatttccaagaacccttt

SEQ ID NO: 100481 - RNA, 21 nt, synthetic construct
  source 1..21: mol_type = other RNA
tctaatttcccatttgatttc

SEQ ID NO: 100482 - RNA, 21 nt, synthetic construct
  source 1..21: mol_type = other RNA
tctaatttgtgaaccttgaag

SEQ ID NO: 100483 - RNA, 21 nt, synthetic construct
  source 1..21: mol_type = other RNA
tctacaaaacagggttattaa

SEQ ID NO: 100484 - RNA, 21 nt, synthetic construct
  source 1..21: mol_type = other RNA
tctacaaaaggaggaactaat

SEQ ID NO: 100485 - RNA, 21 nt, synthetic construct
  source 1..21: mol_type = other RNA
tctacaaaaggtttccagtgg

SEQ ID NO: 100486 - RNA, 21 nt, synthetic construct
  source 1..21: mol_type = other RNA
tctacaaaccttcttatttcc

SEQ ID NO: 100487 - RNA, 21 nt, synthetic construct
  source 1..21: mol_type = other RNA
tctacaatggttgaactagtt

SEQ ID NO: 100488 - RNA, 21 nt, synthetic construct
  source 1..21: mol_type = other RNA
tctacacaaaaatccagataa

SEQ ID NO: 100489 - RNA, 21 nt, synthetic construct
  source 1..21: mol_type = other RNA
tctacagaaaacccttcatca

SEQ ID NO: 100490 - RNA, 21 nt, synthetic construct
  source 1..21: mol_type = other RNA
tctacagaatgttcaagtatt

SEQ ID NO: 100491 - RNA, 21 nt, synthetic construct
  source 1..21: mol_type = other RNA
tctacagaggattttggattg

SEQ ID NO: 100492 - RNA, 21 nt, synthetic construct
  source 1..21: mol_type = other RNA
tctacagattcaatgcaatac

SEQ ID NO: 100493 - RNA, 21 nt, synthetic construct
  source 1..21: mol_type = other RNA
tctacagggaaccgtaacttc

SEQ ID NO: 100494 - RNA, 21 nt, synthetic construct
  source 1..21: mol_type = other RNA
tctacaggtcggaaggaatgt

SEQ ID NO: 100495 - RNA, 21 nt, synthetic construct
  source 1..21: mol_type = other RNA
tctacagtattacacagaaag

SEQ ID NO: 100496 - RNA, 21 nt, synthetic construct
  source 1..21: mol_type = other RNA
tctacagttaacaatactgca

SEQ ID NO: 100497 - RNA, 21 nt, synthetic construct
  source 1..21: mol_type = other RNA
tctacatcacagacagggaat

SEQ ID NO: 100498 - RNA, 21 nt, synthetic construct
  source 1..21: mol_type = other RNA
tctacatccccccacccctgc

SEQ ID NO: 100499 - RNA, 21 nt, synthetic construct
  source 1..21: mol_type = other RNA
tctacatctggatcctgtctc

SEQ ID NO: 100500 - RNA, 21 nt, synthetic construct
  source 1..21: mol_type = other RNA
tctacatgtacgccaattttc

SEQ ID NO: 100501 - RNA, 21 nt, synthetic construct
  source 1..21: mol_type = other RNA
tctaccaaaaaactacgagta

SEQ ID NO: 100502 - RNA, 21 nt, synthetic construct
  source 1..21: mol_type = other RNA
tctaccaaacattgaaggcag

SEQ ID NO: 100503 - RNA, 21 nt, synthetic construct
  source 1..21: mol_type = other RNA
tctaccatgttgttcttttca

SEQ ID NO: 100504 - RNA, 21 nt, synthetic construct
  source 1..21: mol_type = other RNA
tctacccactattgaaagccc

SEQ ID NO: 100505 - RNA, 21 nt, synthetic construct
  source 1..21: mol_type = other RNA
tctacccagcactctgaatca

SEQ ID NO: 100506 - RNA, 21 nt, synthetic construct
  source 1..21: mol_type = other RNA
tctaccctttccaaattcaaa

SEQ ID NO: 100507 - RNA, 21 nt, synthetic construct
  source 1..21: mol_type = other RNA
tctacctggagcctgaggaca

SEQ ID NO: 100508 - RNA, 21 nt, synthetic construct
  source 1..21: mol_type = other RNA
tctacctgtctttcccattac

SEQ ID NO: 100509 - RNA, 21 nt, synthetic construct
  source 1..21: mol_type = other RNA
tctaccttgaaaatgccctta

SEQ ID NO: 100510 - RNA, 21 nt, synthetic construct
  source 1..21: mol_type = other RNA
tctacctttggctactgtaaa

SEQ ID NO: 100511 - RNA, 21 nt, synthetic construct
  source 1..21: mol_type = other RNA
tctacggacgcaggcaaacag

SEQ ID NO: 100512 - RNA, 21 nt, synthetic construct
  source 1..21: mol_type = other RNA
tctactaaacattaaggaaga

SEQ ID NO: 100513 - RNA, 21 nt, synthetic construct
  source 1..21: mol_type = other RNA
tctactagtataagagaagga

SEQ ID NO: 100514 - RNA, 21 nt, synthetic construct
  source 1..21: mol_type = other RNA
tctactcactgtactactgac

SEQ ID NO: 100515 - RNA, 21 nt, synthetic construct
  source 1..21: mol_type = other RNA
tctactctgcctcagttgaca

SEQ ID NO: 100516 - RNA, 21 nt, synthetic construct
  source 1..21: mol_type = other RNA
tctactcttttgtttttgggg

SEQ ID NO: 100517 - RNA, 21 nt, synthetic construct
  source 1..21: mol_type = other RNA
tctactgactccctttttagg

SEQ ID NO: 100518 - RNA, 21 nt, synthetic construct
  source 1..21: mol_type = other RNA
tctactggggtcttagttctg

SEQ ID NO: 100519 - RNA, 21 nt, synthetic construct
  source 1..21: mol_type = other RNA
tctactgtgaattcactaatg

SEQ ID NO: 100520 - RNA, 21 nt, synthetic construct
  source 1..21: mol_type = other RNA
tctactttcacataaggtata

SEQ ID NO: 100521 - RNA, 21 nt, synthetic construct
  source 1..21: mol_type = other RNA
tctactttctaatcctttgca

SEQ ID NO: 100522 - RNA, 21 nt, synthetic construct
  source 1..21: mol_type = other RNA
tctagaaagataaatccaacg

SEQ ID NO: 100523 - RNA, 21 nt, synthetic construct
  source 1..21: mol_type = other RNA
tctagaaaggagggactgaaa

SEQ ID NO: 100524 - RNA, 21 nt, synthetic construct
  source 1..21: mol_type = other RNA
tctagaacttatgcatcttgc

SEQ ID NO: 100525 - RNA, 21 nt, synthetic construct
  source 1..21: mol_type = other RNA
tctagaatgcatccctcctct

SEQ ID NO: 100526 - RNA, 21 nt, synthetic construct
  source 1..21: mol_type = other RNA
tctagagatttgctgtataac

SEQ ID NO: 100527 - RNA, 21 nt, synthetic construct
  source 1..21: mol_type = other RNA
tctagattcatatgctttgag

SEQ ID NO: 100528 - RNA, 21 nt, synthetic construct
  source 1..21: mol_type = other RNA
tctagcaaacaaacacactgg

SEQ ID NO: 100529 - RNA, 21 nt, synthetic construct
  source 1..21: mol_type = other RNA
tctagcacagaaccatgtaac

SEQ ID NO: 100530 - RNA, 21 nt, synthetic construct
  source 1..21: mol_type = other RNA
tctagccaaagcaagccttgg

SEQ ID NO: 100531 - RNA, 21 nt, synthetic construct
  source 1..21: mol_type = other RNA
tctagccaagggtttgtcaat

SEQ ID NO: 100532 - RNA, 21 nt, synthetic construct
  source 1..21: mol_type = other RNA
tctagccacttcctattagaa

SEQ ID NO: 100533 - RNA, 21 nt, synthetic construct
  source 1..21: mol_type = other RNA
tctagccataatccttagatt

SEQ ID NO: 100534 - RNA, 21 nt, synthetic construct
  source 1..21: mol_type = other RNA
tctagcccagcttccgggact

SEQ ID NO: 100535 - RNA, 21 nt, synthetic construct
  source 1..21: mol_type = other RNA
tctagcctccagaaaaccaga

SEQ ID NO: 100536 - RNA, 21 nt, synthetic construct
  source 1..21: mol_type = other RNA
tctagccttgtactgtgtggc

SEQ ID NO: 100537 - RNA, 21 nt, synthetic construct
  source 1..21: mol_type = other RNA
tctagctccccattccctgtc

SEQ ID NO: 100538 - RNA, 21 nt, synthetic construct
  source 1..21: mol_type = other RNA
tctagctcctgggaaaaggat

SEQ ID NO: 100539 - RNA, 21 nt, synthetic construct
  source 1..21: mol_type = other RNA
tctagctttcagcactgctat

SEQ ID NO: 100540 - RNA, 21 nt, synthetic construct
  source 1..21: mol_type = other RNA
tctaggaaaagacttgaggtt

SEQ ID NO: 100541 - RNA, 21 nt, synthetic construct
  source 1..21: mol_type = other RNA
tctaggaaacactgctcagaa

SEQ ID NO: 100542 - RNA, 21 nt, synthetic construct
  source 1..21: mol_type = other RNA
tctaggaaccatattagagtg

SEQ ID NO: 100543 - RNA, 21 nt, synthetic construct
  source 1..21: mol_type = other RNA
tctaggaggtctaagagataa

SEQ ID NO: 100544 - RNA, 21 nt, synthetic construct
  source 1..21: mol_type = other RNA
tctaggagtacagtgcatacc

SEQ ID NO: 100545 - RNA, 21 nt, synthetic construct
  source 1..21: mol_type = other RNA
tctaggcatataaactggaag

SEQ ID NO: 100546 - RNA, 21 nt, synthetic construct
  source 1..21: mol_type = other RNA
tctaggcatataataagcaga

SEQ ID NO: 100547 - RNA, 21 nt, synthetic construct
  source 1..21: mol_type = other RNA
tctaggcatctatttccccat

SEQ ID NO: 100548 - RNA, 21 nt, synthetic construct
  source 1..21: mol_type = other RNA
tctaggccctaaccccagaga

SEQ ID NO: 100549 - RNA, 21 nt, synthetic construct
  source 1..21: mol_type = other RNA
tctaggcgaaatatctccctc

SEQ ID NO: 100550 - RNA, 21 nt, synthetic construct
  source 1..21: mol_type = other RNA
tctaggctaatgtgtgttcca

SEQ ID NO: 100551 - RNA, 21 nt, synthetic construct
  source 1..21: mol_type = other RNA
tctaggcttaaaattcttcca

SEQ ID NO: 100552 - RNA, 21 nt, synthetic construct
  source 1..21: mol_type = other RNA
tctaggtagtttctttgaact

SEQ ID NO: 100553 - RNA, 21 nt, synthetic construct
  source 1..21: mol_type = other RNA
tctaggttatctgttttctta

SEQ ID NO: 100554 - RNA, 21 nt, synthetic construct
  source 1..21: mol_type = other RNA
tctagtaacttggtcgaaaac

SEQ ID NO: 100555 - RNA, 21 nt, synthetic construct
  source 1..21: mol_type = other RNA
tctagtcacatttgctttact

SEQ ID NO: 100556 - RNA, 21 nt, synthetic construct
  source 1..21: mol_type = other RNA
tctagtccatgaagaaaacac

SEQ ID NO: 100557 - RNA, 21 nt, synthetic construct
  source 1..21: mol_type = other RNA
tctagtgaagtcaatttcaga

SEQ ID NO: 100558 - RNA, 21 nt, synthetic construct
  source 1..21: mol_type = other RNA
tctagtgaatgagaccaaatg

SEQ ID NO: 100559 - RNA, 21 nt, synthetic construct
  source 1..21: mol_type = other RNA
tctagtgatgggagatggaca

SEQ ID NO: 100560 - RNA, 21 nt, synthetic construct
  source 1..21: mol_type = other RNA
tctagtggtgcttaattcaaa

SEQ ID NO: 100561 - RNA, 21 nt, synthetic construct
  source 1..21: mol_type = other RNA
tctagtgtgcatgtgttgtgc

SEQ ID NO: 100562 - RNA, 21 nt, synthetic construct
  source 1..21: mol_type = other RNA
tctagttaataaaggtgctaa

SEQ ID NO: 100563 - RNA, 21 nt, synthetic construct
  source 1..21: mol_type = other RNA
tctagttaccactagcaaact

SEQ ID NO: 100564 - RNA, 21 nt, synthetic construct
  source 1..21: mol_type = other RNA
tctagttagtttgttgaccca

SEQ ID NO: 100565 - RNA, 21 nt, synthetic construct
  source 1..21: mol_type = other RNA
tctagttctaataaacgcgga

SEQ ID NO: 100566 - RNA, 21 nt, synthetic construct
  source 1..21: mol_type = other RNA
tctagttctagctctgtcttt

SEQ ID NO: 100567 - RNA, 21 nt, synthetic construct
  source 1..21: mol_type = other RNA
tctagttgcacggtgaagaac

SEQ ID NO: 100568 - RNA, 21 nt, synthetic construct
  source 1..21: mol_type = other RNA
tctagtttgaggtgtacaatt

SEQ ID NO: 100569 - RNA, 21 nt, synthetic construct
  source 1..21: mol_type = other RNA
tctagttttccagtatattca

SEQ ID NO: 100570 - RNA, 21 nt, synthetic construct
  source 1..21: mol_type = other RNA
tctataattctgccttcaatg

SEQ ID NO: 100571 - RNA, 21 nt, synthetic construct
  source 1..21: mol_type = other RNA
tctatacttcatctttcctga

SEQ ID NO: 100572 - RNA, 21 nt, synthetic construct
  source 1..21: mol_type = other RNA
tctataggcaatgagtctgac

SEQ ID NO: 100573 - RNA, 21 nt, synthetic construct
  source 1..21: mol_type = other RNA
tctataggtagtacatattca

SEQ ID NO: 100574 - RNA, 21 nt, synthetic construct
  source 1..21: mol_type = other RNA
tctatagtcattccgctaaac

SEQ ID NO: 100575 - RNA, 21 nt, synthetic construct
  source 1..21: mol_type = other RNA
tctatagtggctgcaccattt

SEQ ID NO: 100576 - RNA, 21 nt, synthetic construct
  source 1..21: mol_type = other RNA
tctatagtttaattgggggaa

SEQ ID NO: 100577 - RNA, 21 nt, synthetic construct
  source 1..21: mol_type = other RNA
tctatcaatctcacacctggg

SEQ ID NO: 100578 - RNA, 21 nt, synthetic construct
  source 1..21: mol_type = other RNA
tctatcagggctgaaaaacac

SEQ ID NO: 100579 - RNA, 21 nt, synthetic construct
  source 1..21: mol_type = other RNA
tctatcatcaagacagagctc

SEQ ID NO: 100580 - RNA, 21 nt, synthetic construct
  source 1..21: mol_type = other RNA
tctatccaccactccacctta

SEQ ID NO: 100581 - RNA, 21 nt, synthetic construct
  source 1..21: mol_type = other RNA
tctatccagtgacacctgagg

SEQ ID NO: 100582 - RNA, 21 nt, synthetic construct
  source 1..21: mol_type = other RNA
tctatctctcagatctgagtt

SEQ ID NO: 100583 - RNA, 21 nt, synthetic construct
  source 1..21: mol_type = other RNA
tctatctgaacattttagctg

SEQ ID NO: 100584 - RNA, 21 nt, synthetic construct
  source 1..21: mol_type = other RNA
tctatctgaactttcgaagtg

SEQ ID NO: 100585 - RNA, 21 nt, synthetic construct
  source 1..21: mol_type = other RNA
tctatctttgggaaaatctct

SEQ ID NO: 100586 - RNA, 21 nt, synthetic construct
  source 1..21: mol_type = other RNA
tctatgaatttgcctattctg

SEQ ID NO: 100587 - RNA, 21 nt, synthetic construct
  source 1..21: mol_type = other RNA
tctatgcagaaatctaccaaa

SEQ ID NO: 100588 - RNA, 21 nt, synthetic construct
  source 1..21: mol_type = other RNA
tctatgcatactgcagcactt

SEQ ID NO: 100589 - RNA, 21 nt, synthetic construct
  source 1..21: mol_type = other RNA
tctatgctcttggtttcttca

SEQ ID NO: 100590 - RNA, 21 nt, synthetic construct
  source 1..21: mol_type = other RNA
tctatggcaggcaccttcaga

SEQ ID NO: 100591 - RNA, 21 nt, synthetic construct
  source 1..21: mol_type = other RNA
tctatggcatttgagggttag

SEQ ID NO: 100592 - RNA, 21 nt, synthetic construct
  source 1..21: mol_type = other RNA
tctatgtcccctggggcctca

SEQ ID NO: 100593 - RNA, 21 nt, synthetic construct
  source 1..21: mol_type = other RNA
tctatgtgacaaacacttttc

SEQ ID NO: 100594 - RNA, 21 nt, synthetic construct
  source 1..21: mol_type = other RNA
tctatgtgacagaatgcatct

SEQ ID NO: 100595 - RNA, 21 nt, synthetic construct
  source 1..21: mol_type = other RNA
tctattaacagaagggtatat

SEQ ID NO: 100596 - RNA, 21 nt, synthetic construct
  source 1..21: mol_type = other RNA
tctattcattaccaggctgga

SEQ ID NO: 100597 - RNA, 21 nt, synthetic construct
  source 1..21: mol_type = other RNA
tctattccaaatgtctgtctt

SEQ ID NO: 100598 - RNA, 21 nt, synthetic construct
  source 1..21: mol_type = other RNA
tctattccagagaattcagag

SEQ ID NO: 100599 - RNA, 21 nt, synthetic construct
  source 1..21: mol_type = other RNA
tctattccattgttctctttg

SEQ ID NO: 100600 - RNA, 21 nt, synthetic construct
  source 1..21: mol_type = other RNA
tctattcccctggatccccca

SEQ ID NO: 100601 - RNA, 21 nt, synthetic construct
  source 1..21: mol_type = other RNA
tctattccctacattgccttc

SEQ ID NO: 100602 - RNA, 21 nt, synthetic construct
  source 1..21: mol_type = other RNA
tctatttccccattagagtaa

SEQ ID NO: 100603 - RNA, 21 nt, synthetic construct
  source 1..21: mol_type = other RNA
tctatttctttccattcaatc

SEQ ID NO: 100604 - RNA, 21 nt, synthetic construct
  source 1..21: mol_type = other RNA
tctattttcctaaaactcccc

SEQ ID NO: 100605 - RNA, 21 nt, synthetic construct
  source 1..21: mol_type = other RNA
tctatttttctgcaattggaa

SEQ ID NO: 100606 - RNA, 21 nt, synthetic construct
  source 1..21: mol_type = other RNA
tctatttttgtctggtggaca

SEQ ID NO: 100607 - RNA, 21 nt, synthetic construct
  source 1..21: mol_type = other RNA
tctcaaaaatttaagcacaga

SEQ ID NO: 100608 - RNA, 21 nt, synthetic construct
  source 1..21: mol_type = other RNA
tctcaaaacaaacaaacagaa

SEQ ID NO: 100609 - RNA, 21 nt, synthetic construct
  source 1..21: mol_type = other RNA
tctcaaacagcctaattgtac

SEQ ID NO: 100610 - RNA, 21 nt, synthetic construct
  source 1..21: mol_type = other RNA
tctcaaacaggatacaaaaag

SEQ ID NO: 100611 - RNA, 21 nt, synthetic construct
  source 1..21: mol_type = other RNA
tctcaaactccaagtctcatg

SEQ ID NO: 100612 - RNA, 21 nt, synthetic construct
  source 1..21: mol_type = other RNA
tctcaaactgtgtgcttggag

SEQ ID NO: 100613 - RNA, 21 nt, synthetic construct
  source 1..21: mol_type = other RNA
tctcaaagcccaccagcataa

SEQ ID NO: 100614 - RNA, 21 nt, synthetic construct
  source 1..21: mol_type = other RNA
tctcaaatgaacaggttcttc

SEQ ID NO: 100615 - RNA, 21 nt, synthetic construct
  source 1..21: mol_type = other RNA
tctcaacactgtgttcttttc

SEQ ID NO: 100616 - RNA, 21 nt, synthetic construct
  source 1..21: mol_type = other RNA
tctcaacacttcagtggtaag

SEQ ID NO: 100617 - RNA, 21 nt, synthetic construct
  source 1..21: mol_type = other RNA
tctcaacctactttaaatcag

SEQ ID NO: 100618 - RNA, 21 nt, synthetic construct
  source 1..21: mol_type = other RNA
tctcaacctttgcctcctggg

SEQ ID NO: 100619 - RNA, 21 nt, synthetic construct
  source 1..21: mol_type = other RNA
tctcaactggcccctccatgg

SEQ ID NO: 100620 - RNA, 21 nt, synthetic construct
  source 1..21: mol_type = other RNA
tctcaacttagccttggtaaa

SEQ ID NO: 100621 - RNA, 21 nt, synthetic construct
  source 1..21: mol_type = other RNA
tctcaacttcctgttttagtg

SEQ ID NO: 100622 - RNA, 21 nt, synthetic construct
  source 1..21: mol_type = other RNA
tctcaagaaggtatcatcgga

SEQ ID NO: 100623 - RNA, 21 nt, synthetic construct
  source 1..21: mol_type = other RNA
tctcaagattgtgtgatttca

SEQ ID NO: 100624 - RNA, 21 nt, synthetic construct
  source 1..21: mol_type = other RNA
tctcaagcaatctgaaacgac

SEQ ID NO: 100625 - RNA, 21 nt, synthetic construct
  source 1..21: mol_type = other RNA
tctcaagtaattgttttccct

SEQ ID NO: 100626 - RNA, 21 nt, synthetic construct
  source 1..21: mol_type = other RNA
tctcaataaggaaagcacgtt

SEQ ID NO: 100627 - RNA, 21 nt, synthetic construct
  source 1..21: mol_type = other RNA
tctcaatagtgtcctttgatg

SEQ ID NO: 100628 - RNA, 21 nt, synthetic construct
  source 1..21: mol_type = other RNA
tctcaatcagggccttcccaa

SEQ ID NO: 100629 - RNA, 21 nt, synthetic construct
  source 1..21: mol_type = other RNA
tctcaatcccttccccacctt

SEQ ID NO: 100630 - RNA, 21 nt, synthetic construct
  source 1..21: mol_type = other RNA
tctcaatctcctgatccacct

SEQ ID NO: 100631 - RNA, 21 nt, synthetic construct
  source 1..21: mol_type = other RNA
tctcaattaatgcccaatcaa

SEQ ID NO: 100632 - RNA, 21 nt, synthetic construct
  source 1..21: mol_type = other RNA
tctcaattcagaagctaaatt

SEQ ID NO: 100633 - RNA, 21 nt, synthetic construct
  source 1..21: mol_type = other RNA
tctcacacctgggtatacagc

SEQ ID NO: 100634 - RNA, 21 nt, synthetic construct
  source 1..21: mol_type = other RNA
tctcacactgttgtccaggcc

SEQ ID NO: 100635 - RNA, 21 nt, synthetic construct
  source 1..21: mol_type = other RNA
tctcaccaacatccacagctt

SEQ ID NO: 100636 - RNA, 21 nt, synthetic construct
  source 1..21: mol_type = other RNA
tctcaccctcaggactctgct

SEQ ID NO: 100637 - RNA, 21 nt, synthetic construct
  source 1..21: mol_type = other RNA
tctcacctcaaggccaactgt

SEQ ID NO: 100638 - RNA, 21 nt, synthetic construct
  source 1..21: mol_type = other RNA
tctcacgtcaccgcaacctcc

SEQ ID NO: 100639 - RNA, 21 nt, synthetic construct
  source 1..21: mol_type = other RNA
tctcactcacctagctgtttt

SEQ ID NO: 100640 - RNA, 21 nt, synthetic construct
  source 1..21: mol_type = other RNA
tctcactccaaagcaaacgtg

SEQ ID NO: 100641 - RNA, 21 nt, synthetic construct
  source 1..21: mol_type = other RNA
tctcactcttaccaaggctgg

SEQ ID NO: 100642 - RNA, 21 nt, synthetic construct
  source 1..21: mol_type = other RNA
tctcagaaattataagcttcc

SEQ ID NO: 100643 - RNA, 21 nt, synthetic construct
  source 1..21: mol_type = other RNA
tctcagagggaaactgttttt

SEQ ID NO: 100644 - RNA, 21 nt, synthetic construct
  source 1..21: mol_type = other RNA
tctcagagtatatatgctccc

SEQ ID NO: 100645 - RNA, 21 nt, synthetic construct
  source 1..21: mol_type = other RNA
tctcagatctgagtttgctct

SEQ ID NO: 100646 - RNA, 21 nt, synthetic construct
  source 1..21: mol_type = other RNA
tctcagatctgttgcagtccc

SEQ ID NO: 100647 - RNA, 21 nt, synthetic construct
  source 1..21: mol_type = other RNA
tctcagatgtctccattttgc

SEQ ID NO: 100648 - RNA, 21 nt, synthetic construct
  source 1..21: mol_type = other RNA
tctcagcacagagccgaaatg

SEQ ID NO: 100649 - RNA, 21 nt, synthetic construct
  source 1..21: mol_type = other RNA
tctcagccttttctgatttgc

SEQ ID NO: 100650 - RNA, 21 nt, synthetic construct
  source 1..21: mol_type = other RNA
tctcagctatagcttctgagc

SEQ ID NO: 100651 - RNA, 21 nt, synthetic construct
  source 1..21: mol_type = other RNA
tctcagctcattacagtctcg

SEQ ID NO: 100652 - RNA, 21 nt, synthetic construct
  source 1..21: mol_type = other RNA
tctcagctcctcagaaggcca

SEQ ID NO: 100653 - RNA, 21 nt, synthetic construct
  source 1..21: mol_type = other RNA
tctcaggagcctagtcatcca

SEQ ID NO: 100654 - RNA, 21 nt, synthetic construct
  source 1..21: mol_type = other RNA
tctcagggcctgcttttggaa

SEQ ID NO: 100655 - RNA, 21 nt, synthetic construct
  source 1..21: mol_type = other RNA
tctcaggggtaaaggggatgg

SEQ ID NO: 100656 - RNA, 21 nt, synthetic construct
  source 1..21: mol_type = other RNA
tctcagtatcctttcaaggta

SEQ ID NO: 100657 - RNA, 21 nt, synthetic construct
  source 1..21: mol_type = other RNA
tctcagtcataatttgtgtcc

SEQ ID NO: 100658 - RNA, 21 nt, synthetic construct
  source 1..21: mol_type = other RNA
tctcagtcccaaatgggagca

SEQ ID NO: 100659 - RNA, 21 nt, synthetic construct
  source 1..21: mol_type = other RNA
tctcagtggccctgttggcct

SEQ ID NO: 100660 - RNA, 21 nt, synthetic construct
  source 1..21: mol_type = other RNA
tctcagtggtgcttttgctgc

SEQ ID NO: 100661 - RNA, 21 nt, synthetic construct
  source 1..21: mol_type = other RNA
tctcagttgcagcatgctcac

SEQ ID NO: 100662 - RNA, 21 nt, synthetic construct
  source 1..21: mol_type = other RNA
tctcataaagccggattcctt

SEQ ID NO: 100663 - RNA, 21 nt, synthetic construct
  source 1..21: mol_type = other RNA
tctcatactttgtcaggcatg

SEQ ID NO: 100664 - RNA, 21 nt, synthetic construct
  source 1..21: mol_type = other RNA
tctcatagtcttccaaaatat

SEQ ID NO: 100665 - RNA, 21 nt, synthetic construct
  source 1..21: mol_type = other RNA
tctcatattattttttcccgc

SEQ ID NO: 100666 - RNA, 21 nt, synthetic construct
  source 1..21: mol_type = other RNA
tctcatccacaatgagacatt

SEQ ID NO: 100667 - RNA, 21 nt, synthetic construct
  source 1..21: mol_type = other RNA
tctcatctaaattaagcttcg

SEQ ID NO: 100668 - RNA, 21 nt, synthetic construct
  source 1..21: mol_type = other RNA
tctcatctgtcaaaaagagaa

SEQ ID NO: 100669 - RNA, 21 nt, synthetic construct
  source 1..21: mol_type = other RNA
tctcatctgtcactttcctat

SEQ ID NO: 100670 - RNA, 21 nt, synthetic construct
  source 1..21: mol_type = other RNA
tctcatgagtcctgaaaattc

SEQ ID NO: 100671 - RNA, 21 nt, synthetic construct
  source 1..21: mol_type = other RNA
tctcatgcaattccccagcct

SEQ ID NO: 100672 - RNA, 21 nt, synthetic construct
  source 1..21: mol_type = other RNA
tctcatgcttaggatcccagt

SEQ ID NO: 100673 - RNA, 21 nt, synthetic construct
  source 1..21: mol_type = other RNA
tctcatggaagttatttaatc

SEQ ID NO: 100674 - RNA, 21 nt, synthetic construct
  source 1..21: mol_type = other RNA
tctcatgtatgttttagcctt

SEQ ID NO: 100675 - RNA, 21 nt, synthetic construct
  source 1..21: mol_type = other RNA
tctcatgtcagagacacatac

SEQ ID NO: 100676 - RNA, 21 nt, synthetic construct
  source 1..21: mol_type = other RNA
tctcatgttgggtaaaaataa

SEQ ID NO: 100677 - RNA, 21 nt, synthetic construct
  source 1..21: mol_type = other RNA
tctcattaaaaatcaacccat

SEQ ID NO: 100678 - RNA, 21 nt, synthetic construct
  source 1..21: mol_type = other RNA
tctcattagttatctcttaga

SEQ ID NO: 100679 - RNA, 21 nt, synthetic construct
  source 1..21: mol_type = other RNA
tctcattataacataaaagcg

SEQ ID NO: 100680 - RNA, 21 nt, synthetic construct
  source 1..21: mol_type = other RNA
tctcattcactagacacattt

SEQ ID NO: 100681 - RNA, 21 nt, synthetic construct
  source 1..21: mol_type = other RNA
tctcattcttctctaatgtaa

SEQ ID NO: 100682 - RNA, 21 nt, synthetic construct
  source 1..21: mol_type = other RNA
tctcattgtggatgagattaa

SEQ ID NO: 100683 - RNA, 21 nt, synthetic construct
  source 1..21: mol_type = other RNA
tctcattttgaaaaacagatc

SEQ ID NO: 100684 - RNA, 21 nt, synthetic construct
  source 1..21: mol_type = other RNA
tctcatttttcaggggggcca

SEQ ID NO: 100685 - RNA, 21 nt, synthetic construct
  source 1..21: mol_type = other RNA
tctccaacagaagaagtttct

SEQ ID NO: 100686 - RNA, 21 nt, synthetic construct
  source 1..21: mol_type = other RNA
tctccaacgctttttatggaa

SEQ ID NO: 100687 - RNA, 21 nt, synthetic construct
  source 1..21: mol_type = other RNA
tctccaaggaaagtgtgcttg

SEQ ID NO: 100688 - RNA, 21 nt, synthetic construct
  source 1..21: mol_type = other RNA
tctccaaggtacaattacaca

SEQ ID NO: 100689 - RNA, 21 nt, synthetic construct
  source 1..21: mol_type = other RNA
tctccaatcctcagccccctc

SEQ ID NO: 100690 - RNA, 21 nt, synthetic construct
  source 1..21: mol_type = other RNA
tctccacatccttgccaacag

SEQ ID NO: 100691 - RNA, 21 nt, synthetic construct
  source 1..21: mol_type = other RNA
tctccacatttctacacaaca

SEQ ID NO: 100692 - RNA, 21 nt, synthetic construct
  source 1..21: mol_type = other RNA
tctccactttcatgatttggt

SEQ ID NO: 100693 - RNA, 21 nt, synthetic construct
  source 1..21: mol_type = other RNA
tctccagggaggaatccttca

SEQ ID NO: 100694 - RNA, 21 nt, synthetic construct
  source 1..21: mol_type = other RNA
tctccagtcccactgacagtg

SEQ ID NO: 100695 - RNA, 21 nt, synthetic construct
  source 1..21: mol_type = other RNA
tctccagtgaagtcatctggt

SEQ ID NO: 100696 - RNA, 21 nt, synthetic construct
  source 1..21: mol_type = other RNA
tctccataagtccctaacagt

SEQ ID NO: 100697 - RNA, 21 nt, synthetic construct
  source 1..21: mol_type = other RNA
tctccatacaaggagacctac

SEQ ID NO: 100698 - RNA, 21 nt, synthetic construct
  source 1..21: mol_type = other RNA
tctccataccccctggaaata

SEQ ID NO: 100699 - RNA, 21 nt, synthetic construct
  source 1..21: mol_type = other RNA
tctccatgtcctcacctcaca

SEQ ID NO: 100700 - RNA, 21 nt, synthetic construct
  source 1..21: mol_type = other RNA
tctccattttgccagctaact

SEQ ID NO: 100701 - RNA, 21 nt, synthetic construct
  source 1..21: mol_type = other RNA
tctccattttggtcttaccct

SEQ ID NO: 100702 - RNA, 21 nt, synthetic construct
  source 1..21: mol_type = other RNA
tctcccaaggttgcctgttca

SEQ ID NO: 100703 - RNA, 21 nt, synthetic construct
  source 1..21: mol_type = other RNA
tctcccaccatctctctgcct

SEQ ID NO: 100704 - RNA, 21 nt, synthetic construct
  source 1..21: mol_type = other RNA
tctcccagcatgaagccctct

SEQ ID NO: 100705 - RNA, 21 nt, synthetic construct
  source 1..21: mol_type = other RNA
tctcccagctgtccaacaagg

SEQ ID NO: 100706 - RNA, 21 nt, synthetic construct
  source 1..21: mol_type = other RNA
tctcccaggtcagtagtacag

SEQ ID NO: 100707 - RNA, 21 nt, synthetic construct
  source 1..21: mol_type = other RNA
tctcccagttgtcagaattag

SEQ ID NO: 100708 - RNA, 21 nt, synthetic construct
  source 1..21: mol_type = other RNA
tctcccataccacctgtcaga

SEQ ID NO: 100709 - RNA, 21 nt, synthetic construct
  source 1..21: mol_type = other RNA
tctcccatcactagaatgtga

SEQ ID NO: 100710 - RNA, 21 nt, synthetic construct
  source 1..21: mol_type = other RNA
tctccccaaagatattagcta

SEQ ID NO: 100711 - RNA, 21 nt, synthetic construct
  source 1..21: mol_type = other RNA
tctccccaagtaaacctcaag

SEQ ID NO: 100712 - RNA, 21 nt, synthetic construct
  source 1..21: mol_type = other RNA
tctcccccaggtggttctgcc

SEQ ID NO: 100713 - RNA, 21 nt, synthetic construct
  source 1..21: mol_type = other RNA
tctcccccgaatcctttgctt

SEQ ID NO: 100714 - RNA, 21 nt, synthetic construct
  source 1..21: mol_type = other RNA
tctccccttgacgaagtcaca

SEQ ID NO: 100715 - RNA, 21 nt, synthetic construct
  source 1..21: mol_type = other RNA
tctccctaaccaggcccgggg

SEQ ID NO: 100716 - RNA, 21 nt, synthetic construct
  source 1..21: mol_type = other RNA
tctccctcacagtccactcac

SEQ ID NO: 100717 - RNA, 21 nt, synthetic construct
  source 1..21: mol_type = other RNA
tctccctcggccacagcaggg

SEQ ID NO: 100718 - RNA, 21 nt, synthetic construct
  source 1..21: mol_type = other RNA
tctccctcttcgctcttttaa

SEQ ID NO: 100719 - RNA, 21 nt, synthetic construct
  source 1..21: mol_type = other RNA
tctccctgaaattgtcagaaa

SEQ ID NO: 100720 - RNA, 21 nt, synthetic construct
  source 1..21: mol_type = other RNA
tctccctgccctgtgaaaatc

SEQ ID NO: 100721 - RNA, 21 nt, synthetic construct
  source 1..21: mol_type = other RNA
tctccctgtctttctgtctgc

SEQ ID NO: 100722 - RNA, 21 nt, synthetic construct
  source 1..21: mol_type = other RNA
tctccctgtgcgtgaatctgt

SEQ ID NO: 100723 - RNA, 21 nt, synthetic construct
  source 1..21: mol_type = other RNA
tctcccttcctgttctttgtt

SEQ ID NO: 100724 - RNA, 21 nt, synthetic construct
  source 1..21: mol_type = other RNA
tctcccttctattccattgtt

SEQ ID NO: 100725 - RNA, 21 nt, synthetic construct
  source 1..21: mol_type = other RNA
tctccgggtaaaaagcctgct

SEQ ID NO: 100726 - RNA, 21 nt, synthetic construct
  source 1..21: mol_type = other RNA
tctcctaagtcttcttctaag

SEQ ID NO: 100727 - RNA, 21 nt, synthetic construct
  source 1..21: mol_type = other RNA
tctcctatattgtcaatgggg

SEQ ID NO: 100728 - RNA, 21 nt, synthetic construct
  source 1..21: mol_type = other RNA
tctcctccaacccattccagg

SEQ ID NO: 100729 - RNA, 21 nt, synthetic construct
  source 1..21: mol_type = other RNA
tctcctctttcatatctgatt

SEQ ID NO: 100730 - RNA, 21 nt, synthetic construct
  source 1..21: mol_type = other RNA
tctcctgcatggggagtttta

SEQ ID NO: 100731 - RNA, 21 nt, synthetic construct
  source 1..21: mol_type = other RNA
tctcctgtgccaagtccgtgc

SEQ ID NO: 100732 - RNA, 21 nt, synthetic construct
  source 1..21: mol_type = other RNA
tctcctgtgtgcatgctccca

SEQ ID NO: 100733 - RNA, 21 nt, synthetic construct
  source 1..21: mol_type = other RNA
tctccttaatccagtctatca

SEQ ID NO: 100734 - RNA, 21 nt, synthetic construct
  source 1..21: mol_type = other RNA
tctccttctgcaggctgaact

SEQ ID NO: 100735 - RNA, 21 nt, synthetic construct
  source 1..21: mol_type = other RNA
tctccttctggaagatttcta

SEQ ID NO: 100736 - RNA, 21 nt, synthetic construct
  source 1..21: mol_type = other RNA
tctccttgcacattagaatca

SEQ ID NO: 100737 - RNA, 21 nt, synthetic construct
  source 1..21: mol_type = other RNA
tctccttgtatggagactagt

SEQ ID NO: 100738 - RNA, 21 nt, synthetic construct
  source 1..21: mol_type = other RNA
tctcctttccttccttgctca

SEQ ID NO: 100739 - RNA, 21 nt, synthetic construct
  source 1..21: mol_type = other RNA
tctcctttctatacttcatct

SEQ ID NO: 100740 - RNA, 21 nt, synthetic construct
  source 1..21: mol_type = other RNA
tctcctttgaggtaagaactt

SEQ ID NO: 100741 - RNA, 21 nt, synthetic construct
  source 1..21: mol_type = other RNA
tctccttttaagagtgaagaa

SEQ ID NO: 100742 - RNA, 21 nt, synthetic construct
  source 1..21: mol_type = other RNA
tctcgaaaaggaatggaattc

SEQ ID NO: 100743 - RNA, 21 nt, synthetic construct
  source 1..21: mol_type = other RNA
tctcgaactctcgacctcgtg

SEQ ID NO: 100744 - RNA, 21 nt, synthetic construct
  source 1..21: mol_type = other RNA
tctcgaagtggtgcttgaact

SEQ ID NO: 100745 - RNA, 21 nt, synthetic construct
  source 1..21: mol_type = other RNA
tctcgacacacaatccaagtt

SEQ ID NO: 100746 - RNA, 21 nt, synthetic construct
  source 1..21: mol_type = other RNA
tctcgaccccctgggctcaag

SEQ ID NO: 100747 - RNA, 21 nt, synthetic construct
  source 1..21: mol_type = other RNA
tctcgagctcctgacctcaga

SEQ ID NO: 100748 - RNA, 21 nt, synthetic construct
  source 1..21: mol_type = other RNA
tctcgatggacatttaggttg

SEQ ID NO: 100749 - RNA, 21 nt, synthetic construct
  source 1..21: mol_type = other RNA
tctcgcagcggggatgctcag

SEQ ID NO: 100750 - RNA, 21 nt, synthetic construct
  source 1..21: mol_type = other RNA
tctcgctctgtcgcccaggcg

SEQ ID NO: 100751 - RNA, 21 nt, synthetic construct
  source 1..21: mol_type = other RNA
tctcggatttaagagaggaag

SEQ ID NO: 100752 - RNA, 21 nt, synthetic construct
  source 1..21: mol_type = other RNA
tctcggcttactgcaacctcc

SEQ ID NO: 100753 - RNA, 21 nt, synthetic construct
  source 1..21: mol_type = other RNA
tctcggtcattctggagtgtt

SEQ ID NO: 100754 - RNA, 21 nt, synthetic construct
  source 1..21: mol_type = other RNA
tctcgtgaatttggtattctt

SEQ ID NO: 100755 - RNA, 21 nt, synthetic construct
  source 1..21: mol_type = other RNA
tctcgtgcatgtctgcaggag

SEQ ID NO: 100756 - RNA, 21 nt, synthetic construct
  source 1..21: mol_type = other RNA
tctcgtgtgagctctagcctt

SEQ ID NO: 100757 - RNA, 21 nt, synthetic construct
  source 1..21: mol_type = other RNA
tctcgttcatgttcaaggtgt

SEQ ID NO: 100758 - RNA, 21 nt, synthetic construct
  source 1..21: mol_type = other RNA
tctctaaaaacatccattact

SEQ ID NO: 100759 - RNA, 21 nt, synthetic construct
  source 1..21: mol_type = other RNA
tctctaatagctagtgatgtt

SEQ ID NO: 100760 - RNA, 21 nt, synthetic construct
  source 1..21: mol_type = other RNA
tctctaatgtaaacagcatac

SEQ ID NO: 100761 - RNA, 21 nt, synthetic construct
  source 1..21: mol_type = other RNA
tctctacagggaaccgtaact

SEQ ID NO: 100762 - RNA, 21 nt, synthetic construct
  source 1..21: mol_type = other RNA
tctctacagttaacaatactg

SEQ ID NO: 100763 - RNA, 21 nt, synthetic construct
  source 1..21: mol_type = other RNA
tctctacatctggatcctgtc

SEQ ID NO: 100764 - RNA, 21 nt, synthetic construct
  source 1..21: mol_type = other RNA
tctctacccagcactctgaat

SEQ ID NO: 100765 - RNA, 21 nt, synthetic construct
  source 1..21: mol_type = other RNA
tctctactctgcctcagttga

SEQ ID NO: 100766 - RNA, 21 nt, synthetic construct
  source 1..21: mol_type = other RNA
tctctagaacttatgcatctt

SEQ ID NO: 100767 - RNA, 21 nt, synthetic construct
  source 1..21: mol_type = other RNA
tctctaggcttaaaattcttc

SEQ ID NO: 100768 - RNA, 21 nt, synthetic construct
  source 1..21: mol_type = other RNA
tctctagttgcacggtgaaga

SEQ ID NO: 100769 - RNA, 21 nt, synthetic construct
  source 1..21: mol_type = other RNA
tctctagttttccagtatatt

SEQ ID NO: 100770 - RNA, 21 nt, synthetic construct
  source 1..21: mol_type = other RNA
tctctatccaccactccacct

SEQ ID NO: 100771 - RNA, 21 nt, synthetic construct
  source 1..21: mol_type = other RNA
tctctatgcagaaatctacca

SEQ ID NO: 100772 - RNA, 21 nt, synthetic construct
  source 1..21: mol_type = other RNA
tctctattccaaatgtctgtc

SEQ ID NO: 100773 - RNA, 21 nt, synthetic construct
  source 1..21: mol_type = other RNA
tctctcaactggcccctccat

SEQ ID NO: 100774 - RNA, 21 nt, synthetic construct
  source 1..21: mol_type = other RNA
tctctcaagcaatctgaaacg

SEQ ID NO: 100775 - RNA, 21 nt, synthetic construct
  source 1..21: mol_type = other RNA
tctctcagagggaaactgttt

SEQ ID NO: 100776 - RNA, 21 nt, synthetic construct
  source 1..21: mol_type = other RNA
tctctcagatctgagtttgct

SEQ ID NO: 100777 - RNA, 21 nt, synthetic construct
  source 1..21: mol_type = other RNA
tctctcatgttgggtaaaaat

SEQ ID NO: 100778 - RNA, 21 nt, synthetic construct
  source 1..21: mol_type = other RNA
tctctccaacagaagaagttt

SEQ ID NO: 100779 - RNA, 21 nt, synthetic construct
  source 1..21: mol_type = other RNA
tctctccaaggtacaattaca

SEQ ID NO: 100780 - RNA, 21 nt, synthetic construct
  source 1..21: mol_type = other RNA
tctctccctgccctgtgaaaa

SEQ ID NO: 100781 - RNA, 21 nt, synthetic construct
  source 1..21: mol_type = other RNA
tctctccctgtctttctgtct

SEQ ID NO: 100782 - RNA, 21 nt, synthetic construct
  source 1..21: mol_type = other RNA
tctctcccttcctgttctttg

SEQ ID NO: 100783 - RNA, 21 nt, synthetic construct
  source 1..21: mol_type = other RNA
tctctccttgcacattagaat

SEQ ID NO: 100784 - RNA, 21 nt, synthetic construct
  source 1..21: mol_type = other RNA
tctctcctttgaggtaagaac

SEQ ID NO: 100785 - RNA, 21 nt, synthetic construct
  source 1..21: mol_type = other RNA
tctctcgatggacatttaggt

SEQ ID NO: 100786 - RNA, 21 nt, synthetic construct
  source 1..21: mol_type = other RNA
tctctctaaaaacatccatta

SEQ ID NO: 100787 - RNA, 21 nt, synthetic construct
  source 1..21: mol_type = other RNA
tctctctatccaccactccac

SEQ ID NO: 100788 - RNA, 21 nt, synthetic construct
  source 1..21: mol_type = other RNA
tctctctcaactggcccctcc

SEQ ID NO: 100789 - RNA, 21 nt, synthetic construct
  source 1..21: mol_type = other RNA
tctctctcaagcaatctgaaa

SEQ ID NO: 100790 - RNA, 21 nt, synthetic construct
  source 1..21: mol_type = other RNA
tctctctccctgccctgtgaa

SEQ ID NO: 100791 - RNA, 21 nt, synthetic construct
  source 1..21: mol_type = other RNA
tctctctccctgtctttctgt

SEQ ID NO: 100792 - RNA, 21 nt, synthetic construct
  source 1..21: mol_type = other RNA
tctctctctccctgtctttct

SEQ ID NO: 100793 - RNA, 21 nt, synthetic construct
  source 1..21: mol_type = other RNA
tctctctctgcttcactaact

SEQ ID NO: 100794 - RNA, 21 nt, synthetic construct
  source 1..21: mol_type = other RNA
tctctctgaaattagctaagt

SEQ ID NO: 100795 - RNA, 21 nt, synthetic construct
  source 1..21: mol_type = other RNA
tctctctgcctcaaaatcaac

SEQ ID NO: 100796 - RNA, 21 nt, synthetic construct
  source 1..21: mol_type = other RNA
tctctctgcctcggcacagct

SEQ ID NO: 100797 - RNA, 21 nt, synthetic construct
  source 1..21: mol_type = other RNA
tctctctgcttcactaacttt

SEQ ID NO: 100798 - RNA, 21 nt, synthetic construct
  source 1..21: mol_type = other RNA
tctctcttccaaataatcccg

SEQ ID NO: 100799 - RNA, 21 nt, synthetic construct
  source 1..21: mol_type = other RNA
tctctcttgaccttagttttc

SEQ ID NO: 100800 - RNA, 21 nt, synthetic construct
  source 1..21: mol_type = other RNA
tctctctttctggggatgctg

SEQ ID NO: 100801 - RNA, 21 nt, synthetic construct
  source 1..21: mol_type = other RNA
tctctgaaattagctaagtat

SEQ ID NO: 100802 - RNA, 21 nt, synthetic construct
  source 1..21: mol_type = other RNA
tctctgacatgagagctaagg

SEQ ID NO: 100803 - RNA, 21 nt, synthetic construct
  source 1..21: mol_type = other RNA
tctctgacattggttattcat

SEQ ID NO: 100804 - RNA, 21 nt, synthetic construct
  source 1..21: mol_type = other RNA
tctctgacttcattcttgaca

SEQ ID NO: 100805 - RNA, 21 nt, synthetic construct
  source 1..21: mol_type = other RNA
tctctgatggaacggcttaac

SEQ ID NO: 100806 - RNA, 21 nt, synthetic construct
  source 1..21: mol_type = other RNA
tctctgcaaaaaatgtttgtt

SEQ ID NO: 100807 - RNA, 21 nt, synthetic construct
  source 1..21: mol_type = other RNA
tctctgcaacatttgttgcat

SEQ ID NO: 100808 - RNA, 21 nt, synthetic construct
  source 1..21: mol_type = other RNA
tctctgcagagcaggctccac

SEQ ID NO: 100809 - RNA, 21 nt, synthetic construct
  source 1..21: mol_type = other RNA
tctctgccccgggcctggtta

SEQ ID NO: 100810 - RNA, 21 nt, synthetic construct
  source 1..21: mol_type = other RNA
tctctgccctcattgaagcta

SEQ ID NO: 100811 - RNA, 21 nt, synthetic construct
  source 1..21: mol_type = other RNA
tctctgcctcaaaatcaacat

SEQ ID NO: 100812 - RNA, 21 nt, synthetic construct
  source 1..21: mol_type = other RNA
tctctgcctcggcacagctct

SEQ ID NO: 100813 - RNA, 21 nt, synthetic construct
  source 1..21: mol_type = other RNA
tctctgctctcaagtaattgt

SEQ ID NO: 100814 - RNA, 21 nt, synthetic construct
  source 1..21: mol_type = other RNA
tctctgctgctgaaaaagata

SEQ ID NO: 100815 - RNA, 21 nt, synthetic construct
  source 1..21: mol_type = other RNA
tctctgcttcactaactttaa

SEQ ID NO: 100816 - RNA, 21 nt, synthetic construct
  source 1..21: mol_type = other RNA
tctctgctttttcttggtggt

SEQ ID NO: 100817 - RNA, 21 nt, synthetic construct
  source 1..21: mol_type = other RNA
tctctggaaggctaagcatgt

SEQ ID NO: 100818 - RNA, 21 nt, synthetic construct
  source 1..21: mol_type = other RNA
tctctggaatagaagagcagt

SEQ ID NO: 100819 - RNA, 21 nt, synthetic construct
  source 1..21: mol_type = other RNA
tctctggagcaagcatgagta

SEQ ID NO: 100820 - RNA, 21 nt, synthetic construct
  source 1..21: mol_type = other RNA
tctctggctgcaattgcgcag

SEQ ID NO: 100821 - RNA, 21 nt, synthetic construct
  source 1..21: mol_type = other RNA
tctctgggctcactgcaactt

SEQ ID NO: 100822 - RNA, 21 nt, synthetic construct
  source 1..21: mol_type = other RNA
tctctgggcttcactttcgtc

SEQ ID NO: 100823 - RNA, 21 nt, synthetic construct
  source 1..21: mol_type = other RNA
tctctggggttagggcctaga

SEQ ID NO: 100824 - RNA, 21 nt, synthetic construct
  source 1..21: mol_type = other RNA
tctctggtattctgaactttc

SEQ ID NO: 100825 - RNA, 21 nt, synthetic construct
  source 1..21: mol_type = other RNA
tctctgtctctgttgcccagt

SEQ ID NO: 100826 - RNA, 21 nt, synthetic construct
  source 1..21: mol_type = other RNA
tctctgtgtggtttgcctttt

SEQ ID NO: 100827 - RNA, 21 nt, synthetic construct
  source 1..21: mol_type = other RNA
tctcttaaatccgagacaagt

SEQ ID NO: 100828 - RNA, 21 nt, synthetic construct
  source 1..21: mol_type = other RNA
tctcttaagaccacaaggatt

SEQ ID NO: 100829 - RNA, 21 nt, synthetic construct
  source 1..21: mol_type = other RNA
tctcttacacctgtttaaaaa

SEQ ID NO: 100830 - RNA, 21 nt, synthetic construct
  source 1..21: mol_type = other RNA
tctcttagacctcctagattg

SEQ ID NO: 100831 - RNA, 21 nt, synthetic construct
  source 1..21: mol_type = other RNA
tctcttatactagtagaaagc

SEQ ID NO: 100832 - RNA, 21 nt, synthetic construct
  source 1..21: mol_type = other RNA
tctcttcaccaactgaagcgg

SEQ ID NO: 100833 - RNA, 21 nt, synthetic construct
  source 1..21: mol_type = other RNA
tctcttccaaataatcccgca

SEQ ID NO: 100834 - RNA, 21 nt, synthetic construct
  source 1..21: mol_type = other RNA
tctcttcccccaaaacttagg

SEQ ID NO: 100835 - RNA, 21 nt, synthetic construct
  source 1..21: mol_type = other RNA
tctcttcctcctctggacatt

SEQ ID NO: 100836 - RNA, 21 nt, synthetic construct
  source 1..21: mol_type = other RNA
tctcttcctgtatatctcctt

SEQ ID NO: 100837 - RNA, 21 nt, synthetic construct
  source 1..21: mol_type = other RNA
tctcttcgagggggctgagta

SEQ ID NO: 100838 - RNA, 21 nt, synthetic construct
  source 1..21: mol_type = other RNA
tctcttctggatagcattatc

SEQ ID NO: 100839 - RNA, 21 nt, synthetic construct
  source 1..21: mol_type = other RNA
tctcttgaccttagttttcac

SEQ ID NO: 100840 - RNA, 21 nt, synthetic construct
  source 1..21: mol_type = other RNA
tctcttgcccaagctggtcct

SEQ ID NO: 100841 - RNA, 21 nt, synthetic construct
  source 1..21: mol_type = other RNA
tctcttgcctaggctggagtg

SEQ ID NO: 100842 - RNA, 21 nt, synthetic construct
  source 1..21: mol_type = other RNA
tctcttggaatgtgcacctcc

SEQ ID NO: 100843 - RNA, 21 nt, synthetic construct
  source 1..21: mol_type = other RNA
tctcttgttgaggatgactgt

SEQ ID NO: 100844 - RNA, 21 nt, synthetic construct
  source 1..21: mol_type = other RNA
tctctttaaagctgaactcct

SEQ ID NO: 100845 - RNA, 21 nt, synthetic construct
  source 1..21: mol_type = other RNA
tctctttaattatgagcattc

SEQ ID NO: 100846 - RNA, 21 nt, synthetic construct
  source 1..21: mol_type = other RNA
tctctttaggaagcttccttg

SEQ ID NO: 100847 - RNA, 21 nt, synthetic construct
  source 1..21: mol_type = other RNA
tctctttagggaagatagtac

SEQ ID NO: 100848 - RNA, 21 nt, synthetic construct
  source 1..21: mol_type = other RNA
tctctttcagccatcccagct

SEQ ID NO: 100849 - RNA, 21 nt, synthetic construct
  source 1..21: mol_type = other RNA
tctctttctgaaattctcatt

SEQ ID NO: 100850 - RNA, 21 nt, synthetic construct
  source 1..21: mol_type = other RNA
tctctttctggggatgctgtc

SEQ ID NO: 100851 - RNA, 21 nt, synthetic construct
  source 1..21: mol_type = other RNA
tctctttgaaaggaatccggc

SEQ ID NO: 100852 - RNA, 21 nt, synthetic construct
  source 1..21: mol_type = other RNA
tctctttgtttatccttgcac

SEQ ID NO: 100853 - RNA, 21 nt, synthetic construct
  source 1..21: mol_type = other RNA
tctcttttcctcgttttcaac

SEQ ID NO: 100854 - RNA, 21 nt, synthetic construct
  source 1..21: mol_type = other RNA
tctcttttcctttaacgtatc

SEQ ID NO: 100855 - RNA, 21 nt, synthetic construct
  source 1..21: mol_type = other RNA
tctctttttgacagatgagac

SEQ ID NO: 100856 - RNA, 21 nt, synthetic construct
  source 1..21: mol_type = other RNA
tctgaaaaatggttttatggt

SEQ ID NO: 100857 - RNA, 21 nt, synthetic construct
  source 1..21: mol_type = other RNA
tctgaaacgaccttgctcatt

SEQ ID NO: 100858 - RNA, 21 nt, synthetic construct
  source 1..21: mol_type = other RNA
tctgaaagcttctgagcagtg

SEQ ID NO: 100859 - RNA, 21 nt, synthetic construct
  source 1..21: mol_type = other RNA
tctgaaattagctaagtatgc

SEQ ID NO: 100860 - RNA, 21 nt, synthetic construct
  source 1..21: mol_type = other RNA
tctgaaattgacttcactaga

SEQ ID NO: 100861 - RNA, 21 nt, synthetic construct
  source 1..21: mol_type = other RNA
tctgaacattttagctggggc

SEQ ID NO: 100862 - RNA, 21 nt, synthetic construct
  source 1..21: mol_type = other RNA
tctgaacgtctttaaatttca

SEQ ID NO: 100863 - RNA, 21 nt, synthetic construct
  source 1..21: mol_type = other RNA
tctgaactcaaaagtgaatca

SEQ ID NO: 100864 - RNA, 21 nt, synthetic construct
  source 1..21: mol_type = other RNA
tctgaactttcaacctaacat

SEQ ID NO: 100865 - RNA, 21 nt, synthetic construct
  source 1..21: mol_type = other RNA
tctgaactttcgaagtgggaa

SEQ ID NO: 100866 - RNA, 21 nt, synthetic construct
  source 1..21: mol_type = other RNA
tctgaagaaattatctgtggg

SEQ ID NO: 100867 - RNA, 21 nt, synthetic construct
  source 1..21: mol_type = other RNA
tctgaagacatgctgaggccc

SEQ ID NO: 100868 - RNA, 21 nt, synthetic construct
  source 1..21: mol_type = other RNA
tctgaagaggctttctgtgta

SEQ ID NO: 100869 - RNA, 21 nt, synthetic construct
  source 1..21: mol_type = other RNA
tctgaagagtctatctttggg

SEQ ID NO: 100870 - RNA, 21 nt, synthetic construct
  source 1..21: mol_type = other RNA
tctgaaggcactaacaaaggg

SEQ ID NO: 100871 - RNA, 21 nt, synthetic construct
  source 1..21: mol_type = other RNA
tctgaaggctcagcccctcat

SEQ ID NO: 100872 - RNA, 21 nt, synthetic construct
  source 1..21: mol_type = other RNA
tctgaaggtgcctgccataga

SEQ ID NO: 100873 - RNA, 21 nt, synthetic construct
  source 1..21: mol_type = other RNA
tctgaatcacctcaaggcaga

SEQ ID NO: 100874 - RNA, 21 nt, synthetic construct
  source 1..21: mol_type = other RNA
tctgaatgtgaccttatttgg

SEQ ID NO: 100875 - RNA, 21 nt, synthetic construct
  source 1..21: mol_type = other RNA
tctgaattctctggaatagaa

SEQ ID NO: 100876 - RNA, 21 nt, synthetic construct
  source 1..21: mol_type = other RNA
tctgaattgagatgtactgga

SEQ ID NO: 100877 - RNA, 21 nt, synthetic construct
  source 1..21: mol_type = other RNA
tctgacaactgggagaatggc

SEQ ID NO: 100878 - RNA, 21 nt, synthetic construct
  source 1..21: mol_type = other RNA
tctgacaatttcagggagaat

SEQ ID NO: 100879 - RNA, 21 nt, synthetic construct
  source 1..21: mol_type = other RNA
tctgacaatttgccaaaatga

SEQ ID NO: 100880 - RNA, 21 nt, synthetic construct
  source 1..21: mol_type = other RNA
tctgacacccgaagaggacga

SEQ ID NO: 100881 - RNA, 21 nt, synthetic construct
  source 1..21: mol_type = other RNA
tctgacacccgacccactagt

SEQ ID NO: 100882 - RNA, 21 nt, synthetic construct
  source 1..21: mol_type = other RNA
tctgacaggtggtatgggaga

SEQ ID NO: 100883 - RNA, 21 nt, synthetic construct
  source 1..21: mol_type = other RNA
tctgacatactgtcacaggct

SEQ ID NO: 100884 - RNA, 21 nt, synthetic construct
  source 1..21: mol_type = other RNA
tctgacatatgttttgcttcg

SEQ ID NO: 100885 - RNA, 21 nt, synthetic construct
  source 1..21: mol_type = other RNA
tctgacatgagagctaaggga

SEQ ID NO: 100886 - RNA, 21 nt, synthetic construct
  source 1..21: mol_type = other RNA
tctgacattggttattcatgt

SEQ ID NO: 100887 - RNA, 21 nt, synthetic construct
  source 1..21: mol_type = other RNA
tctgaccaactatttcactaa

SEQ ID NO: 100888 - RNA, 21 nt, synthetic construct
  source 1..21: mol_type = other RNA
tctgaccattgtgtggacaca

SEQ ID NO: 100889 - RNA, 21 nt, synthetic construct
  source 1..21: mol_type = other RNA
tctgacccagagcctaatgtg

SEQ ID NO: 100890 - RNA, 21 nt, synthetic construct
  source 1..21: mol_type = other RNA
tctgaccctttattcaaagat

SEQ ID NO: 100891 - RNA, 21 nt, synthetic construct
  source 1..21: mol_type = other RNA
tctgacctaaagttttaagaa

SEQ ID NO: 100892 - RNA, 21 nt, synthetic construct
  source 1..21: mol_type = other RNA
tctgacctaagcttgggtagg

SEQ ID NO: 100893 - RNA, 21 nt, synthetic construct
  source 1..21: mol_type = other RNA
tctgacgtttaaatgagttaa

SEQ ID NO: 100894 - RNA, 21 nt, synthetic construct
  source 1..21: mol_type = other RNA
tctgactacactgaagggaat

SEQ ID NO: 100895 - RNA, 21 nt, synthetic construct
  source 1..21: mol_type = other RNA
tctgactctgtgcttgtgctt

SEQ ID NO: 100896 - RNA, 21 nt, synthetic construct
  source 1..21: mol_type = other RNA
tctgacttagtgagggaggcc

SEQ ID NO: 100897 - RNA, 21 nt, synthetic construct
  source 1..21: mol_type = other RNA
tctgacttcattcttgacatg

SEQ ID NO: 100898 - RNA, 21 nt, synthetic construct
  source 1..21: mol_type = other RNA
tctgacttctctcagagggaa

SEQ ID NO: 100899 - RNA, 21 nt, synthetic construct
  source 1..21: mol_type = other RNA
tctgactttatggtatcactt

SEQ ID NO: 100900 - RNA, 21 nt, synthetic construct
  source 1..21: mol_type = other RNA
tctgagaagactaagcagaaa

SEQ ID NO: 100901 - RNA, 21 nt, synthetic construct
  source 1..21: mol_type = other RNA
tctgagaaggcgaaatgtgaa

SEQ ID NO: 100902 - RNA, 21 nt, synthetic construct
  source 1..21: mol_type = other RNA
tctgagacaggatccagatgt

SEQ ID NO: 100903 - RNA, 21 nt, synthetic construct
  source 1..21: mol_type = other RNA
tctgagacatcacaatgcgtt

SEQ ID NO: 100904 - RNA, 21 nt, synthetic construct
  source 1..21: mol_type = other RNA
tctgagagaagtcagactaag

SEQ ID NO: 100905 - RNA, 21 nt, synthetic construct
  source 1..21: mol_type = other RNA
tctgagagatagaaagcacca

SEQ ID NO: 100906 - RNA, 21 nt, synthetic construct
  source 1..21: mol_type = other RNA
tctgagagtattgccaggttt

SEQ ID NO: 100907 - RNA, 21 nt, synthetic construct
  source 1..21: mol_type = other RNA
tctgagcaactactatttcgc

SEQ ID NO: 100908 - RNA, 21 nt, synthetic construct
  source 1..21: mol_type = other RNA
tctgagcagtgtttcctagat

SEQ ID NO: 100909 - RNA, 21 nt, synthetic construct
  source 1..21: mol_type = other RNA
tctgagccagagtttcactct

SEQ ID NO: 100910 - RNA, 21 nt, synthetic construct
  source 1..21: mol_type = other RNA
tctgagctgttaatggttaga

SEQ ID NO: 100911 - RNA, 21 nt, synthetic construct
  source 1..21: mol_type = other RNA
tctgaggagctgagaccacag

SEQ ID NO: 100912 - RNA, 21 nt, synthetic construct
  source 1..21: mol_type = other RNA
tctgaggcctcctgccttcct

SEQ ID NO: 100913 - RNA, 21 nt, synthetic construct
  source 1..21: mol_type = other RNA
tctgagggaaattatttccag

SEQ ID NO: 100914 - RNA, 21 nt, synthetic construct
  source 1..21: mol_type = other RNA
tctgaggtggagttctgctct

SEQ ID NO: 100915 - RNA, 21 nt, synthetic construct
  source 1..21: mol_type = other RNA
tctgagtaaagggtaagaaaa

SEQ ID NO: 100916 - RNA, 21 nt, synthetic construct
  source 1..21: mol_type = other RNA
tctgagtatattctgtgaatt

SEQ ID NO: 100917 - RNA, 21 nt, synthetic construct
  source 1..21: mol_type = other RNA
tctgagtgttacttgaaatca

SEQ ID NO: 100918 - RNA, 21 nt, synthetic construct
  source 1..21: mol_type = other RNA
tctgagtgttgtgtgcaccta

SEQ ID NO: 100919 - RNA, 21 nt, synthetic construct
  source 1..21: mol_type = other RNA
tctgagtttgctctgcaaatg

SEQ ID NO: 100920 - RNA, 21 nt, synthetic construct
  source 1..21: mol_type = other RNA
tctgataaattattagcttgc

SEQ ID NO: 100921 - RNA, 21 nt, synthetic construct
  source 1..21: mol_type = other RNA
tctgataagcccaacctgatt

SEQ ID NO: 100922 - RNA, 21 nt, synthetic construct
  source 1..21: mol_type = other RNA
tctgatacacttctatccagt

SEQ ID NO: 100923 - RNA, 21 nt, synthetic construct
  source 1..21: mol_type = other RNA
tctgatagcttgacaaaaggc

SEQ ID NO: 100924 - RNA, 21 nt, synthetic construct
  source 1..21: mol_type = other RNA
tctgataggaatatcgtcttt

SEQ ID NO: 100925 - RNA, 21 nt, synthetic construct
  source 1..21: mol_type = other RNA
tctgataggataatgtccaga

SEQ ID NO: 100926 - RNA, 21 nt, synthetic construct
  source 1..21: mol_type = other RNA
tctgatatcctgtaaacctgg

SEQ ID NO: 100927 - RNA, 21 nt, synthetic construct
  source 1..21: mol_type = other RNA
tctgatcacagaagtgttttg

SEQ ID NO: 100928 - RNA, 21 nt, synthetic construct
  source 1..21: mol_type = other RNA
tctgatgcacaagccttgaaa

SEQ ID NO: 100929 - RNA, 21 nt, synthetic construct
  source 1..21: mol_type = other RNA
tctgatgctttctctagttgc

SEQ ID NO: 100930 - RNA, 21 nt, synthetic construct
  source 1..21: mol_type = other RNA
tctgatggaacggcttaacac

SEQ ID NO: 100931 - RNA, 21 nt, synthetic construct
  source 1..21: mol_type = other RNA
tctgatgtgtatgttacactt

SEQ ID NO: 100932 - RNA, 21 nt, synthetic construct
  source 1..21: mol_type = other RNA
tctgatgtgtgtctctgctct

SEQ ID NO: 100933 - RNA, 21 nt, synthetic construct
  source 1..21: mol_type = other RNA
tctgattcagtggttggaaaa

SEQ ID NO: 100934 - RNA, 21 nt, synthetic construct
  source 1..21: mol_type = other RNA
tctgattgcccattataaaat

SEQ ID NO: 100935 - RNA, 21 nt, synthetic construct
  source 1..21: mol_type = other RNA
tctgatttcaaagttaatagc

SEQ ID NO: 100936 - RNA, 21 nt, synthetic construct
  source 1..21: mol_type = other RNA
tctgatttgctggctcagtct

SEQ ID NO: 100937 - RNA, 21 nt, synthetic construct
  source 1..21: mol_type = other RNA
tctgatttgtttagtagctgt

SEQ ID NO: 100938 - RNA, 21 nt, synthetic construct
  source 1..21: mol_type = other RNA
tctgattttaatctgtcctga

SEQ ID NO: 100939 - RNA, 21 nt, synthetic construct
  source 1..21: mol_type = other RNA
tctgattttgtgtcttctgtt

SEQ ID NO: 100940 - RNA, 21 nt, synthetic construct
  source 1..21: mol_type = other RNA
tctgatttttagtgactggct

SEQ ID NO: 100941 - RNA, 21 nt, synthetic construct
  source 1..21: mol_type = other RNA
tctgcaaatgaggttgctttt

SEQ ID NO: 100942 - RNA, 21 nt, synthetic construct
  source 1..21: mol_type = other RNA
tctgcaacatttgttgcatcc

SEQ ID NO: 100943 - RNA, 21 nt, synthetic construct
  source 1..21: mol_type = other RNA
tctgcaactatcaaaacactt

SEQ ID NO: 100944 - RNA, 21 nt, synthetic construct
  source 1..21: mol_type = other RNA
tctgcaagcagatctgctgta

SEQ ID NO: 100945 - RNA, 21 nt, synthetic construct
  source 1..21: mol_type = other RNA
tctgcaagttgctatccagtc

SEQ ID NO: 100946 - RNA, 21 nt, synthetic construct
  source 1..21: mol_type = other RNA
tctgcaattggaagactatca

SEQ ID NO: 100947 - RNA, 21 nt, synthetic construct
  source 1..21: mol_type = other RNA
tctgcacgtactagtcagcac

SEQ ID NO: 100948 - RNA, 21 nt, synthetic construct
  source 1..21: mol_type = other RNA
tctgcagaccaagaaaggact

SEQ ID NO: 100949 - RNA, 21 nt, synthetic construct
  source 1..21: mol_type = other RNA
tctgcagactcttgtcccggc

SEQ ID NO: 100950 - RNA, 21 nt, synthetic construct
  source 1..21: mol_type = other RNA
tctgcagagactgtgcttcca

SEQ ID NO: 100951 - RNA, 21 nt, synthetic construct
  source 1..21: mol_type = other RNA
tctgcagagcaggctccactt

SEQ ID NO: 100952 - RNA, 21 nt, synthetic construct
  source 1..21: mol_type = other RNA
tctgcaggagccttgctgttg

SEQ ID NO: 100953 - RNA, 21 nt, synthetic construct
  source 1..21: mol_type = other RNA
tctgcaggcagaatgtgacct

SEQ ID NO: 100954 - RNA, 21 nt, synthetic construct
  source 1..21: mol_type = other RNA
tctgcaggctgaactgctgac

SEQ ID NO: 100955 - RNA, 21 nt, synthetic construct
  source 1..21: mol_type = other RNA
tctgcagtgaacatgggaatg

SEQ ID NO: 100956 - RNA, 21 nt, synthetic construct
  source 1..21: mol_type = other RNA
tctgcagtgtccatctcccat

SEQ ID NO: 100957 - RNA, 21 nt, synthetic construct
  source 1..21: mol_type = other RNA
tctgcagttagcatgcctgac

SEQ ID NO: 100958 - RNA, 21 nt, synthetic construct
  source 1..21: mol_type = other RNA
tctgcagtttgtgttttcact

SEQ ID NO: 100959 - RNA, 21 nt, synthetic construct
  source 1..21: mol_type = other RNA
tctgcatacttagctaatttc

SEQ ID NO: 100960 - RNA, 21 nt, synthetic construct
  source 1..21: mol_type = other RNA
tctgcatagagatcttgtgta

SEQ ID NO: 100961 - RNA, 21 nt, synthetic construct
  source 1..21: mol_type = other RNA
tctgcatccaaaagggaaata

SEQ ID NO: 100962 - RNA, 21 nt, synthetic construct
  source 1..21: mol_type = other RNA
tctgcatcttttgagggtatc

SEQ ID NO: 100963 - RNA, 21 nt, synthetic construct
  source 1..21: mol_type = other RNA
tctgcatttggtttgcaaaaa

SEQ ID NO: 100964 - RNA, 21 nt, synthetic construct
  source 1..21: mol_type = other RNA
tctgccacattcaacaacatg

SEQ ID NO: 100965 - RNA, 21 nt, synthetic construct
  source 1..21: mol_type = other RNA
tctgccaggacaattgaatgg

SEQ ID NO: 100966 - RNA, 21 nt, synthetic construct
  source 1..21: mol_type = other RNA
tctgcccatcctatctaagcc

SEQ ID NO: 100967 - RNA, 21 nt, synthetic construct
  source 1..21: mol_type = other RNA
tctgccccgggcctggttagg

SEQ ID NO: 100968 - RNA, 21 nt, synthetic construct
  source 1..21: mol_type = other RNA
tctgccctcattgaagctact

SEQ ID NO: 100969 - RNA, 21 nt, synthetic construct
  source 1..21: mol_type = other RNA
tctgcctaatctctaggctta

SEQ ID NO: 100970 - RNA, 21 nt, synthetic construct
  source 1..21: mol_type = other RNA
tctgcctcaaaatcaacattg

SEQ ID NO: 100971 - RNA, 21 nt, synthetic construct
  source 1..21: mol_type = other RNA
tctgcctcagttgacatcctt

SEQ ID NO: 100972 - RNA, 21 nt, synthetic construct
  source 1..21: mol_type = other RNA
tctgcctcccgggtccaggca

SEQ ID NO: 100973 - RNA, 21 nt, synthetic construct
  source 1..21: mol_type = other RNA
tctgcctcggcacagctctca

SEQ ID NO: 100974 - RNA, 21 nt, synthetic construct
  source 1..21: mol_type = other RNA
tctgcctgcagactgcaggtc

SEQ ID NO: 100975 - RNA, 21 nt, synthetic construct
  source 1..21: mol_type = other RNA
tctgccttcaatgtttggtag

SEQ ID NO: 100976 - RNA, 21 nt, synthetic construct
  source 1..21: mol_type = other RNA
tctgccttgacctcccaaagg

SEQ ID NO: 100977 - RNA, 21 nt, synthetic construct
  source 1..21: mol_type = other RNA
tctgccttgaggtgattcaga

SEQ ID NO: 100978 - RNA, 21 nt, synthetic construct
  source 1..21: mol_type = other RNA
tctgcgcaattgcagccagag

SEQ ID NO: 100979 - RNA, 21 nt, synthetic construct
  source 1..21: mol_type = other RNA
tctgcgccttaaagccacact

SEQ ID NO: 100980 - RNA, 21 nt, synthetic construct
  source 1..21: mol_type = other RNA
tctgcggcaggcattgtgctc

SEQ ID NO: 100981 - RNA, 21 nt, synthetic construct
  source 1..21: mol_type = other RNA
tctgcggcggctgaggcagcc

SEQ ID NO: 100982 - RNA, 21 nt, synthetic construct
  source 1..21: mol_type = other RNA
tctgcgtgttattttaatcga

SEQ ID NO: 100983 - RNA, 21 nt, synthetic construct
  source 1..21: mol_type = other RNA
tctgctaataaaaacatatgc

SEQ ID NO: 100984 - RNA, 21 nt, synthetic construct
  source 1..21: mol_type = other RNA
tctgctacaggggcattccct

SEQ ID NO: 100985 - RNA, 21 nt, synthetic construct
  source 1..21: mol_type = other RNA
tctgctactagcaagctaata

SEQ ID NO: 100986 - RNA, 21 nt, synthetic construct
  source 1..21: mol_type = other RNA
tctgctatgaaatgtggtttt

SEQ ID NO: 100987 - RNA, 21 nt, synthetic construct
  source 1..21: mol_type = other RNA
tctgctatgctgaaaggcatg

SEQ ID NO: 100988 - RNA, 21 nt, synthetic construct
  source 1..21: mol_type = other RNA
tctgctattctctttctgaaa

SEQ ID NO: 100989 - RNA, 21 nt, synthetic construct
  source 1..21: mol_type = other RNA
tctgctcaaaggggcattccg

SEQ ID NO: 100990 - RNA, 21 nt, synthetic construct
  source 1..21: mol_type = other RNA
tctgctcaccgcaacatctgc

SEQ ID NO: 100991 - RNA, 21 nt, synthetic construct
  source 1..21: mol_type = other RNA
tctgctcactgcaacctttgt

SEQ ID NO: 100992 - RNA, 21 nt, synthetic construct
  source 1..21: mol_type = other RNA
tctgctcactttgggattagc

SEQ ID NO: 100993 - RNA, 21 nt, synthetic construct
  source 1..21: mol_type = other RNA
tctgctcggctctgtcaccct

SEQ ID NO: 100994 - RNA, 21 nt, synthetic construct
  source 1..21: mol_type = other RNA
tctgctctcaagtaattgttt

SEQ ID NO: 100995 - RNA, 21 nt, synthetic construct
  source 1..21: mol_type = other RNA
tctgctcttgtcgcccaggct

SEQ ID NO: 100996 - RNA, 21 nt, synthetic construct
  source 1..21: mol_type = other RNA
tctgctgctgaaaaagatact

SEQ ID NO: 100997 - RNA, 21 nt, synthetic construct
  source 1..21: mol_type = other RNA
tctgctgggcccactctcccc

SEQ ID NO: 100998 - RNA, 21 nt, synthetic construct
  source 1..21: mol_type = other RNA
tctgctgtaagctggtaatac

SEQ ID NO: 100999 - RNA, 21 nt, synthetic construct
  source 1..21: mol_type = other RNA
tctgctgtcggttttctagtt

SEQ ID NO: 101000 - RNA, 21 nt, synthetic construct
  source 1..21: mol_type = other RNA
tctgctgttgatggacgtttg

SEQ ID NO: 101001 - RNA, 21 nt, synthetic construct
  source 1..21: mol_type = other RNA
tctgcttaaagcctctcaaca

SEQ ID NO: 101002 - RNA, 21 nt, synthetic construct
  source 1..21: mol_type = other RNA
tctgcttagtcttctcagatc

SEQ ID NO: 101003 - RNA, 21 nt, synthetic construct
  source 1..21: mol_type = other RNA
tctgcttattatatgcctaga

SEQ ID NO: 101004 - RNA, 21 nt, synthetic construct
  source 1..21: mol_type = other RNA
tctgcttcactaactttaaat

SEQ ID NO: 101005 - RNA, 21 nt, synthetic construct
  source 1..21: mol_type = other RNA
tctgcttccacatttctaatt

SEQ ID NO: 101006 - RNA, 21 nt, synthetic construct
  source 1..21: mol_type = other RNA
tctgcttccttgctatgtaat

SEQ ID NO: 101007 - RNA, 21 nt, synthetic construct
  source 1..21: mol_type = other RNA
tctgcttctcaataaggaaag

SEQ ID NO: 101008 - RNA, 21 nt, synthetic construct
  source 1..21: mol_type = other RNA
tctgcttgaatgtgcctacat

SEQ ID NO: 101009 - RNA, 21 nt, synthetic construct
  source 1..21: mol_type = other RNA
tctgcttgcagacaataattc

SEQ ID NO: 101010 - RNA, 21 nt, synthetic construct
  source 1..21: mol_type = other RNA
tctgctttttcttggtggtaa

SEQ ID NO: 101011 - RNA, 21 nt, synthetic construct
  source 1..21: mol_type = other RNA
tctggaaactcaaacccaaat

SEQ ID NO: 101012 - RNA, 21 nt, synthetic construct
  source 1..21: mol_type = other RNA
tctggaaaggacttgatctaa

SEQ ID NO: 101013 - RNA, 21 nt, synthetic construct
  source 1..21: mol_type = other RNA
tctggaaagttcaaatgaggc

SEQ ID NO: 101014 - RNA, 21 nt, synthetic construct
  source 1..21: mol_type = other RNA
tctggaacacacattagccta

SEQ ID NO: 101015 - RNA, 21 nt, synthetic construct
  source 1..21: mol_type = other RNA
tctggaagatttctactgggg

SEQ ID NO: 101016 - RNA, 21 nt, synthetic construct
  source 1..21: mol_type = other RNA
tctggaaggaaacactataaa

SEQ ID NO: 101017 - RNA, 21 nt, synthetic construct
  source 1..21: mol_type = other RNA
tctggaaggctaagcatgtaa

SEQ ID NO: 101018 - RNA, 21 nt, synthetic construct
  source 1..21: mol_type = other RNA
tctggaagtttcctgcacatg

SEQ ID NO: 101019 - RNA, 21 nt, synthetic construct
  source 1..21: mol_type = other RNA
tctggaatagaagagcagtgt

SEQ ID NO: 101020 - RNA, 21 nt, synthetic construct
  source 1..21: mol_type = other RNA
tctggaatgcatcgtttcaat

SEQ ID NO: 101021 - RNA, 21 nt, synthetic construct
  source 1..21: mol_type = other RNA
tctggaatgcccatcctctat

SEQ ID NO: 101022 - RNA, 21 nt, synthetic construct
  source 1..21: mol_type = other RNA
tctggaatgtgtagttctggt

SEQ ID NO: 101023 - RNA, 21 nt, synthetic construct
  source 1..21: mol_type = other RNA
tctggacattatcctatcaga

SEQ ID NO: 101024 - RNA, 21 nt, synthetic construct
  source 1..21: mol_type = other RNA
tctggaccacaatcttacccc

SEQ ID NO: 101025 - RNA, 21 nt, synthetic construct
  source 1..21: mol_type = other RNA
tctggaccagttactctctct

SEQ ID NO: 101026 - RNA, 21 nt, synthetic construct
  source 1..21: mol_type = other RNA
tctggactcagggtcacttcc

SEQ ID NO: 101027 - RNA, 21 nt, synthetic construct
  source 1..21: mol_type = other RNA
tctggactgaaaagatacaga

SEQ ID NO: 101028 - RNA, 21 nt, synthetic construct
  source 1..21: mol_type = other RNA
tctggagcaagcatgagtatc

SEQ ID NO: 101029 - RNA, 21 nt, synthetic construct
  source 1..21: mol_type = other RNA
tctggaggctagaagtcccag

SEQ ID NO: 101030 - RNA, 21 nt, synthetic construct
  source 1..21: mol_type = other RNA
tctggagtgttttcttcatgg

SEQ ID NO: 101031 - RNA, 21 nt, synthetic construct
  source 1..21: mol_type = other RNA
tctggatagcattatcccttt

SEQ ID NO: 101032 - RNA, 21 nt, synthetic construct
  source 1..21: mol_type = other RNA
tctggatcctgtctcagagta

SEQ ID NO: 101033 - RNA, 21 nt, synthetic construct
  source 1..21: mol_type = other RNA
tctggatgtgtatgatcaaag

SEQ ID NO: 101034 - RNA, 21 nt, synthetic construct
  source 1..21: mol_type = other RNA
tctggatgttaattagatatg

SEQ ID NO: 101035 - RNA, 21 nt, synthetic construct
  source 1..21: mol_type = other RNA
tctggattatagtggtaagga

SEQ ID NO: 101036 - RNA, 21 nt, synthetic construct
  source 1..21: mol_type = other RNA
tctggattgattccagtttct

SEQ ID NO: 101037 - RNA, 21 nt, synthetic construct
  source 1..21: mol_type = other RNA
tctggatttttgtgtagaggt

SEQ ID NO: 101038 - RNA, 21 nt, synthetic construct
  source 1..21: mol_type = other RNA
tctggcagcaggggctaagta

SEQ ID NO: 101039 - RNA, 21 nt, synthetic construct
  source 1..21: mol_type = other RNA
tctggcaggtcacctagcctc

SEQ ID NO: 101040 - RNA, 21 nt, synthetic construct
  source 1..21: mol_type = other RNA
tctggccaaatccctgatcaa

SEQ ID NO: 101041 - RNA, 21 nt, synthetic construct
  source 1..21: mol_type = other RNA
tctggccctccatttccctgc

SEQ ID NO: 101042 - RNA, 21 nt, synthetic construct
  source 1..21: mol_type = other RNA
tctggcctgcaccatttattg

SEQ ID NO: 101043 - RNA, 21 nt, synthetic construct
  source 1..21: mol_type = other RNA
tctggcctggacaacagtgtg

SEQ ID NO: 101044 - RNA, 21 nt, synthetic construct
  source 1..21: mol_type = other RNA
tctggccttctatatttttac

SEQ ID NO: 101045 - RNA, 21 nt, synthetic construct
  source 1..21: mol_type = other RNA
tctggctcagaaacaacaaca

SEQ ID NO: 101046 - RNA, 21 nt, synthetic construct
  source 1..21: mol_type = other RNA
tctggctgacctggtactcta

SEQ ID NO: 101047 - RNA, 21 nt, synthetic construct
  source 1..21: mol_type = other RNA
tctggctgcaattgcgcagaa

SEQ ID NO: 101048 - RNA, 21 nt, synthetic construct
  source 1..21: mol_type = other RNA
tctggctgcagggcttctgaa

SEQ ID NO: 101049 - RNA, 21 nt, synthetic construct
  source 1..21: mol_type = other RNA
tctgggaaaaaataagaaaac

SEQ ID NO: 101050 - RNA, 21 nt, synthetic construct
  source 1..21: mol_type = other RNA
tctgggaacagcccctagcat

SEQ ID NO: 101051 - RNA, 21 nt, synthetic construct
  source 1..21: mol_type = other RNA
tctgggaagttatgtagctgg

SEQ ID NO: 101052 - RNA, 21 nt, synthetic construct
  source 1..21: mol_type = other RNA
tctgggagttcattagaattc

SEQ ID NO: 101053 - RNA, 21 nt, synthetic construct
  source 1..21: mol_type = other RNA
tctgggataatgagtttaatt

SEQ ID NO: 101054 - RNA, 21 nt, synthetic construct
  source 1..21: mol_type = other RNA
tctgggataatgctatcattt

SEQ ID NO: 101055 - RNA, 21 nt, synthetic construct
  source 1..21: mol_type = other RNA
tctgggatacttctaacttta

SEQ ID NO: 101056 - RNA, 21 nt, synthetic construct
  source 1..21: mol_type = other RNA
tctgggatgctcagtttcaaa

SEQ ID NO: 101057 - RNA, 21 nt, synthetic construct
  source 1..21: mol_type = other RNA
tctgggctcactgcaacttcc

SEQ ID NO: 101058 - RNA, 21 nt, synthetic construct
  source 1..21: mol_type = other RNA
tctgggctctctattccaaat

SEQ ID NO: 101059 - RNA, 21 nt, synthetic construct
  source 1..21: mol_type = other RNA
tctgggcttcactttcgtcat

SEQ ID NO: 101060 - RNA, 21 nt, synthetic construct
  source 1..21: mol_type = other RNA
tctggggatgctgtctatagg

SEQ ID NO: 101061 - RNA, 21 nt, synthetic construct
  source 1..21: mol_type = other RNA
tctggggctcaagtaagtgaa

SEQ ID NO: 101062 - RNA, 21 nt, synthetic construct
  source 1..21: mol_type = other RNA
tctggggttagggcctagaaa

SEQ ID NO: 101063 - RNA, 21 nt, synthetic construct
  source 1..21: mol_type = other RNA
tctggggttcaaaccacctaa

SEQ ID NO: 101064 - RNA, 21 nt, synthetic construct
  source 1..21: mol_type = other RNA
tctgggtcagaatcgtgatag

SEQ ID NO: 101065 - RNA, 21 nt, synthetic construct
  source 1..21: mol_type = other RNA
tctgggtgatatctgtaagtc

SEQ ID NO: 101066 - RNA, 21 nt, synthetic construct
  source 1..21: mol_type = other RNA
tctgggtgcgttgaccgcttt

SEQ ID NO: 101067 - RNA, 21 nt, synthetic construct
  source 1..21: mol_type = other RNA
tctggtatctaccaaaaaact

SEQ ID NO: 101068 - RNA, 21 nt, synthetic construct
  source 1..21: mol_type = other RNA
tctggtattctgaactttcaa

SEQ ID NO: 101069 - RNA, 21 nt, synthetic construct
  source 1..21: mol_type = other RNA
tctggtattttaagattctct

SEQ ID NO: 101070 - RNA, 21 nt, synthetic construct
  source 1..21: mol_type = other RNA
tctggtcacaaacacaaaaca

SEQ ID NO: 101071 - RNA, 21 nt, synthetic construct
  source 1..21: mol_type = other RNA
tctggtcctgagctttcctta

SEQ ID NO: 101072 - RNA, 21 nt, synthetic construct
  source 1..21: mol_type = other RNA
tctggtctatctcattataac

SEQ ID NO: 101073 - RNA, 21 nt, synthetic construct
  source 1..21: mol_type = other RNA
tctggtgctggcagccttctc

SEQ ID NO: 101074 - RNA, 21 nt, synthetic construct
  source 1..21: mol_type = other RNA
tctggtggacaaaaaacgcgg

SEQ ID NO: 101075 - RNA, 21 nt, synthetic construct
  source 1..21: mol_type = other RNA
tctggtgtcgtttatttcttc

SEQ ID NO: 101076 - RNA, 21 nt, synthetic construct
  source 1..21: mol_type = other RNA
tctggtgttgcttgctctaca

SEQ ID NO: 101077 - RNA, 21 nt, synthetic construct
  source 1..21: mol_type = other RNA
tctggtttgctttggagtcac

SEQ ID NO: 101078 - RNA, 21 nt, synthetic construct
  source 1..21: mol_type = other RNA
tctggttttctggaggctaga

SEQ ID NO: 101079 - RNA, 21 nt, synthetic construct
  source 1..21: mol_type = other RNA
tctgtaaacatgaacaagtta

SEQ ID NO: 101080 - RNA, 21 nt, synthetic construct
  source 1..21: mol_type = other RNA
tctgtaagcacctgtataaat

SEQ ID NO: 101081 - RNA, 21 nt, synthetic construct
  source 1..21: mol_type = other RNA
tctgtaagtcagttaacagtg

SEQ ID NO: 101082 - RNA, 21 nt, synthetic construct
  source 1..21: mol_type = other RNA
tctgtaagtcatcaaaggaag

SEQ ID NO: 101083 - RNA, 21 nt, synthetic construct
  source 1..21: mol_type = other RNA
tctgtaatattaaccaagaac

SEQ ID NO: 101084 - RNA, 21 nt, synthetic construct
  source 1..21: mol_type = other RNA
tctgtaatgtttgtacttcta

SEQ ID NO: 101085 - RNA, 21 nt, synthetic construct
  source 1..21: mol_type = other RNA
tctgtacccttacgcgtggat

SEQ ID NO: 101086 - RNA, 21 nt, synthetic construct
  source 1..21: mol_type = other RNA
tctgtagaatatccaagcaca

SEQ ID NO: 101087 - RNA, 21 nt, synthetic construct
  source 1..21: mol_type = other RNA
tctgtagataaacgttaacta

SEQ ID NO: 101088 - RNA, 21 nt, synthetic construct
  source 1..21: mol_type = other RNA
tctgtagattgttttaggtag

SEQ ID NO: 101089 - RNA, 21 nt, synthetic construct
  source 1..21: mol_type = other RNA
tctgtagcttcacgtgcattc

SEQ ID NO: 101090 - RNA, 21 nt, synthetic construct
  source 1..21: mol_type = other RNA
tctgtagggtgactagtgtga

SEQ ID NO: 101091 - RNA, 21 nt, synthetic construct
  source 1..21: mol_type = other RNA
tctgtagttacaactactcgg

SEQ ID NO: 101092 - RNA, 21 nt, synthetic construct
  source 1..21: mol_type = other RNA
tctgtatatgaaaagcttccc

SEQ ID NO: 101093 - RNA, 21 nt, synthetic construct
  source 1..21: mol_type = other RNA
tctgtatcttttcagtccaga

SEQ ID NO: 101094 - RNA, 21 nt, synthetic construct
  source 1..21: mol_type = other RNA
tctgtatgagaagactggaaa

SEQ ID NO: 101095 - RNA, 21 nt, synthetic construct
  source 1..21: mol_type = other RNA
tctgtatttctgctttggtac

SEQ ID NO: 101096 - RNA, 21 nt, synthetic construct
  source 1..21: mol_type = other RNA
tctgtcaaaaagagaacacac

SEQ ID NO: 101097 - RNA, 21 nt, synthetic construct
  source 1..21: mol_type = other RNA
tctgtcacatagacctgaatg

SEQ ID NO: 101098 - RNA, 21 nt, synthetic construct
  source 1..21: mol_type = other RNA
tctgtcacatttgaaagaaag

SEQ ID NO: 101099 - RNA, 21 nt, synthetic construct
  source 1..21: mol_type = other RNA
tctgtcaccaggctggaatgc

SEQ ID NO: 101100 - RNA, 21 nt, synthetic construct
  source 1..21: mol_type = other RNA
tctgtcacccacgtggagtgc

SEQ ID NO: 101101 - RNA, 21 nt, synthetic construct
  source 1..21: mol_type = other RNA
tctgtcacccttgtaatcaag

SEQ ID NO: 101102 - RNA, 21 nt, synthetic construct
  source 1..21: mol_type = other RNA
tctgtcacggtgccctacata

SEQ ID NO: 101103 - RNA, 21 nt, synthetic construct
  source 1..21: mol_type = other RNA
tctgtcactttcctattcaca

SEQ ID NO: 101104 - RNA, 21 nt, synthetic construct
  source 1..21: mol_type = other RNA
tctgtcagcagttcagcctgc

SEQ ID NO: 101105 - RNA, 21 nt, synthetic construct
  source 1..21: mol_type = other RNA
tctgtcatctgaatcaataag

SEQ ID NO: 101106 - RNA, 21 nt, synthetic construct
  source 1..21: mol_type = other RNA
tctgtcatggtgtgtctgcgc

SEQ ID NO: 101107 - RNA, 21 nt, synthetic construct
  source 1..21: mol_type = other RNA
tctgtcatgtttgaattttcc

SEQ ID NO: 101108 - RNA, 21 nt, synthetic construct
  source 1..21: mol_type = other RNA
tctgtcattctgcagtttgtg

SEQ ID NO: 101109 - RNA, 21 nt, synthetic construct
  source 1..21: mol_type = other RNA
tctgtcctcgtaaaagctaat

SEQ ID NO: 101110 - RNA, 21 nt, synthetic construct
  source 1..21: mol_type = other RNA
tctgtcctgaatactattcct

SEQ ID NO: 101111 - RNA, 21 nt, synthetic construct
  source 1..21: mol_type = other RNA
tctgtcctgtcagtgtggttc

SEQ ID NO: 101112 - RNA, 21 nt, synthetic construct
  source 1..21: mol_type = other RNA
tctgtccttggattgctaaac

SEQ ID NO: 101113 - RNA, 21 nt, synthetic construct
  source 1..21: mol_type = other RNA
tctgtcgcccaggcggaatgc

SEQ ID NO: 101114 - RNA, 21 nt, synthetic construct
  source 1..21: mol_type = other RNA
tctgtctcacctcaaggccaa

SEQ ID NO: 101115 - RNA, 21 nt, synthetic construct
  source 1..21: mol_type = other RNA
tctgtctctacaaaaaagtaa

SEQ ID NO: 101116 - RNA, 21 nt, synthetic construct
  source 1..21: mol_type = other RNA
tctgtctgggataatgagttt

SEQ ID NO: 101117 - RNA, 21 nt, synthetic construct
  source 1..21: mol_type = other RNA
tctgtctgttcacatttcgcc

SEQ ID NO: 101118 - RNA, 21 nt, synthetic construct
  source 1..21: mol_type = other RNA
tctgtcttgatgatagaatac

SEQ ID NO: 101119 - RNA, 21 nt, synthetic construct
  source 1..21: mol_type = other RNA
tctgtcttgtgcatcctttat

SEQ ID NO: 101120 - RNA, 21 nt, synthetic construct
  source 1..21: mol_type = other RNA
tctgtctttcagtatgtgtct

SEQ ID NO: 101121 - RNA, 21 nt, synthetic construct
  source 1..21: mol_type = other RNA
tctgtctttggcccatatcct

SEQ ID NO: 101122 - RNA, 21 nt, synthetic construct
  source 1..21: mol_type = other RNA
tctgtgaaaataatacctaac

SEQ ID NO: 101123 - RNA, 21 nt, synthetic construct
  source 1..21: mol_type = other RNA
tctgtgaattgtgacagttct

SEQ ID NO: 101124 - RNA, 21 nt, synthetic construct
  source 1..21: mol_type = other RNA
tctgtgatcagaagagcacta

SEQ ID NO: 101125 - RNA, 21 nt, synthetic construct
  source 1..21: mol_type = other RNA
tctgtgatccctgatatgtcg

SEQ ID NO: 101126 - RNA, 21 nt, synthetic construct
  source 1..21: mol_type = other RNA
tctgtgatgtagaggcagttg

SEQ ID NO: 101127 - RNA, 21 nt, synthetic construct
  source 1..21: mol_type = other RNA
tctgtgattatcagggatatt

SEQ ID NO: 101128 - RNA, 21 nt, synthetic construct
  source 1..21: mol_type = other RNA
tctgtgccaagcaacttgatc

SEQ ID NO: 101129 - RNA, 21 nt, synthetic construct
  source 1..21: mol_type = other RNA
tctgtgctagatgctaaacag

SEQ ID NO: 101130 - RNA, 21 nt, synthetic construct
  source 1..21: mol_type = other RNA
tctgtgctagccttcttggag

SEQ ID NO: 101131 - RNA, 21 nt, synthetic construct
  source 1..21: mol_type = other RNA
tctgtgctctgtatttaatct

SEQ ID NO: 101132 - RNA, 21 nt, synthetic construct
  source 1..21: mol_type = other RNA
tctgtgctgagatggtcagta

SEQ ID NO: 101133 - RNA, 21 nt, synthetic construct
  source 1..21: mol_type = other RNA
tctgtgcttaaatttttgaga

SEQ ID NO: 101134 - RNA, 21 nt, synthetic construct
  source 1..21: mol_type = other RNA
tctgtgcttaaggaaatggac

SEQ ID NO: 101135 - RNA, 21 nt, synthetic construct
  source 1..21: mol_type = other RNA
tctgtgcttgtgcttttaata

SEQ ID NO: 101136 - RNA, 21 nt, synthetic construct
  source 1..21: mol_type = other RNA
tctgtggaccatgttttagga

SEQ ID NO: 101137 - RNA, 21 nt, synthetic construct
  source 1..21: mol_type = other RNA
tctgtggactttaggctgttc

SEQ ID NO: 101138 - RNA, 21 nt, synthetic construct
  source 1..21: mol_type = other RNA
tctgtggagtcctgtcagttt

SEQ ID NO: 101139 - RNA, 21 nt, synthetic construct
  source 1..21: mol_type = other RNA
tctgtgggttaaaagttagct

SEQ ID NO: 101140 - RNA, 21 nt, synthetic construct
  source 1..21: mol_type = other RNA
tctgtggtctcagctcctcag

SEQ ID NO: 101141 - RNA, 21 nt, synthetic construct
  source 1..21: mol_type = other RNA
tctgtggtttcttgaatctct

SEQ ID NO: 101142 - RNA, 21 nt, synthetic construct
  source 1..21: mol_type = other RNA
tctgtgtaatactgtagaatg

SEQ ID NO: 101143 - RNA, 21 nt, synthetic construct
  source 1..21: mol_type = other RNA
tctgtgtagttcatcagcata

SEQ ID NO: 101144 - RNA, 21 nt, synthetic construct
  source 1..21: mol_type = other RNA
tctgtgtgcatgcatgtctgt

SEQ ID NO: 101145 - RNA, 21 nt, synthetic construct
  source 1..21: mol_type = other RNA
tctgtgtggtttgccttttca

SEQ ID NO: 101146 - RNA, 21 nt, synthetic construct
  source 1..21: mol_type = other RNA
tctgtgtttatgaatgatgcc

SEQ ID NO: 101147 - RNA, 21 nt, synthetic construct
  source 1..21: mol_type = other RNA
tctgttaatagataggtcatg

SEQ ID NO: 101148 - RNA, 21 nt, synthetic construct
  source 1..21: mol_type = other RNA
tctgttaatgggcacttggga

SEQ ID NO: 101149 - RNA, 21 nt, synthetic construct
  source 1..21: mol_type = other RNA
tctgttaatgtgatatgccac

SEQ ID NO: 101150 - RNA, 21 nt, synthetic construct
  source 1..21: mol_type = other RNA
tctgttacagctcttctcagt

SEQ ID NO: 101151 - RNA, 21 nt, synthetic construct
  source 1..21: mol_type = other RNA
tctgttactcccgatttcagt

SEQ ID NO: 101152 - RNA, 21 nt, synthetic construct
  source 1..21: mol_type = other RNA
tctgttagatggtgctgattt

SEQ ID NO: 101153 - RNA, 21 nt, synthetic construct
  source 1..21: mol_type = other RNA
tctgttcacatttcgccttct

SEQ ID NO: 101154 - RNA, 21 nt, synthetic construct
  source 1..21: mol_type = other RNA
tctgttccatcggtctgtatt

SEQ ID NO: 101155 - RNA, 21 nt, synthetic construct
  source 1..21: mol_type = other RNA
tctgttcctgggttctccctt

SEQ ID NO: 101156 - RNA, 21 nt, synthetic construct
  source 1..21: mol_type = other RNA
tctgttctagctcctgggaaa

SEQ ID NO: 101157 - RNA, 21 nt, synthetic construct
  source 1..21: mol_type = other RNA
tctgttctcagtatcctttca

SEQ ID NO: 101158 - RNA, 21 nt, synthetic construct
  source 1..21: mol_type = other RNA
tctgttctgttccatcggtct

SEQ ID NO: 101159 - RNA, 21 nt, synthetic construct
  source 1..21: mol_type = other RNA
tctgttgcaaattattttcct

SEQ ID NO: 101160 - RNA, 21 nt, synthetic construct
  source 1..21: mol_type = other RNA
tctgttgcagtccccggtctt

SEQ ID NO: 101161 - RNA, 21 nt, synthetic construct
  source 1..21: mol_type = other RNA
tctgttgcccagactggagtt

SEQ ID NO: 101162 - RNA, 21 nt, synthetic construct
  source 1..21: mol_type = other RNA
tctgttgcttaagtcactcca

SEQ ID NO: 101163 - RNA, 21 nt, synthetic construct
  source 1..21: mol_type = other RNA
tctgttggagagatggtagtc

SEQ ID NO: 101164 - RNA, 21 nt, synthetic construct
  source 1..21: mol_type = other RNA
tctgttggtgcttagctgcct

SEQ ID NO: 101165 - RNA, 21 nt, synthetic construct
  source 1..21: mol_type = other RNA
tctgtttacccttactaaatt

SEQ ID NO: 101166 - RNA, 21 nt, synthetic construct
  source 1..21: mol_type = other RNA
tctgtttcctaatctaacatg

SEQ ID NO: 101167 - RNA, 21 nt, synthetic construct
  source 1..21: mol_type = other RNA
tctgtttccttaccagtgctt

SEQ ID NO: 101168 - RNA, 21 nt, synthetic construct
  source 1..21: mol_type = other RNA
tctgtttctgtgaaaaaacaa

SEQ ID NO: 101169 - RNA, 21 nt, synthetic construct
  source 1..21: mol_type = other RNA
tctgtttgccatcttcaagat

SEQ ID NO: 101170 - RNA, 21 nt, synthetic construct
  source 1..21: mol_type = other RNA
tctgtttggatgaaaaagtac

SEQ ID NO: 101171 - RNA, 21 nt, synthetic construct
  source 1..21: mol_type = other RNA
tctgtttgtttgttttgagac

SEQ ID NO: 101172 - RNA, 21 nt, synthetic construct
  source 1..21: mol_type = other RNA
tctgtttttcaaaatgagatc

SEQ ID NO: 101173 - RNA, 21 nt, synthetic construct
  source 1..21: mol_type = other RNA
tctgtttttcttagtctagcc

SEQ ID NO: 101174 - RNA, 21 nt, synthetic construct
  source 1..21: mol_type = other RNA
tcttaaaaatgacaccaaaac

SEQ ID NO: 101175 - RNA, 21 nt, synthetic construct
  source 1..21: mol_type = other RNA
tcttaaaactttaggtcagaa

SEQ ID NO: 101176 - RNA, 21 nt, synthetic construct
  source 1..21: mol_type = other RNA
tcttaaaaggagatatacagg

SEQ ID NO: 101177 - RNA, 21 nt, synthetic construct
  source 1..21: mol_type = other RNA
tcttaaaataccagaggttaa

SEQ ID NO: 101178 - RNA, 21 nt, synthetic construct
  source 1..21: mol_type = other RNA
tcttaaactgccaaaccctac

SEQ ID NO: 101179 - RNA, 21 nt, synthetic construct
  source 1..21: mol_type = other RNA
tcttaaagtttcaaactgtgg

SEQ ID NO: 101180 - RNA, 21 nt, synthetic construct
  source 1..21: mol_type = other RNA
tcttaaatccgagacaagttc

SEQ ID NO: 101181 - RNA, 21 nt, synthetic construct
  source 1..21: mol_type = other RNA
tcttaaatgtgaattagatgg

SEQ ID NO: 101182 - RNA, 21 nt, synthetic construct
  source 1..21: mol_type = other RNA
tcttaacatttctcatgtatg

SEQ ID NO: 101183 - RNA, 21 nt, synthetic construct
  source 1..21: mol_type = other RNA
tcttaaccattgagccaaaga

SEQ ID NO: 101184 - RNA, 21 nt, synthetic construct
  source 1..21: mol_type = other RNA
tcttaagaaccatacagtgcc

SEQ ID NO: 101185 - RNA, 21 nt, synthetic construct
  source 1..21: mol_type = other RNA
tcttaagaaggaaaagaacac

SEQ ID NO: 101186 - RNA, 21 nt, synthetic construct
  source 1..21: mol_type = other RNA
tcttaagacatttgggaatgt

SEQ ID NO: 101187 - RNA, 21 nt, synthetic construct
  source 1..21: mol_type = other RNA
tcttaagaccacaaggattaa

SEQ ID NO: 101188 - RNA, 21 nt, synthetic construct
  source 1..21: mol_type = other RNA
tcttaagagactctcaagaag

SEQ ID NO: 101189 - RNA, 21 nt, synthetic construct
  source 1..21: mol_type = other RNA
tcttaagcttaggtctttgat

SEQ ID NO: 101190 - RNA, 21 nt, synthetic construct
  source 1..21: mol_type = other RNA
tcttaataacctcaaagtgga

SEQ ID NO: 101191 - RNA, 21 nt, synthetic construct
  source 1..21: mol_type = other RNA
tcttaataactgcctaagtaa

SEQ ID NO: 101192 - RNA, 21 nt, synthetic construct
  source 1..21: mol_type = other RNA
tcttaatattgaaacgatgca

SEQ ID NO: 101193 - RNA, 21 nt, synthetic construct
  source 1..21: mol_type = other RNA
tcttacacattaggctctggg

SEQ ID NO: 101194 - RNA, 21 nt, synthetic construct
  source 1..21: mol_type = other RNA
tcttacacctgtttaaaaaga

SEQ ID NO: 101195 - RNA, 21 nt, synthetic construct
  source 1..21: mol_type = other RNA
tcttacagtgacatatgccgg

SEQ ID NO: 101196 - RNA, 21 nt, synthetic construct
  source 1..21: mol_type = other RNA
tcttacataggcttagtacag

SEQ ID NO: 101197 - RNA, 21 nt, synthetic construct
  source 1..21: mol_type = other RNA
tcttaccaaggctggagtgca

SEQ ID NO: 101198 - RNA, 21 nt, synthetic construct
  source 1..21: mol_type = other RNA
tcttacccccatcacactggt

SEQ ID NO: 101199 - RNA, 21 nt, synthetic construct
  source 1..21: mol_type = other RNA
tcttaccctcacagtcacaaa

SEQ ID NO: 101200 - RNA, 21 nt, synthetic construct
  source 1..21: mol_type = other RNA
tcttaccctctagctccccat

SEQ ID NO: 101201 - RNA, 21 nt, synthetic construct
  source 1..21: mol_type = other RNA
tcttaccctttactcagattc

SEQ ID NO: 101202 - RNA, 21 nt, synthetic construct
  source 1..21: mol_type = other RNA
tcttacctaagcatcgtgaag

SEQ ID NO: 101203 - RNA, 21 nt, synthetic construct
  source 1..21: mol_type = other RNA
tcttacctcaaaggagagaag

SEQ ID NO: 101204 - RNA, 21 nt, synthetic construct
  source 1..21: mol_type = other RNA
tcttaccttctaaaatcatca

SEQ ID NO: 101205 - RNA, 21 nt, synthetic construct
  source 1..21: mol_type = other RNA
tcttactggtgttaggcaatc

SEQ ID NO: 101206 - RNA, 21 nt, synthetic construct
  source 1..21: mol_type = other RNA
tcttactgtaagttcctggac

SEQ ID NO: 101207 - RNA, 21 nt, synthetic construct
  source 1..21: mol_type = other RNA
tcttagacctcctagattgac

SEQ ID NO: 101208 - RNA, 21 nt, synthetic construct
  source 1..21: mol_type = other RNA
tcttagccgggaggagccaag

SEQ ID NO: 101209 - RNA, 21 nt, synthetic construct
  source 1..21: mol_type = other RNA
tcttagctatattcacttttg

SEQ ID NO: 101210 - RNA, 21 nt, synthetic construct
  source 1..21: mol_type = other RNA
tcttagctcttaagcttaggt

SEQ ID NO: 101211 - RNA, 21 nt, synthetic construct
  source 1..21: mol_type = other RNA
tcttagctcttcccttaacct

SEQ ID NO: 101212 - RNA, 21 nt, synthetic construct
  source 1..21: mol_type = other RNA
tcttagcttagaagaagactt

SEQ ID NO: 101213 - RNA, 21 nt, synthetic construct
  source 1..21: mol_type = other RNA
tcttaggaagctatggagcac

SEQ ID NO: 101214 - RNA, 21 nt, synthetic construct
  source 1..21: mol_type = other RNA
tcttaggccataaatcaaggt

SEQ ID NO: 101215 - RNA, 21 nt, synthetic construct
  source 1..21: mol_type = other RNA
tcttaggtttctcatttttca

SEQ ID NO: 101216 - RNA, 21 nt, synthetic construct
  source 1..21: mol_type = other RNA
tcttagtaaatatccgaaaga

SEQ ID NO: 101217 - RNA, 21 nt, synthetic construct
  source 1..21: mol_type = other RNA
tcttagtctgacttctctcag

SEQ ID NO: 101218 - RNA, 21 nt, synthetic construct
  source 1..21: mol_type = other RNA
tcttagtgatgtcttttgaag

SEQ ID NO: 101219 - RNA, 21 nt, synthetic construct
  source 1..21: mol_type = other RNA
tcttagtgttcccttcttaaa

SEQ ID NO: 101220 - RNA, 21 nt, synthetic construct
  source 1..21: mol_type = other RNA
tcttagttccattattccata

SEQ ID NO: 101221 - RNA, 21 nt, synthetic construct
  source 1..21: mol_type = other RNA
tcttagttctgcttccacatt

SEQ ID NO: 101222 - RNA, 21 nt, synthetic construct
  source 1..21: mol_type = other RNA
tcttatactagtagaaagcag

SEQ ID NO: 101223 - RNA, 21 nt, synthetic construct
  source 1..21: mol_type = other RNA
tcttataggttgaatagggcc

SEQ ID NO: 101224 - RNA, 21 nt, synthetic construct
  source 1..21: mol_type = other RNA
tcttatatcctaaacacttag

SEQ ID NO: 101225 - RNA, 21 nt, synthetic construct
  source 1..21: mol_type = other RNA
tcttatattaattctgaggcc

SEQ ID NO: 101226 - RNA, 21 nt, synthetic construct
  source 1..21: mol_type = other RNA
tcttatccctacctaaaaagg

SEQ ID NO: 101227 - RNA, 21 nt, synthetic construct
  source 1..21: mol_type = other RNA
tcttatctaggcgaaatatct

SEQ ID NO: 101228 - RNA, 21 nt, synthetic construct
  source 1..21: mol_type = other RNA
tcttatctgctgtcggttttc

SEQ ID NO: 101229 - RNA, 21 nt, synthetic construct
  source 1..21: mol_type = other RNA
tcttatgaggttattcaaaac

SEQ ID NO: 101230 - RNA, 21 nt, synthetic construct
  source 1..21: mol_type = other RNA
tcttatgctggtgggctttga

SEQ ID NO: 101231 - RNA, 21 nt, synthetic construct
  source 1..21: mol_type = other RNA
tcttatggctataaccacgag

SEQ ID NO: 101232 - RNA, 21 nt, synthetic construct
  source 1..21: mol_type = other RNA
tcttattaatgtgttgtctga

SEQ ID NO: 101233 - RNA, 21 nt, synthetic construct
  source 1..21: mol_type = other RNA
tcttattccccagggaaacct

SEQ ID NO: 101234 - RNA, 21 nt, synthetic construct
  source 1..21: mol_type = other RNA
tcttattgattcagatgacag

SEQ ID NO: 101235 - RNA, 21 nt, synthetic construct
  source 1..21: mol_type = other RNA
tcttattggttatctgtactt

SEQ ID NO: 101236 - RNA, 21 nt, synthetic construct
  source 1..21: mol_type = other RNA
tcttatttccttccagtttat

SEQ ID NO: 101237 - RNA, 21 nt, synthetic construct
  source 1..21: mol_type = other RNA
tcttatttgttactgatctgc

SEQ ID NO: 101238 - RNA, 21 nt, synthetic construct
  source 1..21: mol_type = other RNA
tcttattttttcccagatacg

SEQ ID NO: 101239 - RNA, 21 nt, synthetic construct
  source 1..21: mol_type = other RNA
tcttcaaaagacatcactaag

SEQ ID NO: 101240 - RNA, 21 nt, synthetic construct
  source 1..21: mol_type = other RNA
tcttcaaaatctgatgtgtat

SEQ ID NO: 101241 - RNA, 21 nt, synthetic construct
  source 1..21: mol_type = other RNA
tcttcaaccatacttttcaac

SEQ ID NO: 101242 - RNA, 21 nt, synthetic construct
  source 1..21: mol_type = other RNA
tcttcaacctcaactttaggt

SEQ ID NO: 101243 - RNA, 21 nt, synthetic construct
  source 1..21: mol_type = other RNA
tcttcaagatactgcactaaa

SEQ ID NO: 101244 - RNA, 21 nt, synthetic construct
  source 1..21: mol_type = other RNA
tcttcaagatttcataggcat

SEQ ID NO: 101245 - RNA, 21 nt, synthetic construct
  source 1..21: mol_type = other RNA
tcttcaagcattgggagcttt

SEQ ID NO: 101246 - RNA, 21 nt, synthetic construct
  source 1..21: mol_type = other RNA
tcttcaatattttggaagact

SEQ ID NO: 101247 - RNA, 21 nt, synthetic construct
  source 1..21: mol_type = other RNA
tcttcacaaacaaatcctttt

SEQ ID NO: 101248 - RNA, 21 nt, synthetic construct
  source 1..21: mol_type = other RNA
tcttcacacattaactatgga

SEQ ID NO: 101249 - RNA, 21 nt, synthetic construct
  source 1..21: mol_type = other RNA
tcttcacacttagttcaagat

SEQ ID NO: 101250 - RNA, 21 nt, synthetic construct
  source 1..21: mol_type = other RNA
tcttcaccaactgaagcgggg

SEQ ID NO: 101251 - RNA, 21 nt, synthetic construct
  source 1..21: mol_type = other RNA
tcttcaccattccagccattc

SEQ ID NO: 101252 - RNA, 21 nt, synthetic construct
  source 1..21: mol_type = other RNA
tcttcaccgtgcaactagaga

SEQ ID NO: 101253 - RNA, 21 nt, synthetic construct
  source 1..21: mol_type = other RNA
tcttcacgtggcgctccctct

SEQ ID NO: 101254 - RNA, 21 nt, synthetic construct
  source 1..21: mol_type = other RNA
tcttcactcttaaaaggagat

SEQ ID NO: 101255 - RNA, 21 nt, synthetic construct
  source 1..21: mol_type = other RNA
tcttcactgactacacataca

SEQ ID NO: 101256 - RNA, 21 nt, synthetic construct
  source 1..21: mol_type = other RNA
tcttcagaagaaattacttct

SEQ ID NO: 101257 - RNA, 21 nt, synthetic construct
  source 1..21: mol_type = other RNA
tcttcagaagaggataagggg

SEQ ID NO: 101258 - RNA, 21 nt, synthetic construct
  source 1..21: mol_type = other RNA
tcttcagaggccctggtgctt

SEQ ID NO: 101259 - RNA, 21 nt, synthetic construct
  source 1..21: mol_type = other RNA
tcttcagaggtctgttactcc

SEQ ID NO: 101260 - RNA, 21 nt, synthetic construct
  source 1..21: mol_type = other RNA
tcttcagcaaggaccattagc

SEQ ID NO: 101261 - RNA, 21 nt, synthetic construct
  source 1..21: mol_type = other RNA
tcttcaggtctctctgaaatt

SEQ ID NO: 101262 - RNA, 21 nt, synthetic construct
  source 1..21: mol_type = other RNA
tcttcatcagtccctgtgttt

SEQ ID NO: 101263 - RNA, 21 nt, synthetic construct
  source 1..21: mol_type = other RNA
tcttcatggactagactgcct

SEQ ID NO: 101264 - RNA, 21 nt, synthetic construct
  source 1..21: mol_type = other RNA
tcttcatttctaagccatgtt

SEQ ID NO: 101265 - RNA, 21 nt, synthetic construct
  source 1..21: mol_type = other RNA
tcttccaaaatattgaagagg

SEQ ID NO: 101266 - RNA, 21 nt, synthetic construct
  source 1..21: mol_type = other RNA
tcttccaaataatcccgcacc

SEQ ID NO: 101267 - RNA, 21 nt, synthetic construct
  source 1..21: mol_type = other RNA
tcttccaattgcagaaaaata

SEQ ID NO: 101268 - RNA, 21 nt, synthetic construct
  source 1..21: mol_type = other RNA
tcttccactagtgggatcaaa

SEQ ID NO: 101269 - RNA, 21 nt, synthetic construct
  source 1..21: mol_type = other RNA
tcttccagaaggagaaaacaa

SEQ ID NO: 101270 - RNA, 21 nt, synthetic construct
  source 1..21: mol_type = other RNA
tcttccagcctggtaatgaat

SEQ ID NO: 101271 - RNA, 21 nt, synthetic construct
  source 1..21: mol_type = other RNA
tcttccatacgaaagccttta

SEQ ID NO: 101272 - RNA, 21 nt, synthetic construct
  source 1..21: mol_type = other RNA
tcttccattttagatcaagtc

SEQ ID NO: 101273 - RNA, 21 nt, synthetic construct
  source 1..21: mol_type = other RNA
tcttcccaatcctttgtgcag

SEQ ID NO: 101274 - RNA, 21 nt, synthetic construct
  source 1..21: mol_type = other RNA
tcttcccatctcactcaccta

SEQ ID NO: 101275 - RNA, 21 nt, synthetic construct
  source 1..21: mol_type = other RNA
tcttcccatgaacatggtttg

SEQ ID NO: 101276 - RNA, 21 nt, synthetic construct
  source 1..21: mol_type = other RNA
tcttcccccaaaacttaggag

SEQ ID NO: 101277 - RNA, 21 nt, synthetic construct
  source 1..21: mol_type = other RNA
tcttccctaaagagaatctta

SEQ ID NO: 101278 - RNA, 21 nt, synthetic construct
  source 1..21: mol_type = other RNA
tcttcccttaacctttttctt

SEQ ID NO: 101279 - RNA, 21 nt, synthetic construct
  source 1..21: mol_type = other RNA
tcttcccttgtgcacctcggg

SEQ ID NO: 101280 - RNA, 21 nt, synthetic construct
  source 1..21: mol_type = other RNA
tcttccgtctcaagattgtgt

SEQ ID NO: 101281 - RNA, 21 nt, synthetic construct
  source 1..21: mol_type = other RNA
tcttcctcatccctcatatca

SEQ ID NO: 101282 - RNA, 21 nt, synthetic construct
  source 1..21: mol_type = other RNA
tcttcctcctctggacattat

SEQ ID NO: 101283 - RNA, 21 nt, synthetic construct
  source 1..21: mol_type = other RNA
tcttcctgtatatctcctttt

SEQ ID NO: 101284 - RNA, 21 nt, synthetic construct
  source 1..21: mol_type = other RNA
tcttcctgtcttggacccatg

SEQ ID NO: 101285 - RNA, 21 nt, synthetic construct
  source 1..21: mol_type = other RNA
tcttcctgttgctttaacctc

SEQ ID NO: 101286 - RNA, 21 nt, synthetic construct
  source 1..21: mol_type = other RNA
tcttccttaatgtttagtaga

SEQ ID NO: 101287 - RNA, 21 nt, synthetic construct
  source 1..21: mol_type = other RNA
tcttccttatccgataaaggg

SEQ ID NO: 101288 - RNA, 21 nt, synthetic construct
  source 1..21: mol_type = other RNA
tcttcgagggggctgagtatg

SEQ ID NO: 101289 - RNA, 21 nt, synthetic construct
  source 1..21: mol_type = other RNA
tcttcgggtgtcagaattcca

SEQ ID NO: 101290 - RNA, 21 nt, synthetic construct
  source 1..21: mol_type = other RNA
tcttctaaccctcaaatgcca

SEQ ID NO: 101291 - RNA, 21 nt, synthetic construct
  source 1..21: mol_type = other RNA
tcttctaagctaagagtttta

SEQ ID NO: 101292 - RNA, 21 nt, synthetic construct
  source 1..21: mol_type = other RNA
tcttctaataggaagtggcta

SEQ ID NO: 101293 - RNA, 21 nt, synthetic construct
  source 1..21: mol_type = other RNA
tcttctacaatggttgaacta

SEQ ID NO: 101294 - RNA, 21 nt, synthetic construct
  source 1..21: mol_type = other RNA
tcttctactcactgtactact

SEQ ID NO: 101295 - RNA, 21 nt, synthetic construct
  source 1..21: mol_type = other RNA
tcttctactgtgaattcacta

SEQ ID NO: 101296 - RNA, 21 nt, synthetic construct
  source 1..21: mol_type = other RNA
tcttctagctttcagcactgc

SEQ ID NO: 101297 - RNA, 21 nt, synthetic construct
  source 1..21: mol_type = other RNA
tcttctagtcacatttgcttt

SEQ ID NO: 101298 - RNA, 21 nt, synthetic construct
  source 1..21: mol_type = other RNA
tcttctattccagagaattca

SEQ ID NO: 101299 - RNA, 21 nt, synthetic construct
  source 1..21: mol_type = other RNA
tcttctcagatctgttgcagt

SEQ ID NO: 101300 - RNA, 21 nt, synthetic construct
  source 1..21: mol_type = other RNA
tcttctcagttgcagcatgct

SEQ ID NO: 101301 - RNA, 21 nt, synthetic construct
  source 1..21: mol_type = other RNA
tcttctccaaggaaagtgtgc

SEQ ID NO: 101302 - RNA, 21 nt, synthetic construct
  source 1..21: mol_type = other RNA
tcttctccctcttcgctcttt

SEQ ID NO: 101303 - RNA, 21 nt, synthetic construct
  source 1..21: mol_type = other RNA
tcttctctaatgtaaacagca

SEQ ID NO: 101304 - RNA, 21 nt, synthetic construct
  source 1..21: mol_type = other RNA
tcttctctcctttgaggtaag

SEQ ID NO: 101305 - RNA, 21 nt, synthetic construct
  source 1..21: mol_type = other RNA
tcttctctctctgcttcacta

SEQ ID NO: 101306 - RNA, 21 nt, synthetic construct
  source 1..21: mol_type = other RNA
tcttctgaagaaattatctgt

SEQ ID NO: 101307 - RNA, 21 nt, synthetic construct
  source 1..21: mol_type = other RNA
tcttctgaagaggctttctgt

SEQ ID NO: 101308 - RNA, 21 nt, synthetic construct
  source 1..21: mol_type = other RNA
tcttctgatcacagaagtgtt

SEQ ID NO: 101309 - RNA, 21 nt, synthetic construct
  source 1..21: mol_type = other RNA
tcttctgcaagttgctatcca

SEQ ID NO: 101310 - RNA, 21 nt, synthetic construct
  source 1..21: mol_type = other RNA
tcttctggatagcattatccc

SEQ ID NO: 101311 - RNA, 21 nt, synthetic construct
  source 1..21: mol_type = other RNA
tcttctgtaatattaaccaag

SEQ ID NO: 101312 - RNA, 21 nt, synthetic construct
  source 1..21: mol_type = other RNA
tcttctgttggagagatggta

SEQ ID NO: 101313 - RNA, 21 nt, synthetic construct
  source 1..21: mol_type = other RNA
tcttctgtttttcttagtcta

SEQ ID NO: 101314 - RNA, 21 nt, synthetic construct
  source 1..21: mol_type = other RNA
tcttcttagtgttcccttctt

SEQ ID NO: 101315 - RNA, 21 nt, synthetic construct
  source 1..21: mol_type = other RNA
tcttcttatttgttactgatc

SEQ ID NO: 101316 - RNA, 21 nt, synthetic construct
  source 1..21: mol_type = other RNA
tcttcttctaagctaagagtt

SEQ ID NO: 101317 - RNA, 21 nt, synthetic construct
  source 1..21: mol_type = other RNA
tcttcttggattttcttcatt

SEQ ID NO: 101318 - RNA, 21 nt, synthetic construct
  source 1..21: mol_type = other RNA
tcttcttgttttgttctcgtt

SEQ ID NO: 101319 - RNA, 21 nt, synthetic construct
  source 1..21: mol_type = other RNA
tcttctttggctcaatggtta

SEQ ID NO: 101320 - RNA, 21 nt, synthetic construct
  source 1..21: mol_type = other RNA
tcttcttttacttgcttggtt

SEQ ID NO: 101321 - RNA, 21 nt, synthetic construct
  source 1..21: mol_type = other RNA
tcttgaaaggggccaggtgtg

SEQ ID NO: 101322 - RNA, 21 nt, synthetic construct
  source 1..21: mol_type = other RNA
tcttgaactaagtgtgaagat

SEQ ID NO: 101323 - RNA, 21 nt, synthetic construct
  source 1..21: mol_type = other RNA
tcttgaagaaaccaagagcat

SEQ ID NO: 101324 - RNA, 21 nt, synthetic construct
  source 1..21: mol_type = other RNA
tcttgaagatggcaaacagac

SEQ ID NO: 101325 - RNA, 21 nt, synthetic construct
  source 1..21: mol_type = other RNA
tcttgaagtcagttacagcat

SEQ ID NO: 101326 - RNA, 21 nt, synthetic construct
  source 1..21: mol_type = other RNA
tcttgaatagcatcttagctc

SEQ ID NO: 101327 - RNA, 21 nt, synthetic construct
  source 1..21: mol_type = other RNA
tcttgaatctctctatccacc

SEQ ID NO: 101328 - RNA, 21 nt, synthetic construct
  source 1..21: mol_type = other RNA
tcttgacatgattgaggactt

SEQ ID NO: 101329 - RNA, 21 nt, synthetic construct
  source 1..21: mol_type = other RNA
tcttgacctcagtggtagtta

SEQ ID NO: 101330 - RNA, 21 nt, synthetic construct
  source 1..21: mol_type = other RNA
tcttgaccttagttttcactt

SEQ ID NO: 101331 - RNA, 21 nt, synthetic construct
  source 1..21: mol_type = other RNA
tcttgaccttgtgcatgtgca

SEQ ID NO: 101332 - RNA, 21 nt, synthetic construct
  source 1..21: mol_type = other RNA
tcttgacttcacttccaagtc

SEQ ID NO: 101333 - RNA, 21 nt, synthetic construct
  source 1..21: mol_type = other RNA
tcttgagacggaagactcata

SEQ ID NO: 101334 - RNA, 21 nt, synthetic construct
  source 1..21: mol_type = other RNA
tcttgagagtctcttaagacc

SEQ ID NO: 101335 - RNA, 21 nt, synthetic construct
  source 1..21: mol_type = other RNA
tcttgagttaggaatttacat

SEQ ID NO: 101336 - RNA, 21 nt, synthetic construct
  source 1..21: mol_type = other RNA
tcttgatgatagaataccact

SEQ ID NO: 101337 - RNA, 21 nt, synthetic construct
  source 1..21: mol_type = other RNA
tcttgcaaaacaatagcccag

SEQ ID NO: 101338 - RNA, 21 nt, synthetic construct
  source 1..21: mol_type = other RNA
tcttgcaaaacggaaacttta

SEQ ID NO: 101339 - RNA, 21 nt, synthetic construct
  source 1..21: mol_type = other RNA
tcttgcataactcgtaatgcg

SEQ ID NO: 101340 - RNA, 21 nt, synthetic construct
  source 1..21: mol_type = other RNA
tcttgcattagagccccaaga

SEQ ID NO: 101341 - RNA, 21 nt, synthetic construct
  source 1..21: mol_type = other RNA
tcttgcccaagctggtcctga

SEQ ID NO: 101342 - RNA, 21 nt, synthetic construct
  source 1..21: mol_type = other RNA
tcttgcctaggctggagtgca

SEQ ID NO: 101343 - RNA, 21 nt, synthetic construct
  source 1..21: mol_type = other RNA
tcttgcggtcttttagccaac

SEQ ID NO: 101344 - RNA, 21 nt, synthetic construct
  source 1..21: mol_type = other RNA
tcttgctaaacatgtatacta

SEQ ID NO: 101345 - RNA, 21 nt, synthetic construct
  source 1..21: mol_type = other RNA
tcttgctctgtcacccacgtg

SEQ ID NO: 101346 - RNA, 21 nt, synthetic construct
  source 1..21: mol_type = other RNA
tcttgctggaagttggcccaa

SEQ ID NO: 101347 - RNA, 21 nt, synthetic construct
  source 1..21: mol_type = other RNA
tcttgctttgctgccccagct

SEQ ID NO: 101348 - RNA, 21 nt, synthetic construct
  source 1..21: mol_type = other RNA
tcttggaaatgatacctcatt

SEQ ID NO: 101349 - RNA, 21 nt, synthetic construct
  source 1..21: mol_type = other RNA
tcttggaaattagaaatgtgg

SEQ ID NO: 101350 - RNA, 21 nt, synthetic construct
  source 1..21: mol_type = other RNA
tcttggaatgtgcacctccag

SEQ ID NO: 101351 - RNA, 21 nt, synthetic construct
  source 1..21: mol_type = other RNA
tcttggacccatgcccatgtg

SEQ ID NO: 101352 - RNA, 21 nt, synthetic construct
  source 1..21: mol_type = other RNA
tcttggagtaaacctgcaatt

SEQ ID NO: 101353 - RNA, 21 nt, synthetic construct
  source 1..21: mol_type = other RNA
tcttggccattttcttttaaa

SEQ ID NO: 101354 - RNA, 21 nt, synthetic construct
  source 1..21: mol_type = other RNA
tcttggccgaatgtggtggta

SEQ ID NO: 101355 - RNA, 21 nt, synthetic construct
  source 1..21: mol_type = other RNA
tcttggctattgtcagtaatt

SEQ ID NO: 101356 - RNA, 21 nt, synthetic construct
  source 1..21: mol_type = other RNA
tcttggcttttggcagcgtaa

SEQ ID NO: 101357 - RNA, 21 nt, synthetic construct
  source 1..21: mol_type = other RNA
tcttgggaatactttcccatc

SEQ ID NO: 101358 - RNA, 21 nt, synthetic construct
  source 1..21: mol_type = other RNA
tcttggggctctaatgcaaga

SEQ ID NO: 101359 - RNA, 21 nt, synthetic construct
  source 1..21: mol_type = other RNA
tcttgggtgaataacccatat

SEQ ID NO: 101360 - RNA, 21 nt, synthetic construct
  source 1..21: mol_type = other RNA
tcttggtagtttgcacgtttt

SEQ ID NO: 101361 - RNA, 21 nt, synthetic construct
  source 1..21: mol_type = other RNA
tcttggtctgcagactcttgt

SEQ ID NO: 101362 - RNA, 21 nt, synthetic construct
  source 1..21: mol_type = other RNA
tcttggtctttctcccaggtc

SEQ ID NO: 101363 - RNA, 21 nt, synthetic construct
  source 1..21: mol_type = other RNA
tcttggtggtaactgatgtga

SEQ ID NO: 101364 - RNA, 21 nt, synthetic construct
  source 1..21: mol_type = other RNA
tcttggtgtgctcttttcatc

SEQ ID NO: 101365 - RNA, 21 nt, synthetic construct
  source 1..21: mol_type = other RNA
tcttggttaatattacagaag

SEQ ID NO: 101366 - RNA, 21 nt, synthetic construct
  source 1..21: mol_type = other RNA
tcttggtttcttcaagatact

SEQ ID NO: 101367 - RNA, 21 nt, synthetic construct
  source 1..21: mol_type = other RNA
tcttgtactcccagcctcaaa

SEQ ID NO: 101368 - RNA, 21 nt, synthetic construct
  source 1..21: mol_type = other RNA
tcttgtagtatttttgcaact

SEQ ID NO: 101369 - RNA, 21 nt, synthetic construct
  source 1..21: mol_type = other RNA
tcttgtcaataatttggatga

SEQ ID NO: 101370 - RNA, 21 nt, synthetic construct
  source 1..21: mol_type = other RNA
tcttgtcataacagtattgtc

SEQ ID NO: 101371 - RNA, 21 nt, synthetic construct
  source 1..21: mol_type = other RNA
tcttgtcatgaatgaatgttg

SEQ ID NO: 101372 - RNA, 21 nt, synthetic construct
  source 1..21: mol_type = other RNA
tcttgtcccggcatgcctctc

SEQ ID NO: 101373 - RNA, 21 nt, synthetic construct
  source 1..21: mol_type = other RNA
tcttgtctcaacctttgcctc

SEQ ID NO: 101374 - RNA, 21 nt, synthetic construct
  source 1..21: mol_type = other RNA
tcttgtgaattgataaaagtc

SEQ ID NO: 101375 - RNA, 21 nt, synthetic construct
  source 1..21: mol_type = other RNA
tcttgtgcatcctttatacct

SEQ ID NO: 101376 - RNA, 21 nt, synthetic construct
  source 1..21: mol_type = other RNA
tcttgtggctgacatgtgtaa

SEQ ID NO: 101377 - RNA, 21 nt, synthetic construct
  source 1..21: mol_type = other RNA
tcttgtgggtattttgttgtt

SEQ ID NO: 101378 - RNA, 21 nt, synthetic construct
  source 1..21: mol_type = other RNA
tcttgtgtatcttttgttaga

SEQ ID NO: 101379 - RNA, 21 nt, synthetic construct
  source 1..21: mol_type = other RNA
tcttgttaagcattttccggt

SEQ ID NO: 101380 - RNA, 21 nt, synthetic construct
  source 1..21: mol_type = other RNA
tcttgttagtaggaaaaccat

SEQ ID NO: 101381 - RNA, 21 nt, synthetic construct
  source 1..21: mol_type = other RNA
tcttgttgaggatgactgtcc

SEQ ID NO: 101382 - RNA, 21 nt, synthetic construct
  source 1..21: mol_type = other RNA
tcttgtttacccagtgtgttt

SEQ ID NO: 101383 - RNA, 21 nt, synthetic construct
  source 1..21: mol_type = other RNA
tcttgttttcttgagatggag

SEQ ID NO: 101384 - RNA, 21 nt, synthetic construct
  source 1..21: mol_type = other RNA
tcttgttttgttctcgttcat

SEQ ID NO: 101385 - RNA, 21 nt, synthetic construct
  source 1..21: mol_type = other RNA
tctttaaaaccagagcggaat

SEQ ID NO: 101386 - RNA, 21 nt, synthetic construct
  source 1..21: mol_type = other RNA
tctttaaaactgctgagtctt

SEQ ID NO: 101387 - RNA, 21 nt, synthetic construct
  source 1..21: mol_type = other RNA
tctttaaaagaaagctctcaa

SEQ ID NO: 101388 - RNA, 21 nt, synthetic construct
  source 1..21: mol_type = other RNA
tctttaaagctgaactccttt

SEQ ID NO: 101389 - RNA, 21 nt, synthetic construct
  source 1..21: mol_type = other RNA
tctttaattatgagcattccc

SEQ ID NO: 101390 - RNA, 21 nt, synthetic construct
  source 1..21: mol_type = other RNA
tctttacttcccttctcgaag

SEQ ID NO: 101391 - RNA, 21 nt, synthetic construct
  source 1..21: mol_type = other RNA
tctttactttcagctcaaaca

SEQ ID NO: 101392 - RNA, 21 nt, synthetic construct
  source 1..21: mol_type = other RNA
tctttaggaagcttccttgat

SEQ ID NO: 101393 - RNA, 21 nt, synthetic construct
  source 1..21: mol_type = other RNA
tctttagggaagatagtactg

SEQ ID NO: 101394 - RNA, 21 nt, synthetic construct
  source 1..21: mol_type = other RNA
tctttaggtgttttttccttc

SEQ ID NO: 101395 - RNA, 21 nt, synthetic construct
  source 1..21: mol_type = other RNA
tctttagtgttgcttggtgtt

SEQ ID NO: 101396 - RNA, 21 nt, synthetic construct
  source 1..21: mol_type = other RNA
tctttatctccacatttctac

SEQ ID NO: 101397 - RNA, 21 nt, synthetic construct
  source 1..21: mol_type = other RNA
tctttatgccaatatcacact

SEQ ID NO: 101398 - RNA, 21 nt, synthetic construct
  source 1..21: mol_type = other RNA
tctttcaaatgtgacagaaca

SEQ ID NO: 101399 - RNA, 21 nt, synthetic construct
  source 1..21: mol_type = other RNA
tctttcaaggggccttttgtc

SEQ ID NO: 101400 - RNA, 21 nt, synthetic construct
  source 1..21: mol_type = other RNA
tctttcagccatcccagctac

SEQ ID NO: 101401 - RNA, 21 nt, synthetic construct
  source 1..21: mol_type = other RNA
tctttcagtatgtgtctctga

SEQ ID NO: 101402 - RNA, 21 nt, synthetic construct
  source 1..21: mol_type = other RNA
tctttcatatctgattttgtg

SEQ ID NO: 101403 - RNA, 21 nt, synthetic construct
  source 1..21: mol_type = other RNA
tctttccactctctggctgca

SEQ ID NO: 101404 - RNA, 21 nt, synthetic construct
  source 1..21: mol_type = other RNA
tctttccattcaatccttgta

SEQ ID NO: 101405 - RNA, 21 nt, synthetic construct
  source 1..21: mol_type = other RNA
tctttcccattaccaaaacct

SEQ ID NO: 101406 - RNA, 21 nt, synthetic construct
  source 1..21: mol_type = other RNA
tctttcctgatcacaccctcc

SEQ ID NO: 101407 - RNA, 21 nt, synthetic construct
  source 1..21: mol_type = other RNA
tctttcctgatcagcaccctc

SEQ ID NO: 101408 - RNA, 21 nt, synthetic construct
  source 1..21: mol_type = other RNA
tctttcctgtgatttatgtgg

SEQ ID NO: 101409 - RNA, 21 nt, synthetic construct
  source 1..21: mol_type = other RNA
tctttcgcatcattcaaatga

SEQ ID NO: 101410 - RNA, 21 nt, synthetic construct
  source 1..21: mol_type = other RNA
tctttcggatatttactaaga

SEQ ID NO: 101411 - RNA, 21 nt, synthetic construct
  source 1..21: mol_type = other RNA
tctttctagattcatatgctt

SEQ ID NO: 101412 - RNA, 21 nt, synthetic construct
  source 1..21: mol_type = other RNA
tctttctcaacttcctgtttt

SEQ ID NO: 101413 - RNA, 21 nt, synthetic construct
  source 1..21: mol_type = other RNA
tctttctcccaggtcagtagt

SEQ ID NO: 101414 - RNA, 21 nt, synthetic construct
  source 1..21: mol_type = other RNA
tctttctctttcagccatccc

SEQ ID NO: 101415 - RNA, 21 nt, synthetic construct
  source 1..21: mol_type = other RNA
tctttctgaaattctcattag

SEQ ID NO: 101416 - RNA, 21 nt, synthetic construct
  source 1..21: mol_type = other RNA
tctttctgaactcaaaagtga

SEQ ID NO: 101417 - RNA, 21 nt, synthetic construct
  source 1..21: mol_type = other RNA
tctttctggggatgctgtcta

SEQ ID NO: 101418 - RNA, 21 nt, synthetic construct
  source 1..21: mol_type = other RNA
tctttctttcaaatgtgacag

SEQ ID NO: 101419 - RNA, 21 nt, synthetic construct
  source 1..21: mol_type = other RNA
tctttgaaaggaatccggctt

SEQ ID NO: 101420 - RNA, 21 nt, synthetic construct
  source 1..21: mol_type = other RNA
tctttgaataaagggtcagaa

SEQ ID NO: 101421 - RNA, 21 nt, synthetic construct
  source 1..21: mol_type = other RNA
tctttgagtagttcatgttag

SEQ ID NO: 101422 - RNA, 21 nt, synthetic construct
  source 1..21: mol_type = other RNA
tctttgatccattttgagttc

SEQ ID NO: 101423 - RNA, 21 nt, synthetic construct
  source 1..21: mol_type = other RNA
tctttgctaataagtgagttt

SEQ ID NO: 101424 - RNA, 21 nt, synthetic construct
  source 1..21: mol_type = other RNA
tctttggaaaaatgtccgttg

SEQ ID NO: 101425 - RNA, 21 nt, synthetic construct
  source 1..21: mol_type = other RNA
tctttggagctgtatttttgc

SEQ ID NO: 101426 - RNA, 21 nt, synthetic construct
  source 1..21: mol_type = other RNA
tctttggatatccccattttt

SEQ ID NO: 101427 - RNA, 21 nt, synthetic construct
  source 1..21: mol_type = other RNA
tctttggcaaacttagaatat

SEQ ID NO: 101428 - RNA, 21 nt, synthetic construct
  source 1..21: mol_type = other RNA
tctttggcccatatcctttta

SEQ ID NO: 101429 - RNA, 21 nt, synthetic construct
  source 1..21: mol_type = other RNA
tctttggcccattttcgaatt

SEQ ID NO: 101430 - RNA, 21 nt, synthetic construct
  source 1..21: mol_type = other RNA
tctttggctcaatggttaaga

SEQ ID NO: 101431 - RNA, 21 nt, synthetic construct
  source 1..21: mol_type = other RNA
tctttggctcttagaaaatat

SEQ ID NO: 101432 - RNA, 21 nt, synthetic construct
  source 1..21: mol_type = other RNA
tctttggctgttagccttgcc

SEQ ID NO: 101433 - RNA, 21 nt, synthetic construct
  source 1..21: mol_type = other RNA
tctttgggaaaatctctgact

SEQ ID NO: 101434 - RNA, 21 nt, synthetic construct
  source 1..21: mol_type = other RNA
tctttgggaaggccctgattg

SEQ ID NO: 101435 - RNA, 21 nt, synthetic construct
  source 1..21: mol_type = other RNA
tctttgggaggctgaggcgga

SEQ ID NO: 101436 - RNA, 21 nt, synthetic construct
  source 1..21: mol_type = other RNA
tctttggggagataccttgaa

SEQ ID NO: 101437 - RNA, 21 nt, synthetic construct
  source 1..21: mol_type = other RNA
tctttgggggaagcaggaact

SEQ ID NO: 101438 - RNA, 21 nt, synthetic construct
  source 1..21: mol_type = other RNA
tctttgggtaatttatctcca

SEQ ID NO: 101439 - RNA, 21 nt, synthetic construct
  source 1..21: mol_type = other RNA
tctttggtgaaggttcatgaa

SEQ ID NO: 101440 - RNA, 21 nt, synthetic construct
  source 1..21: mol_type = other RNA
tctttggtgatcctaagccat

SEQ ID NO: 101441 - RNA, 21 nt, synthetic construct
  source 1..21: mol_type = other RNA
tctttggtgctgataaatggc

SEQ ID NO: 101442 - RNA, 21 nt, synthetic construct
  source 1..21: mol_type = other RNA
tctttggttttgactcagtac

SEQ ID NO: 101443 - RNA, 21 nt, synthetic construct
  source 1..21: mol_type = other RNA
tctttgtacagtaattgtagt

SEQ ID NO: 101444 - RNA, 21 nt, synthetic construct
  source 1..21: mol_type = other RNA
tctttgtctattccctacatt

SEQ ID NO: 101445 - RNA, 21 nt, synthetic construct
  source 1..21: mol_type = other RNA
tctttgttacagcagctctag

SEQ ID NO: 101446 - RNA, 21 nt, synthetic construct
  source 1..21: mol_type = other RNA
tctttgtttatccttgcacca

SEQ ID NO: 101447 - RNA, 21 nt, synthetic construct
  source 1..21: mol_type = other RNA
tcttttaaacccatttcatgc

SEQ ID NO: 101448 - RNA, 21 nt, synthetic construct
  source 1..21: mol_type = other RNA
tcttttaaagacctcaggttt

SEQ ID NO: 101449 - RNA, 21 nt, synthetic construct
  source 1..21: mol_type = other RNA
tcttttaaatgccaatttggg

SEQ ID NO: 101450 - RNA, 21 nt, synthetic construct
  source 1..21: mol_type = other RNA
tcttttaacagatggtccttt

SEQ ID NO: 101451 - RNA, 21 nt, synthetic construct
  source 1..21: mol_type = other RNA
tcttttacttgcttggtttca

SEQ ID NO: 101452 - RNA, 21 nt, synthetic construct
  source 1..21: mol_type = other RNA
tcttttagagtaactgtcatc

SEQ ID NO: 101453 - RNA, 21 nt, synthetic construct
  source 1..21: mol_type = other RNA
tcttttagccaacaaccataa

SEQ ID NO: 101454 - RNA, 21 nt, synthetic construct
  source 1..21: mol_type = other RNA
tcttttcaaaaacccaactct

SEQ ID NO: 101455 - RNA, 21 nt, synthetic construct
  source 1..21: mol_type = other RNA
tcttttcacataaatttgcca

SEQ ID NO: 101456 - RNA, 21 nt, synthetic construct
  source 1..21: mol_type = other RNA
tcttttcactctaatatggtt

SEQ ID NO: 101457 - RNA, 21 nt, synthetic construct
  source 1..21: mol_type = other RNA
tcttttcagtccagatattat

SEQ ID NO: 101458 - RNA, 21 nt, synthetic construct
  source 1..21: mol_type = other RNA
tcttttcatcactcactggcc

SEQ ID NO: 101459 - RNA, 21 nt, synthetic construct
  source 1..21: mol_type = other RNA
tcttttcatgttgaccatttt

SEQ ID NO: 101460 - RNA, 21 nt, synthetic construct
  source 1..21: mol_type = other RNA
tcttttccaaccaagcccaac

SEQ ID NO: 101461 - RNA, 21 nt, synthetic construct
  source 1..21: mol_type = other RNA
tcttttcctaccctgaggata

SEQ ID NO: 101462 - RNA, 21 nt, synthetic construct
  source 1..21: mol_type = other RNA
tcttttcctagactgccaggt

SEQ ID NO: 101463 - RNA, 21 nt, synthetic construct
  source 1..21: mol_type = other RNA
tcttttcctcgttttcaacaa

SEQ ID NO: 101464 - RNA, 21 nt, synthetic construct
  source 1..21: mol_type = other RNA
tcttttccttcttaagacatt

SEQ ID NO: 101465 - RNA, 21 nt, synthetic construct
  source 1..21: mol_type = other RNA
tcttttcctttaacgtatctg

SEQ ID NO: 101466 - RNA, 21 nt, synthetic construct
  source 1..21: mol_type = other RNA
tcttttctgacaatttcaggg

SEQ ID NO: 101467 - RNA, 21 nt, synthetic construct
  source 1..21: mol_type = other RNA
tcttttgacgcgcaacaattc

SEQ ID NO: 101468 - RNA, 21 nt, synthetic construct
  source 1..21: mol_type = other RNA
tcttttgagggtatcatatta

SEQ ID NO: 101469 - RNA, 21 nt, synthetic construct
  source 1..21: mol_type = other RNA
tcttttgcctggatgaatgca

SEQ ID NO: 101470 - RNA, 21 nt, synthetic construct
  source 1..21: mol_type = other RNA
tcttttgctgtatacccaggt

SEQ ID NO: 101471 - RNA, 21 nt, synthetic construct
  source 1..21: mol_type = other RNA
tcttttgtgggtaaattaagt

SEQ ID NO: 101472 - RNA, 21 nt, synthetic construct
  source 1..21: mol_type = other RNA
tcttttgttgcctgtagtttt

SEQ ID NO: 101473 - RNA, 21 nt, synthetic construct
  source 1..21: mol_type = other RNA
tctttttaaacaggtgtaaga

SEQ ID NO: 101474 - RNA, 21 nt, synthetic construct
  source 1..21: mol_type = other RNA
tctttttacacttggagtttt

SEQ ID NO: 101475 - RNA, 21 nt, synthetic construct
  source 1..21: mol_type = other RNA
tctttttactcatgtctacct

SEQ ID NO: 101476 - RNA, 21 nt, synthetic construct
  source 1..21: mol_type = other RNA
tctttttactcgagggtagct

SEQ ID NO: 101477 - RNA, 21 nt, synthetic construct
  source 1..21: mol_type = other RNA
tctttttagtaagaggtatca

SEQ ID NO: 101478 - RNA, 21 nt, synthetic construct
  source 1..21: mol_type = other RNA
tctttttcagcagcagagaag

SEQ ID NO: 101479 - RNA, 21 nt, synthetic construct
  source 1..21: mol_type = other RNA
tctttttccaggaccaattta

SEQ ID NO: 101480 - RNA, 21 nt, synthetic construct
  source 1..21: mol_type = other RNA
tctttttctagtttgaggtgt

SEQ ID NO: 101481 - RNA, 21 nt, synthetic construct
  source 1..21: mol_type = other RNA
tctttttcttgctttgctgcc

SEQ ID NO: 101482 - RNA, 21 nt, synthetic construct
  source 1..21: mol_type = other RNA
tctttttgacagatgagactc

SEQ ID NO: 101483 - RNA, 21 nt, synthetic construct
  source 1..21: mol_type = other RNA
tctttttgttttctccttctg

SEQ ID NO: 101484 - RNA, 21 nt, synthetic construct
  source 1..21: mol_type = other RNA
tgaaaaaacaaaacaaaaccc

SEQ ID NO: 101485 - RNA, 21 nt, synthetic construct
  source 1..21: mol_type = other RNA
tgaaaaaacttcccttagctc

SEQ ID NO: 101486 - RNA, 21 nt, synthetic construct
  source 1..21: mol_type = other RNA
tgaaaaaatggtgcagccact

SEQ ID NO: 101487 - RNA, 21 nt, synthetic construct
  source 1..21: mol_type = other RNA
tgaaaaacacctcagttaaac

SEQ ID NO: 101488 - RNA, 21 nt, synthetic construct
  source 1..21: mol_type = other RNA
tgaaaaacagatcttggccga

SEQ ID NO: 101489 - RNA, 21 nt, synthetic construct
  source 1..21: mol_type = other RNA
tgaaaaacggaggttgcagta

SEQ ID NO: 101490 - RNA, 21 nt, synthetic construct
  source 1..21: mol_type = other RNA
tgaaaaaggaaagtaactgtt

SEQ ID NO: 101491 - RNA, 21 nt, synthetic construct
  source 1..21: mol_type = other RNA
tgaaaaagtactggaaatgga

SEQ ID NO: 101492 - RNA, 21 nt, synthetic construct
  source 1..21: mol_type = other RNA
tgaaaaatgagaaacctaaga

SEQ ID NO: 101493 - RNA, 21 nt, synthetic construct
  source 1..21: mol_type = other RNA
tgaaaaatgtcaattttcccc

SEQ ID NO: 101494 - RNA, 21 nt, synthetic construct
  source 1..21: mol_type = other RNA
tgaaaaattcactcctcattc

SEQ ID NO: 101495 - RNA, 21 nt, synthetic construct
  source 1..21: mol_type = other RNA
tgaaaaatttgacatgacagg

SEQ ID NO: 101496 - RNA, 21 nt, synthetic construct
  source 1..21: mol_type = other RNA
tgaaaacacaaactgcagaat

SEQ ID NO: 101497 - RNA, 21 nt, synthetic construct
  source 1..21: mol_type = other RNA
tgaaaacacaacataccaaaa

SEQ ID NO: 101498 - RNA, 21 nt, synthetic construct
  source 1..21: mol_type = other RNA
tgaaaacagctaggtgagtga

SEQ ID NO: 101499 - RNA, 21 nt, synthetic construct
  source 1..21: mol_type = other RNA
tgaaaacatgttttgttgttg

SEQ ID NO: 101500 - RNA, 21 nt, synthetic construct
  source 1..21: mol_type = other RNA
tgaaaacgaggaaaagagaac

SEQ ID NO: 101501 - RNA, 21 nt, synthetic construct
  source 1..21: mol_type = other RNA
tgaaaactaaggtcaagagag

SEQ ID NO: 101502 - RNA, 21 nt, synthetic construct
  source 1..21: mol_type = other RNA
tgaaaactcaactgcctctac

SEQ ID NO: 101503 - RNA, 21 nt, synthetic construct
  source 1..21: mol_type = other RNA
tgaaaagaaaaaggttaaggg

SEQ ID NO: 101504 - RNA, 21 nt, synthetic construct
  source 1..21: mol_type = other RNA
tgaaaagaacaacatggtaga

SEQ ID NO: 101505 - RNA, 21 nt, synthetic construct
  source 1..21: mol_type = other RNA
tgaaaagagcacaccaagaca

SEQ ID NO: 101506 - RNA, 21 nt, synthetic construct
  source 1..21: mol_type = other RNA
tgaaaagatactcaacatcac

SEQ ID NO: 101507 - RNA, 21 nt, synthetic construct
  source 1..21: mol_type = other RNA
tgaaaagcccaatctacaggt

SEQ ID NO: 101508 - RNA, 21 nt, synthetic construct
  source 1..21: mol_type = other RNA
tgaaaagcctcaaacgaacca

SEQ ID NO: 101509 - RNA, 21 nt, synthetic construct
  source 1..21: mol_type = other RNA
tgaaaagctcaaaaatactca

SEQ ID NO: 101510 - RNA, 21 nt, synthetic construct
  source 1..21: mol_type = other RNA
tgaaaagcttcccccctctct

SEQ ID NO: 101511 - RNA, 21 nt, synthetic construct
  source 1..21: mol_type = other RNA
tgaaaaggcaaaccacacaga

SEQ ID NO: 101512 - RNA, 21 nt, synthetic construct
  source 1..21: mol_type = other RNA
tgaaaagtatggttgaagaaa

SEQ ID NO: 101513 - RNA, 21 nt, synthetic construct
  source 1..21: mol_type = other RNA
tgaaaagtgtttgtcacatag

SEQ ID NO: 101514 - RNA, 21 nt, synthetic construct
  source 1..21: mol_type = other RNA
tgaaaataatacctaacagcc

SEQ ID NO: 101515 - RNA, 21 nt, synthetic construct
  source 1..21: mol_type = other RNA
tgaaaatactaacgatcctta

SEQ ID NO: 101516 - RNA, 21 nt, synthetic construct
  source 1..21: mol_type = other RNA
tgaaaatagtaactttctgct

SEQ ID NO: 101517 - RNA, 21 nt, synthetic construct
  source 1..21: mol_type = other RNA
tgaaaatgcccttatttaatg

SEQ ID NO: 101518 - RNA, 21 nt, synthetic construct
  source 1..21: mol_type = other RNA
tgaaaatggtttaggctgtct

SEQ ID NO: 101519 - RNA, 21 nt, synthetic construct
  source 1..21: mol_type = other RNA
tgaaaatgttccctcttcaat

SEQ ID NO: 101520 - RNA, 21 nt, synthetic construct
  source 1..21: mol_type = other RNA
tgaaaattagctggatgtggt

SEQ ID NO: 101521 - RNA, 21 nt, synthetic construct
  source 1..21: mol_type = other RNA
tgaaaattccttcccctttct

SEQ ID NO: 101522 - RNA, 21 nt, synthetic construct
  source 1..21: mol_type = other RNA
tgaaaattggcgtacatgtag

SEQ ID NO: 101523 - RNA, 21 nt, synthetic construct
  source 1..21: mol_type = other RNA
tgaaaatttttgtctggaaca

SEQ ID NO: 101524 - RNA, 21 nt, synthetic construct
  source 1..21: mol_type = other RNA
tgaaacaatactttagacatg

SEQ ID NO: 101525 - RNA, 21 nt, synthetic construct
  source 1..21: mol_type = other RNA
tgaaacaatcgcaatccaaaa

SEQ ID NO: 101526 - RNA, 21 nt, synthetic construct
  source 1..21: mol_type = other RNA
tgaaacacttgtgtaactacc

SEQ ID NO: 101527 - RNA, 21 nt, synthetic construct
  source 1..21: mol_type = other RNA
tgaaaccaagcaagtaaaaga

SEQ ID NO: 101528 - RNA, 21 nt, synthetic construct
  source 1..21: mol_type = other RNA
tgaaaccagtgctctcccccg

SEQ ID NO: 101529 - RNA, 21 nt, synthetic construct
  source 1..21: mol_type = other RNA
tgaaaccagtgggtcagctag

SEQ ID NO: 101530 - RNA, 21 nt, synthetic construct
  source 1..21: mol_type = other RNA
tgaaaccccgcatactgtgca

SEQ ID NO: 101531 - RNA, 21 nt, synthetic construct
  source 1..21: mol_type = other RNA
tgaaaccctcacgaaagcggt

SEQ ID NO: 101532 - RNA, 21 nt, synthetic construct
  source 1..21: mol_type = other RNA
tgaaacctgccatggtgttaa

SEQ ID NO: 101533 - RNA, 21 nt, synthetic construct
  source 1..21: mol_type = other RNA
tgaaacgaccttgctcattca

SEQ ID NO: 101534 - RNA, 21 nt, synthetic construct
  source 1..21: mol_type = other RNA
tgaaacgatgcattccagatt

SEQ ID NO: 101535 - RNA, 21 nt, synthetic construct
  source 1..21: mol_type = other RNA
tgaaactaaatgtgagcattt

SEQ ID NO: 101536 - RNA, 21 nt, synthetic construct
  source 1..21: mol_type = other RNA
tgaaactcaatgttggttagt

SEQ ID NO: 101537 - RNA, 21 nt, synthetic construct
  source 1..21: mol_type = other RNA
tgaaactctggctcagaaaca

SEQ ID NO: 101538 - RNA, 21 nt, synthetic construct
  source 1..21: mol_type = other RNA
tgaaactgagcatcccagagg

SEQ ID NO: 101539 - RNA, 21 nt, synthetic construct
  source 1..21: mol_type = other RNA
tgaaacttatttccagggggt

SEQ ID NO: 101540 - RNA, 21 nt, synthetic construct
  source 1..21: mol_type = other RNA
tgaaacttgaatactcgtgtg

SEQ ID NO: 101541 - RNA, 21 nt, synthetic construct
  source 1..21: mol_type = other RNA
tgaaagaaagaaggccatttg

SEQ ID NO: 101542 - RNA, 21 nt, synthetic construct
  source 1..21: mol_type = other RNA
tgaaagacagacctctattaa

SEQ ID NO: 101543 - RNA, 21 nt, synthetic construct
  source 1..21: mol_type = other RNA
tgaaagatcatttagtaagtg

SEQ ID NO: 101544 - RNA, 21 nt, synthetic construct
  source 1..21: mol_type = other RNA
tgaaagcagggactcccatat

SEQ ID NO: 101545 - RNA, 21 nt, synthetic construct
  source 1..21: mol_type = other RNA
tgaaagcccttgagtattttt

SEQ ID NO: 101546 - RNA, 21 nt, synthetic construct
  source 1..21: mol_type = other RNA
tgaaagctagaagacctcaaa

SEQ ID NO: 101547 - RNA, 21 nt, synthetic construct
  source 1..21: mol_type = other RNA
tgaaagctcccaatgcttgaa

SEQ ID NO: 101548 - RNA, 21 nt, synthetic construct
  source 1..21: mol_type = other RNA
tgaaagcttctgagcagtgtt

SEQ ID NO: 101549 - RNA, 21 nt, synthetic construct
  source 1..21: mol_type = other RNA
tgaaaggaaatgagtgtatgc

SEQ ID NO: 101550 - RNA, 21 nt, synthetic construct
  source 1..21: mol_type = other RNA
tgaaaggaatccggctttatg

SEQ ID NO: 101551 - RNA, 21 nt, synthetic construct
  source 1..21: mol_type = other RNA
tgaaaggatactgagaacaga

SEQ ID NO: 101552 - RNA, 21 nt, synthetic construct
  source 1..21: mol_type = other RNA
tgaaaggcaaaggaaaaaact

SEQ ID NO: 101553 - RNA, 21 nt, synthetic construct
  source 1..21: mol_type = other RNA
tgaaaggcatgaaattcttgg

SEQ ID NO: 101554 - RNA, 21 nt, synthetic construct
  source 1..21: mol_type = other RNA
tgaaaggcgtcggggctgctg

SEQ ID NO: 101555 - RNA, 21 nt, synthetic construct
  source 1..21: mol_type = other RNA
tgaaaggggccaggtgtggag

SEQ ID NO: 101556 - RNA, 21 nt, synthetic construct
  source 1..21: mol_type = other RNA
tgaaagtaaagatagcccctt

SEQ ID NO: 101557 - RNA, 21 nt, synthetic construct
  source 1..21: mol_type = other RNA
tgaaagtagaggactgcctat

SEQ ID NO: 101558 - RNA, 21 nt, synthetic construct
  source 1..21: mol_type = other RNA
tgaaagtattaaaagcacaag

SEQ ID NO: 101559 - RNA, 21 nt, synthetic construct
  source 1..21: mol_type = other RNA
tgaaagtcagctaattttcta

SEQ ID NO: 101560 - RNA, 21 nt, synthetic construct
  source 1..21: mol_type = other RNA
tgaaagtctccctaaccaggc

SEQ ID NO: 101561 - RNA, 21 nt, synthetic construct
  source 1..21: mol_type = other RNA
tgaaagtggagaattactaaa

SEQ ID NO: 101562 - RNA, 21 nt, synthetic construct
  source 1..21: mol_type = other RNA
tgaaagttcagaataccagag

SEQ ID NO: 101563 - RNA, 21 nt, synthetic construct
  source 1..21: mol_type = other RNA
tgaaataatttggttatgcga

SEQ ID NO: 101564 - RNA, 21 nt, synthetic construct
  source 1..21: mol_type = other RNA
tgaaatactcaaactatgctt

SEQ ID NO: 101565 - RNA, 21 nt, synthetic construct
  source 1..21: mol_type = other RNA
tgaaatagttggtcagaaaaa

SEQ ID NO: 101566 - RNA, 21 nt, synthetic construct
  source 1..21: mol_type = other RNA
tgaaatcacacaatcttgaga

SEQ ID NO: 101567 - RNA, 21 nt, synthetic construct
  source 1..21: mol_type = other RNA
tgaaatcagaacttgacaagt

SEQ ID NO: 101568 - RNA, 21 nt, synthetic construct
  source 1..21: mol_type = other RNA
tgaaatcaggaagtatgagtc

SEQ ID NO: 101569 - RNA, 21 nt, synthetic construct
  source 1..21: mol_type = other RNA
tgaaatcccctttagtgttct

SEQ ID NO: 101570 - RNA, 21 nt, synthetic construct
  source 1..21: mol_type = other RNA
tgaaatcctagccccaaatac

SEQ ID NO: 101571 - RNA, 21 nt, synthetic construct
  source 1..21: mol_type = other RNA
tgaaatcgggagtaacagacc

SEQ ID NO: 101572 - RNA, 21 nt, synthetic construct
  source 1..21: mol_type = other RNA
tgaaatcttgaagatggcaaa

SEQ ID NO: 101573 - RNA, 21 nt, synthetic construct
  source 1..21: mol_type = other RNA
tgaaatgaaccaaacttggtt

SEQ ID NO: 101574 - RNA, 21 nt, synthetic construct
  source 1..21: mol_type = other RNA
tgaaatgatttcaagtaacac

SEQ ID NO: 101575 - RNA, 21 nt, synthetic construct
  source 1..21: mol_type = other RNA
tgaaatgctgtaactgacttc

SEQ ID NO: 101576 - RNA, 21 nt, synthetic construct
  source 1..21: mol_type = other RNA
tgaaatggcccttaacttcac

SEQ ID NO: 101577 - RNA, 21 nt, synthetic construct
  source 1..21: mol_type = other RNA
tgaaatggcttaaggaaataa

SEQ ID NO: 101578 - RNA, 21 nt, synthetic construct
  source 1..21: mol_type = other RNA
tgaaatgggtttaaaagagtg

SEQ ID NO: 101579 - RNA, 21 nt, synthetic construct
  source 1..21: mol_type = other RNA
tgaaatgtggtttttggttca

SEQ ID NO: 101580 - RNA, 21 nt, synthetic construct
  source 1..21: mol_type = other RNA
tgaaattagctaagtatgcag

SEQ ID NO: 101581 - RNA, 21 nt, synthetic construct
  source 1..21: mol_type = other RNA
tgaaattagttccttttaagg

SEQ ID NO: 101582 - RNA, 21 nt, synthetic construct
  source 1..21: mol_type = other RNA
tgaaattctcaaatgaacagg

SEQ ID NO: 101583 - RNA, 21 nt, synthetic construct
  source 1..21: mol_type = other RNA
tgaaattcttgggtgaataac

SEQ ID NO: 101584 - RNA, 21 nt, synthetic construct
  source 1..21: mol_type = other RNA
tgaaattgaccattccacgct

SEQ ID NO: 101585 - RNA, 21 nt, synthetic construct
  source 1..21: mol_type = other RNA
tgaaattgacttcactagatc

SEQ ID NO: 101586 - RNA, 21 nt, synthetic construct
  source 1..21: mol_type = other RNA
tgaaattgtcagaaaagatca

SEQ ID NO: 101587 - RNA, 21 nt, synthetic construct
  source 1..21: mol_type = other RNA
tgaaatttaaagacgttcaga

SEQ ID NO: 101588 - RNA, 21 nt, synthetic construct
  source 1..21: mol_type = other RNA
tgaaatttgaggccctattca

SEQ ID NO: 101589 - RNA, 21 nt, synthetic construct
  source 1..21: mol_type = other RNA
tgaacaaaatttttgcaaacc

SEQ ID NO: 101590 - RNA, 21 nt, synthetic construct
  source 1..21: mol_type = other RNA
tgaacaaaggcaggagcagtg

SEQ ID NO: 101591 - RNA, 21 nt, synthetic construct
  source 1..21: mol_type = other RNA
tgaacaacgctgtggctaaca

SEQ ID NO: 101592 - RNA, 21 nt, synthetic construct
  source 1..21: mol_type = other RNA
tgaacaagagcgtcgtacctt

SEQ ID NO: 101593 - RNA, 21 nt, synthetic construct
  source 1..21: mol_type = other RNA
tgaacaagttacaaacatatg

SEQ ID NO: 101594 - RNA, 21 nt, synthetic construct
  source 1..21: mol_type = other RNA
tgaacaatccttctaatcagt

SEQ ID NO: 101595 - RNA, 21 nt, synthetic construct
  source 1..21: mol_type = other RNA
tgaacaattttctctcatgtt

SEQ ID NO: 101596 - RNA, 21 nt, synthetic construct
  source 1..21: mol_type = other RNA
tgaacactctgcaattttaaa

SEQ ID NO: 101597 - RNA, 21 nt, synthetic construct
  source 1..21: mol_type = other RNA
tgaacagacagacatgcatgc

SEQ ID NO: 101598 - RNA, 21 nt, synthetic construct
  source 1..21: mol_type = other RNA
tgaacagcctaaagtccacag

SEQ ID NO: 101599 - RNA, 21 nt, synthetic construct
  source 1..21: mol_type = other RNA
tgaacaggcaaccttgggaga

SEQ ID NO: 101600 - RNA, 21 nt, synthetic construct
  source 1..21: mol_type = other RNA
tgaacaggttcttcatcagtc

SEQ ID NO: 101601 - RNA, 21 nt, synthetic construct
  source 1..21: mol_type = other RNA
tgaacatcacccagctcgacc

SEQ ID NO: 101602 - RNA, 21 nt, synthetic construct
  source 1..21: mol_type = other RNA
tgaacatgaacgagaacaaaa

SEQ ID NO: 101603 - RNA, 21 nt, synthetic construct
  source 1..21: mol_type = other RNA
tgaacatgggaatgcatatat

SEQ ID NO: 101604 - RNA, 21 nt, synthetic construct
  source 1..21: mol_type = other RNA
tgaacatggtttgatcccact

SEQ ID NO: 101605 - RNA, 21 nt, synthetic construct
  source 1..21: mol_type = other RNA
tgaacatgtatgtttctcatt

SEQ ID NO: 101606 - RNA, 21 nt, synthetic construct
  source 1..21: mol_type = other RNA
tgaacattctgtagaagtaaa

SEQ ID NO: 101607 - RNA, 21 nt, synthetic construct
  source 1..21: mol_type = other RNA
tgaacatttatacagttggaa

SEQ ID NO: 101608 - RNA, 21 nt, synthetic construct
  source 1..21: mol_type = other RNA
tgaacattttagctggggcag

SEQ ID NO: 101609 - RNA, 21 nt, synthetic construct
  source 1..21: mol_type = other RNA
tgaacattttgagttattgca

SEQ ID NO: 101610 - RNA, 21 nt, synthetic construct
  source 1..21: mol_type = other RNA
tgaaccaaaaaccacatttca

SEQ ID NO: 101611 - RNA, 21 nt, synthetic construct
  source 1..21: mol_type = other RNA
tgaaccaaacttggtttattt

SEQ ID NO: 101612 - RNA, 21 nt, synthetic construct
  source 1..21: mol_type = other RNA
tgaaccacactgacaggacag

SEQ ID NO: 101613 - RNA, 21 nt, synthetic construct
  source 1..21: mol_type = other RNA
tgaaccacgcatctggtctat

SEQ ID NO: 101614 - RNA, 21 nt, synthetic construct
  source 1..21: mol_type = other RNA
tgaaccattgtaaaccatatg

SEQ ID NO: 101615 - RNA, 21 nt, synthetic construct
  source 1..21: mol_type = other RNA
tgaacccaccaggaggcggag

SEQ ID NO: 101616 - RNA, 21 nt, synthetic construct
  source 1..21: mol_type = other RNA
tgaacccactgagcatttata

SEQ ID NO: 101617 - RNA, 21 nt, synthetic construct
  source 1..21: mol_type = other RNA
tgaacccaggaggcaaaggtt

SEQ ID NO: 101618 - RNA, 21 nt, synthetic construct
  source 1..21: mol_type = other RNA
tgaaccccagaaggttaacta

SEQ ID NO: 101619 - RNA, 21 nt, synthetic construct
  source 1..21: mol_type = other RNA
tgaacccgaggtgcacaaggg

SEQ ID NO: 101620 - RNA, 21 nt, synthetic construct
  source 1..21: mol_type = other RNA
tgaacctgaaaaacggaggtt

SEQ ID NO: 101621 - RNA, 21 nt, synthetic construct
  source 1..21: mol_type = other RNA
tgaacctgcatggtgtaaaat

SEQ ID NO: 101622 - RNA, 21 nt, synthetic construct
  source 1..21: mol_type = other RNA
tgaacctgctttctactagta

SEQ ID NO: 101623 - RNA, 21 nt, synthetic construct
  source 1..21: mol_type = other RNA
tgaaccttcaccaaagattta

SEQ ID NO: 101624 - RNA, 21 nt, synthetic construct
  source 1..21: mol_type = other RNA
tgaaccttcctcttcctcatc

SEQ ID NO: 101625 - RNA, 21 nt, synthetic construct
  source 1..21: mol_type = other RNA
tgaaccttgaagtacttcagc

SEQ ID NO: 101626 - RNA, 21 nt, synthetic construct
  source 1..21: mol_type = other RNA
tgaacgaatgaaaacacaaca

SEQ ID NO: 101627 - RNA, 21 nt, synthetic construct
  source 1..21: mol_type = other RNA
tgaacgagaacaaaacaagaa

SEQ ID NO: 101628 - RNA, 21 nt, synthetic construct
  source 1..21: mol_type = other RNA
tgaacgatggtttctgacacc

SEQ ID NO: 101629 - RNA, 21 nt, synthetic construct
  source 1..21: mol_type = other RNA
tgaacgctaaattaaaggctg

SEQ ID NO: 101630 - RNA, 21 nt, synthetic construct
  source 1..21: mol_type = other RNA
tgaactaagtgtgaagattaa

SEQ ID NO: 101631 - RNA, 21 nt, synthetic construct
  source 1..21: mol_type = other RNA
tgaactacacagacatgaaca

SEQ ID NO: 101632 - RNA, 21 nt, synthetic construct
  source 1..21: mol_type = other RNA
tgaactacagtgtttagggac

SEQ ID NO: 101633 - RNA, 21 nt, synthetic construct
  source 1..21: mol_type = other RNA
tgaactcaaaagtgaatcact

SEQ ID NO: 101634 - RNA, 21 nt, synthetic construct
  source 1..21: mol_type = other RNA
tgaactcactggccagcatta

SEQ ID NO: 101635 - RNA, 21 nt, synthetic construct
  source 1..21: mol_type = other RNA
tgaactcccagaactcgaagc

SEQ ID NO: 101636 - RNA, 21 nt, synthetic construct
  source 1..21: mol_type = other RNA
tgaactcctatagttaagtct

SEQ ID NO: 101637 - RNA, 21 nt, synthetic construct
  source 1..21: mol_type = other RNA
tgaactcctttcttaccctca

SEQ ID NO: 101638 - RNA, 21 nt, synthetic construct
  source 1..21: mol_type = other RNA
tgaactcgtggcctcaagcag

SEQ ID NO: 101639 - RNA, 21 nt, synthetic construct
  source 1..21: mol_type = other RNA
tgaactctgtggagtcctgtc

SEQ ID NO: 101640 - RNA, 21 nt, synthetic construct
  source 1..21: mol_type = other RNA
tgaactgctgacagattaaat

SEQ ID NO: 101641 - RNA, 21 nt, synthetic construct
  source 1..21: mol_type = other RNA
tgaactgctggtctggaatgt

SEQ ID NO: 101642 - RNA, 21 nt, synthetic construct
  source 1..21: mol_type = other RNA
tgaactgggacttctagcctc

SEQ ID NO: 101643 - RNA, 21 nt, synthetic construct
  source 1..21: mol_type = other RNA
tgaactgggtgtagggggaaa

SEQ ID NO: 101644 - RNA, 21 nt, synthetic construct
  source 1..21: mol_type = other RNA
tgaactgttacttgactattt

SEQ ID NO: 101645 - RNA, 21 nt, synthetic construct
  source 1..21: mol_type = other RNA
tgaacttatataaatgctcag

SEQ ID NO: 101646 - RNA, 21 nt, synthetic construct
  source 1..21: mol_type = other RNA
tgaacttgtcacaaaatgtgg

SEQ ID NO: 101647 - RNA, 21 nt, synthetic construct
  source 1..21: mol_type = other RNA
tgaactttcaacctaacatgt

SEQ ID NO: 101648 - RNA, 21 nt, synthetic construct
  source 1..21: mol_type = other RNA
tgaactttccagaagtaactc

SEQ ID NO: 101649 - RNA, 21 nt, synthetic construct
  source 1..21: mol_type = other RNA
tgaactttcgaagtgggaagc

SEQ ID NO: 101650 - RNA, 21 nt, synthetic construct
  source 1..21: mol_type = other RNA
tgaagaaaacactccagaatg

SEQ ID NO: 101651 - RNA, 21 nt, synthetic construct
  source 1..21: mol_type = other RNA
tgaagaaaatccaagaagaca

SEQ ID NO: 101652 - RNA, 21 nt, synthetic construct
  source 1..21: mol_type = other RNA
tgaagaaaccaagagcataga

SEQ ID NO: 101653 - RNA, 21 nt, synthetic construct
  source 1..21: mol_type = other RNA
tgaagaaacctttctcaaagc

SEQ ID NO: 101654 - RNA, 21 nt, synthetic construct
  source 1..21: mol_type = other RNA
tgaagaaagtaggaattaaac

SEQ ID NO: 101655 - RNA, 21 nt, synthetic construct
  source 1..21: mol_type = other RNA
tgaagaaagttttgcagttgg

SEQ ID NO: 101656 - RNA, 21 nt, synthetic construct
  source 1..21: mol_type = other RNA
tgaagaaatagaaaacttgag

SEQ ID NO: 101657 - RNA, 21 nt, synthetic construct
  source 1..21: mol_type = other RNA
tgaagaaattatctgtgggtt

SEQ ID NO: 101658 - RNA, 21 nt, synthetic construct
  source 1..21: mol_type = other RNA
tgaagaaccgactgaaaggaa

SEQ ID NO: 101659 - RNA, 21 nt, synthetic construct
  source 1..21: mol_type = other RNA
tgaagaacctgttcatttgag

SEQ ID NO: 101660 - RNA, 21 nt, synthetic construct
  source 1..21: mol_type = other RNA
tgaagaaggaatgtgcactct

SEQ ID NO: 101661 - RNA, 21 nt, synthetic construct
  source 1..21: mol_type = other RNA
tgaagaataactgtcctgaat

SEQ ID NO: 101662 - RNA, 21 nt, synthetic construct
  source 1..21: mol_type = other RNA
tgaagacatgctgaggcccca

SEQ ID NO: 101663 - RNA, 21 nt, synthetic construct
  source 1..21: mol_type = other RNA
tgaagacctgcagtctgcagg

SEQ ID NO: 101664 - RNA, 21 nt, synthetic construct
  source 1..21: mol_type = other RNA
tgaagactggatttgattggg

SEQ ID NO: 101665 - RNA, 21 nt, synthetic construct
  source 1..21: mol_type = other RNA
tgaagagagcctgtggtctct

SEQ ID NO: 101666 - RNA, 21 nt, synthetic construct
  source 1..21: mol_type = other RNA
tgaagagcgcttctatgtgac

SEQ ID NO: 101667 - RNA, 21 nt, synthetic construct
  source 1..21: mol_type = other RNA
tgaagaggctttctgtgtaat

SEQ ID NO: 101668 - RNA, 21 nt, synthetic construct
  source 1..21: mol_type = other RNA
tgaagagggaacattttcatt

SEQ ID NO: 101669 - RNA, 21 nt, synthetic construct
  source 1..21: mol_type = other RNA
tgaagagtctatctttgggaa

SEQ ID NO: 101670 - RNA, 21 nt, synthetic construct
  source 1..21: mol_type = other RNA
tgaagatgctgaacttgtcac

SEQ ID NO: 101671 - RNA, 21 nt, synthetic construct
  source 1..21: mol_type = other RNA
tgaagatggagttacgctgcc

SEQ ID NO: 101672 - RNA, 21 nt, synthetic construct
  source 1..21: mol_type = other RNA
tgaagatggcaaacagactga

SEQ ID NO: 101673 - RNA, 21 nt, synthetic construct
  source 1..21: mol_type = other RNA
tgaagatggcctccctcacta

SEQ ID NO: 101674 - RNA, 21 nt, synthetic construct
  source 1..21: mol_type = other RNA
tgaagattaagcacatctgtc

SEQ ID NO: 101675 - RNA, 21 nt, synthetic construct
  source 1..21: mol_type = other RNA
tgaagattagaaaattagctg

SEQ ID NO: 101676 - RNA, 21 nt, synthetic construct
  source 1..21: mol_type = other RNA
tgaagcagagagagaagatga

SEQ ID NO: 101677 - RNA, 21 nt, synthetic construct
  source 1..21: mol_type = other RNA
tgaagcaggccttcgaggcat

SEQ ID NO: 101678 - RNA, 21 nt, synthetic construct
  source 1..21: mol_type = other RNA
tgaagcaggctttttacccgg

SEQ ID NO: 101679 - RNA, 21 nt, synthetic construct
  source 1..21: mol_type = other RNA
tgaagcagggaaatggagggc

SEQ ID NO: 101680 - RNA, 21 nt, synthetic construct
  source 1..21: mol_type = other RNA
tgaagcattaatgcaacctgc

SEQ ID NO: 101681 - RNA, 21 nt, synthetic construct
  source 1..21: mol_type = other RNA
tgaagccagcacctaacaatg

SEQ ID NO: 101682 - RNA, 21 nt, synthetic construct
  source 1..21: mol_type = other RNA
tgaagccagtccttgtgatct

SEQ ID NO: 101683 - RNA, 21 nt, synthetic construct
  source 1..21: mol_type = other RNA
tgaagcccagagaggctaggt

SEQ ID NO: 101684 - RNA, 21 nt, synthetic construct
  source 1..21: mol_type = other RNA
tgaagccctctaagtcagcct

SEQ ID NO: 101685 - RNA, 21 nt, synthetic construct
  source 1..21: mol_type = other RNA
tgaagcggggctgccactact

SEQ ID NO: 101686 - RNA, 21 nt, synthetic construct
  source 1..21: mol_type = other RNA
tgaagctacagactaatatga

SEQ ID NO: 101687 - RNA, 21 nt, synthetic construct
  source 1..21: mol_type = other RNA
tgaagctactattccaggatc

SEQ ID NO: 101688 - RNA, 21 nt, synthetic construct
  source 1..21: mol_type = other RNA
tgaagctctagtgagctatga

SEQ ID NO: 101689 - RNA, 21 nt, synthetic construct
  source 1..21: mol_type = other RNA
tgaagctggacccttacctta

SEQ ID NO: 101690 - RNA, 21 nt, synthetic construct
  source 1..21: mol_type = other RNA
tgaagcttcaaaccactatct

SEQ ID NO: 101691 - RNA, 21 nt, synthetic construct
  source 1..21: mol_type = other RNA
tgaagcttcacttctctgctg

SEQ ID NO: 101692 - RNA, 21 nt, synthetic construct
  source 1..21: mol_type = other RNA
tgaagcttttctcctaagtct

SEQ ID NO: 101693 - RNA, 21 nt, synthetic construct
  source 1..21: mol_type = other RNA
tgaaggaaaaaacgggttata

SEQ ID NO: 101694 - RNA, 21 nt, synthetic construct
  source 1..21: mol_type = other RNA
tgaaggaaggattggaatgag

SEQ ID NO: 101695 - RNA, 21 nt, synthetic construct
  source 1..21: mol_type = other RNA
tgaaggattcctccctggaga

SEQ ID NO: 101696 - RNA, 21 nt, synthetic construct
  source 1..21: mol_type = other RNA
tgaaggcaatgtagggaatag

SEQ ID NO: 101697 - RNA, 21 nt, synthetic construct
  source 1..21: mol_type = other RNA
tgaaggcactaacaaagggcc

SEQ ID NO: 101698 - RNA, 21 nt, synthetic construct
  source 1..21: mol_type = other RNA
tgaaggcactgtatggttctt

SEQ ID NO: 101699 - RNA, 21 nt, synthetic construct
  source 1..21: mol_type = other RNA
tgaaggcagaattatagaggg

SEQ ID NO: 101700 - RNA, 21 nt, synthetic construct
  source 1..21: mol_type = other RNA
tgaaggcatagggccttctac

SEQ ID NO: 101701 - RNA, 21 nt, synthetic construct
  source 1..21: mol_type = other RNA
tgaaggctcagcccctcatcc

SEQ ID NO: 101702 - RNA, 21 nt, synthetic construct
  source 1..21: mol_type = other RNA
tgaagggaattttactgatct

SEQ ID NO: 101703 - RNA, 21 nt, synthetic construct
  source 1..21: mol_type = other RNA
tgaagggaggaaaaaacagtt

SEQ ID NO: 101704 - RNA, 21 nt, synthetic construct
  source 1..21: mol_type = other RNA
tgaagggaggtaggcttagat

SEQ ID NO: 101705 - RNA, 21 nt, synthetic construct
  source 1..21: mol_type = other RNA
tgaagggttttctgtagaata

SEQ ID NO: 101706 - RNA, 21 nt, synthetic construct
  source 1..21: mol_type = other RNA
tgaaggtgcctgccatagagg

SEQ ID NO: 101707 - RNA, 21 nt, synthetic construct
  source 1..21: mol_type = other RNA
tgaaggttcatgaacataaat

SEQ ID NO: 101708 - RNA, 21 nt, synthetic construct
  source 1..21: mol_type = other RNA
tgaagtaataaagcaagtatg

SEQ ID NO: 101709 - RNA, 21 nt, synthetic construct
  source 1..21: mol_type = other RNA
tgaagtacttcaaggttcaca

SEQ ID NO: 101710 - RNA, 21 nt, synthetic construct
  source 1..21: mol_type = other RNA
tgaagtacttcagcgcttgaa

SEQ ID NO: 101711 - RNA, 21 nt, synthetic construct
  source 1..21: mol_type = other RNA
tgaagtatagaaaggagacca

SEQ ID NO: 101712 - RNA, 21 nt, synthetic construct
  source 1..21: mol_type = other RNA
tgaagtatgtaattacagggg

SEQ ID NO: 101713 - RNA, 21 nt, synthetic construct
  source 1..21: mol_type = other RNA
tgaagtattgatttgaccatg

SEQ ID NO: 101714 - RNA, 21 nt, synthetic construct
  source 1..21: mol_type = other RNA
tgaagtcaagatgaatctgca

SEQ ID NO: 101715 - RNA, 21 nt, synthetic construct
  source 1..21: mol_type = other RNA
tgaagtcaatttcagatctct

SEQ ID NO: 101716 - RNA, 21 nt, synthetic construct
  source 1..21: mol_type = other RNA
tgaagtcagagattttcccaa

SEQ ID NO: 101717 - RNA, 21 nt, synthetic construct
  source 1..21: mol_type = other RNA
tgaagtcagttacagcatttc

SEQ ID NO: 101718 - RNA, 21 nt, synthetic construct
  source 1..21: mol_type = other RNA
tgaagtcatctggtcctgagc

SEQ ID NO: 101719 - RNA, 21 nt, synthetic construct
  source 1..21: mol_type = other RNA
tgaagtcccatcttccatacg

SEQ ID NO: 101720 - RNA, 21 nt, synthetic construct
  source 1..21: mol_type = other RNA
tgaagtcctcaatcatgtcaa

SEQ ID NO: 101721 - RNA, 21 nt, synthetic construct
  source 1..21: mol_type = other RNA
tgaagtcctttcttggtctgc

SEQ ID NO: 101722 - RNA, 21 nt, synthetic construct
  source 1..21: mol_type = other RNA
tgaagtctttggcccattttc

SEQ ID NO: 101723 - RNA, 21 nt, synthetic construct
  source 1..21: mol_type = other RNA
tgaagtctttggtgatcctaa

SEQ ID NO: 101724 - RNA, 21 nt, synthetic construct
  source 1..21: mol_type = other RNA
tgaagtgttgagaggctttaa

SEQ ID NO: 101725 - RNA, 21 nt, synthetic construct
  source 1..21: mol_type = other RNA
tgaagttaagggccatttcat

SEQ ID NO: 101726 - RNA, 21 nt, synthetic construct
  source 1..21: mol_type = other RNA
tgaagttctcaggggtaaagg

SEQ ID NO: 101727 - RNA, 21 nt, synthetic construct
  source 1..21: mol_type = other RNA
tgaagttgggcttaacatttg

SEQ ID NO: 101728 - RNA, 21 nt, synthetic construct
  source 1..21: mol_type = other RNA
tgaagtttatcagtctccaat

SEQ ID NO: 101729 - RNA, 21 nt, synthetic construct
  source 1..21: mol_type = other RNA
tgaataaaccacgcagtttgt

SEQ ID NO: 101730 - RNA, 21 nt, synthetic construct
  source 1..21: mol_type = other RNA
tgaataaagggtcagaatttt

SEQ ID NO: 101731 - RNA, 21 nt, synthetic construct
  source 1..21: mol_type = other RNA
tgaataaccaatgtcagagat

SEQ ID NO: 101732 - RNA, 21 nt, synthetic construct
  source 1..21: mol_type = other RNA
tgaataacccatatctttgct

SEQ ID NO: 101733 - RNA, 21 nt, synthetic construct
  source 1..21: mol_type = other RNA
tgaataacctcataagaactc

SEQ ID NO: 101734 - RNA, 21 nt, synthetic construct
  source 1..21: mol_type = other RNA
tgaataaggtctgtaagtcag

SEQ ID NO: 101735 - RNA, 21 nt, synthetic construct
  source 1..21: mol_type = other RNA
tgaataatttccaggtcatta

SEQ ID NO: 101736 - RNA, 21 nt, synthetic construct
  source 1..21: mol_type = other RNA
tgaatacaaaggtgttaagcc

SEQ ID NO: 101737 - RNA, 21 nt, synthetic construct
  source 1..21: mol_type = other RNA
tgaatacccctccctacctgg

SEQ ID NO: 101738 - RNA, 21 nt, synthetic construct
  source 1..21: mol_type = other RNA
tgaatacctatttagagggat

SEQ ID NO: 101739 - RNA, 21 nt, synthetic construct
  source 1..21: mol_type = other RNA
tgaatactcgtgtgtctcata

SEQ ID NO: 101740 - RNA, 21 nt, synthetic construct
  source 1..21: mol_type = other RNA
tgaatagaaaatccttacttc

SEQ ID NO: 101741 - RNA, 21 nt, synthetic construct
  source 1..21: mol_type = other RNA
tgaatagcaactgttttttcc

SEQ ID NO: 101742 - RNA, 21 nt, synthetic construct
  source 1..21: mol_type = other RNA
tgaatagcatcttagctcttc

SEQ ID NO: 101743 - RNA, 21 nt, synthetic construct
  source 1..21: mol_type = other RNA
tgaataggaaagtgacagatg

SEQ ID NO: 101744 - RNA, 21 nt, synthetic construct
  source 1..21: mol_type = other RNA
tgaatagggcctcaaatttca

SEQ ID NO: 101745 - RNA, 21 nt, synthetic construct
  source 1..21: mol_type = other RNA
tgaataggtgtgtgttccttc

SEQ ID NO: 101746 - RNA, 21 nt, synthetic construct
  source 1..21: mol_type = other RNA
tgaatatactggaaaactaga

SEQ ID NO: 101747 - RNA, 21 nt, synthetic construct
  source 1..21: mol_type = other RNA
tgaatatagctaagaaacagt

SEQ ID NO: 101748 - RNA, 21 nt, synthetic construct
  source 1..21: mol_type = other RNA
tgaatatcatttgaatgatgc

SEQ ID NO: 101749 - RNA, 21 nt, synthetic construct
  source 1..21: mol_type = other RNA
tgaatatgtactacctataga

SEQ ID NO: 101750 - RNA, 21 nt, synthetic construct
  source 1..21: mol_type = other RNA
tgaatattcgttccagcaggg

SEQ ID NO: 101751 - RNA, 21 nt, synthetic construct
  source 1..21: mol_type = other RNA
tgaatcacctcaaggcagaac

SEQ ID NO: 101752 - RNA, 21 nt, synthetic construct
  source 1..21: mol_type = other RNA
tgaatcactacagcatattag

SEQ ID NO: 101753 - RNA, 21 nt, synthetic construct
  source 1..21: mol_type = other RNA
tgaatcagacaacacattaat

SEQ ID NO: 101754 - RNA, 21 nt, synthetic construct
  source 1..21: mol_type = other RNA
tgaatcatgggagccaaactt

SEQ ID NO: 101755 - RNA, 21 nt, synthetic construct
  source 1..21: mol_type = other RNA
tgaatctagaaagataaatcc

SEQ ID NO: 101756 - RNA, 21 nt, synthetic construct
  source 1..21: mol_type = other RNA
tgaatctctctatccaccact

SEQ ID NO: 101757 - RNA, 21 nt, synthetic construct
  source 1..21: mol_type = other RNA
tgaatctgagtaaagggtaag

SEQ ID NO: 101758 - RNA, 21 nt, synthetic construct
  source 1..21: mol_type = other RNA
tgaatctgcaactatcaaaac

SEQ ID NO: 101759 - RNA, 21 nt, synthetic construct
  source 1..21: mol_type = other RNA
tgaatctgtagattgttttag

SEQ ID NO: 101760 - RNA, 21 nt, synthetic construct
  source 1..21: mol_type = other RNA
tgaatctgttcctgggttctc

SEQ ID NO: 101761 - RNA, 21 nt, synthetic construct
  source 1..21: mol_type = other RNA
tgaatcttaacatttctcatg

SEQ ID NO: 101762 - RNA, 21 nt, synthetic construct
  source 1..21: mol_type = other RNA
tgaatgaacaaaatgtggtat

SEQ ID NO: 101763 - RNA, 21 nt, synthetic construct
  source 1..21: mol_type = other RNA
tgaatgactgttgcctctgtg

SEQ ID NO: 101764 - RNA, 21 nt, synthetic construct
  source 1..21: mol_type = other RNA
tgaatgagaccaaatgcataa

SEQ ID NO: 101765 - RNA, 21 nt, synthetic construct
  source 1..21: mol_type = other RNA
tgaatgagcaaggtcgtttca

SEQ ID NO: 101766 - RNA, 21 nt, synthetic construct
  source 1..21: mol_type = other RNA
tgaatgaggagtgaatttttc

SEQ ID NO: 101767 - RNA, 21 nt, synthetic construct
  source 1..21: mol_type = other RNA
tgaatgatgccatcacatttt

SEQ ID NO: 101768 - RNA, 21 nt, synthetic construct
  source 1..21: mol_type = other RNA
tgaatgatgcgaaagaaaaaa

SEQ ID NO: 101769 - RNA, 21 nt, synthetic construct
  source 1..21: mol_type = other RNA
tgaatgatttccctgcataca

SEQ ID NO: 101770 - RNA, 21 nt, synthetic construct
  source 1..21: mol_type = other RNA
tgaatgcacgtgaagctacag

SEQ ID NO: 101771 - RNA, 21 nt, synthetic construct
  source 1..21: mol_type = other RNA
tgaatgcagtggcttcctaac

SEQ ID NO: 101772 - RNA, 21 nt, synthetic construct
  source 1..21: mol_type = other RNA
tgaatggaaaattcaaacatg

SEQ ID NO: 101773 - RNA, 21 nt, synthetic construct
  source 1..21: mol_type = other RNA
tgaatggaaaattcttggtct

SEQ ID NO: 101774 - RNA, 21 nt, synthetic construct
  source 1..21: mol_type = other RNA
tgaatggaaagaaatagaact

SEQ ID NO: 101775 - RNA, 21 nt, synthetic construct
  source 1..21: mol_type = other RNA
tgaatggaaatgtaaattcct

SEQ ID NO: 101776 - RNA, 21 nt, synthetic construct
  source 1..21: mol_type = other RNA
tgaatggataaggaaaatatg

SEQ ID NO: 101777 - RNA, 21 nt, synthetic construct
  source 1..21: mol_type = other RNA
tgaatggggatgcaacaaatg

SEQ ID NO: 101778 - RNA, 21 nt, synthetic construct
  source 1..21: mol_type = other RNA
tgaatggggtaattttggggc

SEQ ID NO: 101779 - RNA, 21 nt, synthetic construct
  source 1..21: mol_type = other RNA
tgaatgtgaggtgaggacatg

SEQ ID NO: 101780 - RNA, 21 nt, synthetic construct
  source 1..21: mol_type = other RNA
tgaatgtgcctacatagtcca

SEQ ID NO: 101781 - RNA, 21 nt, synthetic construct
  source 1..21: mol_type = other RNA
tgaatgtggcagaatttacat

SEQ ID NO: 101782 - RNA, 21 nt, synthetic construct
  source 1..21: mol_type = other RNA
tgaattaagcaccactagagt

SEQ ID NO: 101783 - RNA, 21 nt, synthetic construct
  source 1..21: mol_type = other RNA
tgaattaatctcttacacctg

SEQ ID NO: 101784 - RNA, 21 nt, synthetic construct
  source 1..21: mol_type = other RNA
tgaattacaaatgaaagtcag

SEQ ID NO: 101785 - RNA, 21 nt, synthetic construct
  source 1..21: mol_type = other RNA
tgaattagatggcttaggatc

SEQ ID NO: 101786 - RNA, 21 nt, synthetic construct
  source 1..21: mol_type = other RNA
tgaattagcaatgcgaatcat

SEQ ID NO: 101787 - RNA, 21 nt, synthetic construct
  source 1..21: mol_type = other RNA
tgaattagtgattttaccaag

SEQ ID NO: 101788 - RNA, 21 nt, synthetic construct
  source 1..21: mol_type = other RNA
tgaattcacagtagaagactc

SEQ ID NO: 101789 - RNA, 21 nt, synthetic construct
  source 1..21: mol_type = other RNA
tgaattcactaatgcctcaaa

SEQ ID NO: 101790 - RNA, 21 nt, synthetic construct
  source 1..21: mol_type = other RNA
tgaattcagatggccccaaaa

SEQ ID NO: 101791 - RNA, 21 nt, synthetic construct
  source 1..21: mol_type = other RNA
tgaattcccacaaaatatgaa

SEQ ID NO: 101792 - RNA, 21 nt, synthetic construct
  source 1..21: mol_type = other RNA
tgaattctaatgaactcccag

SEQ ID NO: 101793 - RNA, 21 nt, synthetic construct
  source 1..21: mol_type = other RNA
tgaattctctggaatagaaga

SEQ ID NO: 101794 - RNA, 21 nt, synthetic construct
  source 1..21: mol_type = other RNA
tgaattctgacttagtgaggg

SEQ ID NO: 101795 - RNA, 21 nt, synthetic construct
  source 1..21: mol_type = other RNA
tgaattctgcttattatatgc

SEQ ID NO: 101796 - RNA, 21 nt, synthetic construct
  source 1..21: mol_type = other RNA
tgaattcttgacctcaaatga

SEQ ID NO: 101797 - RNA, 21 nt, synthetic construct
  source 1..21: mol_type = other RNA
tgaattgagatgtactggaag

SEQ ID NO: 101798 - RNA, 21 nt, synthetic construct
  source 1..21: mol_type = other RNA
tgaattgtgacagttctattt

SEQ ID NO: 101799 - RNA, 21 nt, synthetic construct
  source 1..21: mol_type = other RNA
tgaattgttgcgcgtcaaaag

SEQ ID NO: 101800 - RNA, 21 nt, synthetic construct
  source 1..21: mol_type = other RNA
tgaattgttggagttctttat

SEQ ID NO: 101801 - RNA, 21 nt, synthetic construct
  source 1..21: mol_type = other RNA
tgaatttaagacacaaggaag

SEQ ID NO: 101802 - RNA, 21 nt, synthetic construct
  source 1..21: mol_type = other RNA
tgaatttaattttgagagtgc

SEQ ID NO: 101803 - RNA, 21 nt, synthetic construct
  source 1..21: mol_type = other RNA
tgaatttctgtccttggattg

SEQ ID NO: 101804 - RNA, 21 nt, synthetic construct
  source 1..21: mol_type = other RNA
tgaatttgcctattctggggc

SEQ ID NO: 101805 - RNA, 21 nt, synthetic construct
  source 1..21: mol_type = other RNA
tgaatttggaaagggtagagc

SEQ ID NO: 101806 - RNA, 21 nt, synthetic construct
  source 1..21: mol_type = other RNA
tgaatttggatttgagtaact

SEQ ID NO: 101807 - RNA, 21 nt, synthetic construct
  source 1..21: mol_type = other RNA
tgaatttggtattcttatccc

SEQ ID NO: 101808 - RNA, 21 nt, synthetic construct
  source 1..21: mol_type = other RNA
tgaattttccattcacacacc

SEQ ID NO: 101809 - RNA, 21 nt, synthetic construct
  source 1..21: mol_type = other RNA
tgacaaaaagtaggggtaaat

SEQ ID NO: 101810 - RNA, 21 nt, synthetic construct
  source 1..21: mol_type = other RNA
tgacaaaaggccccttgaaag

SEQ ID NO: 101811 - RNA, 21 nt, synthetic construct
  source 1..21: mol_type = other RNA
tgacaaacacttttcaaacac

SEQ ID NO: 101812 - RNA, 21 nt, synthetic construct
  source 1..21: mol_type = other RNA
tgacaaagtatgagaaatgtc

SEQ ID NO: 101813 - RNA, 21 nt, synthetic construct
  source 1..21: mol_type = other RNA
tgacaactgggagaatggcaa

SEQ ID NO: 101814 - RNA, 21 nt, synthetic construct
  source 1..21: mol_type = other RNA
tgacaagaatctttggcaaac

SEQ ID NO: 101815 - RNA, 21 nt, synthetic construct
  source 1..21: mol_type = other RNA
tgacaagacgtgtacataaaa

SEQ ID NO: 101816 - RNA, 21 nt, synthetic construct
  source 1..21: mol_type = other RNA
tgacaagactacctaaaacaa

SEQ ID NO: 101817 - RNA, 21 nt, synthetic construct
  source 1..21: mol_type = other RNA
tgacaagtaaatgcaatgcag

SEQ ID NO: 101818 - RNA, 21 nt, synthetic construct
  source 1..21: mol_type = other RNA
tgacaagtagtacaaaagtgc

SEQ ID NO: 101819 - RNA, 21 nt, synthetic construct
  source 1..21: mol_type = other RNA
tgacaagttcagcatcttcac

SEQ ID NO: 101820 - RNA, 21 nt, synthetic construct
  source 1..21: mol_type = other RNA
tgacaataaatggtgcaggcc

SEQ ID NO: 101821 - RNA, 21 nt, synthetic construct
  source 1..21: mol_type = other RNA
tgacaataataactacacatc

SEQ ID NO: 101822 - RNA, 21 nt, synthetic construct
  source 1..21: mol_type = other RNA
tgacaatagccaagacatgga

SEQ ID NO: 101823 - RNA, 21 nt, synthetic construct
  source 1..21: mol_type = other RNA
tgacaatataggagactatcg

SEQ ID NO: 101824 - RNA, 21 nt, synthetic construct
  source 1..21: mol_type = other RNA
tgacaatttcagggagaattg

SEQ ID NO: 101825 - RNA, 21 nt, synthetic construct
  source 1..21: mol_type = other RNA
tgacaatttgccaaaatgatt

SEQ ID NO: 101826 - RNA, 21 nt, synthetic construct
  source 1..21: mol_type = other RNA
tgacacaaaggactggaactc

SEQ ID NO: 101827 - RNA, 21 nt, synthetic construct
  source 1..21: mol_type = other RNA
tgacacaacttactactaaaa

SEQ ID NO: 101828 - RNA, 21 nt, synthetic construct
  source 1..21: mol_type = other RNA
tgacacaggctgaagggagga

SEQ ID NO: 101829 - RNA, 21 nt, synthetic construct
  source 1..21: mol_type = other RNA
tgacaccaaaactacaggcaa

SEQ ID NO: 101830 - RNA, 21 nt, synthetic construct
  source 1..21: mol_type = other RNA
tgacacccgaagaggacgatt

SEQ ID NO: 101831 - RNA, 21 nt, synthetic construct
  source 1..21: mol_type = other RNA
tgacacccgacccactagtga

SEQ ID NO: 101832 - RNA, 21 nt, synthetic construct
  source 1..21: mol_type = other RNA
tgacacctgaggggtcttatg

SEQ ID NO: 101833 - RNA, 21 nt, synthetic construct
  source 1..21: mol_type = other RNA
tgacagaacaaactcaagttc

SEQ ID NO: 101834 - RNA, 21 nt, synthetic construct
  source 1..21: mol_type = other RNA
tgacagaacaaataacaccat

SEQ ID NO: 101835 - RNA, 21 nt, synthetic construct
  source 1..21: mol_type = other RNA
tgacagaatgcatcttttaaa

SEQ ID NO: 101836 - RNA, 21 nt, synthetic construct
  source 1..21: mol_type = other RNA
tgacagagagagacctttctt

SEQ ID NO: 101837 - RNA, 21 nt, synthetic construct
  source 1..21: mol_type = other RNA
tgacagagccgagcagaaggg

SEQ ID NO: 101838 - RNA, 21 nt, synthetic construct
  source 1..21: mol_type = other RNA
tgacagagttccacctccatc

SEQ ID NO: 101839 - RNA, 21 nt, synthetic construct
  source 1..21: mol_type = other RNA
tgacagatcccaaaaaggttt

SEQ ID NO: 101840 - RNA, 21 nt, synthetic construct
  source 1..21: mol_type = other RNA
tgacagatgagaaatacttgg

SEQ ID NO: 101841 - RNA, 21 nt, synthetic construct
  source 1..21: mol_type = other RNA
tgacagatgagactcttaata

SEQ ID NO: 101842 - RNA, 21 nt, synthetic construct
  source 1..21: mol_type = other RNA
tgacagattaaataccacctg

SEQ ID NO: 101843 - RNA, 21 nt, synthetic construct
  source 1..21: mol_type = other RNA
tgacagcaaataaacaaaatc

SEQ ID NO: 101844 - RNA, 21 nt, synthetic construct
  source 1..21: mol_type = other RNA
tgacagccacgtgtattgagt

SEQ ID NO: 101845 - RNA, 21 nt, synthetic construct
  source 1..21: mol_type = other RNA
tgacagctgagtagcgcttta

SEQ ID NO: 101846 - RNA, 21 nt, synthetic construct
  source 1..21: mol_type = other RNA
tgacaggacagagcagtaggc

SEQ ID NO: 101847 - RNA, 21 nt, synthetic construct
  source 1..21: mol_type = other RNA
tgacaggactccacagagttc

SEQ ID NO: 101848 - RNA, 21 nt, synthetic construct
  source 1..21: mol_type = other RNA
tgacaggtgagtggactgtga

SEQ ID NO: 101849 - RNA, 21 nt, synthetic construct
  source 1..21: mol_type = other RNA
tgacaggtggtatgggagatg

SEQ ID NO: 101850 - RNA, 21 nt, synthetic construct
  source 1..21: mol_type = other RNA
tgacagtatgtcagactcatt

SEQ ID NO: 101851 - RNA, 21 nt, synthetic construct
  source 1..21: mol_type = other RNA
tgacagtggacaaaggttcca

SEQ ID NO: 101852 - RNA, 21 nt, synthetic construct
  source 1..21: mol_type = other RNA
tgacagttactctaaaagaat

SEQ ID NO: 101853 - RNA, 21 nt, synthetic construct
  source 1..21: mol_type = other RNA
tgacagttctatttctttcca

SEQ ID NO: 101854 - RNA, 21 nt, synthetic construct
  source 1..21: mol_type = other RNA
tgacagttctgtgaatttgat

SEQ ID NO: 101855 - RNA, 21 nt, synthetic construct
  source 1..21: mol_type = other RNA
tgacataactgtaaagtaatc

SEQ ID NO: 101856 - RNA, 21 nt, synthetic construct
  source 1..21: mol_type = other RNA
tgacatactgtcacaggcttt

SEQ ID NO: 101857 - RNA, 21 nt, synthetic construct
  source 1..21: mol_type = other RNA
tgacatatgccggctgttagg

SEQ ID NO: 101858 - RNA, 21 nt, synthetic construct
  source 1..21: mol_type = other RNA
tgacatatgttttgcttcgaa

SEQ ID NO: 101859 - RNA, 21 nt, synthetic construct
  source 1..21: mol_type = other RNA
tgacatcaagggtggtgctgg

SEQ ID NO: 101860 - RNA, 21 nt, synthetic construct
  source 1..21: mol_type = other RNA
tgacatcctttaatttgggtt

SEQ ID NO: 101861 - RNA, 21 nt, synthetic construct
  source 1..21: mol_type = other RNA
tgacatcctttgcgtctgtga

SEQ ID NO: 101862 - RNA, 21 nt, synthetic construct
  source 1..21: mol_type = other RNA
tgacatcttgcataactcgta

SEQ ID NO: 101863 - RNA, 21 nt, synthetic construct
  source 1..21: mol_type = other RNA
tgacatgacaggtgagtggac

SEQ ID NO: 101864 - RNA, 21 nt, synthetic construct
  source 1..21: mol_type = other RNA
tgacatgagagctaagggaag

SEQ ID NO: 101865 - RNA, 21 nt, synthetic construct
  source 1..21: mol_type = other RNA
tgacatgattgaggacttcat

SEQ ID NO: 101866 - RNA, 21 nt, synthetic construct
  source 1..21: mol_type = other RNA
tgacatggttttcctactaac

SEQ ID NO: 101867 - RNA, 21 nt, synthetic construct
  source 1..21: mol_type = other RNA
tgacatgtgtaaaacatctgg

SEQ ID NO: 101868 - RNA, 21 nt, synthetic construct
  source 1..21: mol_type = other RNA
tgacatgtgttttatttaggc

SEQ ID NO: 101869 - RNA, 21 nt, synthetic construct
  source 1..21: mol_type = other RNA
tgacattagtggtggtagtaa

SEQ ID NO: 101870 - RNA, 21 nt, synthetic construct
  source 1..21: mol_type = other RNA
tgacattcttaccttctaaaa

SEQ ID NO: 101871 - RNA, 21 nt, synthetic construct
  source 1..21: mol_type = other RNA
tgacattggttattcatgttt

SEQ ID NO: 101872 - RNA, 21 nt, synthetic construct
  source 1..21: mol_type = other RNA
tgacatttgcttttcctggaa

SEQ ID NO: 101873 - RNA, 21 nt, synthetic construct
  source 1..21: mol_type = other RNA
tgacatttttcaaatacctag

SEQ ID NO: 101874 - RNA, 21 nt, synthetic construct
  source 1..21: mol_type = other RNA
tgaccaaaacaaaaaacaaac

SEQ ID NO: 101875 - RNA, 21 nt, synthetic construct
  source 1..21: mol_type = other RNA
tgaccaaacatgtgaggattt

SEQ ID NO: 101876 - RNA, 21 nt, synthetic construct
  source 1..21: mol_type = other RNA
tgaccaactatttcactaaat

SEQ ID NO: 101877 - RNA, 21 nt, synthetic construct
  source 1..21: mol_type = other RNA
tgaccacagtttgaaacttta

SEQ ID NO: 101878 - RNA, 21 nt, synthetic construct
  source 1..21: mol_type = other RNA
tgaccacattcccaaatgtct

SEQ ID NO: 101879 - RNA, 21 nt, synthetic construct
  source 1..21: mol_type = other RNA
tgaccagatcaaacgtgcttt

SEQ ID NO: 101880 - RNA, 21 nt, synthetic construct
  source 1..21: mol_type = other RNA
tgaccagtgtgatgggggtaa

SEQ ID NO: 101881 - RNA, 21 nt, synthetic construct
  source 1..21: mol_type = other RNA
tgaccatctcagcacagagcc

SEQ ID NO: 101882 - RNA, 21 nt, synthetic construct
  source 1..21: mol_type = other RNA
tgaccatgggacaagtgggtg

SEQ ID NO: 101883 - RNA, 21 nt, synthetic construct
  source 1..21: mol_type = other RNA
tgaccattccacgctgtggct

SEQ ID NO: 101884 - RNA, 21 nt, synthetic construct
  source 1..21: mol_type = other RNA
tgaccattgtgtggacacact

SEQ ID NO: 101885 - RNA, 21 nt, synthetic construct
  source 1..21: mol_type = other RNA
tgaccatttttatatctttgg

SEQ ID NO: 101886 - RNA, 21 nt, synthetic construct
  source 1..21: mol_type = other RNA
tgacccaatcatgttctttat

SEQ ID NO: 101887 - RNA, 21 nt, synthetic construct
  source 1..21: mol_type = other RNA
tgacccactggtttcagtccc

SEQ ID NO: 101888 - RNA, 21 nt, synthetic construct
  source 1..21: mol_type = other RNA
tgacccagagcctaatgtgta

SEQ ID NO: 101889 - RNA, 21 nt, synthetic construct
  source 1..21: mol_type = other RNA
tgacccataaactgaacattt

SEQ ID NO: 101890 - RNA, 21 nt, synthetic construct
  source 1..21: mol_type = other RNA
tgaccctgagtccagaggtga

SEQ ID NO: 101891 - RNA, 21 nt, synthetic construct
  source 1..21: mol_type = other RNA
tgaccctgctatgcatacttt

SEQ ID NO: 101892 - RNA, 21 nt, synthetic construct
  source 1..21: mol_type = other RNA
tgaccctttattcaaagatca

SEQ ID NO: 101893 - RNA, 21 nt, synthetic construct
  source 1..21: mol_type = other RNA
tgaccctttgaagtatgtaat

SEQ ID NO: 101894 - RNA, 21 nt, synthetic construct
  source 1..21: mol_type = other RNA
tgaccgagatacttaagtttt

SEQ ID NO: 101895 - RNA, 21 nt, synthetic construct
  source 1..21: mol_type = other RNA
tgaccgctttcgtgagggttt

SEQ ID NO: 101896 - RNA, 21 nt, synthetic construct
  source 1..21: mol_type = other RNA
tgacctaaaatcttattcccc

SEQ ID NO: 101897 - RNA, 21 nt, synthetic construct
  source 1..21: mol_type = other RNA
tgacctaagcttgggtaggaa

SEQ ID NO: 101898 - RNA, 21 nt, synthetic construct
  source 1..21: mol_type = other RNA
tgacctatctattaacagaag

SEQ ID NO: 101899 - RNA, 21 nt, synthetic construct
  source 1..21: mol_type = other RNA
tgacctcaagcgatccagccg

SEQ ID NO: 101900 - RNA, 21 nt, synthetic construct
  source 1..21: mol_type = other RNA
tgacctcagtggtagttacac

SEQ ID NO: 101901 - RNA, 21 nt, synthetic construct
  source 1..21: mol_type = other RNA
tgacctcatgtaactaattac

SEQ ID NO: 101902 - RNA, 21 nt, synthetic construct
  source 1..21: mol_type = other RNA
tgacctcccaaaggactggga

SEQ ID NO: 101903 - RNA, 21 nt, synthetic construct
  source 1..21: mol_type = other RNA
tgacctcctcccacttacatc

SEQ ID NO: 101904 - RNA, 21 nt, synthetic construct
  source 1..21: mol_type = other RNA
tgacctctgcagttagcatgc

SEQ ID NO: 101905 - RNA, 21 nt, synthetic construct
  source 1..21: mol_type = other RNA
tgacctgccagagttggcaca

SEQ ID NO: 101906 - RNA, 21 nt, synthetic construct
  source 1..21: mol_type = other RNA
tgacctgctttcttggggctc

SEQ ID NO: 101907 - RNA, 21 nt, synthetic construct
  source 1..21: mol_type = other RNA
tgacctggaaattattcaata

SEQ ID NO: 101908 - RNA, 21 nt, synthetic construct
  source 1..21: mol_type = other RNA
tgacctgggagaaagaccaag

SEQ ID NO: 101909 - RNA, 21 nt, synthetic construct
  source 1..21: mol_type = other RNA
tgacctggtactctatgatat

SEQ ID NO: 101910 - RNA, 21 nt, synthetic construct
  source 1..21: mol_type = other RNA
tgacctgtaatttttctcttt

SEQ ID NO: 101911 - RNA, 21 nt, synthetic construct
  source 1..21: mol_type = other RNA
tgacctgtccttgtgttttat

SEQ ID NO: 101912 - RNA, 21 nt, synthetic construct
  source 1..21: mol_type = other RNA
tgaccttagtggttgacccat

SEQ ID NO: 101913 - RNA, 21 nt, synthetic construct
  source 1..21: mol_type = other RNA
tgaccttagttttcacttttg

SEQ ID NO: 101914 - RNA, 21 nt, synthetic construct
  source 1..21: mol_type = other RNA
tgaccttccttgtgtcttaaa

SEQ ID NO: 101915 - RNA, 21 nt, synthetic construct
  source 1..21: mol_type = other RNA
tgaccttctacttatcttttc

SEQ ID NO: 101916 - RNA, 21 nt, synthetic construct
  source 1..21: mol_type = other RNA
tgaccttgacaataaatggtg

SEQ ID NO: 101917 - RNA, 21 nt, synthetic construct
  source 1..21: mol_type = other RNA
tgaccttgtatccagtaatct

SEQ ID NO: 101918 - RNA, 21 nt, synthetic construct
  source 1..21: mol_type = other RNA
tgaccttgtgcatgtgcagga

SEQ ID NO: 101919 - RNA, 21 nt, synthetic construct
  source 1..21: mol_type = other RNA
tgacgaaagtgaagcccagag

SEQ ID NO: 101920 - RNA, 21 nt, synthetic construct
  source 1..21: mol_type = other RNA
tgacgaagtcacattctagtg

SEQ ID NO: 101921 - RNA, 21 nt, synthetic construct
  source 1..21: mol_type = other RNA
tgacgcgcaacaattcaacag

SEQ ID NO: 101922 - RNA, 21 nt, synthetic construct
  source 1..21: mol_type = other RNA
tgacgtgagatcatgccactc

SEQ ID NO: 101923 - RNA, 21 nt, synthetic construct
  source 1..21: mol_type = other RNA
tgactaatttgaggcattagt

SEQ ID NO: 101924 - RNA, 21 nt, synthetic construct
  source 1..21: mol_type = other RNA
tgactacacatacacagggaa

SEQ ID NO: 101925 - RNA, 21 nt, synthetic construct
  source 1..21: mol_type = other RNA
tgactacactgaagggaattt

SEQ ID NO: 101926 - RNA, 21 nt, synthetic construct
  source 1..21: mol_type = other RNA
tgactaccaattctccctgaa

SEQ ID NO: 101927 - RNA, 21 nt, synthetic construct
  source 1..21: mol_type = other RNA
tgactaccatctctccaacag

SEQ ID NO: 101928 - RNA, 21 nt, synthetic construct
  source 1..21: mol_type = other RNA
tgactagaagaaatgttaaca

SEQ ID NO: 101929 - RNA, 21 nt, synthetic construct
  source 1..21: mol_type = other RNA
tgactaggctcctgagaaccg

SEQ ID NO: 101930 - RNA, 21 nt, synthetic construct
  source 1..21: mol_type = other RNA
tgactagtacgtgcagagcag

SEQ ID NO: 101931 - RNA, 21 nt, synthetic construct
  source 1..21: mol_type = other RNA
tgactagtggctcatacttgc

SEQ ID NO: 101932 - RNA, 21 nt, synthetic construct
  source 1..21: mol_type = other RNA
tgactagtgtgaatgaggagt

SEQ ID NO: 101933 - RNA, 21 nt, synthetic construct
  source 1..21: mol_type = other RNA
tgactatgaaaagcctcaaac

SEQ ID NO: 101934 - RNA, 21 nt, synthetic construct
  source 1..21: mol_type = other RNA
tgactattttaccctcatttt

SEQ ID NO: 101935 - RNA, 21 nt, synthetic construct
  source 1..21: mol_type = other RNA
tgactcaatcttcttatttgt

SEQ ID NO: 101936 - RNA, 21 nt, synthetic construct
  source 1..21: mol_type = other RNA
tgactcagtacttccctcttt

SEQ ID NO: 101937 - RNA, 21 nt, synthetic construct
  source 1..21: mol_type = other RNA
tgactccaaagcaaaccagac

SEQ ID NO: 101938 - RNA, 21 nt, synthetic construct
  source 1..21: mol_type = other RNA
tgactccaagcacacagtttg

SEQ ID NO: 101939 - RNA, 21 nt, synthetic construct
  source 1..21: mol_type = other RNA
tgactccctttttaggtaggg

SEQ ID NO: 101940 - RNA, 21 nt, synthetic construct
  source 1..21: mol_type = other RNA
tgactcctaaaacatggtcca

SEQ ID NO: 101941 - RNA, 21 nt, synthetic construct
  source 1..21: mol_type = other RNA
tgactctaaagtctatgctct

SEQ ID NO: 101942 - RNA, 21 nt, synthetic construct
  source 1..21: mol_type = other RNA
tgactctgtgcttgtgctttt

SEQ ID NO: 101943 - RNA, 21 nt, synthetic construct
  source 1..21: mol_type = other RNA
tgactgaaggattcctccctg

SEQ ID NO: 101944 - RNA, 21 nt, synthetic construct
  source 1..21: mol_type = other RNA
tgactgaattaatctcttaca

SEQ ID NO: 101945 - RNA, 21 nt, synthetic construct
  source 1..21: mol_type = other RNA
tgactgaattcccacaaaata

SEQ ID NO: 101946 - RNA, 21 nt, synthetic construct
  source 1..21: mol_type = other RNA
tgactgacataactgtaaagt

SEQ ID NO: 101947 - RNA, 21 nt, synthetic construct
  source 1..21: mol_type = other RNA
tgactgagatacttaagtttt

SEQ ID NO: 101948 - RNA, 21 nt, synthetic construct
  source 1..21: mol_type = other RNA
tgactggccatccttcccaaa

SEQ ID NO: 101949 - RNA, 21 nt, synthetic construct
  source 1..21: mol_type = other RNA
tgactggctgtgccaactctg

SEQ ID NO: 101950 - RNA, 21 nt, synthetic construct
  source 1..21: mol_type = other RNA
tgactggcttaatgcatataa

SEQ ID NO: 101951 - RNA, 21 nt, synthetic construct
  source 1..21: mol_type = other RNA
tgactggtgtccttctgagaa

SEQ ID NO: 101952 - RNA, 21 nt, synthetic construct
  source 1..21: mol_type = other RNA
tgactgtaagctgaactctgt

SEQ ID NO: 101953 - RNA, 21 nt, synthetic construct
  source 1..21: mol_type = other RNA
tgactgtagtccctgctactt

SEQ ID NO: 101954 - RNA, 21 nt, synthetic construct
  source 1..21: mol_type = other RNA
tgactgtcctgaattctaatg

SEQ ID NO: 101955 - RNA, 21 nt, synthetic construct
  source 1..21: mol_type = other RNA
tgactgtgagggtaagaaagg

SEQ ID NO: 101956 - RNA, 21 nt, synthetic construct
  source 1..21: mol_type = other RNA
tgactgttgcctctgtgctag

SEQ ID NO: 101957 - RNA, 21 nt, synthetic construct
  source 1..21: mol_type = other RNA
tgacttaagcaacagaaattt

SEQ ID NO: 101958 - RNA, 21 nt, synthetic construct
  source 1..21: mol_type = other RNA
tgacttacagaccttattcaa

SEQ ID NO: 101959 - RNA, 21 nt, synthetic construct
  source 1..21: mol_type = other RNA
tgacttacagatatcacccag

SEQ ID NO: 101960 - RNA, 21 nt, synthetic construct
  source 1..21: mol_type = other RNA
tgacttagagggcttcatgct

SEQ ID NO: 101961 - RNA, 21 nt, synthetic construct
  source 1..21: mol_type = other RNA
tgacttagtgagggaggccat

SEQ ID NO: 101962 - RNA, 21 nt, synthetic construct
  source 1..21: mol_type = other RNA
tgacttcaaactatacttcaa

SEQ ID NO: 101963 - RNA, 21 nt, synthetic construct
  source 1..21: mol_type = other RNA
tgacttcaagaggttaaaacc

SEQ ID NO: 101964 - RNA, 21 nt, synthetic construct
  source 1..21: mol_type = other RNA
tgacttcactagatctctttt

SEQ ID NO: 101965 - RNA, 21 nt, synthetic construct
  source 1..21: mol_type = other RNA
tgacttcactggagaattcta

SEQ ID NO: 101966 - RNA, 21 nt, synthetic construct
  source 1..21: mol_type = other RNA
tgacttcacttccaagtcccg

SEQ ID NO: 101967 - RNA, 21 nt, synthetic construct
  source 1..21: mol_type = other RNA
tgacttcattcttgacatgat

SEQ ID NO: 101968 - RNA, 21 nt, synthetic construct
  source 1..21: mol_type = other RNA
tgacttcctggctctagccca

SEQ ID NO: 101969 - RNA, 21 nt, synthetic construct
  source 1..21: mol_type = other RNA
tgacttcgtcaaggggagagg

SEQ ID NO: 101970 - RNA, 21 nt, synthetic construct
  source 1..21: mol_type = other RNA
tgacttctcagggcctgcttt

SEQ ID NO: 101971 - RNA, 21 nt, synthetic construct
  source 1..21: mol_type = other RNA
tgacttctctcagagggaaac

SEQ ID NO: 101972 - RNA, 21 nt, synthetic construct
  source 1..21: mol_type = other RNA
tgacttctggatgtgtatgat

SEQ ID NO: 101973 - RNA, 21 nt, synthetic construct
  source 1..21: mol_type = other RNA
tgactttaccctgctggaacg

SEQ ID NO: 101974 - RNA, 21 nt, synthetic construct
  source 1..21: mol_type = other RNA
tgactttactgttctccagtc

SEQ ID NO: 101975 - RNA, 21 nt, synthetic construct
  source 1..21: mol_type = other RNA
tgactttatggtatcactttt

SEQ ID NO: 101976 - RNA, 21 nt, synthetic construct
  source 1..21: mol_type = other RNA
tgacttttatcaattcacaag

SEQ ID NO: 101977 - RNA, 21 nt, synthetic construct
  source 1..21: mol_type = other RNA
tgacttttccttaaaaaaggt

SEQ ID NO: 101978 - RNA, 21 nt, synthetic construct
  source 1..21: mol_type = other RNA
tgacttttttgcccactctta

SEQ ID NO: 101979 - RNA, 21 nt, synthetic construct
  source 1..21: mol_type = other RNA
tgagaaacatacatgttcagt

SEQ ID NO: 101980 - RNA, 21 nt, synthetic construct
  source 1..21: mol_type = other RNA
tgagaaacctaagaaaggtct

SEQ ID NO: 101981 - RNA, 21 nt, synthetic construct
  source 1..21: mol_type = other RNA
tgagaaactatccaacatgcc

SEQ ID NO: 101982 - RNA, 21 nt, synthetic construct
  source 1..21: mol_type = other RNA
tgagaaagagggaagtactga

SEQ ID NO: 101983 - RNA, 21 nt, synthetic construct
  source 1..21: mol_type = other RNA
tgagaaagcacataaaaaagg

SEQ ID NO: 101984 - RNA, 21 nt, synthetic construct
  source 1..21: mol_type = other RNA
tgagaaaggtttcttcactct

SEQ ID NO: 101985 - RNA, 21 nt, synthetic construct
  source 1..21: mol_type = other RNA
tgagaaatacttggacagggg

SEQ ID NO: 101986 - RNA, 21 nt, synthetic construct
  source 1..21: mol_type = other RNA
tgagaaatgtctggtttgctt

SEQ ID NO: 101987 - RNA, 21 nt, synthetic construct
  source 1..21: mol_type = other RNA
tgagaaatgttaagattcaac

SEQ ID NO: 101988 - RNA, 21 nt, synthetic construct
  source 1..21: mol_type = other RNA
tgagaacccagtgtctgctac

SEQ ID NO: 101989 - RNA, 21 nt, synthetic construct
  source 1..21: mol_type = other RNA
tgagaaccggaacttgagttt

SEQ ID NO: 101990 - RNA, 21 nt, synthetic construct
  source 1..21: mol_type = other RNA
tgagaagactaagcagaaatg

SEQ ID NO: 101991 - RNA, 21 nt, synthetic construct
  source 1..21: mol_type = other RNA
tgagaagactggaaaagtgtt

SEQ ID NO: 101992 - RNA, 21 nt, synthetic construct
  source 1..21: mol_type = other RNA
tgagaagagctgtaacagagg

SEQ ID NO: 101993 - RNA, 21 nt, synthetic construct
  source 1..21: mol_type = other RNA
tgagaagcagaaaatcagtgt

SEQ ID NO: 101994 - RNA, 21 nt, synthetic construct
  source 1..21: mol_type = other RNA
tgagaagccacacagtacaag

SEQ ID NO: 101995 - RNA, 21 nt, synthetic construct
  source 1..21: mol_type = other RNA
tgagaaggcgaaatgtgaaca

SEQ ID NO: 101996 - RNA, 21 nt, synthetic construct
  source 1..21: mol_type = other RNA
tgagaagtaacattacaacag

SEQ ID NO: 101997 - RNA, 21 nt, synthetic construct
  source 1..21: mol_type = other RNA
tgagaagtcaaagcctgtgga

SEQ ID NO: 101998 - RNA, 21 nt, synthetic construct
  source 1..21: mol_type = other RNA
tgagaagtcttttcctaccct

SEQ ID NO: 101999 - RNA, 21 nt, synthetic construct
  source 1..21: mol_type = other RNA
tgagaattcattgttgtgtgt

SEQ ID NO: 102000 - RNA, 21 nt, synthetic construct
  source 1..21: mol_type = other RNA
tgagaatttcagaaagagaat

SEQ ID NO: 102001 - RNA, 21 nt, synthetic construct
  source 1..21: mol_type = other RNA
tgagaatttcaggtgtgtaaa

SEQ ID NO: 102002 - RNA, 21 nt, synthetic construct
  source 1..21: mol_type = other RNA
tgagacacacgagtattcaag

SEQ ID NO: 102003 - RNA, 21 nt, synthetic construct
  source 1..21: mol_type = other RNA
tgagacacctacaatattaac

SEQ ID NO: 102004 - RNA, 21 nt, synthetic construct
  source 1..21: mol_type = other RNA
tgagacacggtctcacactgt

SEQ ID NO: 102005 - RNA, 21 nt, synthetic construct
  source 1..21: mol_type = other RNA
tgagacagaccctggcttgtg

SEQ ID NO: 102006 - RNA, 21 nt, synthetic construct
  source 1..21: mol_type = other RNA
tgagacagattctctgtctct

SEQ ID NO: 102007 - RNA, 21 nt, synthetic construct
  source 1..21: mol_type = other RNA
tgagacaggatccagatgtag

SEQ ID NO: 102008 - RNA, 21 nt, synthetic construct
  source 1..21: mol_type = other RNA
tgagacagggtctcactctta

SEQ ID NO: 102009 - RNA, 21 nt, synthetic construct
  source 1..21: mol_type = other RNA
tgagacagtattgtgctgaaa

SEQ ID NO: 102010 - RNA, 21 nt, synthetic construct
  source 1..21: mol_type = other RNA
tgagacatcacaatgcgtttg

SEQ ID NO: 102011 - RNA, 21 nt, synthetic construct
  source 1..21: mol_type = other RNA
tgagacatttgagggtgctga

SEQ ID NO: 102012 - RNA, 21 nt, synthetic construct
  source 1..21: mol_type = other RNA
tgagaccaaatgcataaaaat

SEQ ID NO: 102013 - RNA, 21 nt, synthetic construct
  source 1..21: mol_type = other RNA
tgagaccacagacgtgcagca

SEQ ID NO: 102014 - RNA, 21 nt, synthetic construct
  source 1..21: mol_type = other RNA
tgagaccaccacacttgcttg

SEQ ID NO: 102015 - RNA, 21 nt, synthetic construct
  source 1..21: mol_type = other RNA
tgagaccagcgtgggcaacac

SEQ ID NO: 102016 - RNA, 21 nt, synthetic construct
  source 1..21: mol_type = other RNA
tgagaccccatctctaccaaa

SEQ ID NO: 102017 - RNA, 21 nt, synthetic construct
  source 1..21: mol_type = other RNA
tgagaccggatgaggtggctc

SEQ ID NO: 102018 - RNA, 21 nt, synthetic construct
  source 1..21: mol_type = other RNA
tgagacctcaggcagtctagt

SEQ ID NO: 102019 - RNA, 21 nt, synthetic construct
  source 1..21: mol_type = other RNA
tgagacctcatcttagccggg

SEQ ID NO: 102020 - RNA, 21 nt, synthetic construct
  source 1..21: mol_type = other RNA
tgagacggaagactcatactt

SEQ ID NO: 102021 - RNA, 21 nt, synthetic construct
  source 1..21: mol_type = other RNA
tgagacggaatcttaccctgt

SEQ ID NO: 102022 - RNA, 21 nt, synthetic construct
  source 1..21: mol_type = other RNA
tgagactattatgagcagttg

SEQ ID NO: 102023 - RNA, 21 nt, synthetic construct
  source 1..21: mol_type = other RNA
tgagactccaactcaaaaaag

SEQ ID NO: 102024 - RNA, 21 nt, synthetic construct
  source 1..21: mol_type = other RNA
tgagactcttaatattgaaac

SEQ ID NO: 102025 - RNA, 21 nt, synthetic construct
  source 1..21: mol_type = other RNA
tgagactgcagtgacctatca

SEQ ID NO: 102026 - RNA, 21 nt, synthetic construct
  source 1..21: mol_type = other RNA
tgagacttaggcaaaggaaaa

SEQ ID NO: 102027 - RNA, 21 nt, synthetic construct
  source 1..21: mol_type = other RNA
tgagagaaaattgttcatgaa

SEQ ID NO: 102028 - RNA, 21 nt, synthetic construct
  source 1..21: mol_type = other RNA
tgagagaagtcagactaagac

SEQ ID NO: 102029 - RNA, 21 nt, synthetic construct
  source 1..21: mol_type = other RNA
tgagagagaattctaaattgc

SEQ ID NO: 102030 - RNA, 21 nt, synthetic construct
  source 1..21: mol_type = other RNA
tgagagagataaaacctggaa

SEQ ID NO: 102031 - RNA, 21 nt, synthetic construct
  source 1..21: mol_type = other RNA
tgagagatagaaagcaccagg

SEQ ID NO: 102032 - RNA, 21 nt, synthetic construct
  source 1..21: mol_type = other RNA
tgagagcagagacacacatca

SEQ ID NO: 102033 - RNA, 21 nt, synthetic construct
  source 1..21: mol_type = other RNA
tgagagctaagggaagttttt

SEQ ID NO: 102034 - RNA, 21 nt, synthetic construct
  source 1..21: mol_type = other RNA
tgagagctcaggccagtgagt

SEQ ID NO: 102035 - RNA, 21 nt, synthetic construct
  source 1..21: mol_type = other RNA
tgagagctgtgccgaggcaga

SEQ ID NO: 102036 - RNA, 21 nt, synthetic construct
  source 1..21: mol_type = other RNA
tgagagctttcttttaaagac

SEQ ID NO: 102037 - RNA, 21 nt, synthetic construct
  source 1..21: mol_type = other RNA
tgagaggactgcctggtcctg

SEQ ID NO: 102038 - RNA, 21 nt, synthetic construct
  source 1..21: mol_type = other RNA
tgagaggctttaagcagaaag

SEQ ID NO: 102039 - RNA, 21 nt, synthetic construct
  source 1..21: mol_type = other RNA
tgagagggaagtttatagcag

SEQ ID NO: 102040 - RNA, 21 nt, synthetic construct
  source 1..21: mol_type = other RNA
tgagagggagaccgtgggggg

SEQ ID NO: 102041 - RNA, 21 nt, synthetic construct
  source 1..21: mol_type = other RNA
tgagagtaagttgcatacgtc

SEQ ID NO: 102042 - RNA, 21 nt, synthetic construct
  source 1..21: mol_type = other RNA
tgagagtattgccaggtttgt

SEQ ID NO: 102043 - RNA, 21 nt, synthetic construct
  source 1..21: mol_type = other RNA
tgagagtctcttaagaccaca

SEQ ID NO: 102044 - RNA, 21 nt, synthetic construct
  source 1..21: mol_type = other RNA
tgagagtgaaaacacaaactg

SEQ ID NO: 102045 - RNA, 21 nt, synthetic construct
  source 1..21: mol_type = other RNA
tgagagtgcagtatgtaggaa

SEQ ID NO: 102046 - RNA, 21 nt, synthetic construct
  source 1..21: mol_type = other RNA
tgagagtggcctaaatcagga

SEQ ID NO: 102047 - RNA, 21 nt, synthetic construct
  source 1..21: mol_type = other RNA
tgagataaactagattacctt

SEQ ID NO: 102048 - RNA, 21 nt, synthetic construct
  source 1..21: mol_type = other RNA
tgagatactacgcctagctga

SEQ ID NO: 102049 - RNA, 21 nt, synthetic construct
  source 1..21: mol_type = other RNA
tgagatagaccagatgcgtgg

SEQ ID NO: 102050 - RNA, 21 nt, synthetic construct
  source 1..21: mol_type = other RNA
tgagatctaaattttaagtgc

SEQ ID NO: 102051 - RNA, 21 nt, synthetic construct
  source 1..21: mol_type = other RNA
tgagatgggaagaaaaaataa

SEQ ID NO: 102052 - RNA, 21 nt, synthetic construct
  source 1..21: mol_type = other RNA
tgagatggtcagtactatctt

SEQ ID NO: 102053 - RNA, 21 nt, synthetic construct
  source 1..21: mol_type = other RNA
tgagatgtactggaagtgtaa

SEQ ID NO: 102054 - RNA, 21 nt, synthetic construct
  source 1..21: mol_type = other RNA
tgagattaatgtaggtgtctg

SEQ ID NO: 102055 - RNA, 21 nt, synthetic construct
  source 1..21: mol_type = other RNA
tgagattacagatgtgagccc

SEQ ID NO: 102056 - RNA, 21 nt, synthetic construct
  source 1..21: mol_type = other RNA
tgagattacatagcaaggaag

SEQ ID NO: 102057 - RNA, 21 nt, synthetic construct
  source 1..21: mol_type = other RNA
tgagattagcgaaagggattc

SEQ ID NO: 102058 - RNA, 21 nt, synthetic construct
  source 1..21: mol_type = other RNA
tgagattgatagatcatatga

SEQ ID NO: 102059 - RNA, 21 nt, synthetic construct
  source 1..21: mol_type = other RNA
tgagattgccccattgcactc

SEQ ID NO: 102060 - RNA, 21 nt, synthetic construct
  source 1..21: mol_type = other RNA
tgagattgtgccagtgaactc

SEQ ID NO: 102061 - RNA, 21 nt, synthetic construct
  source 1..21: mol_type = other RNA
tgagatttgagtcttgctctc

SEQ ID NO: 102062 - RNA, 21 nt, synthetic construct
  source 1..21: mol_type = other RNA
tgagcaaaaatacagctccaa

SEQ ID NO: 102063 - RNA, 21 nt, synthetic construct
  source 1..21: mol_type = other RNA
tgagcaactactatttcgcaa

SEQ ID NO: 102064 - RNA, 21 nt, synthetic construct
  source 1..21: mol_type = other RNA
tgagcaaggaaggaaaggaga

SEQ ID NO: 102065 - RNA, 21 nt, synthetic construct
  source 1..21: mol_type = other RNA
tgagcaaggtcgtttcagatt

SEQ ID NO: 102066 - RNA, 21 nt, synthetic construct
  source 1..21: mol_type = other RNA
tgagcacaatgcctgccgcag

SEQ ID NO: 102067 - RNA, 21 nt, synthetic construct
  source 1..21: mol_type = other RNA
tgagcagaaggaggaaaataa

SEQ ID NO: 102068 - RNA, 21 nt, synthetic construct
  source 1..21: mol_type = other RNA
tgagcagagtcctgagggtga

SEQ ID NO: 102069 - RNA, 21 nt, synthetic construct
  source 1..21: mol_type = other RNA
tgagcagatcagtaacaaata

SEQ ID NO: 102070 - RNA, 21 nt, synthetic construct
  source 1..21: mol_type = other RNA
tgagcagtgaaagtctcccta

SEQ ID NO: 102071 - RNA, 21 nt, synthetic construct
  source 1..21: mol_type = other RNA
tgagcagtgtttcctagattc

SEQ ID NO: 102072 - RNA, 21 nt, synthetic construct
  source 1..21: mol_type = other RNA
tgagcagttgtatgccaaaaa

SEQ ID NO: 102073 - RNA, 21 nt, synthetic construct
  source 1..21: mol_type = other RNA
tgagcatcccagaggtactca

SEQ ID NO: 102074 - RNA, 21 nt, synthetic construct
  source 1..21: mol_type = other RNA
tgagcatccccgctgcgagaa

SEQ ID NO: 102075 - RNA, 21 nt, synthetic construct
  source 1..21: mol_type = other RNA
tgagcatgctgcaactgagaa

SEQ ID NO: 102076 - RNA, 21 nt, synthetic construct
  source 1..21: mol_type = other RNA
tgagcattccccacataggat

SEQ ID NO: 102077 - RNA, 21 nt, synthetic construct
  source 1..21: mol_type = other RNA
tgagcatttagccccctgaat

SEQ ID NO: 102078 - RNA, 21 nt, synthetic construct
  source 1..21: mol_type = other RNA
tgagccaaagaagaaatcaaa

SEQ ID NO: 102079 - RNA, 21 nt, synthetic construct
  source 1..21: mol_type = other RNA
tgagccacagctacactcaat

SEQ ID NO: 102080 - RNA, 21 nt, synthetic construct
  source 1..21: mol_type = other RNA
tgagccacagggcccagcctc

SEQ ID NO: 102081 - RNA, 21 nt, synthetic construct
  source 1..21: mol_type = other RNA
tgagccacatacatagtatta

SEQ ID NO: 102082 - RNA, 21 nt, synthetic construct
  source 1..21: mol_type = other RNA
tgagccaccacgtccggtcgt

SEQ ID NO: 102083 - RNA, 21 nt, synthetic construct
  source 1..21: mol_type = other RNA
tgagccaccactcccggccgt

SEQ ID NO: 102084 - RNA, 21 nt, synthetic construct
  source 1..21: mol_type = other RNA
tgagccaccgcacctggccgg

SEQ ID NO: 102085 - RNA, 21 nt, synthetic construct
  source 1..21: mol_type = other RNA
tgagccaccgcgcccggccaa

SEQ ID NO: 102086 - RNA, 21 nt, synthetic construct
  source 1..21: mol_type = other RNA
tgagccaccgcgcctggtgat

SEQ ID NO: 102087 - RNA, 21 nt, synthetic construct
  source 1..21: mol_type = other RNA
tgagccaccgtgccgggcttg

SEQ ID NO: 102088 - RNA, 21 nt, synthetic construct
  source 1..21: mol_type = other RNA
tgagccacctcatccggtctc

SEQ ID NO: 102089 - RNA, 21 nt, synthetic construct
  source 1..21: mol_type = other RNA
tgagccactaaaacaggaagt

SEQ ID NO: 102090 - RNA, 21 nt, synthetic construct
  source 1..21: mol_type = other RNA
tgagccactacgcccggccca

SEQ ID NO: 102091 - RNA, 21 nt, synthetic construct
  source 1..21: mol_type = other RNA
tgagccactagtcagtatatt

SEQ ID NO: 102092 - RNA, 21 nt, synthetic construct
  source 1..21: mol_type = other RNA
tgagccactgcgggcccagct

SEQ ID NO: 102093 - RNA, 21 nt, synthetic construct
  source 1..21: mol_type = other RNA
tgagccagagtttcactctgt

SEQ ID NO: 102094 - RNA, 21 nt, synthetic construct
  source 1..21: mol_type = other RNA
tgagccagcaaatcagaaaag

SEQ ID NO: 102095 - RNA, 21 nt, synthetic construct
  source 1..21: mol_type = other RNA
tgagccaggcatggtggtggg

SEQ ID NO: 102096 - RNA, 21 nt, synthetic construct
  source 1..21: mol_type = other RNA
tgagccatcatgcctgggtaa

SEQ ID NO: 102097 - RNA, 21 nt, synthetic construct
  source 1..21: mol_type = other RNA
tgagccatcgcgcccagcccg

SEQ ID NO: 102098 - RNA, 21 nt, synthetic construct
  source 1..21: mol_type = other RNA
tgagcccagagatcccaccat

SEQ ID NO: 102099 - RNA, 21 nt, synthetic construct
  source 1..21: mol_type = other RNA
tgagcccaggaggttgaagct

SEQ ID NO: 102100 - RNA, 21 nt, synthetic construct
  source 1..21: mol_type = other RNA
tgagcccaggagttgcatcac

SEQ ID NO: 102101 - RNA, 21 nt, synthetic construct
  source 1..21: mol_type = other RNA
tgagcccagggggtcgagact

SEQ ID NO: 102102 - RNA, 21 nt, synthetic construct
  source 1..21: mol_type = other RNA
tgagccccagaataggcaaat

SEQ ID NO: 102103 - RNA, 21 nt, synthetic construct
  source 1..21: mol_type = other RNA
tgagccgtcggtatgttaata

SEQ ID NO: 102104 - RNA, 21 nt, synthetic construct
  source 1..21: mol_type = other RNA
tgagcctccacacctggcccc

SEQ ID NO: 102105 - RNA, 21 nt, synthetic construct
  source 1..21: mol_type = other RNA
tgagcctggaagttcaaggtt

SEQ ID NO: 102106 - RNA, 21 nt, synthetic construct
  source 1..21: mol_type = other RNA
tgagcctgttccgattttact

SEQ ID NO: 102107 - RNA, 21 nt, synthetic construct
  source 1..21: mol_type = other RNA
tgagccttcagaactcttctc

SEQ ID NO: 102108 - RNA, 21 nt, synthetic construct
  source 1..21: mol_type = other RNA
tgagctacaaactccaaacct

SEQ ID NO: 102109 - RNA, 21 nt, synthetic construct
  source 1..21: mol_type = other RNA
tgagctactgcatgctagggg

SEQ ID NO: 102110 - RNA, 21 nt, synthetic construct
  source 1..21: mol_type = other RNA
tgagctctagccttgtactgt

SEQ ID NO: 102111 - RNA, 21 nt, synthetic construct
  source 1..21: mol_type = other RNA
tgagctctcagtggccctgtt

SEQ ID NO: 102112 - RNA, 21 nt, synthetic construct
  source 1..21: mol_type = other RNA
tgagctgaaagtaaagatagc

SEQ ID NO: 102113 - RNA, 21 nt, synthetic construct
  source 1..21: mol_type = other RNA
tgagctggaagtaaggatttt

SEQ ID NO: 102114 - RNA, 21 nt, synthetic construct
  source 1..21: mol_type = other RNA
tgagctgtccccaccgccttc

SEQ ID NO: 102115 - RNA, 21 nt, synthetic construct
  source 1..21: mol_type = other RNA
tgagctgttaatggttagact

SEQ ID NO: 102116 - RNA, 21 nt, synthetic construct
  source 1..21: mol_type = other RNA
tgagctttccttagttcgaag

SEQ ID NO: 102117 - RNA, 21 nt, synthetic construct
  source 1..21: mol_type = other RNA
tgaggaaagcaggttgcatta

SEQ ID NO: 102118 - RNA, 21 nt, synthetic construct
  source 1..21: mol_type = other RNA
tgaggaagaggaaggttcaag

SEQ ID NO: 102119 - RNA, 21 nt, synthetic construct
  source 1..21: mol_type = other RNA
tgaggaagctaatcaagccgc

SEQ ID NO: 102120 - RNA, 21 nt, synthetic construct
  source 1..21: mol_type = other RNA
tgaggaaggagaatcgcttaa

SEQ ID NO: 102121 - RNA, 21 nt, synthetic construct
  source 1..21: mol_type = other RNA
tgaggacactagcaatccagg

SEQ ID NO: 102122 - RNA, 21 nt, synthetic construct
  source 1..21: mol_type = other RNA
tgaggacatggagacagtgag

SEQ ID NO: 102123 - RNA, 21 nt, synthetic construct
  source 1..21: mol_type = other RNA
tgaggacgctgatgacagtta

SEQ ID NO: 102124 - RNA, 21 nt, synthetic construct
  source 1..21: mol_type = other RNA
tgaggacttcatgtacaatga

SEQ ID NO: 102125 - RNA, 21 nt, synthetic construct
  source 1..21: mol_type = other RNA
tgaggagctgagaccacagac

SEQ ID NO: 102126 - RNA, 21 nt, synthetic construct
  source 1..21: mol_type = other RNA
tgaggagtgaatttttcattt

SEQ ID NO: 102127 - RNA, 21 nt, synthetic construct
  source 1..21: mol_type = other RNA
tgaggatataacgatagtctc

SEQ ID NO: 102128 - RNA, 21 nt, synthetic construct
  source 1..21: mol_type = other RNA
tgaggatctgttggtgcttag

SEQ ID NO: 102129 - RNA, 21 nt, synthetic construct
  source 1..21: mol_type = other RNA
tgaggatgactgtcctgaatt

SEQ ID NO: 102130 - RNA, 21 nt, synthetic construct
  source 1..21: mol_type = other RNA
tgaggattcgattaaaataac

SEQ ID NO: 102131 - RNA, 21 nt, synthetic construct
  source 1..21: mol_type = other RNA
tgaggattggagactgataaa

SEQ ID NO: 102132 - RNA, 21 nt, synthetic construct
  source 1..21: mol_type = other RNA
tgaggcagagagatggtggga

SEQ ID NO: 102133 - RNA, 21 nt, synthetic construct
  source 1..21: mol_type = other RNA
tgaggcagagtagagaaggct

SEQ ID NO: 102134 - RNA, 21 nt, synthetic construct
  source 1..21: mol_type = other RNA
tgaggcagcccgacctccagc

SEQ ID NO: 102135 - RNA, 21 nt, synthetic construct
  source 1..21: mol_type = other RNA
tgaggcaggagaactgcctgg

SEQ ID NO: 102136 - RNA, 21 nt, synthetic construct
  source 1..21: mol_type = other RNA
tgaggcaggagcatagcttga

SEQ ID NO: 102137 - RNA, 21 nt, synthetic construct
  source 1..21: mol_type = other RNA
tgaggcaggaggcacctgaac

SEQ ID NO: 102138 - RNA, 21 nt, synthetic construct
  source 1..21: mol_type = other RNA
tgaggcaggtggatatctgag

SEQ ID NO: 102139 - RNA, 21 nt, synthetic construct
  source 1..21: mol_type = other RNA
tgaggcatattattgtaactt

SEQ ID NO: 102140 - RNA, 21 nt, synthetic construct
  source 1..21: mol_type = other RNA
tgaggcattagtgaattcaca

SEQ ID NO: 102141 - RNA, 21 nt, synthetic construct
  source 1..21: mol_type = other RNA
tgaggccccaggggacataga

SEQ ID NO: 102142 - RNA, 21 nt, synthetic construct
  source 1..21: mol_type = other RNA
tgaggccctattcaacctata

SEQ ID NO: 102143 - RNA, 21 nt, synthetic construct
  source 1..21: mol_type = other RNA
tgaggccgcagtgagccatgg

SEQ ID NO: 102144 - RNA, 21 nt, synthetic construct
  source 1..21: mol_type = other RNA
tgaggccggaggattgcttga

SEQ ID NO: 102145 - RNA, 21 nt, synthetic construct
  source 1..21: mol_type = other RNA
tgaggcctcctgccttcctga

SEQ ID NO: 102146 - RNA, 21 nt, synthetic construct
  source 1..21: mol_type = other RNA
tgaggcctctccccttgacga

SEQ ID NO: 102147 - RNA, 21 nt, synthetic construct
  source 1..21: mol_type = other RNA
tgaggcggaaggattgcctaa

SEQ ID NO: 102148 - RNA, 21 nt, synthetic construct
  source 1..21: mol_type = other RNA
tgaggcggctggatcgcttga

SEQ ID NO: 102149 - RNA, 21 nt, synthetic construct
  source 1..21: mol_type = other RNA
tgaggctgggagtacaagacc

SEQ ID NO: 102150 - RNA, 21 nt, synthetic construct
  source 1..21: mol_type = other RNA
tgaggctgggccctgtggctc

SEQ ID NO: 102151 - RNA, 21 nt, synthetic construct
  source 1..21: mol_type = other RNA
tgaggctggggaattgcatga

SEQ ID NO: 102152 - RNA, 21 nt, synthetic construct
  source 1..21: mol_type = other RNA
tgaggcttttattggtaatgt

SEQ ID NO: 102153 - RNA, 21 nt, synthetic construct
  source 1..21: mol_type = other RNA
tgaggcttttcatagtcatca

SEQ ID NO: 102154 - RNA, 21 nt, synthetic construct
  source 1..21: mol_type = other RNA
tgaggcttttggattttcttt

SEQ ID NO: 102155 - RNA, 21 nt, synthetic construct
  source 1..21: mol_type = other RNA
tgagggaaattatttccagcc

SEQ ID NO: 102156 - RNA, 21 nt, synthetic construct
  source 1..21: mol_type = other RNA
tgagggaatttttcttaccta

SEQ ID NO: 102157 - RNA, 21 nt, synthetic construct
  source 1..21: mol_type = other RNA
tgagggactgagcagtgaaag

SEQ ID NO: 102158 - RNA, 21 nt, synthetic construct
  source 1..21: mol_type = other RNA
tgagggagatatttcgcctag

SEQ ID NO: 102159 - RNA, 21 nt, synthetic construct
  source 1..21: mol_type = other RNA
tgagggaggccatcttcattt

SEQ ID NO: 102160 - RNA, 21 nt, synthetic construct
  source 1..21: mol_type = other RNA
tgagggatgaggaagaggaag

SEQ ID NO: 102161 - RNA, 21 nt, synthetic construct
  source 1..21: mol_type = other RNA
tgagggcagagataactgggt

SEQ ID NO: 102162 - RNA, 21 nt, synthetic construct
  source 1..21: mol_type = other RNA
tgagggctttgtgaagggagg

SEQ ID NO: 102163 - RNA, 21 nt, synthetic construct
  source 1..21: mol_type = other RNA
tgaggggctgagccttcagaa

SEQ ID NO: 102164 - RNA, 21 nt, synthetic construct
  source 1..21: mol_type = other RNA
tgaggggtcttatgctggtgg

SEQ ID NO: 102165 - RNA, 21 nt, synthetic construct
  source 1..21: mol_type = other RNA
tgagggtaaaatagtcaagta

SEQ ID NO: 102166 - RNA, 21 nt, synthetic construct
  source 1..21: mol_type = other RNA
tgagggtaagaaaggagttca

SEQ ID NO: 102167 - RNA, 21 nt, synthetic construct
  source 1..21: mol_type = other RNA
tgagggtgagaccaccacact

SEQ ID NO: 102168 - RNA, 21 nt, synthetic construct
  source 1..21: mol_type = other RNA
tgagggtgctgatcaggaaag

SEQ ID NO: 102169 - RNA, 21 nt, synthetic construct
  source 1..21: mol_type = other RNA
tgagggttagaagacaatact

SEQ ID NO: 102170 - RNA, 21 nt, synthetic construct
  source 1..21: mol_type = other RNA
tgagggttagatttttccttt

SEQ ID NO: 102171 - RNA, 21 nt, synthetic construct
  source 1..21: mol_type = other RNA
tgagggtttcagtgagtaggg

SEQ ID NO: 102172 - RNA, 21 nt, synthetic construct
  source 1..21: mol_type = other RNA
tgaggtaagaacttgtctttg

SEQ ID NO: 102173 - RNA, 21 nt, synthetic construct
  source 1..21: mol_type = other RNA
tgaggtagcacaactagtaag

SEQ ID NO: 102174 - RNA, 21 nt, synthetic construct
  source 1..21: mol_type = other RNA
tgaggtatcatttccaagatt

SEQ ID NO: 102175 - RNA, 21 nt, synthetic construct
  source 1..21: mol_type = other RNA
tgaggtcaagaaataaaacat

SEQ ID NO: 102176 - RNA, 21 nt, synthetic construct
  source 1..21: mol_type = other RNA
tgaggtcacccaagccacagc

SEQ ID NO: 102177 - RNA, 21 nt, synthetic construct
  source 1..21: mol_type = other RNA
tgaggtctaggctaatgtgtg

SEQ ID NO: 102178 - RNA, 21 nt, synthetic construct
  source 1..21: mol_type = other RNA
tgaggtctcaaaatttaaagt

SEQ ID NO: 102179 - RNA, 21 nt, synthetic construct
  source 1..21: mol_type = other RNA
tgaggtctcagccttttctga

SEQ ID NO: 102180 - RNA, 21 nt, synthetic construct
  source 1..21: mol_type = other RNA
tgaggtcttctagctttcagc

SEQ ID NO: 102181 - RNA, 21 nt, synthetic construct
  source 1..21: mol_type = other RNA
tgaggtctttaaaagaaagct

SEQ ID NO: 102182 - RNA, 21 nt, synthetic construct
  source 1..21: mol_type = other RNA
tgaggtgagacagaccctggc

SEQ ID NO: 102183 - RNA, 21 nt, synthetic construct
  source 1..21: mol_type = other RNA
tgaggtgaggacatggagaca

SEQ ID NO: 102184 - RNA, 21 nt, synthetic construct
  source 1..21: mol_type = other RNA
tgaggtgattaaaggccctga

SEQ ID NO: 102185 - RNA, 21 nt, synthetic construct
  source 1..21: mol_type = other RNA
tgaggtgattcagagtgctgg

SEQ ID NO: 102186 - RNA, 21 nt, synthetic construct
  source 1..21: mol_type = other RNA
tgaggtggagttctgctcttg

SEQ ID NO: 102187 - RNA, 21 nt, synthetic construct
  source 1..21: mol_type = other RNA
tgaggtgtacaattaggctgt

SEQ ID NO: 102188 - RNA, 21 nt, synthetic construct
  source 1..21: mol_type = other RNA
tgaggtgtttttcagccctga

SEQ ID NO: 102189 - RNA, 21 nt, synthetic construct
  source 1..21: mol_type = other RNA
tgaggttattaagataatgct

SEQ ID NO: 102190 - RNA, 21 nt, synthetic construct
  source 1..21: mol_type = other RNA
tgaggttattcaaaacaaaac

SEQ ID NO: 102191 - RNA, 21 nt, synthetic construct
  source 1..21: mol_type = other RNA
tgaggttgaagacctgcagtc

SEQ ID NO: 102192 - RNA, 21 nt, synthetic construct
  source 1..21: mol_type = other RNA
tgaggttgcttttacttggct

SEQ ID NO: 102193 - RNA, 21 nt, synthetic construct
  source 1..21: mol_type = other RNA
tgaggtttacttggggagagt

SEQ ID NO: 102194 - RNA, 21 nt, synthetic construct
  source 1..21: mol_type = other RNA
tgaggttttacgatgttggcc

SEQ ID NO: 102195 - RNA, 21 nt, synthetic construct
  source 1..21: mol_type = other RNA
tgagtaaaaagaaatctgcat

SEQ ID NO: 102196 - RNA, 21 nt, synthetic construct
  source 1..21: mol_type = other RNA
tgagtaaagggtaagaaaatt

SEQ ID NO: 102197 - RNA, 21 nt, synthetic construct
  source 1..21: mol_type = other RNA
tgagtaacatgtggaacataa

SEQ ID NO: 102198 - RNA, 21 nt, synthetic construct
  source 1..21: mol_type = other RNA
tgagtacctctgggatgctca

SEQ ID NO: 102199 - RNA, 21 nt, synthetic construct
  source 1..21: mol_type = other RNA
tgagtagaagagtaatggttg

SEQ ID NO: 102200 - RNA, 21 nt, synthetic construct
  source 1..21: mol_type = other RNA
tgagtagcaccctatttatgt

SEQ ID NO: 102201 - RNA, 21 nt, synthetic construct
  source 1..21: mol_type = other RNA
tgagtagcgctttaagcatcc

SEQ ID NO: 102202 - RNA, 21 nt, synthetic construct
  source 1..21: mol_type = other RNA
tgagtagctgtgattaccggc

SEQ ID NO: 102203 - RNA, 21 nt, synthetic construct
  source 1..21: mol_type = other RNA
tgagtagggaaggtgcccgcg

SEQ ID NO: 102204 - RNA, 21 nt, synthetic construct
  source 1..21: mol_type = other RNA
tgagtagtacttctgagtgtt

SEQ ID NO: 102205 - RNA, 21 nt, synthetic construct
  source 1..21: mol_type = other RNA
tgagtagttcatgttagcata

SEQ ID NO: 102206 - RNA, 21 nt, synthetic construct
  source 1..21: mol_type = other RNA
tgagtatattctgtgaattgt

SEQ ID NO: 102207 - RNA, 21 nt, synthetic construct
  source 1..21: mol_type = other RNA
tgagtatctggtgctggcagc

SEQ ID NO: 102208 - RNA, 21 nt, synthetic construct
  source 1..21: mol_type = other RNA
tgagtatctggtgttgcttgc

SEQ ID NO: 102209 - RNA, 21 nt, synthetic construct
  source 1..21: mol_type = other RNA
tgagtatcttttcatgttgac

SEQ ID NO: 102210 - RNA, 21 nt, synthetic construct
  source 1..21: mol_type = other RNA
tgagtatgggtctccattttg

SEQ ID NO: 102211 - RNA, 21 nt, synthetic construct
  source 1..21: mol_type = other RNA
tgagtatttcatgtacttgta

SEQ ID NO: 102212 - RNA, 21 nt, synthetic construct
  source 1..21: mol_type = other RNA
tgagtatttttgagcttttca

SEQ ID NO: 102213 - RNA, 21 nt, synthetic construct
  source 1..21: mol_type = other RNA
tgagtcaaaaccaaagaaagg

SEQ ID NO: 102214 - RNA, 21 nt, synthetic construct
  source 1..21: mol_type = other RNA
tgagtcagtaatcaaaaacct

SEQ ID NO: 102215 - RNA, 21 nt, synthetic construct
  source 1..21: mol_type = other RNA
tgagtccagaggtgagctttt

SEQ ID NO: 102216 - RNA, 21 nt, synthetic construct
  source 1..21: mol_type = other RNA
tgagtccagctttctaattct

SEQ ID NO: 102217 - RNA, 21 nt, synthetic construct
  source 1..21: mol_type = other RNA
tgagtcctgaaaattccttcc

SEQ ID NO: 102218 - RNA, 21 nt, synthetic construct
  source 1..21: mol_type = other RNA
tgagtccttccagtatgatgc

SEQ ID NO: 102219 - RNA, 21 nt, synthetic construct
  source 1..21: mol_type = other RNA
tgagtcgccatacctggtcct

SEQ ID NO: 102220 - RNA, 21 nt, synthetic construct
  source 1..21: mol_type = other RNA
tgagtctgacatactgtcaca

SEQ ID NO: 102221 - RNA, 21 nt, synthetic construct
  source 1..21: mol_type = other RNA
tgagtctgtagggtgactagt

SEQ ID NO: 102222 - RNA, 21 nt, synthetic construct
  source 1..21: mol_type = other RNA
tgagtctgtgctctgtattta

SEQ ID NO: 102223 - RNA, 21 nt, synthetic construct
  source 1..21: mol_type = other RNA
tgagtcttccgtctcaagatt

SEQ ID NO: 102224 - RNA, 21 nt, synthetic construct
  source 1..21: mol_type = other RNA
tgagtcttctactgtgaattc

SEQ ID NO: 102225 - RNA, 21 nt, synthetic construct
  source 1..21: mol_type = other RNA
tgagtcttgctctcttgccta

SEQ ID NO: 102226 - RNA, 21 nt, synthetic construct
  source 1..21: mol_type = other RNA
tgagtcttgtttacccagtgt

SEQ ID NO: 102227 - RNA, 21 nt, synthetic construct
  source 1..21: mol_type = other RNA
tgagtgaatggggtaattttg

SEQ ID NO: 102228 - RNA, 21 nt, synthetic construct
  source 1..21: mol_type = other RNA
tgagtgagatgggaagaaaaa

SEQ ID NO: 102229 - RNA, 21 nt, synthetic construct
  source 1..21: mol_type = other RNA
tgagtgagccacagctacact

SEQ ID NO: 102230 - RNA, 21 nt, synthetic construct
  source 1..21: mol_type = other RNA
tgagtgatgaaaagagcacac

SEQ ID NO: 102231 - RNA, 21 nt, synthetic construct
  source 1..21: mol_type = other RNA
tgagtggactgtgagggagat

SEQ ID NO: 102232 - RNA, 21 nt, synthetic construct
  source 1..21: mol_type = other RNA
tgagtggatcatttgaggtca

SEQ ID NO: 102233 - RNA, 21 nt, synthetic construct
  source 1..21: mol_type = other RNA
tgagtggcatcatactggaag

SEQ ID NO: 102234 - RNA, 21 nt, synthetic construct
  source 1..21: mol_type = other RNA
tgagtgtaaggtgtttggtga

SEQ ID NO: 102235 - RNA, 21 nt, synthetic construct
  source 1..21: mol_type = other RNA
tgagtgtagctgtggctcact

SEQ ID NO: 102236 - RNA, 21 nt, synthetic construct
  source 1..21: mol_type = other RNA
tgagtgtatgcagggaaatca

SEQ ID NO: 102237 - RNA, 21 nt, synthetic construct
  source 1..21: mol_type = other RNA
tgagtgttacttgaaatcatt

SEQ ID NO: 102238 - RNA, 21 nt, synthetic construct
  source 1..21: mol_type = other RNA
tgagtgttgtgtgcacctaat

SEQ ID NO: 102239 - RNA, 21 nt, synthetic construct
  source 1..21: mol_type = other RNA
tgagtgtttcccttaaaagga

SEQ ID NO: 102240 - RNA, 21 nt, synthetic construct
  source 1..21: mol_type = other RNA
tgagttaggaatttacatttc

SEQ ID NO: 102241 - RNA, 21 nt, synthetic construct
  source 1..21: mol_type = other RNA
tgagttattgcatagggatgt

SEQ ID NO: 102242 - RNA, 21 nt, synthetic construct
  source 1..21: mol_type = other RNA
tgagttcaaatgttaagccca

SEQ ID NO: 102243 - RNA, 21 nt, synthetic construct
  source 1..21: mol_type = other RNA
tgagttcagaaagattaatcc

SEQ ID NO: 102244 - RNA, 21 nt, synthetic construct
  source 1..21: mol_type = other RNA
tgagttcagttttgtatatgg

SEQ ID NO: 102245 - RNA, 21 nt, synthetic construct
  source 1..21: mol_type = other RNA
tgagttccagtcctttgtgtc

SEQ ID NO: 102246 - RNA, 21 nt, synthetic construct
  source 1..21: mol_type = other RNA
tgagttcctgcttcccccaaa

SEQ ID NO: 102247 - RNA, 21 nt, synthetic construct
  source 1..21: mol_type = other RNA
tgagttgtttccactttgagg

SEQ ID NO: 102248 - RNA, 21 nt, synthetic construct
  source 1..21: mol_type = other RNA
tgagtttaattcttttgctgt

SEQ ID NO: 102249 - RNA, 21 nt, synthetic construct
  source 1..21: mol_type = other RNA
tgagtttcaatgacttttatc

SEQ ID NO: 102250 - RNA, 21 nt, synthetic construct
  source 1..21: mol_type = other RNA
tgagtttccagaaaactggca

SEQ ID NO: 102251 - RNA, 21 nt, synthetic construct
  source 1..21: mol_type = other RNA
tgagtttgacctgtaattttt

SEQ ID NO: 102252 - RNA, 21 nt, synthetic construct
  source 1..21: mol_type = other RNA
tgagtttgctctgcaaatgag

SEQ ID NO: 102253 - RNA, 21 nt, synthetic construct
  source 1..21: mol_type = other RNA
tgagtttggtgtatttagtat

SEQ ID NO: 102254 - RNA, 21 nt, synthetic construct
  source 1..21: mol_type = other RNA
tgagtttgttctgtcacattt

SEQ ID NO: 102255 - RNA, 21 nt, synthetic construct
  source 1..21: mol_type = other RNA
tgagttttaactcttgcatta

SEQ ID NO: 102256 - RNA, 21 nt, synthetic construct
  source 1..21: mol_type = other RNA
tgagttttcaacctttgttga

SEQ ID NO: 102257 - RNA, 21 nt, synthetic construct
  source 1..21: mol_type = other RNA
tgataaaaaggagggaaaatg

SEQ ID NO: 102258 - RNA, 21 nt, synthetic construct
  source 1..21: mol_type = other RNA
tgataaaaataacgggccggg

SEQ ID NO: 102259 - RNA, 21 nt, synthetic construct
  source 1..21: mol_type = other RNA
tgataaaaatctctacaggga

SEQ ID NO: 102260 - RNA, 21 nt, synthetic construct
  source 1..21: mol_type = other RNA
tgataaaactgaagtttatcg

SEQ ID NO: 102261 - RNA, 21 nt, synthetic construct
  source 1..21: mol_type = other RNA
tgataaaagtcattgaaactc

SEQ ID NO: 102262 - RNA, 21 nt, synthetic construct
  source 1..21: mol_type = other RNA
tgataaacttcagttttgagt

SEQ ID NO: 102263 - RNA, 21 nt, synthetic construct
  source 1..21: mol_type = other RNA
tgataaatctaaagccaatct

SEQ ID NO: 102264 - RNA, 21 nt, synthetic construct
  source 1..21: mol_type = other RNA
tgataaatggctttttacgat

SEQ ID NO: 102265 - RNA, 21 nt, synthetic construct
  source 1..21: mol_type = other RNA
tgataactgatatgagggatg

SEQ ID NO: 102266 - RNA, 21 nt, synthetic construct
  source 1..21: mol_type = other RNA
tgataactggtgcttttttgg

SEQ ID NO: 102267 - RNA, 21 nt, synthetic construct
  source 1..21: mol_type = other RNA
tgataagcacatggtgataac

SEQ ID NO: 102268 - RNA, 21 nt, synthetic construct
  source 1..21: mol_type = other RNA
tgataagcccaacctgattag

SEQ ID NO: 102269 - RNA, 21 nt, synthetic construct
  source 1..21: mol_type = other RNA
tgataagctcccagccaaaca

SEQ ID NO: 102270 - RNA, 21 nt, synthetic construct
  source 1..21: mol_type = other RNA
tgataaggggctatctttact

SEQ ID NO: 102271 - RNA, 21 nt, synthetic construct
  source 1..21: mol_type = other RNA
tgataatcacagacgcaaagg

SEQ ID NO: 102272 - RNA, 21 nt, synthetic construct
  source 1..21: mol_type = other RNA
tgatacaatacttggatctta

SEQ ID NO: 102273 - RNA, 21 nt, synthetic construct
  source 1..21: mol_type = other RNA
tgatacacttctatccagtga

SEQ ID NO: 102274 - RNA, 21 nt, synthetic construct
  source 1..21: mol_type = other RNA
tgataccataaagtcagagga

SEQ ID NO: 102275 - RNA, 21 nt, synthetic construct
  source 1..21: mol_type = other RNA
tgataccctcaaaagatgcag

SEQ ID NO: 102276 - RNA, 21 nt, synthetic construct
  source 1..21: mol_type = other RNA
tgatacctagtacgtaaccta

SEQ ID NO: 102277 - RNA, 21 nt, synthetic construct
  source 1..21: mol_type = other RNA
tgatacctcttactaaaaaga

SEQ ID NO: 102278 - RNA, 21 nt, synthetic construct
  source 1..21: mol_type = other RNA
tgataccttcttgagagtctc

SEQ ID NO: 102279 - RNA, 21 nt, synthetic construct
  source 1..21: mol_type = other RNA
tgatacggagtctcgctctgt

SEQ ID NO: 102280 - RNA, 21 nt, synthetic construct
  source 1..21: mol_type = other RNA
tgatactagtttagtgcagta

SEQ ID NO: 102281 - RNA, 21 nt, synthetic construct
  source 1..21: mol_type = other RNA
tgatactcgtagttttttggt

SEQ ID NO: 102282 - RNA, 21 nt, synthetic construct
  source 1..21: mol_type = other RNA
tgatagaataccacttagttt

SEQ ID NO: 102283 - RNA, 21 nt, synthetic construct
  source 1..21: mol_type = other RNA
tgatagactggattaaggaga

SEQ ID NO: 102284 - RNA, 21 nt, synthetic construct
  source 1..21: mol_type = other RNA
tgatagatattggcaacattt

SEQ ID NO: 102285 - RNA, 21 nt, synthetic construct
  source 1..21: mol_type = other RNA
tgatagcattatcccagatct

SEQ ID NO: 102286 - RNA, 21 nt, synthetic construct
  source 1..21: mol_type = other RNA
tgatagcgaaaggtacgacgc

SEQ ID NO: 102287 - RNA, 21 nt, synthetic construct
  source 1..21: mol_type = other RNA
tgatagctgtggaagcacagt

SEQ ID NO: 102288 - RNA, 21 nt, synthetic construct
  source 1..21: mol_type = other RNA
tgatagcttgacaaaaggccc

SEQ ID NO: 102289 - RNA, 21 nt, synthetic construct
  source 1..21: mol_type = other RNA
tgataggaatatcgtcttttt

SEQ ID NO: 102290 - RNA, 21 nt, synthetic construct
  source 1..21: mol_type = other RNA
tgataggataatgtccagagg

SEQ ID NO: 102291 - RNA, 21 nt, synthetic construct
  source 1..21: mol_type = other RNA
tgataggtcactgcagtctca

SEQ ID NO: 102292 - RNA, 21 nt, synthetic construct
  source 1..21: mol_type = other RNA
tgatagtcttccaattgcaga

SEQ ID NO: 102293 - RNA, 21 nt, synthetic construct
  source 1..21: mol_type = other RNA
tgatagttgcagattcatctt

SEQ ID NO: 102294 - RNA, 21 nt, synthetic construct
  source 1..21: mol_type = other RNA
tgatatcctgtaaacctggaa

SEQ ID NO: 102295 - RNA, 21 nt, synthetic construct
  source 1..21: mol_type = other RNA
tgatatctgagtgttgtgtgc

SEQ ID NO: 102296 - RNA, 21 nt, synthetic construct
  source 1..21: mol_type = other RNA
tgatatctgtaagtcatcaaa

SEQ ID NO: 102297 - RNA, 21 nt, synthetic construct
  source 1..21: mol_type = other RNA
tgatatgagggatgaggaaga

SEQ ID NO: 102298 - RNA, 21 nt, synthetic construct
  source 1..21: mol_type = other RNA
tgatatgccacattttttggt

SEQ ID NO: 102299 - RNA, 21 nt, synthetic construct
  source 1..21: mol_type = other RNA
tgatatgtcgcatgaaaacag

SEQ ID NO: 102300 - RNA, 21 nt, synthetic construct
  source 1..21: mol_type = other RNA
tgatattggcataaagacaga

SEQ ID NO: 102301 - RNA, 21 nt, synthetic construct
  source 1..21: mol_type = other RNA
tgatatttttcagattgacct

SEQ ID NO: 102302 - RNA, 21 nt, synthetic construct
  source 1..21: mol_type = other RNA
tgatcaaaaccaggaggtttg

SEQ ID NO: 102303 - RNA, 21 nt, synthetic construct
  source 1..21: mol_type = other RNA
tgatcaaagtgaaaggcaaag

SEQ ID NO: 102304 - RNA, 21 nt, synthetic construct
  source 1..21: mol_type = other RNA
tgatcaaggaagcttcctaaa

SEQ ID NO: 102305 - RNA, 21 nt, synthetic construct
  source 1..21: mol_type = other RNA
tgatcaagttgcttggcacag

SEQ ID NO: 102306 - RNA, 21 nt, synthetic construct
  source 1..21: mol_type = other RNA
tgatcacaccctcctaccttc

SEQ ID NO: 102307 - RNA, 21 nt, synthetic construct
  source 1..21: mol_type = other RNA
tgatcacagaagtgttttgat

SEQ ID NO: 102308 - RNA, 21 nt, synthetic construct
  source 1..21: mol_type = other RNA
tgatcagaagagcactatgta

SEQ ID NO: 102309 - RNA, 21 nt, synthetic construct
  source 1..21: mol_type = other RNA
tgatcagcaccctcaaatgtc

SEQ ID NO: 102310 - RNA, 21 nt, synthetic construct
  source 1..21: mol_type = other RNA
tgatcagcttcctacccaagc

SEQ ID NO: 102311 - RNA, 21 nt, synthetic construct
  source 1..21: mol_type = other RNA
tgatcaggaaagaccggggac

SEQ ID NO: 102312 - RNA, 21 nt, synthetic construct
  source 1..21: mol_type = other RNA
tgatcaggaaagatgaagtat

SEQ ID NO: 102313 - RNA, 21 nt, synthetic construct
  source 1..21: mol_type = other RNA
tgatcagggatttggccagaa

SEQ ID NO: 102314 - RNA, 21 nt, synthetic construct
  source 1..21: mol_type = other RNA
tgatcatacacatccagaagt

SEQ ID NO: 102315 - RNA, 21 nt, synthetic construct
  source 1..21: mol_type = other RNA
tgatcatcgcattacgagtta

SEQ ID NO: 102316 - RNA, 21 nt, synthetic construct
  source 1..21: mol_type = other RNA
tgatccagcagtttcacttct

SEQ ID NO: 102317 - RNA, 21 nt, synthetic construct
  source 1..21: mol_type = other RNA
tgatccaggtgtatgatctta

SEQ ID NO: 102318 - RNA, 21 nt, synthetic construct
  source 1..21: mol_type = other RNA
tgatccattacatcaacatat

SEQ ID NO: 102319 - RNA, 21 nt, synthetic construct
  source 1..21: mol_type = other RNA
tgatcccactagtggaagaat

SEQ ID NO: 102320 - RNA, 21 nt, synthetic construct
  source 1..21: mol_type = other RNA
tgatccctgatatgtcgcatg

SEQ ID NO: 102321 - RNA, 21 nt, synthetic construct
  source 1..21: mol_type = other RNA
tgatcctaagccatctaattc

SEQ ID NO: 102322 - RNA, 21 nt, synthetic construct
  source 1..21: mol_type = other RNA
tgatcctcctgccttggcctt

SEQ ID NO: 102323 - RNA, 21 nt, synthetic construct
  source 1..21: mol_type = other RNA
tgatcctggaatagtagcttc

SEQ ID NO: 102324 - RNA, 21 nt, synthetic construct
  source 1..21: mol_type = other RNA
tgatctaaaatggaagacttt

SEQ ID NO: 102325 - RNA, 21 nt, synthetic construct
  source 1..21: mol_type = other RNA
tgatctaaatggtgtgaagtt

SEQ ID NO: 102326 - RNA, 21 nt, synthetic construct
  source 1..21: mol_type = other RNA
tgatctatcaatctcacacct

SEQ ID NO: 102327 - RNA, 21 nt, synthetic construct
  source 1..21: mol_type = other RNA
tgatctatgaatttgcctatt

SEQ ID NO: 102328 - RNA, 21 nt, synthetic construct
  source 1..21: mol_type = other RNA
tgatctatgcatactgcagca

SEQ ID NO: 102329 - RNA, 21 nt, synthetic construct
  source 1..21: mol_type = other RNA
tgatctcacgtcaccgcaacc

SEQ ID NO: 102330 - RNA, 21 nt, synthetic construct
  source 1..21: mol_type = other RNA
tgatctcggcttactgcaacc

SEQ ID NO: 102331 - RNA, 21 nt, synthetic construct
  source 1..21: mol_type = other RNA
tgatctctgctcaccgcaaca

SEQ ID NO: 102332 - RNA, 21 nt, synthetic construct
  source 1..21: mol_type = other RNA
tgatctgccaggacaattgaa

SEQ ID NO: 102333 - RNA, 21 nt, synthetic construct
  source 1..21: mol_type = other RNA
tgatctgctcaagttttctat

SEQ ID NO: 102334 - RNA, 21 nt, synthetic construct
  source 1..21: mol_type = other RNA
tgatctggtcacaaacacaaa

SEQ ID NO: 102335 - RNA, 21 nt, synthetic construct
  source 1..21: mol_type = other RNA
tgatcttattaatgtgttgtc

SEQ ID NO: 102336 - RNA, 21 nt, synthetic construct
  source 1..21: mol_type = other RNA
tgatcttgggaatactttccc

SEQ ID NO: 102337 - RNA, 21 nt, synthetic construct
  source 1..21: mol_type = other RNA
tgatctttacttcccttctcg

SEQ ID NO: 102338 - RNA, 21 nt, synthetic construct
  source 1..21: mol_type = other RNA
tgatctttcaaggggcctttt

SEQ ID NO: 102339 - RNA, 21 nt, synthetic construct
  source 1..21: mol_type = other RNA
tgatctttgaataaagggtca

SEQ ID NO: 102340 - RNA, 21 nt, synthetic construct
  source 1..21: mol_type = other RNA
tgatcttttctgacaatttca

SEQ ID NO: 102341 - RNA, 21 nt, synthetic construct
  source 1..21: mol_type = other RNA
tgatgaaaagagcacaccaag

SEQ ID NO: 102342 - RNA, 21 nt, synthetic construct
  source 1..21: mol_type = other RNA
tgatgaacaaaggcaggagca

SEQ ID NO: 102343 - RNA, 21 nt, synthetic construct
  source 1..21: mol_type = other RNA
tgatgaactacacagacatga

SEQ ID NO: 102344 - RNA, 21 nt, synthetic construct
  source 1..21: mol_type = other RNA
tgatgaagaacctgttcattt

SEQ ID NO: 102345 - RNA, 21 nt, synthetic construct
  source 1..21: mol_type = other RNA
tgatgaagggttttctgtaga

SEQ ID NO: 102346 - RNA, 21 nt, synthetic construct
  source 1..21: mol_type = other RNA
tgatgaattccagtttatcta

SEQ ID NO: 102347 - RNA, 21 nt, synthetic construct
  source 1..21: mol_type = other RNA
tgatgacagttactctaaaag

SEQ ID NO: 102348 - RNA, 21 nt, synthetic construct
  source 1..21: mol_type = other RNA
tgatgactatgaaaagcctca

SEQ ID NO: 102349 - RNA, 21 nt, synthetic construct
  source 1..21: mol_type = other RNA
tgatgactgtaagctgaactc

SEQ ID NO: 102350 - RNA, 21 nt, synthetic construct
  source 1..21: mol_type = other RNA
tgatgacttacagatatcacc

SEQ ID NO: 102351 - RNA, 21 nt, synthetic construct
  source 1..21: mol_type = other RNA
tgatgagctactgcatgctag

SEQ ID NO: 102352 - RNA, 21 nt, synthetic construct
  source 1..21: mol_type = other RNA
tgatgatagaataccacttag

SEQ ID NO: 102353 - RNA, 21 nt, synthetic construct
  source 1..21: mol_type = other RNA
tgatgatgatggtgatgctaa

SEQ ID NO: 102354 - RNA, 21 nt, synthetic construct
  source 1..21: mol_type = other RNA
tgatgatggtgatgctaacgt

SEQ ID NO: 102355 - RNA, 21 nt, synthetic construct
  source 1..21: mol_type = other RNA
tgatgattttagaaggtaaga

SEQ ID NO: 102356 - RNA, 21 nt, synthetic construct
  source 1..21: mol_type = other RNA
tgatgatttttgccagtgttt

SEQ ID NO: 102357 - RNA, 21 nt, synthetic construct
  source 1..21: mol_type = other RNA
tgatgcaactcctgggctcat

SEQ ID NO: 102358 - RNA, 21 nt, synthetic construct
  source 1..21: mol_type = other RNA
tgatgcaatttgttttccaag

SEQ ID NO: 102359 - RNA, 21 nt, synthetic construct
  source 1..21: mol_type = other RNA
tgatgcacaaaagtttaactt

SEQ ID NO: 102360 - RNA, 21 nt, synthetic construct
  source 1..21: mol_type = other RNA
tgatgcacaagccttgaaaat

SEQ ID NO: 102361 - RNA, 21 nt, synthetic construct
  source 1..21: mol_type = other RNA
tgatgcagcccctgccacact

SEQ ID NO: 102362 - RNA, 21 nt, synthetic construct
  source 1..21: mol_type = other RNA
tgatgccactcaaaactgaag

SEQ ID NO: 102363 - RNA, 21 nt, synthetic construct
  source 1..21: mol_type = other RNA
tgatgccatcacattttgaat

SEQ ID NO: 102364 - RNA, 21 nt, synthetic construct
  source 1..21: mol_type = other RNA
tgatgctaacgtgcttgctct

SEQ ID NO: 102365 - RNA, 21 nt, synthetic construct
  source 1..21: mol_type = other RNA
tgatgctttctctagttgcac

SEQ ID NO: 102366 - RNA, 21 nt, synthetic construct
  source 1..21: mol_type = other RNA
tgatggaacggcttaacacct

SEQ ID NO: 102367 - RNA, 21 nt, synthetic construct
  source 1..21: mol_type = other RNA
tgatggaattctgacacccga

SEQ ID NO: 102368 - RNA, 21 nt, synthetic construct
  source 1..21: mol_type = other RNA
tgatggacattctgcttcctt

SEQ ID NO: 102369 - RNA, 21 nt, synthetic construct
  source 1..21: mol_type = other RNA
tgatggaggtggaactctgtc

SEQ ID NO: 102370 - RNA, 21 nt, synthetic construct
  source 1..21: mol_type = other RNA
tgatggcaacaatcaacaggt

SEQ ID NO: 102371 - RNA, 21 nt, synthetic construct
  source 1..21: mol_type = other RNA
tgatggcatcattcataaaca

SEQ ID NO: 102372 - RNA, 21 nt, synthetic construct
  source 1..21: mol_type = other RNA
tgatggcgcatgcctgtggtc

SEQ ID NO: 102373 - RNA, 21 nt, synthetic construct
  source 1..21: mol_type = other RNA
tgatggctcaacgcctgtgat

SEQ ID NO: 102374 - RNA, 21 nt, synthetic construct
  source 1..21: mol_type = other RNA
tgatggctgtactaagcctat

SEQ ID NO: 102375 - RNA, 21 nt, synthetic construct
  source 1..21: mol_type = other RNA
tgatgggagatggacactgca

SEQ ID NO: 102376 - RNA, 21 nt, synthetic construct
  source 1..21: mol_type = other RNA
tgatgggggtaagattgtggt

SEQ ID NO: 102377 - RNA, 21 nt, synthetic construct
  source 1..21: mol_type = other RNA
tgatggtgatgctaacgtgct

SEQ ID NO: 102378 - RNA, 21 nt, synthetic construct
  source 1..21: mol_type = other RNA
tgatggtttggggcttttgaa

SEQ ID NO: 102379 - RNA, 21 nt, synthetic construct
  source 1..21: mol_type = other RNA
tgatgtaagtgggaggaggtc

SEQ ID NO: 102380 - RNA, 21 nt, synthetic construct
  source 1..21: mol_type = other RNA
tgatgtaatggatcaaggcac

SEQ ID NO: 102381 - RNA, 21 nt, synthetic construct
  source 1..21: mol_type = other RNA
tgatgtagaggcagttgagtt

SEQ ID NO: 102382 - RNA, 21 nt, synthetic construct
  source 1..21: mol_type = other RNA
tgatgtcacaagccagggtct

SEQ ID NO: 102383 - RNA, 21 nt, synthetic construct
  source 1..21: mol_type = other RNA
tgatgtctcagatgtctccat

SEQ ID NO: 102384 - RNA, 21 nt, synthetic construct
  source 1..21: mol_type = other RNA
tgatgtcttttgaagaagttc

SEQ ID NO: 102385 - RNA, 21 nt, synthetic construct
  source 1..21: mol_type = other RNA
tgatgtgaggatctgttggtg

SEQ ID NO: 102386 - RNA, 21 nt, synthetic construct
  source 1..21: mol_type = other RNA
tgatgtgtagttattattgtc

SEQ ID NO: 102387 - RNA, 21 nt, synthetic construct
  source 1..21: mol_type = other RNA
tgatgtgtatgttacacttcc

SEQ ID NO: 102388 - RNA, 21 nt, synthetic construct
  source 1..21: mol_type = other RNA
tgatgtgtgtctctgctctca

SEQ ID NO: 102389 - RNA, 21 nt, synthetic construct
  source 1..21: mol_type = other RNA
tgatgtgttgaccttagtggt

SEQ ID NO: 102390 - RNA, 21 nt, synthetic construct
  source 1..21: mol_type = other RNA
tgatgttcaaccctcggcctc

SEQ ID NO: 102391 - RNA, 21 nt, synthetic construct
  source 1..21: mol_type = other RNA
tgatgttgagtatcttttcat

SEQ ID NO: 102392 - RNA, 21 nt, synthetic construct
  source 1..21: mol_type = other RNA
tgatgtttggctccttaccac

SEQ ID NO: 102393 - RNA, 21 nt, synthetic construct
  source 1..21: mol_type = other RNA
tgatgttttgaacgaatgaaa

SEQ ID NO: 102394 - RNA, 21 nt, synthetic construct
  source 1..21: mol_type = other RNA
tgattaaaggccctgatttaa

SEQ ID NO: 102395 - RNA, 21 nt, synthetic construct
  source 1..21: mol_type = other RNA
tgattaatttgaggtctaggc

SEQ ID NO: 102396 - RNA, 21 nt, synthetic construct
  source 1..21: mol_type = other RNA
tgattacaagggtgacagagc

SEQ ID NO: 102397 - RNA, 21 nt, synthetic construct
  source 1..21: mol_type = other RNA
tgattacaattcctttctagg

SEQ ID NO: 102398 - RNA, 21 nt, synthetic construct
  source 1..21: mol_type = other RNA
tgattaccggcatccgccacc

SEQ ID NO: 102399 - RNA, 21 nt, synthetic construct
  source 1..21: mol_type = other RNA
tgattactgactcaatcttct

SEQ ID NO: 102400 - RNA, 21 nt, synthetic construct
  source 1..21: mol_type = other RNA
tgattactttacagttatgtc

SEQ ID NO: 102401 - RNA, 21 nt, synthetic construct
  source 1..21: mol_type = other RNA
tgattagaaggattgttcatg

SEQ ID NO: 102402 - RNA, 21 nt, synthetic construct
  source 1..21: mol_type = other RNA
tgattagaggctgcaccctcc

SEQ ID NO: 102403 - RNA, 21 nt, synthetic construct
  source 1..21: mol_type = other RNA
tgattagcttcctcaggatct

SEQ ID NO: 102404 - RNA, 21 nt, synthetic construct
  source 1..21: mol_type = other RNA
tgattagttgactcctaaaac

SEQ ID NO: 102405 - RNA, 21 nt, synthetic construct
  source 1..21: mol_type = other RNA
tgattataaccttgaacttcc

SEQ ID NO: 102406 - RNA, 21 nt, synthetic construct
  source 1..21: mol_type = other RNA
tgattatcagggatattggct

SEQ ID NO: 102407 - RNA, 21 nt, synthetic construct
  source 1..21: mol_type = other RNA
tgattatgttagatatcccat

SEQ ID NO: 102408 - RNA, 21 nt, synthetic construct
  source 1..21: mol_type = other RNA
tgattatttgcggcttgatta

SEQ ID NO: 102409 - RNA, 21 nt, synthetic construct
  source 1..21: mol_type = other RNA
tgattatttttacccaacatg

SEQ ID NO: 102410 - RNA, 21 nt, synthetic construct
  source 1..21: mol_type = other RNA
tgattcaaaatgtgatggcat

SEQ ID NO: 102411 - RNA, 21 nt, synthetic construct
  source 1..21: mol_type = other RNA
tgattcacttttgagttcaga

SEQ ID NO: 102412 - RNA, 21 nt, synthetic construct
  source 1..21: mol_type = other RNA
tgattcagagtgctgggtaga

SEQ ID NO: 102413 - RNA, 21 nt, synthetic construct
  source 1..21: mol_type = other RNA
tgattcagatgacagaaataa

SEQ ID NO: 102414 - RNA, 21 nt, synthetic construct
  source 1..21: mol_type = other RNA
tgattcagtcttggtagtttg

SEQ ID NO: 102415 - RNA, 21 nt, synthetic construct
  source 1..21: mol_type = other RNA
tgattcagtggttggaaaact

SEQ ID NO: 102416 - RNA, 21 nt, synthetic construct
  source 1..21: mol_type = other RNA
tgattccacttatatgaagct

SEQ ID NO: 102417 - RNA, 21 nt, synthetic construct
  source 1..21: mol_type = other RNA
tgattccagtttctctgcttt

SEQ ID NO: 102418 - RNA, 21 nt, synthetic construct
  source 1..21: mol_type = other RNA
tgattccccttatatgggata

SEQ ID NO: 102419 - RNA, 21 nt, synthetic construct
  source 1..21: mol_type = other RNA
tgattcgcattgctaattcat

SEQ ID NO: 102420 - RNA, 21 nt, synthetic construct
  source 1..21: mol_type = other RNA
tgattctaatgtgcaaggaga

SEQ ID NO: 102421 - RNA, 21 nt, synthetic construct
  source 1..21: mol_type = other RNA
tgattcttccactagtgggat

SEQ ID NO: 102422 - RNA, 21 nt, synthetic construct
  source 1..21: mol_type = other RNA
tgattgagattagcgaaaggg

SEQ ID NO: 102423 - RNA, 21 nt, synthetic construct
  source 1..21: mol_type = other RNA
tgattgaggacttcatgtaca

SEQ ID NO: 102424 - RNA, 21 nt, synthetic construct
  source 1..21: mol_type = other RNA
tgattgagtatctggtgctgg

SEQ ID NO: 102425 - RNA, 21 nt, synthetic construct
  source 1..21: mol_type = other RNA
tgattgcaggtgtgggccacc

SEQ ID NO: 102426 - RNA, 21 nt, synthetic construct
  source 1..21: mol_type = other RNA
tgattgccagttttctggaaa

SEQ ID NO: 102427 - RNA, 21 nt, synthetic construct
  source 1..21: mol_type = other RNA
tgattgcccattataaaatag

SEQ ID NO: 102428 - RNA, 21 nt, synthetic construct
  source 1..21: mol_type = other RNA
tgattggatatttgcagtagt

SEQ ID NO: 102429 - RNA, 21 nt, synthetic construct
  source 1..21: mol_type = other RNA
tgattggcaaatctttagtgt

SEQ ID NO: 102430 - RNA, 21 nt, synthetic construct
  source 1..21: mol_type = other RNA
tgattgggcattaattgagag

SEQ ID NO: 102431 - RNA, 21 nt, synthetic construct
  source 1..21: mol_type = other RNA
tgattgggtcaacaaactaac

SEQ ID NO: 102432 - RNA, 21 nt, synthetic construct
  source 1..21: mol_type = other RNA
tgattgttagccacagcgttg

SEQ ID NO: 102433 - RNA, 21 nt, synthetic construct
  source 1..21: mol_type = other RNA
tgattgttccaggggggaaaa

SEQ ID NO: 102434 - RNA, 21 nt, synthetic construct
  source 1..21: mol_type = other RNA
tgattgttgccatcattttat

SEQ ID NO: 102435 - RNA, 21 nt, synthetic construct
  source 1..21: mol_type = other RNA
tgatttaaagtaggttgagac

SEQ ID NO: 102436 - RNA, 21 nt, synthetic construct
  source 1..21: mol_type = other RNA
tgatttaatagaggtctgtct

SEQ ID NO: 102437 - RNA, 21 nt, synthetic construct
  source 1..21: mol_type = other RNA
tgatttagaaatacctgcagg

SEQ ID NO: 102438 - RNA, 21 nt, synthetic construct
  source 1..21: mol_type = other RNA
tgatttaggccactctcatct

SEQ ID NO: 102439 - RNA, 21 nt, synthetic construct
  source 1..21: mol_type = other RNA
tgatttataatccattgggta

SEQ ID NO: 102440 - RNA, 21 nt, synthetic construct
  source 1..21: mol_type = other RNA
tgatttatagtgtttccttcc

SEQ ID NO: 102441 - RNA, 21 nt, synthetic construct
  source 1..21: mol_type = other RNA
tgatttatggcctaagatgga

SEQ ID NO: 102442 - RNA, 21 nt, synthetic construct
  source 1..21: mol_type = other RNA
tgatttcaaagttaatagcct

SEQ ID NO: 102443 - RNA, 21 nt, synthetic construct
  source 1..21: mol_type = other RNA
tgatttcaagtaacactcaga

SEQ ID NO: 102444 - RNA, 21 nt, synthetic construct
  source 1..21: mol_type = other RNA
tgatttcacttacttgagccc

SEQ ID NO: 102445 - RNA, 21 nt, synthetic construct
  source 1..21: mol_type = other RNA
tgatttccagtgtttggtttt

SEQ ID NO: 102446 - RNA, 21 nt, synthetic construct
  source 1..21: mol_type = other RNA
tgatttccctgcatacactca

SEQ ID NO: 102447 - RNA, 21 nt, synthetic construct
  source 1..21: mol_type = other RNA
tgatttctaggccctaacccc

SEQ ID NO: 102448 - RNA, 21 nt, synthetic construct
  source 1..21: mol_type = other RNA
tgatttcttctttggctcaat

SEQ ID NO: 102449 - RNA, 21 nt, synthetic construct
  source 1..21: mol_type = other RNA
tgatttgaccatgggacaagt

SEQ ID NO: 102450 - RNA, 21 nt, synthetic construct
  source 1..21: mol_type = other RNA
tgatttgcatttctctaatag

SEQ ID NO: 102451 - RNA, 21 nt, synthetic construct
  source 1..21: mol_type = other RNA
tgatttgctggctcagtctgt

SEQ ID NO: 102452 - RNA, 21 nt, synthetic construct
  source 1..21: mol_type = other RNA
tgatttggtgtgtgcaaagga

SEQ ID NO: 102453 - RNA, 21 nt, synthetic construct
  source 1..21: mol_type = other RNA
tgatttgttatatccagattg

SEQ ID NO: 102454 - RNA, 21 nt, synthetic construct
  source 1..21: mol_type = other RNA
tgatttgtttagtagctgtct

SEQ ID NO: 102455 - RNA, 21 nt, synthetic construct
  source 1..21: mol_type = other RNA
tgatttgtttgaattaagcac

SEQ ID NO: 102456 - RNA, 21 nt, synthetic construct
  source 1..21: mol_type = other RNA
tgattttaatctgtcctgaat

SEQ ID NO: 102457 - RNA, 21 nt, synthetic construct
  source 1..21: mol_type = other RNA
tgattttaccaaggctaagtt

SEQ ID NO: 102458 - RNA, 21 nt, synthetic construct
  source 1..21: mol_type = other RNA
tgattttagaaggtaagaatg

SEQ ID NO: 102459 - RNA, 21 nt, synthetic construct
  source 1..21: mol_type = other RNA
tgattttcacagggcagggag

SEQ ID NO: 102460 - RNA, 21 nt, synthetic construct
  source 1..21: mol_type = other RNA
tgattttctgcttctcaataa

SEQ ID NO: 102461 - RNA, 21 nt, synthetic construct
  source 1..21: mol_type = other RNA
tgattttgaggcagagagatg

SEQ ID NO: 102462 - RNA, 21 nt, synthetic construct
  source 1..21: mol_type = other RNA
tgattttgtatcctgagactt

SEQ ID NO: 102463 - RNA, 21 nt, synthetic construct
  source 1..21: mol_type = other RNA
tgattttgtgtcttctgtttt

SEQ ID NO: 102464 - RNA, 21 nt, synthetic construct
  source 1..21: mol_type = other RNA
tgattttgtttatttgctgtc

SEQ ID NO: 102465 - RNA, 21 nt, synthetic construct
  source 1..21: mol_type = other RNA
tgatttttagtgactggctta

SEQ ID NO: 102466 - RNA, 21 nt, synthetic construct
  source 1..21: mol_type = other RNA
tgatttttgccagtgttttaa

SEQ ID NO: 102467 - RNA, 21 nt, synthetic construct
  source 1..21: mol_type = other RNA
tgcaaaaacagtttccctctg

SEQ ID NO: 102468 - RNA, 21 nt, synthetic construct
  source 1..21: mol_type = other RNA
tgcaaaaatactacaagagtt

SEQ ID NO: 102469 - RNA, 21 nt, synthetic construct
  source 1..21: mol_type = other RNA
tgcaaaaattttgttcaggag

SEQ ID NO: 102470 - RNA, 21 nt, synthetic construct
  source 1..21: mol_type = other RNA
tgcaaaacaatagcccagcag

SEQ ID NO: 102471 - RNA, 21 nt, synthetic construct
  source 1..21: mol_type = other RNA
tgcaaaacggaaactttatac

SEQ ID NO: 102472 - RNA, 21 nt, synthetic construct
  source 1..21: mol_type = other RNA
tgcaaaccaaatgcagaaaat

SEQ ID NO: 102473 - RNA, 21 nt, synthetic construct
  source 1..21: mol_type = other RNA
tgcaaacctcctggttttgat

SEQ ID NO: 102474 - RNA, 21 nt, synthetic construct
  source 1..21: mol_type = other RNA
tgcaaactaagtggtattcta

SEQ ID NO: 102475 - RNA, 21 nt, synthetic construct
  source 1..21: mol_type = other RNA
tgcaaactaccaagactgaat

SEQ ID NO: 102476 - RNA, 21 nt, synthetic construct
  source 1..21: mol_type = other RNA
tgcaaactctaaataataggt

SEQ ID NO: 102477 - RNA, 21 nt, synthetic construct
  source 1..21: mol_type = other RNA
tgcaaaggattagaaagtaga

SEQ ID NO: 102478 - RNA, 21 nt, synthetic construct
  source 1..21: mol_type = other RNA
tgcaaagtttcctacatactg

SEQ ID NO: 102479 - RNA, 21 nt, synthetic construct
  source 1..21: mol_type = other RNA
tgcaaatatccaatcactggc

SEQ ID NO: 102480 - RNA, 21 nt, synthetic construct
  source 1..21: mol_type = other RNA
tgcaaatcaaaacaataagac

SEQ ID NO: 102481 - RNA, 21 nt, synthetic construct
  source 1..21: mol_type = other RNA
tgcaaatgaggttgcttttac

SEQ ID NO: 102482 - RNA, 21 nt, synthetic construct
  source 1..21: mol_type = other RNA
tgcaaattattttcctccttc

SEQ ID NO: 102483 - RNA, 21 nt, synthetic construct
  source 1..21: mol_type = other RNA
tgcaacaaatgttgcagagac

SEQ ID NO: 102484 - RNA, 21 nt, synthetic construct
  source 1..21: mol_type = other RNA
tgcaacagaataaatgaaaac

SEQ ID NO: 102485 - RNA, 21 nt, synthetic construct
  source 1..21: mol_type = other RNA
tgcaacagatctgagaagact

SEQ ID NO: 102486 - RNA, 21 nt, synthetic construct
  source 1..21: mol_type = other RNA
tgcaacataaatagggtgcta

SEQ ID NO: 102487 - RNA, 21 nt, synthetic construct
  source 1..21: mol_type = other RNA
tgcaacatttgttgcatcccc

SEQ ID NO: 102488 - RNA, 21 nt, synthetic construct
  source 1..21: mol_type = other RNA
tgcaaccatccccgctgtcca

SEQ ID NO: 102489 - RNA, 21 nt, synthetic construct
  source 1..21: mol_type = other RNA
tgcaacctccgtttttcaggt

SEQ ID NO: 102490 - RNA, 21 nt, synthetic construct
  source 1..21: mol_type = other RNA
tgcaacctgctttcctcatgt

SEQ ID NO: 102491 - RNA, 21 nt, synthetic construct
  source 1..21: mol_type = other RNA
tgcaactagagaaagcatcag

SEQ ID NO: 102492 - RNA, 21 nt, synthetic construct
  source 1..21: mol_type = other RNA
tgcaactatcaaaacacttct

SEQ ID NO: 102493 - RNA, 21 nt, synthetic construct
  source 1..21: mol_type = other RNA
tgcaactcctgggctcatcta

SEQ ID NO: 102494 - RNA, 21 nt, synthetic construct
  source 1..21: mol_type = other RNA
tgcaactgaaaacatcttttt

SEQ ID NO: 102495 - RNA, 21 nt, synthetic construct
  source 1..21: mol_type = other RNA
tgcaactgagaagagctgtaa

SEQ ID NO: 102496 - RNA, 21 nt, synthetic construct
  source 1..21: mol_type = other RNA
tgcaacttactctcaaataat

SEQ ID NO: 102497 - RNA, 21 nt, synthetic construct
  source 1..21: mol_type = other RNA
tgcaagaatggtttaacacat

SEQ ID NO: 102498 - RNA, 21 nt, synthetic construct
  source 1..21: mol_type = other RNA
tgcaagagttaaaactcacaa

SEQ ID NO: 102499 - RNA, 21 nt, synthetic construct
  source 1..21: mol_type = other RNA
tgcaagatgcataagttctag

SEQ ID NO: 102500 - RNA, 21 nt, synthetic construct
  source 1..21: mol_type = other RNA
tgcaagatggcaagtttccat

SEQ ID NO: 102501 - RNA, 21 nt, synthetic construct
  source 1..21: mol_type = other RNA
tgcaagatgtcaacattaagg

SEQ ID NO: 102502 - RNA, 21 nt, synthetic construct
  source 1..21: mol_type = other RNA
tgcaagattaatcttgtgaat

SEQ ID NO: 102503 - RNA, 21 nt, synthetic construct
  source 1..21: mol_type = other RNA
tgcaagcactggtaaggaaac

SEQ ID NO: 102504 - RNA, 21 nt, synthetic construct
  source 1..21: mol_type = other RNA
tgcaagcagatctgctgtaag

SEQ ID NO: 102505 - RNA, 21 nt, synthetic construct
  source 1..21: mol_type = other RNA
tgcaagccacattagccactc

SEQ ID NO: 102506 - RNA, 21 nt, synthetic construct
  source 1..21: mol_type = other RNA
tgcaagctccgcctcctggtg

SEQ ID NO: 102507 - RNA, 21 nt, synthetic construct
  source 1..21: mol_type = other RNA
tgcaaggagagaaaaacaaaa

SEQ ID NO: 102508 - RNA, 21 nt, synthetic construct
  source 1..21: mol_type = other RNA
tgcaaggataaacaaagagaa

SEQ ID NO: 102509 - RNA, 21 nt, synthetic construct
  source 1..21: mol_type = other RNA
tgcaaggcccaccatgatgca

SEQ ID NO: 102510 - RNA, 21 nt, synthetic construct
  source 1..21: mol_type = other RNA
tgcaagttgctatccagtctc

SEQ ID NO: 102511 - RNA, 21 nt, synthetic construct
  source 1..21: mol_type = other RNA
tgcaataactcaaaatgttca

SEQ ID NO: 102512 - RNA, 21 nt, synthetic construct
  source 1..21: mol_type = other RNA
tgcaatacagttaacgtatga

SEQ ID NO: 102513 - RNA, 21 nt, synthetic construct
  source 1..21: mol_type = other RNA
tgcaatacttaatagcccaac

SEQ ID NO: 102514 - RNA, 21 nt, synthetic construct
  source 1..21: mol_type = other RNA
tgcaatcacagcacttgggga

SEQ ID NO: 102515 - RNA, 21 nt, synthetic construct
  source 1..21: mol_type = other RNA
tgcaatcacggctgattataa

SEQ ID NO: 102516 - RNA, 21 nt, synthetic construct
  source 1..21: mol_type = other RNA
tgcaatgataggtcactgcag

SEQ ID NO: 102517 - RNA, 21 nt, synthetic construct
  source 1..21: mol_type = other RNA
tgcaatgcaggcgcctggaca

SEQ ID NO: 102518 - RNA, 21 nt, synthetic construct
  source 1..21: mol_type = other RNA
tgcaatgcgtgtgaaaccaag

SEQ ID NO: 102519 - RNA, 21 nt, synthetic construct
  source 1..21: mol_type = other RNA
tgcaatggggcaatctcagct

SEQ ID NO: 102520 - RNA, 21 nt, synthetic construct
  source 1..21: mol_type = other RNA
tgcaatggtgggatctctggg

SEQ ID NO: 102521 - RNA, 21 nt, synthetic construct
  source 1..21: mol_type = other RNA
tgcaattccccagcctcagcc

SEQ ID NO: 102522 - RNA, 21 nt, synthetic construct
  source 1..21: mol_type = other RNA
tgcaattgcgcagaactgggg

SEQ ID NO: 102523 - RNA, 21 nt, synthetic construct
  source 1..21: mol_type = other RNA
tgcaattggaagactatcacg

SEQ ID NO: 102524 - RNA, 21 nt, synthetic construct
  source 1..21: mol_type = other RNA
tgcaatttatatgatactcgt

SEQ ID NO: 102525 - RNA, 21 nt, synthetic construct
  source 1..21: mol_type = other RNA
tgcaatttgttttccaagcct

SEQ ID NO: 102526 - RNA, 21 nt, synthetic construct
  source 1..21: mol_type = other RNA
tgcacaaaagtgaaaactaag

SEQ ID NO: 102527 - RNA, 21 nt, synthetic construct
  source 1..21: mol_type = other RNA
tgcacaaaagtttaactttga

SEQ ID NO: 102528 - RNA, 21 nt, synthetic construct
  source 1..21: mol_type = other RNA
tgcacaaaggattgggaagat

SEQ ID NO: 102529 - RNA, 21 nt, synthetic construct
  source 1..21: mol_type = other RNA
tgcacaacacatgcacactag

SEQ ID NO: 102530 - RNA, 21 nt, synthetic construct
  source 1..21: mol_type = other RNA
tgcacaagacagatgtgctta

SEQ ID NO: 102531 - RNA, 21 nt, synthetic construct
  source 1..21: mol_type = other RNA
tgcacaagccttgaaaatata

SEQ ID NO: 102532 - RNA, 21 nt, synthetic construct
  source 1..21: mol_type = other RNA
tgcacaagggaagaggccaca

SEQ ID NO: 102533 - RNA, 21 nt, synthetic construct
  source 1..21: mol_type = other RNA
tgcacaaggtcaagagcggcc

SEQ ID NO: 102534 - RNA, 21 nt, synthetic construct
  source 1..21: mol_type = other RNA
tgcacaatgcagtattgttaa

SEQ ID NO: 102535 - RNA, 21 nt, synthetic construct
  source 1..21: mol_type = other RNA
tgcacaatggaatattactca

SEQ ID NO: 102536 - RNA, 21 nt, synthetic construct
  source 1..21: mol_type = other RNA
tgcacaatgttgtggatgtcc

SEQ ID NO: 102537 - RNA, 21 nt, synthetic construct
  source 1..21: mol_type = other RNA
tgcacacaacactcagatatc

SEQ ID NO: 102538 - RNA, 21 nt, synthetic construct
  source 1..21: mol_type = other RNA
tgcacacaccaaatcatgaaa

SEQ ID NO: 102539 - RNA, 21 nt, synthetic construct
  source 1..21: mol_type = other RNA
tgcacacagagggagcgccac

SEQ ID NO: 102540 - RNA, 21 nt, synthetic construct
  source 1..21: mol_type = other RNA
tgcacacaggagaacttgtct

SEQ ID NO: 102541 - RNA, 21 nt, synthetic construct
  source 1..21: mol_type = other RNA
tgcacacatccacgcgtaagg

SEQ ID NO: 102542 - RNA, 21 nt, synthetic construct
  source 1..21: mol_type = other RNA
tgcacacccagttatctctgc

SEQ ID NO: 102543 - RNA, 21 nt, synthetic construct
  source 1..21: mol_type = other RNA
tgcacacgctggaagggagcc

SEQ ID NO: 102544 - RNA, 21 nt, synthetic construct
  source 1..21: mol_type = other RNA
tgcacactagacctttcttag

SEQ ID NO: 102545 - RNA, 21 nt, synthetic construct
  source 1..21: mol_type = other RNA
tgcacagtatgcggggtttca

SEQ ID NO: 102546 - RNA, 21 nt, synthetic construct
  source 1..21: mol_type = other RNA
tgcacagtctcccccaggtgg

SEQ ID NO: 102547 - RNA, 21 nt, synthetic construct
  source 1..21: mol_type = other RNA
tgcacataaaaggatatgggc

SEQ ID NO: 102548 - RNA, 21 nt, synthetic construct
  source 1..21: mol_type = other RNA
tgcacatgcacaaggtcaaga

SEQ ID NO: 102549 - RNA, 21 nt, synthetic construct
  source 1..21: mol_type = other RNA
tgcacatgggcatgggtccaa

SEQ ID NO: 102550 - RNA, 21 nt, synthetic construct
  source 1..21: mol_type = other RNA
tgcacatgttccctagaactt

SEQ ID NO: 102551 - RNA, 21 nt, synthetic construct
  source 1..21: mol_type = other RNA
tgcacattagaatcatccggg

SEQ ID NO: 102552 - RNA, 21 nt, synthetic construct
  source 1..21: mol_type = other RNA
tgcacattccaagagaggaat

SEQ ID NO: 102553 - RNA, 21 nt, synthetic construct
  source 1..21: mol_type = other RNA
tgcacattccttcttcacaca

SEQ ID NO: 102554 - RNA, 21 nt, synthetic construct
  source 1..21: mol_type = other RNA
tgcaccaacacctgcagtggc

SEQ ID NO: 102555 - RNA, 21 nt, synthetic construct
  source 1..21: mol_type = other RNA
tgcaccaactccacattgtct

SEQ ID NO: 102556 - RNA, 21 nt, synthetic construct
  source 1..21: mol_type = other RNA
tgcaccatttattgtcaaggt

SEQ ID NO: 102557 - RNA, 21 nt, synthetic construct
  source 1..21: mol_type = other RNA
tgcaccattttttcaccagcg

SEQ ID NO: 102558 - RNA, 21 nt, synthetic construct
  source 1..21: mol_type = other RNA
tgcaccctcctcctcctggcc

SEQ ID NO: 102559 - RNA, 21 nt, synthetic construct
  source 1..21: mol_type = other RNA
tgcacctaataaaatgtttag

SEQ ID NO: 102560 - RNA, 21 nt, synthetic construct
  source 1..21: mol_type = other RNA
tgcacctccagtgtcctgaat

SEQ ID NO: 102561 - RNA, 21 nt, synthetic construct
  source 1..21: mol_type = other RNA
tgcacctcgggttcaagcccc

SEQ ID NO: 102562 - RNA, 21 nt, synthetic construct
  source 1..21: mol_type = other RNA
tgcaccttacattgtaatcct

SEQ ID NO: 102563 - RNA, 21 nt, synthetic construct
  source 1..21: mol_type = other RNA
tgcacgagaaaagcacaggca

SEQ ID NO: 102564 - RNA, 21 nt, synthetic construct
  source 1..21: mol_type = other RNA
tgcacgctgtgaatgtgaggt

SEQ ID NO: 102565 - RNA, 21 nt, synthetic construct
  source 1..21: mol_type = other RNA
tgcacggacttggcacaggag

SEQ ID NO: 102566 - RNA, 21 nt, synthetic construct
  source 1..21: mol_type = other RNA
tgcacggtgaagaaccgactg

SEQ ID NO: 102567 - RNA, 21 nt, synthetic construct
  source 1..21: mol_type = other RNA
tgcacgtactagtcagcacac

SEQ ID NO: 102568 - RNA, 21 nt, synthetic construct
  source 1..21: mol_type = other RNA
tgcacgtctgtggtctcagct

SEQ ID NO: 102569 - RNA, 21 nt, synthetic construct
  source 1..21: mol_type = other RNA
tgcacgtgaagctacagacta

SEQ ID NO: 102570 - RNA, 21 nt, synthetic construct
  source 1..21: mol_type = other RNA
tgcacgtttgctttggagtga

SEQ ID NO: 102571 - RNA, 21 nt, synthetic construct
  source 1..21: mol_type = other RNA
tgcacgtttttagaaatttac

SEQ ID NO: 102572 - RNA, 21 nt, synthetic construct
  source 1..21: mol_type = other RNA
tgcactaaactagtatcaacc

SEQ ID NO: 102573 - RNA, 21 nt, synthetic construct
  source 1..21: mol_type = other RNA
tgcactcaagcaatcctccgg

SEQ ID NO: 102574 - RNA, 21 nt, synthetic construct
  source 1..21: mol_type = other RNA
tgcactccacgtgggtgacag

SEQ ID NO: 102575 - RNA, 21 nt, synthetic construct
  source 1..21: mol_type = other RNA
tgcactccagccttggtaaga

SEQ ID NO: 102576 - RNA, 21 nt, synthetic construct
  source 1..21: mol_type = other RNA
tgcactctcaaaattaaattc

SEQ ID NO: 102577 - RNA, 21 nt, synthetic construct
  source 1..21: mol_type = other RNA
tgcactctggcctggacaaca

SEQ ID NO: 102578 - RNA, 21 nt, synthetic construct
  source 1..21: mol_type = other RNA
tgcactcttttaaacccattt

SEQ ID NO: 102579 - RNA, 21 nt, synthetic construct
  source 1..21: mol_type = other RNA
tgcactggcacagcactgtta

SEQ ID NO: 102580 - RNA, 21 nt, synthetic construct
  source 1..21: mol_type = other RNA
tgcactggctattagttaacc

SEQ ID NO: 102581 - RNA, 21 nt, synthetic construct
  source 1..21: mol_type = other RNA
tgcactgtactcctagatact

SEQ ID NO: 102582 - RNA, 21 nt, synthetic construct
  source 1..21: mol_type = other RNA
tgcacttaaaatttagatctc

SEQ ID NO: 102583 - RNA, 21 nt, synthetic construct
  source 1..21: mol_type = other RNA
tgcacttagcgctgatgtgtt

SEQ ID NO: 102584 - RNA, 21 nt, synthetic construct
  source 1..21: mol_type = other RNA
tgcagaaaataaaccaagttt

SEQ ID NO: 102585 - RNA, 21 nt, synthetic construct
  source 1..21: mol_type = other RNA
tgcagaaaccagttgtaattt

SEQ ID NO: 102586 - RNA, 21 nt, synthetic construct
  source 1..21: mol_type = other RNA
tgcagaaatctaccaaacatt

SEQ ID NO: 102587 - RNA, 21 nt, synthetic construct
  source 1..21: mol_type = other RNA
tgcagaagagtgaagctggac

SEQ ID NO: 102588 - RNA, 21 nt, synthetic construct
  source 1..21: mol_type = other RNA
tgcagaaggagaaaccattta

SEQ ID NO: 102589 - RNA, 21 nt, synthetic construct
  source 1..21: mol_type = other RNA
tgcagaatgacagaaaatatc

SEQ ID NO: 102590 - RNA, 21 nt, synthetic construct
  source 1..21: mol_type = other RNA
tgcagaattactgacaatagc

SEQ ID NO: 102591 - RNA, 21 nt, synthetic construct
  source 1..21: mol_type = other RNA
tgcagacaataattcttcctg

SEQ ID NO: 102592 - RNA, 21 nt, synthetic construct
  source 1..21: mol_type = other RNA
tgcagacatgcacgagaaaag

SEQ ID NO: 102593 - RNA, 21 nt, synthetic construct
  source 1..21: mol_type = other RNA
tgcagaccaagaaaggacttc

SEQ ID NO: 102594 - RNA, 21 nt, synthetic construct
  source 1..21: mol_type = other RNA
tgcagactcttgtcccggcat

SEQ ID NO: 102595 - RNA, 21 nt, synthetic construct
  source 1..21: mol_type = other RNA
tgcagactgcaggtcttcaac

SEQ ID NO: 102596 - RNA, 21 nt, synthetic construct
  source 1..21: mol_type = other RNA
tgcagagacggggtcccacta

SEQ ID NO: 102597 - RNA, 21 nt, synthetic construct
  source 1..21: mol_type = other RNA
tgcagagactggatagcaact

SEQ ID NO: 102598 - RNA, 21 nt, synthetic construct
  source 1..21: mol_type = other RNA
tgcagagactgtgcttccaca

SEQ ID NO: 102599 - RNA, 21 nt, synthetic construct
  source 1..21: mol_type = other RNA
tgcagagcaaactcagatctg

SEQ ID NO: 102600 - RNA, 21 nt, synthetic construct
  source 1..21: mol_type = other RNA
tgcagagcaggctccacttgg

SEQ ID NO: 102601 - RNA, 21 nt, synthetic construct
  source 1..21: mol_type = other RNA
tgcagagcaggggtgggggga

SEQ ID NO: 102602 - RNA, 21 nt, synthetic construct
  source 1..21: mol_type = other RNA
tgcagaggtcaggaaggcagg

SEQ ID NO: 102603 - RNA, 21 nt, synthetic construct
  source 1..21: mol_type = other RNA
tgcagagtgttcaaaagcccc

SEQ ID NO: 102604 - RNA, 21 nt, synthetic construct
  source 1..21: mol_type = other RNA
tgcagatgaatgagcaaggtc

SEQ ID NO: 102605 - RNA, 21 nt, synthetic construct
  source 1..21: mol_type = other RNA
tgcagattcatcttgacttca

SEQ ID NO: 102606 - RNA, 21 nt, synthetic construct
  source 1..21: mol_type = other RNA
tgcagatttctttttactcat

SEQ ID NO: 102607 - RNA, 21 nt, synthetic construct
  source 1..21: mol_type = other RNA
tgcagcaaaagcaccactgag

SEQ ID NO: 102608 - RNA, 21 nt, synthetic construct
  source 1..21: mol_type = other RNA
tgcagcaacggaaatgagtga

SEQ ID NO: 102609 - RNA, 21 nt, synthetic construct
  source 1..21: mol_type = other RNA
tgcagcaagcagtaaatatac

SEQ ID NO: 102610 - RNA, 21 nt, synthetic construct
  source 1..21: mol_type = other RNA
tgcagcaattatttgaataag

SEQ ID NO: 102611 - RNA, 21 nt, synthetic construct
  source 1..21: mol_type = other RNA
tgcagcatgctcactgtctcc

SEQ ID NO: 102612 - RNA, 21 nt, synthetic construct
  source 1..21: mol_type = other RNA
tgcagccactatagaaaatag

SEQ ID NO: 102613 - RNA, 21 nt, synthetic construct
  source 1..21: mol_type = other RNA
tgcagccagagagtggaaaga

SEQ ID NO: 102614 - RNA, 21 nt, synthetic construct
  source 1..21: mol_type = other RNA
tgcagccagatttgatcctgg

SEQ ID NO: 102615 - RNA, 21 nt, synthetic construct
  source 1..21: mol_type = other RNA
tgcagcccctgccacactcca

SEQ ID NO: 102616 - RNA, 21 nt, synthetic construct
  source 1..21: mol_type = other RNA
tgcagcctctaatcaggttgg

SEQ ID NO: 102617 - RNA, 21 nt, synthetic construct
  source 1..21: mol_type = other RNA
tgcagccttccctgaacaatg

SEQ ID NO: 102618 - RNA, 21 nt, synthetic construct
  source 1..21: mol_type = other RNA
tgcaggaaacttccagaaact

SEQ ID NO: 102619 - RNA, 21 nt, synthetic construct
  source 1..21: mol_type = other RNA
tgcaggaccaactttaagcaa

SEQ ID NO: 102620 - RNA, 21 nt, synthetic construct
  source 1..21: mol_type = other RNA
tgcaggagaaacatggcttag

SEQ ID NO: 102621 - RNA, 21 nt, synthetic construct
  source 1..21: mol_type = other RNA
tgcaggagccttgctgttgta

SEQ ID NO: 102622 - RNA, 21 nt, synthetic construct
  source 1..21: mol_type = other RNA
tgcaggagtttgagactgcag

SEQ ID NO: 102623 - RNA, 21 nt, synthetic construct
  source 1..21: mol_type = other RNA
tgcaggcagaatgtgacctgt

SEQ ID NO: 102624 - RNA, 21 nt, synthetic construct
  source 1..21: mol_type = other RNA
tgcaggccagatatccataag

SEQ ID NO: 102625 - RNA, 21 nt, synthetic construct
  source 1..21: mol_type = other RNA
tgcaggcgcctggacaggatc

SEQ ID NO: 102626 - RNA, 21 nt, synthetic construct
  source 1..21: mol_type = other RNA
tgcaggctgaactgctgacag

SEQ ID NO: 102627 - RNA, 21 nt, synthetic construct
  source 1..21: mol_type = other RNA
tgcagggaaatcattcaggac

SEQ ID NO: 102628 - RNA, 21 nt, synthetic construct
  source 1..21: mol_type = other RNA
tgcagggcttctgaaggtgcc

SEQ ID NO: 102629 - RNA, 21 nt, synthetic construct
  source 1..21: mol_type = other RNA
tgcaggtatttctaaatcaac

SEQ ID NO: 102630 - RNA, 21 nt, synthetic construct
  source 1..21: mol_type = other RNA
tgcaggtcttcaacctcaact

SEQ ID NO: 102631 - RNA, 21 nt, synthetic construct
  source 1..21: mol_type = other RNA
tgcaggtgtgggccaccaagc

SEQ ID NO: 102632 - RNA, 21 nt, synthetic construct
  source 1..21: mol_type = other RNA
tgcaggtgttggtgcatttgg

SEQ ID NO: 102633 - RNA, 21 nt, synthetic construct
  source 1..21: mol_type = other RNA
tgcaggttcatgtgtgcttac

SEQ ID NO: 102634 - RNA, 21 nt, synthetic construct
  source 1..21: mol_type = other RNA
tgcaggttgatactagtttag

SEQ ID NO: 102635 - RNA, 21 nt, synthetic construct
  source 1..21: mol_type = other RNA
tgcaggtttactccaagaagg

SEQ ID NO: 102636 - RNA, 21 nt, synthetic construct
  source 1..21: mol_type = other RNA
tgcagtacttgtctttttgtg

SEQ ID NO: 102637 - RNA, 21 nt, synthetic construct
  source 1..21: mol_type = other RNA
tgcagtagctcatcatttata

SEQ ID NO: 102638 - RNA, 21 nt, synthetic construct
  source 1..21: mol_type = other RNA
tgcagtagtaaagcaaatgtg

SEQ ID NO: 102639 - RNA, 21 nt, synthetic construct
  source 1..21: mol_type = other RNA
tgcagtagtattgaactgtta

SEQ ID NO: 102640 - RNA, 21 nt, synthetic construct
  source 1..21: mol_type = other RNA
tgcagtatcttgaagaaacca

SEQ ID NO: 102641 - RNA, 21 nt, synthetic construct
  source 1..21: mol_type = other RNA
tgcagtatgcatagatcacaa

SEQ ID NO: 102642 - RNA, 21 nt, synthetic construct
  source 1..21: mol_type = other RNA
tgcagtatgtaggaaactttg

SEQ ID NO: 102643 - RNA, 21 nt, synthetic construct
  source 1..21: mol_type = other RNA
tgcagtatgtgccatttttat

SEQ ID NO: 102644 - RNA, 21 nt, synthetic construct
  source 1..21: mol_type = other RNA
tgcagtattgttaactgtaga

SEQ ID NO: 102645 - RNA, 21 nt, synthetic construct
  source 1..21: mol_type = other RNA
tgcagtccccggtctttcctg

SEQ ID NO: 102646 - RNA, 21 nt, synthetic construct
  source 1..21: mol_type = other RNA
tgcagtctaaccattaacagc

SEQ ID NO: 102647 - RNA, 21 nt, synthetic construct
  source 1..21: mol_type = other RNA
tgcagtctcaaactcctgcac

SEQ ID NO: 102648 - RNA, 21 nt, synthetic construct
  source 1..21: mol_type = other RNA
tgcagtctgcaggcagaatgt

SEQ ID NO: 102649 - RNA, 21 nt, synthetic construct
  source 1..21: mol_type = other RNA
tgcagtctgtcctcgtaaaag

SEQ ID NO: 102650 - RNA, 21 nt, synthetic construct
  source 1..21: mol_type = other RNA
tgcagtgaacatgggaatgca

SEQ ID NO: 102651 - RNA, 21 nt, synthetic construct
  source 1..21: mol_type = other RNA
tgcagtgagcccagagatccc

SEQ ID NO: 102652 - RNA, 21 nt, synthetic construct
  source 1..21: mol_type = other RNA
tgcagtggatgactaggctcc

SEQ ID NO: 102653 - RNA, 21 nt, synthetic construct
  source 1..21: mol_type = other RNA
tgcagtggcgtgtgcccaggc

SEQ ID NO: 102654 - RNA, 21 nt, synthetic construct
  source 1..21: mol_type = other RNA
tgcagtggcttcctaactggt

SEQ ID NO: 102655 - RNA, 21 nt, synthetic construct
  source 1..21: mol_type = other RNA
tgcagtggtgtggtcttgtct

SEQ ID NO: 102656 - RNA, 21 nt, synthetic construct
  source 1..21: mol_type = other RNA
tgcagtgtccatctcccatca

SEQ ID NO: 102657 - RNA, 21 nt, synthetic construct
  source 1..21: mol_type = other RNA
tgcagttagcatgcctgacaa

SEQ ID NO: 102658 - RNA, 21 nt, synthetic construct
  source 1..21: mol_type = other RNA
tgcagttgcttactctaatgg

SEQ ID NO: 102659 - RNA, 21 nt, synthetic construct
  source 1..21: mol_type = other RNA
tgcagttggattatatgttct

SEQ ID NO: 102660 - RNA, 21 nt, synthetic construct
  source 1..21: mol_type = other RNA
tgcagttggggactcttatgg

SEQ ID NO: 102661 - RNA, 21 nt, synthetic construct
  source 1..21: mol_type = other RNA
tgcagtttgtgttttcactct

SEQ ID NO: 102662 - RNA, 21 nt, synthetic construct
  source 1..21: mol_type = other RNA
tgcagtttttccactaatgtc

SEQ ID NO: 102663 - RNA, 21 nt, synthetic construct
  source 1..21: mol_type = other RNA
tgcataaacgacagcaggaaa

SEQ ID NO: 102664 - RNA, 21 nt, synthetic construct
  source 1..21: mol_type = other RNA
tgcataactcgtaatgcgatg

SEQ ID NO: 102665 - RNA, 21 nt, synthetic construct
  source 1..21: mol_type = other RNA
tgcataagttctagagatttg

SEQ ID NO: 102666 - RNA, 21 nt, synthetic construct
  source 1..21: mol_type = other RNA
tgcatacactcatttcctttc

SEQ ID NO: 102667 - RNA, 21 nt, synthetic construct
  source 1..21: mol_type = other RNA
tgcataccaagcccggcacgg

SEQ ID NO: 102668 - RNA, 21 nt, synthetic construct
  source 1..21: mol_type = other RNA
tgcataccaccacattcggcc

SEQ ID NO: 102669 - RNA, 21 nt, synthetic construct
  source 1..21: mol_type = other RNA
tgcatacgtcgtcccccatcc

SEQ ID NO: 102670 - RNA, 21 nt, synthetic construct
  source 1..21: mol_type = other RNA
tgcatactgcagcacttttaa

SEQ ID NO: 102671 - RNA, 21 nt, synthetic construct
  source 1..21: mol_type = other RNA
tgcatactgtgatgattttag

SEQ ID NO: 102672 - RNA, 21 nt, synthetic construct
  source 1..21: mol_type = other RNA
tgcatacttagctaatttcag

SEQ ID NO: 102673 - RNA, 21 nt, synthetic construct
  source 1..21: mol_type = other RNA
tgcatactttggaaggtagga

SEQ ID NO: 102674 - RNA, 21 nt, synthetic construct
  source 1..21: mol_type = other RNA
tgcatagagatcttgtgtatc

SEQ ID NO: 102675 - RNA, 21 nt, synthetic construct
  source 1..21: mol_type = other RNA
tgcatagatcacaaggactgg

SEQ ID NO: 102676 - RNA, 21 nt, synthetic construct
  source 1..21: mol_type = other RNA
tgcatagcagggtcatgcaca

SEQ ID NO: 102677 - RNA, 21 nt, synthetic construct
  source 1..21: mol_type = other RNA
tgcatagggatgttgcctact

SEQ ID NO: 102678 - RNA, 21 nt, synthetic construct
  source 1..21: mol_type = other RNA
tgcatagtactccattatatg

SEQ ID NO: 102679 - RNA, 21 nt, synthetic construct
  source 1..21: mol_type = other RNA
tgcatatataccacattttgt

SEQ ID NO: 102680 - RNA, 21 nt, synthetic construct
  source 1..21: mol_type = other RNA
tgcatatatctgtctgggata

SEQ ID NO: 102681 - RNA, 21 nt, synthetic construct
  source 1..21: mol_type = other RNA
tgcatatgtttgtaacttgtt

SEQ ID NO: 102682 - RNA, 21 nt, synthetic construct
  source 1..21: mol_type = other RNA
tgcatatgtttttattagcag

SEQ ID NO: 102683 - RNA, 21 nt, synthetic construct
  source 1..21: mol_type = other RNA
tgcatattgaagccagcacct

SEQ ID NO: 102684 - RNA, 21 nt, synthetic construct
  source 1..21: mol_type = other RNA
tgcatcaaaggacactattga

SEQ ID NO: 102685 - RNA, 21 nt, synthetic construct
  source 1..21: mol_type = other RNA
tgcatcaactgcttccctagc

SEQ ID NO: 102686 - RNA, 21 nt, synthetic construct
  source 1..21: mol_type = other RNA
tgcatcacttgaggtgattaa

SEQ ID NO: 102687 - RNA, 21 nt, synthetic construct
  source 1..21: mol_type = other RNA
tgcatcagaattccattcctt

SEQ ID NO: 102688 - RNA, 21 nt, synthetic construct
  source 1..21: mol_type = other RNA
tgcatcatggtgggccttgca

SEQ ID NO: 102689 - RNA, 21 nt, synthetic construct
  source 1..21: mol_type = other RNA
tgcatccaaaagggaaatatg

SEQ ID NO: 102690 - RNA, 21 nt, synthetic construct
  source 1..21: mol_type = other RNA
tgcatccacattttgtgacaa

SEQ ID NO: 102691 - RNA, 21 nt, synthetic construct
  source 1..21: mol_type = other RNA
tgcatcccaagggttttggta

SEQ ID NO: 102692 - RNA, 21 nt, synthetic construct
  source 1..21: mol_type = other RNA
tgcatccccattcaattgtcc

SEQ ID NO: 102693 - RNA, 21 nt, synthetic construct
  source 1..21: mol_type = other RNA
tgcatccctcctctggccctc

SEQ ID NO: 102694 - RNA, 21 nt, synthetic construct
  source 1..21: mol_type = other RNA
tgcatcctttataccttttaa

SEQ ID NO: 102695 - RNA, 21 nt, synthetic construct
  source 1..21: mol_type = other RNA
tgcatcgtttcaatattaaga

SEQ ID NO: 102696 - RNA, 21 nt, synthetic construct
  source 1..21: mol_type = other RNA
tgcatcttcttttacttgctt

SEQ ID NO: 102697 - RNA, 21 nt, synthetic construct
  source 1..21: mol_type = other RNA
tgcatcttgaactaagtgtga

SEQ ID NO: 102698 - RNA, 21 nt, synthetic construct
  source 1..21: mol_type = other RNA
tgcatcttgcaaaacggaaac

SEQ ID NO: 102699 - RNA, 21 nt, synthetic construct
  source 1..21: mol_type = other RNA
tgcatcttttgagggtatcat

SEQ ID NO: 102700 - RNA, 21 nt, synthetic construct
  source 1..21: mol_type = other RNA
tgcatgaccctgctatgcata

SEQ ID NO: 102701 - RNA, 21 nt, synthetic construct
  source 1..21: mol_type = other RNA
tgcatgagacttggagtttga

SEQ ID NO: 102702 - RNA, 21 nt, synthetic construct
  source 1..21: mol_type = other RNA
tgcatgaggcatattattgta

SEQ ID NO: 102703 - RNA, 21 nt, synthetic construct
  source 1..21: mol_type = other RNA
tgcatgattccccttatatgg

SEQ ID NO: 102704 - RNA, 21 nt, synthetic construct
  source 1..21: mol_type = other RNA
tgcatgcacacagagggagcg

SEQ ID NO: 102705 - RNA, 21 nt, synthetic construct
  source 1..21: mol_type = other RNA
tgcatgcatgtctgtctgttc

SEQ ID NO: 102706 - RNA, 21 nt, synthetic construct
  source 1..21: mol_type = other RNA
tgcatgcctctgttacagctc

SEQ ID NO: 102707 - RNA, 21 nt, synthetic construct
  source 1..21: mol_type = other RNA
tgcatgctaggggctgttccc

SEQ ID NO: 102708 - RNA, 21 nt, synthetic construct
  source 1..21: mol_type = other RNA
tgcatgctcccatttgggact

SEQ ID NO: 102709 - RNA, 21 nt, synthetic construct
  source 1..21: mol_type = other RNA
tgcatgggaggtaatactata

SEQ ID NO: 102710 - RNA, 21 nt, synthetic construct
  source 1..21: mol_type = other RNA
tgcatggggagttttaggaaa

SEQ ID NO: 102711 - RNA, 21 nt, synthetic construct
  source 1..21: mol_type = other RNA
tgcatggtgtaaaatacaaca

SEQ ID NO: 102712 - RNA, 21 nt, synthetic construct
  source 1..21: mol_type = other RNA
tgcatgtctgcaggagccttg

SEQ ID NO: 102713 - RNA, 21 nt, synthetic construct
  source 1..21: mol_type = other RNA
tgcatgtctgtctgttcacat

SEQ ID NO: 102714 - RNA, 21 nt, synthetic construct
  source 1..21: mol_type = other RNA
tgcatgtgcaggaaacttcca

SEQ ID NO: 102715 - RNA, 21 nt, synthetic construct
  source 1..21: mol_type = other RNA
tgcatgtgttgtgcacacatc

SEQ ID NO: 102716 - RNA, 21 nt, synthetic construct
  source 1..21: mol_type = other RNA
tgcatgttatttggggattct

SEQ ID NO: 102717 - RNA, 21 nt, synthetic construct
  source 1..21: mol_type = other RNA
tgcattaagccagtcactaaa

SEQ ID NO: 102718 - RNA, 21 nt, synthetic construct
  source 1..21: mol_type = other RNA
tgcattacatgaatggaaaat

SEQ ID NO: 102719 - RNA, 21 nt, synthetic construct
  source 1..21: mol_type = other RNA
tgcattagagccccaagaaag

SEQ ID NO: 102720 - RNA, 21 nt, synthetic construct
  source 1..21: mol_type = other RNA
tgcattcatactgaaggcata

SEQ ID NO: 102721 - RNA, 21 nt, synthetic construct
  source 1..21: mol_type = other RNA
tgcattcatccaggcaaaaga

SEQ ID NO: 102722 - RNA, 21 nt, synthetic construct
  source 1..21: mol_type = other RNA
tgcattccagattgaaatcta

SEQ ID NO: 102723 - RNA, 21 nt, synthetic construct
  source 1..21: mol_type = other RNA
tgcattccgcctgggcgacag

SEQ ID NO: 102724 - RNA, 21 nt, synthetic construct
  source 1..21: mol_type = other RNA
tgcattcctgaaatgaaccaa

SEQ ID NO: 102725 - RNA, 21 nt, synthetic construct
  source 1..21: mol_type = other RNA
tgcattcgtccctaaacactg

SEQ ID NO: 102726 - RNA, 21 nt, synthetic construct
  source 1..21: mol_type = other RNA
tgcattctagaaaggagggac

SEQ ID NO: 102727 - RNA, 21 nt, synthetic construct
  source 1..21: mol_type = other RNA
tgcattctgtcacatagacct

SEQ ID NO: 102728 - RNA, 21 nt, synthetic construct
  source 1..21: mol_type = other RNA
tgcattgactaccaattctcc

SEQ ID NO: 102729 - RNA, 21 nt, synthetic construct
  source 1..21: mol_type = other RNA
tgcattgcatttacttgtcat

SEQ ID NO: 102730 - RNA, 21 nt, synthetic construct
  source 1..21: mol_type = other RNA
tgcattgtgcacttaaaattt

SEQ ID NO: 102731 - RNA, 21 nt, synthetic construct
  source 1..21: mol_type = other RNA
tgcatttacttgtcatttctg

SEQ ID NO: 102732 - RNA, 21 nt, synthetic construct
  source 1..21: mol_type = other RNA
tgcatttattagtagttaggt

SEQ ID NO: 102733 - RNA, 21 nt, synthetic construct
  source 1..21: mol_type = other RNA
tgcatttcggctctgtgctga

SEQ ID NO: 102734 - RNA, 21 nt, synthetic construct
  source 1..21: mol_type = other RNA
tgcatttctctaatagctagt

SEQ ID NO: 102735 - RNA, 21 nt, synthetic construct
  source 1..21: mol_type = other RNA
tgcatttgggacagcctagtt

SEQ ID NO: 102736 - RNA, 21 nt, synthetic construct
  source 1..21: mol_type = other RNA
tgcatttggtctcattcacta

SEQ ID NO: 102737 - RNA, 21 nt, synthetic construct
  source 1..21: mol_type = other RNA
tgcatttggtttgcaaaaatt

SEQ ID NO: 102738 - RNA, 21 nt, synthetic construct
  source 1..21: mol_type = other RNA
tgccaaaagccaagagcgagg

SEQ ID NO: 102739 - RNA, 21 nt, synthetic construct
  source 1..21: mol_type = other RNA
tgccaaaatgattttcacagg

SEQ ID NO: 102740 - RNA, 21 nt, synthetic construct
  source 1..21: mol_type = other RNA
tgccaaaccctacacccatcc

SEQ ID NO: 102741 - RNA, 21 nt, synthetic construct
  source 1..21: mol_type = other RNA
tgccaaactgttttccacagt

SEQ ID NO: 102742 - RNA, 21 nt, synthetic construct
  source 1..21: mol_type = other RNA
tgccaaagattcttgtcatga

SEQ ID NO: 102743 - RNA, 21 nt, synthetic construct
  source 1..21: mol_type = other RNA
tgccaaattatttgagagtaa

SEQ ID NO: 102744 - RNA, 21 nt, synthetic construct
  source 1..21: mol_type = other RNA
tgccaacacatggggcattaa

SEQ ID NO: 102745 - RNA, 21 nt, synthetic construct
  source 1..21: mol_type = other RNA
tgccaacagttactttccttt

SEQ ID NO: 102746 - RNA, 21 nt, synthetic construct
  source 1..21: mol_type = other RNA
tgccaactctggcaggtcacc

SEQ ID NO: 102747 - RNA, 21 nt, synthetic construct
  source 1..21: mol_type = other RNA
tgccaagcaacttgatcaggg

SEQ ID NO: 102748 - RNA, 21 nt, synthetic construct
  source 1..21: mol_type = other RNA
tgccaaggcttgctttggcta

SEQ ID NO: 102749 - RNA, 21 nt, synthetic construct
  source 1..21: mol_type = other RNA
tgccaagtataagatgatgat

SEQ ID NO: 102750 - RNA, 21 nt, synthetic construct
  source 1..21: mol_type = other RNA
tgccaagtcagcacttctgat

SEQ ID NO: 102751 - RNA, 21 nt, synthetic construct
  source 1..21: mol_type = other RNA
tgccaagtccgtgcatgcctc

SEQ ID NO: 102752 - RNA, 21 nt, synthetic construct
  source 1..21: mol_type = other RNA
tgccaatatcacactgtttga

SEQ ID NO: 102753 - RNA, 21 nt, synthetic construct
  source 1..21: mol_type = other RNA
tgccaatatctatcagggctg

SEQ ID NO: 102754 - RNA, 21 nt, synthetic construct
  source 1..21: mol_type = other RNA
tgccaatcaataattctgtgc

SEQ ID NO: 102755 - RNA, 21 nt, synthetic construct
  source 1..21: mol_type = other RNA
tgccaatttgggatatagcta

SEQ ID NO: 102756 - RNA, 21 nt, synthetic construct
  source 1..21: mol_type = other RNA
tgccacaaatggagtgactta

SEQ ID NO: 102757 - RNA, 21 nt, synthetic construct
  source 1..21: mol_type = other RNA
tgccacaccacatccagctaa

SEQ ID NO: 102758 - RNA, 21 nt, synthetic construct
  source 1..21: mol_type = other RNA
tgccacactccagcatccctc

SEQ ID NO: 102759 - RNA, 21 nt, synthetic construct
  source 1..21: mol_type = other RNA
tgccacataaatcacaggaaa

SEQ ID NO: 102760 - RNA, 21 nt, synthetic construct
  source 1..21: mol_type = other RNA
tgccacattcaacaacatgga

SEQ ID NO: 102761 - RNA, 21 nt, synthetic construct
  source 1..21: mol_type = other RNA
tgccacattttaccaaaacag

SEQ ID NO: 102762 - RNA, 21 nt, synthetic construct
  source 1..21: mol_type = other RNA
tgccacattttttggtttgta

SEQ ID NO: 102763 - RNA, 21 nt, synthetic construct
  source 1..21: mol_type = other RNA
tgccactacttagcccctgct

SEQ ID NO: 102764 - RNA, 21 nt, synthetic construct
  source 1..21: mol_type = other RNA
tgccactcaaaactgaagttt

SEQ ID NO: 102765 - RNA, 21 nt, synthetic construct
  source 1..21: mol_type = other RNA
tgccagagttggcacagccag

SEQ ID NO: 102766 - RNA, 21 nt, synthetic construct
  source 1..21: mol_type = other RNA
tgccagatgttctaatttctt

SEQ ID NO: 102767 - RNA, 21 nt, synthetic construct
  source 1..21: mol_type = other RNA
tgccagcaccagatactcaat

SEQ ID NO: 102768 - RNA, 21 nt, synthetic construct
  source 1..21: mol_type = other RNA
tgccagccacccttgctgctt

SEQ ID NO: 102769 - RNA, 21 nt, synthetic construct
  source 1..21: mol_type = other RNA
tgccagctaacttttaaccca

SEQ ID NO: 102770 - RNA, 21 nt, synthetic construct
  source 1..21: mol_type = other RNA
tgccagctttggctgaaatgc

SEQ ID NO: 102771 - RNA, 21 nt, synthetic construct
  source 1..21: mol_type = other RNA
tgccaggacaattgaatgggg

SEQ ID NO: 102772 - RNA, 21 nt, synthetic construct
  source 1..21: mol_type = other RNA
tgccagggcgctcctctcccg

SEQ ID NO: 102773 - RNA, 21 nt, synthetic construct
  source 1..21: mol_type = other RNA
tgccaggtagggaggggtatt

SEQ ID NO: 102774 - RNA, 21 nt, synthetic construct
  source 1..21: mol_type = other RNA
tgccaggtttgtgcttggata

SEQ ID NO: 102775 - RNA, 21 nt, synthetic construct
  source 1..21: mol_type = other RNA
tgccagtgaactccagtctgg

SEQ ID NO: 102776 - RNA, 21 nt, synthetic construct
  source 1..21: mol_type = other RNA
tgccagtgcaaacctcctggt

SEQ ID NO: 102777 - RNA, 21 nt, synthetic construct
  source 1..21: mol_type = other RNA
tgccagtgttttaaagcaggg

SEQ ID NO: 102778 - RNA, 21 nt, synthetic construct
  source 1..21: mol_type = other RNA
tgccagttttctggaaactca

SEQ ID NO: 102779 - RNA, 21 nt, synthetic construct
  source 1..21: mol_type = other RNA
tgccatagagctttaaagtta

SEQ ID NO: 102780 - RNA, 21 nt, synthetic construct
  source 1..21: mol_type = other RNA
tgccatagagggagcatcttc

SEQ ID NO: 102781 - RNA, 21 nt, synthetic construct
  source 1..21: mol_type = other RNA
tgccatatgtagggcaccgtg

SEQ ID NO: 102782 - RNA, 21 nt, synthetic construct
  source 1..21: mol_type = other RNA
tgccatcacattttgaatcat

SEQ ID NO: 102783 - RNA, 21 nt, synthetic construct
  source 1..21: mol_type = other RNA
tgccatcattttatgaaacca

SEQ ID NO: 102784 - RNA, 21 nt, synthetic construct
  source 1..21: mol_type = other RNA
tgccatcctggatttgggaag

SEQ ID NO: 102785 - RNA, 21 nt, synthetic construct
  source 1..21: mol_type = other RNA
tgccatctccttaatccagtc

SEQ ID NO: 102786 - RNA, 21 nt, synthetic construct
  source 1..21: mol_type = other RNA
tgccatcttcaagatttcata

SEQ ID NO: 102787 - RNA, 21 nt, synthetic construct
  source 1..21: mol_type = other RNA
tgccatcttgcataagttttt

SEQ ID NO: 102788 - RNA, 21 nt, synthetic construct
  source 1..21: mol_type = other RNA
tgccatggtgttaaatattta

SEQ ID NO: 102789 - RNA, 21 nt, synthetic construct
  source 1..21: mol_type = other RNA
tgccatgtgttttgttttgaa

SEQ ID NO: 102790 - RNA, 21 nt, synthetic construct
  source 1..21: mol_type = other RNA
tgccattctcccagttgtcag

SEQ ID NO: 102791 - RNA, 21 nt, synthetic construct
  source 1..21: mol_type = other RNA
tgcccaaggaaggcagggtag

SEQ ID NO: 102792 - RNA, 21 nt, synthetic construct
  source 1..21: mol_type = other RNA
tgcccaatcaaatccagtctt

SEQ ID NO: 102793 - RNA, 21 nt, synthetic construct
  source 1..21: mol_type = other RNA
tgcccacctgacaagtagtac

SEQ ID NO: 102794 - RNA, 21 nt, synthetic construct
  source 1..21: mol_type = other RNA
tgcccactcttatatcctaaa

SEQ ID NO: 102795 - RNA, 21 nt, synthetic construct
  source 1..21: mol_type = other RNA
tgcccagactggagttcactg

SEQ ID NO: 102796 - RNA, 21 nt, synthetic construct
  source 1..21: mol_type = other RNA
tgcccaggctgacttagaggg

SEQ ID NO: 102797 - RNA, 21 nt, synthetic construct
  source 1..21: mol_type = other RNA
tgcccaggctggtcttgtact

SEQ ID NO: 102798 - RNA, 21 nt, synthetic construct
  source 1..21: mol_type = other RNA
tgcccatcctatctaagccta

SEQ ID NO: 102799 - RNA, 21 nt, synthetic construct
  source 1..21: mol_type = other RNA
tgcccatcctctatttttgtc

SEQ ID NO: 102800 - RNA, 21 nt, synthetic construct
  source 1..21: mol_type = other RNA
tgcccatgtgcattattgtaa

SEQ ID NO: 102801 - RNA, 21 nt, synthetic construct
  source 1..21: mol_type = other RNA
tgcccattaaaaccatgaaaa

SEQ ID NO: 102802 - RNA, 21 nt, synthetic construct
  source 1..21: mol_type = other RNA
tgcccattaacagatgaatga

SEQ ID NO: 102803 - RNA, 21 nt, synthetic construct
  source 1..21: mol_type = other RNA
tgcccattataaaataggaag

SEQ ID NO: 102804 - RNA, 21 nt, synthetic construct
  source 1..21: mol_type = other RNA
tgccccactccacacacgaag

SEQ ID NO: 102805 - RNA, 21 nt, synthetic construct
  source 1..21: mol_type = other RNA
tgccccagctaaaatgttcag

SEQ ID NO: 102806 - RNA, 21 nt, synthetic construct
  source 1..21: mol_type = other RNA
tgccccatgtgttggcactga

SEQ ID NO: 102807 - RNA, 21 nt, synthetic construct
  source 1..21: mol_type = other RNA
tgccccattgcactccacgtg

SEQ ID NO: 102808 - RNA, 21 nt, synthetic construct
  source 1..21: mol_type = other RNA
tgccccctcttctctcctttg

SEQ ID NO: 102809 - RNA, 21 nt, synthetic construct
  source 1..21: mol_type = other RNA
tgccccgggcctggttaggga

SEQ ID NO: 102810 - RNA, 21 nt, synthetic construct
  source 1..21: mol_type = other RNA
tgcccctccactccacaaagc

SEQ ID NO: 102811 - RNA, 21 nt, synthetic construct
  source 1..21: mol_type = other RNA
tgcccctgtagcagacactgg

SEQ ID NO: 102812 - RNA, 21 nt, synthetic construct
  source 1..21: mol_type = other RNA
tgccccttatcctcttctgaa

SEQ ID NO: 102813 - RNA, 21 nt, synthetic construct
  source 1..21: mol_type = other RNA
tgcccctttgagcagagtcct

SEQ ID NO: 102814 - RNA, 21 nt, synthetic construct
  source 1..21: mol_type = other RNA
tgcccgcgaaggcgtgtaaac

SEQ ID NO: 102815 - RNA, 21 nt, synthetic construct
  source 1..21: mol_type = other RNA
tgcccggccagacattttatt

SEQ ID NO: 102816 - RNA, 21 nt, synthetic construct
  source 1..21: mol_type = other RNA
tgccctacatatggcaattcc

SEQ ID NO: 102817 - RNA, 21 nt, synthetic construct
  source 1..21: mol_type = other RNA
tgccctcattgaagctactat

SEQ ID NO: 102818 - RNA, 21 nt, synthetic construct
  source 1..21: mol_type = other RNA
tgccctgtgaaaatcattttg

SEQ ID NO: 102819 - RNA, 21 nt, synthetic construct
  source 1..21: mol_type = other RNA
tgcccttatttaatgtgctgt

SEQ ID NO: 102820 - RNA, 21 nt, synthetic construct
  source 1..21: mol_type = other RNA
tgccgaggcagagagagtaac

SEQ ID NO: 102821 - RNA, 21 nt, synthetic construct
  source 1..21: mol_type = other RNA
tgccgcagagcaagcacgtta

SEQ ID NO: 102822 - RNA, 21 nt, synthetic construct
  source 1..21: mol_type = other RNA
tgccgcgcgagggagcgtacg

SEQ ID NO: 102823 - RNA, 21 nt, synthetic construct
  source 1..21: mol_type = other RNA
tgccgcgttttttgtccacca

SEQ ID NO: 102824 - RNA, 21 nt, synthetic construct
  source 1..21: mol_type = other RNA
tgccgctggtgaaaaaatggt

SEQ ID NO: 102825 - RNA, 21 nt, synthetic construct
  source 1..21: mol_type = other RNA
tgccgcttcgcctttctcgca

SEQ ID NO: 102826 - RNA, 21 nt, synthetic construct
  source 1..21: mol_type = other RNA
tgccggctgttaggtattatt

SEQ ID NO: 102827 - RNA, 21 nt, synthetic construct
  source 1..21: mol_type = other RNA
tgccgggacaagagtctgcag

SEQ ID NO: 102828 - RNA, 21 nt, synthetic construct
  source 1..21: mol_type = other RNA
tgccgggcttggtatgcatct

SEQ ID NO: 102829 - RNA, 21 nt, synthetic construct
  source 1..21: mol_type = other RNA
tgccggtaatcacagctactc

SEQ ID NO: 102830 - RNA, 21 nt, synthetic construct
  source 1..21: mol_type = other RNA
tgcctaacaccagtaagattc

SEQ ID NO: 102831 - RNA, 21 nt, synthetic construct
  source 1..21: mol_type = other RNA
tgcctaagtaatgctggccag

SEQ ID NO: 102832 - RNA, 21 nt, synthetic construct
  source 1..21: mol_type = other RNA
tgcctaagtctcaggatacaa

SEQ ID NO: 102833 - RNA, 21 nt, synthetic construct
  source 1..21: mol_type = other RNA
tgcctaatctctaggcttaaa

SEQ ID NO: 102834 - RNA, 21 nt, synthetic construct
  source 1..21: mol_type = other RNA
tgcctacatagtccactttcc

SEQ ID NO: 102835 - RNA, 21 nt, synthetic construct
  source 1..21: mol_type = other RNA
tgcctactagccagtgattgg

SEQ ID NO: 102836 - RNA, 21 nt, synthetic construct
  source 1..21: mol_type = other RNA
tgcctagaaaggaattgtaat

SEQ ID NO: 102837 - RNA, 21 nt, synthetic construct
  source 1..21: mol_type = other RNA
tgcctagatgattcgcattgc

SEQ ID NO: 102838 - RNA, 21 nt, synthetic construct
  source 1..21: mol_type = other RNA
tgcctagatttcaatctggaa

SEQ ID NO: 102839 - RNA, 21 nt, synthetic construct
  source 1..21: mol_type = other RNA
tgcctataaaatgctggaaat

SEQ ID NO: 102840 - RNA, 21 nt, synthetic construct
  source 1..21: mol_type = other RNA
tgcctatagacagcatcccca

SEQ ID NO: 102841 - RNA, 21 nt, synthetic construct
  source 1..21: mol_type = other RNA
tgcctatgaaatcttgaagat

SEQ ID NO: 102842 - RNA, 21 nt, synthetic construct
  source 1..21: mol_type = other RNA
tgcctattctggggctcaagt

SEQ ID NO: 102843 - RNA, 21 nt, synthetic construct
  source 1..21: mol_type = other RNA
tgcctcaaaatcaacattgcc

SEQ ID NO: 102844 - RNA, 21 nt, synthetic construct
  source 1..21: mol_type = other RNA
tgcctcaaattagtcatagca

SEQ ID NO: 102845 - RNA, 21 nt, synthetic construct
  source 1..21: mol_type = other RNA
tgcctcagccgccgcagaggc

SEQ ID NO: 102846 - RNA, 21 nt, synthetic construct
  source 1..21: mol_type = other RNA
tgcctcagcctcccgagtatc

SEQ ID NO: 102847 - RNA, 21 nt, synthetic construct
  source 1..21: mol_type = other RNA
tgcctcagttgacatccttta

SEQ ID NO: 102848 - RNA, 21 nt, synthetic construct
  source 1..21: mol_type = other RNA
tgcctcatgcatccacatttt

SEQ ID NO: 102849 - RNA, 21 nt, synthetic construct
  source 1..21: mol_type = other RNA
tgcctccacaggctttgactt

SEQ ID NO: 102850 - RNA, 21 nt, synthetic construct
  source 1..21: mol_type = other RNA
tgcctccatatgggatgctta

SEQ ID NO: 102851 - RNA, 21 nt, synthetic construct
  source 1..21: mol_type = other RNA
tgcctcccgggtccaggcagt

SEQ ID NO: 102852 - RNA, 21 nt, synthetic construct
  source 1..21: mol_type = other RNA
tgcctcctgggttcaggtgcc

SEQ ID NO: 102853 - RNA, 21 nt, synthetic construct
  source 1..21: mol_type = other RNA
tgcctcgaaggcctgcttcat

SEQ ID NO: 102854 - RNA, 21 nt, synthetic construct
  source 1..21: mol_type = other RNA
tgcctcggcacagctctcatg

SEQ ID NO: 102855 - RNA, 21 nt, synthetic construct
  source 1..21: mol_type = other RNA
tgcctctacatcacagacagg

SEQ ID NO: 102856 - RNA, 21 nt, synthetic construct
  source 1..21: mol_type = other RNA
tgcctctccagggaggaatcc

SEQ ID NO: 102857 - RNA, 21 nt, synthetic construct
  source 1..21: mol_type = other RNA
tgcctctcccaccatctctct

SEQ ID NO: 102858 - RNA, 21 nt, synthetic construct
  source 1..21: mol_type = other RNA
tgcctctgtgctagccttctt

SEQ ID NO: 102859 - RNA, 21 nt, synthetic construct
  source 1..21: mol_type = other RNA
tgcctctgttacagctcttct

SEQ ID NO: 102860 - RNA, 21 nt, synthetic construct
  source 1..21: mol_type = other RNA
tgcctcttcctgttgctttaa

SEQ ID NO: 102861 - RNA, 21 nt, synthetic construct
  source 1..21: mol_type = other RNA
tgcctctttgctaataagtga

SEQ ID NO: 102862 - RNA, 21 nt, synthetic construct
  source 1..21: mol_type = other RNA
tgcctgacaaagtatgagaaa

SEQ ID NO: 102863 - RNA, 21 nt, synthetic construct
  source 1..21: mol_type = other RNA
tgcctgacagcaaataaacaa

SEQ ID NO: 102864 - RNA, 21 nt, synthetic construct
  source 1..21: mol_type = other RNA
tgcctgaggtctcaaaattta

SEQ ID NO: 102865 - RNA, 21 nt, synthetic construct
  source 1..21: mol_type = other RNA
tgcctgcagactgcaggtctt

SEQ ID NO: 102866 - RNA, 21 nt, synthetic construct
  source 1..21: mol_type = other RNA
tgcctgccatagagggagcat

SEQ ID NO: 102867 - RNA, 21 nt, synthetic construct
  source 1..21: mol_type = other RNA
tgcctgccgcagagcaagcac

SEQ ID NO: 102868 - RNA, 21 nt, synthetic construct
  source 1..21: mol_type = other RNA
tgcctgcgtccgtagaccgag

SEQ ID NO: 102869 - RNA, 21 nt, synthetic construct
  source 1..21: mol_type = other RNA
tgcctggacccgggaggcaga

SEQ ID NO: 102870 - RNA, 21 nt, synthetic construct
  source 1..21: mol_type = other RNA
tgcctggatgaatgcagtggc

SEQ ID NO: 102871 - RNA, 21 nt, synthetic construct
  source 1..21: mol_type = other RNA
tgcctgggtaattaaacattt

SEQ ID NO: 102872 - RNA, 21 nt, synthetic construct
  source 1..21: mol_type = other RNA
tgcctggtcctgagggctttg

SEQ ID NO: 102873 - RNA, 21 nt, synthetic construct
  source 1..21: mol_type = other RNA
tgcctgtagttttggtgtcat

SEQ ID NO: 102874 - RNA, 21 nt, synthetic construct
  source 1..21: mol_type = other RNA
tgcctgtgcttgtctctctct

SEQ ID NO: 102875 - RNA, 21 nt, synthetic construct
  source 1..21: mol_type = other RNA
tgcctgtgcttttctcgtgca

SEQ ID NO: 102876 - RNA, 21 nt, synthetic construct
  source 1..21: mol_type = other RNA
tgccttcaagttgctttttct

SEQ ID NO: 102877 - RNA, 21 nt, synthetic construct
  source 1..21: mol_type = other RNA
tgccttcaatgtttggtagat

SEQ ID NO: 102878 - RNA, 21 nt, synthetic construct
  source 1..21: mol_type = other RNA
tgccttcagaaggagtccagt

SEQ ID NO: 102879 - RNA, 21 nt, synthetic construct
  source 1..21: mol_type = other RNA
tgccttcagctatggtgttat

SEQ ID NO: 102880 - RNA, 21 nt, synthetic construct
  source 1..21: mol_type = other RNA
tgccttcagtatgaatgcacg

SEQ ID NO: 102881 - RNA, 21 nt, synthetic construct
  source 1..21: mol_type = other RNA
tgccttcctgacctctgcagt

SEQ ID NO: 102882 - RNA, 21 nt, synthetic construct
  source 1..21: mol_type = other RNA
tgccttccttgggcacactcc

SEQ ID NO: 102883 - RNA, 21 nt, synthetic construct
  source 1..21: mol_type = other RNA
tgccttcgcagggtgaaactt

SEQ ID NO: 102884 - RNA, 21 nt, synthetic construct
  source 1..21: mol_type = other RNA
tgccttgacctcccaaaggac

SEQ ID NO: 102885 - RNA, 21 nt, synthetic construct
  source 1..21: mol_type = other RNA
tgccttgaggtgattcagagt

SEQ ID NO: 102886 - RNA, 21 nt, synthetic construct
  source 1..21: mol_type = other RNA
tgccttgatccattacatcaa

SEQ ID NO: 102887 - RNA, 21 nt, synthetic construct
  source 1..21: mol_type = other RNA
tgccttggccttctgaggagc

SEQ ID NO: 102888 - RNA, 21 nt, synthetic construct
  source 1..21: mol_type = other RNA
tgcctttcactttgatcatac

SEQ ID NO: 102889 - RNA, 21 nt, synthetic construct
  source 1..21: mol_type = other RNA
tgcctttcagcatagcagaac

SEQ ID NO: 102890 - RNA, 21 nt, synthetic construct
  source 1..21: mol_type = other RNA
tgcctttcgcttttggagcta

SEQ ID NO: 102891 - RNA, 21 nt, synthetic construct
  source 1..21: mol_type = other RNA
tgcctttgttcatcatctttt

SEQ ID NO: 102892 - RNA, 21 nt, synthetic construct
  source 1..21: mol_type = other RNA
tgccttttcactcttagtgat

SEQ ID NO: 102893 - RNA, 21 nt, synthetic construct
  source 1..21: mol_type = other RNA
tgcgaaacacactcgtgtatg

SEQ ID NO: 102894 - RNA, 21 nt, synthetic construct
  source 1..21: mol_type = other RNA
tgcgaaatagtagttgctcag

SEQ ID NO: 102895 - RNA, 21 nt, synthetic construct
  source 1..21: mol_type = other RNA
tgcgaaggcaatgtaacacag

SEQ ID NO: 102896 - RNA, 21 nt, synthetic construct
  source 1..21: mol_type = other RNA
tgcgaatcatctaggcatata

SEQ ID NO: 102897 - RNA, 21 nt, synthetic construct
  source 1..21: mol_type = other RNA
tgcgaatttacttttaaactg

SEQ ID NO: 102898 - RNA, 21 nt, synthetic construct
  source 1..21: mol_type = other RNA
tgcgacatatcagggatcaca

SEQ ID NO: 102899 - RNA, 21 nt, synthetic construct
  source 1..21: mol_type = other RNA
tgcgacctcgaagcacaacca

SEQ ID NO: 102900 - RNA, 21 nt, synthetic construct
  source 1..21: mol_type = other RNA
tgcgagaaaggcgaagcggca

SEQ ID NO: 102901 - RNA, 21 nt, synthetic construct
  source 1..21: mol_type = other RNA
tgcgagcggcgggcttcgcct

SEQ ID NO: 102902 - RNA, 21 nt, synthetic construct
  source 1..21: mol_type = other RNA
tgcgagtgtgaacgatggttt

SEQ ID NO: 102903 - RNA, 21 nt, synthetic construct
  source 1..21: mol_type = other RNA
tgcgatgatcaaaaccaggag

SEQ ID NO: 102904 - RNA, 21 nt, synthetic construct
  source 1..21: mol_type = other RNA
tgcgattggttggactccacc

SEQ ID NO: 102905 - RNA, 21 nt, synthetic construct
  source 1..21: mol_type = other RNA
tgcgattgtttcagtgtgtcc

SEQ ID NO: 102906 - RNA, 21 nt, synthetic construct
  source 1..21: mol_type = other RNA
tgcgcaattgcagccagagag

SEQ ID NO: 102907 - RNA, 21 nt, synthetic construct
  source 1..21: mol_type = other RNA
tgcgcagaactggggcttgaa

SEQ ID NO: 102908 - RNA, 21 nt, synthetic construct
  source 1..21: mol_type = other RNA
tgcgccaagcagggacgggcg

SEQ ID NO: 102909 - RNA, 21 nt, synthetic construct
  source 1..21: mol_type = other RNA
tgcgccatcacacccagtata

SEQ ID NO: 102910 - RNA, 21 nt, synthetic construct
  source 1..21: mol_type = other RNA
tgcgccttaaagccacactct

SEQ ID NO: 102911 - RNA, 21 nt, synthetic construct
  source 1..21: mol_type = other RNA
tgcgcgtcaaaagatgctggt

SEQ ID NO: 102912 - RNA, 21 nt, synthetic construct
  source 1..21: mol_type = other RNA
tgcggcaggcattgtgctcag

SEQ ID NO: 102913 - RNA, 21 nt, synthetic construct
  source 1..21: mol_type = other RNA
tgcggcttgattagcttcctc

SEQ ID NO: 102914 - RNA, 21 nt, synthetic construct
  source 1..21: mol_type = other RNA
tgcgggattatttggaagaga

SEQ ID NO: 102915 - RNA, 21 nt, synthetic construct
  source 1..21: mol_type = other RNA
tgcgggcccagctcttttgtg

SEQ ID NO: 102916 - RNA, 21 nt, synthetic construct
  source 1..21: mol_type = other RNA
tgcggggtttcagcacaatac

SEQ ID NO: 102917 - RNA, 21 nt, synthetic construct
  source 1..21: mol_type = other RNA
tgcggtcttttagccaacaac

SEQ ID NO: 102918 - RNA, 21 nt, synthetic construct
  source 1..21: mol_type = other RNA
tgcggtgacgtgagatcatgc

SEQ ID NO: 102919 - RNA, 21 nt, synthetic construct
  source 1..21: mol_type = other RNA
tgcgtccgtagaccgaggaaa

SEQ ID NO: 102920 - RNA, 21 nt, synthetic construct
  source 1..21: mol_type = other RNA
tgcgtctgtgattatcaggga

SEQ ID NO: 102921 - RNA, 21 nt, synthetic construct
  source 1..21: mol_type = other RNA
tgcgtgaatctgttcctgggt

SEQ ID NO: 102922 - RNA, 21 nt, synthetic construct
  source 1..21: mol_type = other RNA
tgcgtggttcacacctgtagt

SEQ ID NO: 102923 - RNA, 21 nt, synthetic construct
  source 1..21: mol_type = other RNA
tgcgtggtttattcatataat

SEQ ID NO: 102924 - RNA, 21 nt, synthetic construct
  source 1..21: mol_type = other RNA
tgcgtgtgaaaccaagcaagt

SEQ ID NO: 102925 - RNA, 21 nt, synthetic construct
  source 1..21: mol_type = other RNA
tgcgtgttattttaatcgaat

SEQ ID NO: 102926 - RNA, 21 nt, synthetic construct
  source 1..21: mol_type = other RNA
tgcgttgaccgctttcgtgag

SEQ ID NO: 102927 - RNA, 21 nt, synthetic construct
  source 1..21: mol_type = other RNA
tgcgtttgttagatctgggat

SEQ ID NO: 102928 - RNA, 21 nt, synthetic construct
  source 1..21: mol_type = other RNA
tgctaaacagtacagtagtaa

SEQ ID NO: 102929 - RNA, 21 nt, synthetic construct
  source 1..21: mol_type = other RNA
tgctaaactgttccccaagcc

SEQ ID NO: 102930 - RNA, 21 nt, synthetic construct
  source 1..21: mol_type = other RNA
tgctaacaccttgaactggga

SEQ ID NO: 102931 - RNA, 21 nt, synthetic construct
  source 1..21: mol_type = other RNA
tgctaacatgaactactcaaa

SEQ ID NO: 102932 - RNA, 21 nt, synthetic construct
  source 1..21: mol_type = other RNA
tgctaacgtgcttgctctgcg

SEQ ID NO: 102933 - RNA, 21 nt, synthetic construct
  source 1..21: mol_type = other RNA
tgctaactgcagaggtcagga

SEQ ID NO: 102934 - RNA, 21 nt, synthetic construct
  source 1..21: mol_type = other RNA
tgctaagtgtttaggatataa

SEQ ID NO: 102935 - RNA, 21 nt, synthetic construct
  source 1..21: mol_type = other RNA
tgctaataaaaacatatgcag

SEQ ID NO: 102936 - RNA, 21 nt, synthetic construct
  source 1..21: mol_type = other RNA
tgctaataagtgagtttgacc

SEQ ID NO: 102937 - RNA, 21 nt, synthetic construct
  source 1..21: mol_type = other RNA
tgctaataatgatgactatga

SEQ ID NO: 102938 - RNA, 21 nt, synthetic construct
  source 1..21: mol_type = other RNA
tgctaatggtccttgctgaag

SEQ ID NO: 102939 - RNA, 21 nt, synthetic construct
  source 1..21: mol_type = other RNA
tgctaattcattgtacatgaa

SEQ ID NO: 102940 - RNA, 21 nt, synthetic construct
  source 1..21: mol_type = other RNA
tgctaattgtttgttgggttt

SEQ ID NO: 102941 - RNA, 21 nt, synthetic construct
  source 1..21: mol_type = other RNA
tgctacaggggcattccctgt

SEQ ID NO: 102942 - RNA, 21 nt, synthetic construct
  source 1..21: mol_type = other RNA
tgctacctcaaattgtgtgtt

SEQ ID NO: 102943 - RNA, 21 nt, synthetic construct
  source 1..21: mol_type = other RNA
tgctacgaatgaactcctata

SEQ ID NO: 102944 - RNA, 21 nt, synthetic construct
  source 1..21: mol_type = other RNA
tgctactagcaagctaataat

SEQ ID NO: 102945 - RNA, 21 nt, synthetic construct
  source 1..21: mol_type = other RNA
tgctactcaaagtttagttat

SEQ ID NO: 102946 - RNA, 21 nt, synthetic construct
  source 1..21: mol_type = other RNA
tgctactcaggagattaaggc

SEQ ID NO: 102947 - RNA, 21 nt, synthetic construct
  source 1..21: mol_type = other RNA
tgctacttgtggggctgaggt

SEQ ID NO: 102948 - RNA, 21 nt, synthetic construct
  source 1..21: mol_type = other RNA
tgctagagctgctgtaacaaa

SEQ ID NO: 102949 - RNA, 21 nt, synthetic construct
  source 1..21: mol_type = other RNA
tgctagatgctaaacagtaca

SEQ ID NO: 102950 - RNA, 21 nt, synthetic construct
  source 1..21: mol_type = other RNA
tgctagccttcttggagtaaa

SEQ ID NO: 102951 - RNA, 21 nt, synthetic construct
  source 1..21: mol_type = other RNA
tgctaggggctgttcccagat

SEQ ID NO: 102952 - RNA, 21 nt, synthetic construct
  source 1..21: mol_type = other RNA
tgctagtagcagaatccccaa

SEQ ID NO: 102953 - RNA, 21 nt, synthetic construct
  source 1..21: mol_type = other RNA
tgctagtattttgttgacatc

SEQ ID NO: 102954 - RNA, 21 nt, synthetic construct
  source 1..21: mol_type = other RNA
tgctagtggtaactagatgcc

SEQ ID NO: 102955 - RNA, 21 nt, synthetic construct
  source 1..21: mol_type = other RNA
tgctagtgtcctcaggctcca

SEQ ID NO: 102956 - RNA, 21 nt, synthetic construct
  source 1..21: mol_type = other RNA
tgctataaacttccctctcag

SEQ ID NO: 102957 - RNA, 21 nt, synthetic construct
  source 1..21: mol_type = other RNA
tgctataaagaacatgattgg

SEQ ID NO: 102958 - RNA, 21 nt, synthetic construct
  source 1..21: mol_type = other RNA
tgctatacaaccggaaaatgc

SEQ ID NO: 102959 - RNA, 21 nt, synthetic construct
  source 1..21: mol_type = other RNA
tgctatcattttaaagggata

SEQ ID NO: 102960 - RNA, 21 nt, synthetic construct
  source 1..21: mol_type = other RNA
tgctatccagaagagaatggc

SEQ ID NO: 102961 - RNA, 21 nt, synthetic construct
  source 1..21: mol_type = other RNA
tgctatccagtctctgcaaca

SEQ ID NO: 102962 - RNA, 21 nt, synthetic construct
  source 1..21: mol_type = other RNA
tgctatgaaaattggcgtaca

SEQ ID NO: 102963 - RNA, 21 nt, synthetic construct
  source 1..21: mol_type = other RNA
tgctatgaaatgtggtttttg

SEQ ID NO: 102964 - RNA, 21 nt, synthetic construct
  source 1..21: mol_type = other RNA
tgctatgactaatttgaggca

SEQ ID NO: 102965 - RNA, 21 nt, synthetic construct
  source 1..21: mol_type = other RNA
tgctatgcatactttggaagg

SEQ ID NO: 102966 - RNA, 21 nt, synthetic construct
  source 1..21: mol_type = other RNA
tgctatgctgaaaggcatgaa

SEQ ID NO: 102967 - RNA, 21 nt, synthetic construct
  source 1..21: mol_type = other RNA
tgctatgtaatctcatggaag

SEQ ID NO: 102968 - RNA, 21 nt, synthetic construct
  source 1..21: mol_type = other RNA
tgctattataaatggcatctt

SEQ ID NO: 102969 - RNA, 21 nt, synthetic construct
  source 1..21: mol_type = other RNA
tgctattcaacaggtataaag

SEQ ID NO: 102970 - RNA, 21 nt, synthetic construct
  source 1..21: mol_type = other RNA
tgctattcaagacaagcaagg

SEQ ID NO: 102971 - RNA, 21 nt, synthetic construct
  source 1..21: mol_type = other RNA
tgctattctctttctgaaatt

SEQ ID NO: 102972 - RNA, 21 nt, synthetic construct
  source 1..21: mol_type = other RNA
tgctattgataaatctaaagc

SEQ ID NO: 102973 - RNA, 21 nt, synthetic construct
  source 1..21: mol_type = other RNA
tgctattgttgaattgttgga

SEQ ID NO: 102974 - RNA, 21 nt, synthetic construct
  source 1..21: mol_type = other RNA
tgctattttattagatagtgg

SEQ ID NO: 102975 - RNA, 21 nt, synthetic construct
  source 1..21: mol_type = other RNA
tgctcaaaggggcattccgtg

SEQ ID NO: 102976 - RNA, 21 nt, synthetic construct
  source 1..21: mol_type = other RNA
tgctcacacttactaaatgat

SEQ ID NO: 102977 - RNA, 21 nt, synthetic construct
  source 1..21: mol_type = other RNA
tgctcacatttagtttcatct

SEQ ID NO: 102978 - RNA, 21 nt, synthetic construct
  source 1..21: mol_type = other RNA
tgctcaccgcaacatctgcct

SEQ ID NO: 102979 - RNA, 21 nt, synthetic construct
  source 1..21: mol_type = other RNA
tgctcactgcaacctttgtct

SEQ ID NO: 102980 - RNA, 21 nt, synthetic construct
  source 1..21: mol_type = other RNA
tgctcactgtctccatgtcct

SEQ ID NO: 102981 - RNA, 21 nt, synthetic construct
  source 1..21: mol_type = other RNA
tgctcactttgggattagctt

SEQ ID NO: 102982 - RNA, 21 nt, synthetic construct
  source 1..21: mol_type = other RNA
tgctcagaaaattttcttttg

SEQ ID NO: 102983 - RNA, 21 nt, synthetic construct
  source 1..21: mol_type = other RNA
tgctcagaagctttcagactt

SEQ ID NO: 102984 - RNA, 21 nt, synthetic construct
  source 1..21: mol_type = other RNA
tgctcaggagtaactgctcct

SEQ ID NO: 102985 - RNA, 21 nt, synthetic construct
  source 1..21: mol_type = other RNA
tgctcagggtgcgacctcgaa

SEQ ID NO: 102986 - RNA, 21 nt, synthetic construct
  source 1..21: mol_type = other RNA
tgctcagtccctcaccttctg

SEQ ID NO: 102987 - RNA, 21 nt, synthetic construct
  source 1..21: mol_type = other RNA
tgctcagtgggttcaattatg

SEQ ID NO: 102988 - RNA, 21 nt, synthetic construct
  source 1..21: mol_type = other RNA
tgctcagtggttctgcgtgtt

SEQ ID NO: 102989 - RNA, 21 nt, synthetic construct
  source 1..21: mol_type = other RNA
tgctcagtttcaaaagctccc

SEQ ID NO: 102990 - RNA, 21 nt, synthetic construct
  source 1..21: mol_type = other RNA
tgctcataatagtctcacgat

SEQ ID NO: 102991 - RNA, 21 nt, synthetic construct
  source 1..21: mol_type = other RNA
tgctcataattaaagagagta

SEQ ID NO: 102992 - RNA, 21 nt, synthetic construct
  source 1..21: mol_type = other RNA
tgctcattcatctgcagtgtc

SEQ ID NO: 102993 - RNA, 21 nt, synthetic construct
  source 1..21: mol_type = other RNA
tgctccagagaagttttccag

SEQ ID NO: 102994 - RNA, 21 nt, synthetic construct
  source 1..21: mol_type = other RNA
tgctccagtatgacctcctcc

SEQ ID NO: 102995 - RNA, 21 nt, synthetic construct
  source 1..21: mol_type = other RNA
tgctccatagcttcctaagaa

SEQ ID NO: 102996 - RNA, 21 nt, synthetic construct
  source 1..21: mol_type = other RNA
tgctcccatttgggactgaga

SEQ ID NO: 102997 - RNA, 21 nt, synthetic construct
  source 1..21: mol_type = other RNA
tgctccctaaatacacatgtt

SEQ ID NO: 102998 - RNA, 21 nt, synthetic construct
  source 1..21: mol_type = other RNA
tgctccctctatggcaggcac

SEQ ID NO: 102999 - RNA, 21 nt, synthetic construct
  source 1..21: mol_type = other RNA
tgctccctctgccgcctgggg

SEQ ID NO: 103000 - RNA, 21 nt, synthetic construct
  source 1..21: mol_type = other RNA
tgctcctctgactttatggta

SEQ ID NO: 103001 - RNA, 21 nt, synthetic construct
  source 1..21: mol_type = other RNA
tgctcctgcctttgttcatca

SEQ ID NO: 103002 - RNA, 21 nt, synthetic construct
  source 1..21: mol_type = other RNA
tgctcggctctgtcacccttg

SEQ ID NO: 103003 - RNA, 21 nt, synthetic construct
  source 1..21: mol_type = other RNA
tgctctacaaaccttcttatt

SEQ ID NO: 103004 - RNA, 21 nt, synthetic construct
  source 1..21: mol_type = other RNA
tgctctaccctttccaaattc

SEQ ID NO: 103005 - RNA, 21 nt, synthetic construct
  source 1..21: mol_type = other RNA
tgctctcaagtaattgttttc

SEQ ID NO: 103006 - RNA, 21 nt, synthetic construct
  source 1..21: mol_type = other RNA
tgctctcccccgaatcctttg

SEQ ID NO: 103007 - RNA, 21 nt, synthetic construct
  source 1..21: mol_type = other RNA
tgctctcttcccccaaaactt

SEQ ID NO: 103008 - RNA, 21 nt, synthetic construct
  source 1..21: mol_type = other RNA
tgctctcttgcccaagctggt

SEQ ID NO: 103009 - RNA, 21 nt, synthetic construct
  source 1..21: mol_type = other RNA
tgctctcttgcctaggctgga

SEQ ID NO: 103010 - RNA, 21 nt, synthetic construct
  source 1..21: mol_type = other RNA
tgctctgacgtttaaatgagt

SEQ ID NO: 103011 - RNA, 21 nt, synthetic construct
  source 1..21: mol_type = other RNA
tgctctgataggataatgtcc

SEQ ID NO: 103012 - RNA, 21 nt, synthetic construct
  source 1..21: mol_type = other RNA
tgctctgcaaatgaggttgct

SEQ ID NO: 103013 - RNA, 21 nt, synthetic construct
  source 1..21: mol_type = other RNA
tgctctgcacgtactagtcag

SEQ ID NO: 103014 - RNA, 21 nt, synthetic construct
  source 1..21: mol_type = other RNA
tgctctgcagagactgtgctt

SEQ ID NO: 103015 - RNA, 21 nt, synthetic construct
  source 1..21: mol_type = other RNA
tgctctgcggcaggcattgtg

SEQ ID NO: 103016 - RNA, 21 nt, synthetic construct
  source 1..21: mol_type = other RNA
tgctctgtcacccacgtggag

SEQ ID NO: 103017 - RNA, 21 nt, synthetic construct
  source 1..21: mol_type = other RNA
tgctctgtcctgtcagtgtgg

SEQ ID NO: 103018 - RNA, 21 nt, synthetic construct
  source 1..21: mol_type = other RNA
tgctcttctattccagagaat

SEQ ID NO: 103019 - RNA, 21 nt, synthetic construct
  source 1..21: mol_type = other RNA
tgctcttctgatcacagaagt

SEQ ID NO: 103020 - RNA, 21 nt, synthetic construct
  source 1..21: mol_type = other RNA
tgctcttggtttcttcaagat

SEQ ID NO: 103021 - RNA, 21 nt, synthetic construct
  source 1..21: mol_type = other RNA
tgctctttatctccacatttc

SEQ ID NO: 103022 - RNA, 21 nt, synthetic construct
  source 1..21: mol_type = other RNA
tgctcttttcatcactcactg

SEQ ID NO: 103023 - RNA, 21 nt, synthetic construct
  source 1..21: mol_type = other RNA
tgctgaaaaagatactcttaa

SEQ ID NO: 103024 - RNA, 21 nt, synthetic construct
  source 1..21: mol_type = other RNA
tgctgaaaccccgcatactgt

SEQ ID NO: 103025 - RNA, 21 nt, synthetic construct
  source 1..21: mol_type = other RNA
tgctgaaagctagaagacctc

SEQ ID NO: 103026 - RNA, 21 nt, synthetic construct
  source 1..21: mol_type = other RNA
tgctgaaaggcatgaaattct

SEQ ID NO: 103027 - RNA, 21 nt, synthetic construct
  source 1..21: mol_type = other RNA
tgctgaacttgtcacaaaatg

SEQ ID NO: 103028 - RNA, 21 nt, synthetic construct
  source 1..21: mol_type = other RNA
tgctgaagaataactgtcctg

SEQ ID NO: 103029 - RNA, 21 nt, synthetic construct
  source 1..21: mol_type = other RNA
tgctgacagattaaataccac

SEQ ID NO: 103030 - RNA, 21 nt, synthetic construct
  source 1..21: mol_type = other RNA
tgctgactagtacgtgcagag

SEQ ID NO: 103031 - RNA, 21 nt, synthetic construct
  source 1..21: mol_type = other RNA
tgctgacttcctggctctagc

SEQ ID NO: 103032 - RNA, 21 nt, synthetic construct
  source 1..21: mol_type = other RNA
tgctgagatggtcagtactat

SEQ ID NO: 103033 - RNA, 21 nt, synthetic construct
  source 1..21: mol_type = other RNA
tgctgagattacagatgtgag

SEQ ID NO: 103034 - RNA, 21 nt, synthetic construct
  source 1..21: mol_type = other RNA
tgctgaggccccaggggacat

SEQ ID NO: 103035 - RNA, 21 nt, synthetic construct
  source 1..21: mol_type = other RNA
tgctgagggaatttttcttac

SEQ ID NO: 103036 - RNA, 21 nt, synthetic construct
  source 1..21: mol_type = other RNA
tgctgagtcttctactgtgaa

SEQ ID NO: 103037 - RNA, 21 nt, synthetic construct
  source 1..21: mol_type = other RNA
tgctgagtgaatggggtaatt

SEQ ID NO: 103038 - RNA, 21 nt, synthetic construct
  source 1..21: mol_type = other RNA
tgctgataaatggctttttac

SEQ ID NO: 103039 - RNA, 21 nt, synthetic construct
  source 1..21: mol_type = other RNA
tgctgatcaggaaagaccggg

SEQ ID NO: 103040 - RNA, 21 nt, synthetic construct
  source 1..21: mol_type = other RNA
tgctgatgaactacacagaca

SEQ ID NO: 103041 - RNA, 21 nt, synthetic construct
  source 1..21: mol_type = other RNA
tgctgatgtaagtgggaggag

SEQ ID NO: 103042 - RNA, 21 nt, synthetic construct
  source 1..21: mol_type = other RNA
tgctgcaactgagaagagctg

SEQ ID NO: 103043 - RNA, 21 nt, synthetic construct
  source 1..21: mol_type = other RNA
tgctgcacgtctgtggtctca

SEQ ID NO: 103044 - RNA, 21 nt, synthetic construct
  source 1..21: mol_type = other RNA
tgctgcactggctattagtta

SEQ ID NO: 103045 - RNA, 21 nt, synthetic construct
  source 1..21: mol_type = other RNA
tgctgcagtatgcatagatca

SEQ ID NO: 103046 - RNA, 21 nt, synthetic construct
  source 1..21: mol_type = other RNA
tgctgcagtttttccactaat

SEQ ID NO: 103047 - RNA, 21 nt, synthetic construct
  source 1..21: mol_type = other RNA
tgctgcatagtactccattat

SEQ ID NO: 103048 - RNA, 21 nt, synthetic construct
  source 1..21: mol_type = other RNA
tgctgcatcccaagggttttg

SEQ ID NO: 103049 - RNA, 21 nt, synthetic construct
  source 1..21: mol_type = other RNA
tgctgccaagtcagcacttct

SEQ ID NO: 103050 - RNA, 21 nt, synthetic construct
  source 1..21: mol_type = other RNA
tgctgccagatgttctaattt

SEQ ID NO: 103051 - RNA, 21 nt, synthetic construct
  source 1..21: mol_type = other RNA
tgctgccccagctaaaatgtt

SEQ ID NO: 103052 - RNA, 21 nt, synthetic construct
  source 1..21: mol_type = other RNA
tgctgctatgaaaattggcgt

SEQ ID NO: 103053 - RNA, 21 nt, synthetic construct
  source 1..21: mol_type = other RNA
tgctgctctgacgtttaaatg

SEQ ID NO: 103054 - RNA, 21 nt, synthetic construct
  source 1..21: mol_type = other RNA
tgctgctgaaaaagatactct

SEQ ID NO: 103055 - RNA, 21 nt, synthetic construct
  source 1..21: mol_type = other RNA
tgctgcttctacccactattg

SEQ ID NO: 103056 - RNA, 21 nt, synthetic construct
  source 1..21: mol_type = other RNA
tgctggaaattttcaagggtg

SEQ ID NO: 103057 - RNA, 21 nt, synthetic construct
  source 1..21: mol_type = other RNA
tgctggaacgaatattcattt

SEQ ID NO: 103058 - RNA, 21 nt, synthetic construct
  source 1..21: mol_type = other RNA
tgctggaagttggcccaacat

SEQ ID NO: 103059 - RNA, 21 nt, synthetic construct
  source 1..21: mol_type = other RNA
tgctggactggagggatgctg

SEQ ID NO: 103060 - RNA, 21 nt, synthetic construct
  source 1..21: mol_type = other RNA
tgctggagtgtggcaggggct

SEQ ID NO: 103061 - RNA, 21 nt, synthetic construct
  source 1..21: mol_type = other RNA
tgctggatcatatagtaattc

SEQ ID NO: 103062 - RNA, 21 nt, synthetic construct
  source 1..21: mol_type = other RNA
tgctggcagccttctctcttc

SEQ ID NO: 103063 - RNA, 21 nt, synthetic construct
  source 1..21: mol_type = other RNA
tgctggccagtgagttcaaat

SEQ ID NO: 103064 - RNA, 21 nt, synthetic construct
  source 1..21: mol_type = other RNA
tgctggctcagtctgtttgcc

SEQ ID NO: 103065 - RNA, 21 nt, synthetic construct
  source 1..21: mol_type = other RNA
tgctggcttcaatatgcagta

SEQ ID NO: 103066 - RNA, 21 nt, synthetic construct
  source 1..21: mol_type = other RNA
tgctggcttcatgggtggaaa

SEQ ID NO: 103067 - RNA, 21 nt, synthetic construct
  source 1..21: mol_type = other RNA
tgctgggagaccaggagttct

SEQ ID NO: 103068 - RNA, 21 nt, synthetic construct
  source 1..21: mol_type = other RNA
tgctgggcccactctccccaa

SEQ ID NO: 103069 - RNA, 21 nt, synthetic construct
  source 1..21: mol_type = other RNA
tgctgggctagggaagcagtt

SEQ ID NO: 103070 - RNA, 21 nt, synthetic construct
  source 1..21: mol_type = other RNA
tgctgggctattgttttgcaa

SEQ ID NO: 103071 - RNA, 21 nt, synthetic construct
  source 1..21: mol_type = other RNA
tgctggggacccctccctgct

SEQ ID NO: 103072 - RNA, 21 nt, synthetic construct
  source 1..21: mol_type = other RNA
tgctgggtagagactggatcc

SEQ ID NO: 103073 - RNA, 21 nt, synthetic construct
  source 1..21: mol_type = other RNA
tgctggtctggaatgtgtagt

SEQ ID NO: 103074 - RNA, 21 nt, synthetic construct
  source 1..21: mol_type = other RNA
tgctggtggagtattctagtt

SEQ ID NO: 103075 - RNA, 21 nt, synthetic construct
  source 1..21: mol_type = other RNA
tgctggtgggctttgagaaag

SEQ ID NO: 103076 - RNA, 21 nt, synthetic construct
  source 1..21: mol_type = other RNA
tgctgtaacaaagatgccaca

SEQ ID NO: 103077 - RNA, 21 nt, synthetic construct
  source 1..21: mol_type = other RNA
tgctgtaactgacttcaagag

SEQ ID NO: 103078 - RNA, 21 nt, synthetic construct
  source 1..21: mol_type = other RNA
tgctgtaagctggtaatacag

SEQ ID NO: 103079 - RNA, 21 nt, synthetic construct
  source 1..21: mol_type = other RNA
tgctgtagtgattcacttttg

SEQ ID NO: 103080 - RNA, 21 nt, synthetic construct
  source 1..21: mol_type = other RNA
tgctgtataacattttctcta

SEQ ID NO: 103081 - RNA, 21 nt, synthetic construct
  source 1..21: mol_type = other RNA
tgctgtatacccaggtgtgag

SEQ ID NO: 103082 - RNA, 21 nt, synthetic construct
  source 1..21: mol_type = other RNA
tgctgtcaggcaagggactgt

SEQ ID NO: 103083 - RNA, 21 nt, synthetic construct
  source 1..21: mol_type = other RNA
tgctgtccatttccttaagca

SEQ ID NO: 103084 - RNA, 21 nt, synthetic construct
  source 1..21: mol_type = other RNA
tgctgtcggttttctagttag

SEQ ID NO: 103085 - RNA, 21 nt, synthetic construct
  source 1..21: mol_type = other RNA
tgctgtcgtttatgcatttat

SEQ ID NO: 103086 - RNA, 21 nt, synthetic construct
  source 1..21: mol_type = other RNA
tgctgtctataggcaatgagt

SEQ ID NO: 103087 - RNA, 21 nt, synthetic construct
  source 1..21: mol_type = other RNA
tgctgtgaatttggatttgag

SEQ ID NO: 103088 - RNA, 21 nt, synthetic construct
  source 1..21: mol_type = other RNA
tgctgtgattgcaggtgtggg

SEQ ID NO: 103089 - RNA, 21 nt, synthetic construct
  source 1..21: mol_type = other RNA
tgctgtgccagtgcaaacctc

SEQ ID NO: 103090 - RNA, 21 nt, synthetic construct
  source 1..21: mol_type = other RNA
tgctgtggccgagggagacgg

SEQ ID NO: 103091 - RNA, 21 nt, synthetic construct
  source 1..21: mol_type = other RNA
tgctgttcccaagcaagtgtg

SEQ ID NO: 103092 - RNA, 21 nt, synthetic construct
  source 1..21: mol_type = other RNA
tgctgttctctgtgtggtttg

SEQ ID NO: 103093 - RNA, 21 nt, synthetic construct
  source 1..21: mol_type = other RNA
tgctgttgaggctgggccctg

SEQ ID NO: 103094 - RNA, 21 nt, synthetic construct
  source 1..21: mol_type = other RNA
tgctgttgatggacgtttgag

SEQ ID NO: 103095 - RNA, 21 nt, synthetic construct
  source 1..21: mol_type = other RNA
tgctgttgtaatgttacttct

SEQ ID NO: 103096 - RNA, 21 nt, synthetic construct
  source 1..21: mol_type = other RNA
tgctgttgtattttacaccat

SEQ ID NO: 103097 - RNA, 21 nt, synthetic construct
  source 1..21: mol_type = other RNA
tgctgtttacattagagaaga

SEQ ID NO: 103098 - RNA, 21 nt, synthetic construct
  source 1..21: mol_type = other RNA
tgctgtttaccaagggtgtgt

SEQ ID NO: 103099 - RNA, 21 nt, synthetic construct
  source 1..21: mol_type = other RNA
tgctgttttgcttactgtagc

SEQ ID NO: 103100 - RNA, 21 nt, synthetic construct
  source 1..21: mol_type = other RNA
tgctgtttttgaaaagaacaa

SEQ ID NO: 103101 - RNA, 21 nt, synthetic construct
  source 1..21: mol_type = other RNA
tgcttaaagcctctcaacact

SEQ ID NO: 103102 - RNA, 21 nt, synthetic construct
  source 1..21: mol_type = other RNA
tgcttaaagcgctactcagct

SEQ ID NO: 103103 - RNA, 21 nt, synthetic construct
  source 1..21: mol_type = other RNA
tgcttaaagttggtcctgcat

SEQ ID NO: 103104 - RNA, 21 nt, synthetic construct
  source 1..21: mol_type = other RNA
tgcttaacaagaatcctgcta

SEQ ID NO: 103105 - RNA, 21 nt, synthetic construct
  source 1..21: mol_type = other RNA
tgcttaaggaaatggacagca

SEQ ID NO: 103106 - RNA, 21 nt, synthetic construct
  source 1..21: mol_type = other RNA
tgcttaagtcactccatttgt

SEQ ID NO: 103107 - RNA, 21 nt, synthetic construct
  source 1..21: mol_type = other RNA
tgcttaatctgatttttagtg

SEQ ID NO: 103108 - RNA, 21 nt, synthetic construct
  source 1..21: mol_type = other RNA
tgcttaatcttcacacttagt

SEQ ID NO: 103109 - RNA, 21 nt, synthetic construct
  source 1..21: mol_type = other RNA
tgcttaattgagctgtcccca

SEQ ID NO: 103110 - RNA, 21 nt, synthetic construct
  source 1..21: mol_type = other RNA
tgcttacacacacgtttatat

SEQ ID NO: 103111 - RNA, 21 nt, synthetic construct
  source 1..21: mol_type = other RNA
tgcttacagactgattaattt

SEQ ID NO: 103112 - RNA, 21 nt, synthetic construct
  source 1..21: mol_type = other RNA
tgcttactctaatggggaaat

SEQ ID NO: 103113 - RNA, 21 nt, synthetic construct
  source 1..21: mol_type = other RNA
tgcttactgtagcattgaagt

SEQ ID NO: 103114 - RNA, 21 nt, synthetic construct
  source 1..21: mol_type = other RNA
tgcttagccttccagagacaa

SEQ ID NO: 103115 - RNA, 21 nt, synthetic construct
  source 1..21: mol_type = other RNA
tgcttagcgctggaggtcggg

SEQ ID NO: 103116 - RNA, 21 nt, synthetic construct
  source 1..21: mol_type = other RNA
tgcttagctgcctcttcctgt

SEQ ID NO: 103117 - RNA, 21 nt, synthetic construct
  source 1..21: mol_type = other RNA
tgcttaggatcccagtccttt

SEQ ID NO: 103118 - RNA, 21 nt, synthetic construct
  source 1..21: mol_type = other RNA
tgcttaggctgaagcaggctt

SEQ ID NO: 103119 - RNA, 21 nt, synthetic construct
  source 1..21: mol_type = other RNA
tgcttaggctgttattagagt

SEQ ID NO: 103120 - RNA, 21 nt, synthetic construct
  source 1..21: mol_type = other RNA
tgcttaggtaagaaaaattcc

SEQ ID NO: 103121 - RNA, 21 nt, synthetic construct
  source 1..21: mol_type = other RNA
tgcttagtcttctcagatctg

SEQ ID NO: 103122 - RNA, 21 nt, synthetic construct
  source 1..21: mol_type = other RNA
tgcttataacaagaaaatctg

SEQ ID NO: 103123 - RNA, 21 nt, synthetic construct
  source 1..21: mol_type = other RNA
tgcttatgtcttgtggctgac

SEQ ID NO: 103124 - RNA, 21 nt, synthetic construct
  source 1..21: mol_type = other RNA
tgcttattatatgcctagatt

SEQ ID NO: 103125 - RNA, 21 nt, synthetic construct
  source 1..21: mol_type = other RNA
tgcttcaaagagaacaaaata

SEQ ID NO: 103126 - RNA, 21 nt, synthetic construct
  source 1..21: mol_type = other RNA
tgcttcagcctaagcaagtta

SEQ ID NO: 103127 - RNA, 21 nt, synthetic construct
  source 1..21: mol_type = other RNA
tgcttcatattttgtgggaat

SEQ ID NO: 103128 - RNA, 21 nt, synthetic construct
  source 1..21: mol_type = other RNA
tgcttcatctggaccagttac

SEQ ID NO: 103129 - RNA, 21 nt, synthetic construct
  source 1..21: mol_type = other RNA
tgcttcattccgcgtttatta

SEQ ID NO: 103130 - RNA, 21 nt, synthetic construct
  source 1..21: mol_type = other RNA
tgcttccaaaagcaggccctg

SEQ ID NO: 103131 - RNA, 21 nt, synthetic construct
  source 1..21: mol_type = other RNA
tgcttccacagctatcaggcc

SEQ ID NO: 103132 - RNA, 21 nt, synthetic construct
  source 1..21: mol_type = other RNA
tgcttccacatttctaatttc

SEQ ID NO: 103133 - RNA, 21 nt, synthetic construct
  source 1..21: mol_type = other RNA
tgcttcccacttcgaaagttc

SEQ ID NO: 103134 - RNA, 21 nt, synthetic construct
  source 1..21: mol_type = other RNA
tgcttcccccaaagaaggaaa

SEQ ID NO: 103135 - RNA, 21 nt, synthetic construct
  source 1..21: mol_type = other RNA
tgcttccctagcccagcactt

SEQ ID NO: 103136 - RNA, 21 nt, synthetic construct
  source 1..21: mol_type = other RNA
tgcttcctaaacctgctacga

SEQ ID NO: 103137 - RNA, 21 nt, synthetic construct
  source 1..21: mol_type = other RNA
tgcttccttctcttatactag

SEQ ID NO: 103138 - RNA, 21 nt, synthetic construct
  source 1..21: mol_type = other RNA
tgcttccttgctatgtaatct

SEQ ID NO: 103139 - RNA, 21 nt, synthetic construct
  source 1..21: mol_type = other RNA
tgcttcgaagcttattaaaat

SEQ ID NO: 103140 - RNA, 21 nt, synthetic construct
  source 1..21: mol_type = other RNA
tgcttcgaggtcgcaccctga

SEQ ID NO: 103141 - RNA, 21 nt, synthetic construct
  source 1..21: mol_type = other RNA
tgcttctacccactattgaaa

SEQ ID NO: 103142 - RNA, 21 nt, synthetic construct
  source 1..21: mol_type = other RNA
tgcttctagccaaagcaagcc

SEQ ID NO: 103143 - RNA, 21 nt, synthetic construct
  source 1..21: mol_type = other RNA
tgcttctagtaacttggtcga

SEQ ID NO: 103144 - RNA, 21 nt, synthetic construct
  source 1..21: mol_type = other RNA
tgcttctcaataaggaaagca

SEQ ID NO: 103145 - RNA, 21 nt, synthetic construct
  source 1..21: mol_type = other RNA
tgcttctgataggaatatcgt

SEQ ID NO: 103146 - RNA, 21 nt, synthetic construct
  source 1..21: mol_type = other RNA
tgcttgaactgctggtctgga

SEQ ID NO: 103147 - RNA, 21 nt, synthetic construct
  source 1..21: mol_type = other RNA
tgcttgaagagcgcttctatg

SEQ ID NO: 103148 - RNA, 21 nt, synthetic construct
  source 1..21: mol_type = other RNA
tgcttgaatgtgcctacatag

SEQ ID NO: 103149 - RNA, 21 nt, synthetic construct
  source 1..21: mol_type = other RNA
tgcttgagagagataaaacct

SEQ ID NO: 103150 - RNA, 21 nt, synthetic construct
  source 1..21: mol_type = other RNA
tgcttgaggccacgagttcag

SEQ ID NO: 103151 - RNA, 21 nt, synthetic construct
  source 1..21: mol_type = other RNA
tgcttgagtgcaggagtttga

SEQ ID NO: 103152 - RNA, 21 nt, synthetic construct
  source 1..21: mol_type = other RNA
tgcttgcagacaataattctt

SEQ ID NO: 103153 - RNA, 21 nt, synthetic construct
  source 1..21: mol_type = other RNA
tgcttgcagccttccctgaac

SEQ ID NO: 103154 - RNA, 21 nt, synthetic construct
  source 1..21: mol_type = other RNA
tgcttgctccagagaagtttt

SEQ ID NO: 103155 - RNA, 21 nt, synthetic construct
  source 1..21: mol_type = other RNA
tgcttgctctacaaaccttct

SEQ ID NO: 103156 - RNA, 21 nt, synthetic construct
  source 1..21: mol_type = other RNA
tgcttgctctgcggcaggcat

SEQ ID NO: 103157 - RNA, 21 nt, synthetic construct
  source 1..21: mol_type = other RNA
tgcttgctgcactggctatta

SEQ ID NO: 103158 - RNA, 21 nt, synthetic construct
  source 1..21: mol_type = other RNA
tgcttggagtcacttgacaaa

SEQ ID NO: 103159 - RNA, 21 nt, synthetic construct
  source 1..21: mol_type = other RNA
tgcttggatattctacagaaa

SEQ ID NO: 103160 - RNA, 21 nt, synthetic construct
  source 1..21: mol_type = other RNA
tgcttggcacagaattattga

SEQ ID NO: 103161 - RNA, 21 nt, synthetic construct
  source 1..21: mol_type = other RNA
tgcttggcgcagtgcttagcg

SEQ ID NO: 103162 - RNA, 21 nt, synthetic construct
  source 1..21: mol_type = other RNA
tgcttgggaacagcaggggaa

SEQ ID NO: 103163 - RNA, 21 nt, synthetic construct
  source 1..21: mol_type = other RNA
tgcttgggctcccttccagcg

SEQ ID NO: 103164 - RNA, 21 nt, synthetic construct
  source 1..21: mol_type = other RNA
tgcttggtgttgactgaatta

SEQ ID NO: 103165 - RNA, 21 nt, synthetic construct
  source 1..21: mol_type = other RNA
tgcttggtttcacacgcattg

SEQ ID NO: 103166 - RNA, 21 nt, synthetic construct
  source 1..21: mol_type = other RNA
tgcttgtctctctctttctct

SEQ ID NO: 103167 - RNA, 21 nt, synthetic construct
  source 1..21: mol_type = other RNA
tgcttgtcttgaatagcatct

SEQ ID NO: 103168 - RNA, 21 nt, synthetic construct
  source 1..21: mol_type = other RNA
tgcttgtgcttttaatacttt

SEQ ID NO: 103169 - RNA, 21 nt, synthetic construct
  source 1..21: mol_type = other RNA
tgctttaaaacactggcaaaa

SEQ ID NO: 103170 - RNA, 21 nt, synthetic construct
  source 1..21: mol_type = other RNA
tgctttaacctctggtatttt

SEQ ID NO: 103171 - RNA, 21 nt, synthetic construct
  source 1..21: mol_type = other RNA
tgctttactactgcatttttt

SEQ ID NO: 103172 - RNA, 21 nt, synthetic construct
  source 1..21: mol_type = other RNA
tgctttcagttctttcggata

SEQ ID NO: 103173 - RNA, 21 nt, synthetic construct
  source 1..21: mol_type = other RNA
tgctttcctcatgtccatagt

SEQ ID NO: 103174 - RNA, 21 nt, synthetic construct
  source 1..21: mol_type = other RNA
tgctttccttattgagaagca

SEQ ID NO: 103175 - RNA, 21 nt, synthetic construct
  source 1..21: mol_type = other RNA
tgctttctactagtataagag

SEQ ID NO: 103176 - RNA, 21 nt, synthetic construct
  source 1..21: mol_type = other RNA
tgctttctatctctcagatct

SEQ ID NO: 103177 - RNA, 21 nt, synthetic construct
  source 1..21: mol_type = other RNA
tgctttctcaacactgtgttc

SEQ ID NO: 103178 - RNA, 21 nt, synthetic construct
  source 1..21: mol_type = other RNA
tgctttctctagttgcacggt

SEQ ID NO: 103179 - RNA, 21 nt, synthetic construct
  source 1..21: mol_type = other RNA
tgctttcttggggctctaatg

SEQ ID NO: 103180 - RNA, 21 nt, synthetic construct
  source 1..21: mol_type = other RNA
tgctttgaatttggaaagggt

SEQ ID NO: 103181 - RNA, 21 nt, synthetic construct
  source 1..21: mol_type = other RNA
tgctttgagctacaaactcca

SEQ ID NO: 103182 - RNA, 21 nt, synthetic construct
  source 1..21: mol_type = other RNA
tgctttgcgaaatagtagttg

SEQ ID NO: 103183 - RNA, 21 nt, synthetic construct
  source 1..21: mol_type = other RNA
tgctttgctgccccagctaaa

SEQ ID NO: 103184 - RNA, 21 nt, synthetic construct
  source 1..21: mol_type = other RNA
tgctttggagtcacagtgaat

SEQ ID NO: 103185 - RNA, 21 nt, synthetic construct
  source 1..21: mol_type = other RNA
tgctttggagtgagaggactg

SEQ ID NO: 103186 - RNA, 21 nt, synthetic construct
  source 1..21: mol_type = other RNA
tgctttggctagaagcatctg

SEQ ID NO: 103187 - RNA, 21 nt, synthetic construct
  source 1..21: mol_type = other RNA
tgctttgggtctatagtttaa

SEQ ID NO: 103188 - RNA, 21 nt, synthetic construct
  source 1..21: mol_type = other RNA
tgctttgtctctggaaggcta

SEQ ID NO: 103189 - RNA, 21 nt, synthetic construct
  source 1..21: mol_type = other RNA
tgcttttaatactttcacact

SEQ ID NO: 103190 - RNA, 21 nt, synthetic construct
  source 1..21: mol_type = other RNA
tgcttttacttggctcctccc

SEQ ID NO: 103191 - RNA, 21 nt, synthetic construct
  source 1..21: mol_type = other RNA
tgcttttcctggaaaacttct

SEQ ID NO: 103192 - RNA, 21 nt, synthetic construct
  source 1..21: mol_type = other RNA
tgcttttctcgtgcatgtctg

SEQ ID NO: 103193 - RNA, 21 nt, synthetic construct
  source 1..21: mol_type = other RNA
tgcttttgctgagggaatttt

SEQ ID NO: 103194 - RNA, 21 nt, synthetic construct
  source 1..21: mol_type = other RNA
tgcttttgctgcatcccaagg

SEQ ID NO: 103195 - RNA, 21 nt, synthetic construct
  source 1..21: mol_type = other RNA
tgcttttgctttgggtctata

SEQ ID NO: 103196 - RNA, 21 nt, synthetic construct
  source 1..21: mol_type = other RNA
tgcttttggaagcatgtggcc

SEQ ID NO: 103197 - RNA, 21 nt, synthetic construct
  source 1..21: mol_type = other RNA
tgctttttactttgcgaaaca

SEQ ID NO: 103198 - RNA, 21 nt, synthetic construct
  source 1..21: mol_type = other RNA
tgctttttctgcatcttttga

SEQ ID NO: 103199 - RNA, 21 nt, synthetic construct
  source 1..21: mol_type = other RNA
tgctttttcttcttgttttgt

SEQ ID NO: 103200 - RNA, 21 nt, synthetic construct
  source 1..21: mol_type = other RNA
tgctttttcttggtggtaact

SEQ ID NO: 103201 - RNA, 21 nt, synthetic construct
  source 1..21: mol_type = other RNA
tgctttttgtatcctgtttga

SEQ ID NO: 103202 - RNA, 21 nt, synthetic construct
  source 1..21: mol_type = other RNA
tgcttttttggtgtttttcta

SEQ ID NO: 103203 - RNA, 21 nt, synthetic construct
  source 1..21: mol_type = other RNA
tggaaaaactgcagcaattat

SEQ ID NO: 103204 - RNA, 21 nt, synthetic construct
  source 1..21: mol_type = other RNA
tggaaaaatcgtcctcttcgg

SEQ ID NO: 103205 - RNA, 21 nt, synthetic construct
  source 1..21: mol_type = other RNA
tggaaaaatgtccgttgaagt

SEQ ID NO: 103206 - RNA, 21 nt, synthetic construct
  source 1..21: mol_type = other RNA
tggaaaacaaattgcatcaac

SEQ ID NO: 103207 - RNA, 21 nt, synthetic construct
  source 1..21: mol_type = other RNA
tggaaaactagagatgggaaa

SEQ ID NO: 103208 - RNA, 21 nt, synthetic construct
  source 1..21: mol_type = other RNA
tggaaaactaggtatttgaaa

SEQ ID NO: 103209 - RNA, 21 nt, synthetic construct
  source 1..21: mol_type = other RNA
tggaaaactctgtttccttac

SEQ ID NO: 103210 - RNA, 21 nt, synthetic construct
  source 1..21: mol_type = other RNA
tggaaaacttctctggagcaa

SEQ ID NO: 103211 - RNA, 21 nt, synthetic construct
  source 1..21: mol_type = other RNA
tggaaaagaaagctgtggatg

SEQ ID NO: 103212 - RNA, 21 nt, synthetic construct
  source 1..21: mol_type = other RNA
tggaaaagtgttgactaccat

SEQ ID NO: 103213 - RNA, 21 nt, synthetic construct
  source 1..21: mol_type = other RNA
tggaaaattcaaacatgacag

SEQ ID NO: 103214 - RNA, 21 nt, synthetic construct
  source 1..21: mol_type = other RNA
tggaaaattcttggtcttttg

SEQ ID NO: 103215 - RNA, 21 nt, synthetic construct
  source 1..21: mol_type = other RNA
tggaaacaacctaaatgtcca

SEQ ID NO: 103216 - RNA, 21 nt, synthetic construct
  source 1..21: mol_type = other RNA
tggaaacaactcaaacgtcca

SEQ ID NO: 103217 - RNA, 21 nt, synthetic construct
  source 1..21: mol_type = other RNA
tggaaacatggtaatttgtcc

SEQ ID NO: 103218 - RNA, 21 nt, synthetic construct
  source 1..21: mol_type = other RNA
tggaaaccttttgtagaccct

SEQ ID NO: 103219 - RNA, 21 nt, synthetic construct
  source 1..21: mol_type = other RNA
tggaaactacaattactgtac

SEQ ID NO: 103220 - RNA, 21 nt, synthetic construct
  source 1..21: mol_type = other RNA
tggaaactcaaacccaaatta

SEQ ID NO: 103221 - RNA, 21 nt, synthetic construct
  source 1..21: mol_type = other RNA
tggaaacttgccatcttgcat

SEQ ID NO: 103222 - RNA, 21 nt, synthetic construct
  source 1..21: mol_type = other RNA
tggaaagaaatagaactgtca

SEQ ID NO: 103223 - RNA, 21 nt, synthetic construct
  source 1..21: mol_type = other RNA
tggaaagagccagcctgatga

SEQ ID NO: 103224 - RNA, 21 nt, synthetic construct
  source 1..21: mol_type = other RNA
tggaaaggacttgatctaaaa

SEQ ID NO: 103225 - RNA, 21 nt, synthetic construct
  source 1..21: mol_type = other RNA
tggaaagggtagagcactttc

SEQ ID NO: 103226 - RNA, 21 nt, synthetic construct
  source 1..21: mol_type = other RNA
tggaaagtggactatgtaggc

SEQ ID NO: 103227 - RNA, 21 nt, synthetic construct
  source 1..21: mol_type = other RNA
tggaaagttcaaatgaggctt

SEQ ID NO: 103228 - RNA, 21 nt, synthetic construct
  source 1..21: mol_type = other RNA
tggaaataagtttcatggact

SEQ ID NO: 103229 - RNA, 21 nt, synthetic construct
  source 1..21: mol_type = other RNA
tggaaataatttccctcagaa

SEQ ID NO: 103230 - RNA, 21 nt, synthetic construct
  source 1..21: mol_type = other RNA
tggaaatacttgaacattctg

SEQ ID NO: 103231 - RNA, 21 nt, synthetic construct
  source 1..21: mol_type = other RNA
tggaaatatggtcactgctga

SEQ ID NO: 103232 - RNA, 21 nt, synthetic construct
  source 1..21: mol_type = other RNA
tggaaatcacaggtttaggtt

SEQ ID NO: 103233 - RNA, 21 nt, synthetic construct
  source 1..21: mol_type = other RNA
tggaaatgaagtattgatttg

SEQ ID NO: 103234 - RNA, 21 nt, synthetic construct
  source 1..21: mol_type = other RNA
tggaaatgatacctcatttat

SEQ ID NO: 103235 - RNA, 21 nt, synthetic construct
  source 1..21: mol_type = other RNA
tggaaatggacagcggggatg

SEQ ID NO: 103236 - RNA, 21 nt, synthetic construct
  source 1..21: mol_type = other RNA
tggaaatgtaaattcctaact

SEQ ID NO: 103237 - RNA, 21 nt, synthetic construct
  source 1..21: mol_type = other RNA
tggaaattaaacacacccttg

SEQ ID NO: 103238 - RNA, 21 nt, synthetic construct
  source 1..21: mol_type = other RNA
tggaaattagaaatgtggaag

SEQ ID NO: 103239 - RNA, 21 nt, synthetic construct
  source 1..21: mol_type = other RNA
tggaaattttcaagggtgttt

SEQ ID NO: 103240 - RNA, 21 nt, synthetic construct
  source 1..21: mol_type = other RNA
tggaacaatcaaaccatcctt

SEQ ID NO: 103241 - RNA, 21 nt, synthetic construct
  source 1..21: mol_type = other RNA
tggaacacacattagcctaga

SEQ ID NO: 103242 - RNA, 21 nt, synthetic construct
  source 1..21: mol_type = other RNA
tggaacaggccctttgttagt

SEQ ID NO: 103243 - RNA, 21 nt, synthetic construct
  source 1..21: mol_type = other RNA
tggaacataatctttggtgct

SEQ ID NO: 103244 - RNA, 21 nt, synthetic construct
  source 1..21: mol_type = other RNA
tggaaccactgtaggccccga

SEQ ID NO: 103245 - RNA, 21 nt, synthetic construct
  source 1..21: mol_type = other RNA
tggaacctttgtccactgtca

SEQ ID NO: 103246 - RNA, 21 nt, synthetic construct
  source 1..21: mol_type = other RNA
tggaacggcttaacacctttg

SEQ ID NO: 103247 - RNA, 21 nt, synthetic construct
  source 1..21: mol_type = other RNA
tggaactcatttctgcttgaa

SEQ ID NO: 103248 - RNA, 21 nt, synthetic construct
  source 1..21: mol_type = other RNA
tggaactctattttcctaaaa

SEQ ID NO: 103249 - RNA, 21 nt, synthetic construct
  source 1..21: mol_type = other RNA
tggaactctgtcatggtgtgt

SEQ ID NO: 103250 - RNA, 21 nt, synthetic construct
  source 1..21: mol_type = other RNA
tggaactcttgcggtctttta

SEQ ID NO: 103251 - RNA, 21 nt, synthetic construct
  source 1..21: mol_type = other RNA
tggaagaatcaggtctctttg

SEQ ID NO: 103252 - RNA, 21 nt, synthetic construct
  source 1..21: mol_type = other RNA
tggaagaattttaagcctaga

SEQ ID NO: 103253 - RNA, 21 nt, synthetic construct
  source 1..21: mol_type = other RNA
tggaagactatcacgattctg

SEQ ID NO: 103254 - RNA, 21 nt, synthetic construct
  source 1..21: mol_type = other RNA
tggaagactatgagaaggatt

SEQ ID NO: 103255 - RNA, 21 nt, synthetic construct
  source 1..21: mol_type = other RNA
tggaagactttatggtaattg

SEQ ID NO: 103256 - RNA, 21 nt, synthetic construct
  source 1..21: mol_type = other RNA
tggaagagagaaggctgccag

SEQ ID NO: 103257 - RNA, 21 nt, synthetic construct
  source 1..21: mol_type = other RNA
tggaagatgggacttcactag

SEQ ID NO: 103258 - RNA, 21 nt, synthetic construct
  source 1..21: mol_type = other RNA
tggaagatttctactggggtc

SEQ ID NO: 103259 - RNA, 21 nt, synthetic construct
  source 1..21: mol_type = other RNA
tggaagcacagtctctgcaga

SEQ ID NO: 103260 - RNA, 21 nt, synthetic construct
  source 1..21: mol_type = other RNA
tggaagcagaactaagacccc

SEQ ID NO: 103261 - RNA, 21 nt, synthetic construct
  source 1..21: mol_type = other RNA
tggaagcatgtggccaggagg

SEQ ID NO: 103262 - RNA, 21 nt, synthetic construct
  source 1..21: mol_type = other RNA
tggaagctgtccttctcgtgt

SEQ ID NO: 103263 - RNA, 21 nt, synthetic construct
  source 1..21: mol_type = other RNA
tggaaggaaacactataaatc

SEQ ID NO: 103264 - RNA, 21 nt, synthetic construct
  source 1..21: mol_type = other RNA
tggaaggaaataagaaggttt

SEQ ID NO: 103265 - RNA, 21 nt, synthetic construct
  source 1..21: mol_type = other RNA
tggaaggactcacagcttacc

SEQ ID NO: 103266 - RNA, 21 nt, synthetic construct
  source 1..21: mol_type = other RNA
tggaaggcctgatagctgtgg

SEQ ID NO: 103267 - RNA, 21 nt, synthetic construct
  source 1..21: mol_type = other RNA
tggaaggccttctcctccaac

SEQ ID NO: 103268 - RNA, 21 nt, synthetic construct
  source 1..21: mol_type = other RNA
tggaaggctaagcatgtaact

SEQ ID NO: 103269 - RNA, 21 nt, synthetic construct
  source 1..21: mol_type = other RNA
tggaagggagcccaagcacac

SEQ ID NO: 103270 - RNA, 21 nt, synthetic construct
  source 1..21: mol_type = other RNA
tggaaggtaggagggtgtgat

SEQ ID NO: 103271 - RNA, 21 nt, synthetic construct
  source 1..21: mol_type = other RNA
tggaagtaaggattttctatt

SEQ ID NO: 103272 - RNA, 21 nt, synthetic construct
  source 1..21: mol_type = other RNA
tggaagtaattgggatctgat

SEQ ID NO: 103273 - RNA, 21 nt, synthetic construct
  source 1..21: mol_type = other RNA
tggaagtgaagtcaagatgaa

SEQ ID NO: 103274 - RNA, 21 nt, synthetic construct
  source 1..21: mol_type = other RNA
tggaagtgctgggctagggaa

SEQ ID NO: 103275 - RNA, 21 nt, synthetic construct
  source 1..21: mol_type = other RNA
tggaagtgtaacatacacatc

SEQ ID NO: 103276 - RNA, 21 nt, synthetic construct
  source 1..21: mol_type = other RNA
tggaagttatttaatctctct

SEQ ID NO: 103277 - RNA, 21 nt, synthetic construct
  source 1..21: mol_type = other RNA
tggaagttcaaggttataatc

SEQ ID NO: 103278 - RNA, 21 nt, synthetic construct
  source 1..21: mol_type = other RNA
tggaagttggcccaacatgct

SEQ ID NO: 103279 - RNA, 21 nt, synthetic construct
  source 1..21: mol_type = other RNA
tggaagtttcctgcacatgca

SEQ ID NO: 103280 - RNA, 21 nt, synthetic construct
  source 1..21: mol_type = other RNA
tggaagtttctggaagtttcc

SEQ ID NO: 103281 - RNA, 21 nt, synthetic construct
  source 1..21: mol_type = other RNA
tggaataatggaactaagaaa

SEQ ID NO: 103282 - RNA, 21 nt, synthetic construct
  source 1..21: mol_type = other RNA
tggaatagaagagcagtgtgt

SEQ ID NO: 103283 - RNA, 21 nt, synthetic construct
  source 1..21: mol_type = other RNA
tggaatagaagggagaaccca

SEQ ID NO: 103284 - RNA, 21 nt, synthetic construct
  source 1..21: mol_type = other RNA
tggaatagtagcttcaatgag

SEQ ID NO: 103285 - RNA, 21 nt, synthetic construct
  source 1..21: mol_type = other RNA
tggaatattactcagtctcga

SEQ ID NO: 103286 - RNA, 21 nt, synthetic construct
  source 1..21: mol_type = other RNA
tggaatattgttcagccttaa

SEQ ID NO: 103287 - RNA, 21 nt, synthetic construct
  source 1..21: mol_type = other RNA
tggaatcaatccagacagcta

SEQ ID NO: 103288 - RNA, 21 nt, synthetic construct
  source 1..21: mol_type = other RNA
tggaatcattccgtatatatt

SEQ ID NO: 103289 - RNA, 21 nt, synthetic construct
  source 1..21: mol_type = other RNA
tggaatgagtccagctttcta

SEQ ID NO: 103290 - RNA, 21 nt, synthetic construct
  source 1..21: mol_type = other RNA
tggaatgcatcgtttcaatat

SEQ ID NO: 103291 - RNA, 21 nt, synthetic construct
  source 1..21: mol_type = other RNA
tggaatgcccatcctctattt

SEQ ID NO: 103292 - RNA, 21 nt, synthetic construct
  source 1..21: mol_type = other RNA
tggaatgggttggaggagaag

SEQ ID NO: 103293 - RNA, 21 nt, synthetic construct
  source 1..21: mol_type = other RNA
tggaatggtcaatttcatcgt

SEQ ID NO: 103294 - RNA, 21 nt, synthetic construct
  source 1..21: mol_type = other RNA
tggaatggtgaagaatgtgaa

SEQ ID NO: 103295 - RNA, 21 nt, synthetic construct
  source 1..21: mol_type = other RNA
tggaatgtgcacctccagtgt

SEQ ID NO: 103296 - RNA, 21 nt, synthetic construct
  source 1..21: mol_type = other RNA
tggaatgtgtagttctggtgt

SEQ ID NO: 103297 - RNA, 21 nt, synthetic construct
  source 1..21: mol_type = other RNA
tggaattaaaatgttgccaat

SEQ ID NO: 103298 - RNA, 21 nt, synthetic construct
  source 1..21: mol_type = other RNA
tggaattaactccaggggaca

SEQ ID NO: 103299 - RNA, 21 nt, synthetic construct
  source 1..21: mol_type = other RNA
tggaattcatcaaagttaaac

SEQ ID NO: 103300 - RNA, 21 nt, synthetic construct
  source 1..21: mol_type = other RNA
tggaattctgacacccgaaga

SEQ ID NO: 103301 - RNA, 21 nt, synthetic construct
  source 1..21: mol_type = other RNA
tggaattctgatgcacaagcc

SEQ ID NO: 103302 - RNA, 21 nt, synthetic construct
  source 1..21: mol_type = other RNA
tggaattgccatatgtagggc

SEQ ID NO: 103303 - RNA, 21 nt, synthetic construct
  source 1..21: mol_type = other RNA
tggaatttaaggggtaaatgg

SEQ ID NO: 103304 - RNA, 21 nt, synthetic construct
  source 1..21: mol_type = other RNA
tggaattttagtaattctcca

SEQ ID NO: 103305 - RNA, 21 nt, synthetic construct
  source 1..21: mol_type = other RNA
tggacaaaaaacgcggcactt

SEQ ID NO: 103306 - RNA, 21 nt, synthetic construct
  source 1..21: mol_type = other RNA
tggacaaattaccatgtttcc

SEQ ID NO: 103307 - RNA, 21 nt, synthetic construct
  source 1..21: mol_type = other RNA
tggacaacagtgtgagaccgt

SEQ ID NO: 103308 - RNA, 21 nt, synthetic construct
  source 1..21: mol_type = other RNA
tggacacacacagtcctgtgt

SEQ ID NO: 103309 - RNA, 21 nt, synthetic construct
  source 1..21: mol_type = other RNA
tggacacactgaaacaatcgc

SEQ ID NO: 103310 - RNA, 21 nt, synthetic construct
  source 1..21: mol_type = other RNA
tggacactgcagatgaatgag

SEQ ID NO: 103311 - RNA, 21 nt, synthetic construct
  source 1..21: mol_type = other RNA
tggacagcacattaaataagg

SEQ ID NO: 103312 - RNA, 21 nt, synthetic construct
  source 1..21: mol_type = other RNA
tggacagcggggatggttgca

SEQ ID NO: 103313 - RNA, 21 nt, synthetic construct
  source 1..21: mol_type = other RNA
tggacagctgggagaaagcta

SEQ ID NO: 103314 - RNA, 21 nt, synthetic construct
  source 1..21: mol_type = other RNA
tggacaggatcccggaacagg

SEQ ID NO: 103315 - RNA, 21 nt, synthetic construct
  source 1..21: mol_type = other RNA
tggacaggggacatgaaggaa

SEQ ID NO: 103316 - RNA, 21 nt, synthetic construct
  source 1..21: mol_type = other RNA
tggacataagggtctgtttta

SEQ ID NO: 103317 - RNA, 21 nt, synthetic construct
  source 1..21: mol_type = other RNA
tggacatgaggaaagcaggtt

SEQ ID NO: 103318 - RNA, 21 nt, synthetic construct
  source 1..21: mol_type = other RNA
tggacattatcctatcagagc

SEQ ID NO: 103319 - RNA, 21 nt, synthetic construct
  source 1..21: mol_type = other RNA
tggacattctgcttccttgct

SEQ ID NO: 103320 - RNA, 21 nt, synthetic construct
  source 1..21: mol_type = other RNA
tggaccacaatcttaccccca

SEQ ID NO: 103321 - RNA, 21 nt, synthetic construct
  source 1..21: mol_type = other RNA
tggaccagttactctctctgc

SEQ ID NO: 103322 - RNA, 21 nt, synthetic construct
  source 1..21: mol_type = other RNA
tggaccatgttttaggagtca

SEQ ID NO: 103323 - RNA, 21 nt, synthetic construct
  source 1..21: mol_type = other RNA
tggacccatgcccatgtgcat

SEQ ID NO: 103324 - RNA, 21 nt, synthetic construct
  source 1..21: mol_type = other RNA
tggacccgggaggcagatgtt

SEQ ID NO: 103325 - RNA, 21 nt, synthetic construct
  source 1..21: mol_type = other RNA
tggacccttaccttaaaccat

SEQ ID NO: 103326 - RNA, 21 nt, synthetic construct
  source 1..21: mol_type = other RNA
tggacgggtggtagggagggg

SEQ ID NO: 103327 - RNA, 21 nt, synthetic construct
  source 1..21: mol_type = other RNA
tggacgtttgagttgtttcca

SEQ ID NO: 103328 - RNA, 21 nt, synthetic construct
  source 1..21: mol_type = other RNA
tggactagactgcctgaggtc

SEQ ID NO: 103329 - RNA, 21 nt, synthetic construct
  source 1..21: mol_type = other RNA
tggactatgtaggcacattca

SEQ ID NO: 103330 - RNA, 21 nt, synthetic construct
  source 1..21: mol_type = other RNA
tggactcagggtcacttcctc

SEQ ID NO: 103331 - RNA, 21 nt, synthetic construct
  source 1..21: mol_type = other RNA
tggactcattccaatccttcc

SEQ ID NO: 103332 - RNA, 21 nt, synthetic construct
  source 1..21: mol_type = other RNA
tggactccaccctgcccctta

SEQ ID NO: 103333 - RNA, 21 nt, synthetic construct
  source 1..21: mol_type = other RNA
tggactccttctgaaggcact

SEQ ID NO: 103334 - RNA, 21 nt, synthetic construct
  source 1..21: mol_type = other RNA
tggactgaaaagatacagaaa

SEQ ID NO: 103335 - RNA, 21 nt, synthetic construct
  source 1..21: mol_type = other RNA
tggactggagggatgctggag

SEQ ID NO: 103336 - RNA, 21 nt, synthetic construct
  source 1..21: mol_type = other RNA
tggactgtgagggagatattt

SEQ ID NO: 103337 - RNA, 21 nt, synthetic construct
  source 1..21: mol_type = other RNA
tggactgtgatgactgtaagc

SEQ ID NO: 103338 - RNA, 21 nt, synthetic construct
  source 1..21: mol_type = other RNA
tggacttcctattttataatg

SEQ ID NO: 103339 - RNA, 21 nt, synthetic construct
  source 1..21: mol_type = other RNA
tggactttaggctgttcaatt

SEQ ID NO: 103340 - RNA, 21 nt, synthetic construct
  source 1..21: mol_type = other RNA
tggagaaagcccagccgcgga

SEQ ID NO: 103341 - RNA, 21 nt, synthetic construct
  source 1..21: mol_type = other RNA
tggagaacagtaaagtcactg

SEQ ID NO: 103342 - RNA, 21 nt, synthetic construct
  source 1..21: mol_type = other RNA
tggagaacttaaaggtttgga

SEQ ID NO: 103343 - RNA, 21 nt, synthetic construct
  source 1..21: mol_type = other RNA
tggagaagagttctgaaggct

SEQ ID NO: 103344 - RNA, 21 nt, synthetic construct
  source 1..21: mol_type = other RNA
tggagaattactaaaattcca

SEQ ID NO: 103345 - RNA, 21 nt, synthetic construct
  source 1..21: mol_type = other RNA
tggagaattctactaaacatt

SEQ ID NO: 103346 - RNA, 21 nt, synthetic construct
  source 1..21: mol_type = other RNA
tggagacactagggactggcc

SEQ ID NO: 103347 - RNA, 21 nt, synthetic construct
  source 1..21: mol_type = other RNA
tggagacagcctaaaccattt

SEQ ID NO: 103348 - RNA, 21 nt, synthetic construct
  source 1..21: mol_type = other RNA
tggagacagtgagcatgctgc

SEQ ID NO: 103349 - RNA, 21 nt, synthetic construct
  source 1..21: mol_type = other RNA
tggagacatctgagacatcac

SEQ ID NO: 103350 - RNA, 21 nt, synthetic construct
  source 1..21: mol_type = other RNA
tggagacccatactcagcccc

SEQ ID NO: 103351 - RNA, 21 nt, synthetic construct
  source 1..21: mol_type = other RNA
tggagactagtacactgttga

SEQ ID NO: 103352 - RNA, 21 nt, synthetic construct
  source 1..21: mol_type = other RNA
tggagactgataaacttcagt

SEQ ID NO: 103353 - RNA, 21 nt, synthetic construct
  source 1..21: mol_type = other RNA
tggagagaaaccttggtgtgc

SEQ ID NO: 103354 - RNA, 21 nt, synthetic construct
  source 1..21: mol_type = other RNA
tggagagatggtagtcaacac

SEQ ID NO: 103355 - RNA, 21 nt, synthetic construct
  source 1..21: mol_type = other RNA
tggagaggcaaaggccgctct

SEQ ID NO: 103356 - RNA, 21 nt, synthetic construct
  source 1..21: mol_type = other RNA
tggagataaagagcaggtgga

SEQ ID NO: 103357 - RNA, 21 nt, synthetic construct
  source 1..21: mol_type = other RNA
tggagataaattacccaaaga

SEQ ID NO: 103358 - RNA, 21 nt, synthetic construct
  source 1..21: mol_type = other RNA
tggagatggggacttgctctc

SEQ ID NO: 103359 - RNA, 21 nt, synthetic construct
  source 1..21: mol_type = other RNA
tggagcaagcatgagtatctg

SEQ ID NO: 103360 - RNA, 21 nt, synthetic construct
  source 1..21: mol_type = other RNA
tggagcactgtgagccactaa

SEQ ID NO: 103361 - RNA, 21 nt, synthetic construct
  source 1..21: mol_type = other RNA
tggagcagggtgggcccttaa

SEQ ID NO: 103362 - RNA, 21 nt, synthetic construct
  source 1..21: mol_type = other RNA
tggagcctgaggacactagca

SEQ ID NO: 103363 - RNA, 21 nt, synthetic construct
  source 1..21: mol_type = other RNA
tggagcctgctctgcagagac

SEQ ID NO: 103364 - RNA, 21 nt, synthetic construct
  source 1..21: mol_type = other RNA
tggagcggtgtcttattgttt

SEQ ID NO: 103365 - RNA, 21 nt, synthetic construct
  source 1..21: mol_type = other RNA
tggagctataatttatctgga

SEQ ID NO: 103366 - RNA, 21 nt, synthetic construct
  source 1..21: mol_type = other RNA
tggagctcactgcagcctcaa

SEQ ID NO: 103367 - RNA, 21 nt, synthetic construct
  source 1..21: mol_type = other RNA
tggagctgtatttttgctcac

SEQ ID NO: 103368 - RNA, 21 nt, synthetic construct
  source 1..21: mol_type = other RNA
tggaggagaaggccttccacg

SEQ ID NO: 103369 - RNA, 21 nt, synthetic construct
  source 1..21: mol_type = other RNA
tggaggagccctgctgtggcc

SEQ ID NO: 103370 - RNA, 21 nt, synthetic construct
  source 1..21: mol_type = other RNA
tggaggataatatctggactg

SEQ ID NO: 103371 - RNA, 21 nt, synthetic construct
  source 1..21: mol_type = other RNA
tggaggatggcttgagcccag

SEQ ID NO: 103372 - RNA, 21 nt, synthetic construct
  source 1..21: mol_type = other RNA
tggaggcaatgttgattttga

SEQ ID NO: 103373 - RNA, 21 nt, synthetic construct
  source 1..21: mol_type = other RNA
tggaggcagtaccattcccct

SEQ ID NO: 103374 - RNA, 21 nt, synthetic construct
  source 1..21: mol_type = other RNA
tggaggctagaagtcccagtt

SEQ ID NO: 103375 - RNA, 21 nt, synthetic construct
  source 1..21: mol_type = other RNA
tggagggatgctggagtgtgg

SEQ ID NO: 103376 - RNA, 21 nt, synthetic construct
  source 1..21: mol_type = other RNA
tggagggccagaggagggatg

SEQ ID NO: 103377 - RNA, 21 nt, synthetic construct
  source 1..21: mol_type = other RNA
tggagggctcccagtgcccac

SEQ ID NO: 103378 - RNA, 21 nt, synthetic construct
  source 1..21: mol_type = other RNA
tggaggggcaggaaaggtggg

SEQ ID NO: 103379 - RNA, 21 nt, synthetic construct
  source 1..21: mol_type = other RNA
tggaggggccagttgagagag

SEQ ID NO: 103380 - RNA, 21 nt, synthetic construct
  source 1..21: mol_type = other RNA
tggaggtcgggctgcctcagc

SEQ ID NO: 103381 - RNA, 21 nt, synthetic construct
  source 1..21: mol_type = other RNA
tggaggtgcacattccaagag

SEQ ID NO: 103382 - RNA, 21 nt, synthetic construct
  source 1..21: mol_type = other RNA
tggaggtggaactctgtcatg

SEQ ID NO: 103383 - RNA, 21 nt, synthetic construct
  source 1..21: mol_type = other RNA
tggagtaaacctgcaattttt

SEQ ID NO: 103384 - RNA, 21 nt, synthetic construct
  source 1..21: mol_type = other RNA
tggagtactatgcagcaacgg

SEQ ID NO: 103385 - RNA, 21 nt, synthetic construct
  source 1..21: mol_type = other RNA
tggagtattctagttctagct

SEQ ID NO: 103386 - RNA, 21 nt, synthetic construct
  source 1..21: mol_type = other RNA
tggagtcacagtgaattctga

SEQ ID NO: 103387 - RNA, 21 nt, synthetic construct
  source 1..21: mol_type = other RNA
tggagtcacttgacaaaaatt

SEQ ID NO: 103388 - RNA, 21 nt, synthetic construct
  source 1..21: mol_type = other RNA
tggagtccaaccaatcgcagg

SEQ ID NO: 103389 - RNA, 21 nt, synthetic construct
  source 1..21: mol_type = other RNA
tggagtcctgtcagtttctga

SEQ ID NO: 103390 - RNA, 21 nt, synthetic construct
  source 1..21: mol_type = other RNA
tggagtgacttaagcaacaga

SEQ ID NO: 103391 - RNA, 21 nt, synthetic construct
  source 1..21: mol_type = other RNA
tggagtgagaggactgcctgg

SEQ ID NO: 103392 - RNA, 21 nt, synthetic construct
  source 1..21: mol_type = other RNA
tggagtgcaatggtgggatct

SEQ ID NO: 103393 - RNA, 21 nt, synthetic construct
  source 1..21: mol_type = other RNA
tggagtgcgagtgtgaacgat

SEQ ID NO: 103394 - RNA, 21 nt, synthetic construct
  source 1..21: mol_type = other RNA
tggagtggaggggcaggaaag

SEQ ID NO: 103395 - RNA, 21 nt, synthetic construct
  source 1..21: mol_type = other RNA
tggagtggagtggcatgatct

SEQ ID NO: 103396 - RNA, 21 nt, synthetic construct
  source 1..21: mol_type = other RNA
tggagtggcatgatctcacgt

SEQ ID NO: 103397 - RNA, 21 nt, synthetic construct
  source 1..21: mol_type = other RNA
tggagtggggcacctaaaagg

SEQ ID NO: 103398 - RNA, 21 nt, synthetic construct
  source 1..21: mol_type = other RNA
tggagtggtggatagagagat

SEQ ID NO: 103399 - RNA, 21 nt, synthetic construct
  source 1..21: mol_type = other RNA
tggagtgtggcaggggctgca

SEQ ID NO: 103400 - RNA, 21 nt, synthetic construct
  source 1..21: mol_type = other RNA
tggagtgttttcttcatggac

SEQ ID NO: 103401 - RNA, 21 nt, synthetic construct
  source 1..21: mol_type = other RNA
tggagttaattccacaaccac

SEQ ID NO: 103402 - RNA, 21 nt, synthetic construct
  source 1..21: mol_type = other RNA
tggagttacgctgccaaaagc

SEQ ID NO: 103403 - RNA, 21 nt, synthetic construct
  source 1..21: mol_type = other RNA
tggagttcagtggtgcaatca

SEQ ID NO: 103404 - RNA, 21 nt, synthetic construct
  source 1..21: mol_type = other RNA
tggagttggtgcaaggataaa

SEQ ID NO: 103405 - RNA, 21 nt, synthetic construct
  source 1..21: mol_type = other RNA
tggagtttgtagctcaaagca

SEQ ID NO: 103406 - RNA, 21 nt, synthetic construct
  source 1..21: mol_type = other RNA
tggagttttccccctacaccc

SEQ ID NO: 103407 - RNA, 21 nt, synthetic construct
  source 1..21: mol_type = other RNA
tggatacaaggtcaatctgaa

SEQ ID NO: 103408 - RNA, 21 nt, synthetic construct
  source 1..21: mol_type = other RNA
tggatacggaaatataacatt

SEQ ID NO: 103409 - RNA, 21 nt, synthetic construct
  source 1..21: mol_type = other RNA
tggatagaagtgtatcagatg

SEQ ID NO: 103410 - RNA, 21 nt, synthetic construct
  source 1..21: mol_type = other RNA
tggatagagagattcaagaaa

SEQ ID NO: 103411 - RNA, 21 nt, synthetic construct
  source 1..21: mol_type = other RNA
tggatagcaacttgcagaaga

SEQ ID NO: 103412 - RNA, 21 nt, synthetic construct
  source 1..21: mol_type = other RNA
tggatagcattatccctttaa

SEQ ID NO: 103413 - RNA, 21 nt, synthetic construct
  source 1..21: mol_type = other RNA
tggatagtgctttttactttg

SEQ ID NO: 103414 - RNA, 21 nt, synthetic construct
  source 1..21: mol_type = other RNA
tggatagtttctcaacttagc

SEQ ID NO: 103415 - RNA, 21 nt, synthetic construct
  source 1..21: mol_type = other RNA
tggatatccccatttttctcg

SEQ ID NO: 103416 - RNA, 21 nt, synthetic construct
  source 1..21: mol_type = other RNA
tggatatctgaggtcaggagc

SEQ ID NO: 103417 - RNA, 21 nt, synthetic construct
  source 1..21: mol_type = other RNA
tggatatctggcctgcaccat

SEQ ID NO: 103418 - RNA, 21 nt, synthetic construct
  source 1..21: mol_type = other RNA
tggatattctacagaaaaccc

SEQ ID NO: 103419 - RNA, 21 nt, synthetic construct
  source 1..21: mol_type = other RNA
tggatatttgcagtagtattg

SEQ ID NO: 103420 - RNA, 21 nt, synthetic construct
  source 1..21: mol_type = other RNA
tggatatttggccgggcgcgg

SEQ ID NO: 103421 - RNA, 21 nt, synthetic construct
  source 1..21: mol_type = other RNA
tggatcaaagacctaagctta

SEQ ID NO: 103422 - RNA, 21 nt, synthetic construct
  source 1..21: mol_type = other RNA
tggatcaaggcacagtctgtg

SEQ ID NO: 103423 - RNA, 21 nt, synthetic construct
  source 1..21: mol_type = other RNA
tggatcaagtgggatttatcc

SEQ ID NO: 103424 - RNA, 21 nt, synthetic construct
  source 1..21: mol_type = other RNA
tggatcatatagtaattctgt

SEQ ID NO: 103425 - RNA, 21 nt, synthetic construct
  source 1..21: mol_type = other RNA
tggatcccccagcccctggtg

SEQ ID NO: 103426 - RNA, 21 nt, synthetic construct
  source 1..21: mol_type = other RNA
tggatcctggagggctcccag

SEQ ID NO: 103427 - RNA, 21 nt, synthetic construct
  source 1..21: mol_type = other RNA
tggatcctgtctcagagtata

SEQ ID NO: 103428 - RNA, 21 nt, synthetic construct
  source 1..21: mol_type = other RNA
tggatcttatctgctgtcggt

SEQ ID NO: 103429 - RNA, 21 nt, synthetic construct
  source 1..21: mol_type = other RNA
tggatgaaaaagtactggaaa

SEQ ID NO: 103430 - RNA, 21 nt, synthetic construct
  source 1..21: mol_type = other RNA
tggatgaacgctaaattaaag

SEQ ID NO: 103431 - RNA, 21 nt, synthetic construct
  source 1..21: mol_type = other RNA
tggatgaatacaaaggtgtta

SEQ ID NO: 103432 - RNA, 21 nt, synthetic construct
  source 1..21: mol_type = other RNA
tggatgaatgcagtggcttcc

SEQ ID NO: 103433 - RNA, 21 nt, synthetic construct
  source 1..21: mol_type = other RNA
tggatgactaggctcctgaga

SEQ ID NO: 103434 - RNA, 21 nt, synthetic construct
  source 1..21: mol_type = other RNA
tggatgagattaatgtaggtg

SEQ ID NO: 103435 - RNA, 21 nt, synthetic construct
  source 1..21: mol_type = other RNA
tggatgcagatttctttttac

SEQ ID NO: 103436 - RNA, 21 nt, synthetic construct
  source 1..21: mol_type = other RNA
tggatgcatgaggcatattat

SEQ ID NO: 103437 - RNA, 21 nt, synthetic construct
  source 1..21: mol_type = other RNA
tggatgctggggacccctccc

SEQ ID NO: 103438 - RNA, 21 nt, synthetic construct
  source 1..21: mol_type = other RNA
tggatgggtgtagggtttggc

SEQ ID NO: 103439 - RNA, 21 nt, synthetic construct
  source 1..21: mol_type = other RNA
tggatgtccttaatgccaccg

SEQ ID NO: 103440 - RNA, 21 nt, synthetic construct
  source 1..21: mol_type = other RNA
tggatgtggtgtggcatgtct

SEQ ID NO: 103441 - RNA, 21 nt, synthetic construct
  source 1..21: mol_type = other RNA
tggatgtgtatgatcaaagtg

SEQ ID NO: 103442 - RNA, 21 nt, synthetic construct
  source 1..21: mol_type = other RNA
tggatgtgtgcacaacacatg

SEQ ID NO: 103443 - RNA, 21 nt, synthetic construct
  source 1..21: mol_type = other RNA
tggatgttaattagatatgtg

SEQ ID NO: 103444 - RNA, 21 nt, synthetic construct
  source 1..21: mol_type = other RNA
tggatgttggtgagaacccag

SEQ ID NO: 103445 - RNA, 21 nt, synthetic construct
  source 1..21: mol_type = other RNA
tggatgtttttagagagatgc

SEQ ID NO: 103446 - RNA, 21 nt, synthetic construct
  source 1..21: mol_type = other RNA
tggattaaggagatggcacat

SEQ ID NO: 103447 - RNA, 21 nt, synthetic construct
  source 1..21: mol_type = other RNA
tggattaagggcccaccctgc

SEQ ID NO: 103448 - RNA, 21 nt, synthetic construct
  source 1..21: mol_type = other RNA
tggattatagtggtaaggagc

SEQ ID NO: 103449 - RNA, 21 nt, synthetic construct
  source 1..21: mol_type = other RNA
tggattcccaggtattttgtt

SEQ ID NO: 103450 - RNA, 21 nt, synthetic construct
  source 1..21: mol_type = other RNA
tggattgattccagtttctct

SEQ ID NO: 103451 - RNA, 21 nt, synthetic construct
  source 1..21: mol_type = other RNA
tggattgcgattgtttcagtg

SEQ ID NO: 103452 - RNA, 21 nt, synthetic construct
  source 1..21: mol_type = other RNA
tggattgctaaactgttcccc

SEQ ID NO: 103453 - RNA, 21 nt, synthetic construct
  source 1..21: mol_type = other RNA
tggattgctagtgtcctcagg

SEQ ID NO: 103454 - RNA, 21 nt, synthetic construct
  source 1..21: mol_type = other RNA
tggattgtgtgtcgagaaaaa

SEQ ID NO: 103455 - RNA, 21 nt, synthetic construct
  source 1..21: mol_type = other RNA
tggatttatctttctagattc

SEQ ID NO: 103456 - RNA, 21 nt, synthetic construct
  source 1..21: mol_type = other RNA
tggatttgagtaactaaacta

SEQ ID NO: 103457 - RNA, 21 nt, synthetic construct
  source 1..21: mol_type = other RNA
tggatttgattgggcattaat

SEQ ID NO: 103458 - RNA, 21 nt, synthetic construct
  source 1..21: mol_type = other RNA
tggatttgggaaggatggcca

SEQ ID NO: 103459 - RNA, 21 nt, synthetic construct
  source 1..21: mol_type = other RNA
tggatttttctgtttctgtga

SEQ ID NO: 103460 - RNA, 21 nt, synthetic construct
  source 1..21: mol_type = other RNA
tggatttttgtgtagaggtga

SEQ ID NO: 103461 - RNA, 21 nt, synthetic construct
  source 1..21: mol_type = other RNA
tggcaaaaaatgcagtagtaa

SEQ ID NO: 103462 - RNA, 21 nt, synthetic construct
  source 1..21: mol_type = other RNA
tggcaaaatggagacatctga

SEQ ID NO: 103463 - RNA, 21 nt, synthetic construct
  source 1..21: mol_type = other RNA
tggcaaacagactgagccagc

SEQ ID NO: 103464 - RNA, 21 nt, synthetic construct
  source 1..21: mol_type = other RNA
tggcaaacttagaatataaac

SEQ ID NO: 103465 - RNA, 21 nt, synthetic construct
  source 1..21: mol_type = other RNA
tggcaaatctttagtgttgct

SEQ ID NO: 103466 - RNA, 21 nt, synthetic construct
  source 1..21: mol_type = other RNA
tggcaaattgtcagattttct

SEQ ID NO: 103467 - RNA, 21 nt, synthetic construct
  source 1..21: mol_type = other RNA
tggcaaatttatgtgaaaaga

SEQ ID NO: 103468 - RNA, 21 nt, synthetic construct
  source 1..21: mol_type = other RNA
tggcaacaaaggcgaagcccg

SEQ ID NO: 103469 - RNA, 21 nt, synthetic construct
  source 1..21: mol_type = other RNA
tggcaacaatcaacaggtagc

SEQ ID NO: 103470 - RNA, 21 nt, synthetic construct
  source 1..21: mol_type = other RNA
tggcaacattttaattccaaa

SEQ ID NO: 103471 - RNA, 21 nt, synthetic construct
  source 1..21: mol_type = other RNA
tggcaaggctaacagccaaag

SEQ ID NO: 103472 - RNA, 21 nt, synthetic construct
  source 1..21: mol_type = other RNA
tggcaaggggaatggtactgc

SEQ ID NO: 103473 - RNA, 21 nt, synthetic construct
  source 1..21: mol_type = other RNA
tggcaagtttccattctctta

SEQ ID NO: 103474 - RNA, 21 nt, synthetic construct
  source 1..21: mol_type = other RNA
tggcaatactctcagaaatta

SEQ ID NO: 103475 - RNA, 21 nt, synthetic construct
  source 1..21: mol_type = other RNA
tggcaatcaaatggccttctt

SEQ ID NO: 103476 - RNA, 21 nt, synthetic construct
  source 1..21: mol_type = other RNA
tggcaattccataaatgtttg

SEQ ID NO: 103477 - RNA, 21 nt, synthetic construct
  source 1..21: mol_type = other RNA
tggcacaatcatagctcacta

SEQ ID NO: 103478 - RNA, 21 nt, synthetic construct
  source 1..21: mol_type = other RNA
tggcacagaattattgattgg

SEQ ID NO: 103479 - RNA, 21 nt, synthetic construct
  source 1..21: mol_type = other RNA
tggcacagcactgttaactga

SEQ ID NO: 103480 - RNA, 21 nt, synthetic construct
  source 1..21: mol_type = other RNA
tggcacagccagtcagtgatg

SEQ ID NO: 103481 - RNA, 21 nt, synthetic construct
  source 1..21: mol_type = other RNA
tggcacaggagagcgacagct

SEQ ID NO: 103482 - RNA, 21 nt, synthetic construct
  source 1..21: mol_type = other RNA
tggcacatactgcatattgaa

SEQ ID NO: 103483 - RNA, 21 nt, synthetic construct
  source 1..21: mol_type = other RNA
tggcactgaagccagtccttg

SEQ ID NO: 103484 - RNA, 21 nt, synthetic construct
  source 1..21: mol_type = other RNA
tggcactttcctgataagggg

SEQ ID NO: 103485 - RNA, 21 nt, synthetic construct
  source 1..21: mol_type = other RNA
tggcagatcaattgaccaaac

SEQ ID NO: 103486 - RNA, 21 nt, synthetic construct
  source 1..21: mol_type = other RNA
tggcagcaggggctaagtagt

SEQ ID NO: 103487 - RNA, 21 nt, synthetic construct
  source 1..21: mol_type = other RNA
tggcagccccgcttcagttgg

SEQ ID NO: 103488 - RNA, 21 nt, synthetic construct
  source 1..21: mol_type = other RNA
tggcagccttctctcttccaa

SEQ ID NO: 103489 - RNA, 21 nt, synthetic construct
  source 1..21: mol_type = other RNA
tggcagcgtaactccatcttc

SEQ ID NO: 103490 - RNA, 21 nt, synthetic construct
  source 1..21: mol_type = other RNA
tggcaggcaccttcagaagcc

SEQ ID NO: 103491 - RNA, 21 nt, synthetic construct
  source 1..21: mol_type = other RNA
tggcaggggctgcatcatggt

SEQ ID NO: 103492 - RNA, 21 nt, synthetic construct
  source 1..21: mol_type = other RNA
tggcaggtcacctagcctctc

SEQ ID NO: 103493 - RNA, 21 nt, synthetic construct
  source 1..21: mol_type = other RNA
tggcaggtttcaagtgaacca

SEQ ID NO: 103494 - RNA, 21 nt, synthetic construct
  source 1..21: mol_type = other RNA
tggcagtctaggaaaagactt

SEQ ID NO: 103495 - RNA, 21 nt, synthetic construct
  source 1..21: mol_type = other RNA
tggcataaagacagacatttg

SEQ ID NO: 103496 - RNA, 21 nt, synthetic construct
  source 1..21: mol_type = other RNA
tggcatacaactgctcataat

SEQ ID NO: 103497 - RNA, 21 nt, synthetic construct
  source 1..21: mol_type = other RNA
tggcatcatactggaaggact

SEQ ID NO: 103498 - RNA, 21 nt, synthetic construct
  source 1..21: mol_type = other RNA
tggcatcattcataaacacag

SEQ ID NO: 103499 - RNA, 21 nt, synthetic construct
  source 1..21: mol_type = other RNA
tggcatcggggcctacagtgg

SEQ ID NO: 103500 - RNA, 21 nt, synthetic construct
  source 1..21: mol_type = other RNA
tggcatctttaagattttttg

SEQ ID NO: 103501 - RNA, 21 nt, synthetic construct
  source 1..21: mol_type = other RNA
tggcatctttgttacagcagc

SEQ ID NO: 103502 - RNA, 21 nt, synthetic construct
  source 1..21: mol_type = other RNA
tggcatgaaatgggtttaaaa

SEQ ID NO: 103503 - RNA, 21 nt, synthetic construct
  source 1..21: mol_type = other RNA
tggcatgaacccaccaggagg

SEQ ID NO: 103504 - RNA, 21 nt, synthetic construct
  source 1..21: mol_type = other RNA
tggcatgatctcacgtcaccg

SEQ ID NO: 103505 - RNA, 21 nt, synthetic construct
  source 1..21: mol_type = other RNA
tggcatgtctgtagttacaac

SEQ ID NO: 103506 - RNA, 21 nt, synthetic construct
  source 1..21: mol_type = other RNA
tggcatgttggatagtttctc

SEQ ID NO: 103507 - RNA, 21 nt, synthetic construct
  source 1..21: mol_type = other RNA
tggcattaaggacatccacaa

SEQ ID NO: 103508 - RNA, 21 nt, synthetic construct
  source 1..21: mol_type = other RNA
tggcattgtcccgggggaggg

SEQ ID NO: 103509 - RNA, 21 nt, synthetic construct
  source 1..21: mol_type = other RNA
tggcatttaaaagaacctctg

SEQ ID NO: 103510 - RNA, 21 nt, synthetic construct
  source 1..21: mol_type = other RNA
tggcatttcttacacattagg

SEQ ID NO: 103511 - RNA, 21 nt, synthetic construct
  source 1..21: mol_type = other RNA
tggcatttgagggttagaaga

SEQ ID NO: 103512 - RNA, 21 nt, synthetic construct
  source 1..21: mol_type = other RNA
tggccaaatccctgatcaagt

SEQ ID NO: 103513 - RNA, 21 nt, synthetic construct
  source 1..21: mol_type = other RNA
tggccaacatcgtaaaacctc

SEQ ID NO: 103514 - RNA, 21 nt, synthetic construct
  source 1..21: mol_type = other RNA
tggccaagagttgctgacttc

SEQ ID NO: 103515 - RNA, 21 nt, synthetic construct
  source 1..21: mol_type = other RNA
tggccacatgcttccaaaagc

SEQ ID NO: 103516 - RNA, 21 nt, synthetic construct
  source 1..21: mol_type = other RNA
tggccactgattgagtatctg

SEQ ID NO: 103517 - RNA, 21 nt, synthetic construct
  source 1..21: mol_type = other RNA
tggccagaatccctttcgcta

SEQ ID NO: 103518 - RNA, 21 nt, synthetic construct
  source 1..21: mol_type = other RNA
tggccagcattacttaggcag

SEQ ID NO: 103519 - RNA, 21 nt, synthetic construct
  source 1..21: mol_type = other RNA
tggccaggaggaggagggtgc

SEQ ID NO: 103520 - RNA, 21 nt, synthetic construct
  source 1..21: mol_type = other RNA
tggccaggctggttccaaact

SEQ ID NO: 103521 - RNA, 21 nt, synthetic construct
  source 1..21: mol_type = other RNA
tggccagtatctcctttcctt

SEQ ID NO: 103522 - RNA, 21 nt, synthetic construct
  source 1..21: mol_type = other RNA
tggccagtcatgtggggactt

SEQ ID NO: 103523 - RNA, 21 nt, synthetic construct
  source 1..21: mol_type = other RNA
tggccagtgaccagtgtgatg

SEQ ID NO: 103524 - RNA, 21 nt, synthetic construct
  source 1..21: mol_type = other RNA
tggccagtgagttcaaatgtt

SEQ ID NO: 103525 - RNA, 21 nt, synthetic construct
  source 1..21: mol_type = other RNA
tggccatccttcccaaatcca

SEQ ID NO: 103526 - RNA, 21 nt, synthetic construct
  source 1..21: mol_type = other RNA
tggccatgttttatttcttga

SEQ ID NO: 103527 - RNA, 21 nt, synthetic construct
  source 1..21: mol_type = other RNA
tggccattttcttttaaatgt

SEQ ID NO: 103528 - RNA, 21 nt, synthetic construct
  source 1..21: mol_type = other RNA
tggcccaacatgctcttaagt

SEQ ID NO: 103529 - RNA, 21 nt, synthetic construct
  source 1..21: mol_type = other RNA
tggcccacacctgcaatcaca

SEQ ID NO: 103530 - RNA, 21 nt, synthetic construct
  source 1..21: mol_type = other RNA
tggcccagccatcccattact

SEQ ID NO: 103531 - RNA, 21 nt, synthetic construct
  source 1..21: mol_type = other RNA
tggcccatatccttttatgtg

SEQ ID NO: 103532 - RNA, 21 nt, synthetic construct
  source 1..21: mol_type = other RNA
tggcccattttcgaattagat

SEQ ID NO: 103533 - RNA, 21 nt, synthetic construct
  source 1..21: mol_type = other RNA
tggccccaaaattaccccatt

SEQ ID NO: 103534 - RNA, 21 nt, synthetic construct
  source 1..21: mol_type = other RNA
tggcccccctgaaaaatgaga

SEQ ID NO: 103535 - RNA, 21 nt, synthetic construct
  source 1..21: mol_type = other RNA
tggcccctccatggaaactac

SEQ ID NO: 103536 - RNA, 21 nt, synthetic construct
  source 1..21: mol_type = other RNA
tggcccctttcaagattgttt

SEQ ID NO: 103537 - RNA, 21 nt, synthetic construct
  source 1..21: mol_type = other RNA
tggccctccatttccctgctt

SEQ ID NO: 103538 - RNA, 21 nt, synthetic construct
  source 1..21: mol_type = other RNA
tggccctgcgattggttggac

SEQ ID NO: 103539 - RNA, 21 nt, synthetic construct
  source 1..21: mol_type = other RNA
tggccctgttggcctggacac

SEQ ID NO: 103540 - RNA, 21 nt, synthetic construct
  source 1..21: mol_type = other RNA
tggcccttaacttcacctcta

SEQ ID NO: 103541 - RNA, 21 nt, synthetic construct
  source 1..21: mol_type = other RNA
tggccgaatgtggtggtatgc

SEQ ID NO: 103542 - RNA, 21 nt, synthetic construct
  source 1..21: mol_type = other RNA
tggccgaggccagtccctagt

SEQ ID NO: 103543 - RNA, 21 nt, synthetic construct
  source 1..21: mol_type = other RNA
tggccgagggagacggcgagc

SEQ ID NO: 103544 - RNA, 21 nt, synthetic construct
  source 1..21: mol_type = other RNA
tggccgggatttacttctata

SEQ ID NO: 103545 - RNA, 21 nt, synthetic construct
  source 1..21: mol_type = other RNA
tggcctaaatcaggatgtctt

SEQ ID NO: 103546 - RNA, 21 nt, synthetic construct
  source 1..21: mol_type = other RNA
tggcctaagatggaaagtgga

SEQ ID NO: 103547 - RNA, 21 nt, synthetic construct
  source 1..21: mol_type = other RNA
tggcctccccaagtgctgtga

SEQ ID NO: 103548 - RNA, 21 nt, synthetic construct
  source 1..21: mol_type = other RNA
tggcctccctcactaagtcag

SEQ ID NO: 103549 - RNA, 21 nt, synthetic construct
  source 1..21: mol_type = other RNA
tggcctcggccaaccattact

SEQ ID NO: 103550 - RNA, 21 nt, synthetic construct
  source 1..21: mol_type = other RNA
tggcctctgcggcggctgagg

SEQ ID NO: 103551 - RNA, 21 nt, synthetic construct
  source 1..21: mol_type = other RNA
tggcctcttcccttgtgcacc

SEQ ID NO: 103552 - RNA, 21 nt, synthetic construct
  source 1..21: mol_type = other RNA
tggcctgagctctcagtggcc

SEQ ID NO: 103553 - RNA, 21 nt, synthetic construct
  source 1..21: mol_type = other RNA
tggcctgcaccatttattgtc

SEQ ID NO: 103554 - RNA, 21 nt, synthetic construct
  source 1..21: mol_type = other RNA
tggcctggacaacagtgtgag

SEQ ID NO: 103555 - RNA, 21 nt, synthetic construct
  source 1..21: mol_type = other RNA
tggcctggacacacacagtcc

SEQ ID NO: 103556 - RNA, 21 nt, synthetic construct
  source 1..21: mol_type = other RNA
tggccttctatatttttacat

SEQ ID NO: 103557 - RNA, 21 nt, synthetic construct
  source 1..21: mol_type = other RNA
tggccttctgaggagctgaga

SEQ ID NO: 103558 - RNA, 21 nt, synthetic construct
  source 1..21: mol_type = other RNA
tggccttctttctttcaaatg

SEQ ID NO: 103559 - RNA, 21 nt, synthetic construct
  source 1..21: mol_type = other RNA
tggccttgaggtgagacagac

SEQ ID NO: 103560 - RNA, 21 nt, synthetic construct
  source 1..21: mol_type = other RNA
tggcgactcatgcctgtaatt

SEQ ID NO: 103561 - RNA, 21 nt, synthetic construct
  source 1..21: mol_type = other RNA
tggcgcagccatggctcactg

SEQ ID NO: 103562 - RNA, 21 nt, synthetic construct
  source 1..21: mol_type = other RNA
tggcgcagtgcttagcgctgg

SEQ ID NO: 103563 - RNA, 21 nt, synthetic construct
  source 1..21: mol_type = other RNA
tggcgctccctctgtgtgcat

SEQ ID NO: 103564 - RNA, 21 nt, synthetic construct
  source 1..21: mol_type = other RNA
tggcgctgtttgcctgcgtcc

SEQ ID NO: 103565 - RNA, 21 nt, synthetic construct
  source 1..21: mol_type = other RNA
tggcggatgccggtaatcaca

SEQ ID NO: 103566 - RNA, 21 nt, synthetic construct
  source 1..21: mol_type = other RNA
tggcggctttgtggagtggag

SEQ ID NO: 103567 - RNA, 21 nt, synthetic construct
  source 1..21: mol_type = other RNA
tggcgtacatgtagatatggg

SEQ ID NO: 103568 - RNA, 21 nt, synthetic construct
  source 1..21: mol_type = other RNA
tggcgtgtgcccaggctgact

SEQ ID NO: 103569 - RNA, 21 nt, synthetic construct
  source 1..21: mol_type = other RNA
tggctaaaagaccgcaagagt

SEQ ID NO: 103570 - RNA, 21 nt, synthetic construct
  source 1..21: mol_type = other RNA
tggctaacaatcaaatttaac

SEQ ID NO: 103571 - RNA, 21 nt, synthetic construct
  source 1..21: mol_type = other RNA
tggctaatgtggcttgcaagg

SEQ ID NO: 103572 - RNA, 21 nt, synthetic construct
  source 1..21: mol_type = other RNA
tggctacaccctgggaaagcc

SEQ ID NO: 103573 - RNA, 21 nt, synthetic construct
  source 1..21: mol_type = other RNA
tggctactgtaaacaatgctg

SEQ ID NO: 103574 - RNA, 21 nt, synthetic construct
  source 1..21: mol_type = other RNA
tggctagaaacttggattgtg

SEQ ID NO: 103575 - RNA, 21 nt, synthetic construct
  source 1..21: mol_type = other RNA
tggctagaagcatctgataca

SEQ ID NO: 103576 - RNA, 21 nt, synthetic construct
  source 1..21: mol_type = other RNA
tggctagacggaaaaacattc

SEQ ID NO: 103577 - RNA, 21 nt, synthetic construct
  source 1..21: mol_type = other RNA
tggctagactaagaaaaacag

SEQ ID NO: 103578 - RNA, 21 nt, synthetic construct
  source 1..21: mol_type = other RNA
tggctagtaggcaacatccct

SEQ ID NO: 103579 - RNA, 21 nt, synthetic construct
  source 1..21: mol_type = other RNA
tggctagtgtgttgactgaca

SEQ ID NO: 103580 - RNA, 21 nt, synthetic construct
  source 1..21: mol_type = other RNA
tggctataaccacgagtaatg

SEQ ID NO: 103581 - RNA, 21 nt, synthetic construct
  source 1..21: mol_type = other RNA
tggctattagttaaccttctg

SEQ ID NO: 103582 - RNA, 21 nt, synthetic construct
  source 1..21: mol_type = other RNA
tggctattgtcagtaattctg

SEQ ID NO: 103583 - RNA, 21 nt, synthetic construct
  source 1..21: mol_type = other RNA
tggctcaacgcctgtgatccc

SEQ ID NO: 103584 - RNA, 21 nt, synthetic construct
  source 1..21: mol_type = other RNA
tggctcaatggttaagactgc

SEQ ID NO: 103585 - RNA, 21 nt, synthetic construct
  source 1..21: mol_type = other RNA
tggctcacagtgctccatagc

SEQ ID NO: 103586 - RNA, 21 nt, synthetic construct
  source 1..21: mol_type = other RNA
tggctcacattgtatttctgt

SEQ ID NO: 103587 - RNA, 21 nt, synthetic construct
  source 1..21: mol_type = other RNA
tggctcactcatttccgttgc

SEQ ID NO: 103588 - RNA, 21 nt, synthetic construct
  source 1..21: mol_type = other RNA
tggctcagaaacaacaacaac

SEQ ID NO: 103589 - RNA, 21 nt, synthetic construct
  source 1..21: mol_type = other RNA
tggctcagtctgtttgccatc

SEQ ID NO: 103590 - RNA, 21 nt, synthetic construct
  source 1..21: mol_type = other RNA
tggctcatacttgctttatta

SEQ ID NO: 103591 - RNA, 21 nt, synthetic construct
  source 1..21: mol_type = other RNA
tggctcccatgattcaaaatg

SEQ ID NO: 103592 - RNA, 21 nt, synthetic construct
  source 1..21: mol_type = other RNA
tggctcctcccggctaagatg

SEQ ID NO: 103593 - RNA, 21 nt, synthetic construct
  source 1..21: mol_type = other RNA
tggctccttaccactataatc

SEQ ID NO: 103594 - RNA, 21 nt, synthetic construct
  source 1..21: mol_type = other RNA
tggctctagcccagcttccgg

SEQ ID NO: 103595 - RNA, 21 nt, synthetic construct
  source 1..21: mol_type = other RNA
tggctcttagaaaatatatac

SEQ ID NO: 103596 - RNA, 21 nt, synthetic construct
  source 1..21: mol_type = other RNA
tggctctttccactctctggc

SEQ ID NO: 103597 - RNA, 21 nt, synthetic construct
  source 1..21: mol_type = other RNA
tggctgaaagagaaagaagta

SEQ ID NO: 103598 - RNA, 21 nt, synthetic construct
  source 1..21: mol_type = other RNA
tggctgaaatgctgtaactga

SEQ ID NO: 103599 - RNA, 21 nt, synthetic construct
  source 1..21: mol_type = other RNA
tggctgacatgtgtaaaacat

SEQ ID NO: 103600 - RNA, 21 nt, synthetic construct
  source 1..21: mol_type = other RNA
tggctgacctggtactctatg

SEQ ID NO: 103601 - RNA, 21 nt, synthetic construct
  source 1..21: mol_type = other RNA
tggctgcaattgcgcagaact

SEQ ID NO: 103602 - RNA, 21 nt, synthetic construct
  source 1..21: mol_type = other RNA
tggctgcaccattttttcacc

SEQ ID NO: 103603 - RNA, 21 nt, synthetic construct
  source 1..21: mol_type = other RNA
tggctgcagggcttctgaagg

SEQ ID NO: 103604 - RNA, 21 nt, synthetic construct
  source 1..21: mol_type = other RNA
tggctgcgccactgcactcca

SEQ ID NO: 103605 - RNA, 21 nt, synthetic construct
  source 1..21: mol_type = other RNA
tggctggaatggtgaagaatg

SEQ ID NO: 103606 - RNA, 21 nt, synthetic construct
  source 1..21: mol_type = other RNA
tggctggcactttcctgataa

SEQ ID NO: 103607 - RNA, 21 nt, synthetic construct
  source 1..21: mol_type = other RNA
tggctgggagcttatcaggct

SEQ ID NO: 103608 - RNA, 21 nt, synthetic construct
  source 1..21: mol_type = other RNA
tggctgtactaagcctatgta

SEQ ID NO: 103609 - RNA, 21 nt, synthetic construct
  source 1..21: mol_type = other RNA
tggctgtcaaaaatgtgtcta

SEQ ID NO: 103610 - RNA, 21 nt, synthetic construct
  source 1..21: mol_type = other RNA
tggctgtgccaactctggcag

SEQ ID NO: 103611 - RNA, 21 nt, synthetic construct
  source 1..21: mol_type = other RNA
tggctgttaccatttgacctt

SEQ ID NO: 103612 - RNA, 21 nt, synthetic construct
  source 1..21: mol_type = other RNA
tggctgttagccttgccattc

SEQ ID NO: 103613 - RNA, 21 nt, synthetic construct
  source 1..21: mol_type = other RNA
tggcttaaggaaataaatatg

SEQ ID NO: 103614 - RNA, 21 nt, synthetic construct
  source 1..21: mol_type = other RNA
tggcttaatgcatataaaaac

SEQ ID NO: 103615 - RNA, 21 nt, synthetic construct
  source 1..21: mol_type = other RNA
tggcttagaaatgaagatggc

SEQ ID NO: 103616 - RNA, 21 nt, synthetic construct
  source 1..21: mol_type = other RNA
tggcttaggatcaccaaagac

SEQ ID NO: 103617 - RNA, 21 nt, synthetic construct
  source 1..21: mol_type = other RNA
tggcttatagtgttctttttt

SEQ ID NO: 103618 - RNA, 21 nt, synthetic construct
  source 1..21: mol_type = other RNA
tggcttcaatatgcagtatgt

SEQ ID NO: 103619 - RNA, 21 nt, synthetic construct
  source 1..21: mol_type = other RNA
tggcttcagtgccaacacatg

SEQ ID NO: 103620 - RNA, 21 nt, synthetic construct
  source 1..21: mol_type = other RNA
tggcttcatgggtggaaatta

SEQ ID NO: 103621 - RNA, 21 nt, synthetic construct
  source 1..21: mol_type = other RNA
tggcttcctaactggtctcct

SEQ ID NO: 103622 - RNA, 21 nt, synthetic construct
  source 1..21: mol_type = other RNA
tggcttctcaaactgtgtgct

SEQ ID NO: 103623 - RNA, 21 nt, synthetic construct
  source 1..21: mol_type = other RNA
tggcttgagcccagggggtcg

SEQ ID NO: 103624 - RNA, 21 nt, synthetic construct
  source 1..21: mol_type = other RNA
tggcttgcaaggcccaccatg

SEQ ID NO: 103625 - RNA, 21 nt, synthetic construct
  source 1..21: mol_type = other RNA
tggcttggggaacagtttagc

SEQ ID NO: 103626 - RNA, 21 nt, synthetic construct
  source 1..21: mol_type = other RNA
tggcttgggtgacctcatgta

SEQ ID NO: 103627 - RNA, 21 nt, synthetic construct
  source 1..21: mol_type = other RNA
tggcttgtgacatcaagggtg

SEQ ID NO: 103628 - RNA, 21 nt, synthetic construct
  source 1..21: mol_type = other RNA
tggcttgtggctacaccctgg

SEQ ID NO: 103629 - RNA, 21 nt, synthetic construct
  source 1..21: mol_type = other RNA
tggctttaaggcgcagacaca

SEQ ID NO: 103630 - RNA, 21 nt, synthetic construct
  source 1..21: mol_type = other RNA
tggctttagatggtaaaacaa

SEQ ID NO: 103631 - RNA, 21 nt, synthetic construct
  source 1..21: mol_type = other RNA
tggctttagatttatcaatag

SEQ ID NO: 103632 - RNA, 21 nt, synthetic construct
  source 1..21: mol_type = other RNA
tggcttttgagtgtaaggtgt

SEQ ID NO: 103633 - RNA, 21 nt, synthetic construct
  source 1..21: mol_type = other RNA
tggcttttggcagcgtaactc

SEQ ID NO: 103634 - RNA, 21 nt, synthetic construct
  source 1..21: mol_type = other RNA
tggctttttacgatgaaattg

SEQ ID NO: 103635 - RNA, 21 nt, synthetic construct
  source 1..21: mol_type = other RNA
tgggaaaaggatttgtttgtg

SEQ ID NO: 103636 - RNA, 21 nt, synthetic construct
  source 1..21: mol_type = other RNA
tgggaaaatctctgacttcat

SEQ ID NO: 103637 - RNA, 21 nt, synthetic construct
  source 1..21: mol_type = other RNA
tgggaaaatcttggaactttt

SEQ ID NO: 103638 - RNA, 21 nt, synthetic construct
  source 1..21: mol_type = other RNA
tgggaaagacaggtagacatg

SEQ ID NO: 103639 - RNA, 21 nt, synthetic construct
  source 1..21: mol_type = other RNA
tgggaaagcctggctttagat

SEQ ID NO: 103640 - RNA, 21 nt, synthetic construct
  source 1..21: mol_type = other RNA
tgggaaagtattcccaagatc

SEQ ID NO: 103641 - RNA, 21 nt, synthetic construct
  source 1..21: mol_type = other RNA
tgggaaattagatgatgtttt

SEQ ID NO: 103642 - RNA, 21 nt, synthetic construct
  source 1..21: mol_type = other RNA
tgggaacagcaggggaaggct

SEQ ID NO: 103643 - RNA, 21 nt, synthetic construct
  source 1..21: mol_type = other RNA
tgggaacagcccctagcatgc

SEQ ID NO: 103644 - RNA, 21 nt, synthetic construct
  source 1..21: mol_type = other RNA
tgggaagaaaaaataaaggct

SEQ ID NO: 103645 - RNA, 21 nt, synthetic construct
  source 1..21: mol_type = other RNA
tgggaagatgctccctctatg

SEQ ID NO: 103646 - RNA, 21 nt, synthetic construct
  source 1..21: mol_type = other RNA
tgggaagattggctttagatt

SEQ ID NO: 103647 - RNA, 21 nt, synthetic construct
  source 1..21: mol_type = other RNA
tgggaagcaaaggattcgggg

SEQ ID NO: 103648 - RNA, 21 nt, synthetic construct
  source 1..21: mol_type = other RNA
tgggaaggatggccagtcatg

SEQ ID NO: 103649 - RNA, 21 nt, synthetic construct
  source 1..21: mol_type = other RNA
tgggaaggccctgattgagat

SEQ ID NO: 103650 - RNA, 21 nt, synthetic construct
  source 1..21: mol_type = other RNA
tgggaagtggagtgcgagtgt

SEQ ID NO: 103651 - RNA, 21 nt, synthetic construct
  source 1..21: mol_type = other RNA
tgggaagttatgtagctggga

SEQ ID NO: 103652 - RNA, 21 nt, synthetic construct
  source 1..21: mol_type = other RNA
tgggaatactttcccatctct

SEQ ID NO: 103653 - RNA, 21 nt, synthetic construct
  source 1..21: mol_type = other RNA
tgggaatgcatatatctgtct

SEQ ID NO: 103654 - RNA, 21 nt, synthetic construct
  source 1..21: mol_type = other RNA
tgggaatgtggtcacactttt

SEQ ID NO: 103655 - RNA, 21 nt, synthetic construct
  source 1..21: mol_type = other RNA
tgggaattcagtcaccaaacg

SEQ ID NO: 103656 - RNA, 21 nt, synthetic construct
  source 1..21: mol_type = other RNA
tgggacaagtgggtggatggg

SEQ ID NO: 103657 - RNA, 21 nt, synthetic construct
  source 1..21: mol_type = other RNA
tgggacagagcgagactccgt

SEQ ID NO: 103658 - RNA, 21 nt, synthetic construct
  source 1..21: mol_type = other RNA
tgggaccccgtctctgcaaaa

SEQ ID NO: 103659 - RNA, 21 nt, synthetic construct
  source 1..21: mol_type = other RNA
tgggactacaggtgtgaacca

SEQ ID NO: 103660 - RNA, 21 nt, synthetic construct
  source 1..21: mol_type = other RNA
tgggactgagacagtattgtg

SEQ ID NO: 103661 - RNA, 21 nt, synthetic construct
  source 1..21: mol_type = other RNA
tgggactggagaacagtaaag

SEQ ID NO: 103662 - RNA, 21 nt, synthetic construct
  source 1..21: mol_type = other RNA
tgggacttcactagtgggtcg

SEQ ID NO: 103663 - RNA, 21 nt, synthetic construct
  source 1..21: mol_type = other RNA
tgggacttctagcctccagaa

SEQ ID NO: 103664 - RNA, 21 nt, synthetic construct
  source 1..21: mol_type = other RNA
tgggagaaagaccaagagtgt

SEQ ID NO: 103665 - RNA, 21 nt, synthetic construct
  source 1..21: mol_type = other RNA
tgggagaaagctaatttggaa

SEQ ID NO: 103666 - RNA, 21 nt, synthetic construct
  source 1..21: mol_type = other RNA
tgggagaatggcaaggctaac

SEQ ID NO: 103667 - RNA, 21 nt, synthetic construct
  source 1..21: mol_type = other RNA
tgggagaccaggagttcttat

SEQ ID NO: 103668 - RNA, 21 nt, synthetic construct
  source 1..21: mol_type = other RNA
tgggagaggcatgccgggaca

SEQ ID NO: 103669 - RNA, 21 nt, synthetic construct
  source 1..21: mol_type = other RNA
tgggagatggacactgcagat

SEQ ID NO: 103670 - RNA, 21 nt, synthetic construct
  source 1..21: mol_type = other RNA
tgggagatgtgtaattgtacc

SEQ ID NO: 103671 - RNA, 21 nt, synthetic construct
  source 1..21: mol_type = other RNA
tgggagcatgcacacaggaga

SEQ ID NO: 103672 - RNA, 21 nt, synthetic construct
  source 1..21: mol_type = other RNA
tgggagccaaacttgaacctt

SEQ ID NO: 103673 - RNA, 21 nt, synthetic construct
  source 1..21: mol_type = other RNA
tgggagccctccaggatccag

SEQ ID NO: 103674 - RNA, 21 nt, synthetic construct
  source 1..21: mol_type = other RNA
tgggagcttatcaggcttgag

SEQ ID NO: 103675 - RNA, 21 nt, synthetic construct
  source 1..21: mol_type = other RNA
tgggagctttcattattacca

SEQ ID NO: 103676 - RNA, 21 nt, synthetic construct
  source 1..21: mol_type = other RNA
tgggaggaggtcatactggag

SEQ ID NO: 103677 - RNA, 21 nt, synthetic construct
  source 1..21: mol_type = other RNA
tgggaggctgaggcaggtgga

SEQ ID NO: 103678 - RNA, 21 nt, synthetic construct
  source 1..21: mol_type = other RNA
tgggaggctgaggcggaagga

SEQ ID NO: 103679 - RNA, 21 nt, synthetic construct
  source 1..21: mol_type = other RNA
tgggaggctgaggctggggaa

SEQ ID NO: 103680 - RNA, 21 nt, synthetic construct
  source 1..21: mol_type = other RNA
tgggaggtaatactataagga

SEQ ID NO: 103681 - RNA, 21 nt, synthetic construct
  source 1..21: mol_type = other RNA
tgggaggttgaggctgcagtg

SEQ ID NO: 103682 - RNA, 21 nt, synthetic construct
  source 1..21: mol_type = other RNA
tgggagtacaagaccagcctg

SEQ ID NO: 103683 - RNA, 21 nt, synthetic construct
  source 1..21: mol_type = other RNA
tgggagtccctgctttcagtt

SEQ ID NO: 103684 - RNA, 21 nt, synthetic construct
  source 1..21: mol_type = other RNA
tgggagtctatttctgaacaa

SEQ ID NO: 103685 - RNA, 21 nt, synthetic construct
  source 1..21: mol_type = other RNA
tgggagttcattagaattcag

SEQ ID NO: 103686 - RNA, 21 nt, synthetic construct
  source 1..21: mol_type = other RNA
tgggataatgagtttaattct

SEQ ID NO: 103687 - RNA, 21 nt, synthetic construct
  source 1..21: mol_type = other RNA
tgggataatgctatcatttta

SEQ ID NO: 103688 - RNA, 21 nt, synthetic construct
  source 1..21: mol_type = other RNA
tgggatacttctaactttaga

SEQ ID NO: 103689 - RNA, 21 nt, synthetic construct
  source 1..21: mol_type = other RNA
tgggatatagctacaatgatt

SEQ ID NO: 103690 - RNA, 21 nt, synthetic construct
  source 1..21: mol_type = other RNA
tgggatatctaacataatcaa

SEQ ID NO: 103691 - RNA, 21 nt, synthetic construct
  source 1..21: mol_type = other RNA
tgggatcaaaccatgttcatg

SEQ ID NO: 103692 - RNA, 21 nt, synthetic construct
  source 1..21: mol_type = other RNA
tgggatcacacttgatggttt

SEQ ID NO: 103693 - RNA, 21 nt, synthetic construct
  source 1..21: mol_type = other RNA
tgggatcacaggcgttgagcc

SEQ ID NO: 103694 - RNA, 21 nt, synthetic construct
  source 1..21: mol_type = other RNA
tgggatcctaagcatgagata

SEQ ID NO: 103695 - RNA, 21 nt, synthetic construct
  source 1..21: mol_type = other RNA
tgggatctctgggctcactgc

SEQ ID NO: 103696 - RNA, 21 nt, synthetic construct
  source 1..21: mol_type = other RNA
tgggatctgataaattattag

SEQ ID NO: 103697 - RNA, 21 nt, synthetic construct
  source 1..21: mol_type = other RNA
tgggatctgtcatgtttgaat

SEQ ID NO: 103698 - RNA, 21 nt, synthetic construct
  source 1..21: mol_type = other RNA
tgggatgcaagaatggtttaa

SEQ ID NO: 103699 - RNA, 21 nt, synthetic construct
  source 1..21: mol_type = other RNA
tgggatgcagcaaaagcacca

SEQ ID NO: 103700 - RNA, 21 nt, synthetic construct
  source 1..21: mol_type = other RNA
tgggatgctcagtttcaaaag

SEQ ID NO: 103701 - RNA, 21 nt, synthetic construct
  source 1..21: mol_type = other RNA
tgggatgcttaaagcgctact

SEQ ID NO: 103702 - RNA, 21 nt, synthetic construct
  source 1..21: mol_type = other RNA
tgggatggctgaaagagaaag

SEQ ID NO: 103703 - RNA, 21 nt, synthetic construct
  source 1..21: mol_type = other RNA
tgggatgtttctacctttggc

SEQ ID NO: 103704 - RNA, 21 nt, synthetic construct
  source 1..21: mol_type = other RNA
tgggattacacacacctacca

SEQ ID NO: 103705 - RNA, 21 nt, synthetic construct
  source 1..21: mol_type = other RNA
tgggattacaggcgcacgcca

SEQ ID NO: 103706 - RNA, 21 nt, synthetic construct
  source 1..21: mol_type = other RNA
tgggattagcttattcttttt

SEQ ID NO: 103707 - RNA, 21 nt, synthetic construct
  source 1..21: mol_type = other RNA
tgggcaaaaaagtcatgacct

SEQ ID NO: 103708 - RNA, 21 nt, synthetic construct
  source 1..21: mol_type = other RNA
tgggcaacagagacagagaat

SEQ ID NO: 103709 - RNA, 21 nt, synthetic construct
  source 1..21: mol_type = other RNA
tgggcaagagagcaagtcccc

SEQ ID NO: 103710 - RNA, 21 nt, synthetic construct
  source 1..21: mol_type = other RNA
tgggcacacgccactgcaggt

SEQ ID NO: 103711 - RNA, 21 nt, synthetic construct
  source 1..21: mol_type = other RNA
tgggcacactccccagtggtt

SEQ ID NO: 103712 - RNA, 21 nt, synthetic construct
  source 1..21: mol_type = other RNA
tgggcactgggagccctccag

SEQ ID NO: 103713 - RNA, 21 nt, synthetic construct
  source 1..21: mol_type = other RNA
tgggcacttgggatgtttcta

SEQ ID NO: 103714 - RNA, 21 nt, synthetic construct
  source 1..21: mol_type = other RNA
tgggcagactccttcccctgg

SEQ ID NO: 103715 - RNA, 21 nt, synthetic construct
  source 1..21: mol_type = other RNA
tgggcatgggtccaagacagg

SEQ ID NO: 103716 - RNA, 21 nt, synthetic construct
  source 1..21: mol_type = other RNA
tgggcattaattgagagcttt

SEQ ID NO: 103717 - RNA, 21 nt, synthetic construct
  source 1..21: mol_type = other RNA
tgggcattagaagttaaattg

SEQ ID NO: 103718 - RNA, 21 nt, synthetic construct
  source 1..21: mol_type = other RNA
tgggcattccagagggtaacg

SEQ ID NO: 103719 - RNA, 21 nt, synthetic construct
  source 1..21: mol_type = other RNA
tgggccaaagacagatcttat

SEQ ID NO: 103720 - RNA, 21 nt, synthetic construct
  source 1..21: mol_type = other RNA
tgggccaaagacttcaacgga

SEQ ID NO: 103721 - RNA, 21 nt, synthetic construct
  source 1..21: mol_type = other RNA
tgggccaacttccagcaagac

SEQ ID NO: 103722 - RNA, 21 nt, synthetic construct
  source 1..21: mol_type = other RNA
tgggccaccaagccctgcctt

SEQ ID NO: 103723 - RNA, 21 nt, synthetic construct
  source 1..21: mol_type = other RNA
tgggcccactctccccaagta

SEQ ID NO: 103724 - RNA, 21 nt, synthetic construct
  source 1..21: mol_type = other RNA
tgggcccagcagaaggtgagg

SEQ ID NO: 103725 - RNA, 21 nt, synthetic construct
  source 1..21: mol_type = other RNA
tgggcccgcagtggctcatgc

SEQ ID NO: 103726 - RNA, 21 nt, synthetic construct
  source 1..21: mol_type = other RNA
tgggccttgcaagccacatta

SEQ ID NO: 103727 - RNA, 21 nt, synthetic construct
  source 1..21: mol_type = other RNA
tgggcctttctgtttgtttgt

SEQ ID NO: 103728 - RNA, 21 nt, synthetic construct
  source 1..21: mol_type = other RNA
tgggcgacaagagcagaactc

SEQ ID NO: 103729 - RNA, 21 nt, synthetic construct
  source 1..21: mol_type = other RNA
tgggcgacagagtgaaactct

SEQ ID NO: 103730 - RNA, 21 nt, synthetic construct
  source 1..21: mol_type = other RNA
tgggcgagatggcgtgcgcct

SEQ ID NO: 103731 - RNA, 21 nt, synthetic construct
  source 1..21: mol_type = other RNA
tgggcgtggagcggtgtctta

SEQ ID NO: 103732 - RNA, 21 nt, synthetic construct
  source 1..21: mol_type = other RNA
tgggctaaggtggagtggtgg

SEQ ID NO: 103733 - RNA, 21 nt, synthetic construct
  source 1..21: mol_type = other RNA
tgggctagagccaggaagtca

SEQ ID NO: 103734 - RNA, 21 nt, synthetic construct
  source 1..21: mol_type = other RNA
tgggctagggaagcagttgat

SEQ ID NO: 103735 - RNA, 21 nt, synthetic construct
  source 1..21: mol_type = other RNA
tgggctattaagtattgcatt

SEQ ID NO: 103736 - RNA, 21 nt, synthetic construct
  source 1..21: mol_type = other RNA
tgggctattgttttgcaagat

SEQ ID NO: 103737 - RNA, 21 nt, synthetic construct
  source 1..21: mol_type = other RNA
tgggctcaagccatcctccag

SEQ ID NO: 103738 - RNA, 21 nt, synthetic construct
  source 1..21: mol_type = other RNA
tgggctcactgcaacttccgc

SEQ ID NO: 103739 - RNA, 21 nt, synthetic construct
  source 1..21: mol_type = other RNA
tgggctcatctaagcctacct

SEQ ID NO: 103740 - RNA, 21 nt, synthetic construct
  source 1..21: mol_type = other RNA
tgggctcccttccagcgtgtg

SEQ ID NO: 103741 - RNA, 21 nt, synthetic construct
  source 1..21: mol_type = other RNA
tgggctctctattccaaatgt

SEQ ID NO: 103742 - RNA, 21 nt, synthetic construct
  source 1..21: mol_type = other RNA
tgggcttaacatttgaactca

SEQ ID NO: 103743 - RNA, 21 nt, synthetic construct
  source 1..21: mol_type = other RNA
tgggcttatcagatggtgata

SEQ ID NO: 103744 - RNA, 21 nt, synthetic construct
  source 1..21: mol_type = other RNA
tgggcttcactttcgtcatct

SEQ ID NO: 103745 - RNA, 21 nt, synthetic construct
  source 1..21: mol_type = other RNA
tgggcttggttggaaaagaaa

SEQ ID NO: 103746 - RNA, 21 nt, synthetic construct
  source 1..21: mol_type = other RNA
tgggctttctccaggggcggc

SEQ ID NO: 103747 - RNA, 21 nt, synthetic construct
  source 1..21: mol_type = other RNA
tgggctttgagaaaggtttct

SEQ ID NO: 103748 - RNA, 21 nt, synthetic construct
  source 1..21: mol_type = other RNA
tgggcttttcatatacgtatt

SEQ ID NO: 103749 - RNA, 21 nt, synthetic construct
  source 1..21: mol_type = other RNA
tggggaaatagatgcctagaa

SEQ ID NO: 103750 - RNA, 21 nt, synthetic construct
  source 1..21: mol_type = other RNA
tggggaacagtttagcaatcc

SEQ ID NO: 103751 - RNA, 21 nt, synthetic construct
  source 1..21: mol_type = other RNA
tggggaataagattttaggtc

SEQ ID NO: 103752 - RNA, 21 nt, synthetic construct
  source 1..21: mol_type = other RNA
tggggaatgctcataattaaa

SEQ ID NO: 103753 - RNA, 21 nt, synthetic construct
  source 1..21: mol_type = other RNA
tggggaattgcatgagacttg

SEQ ID NO: 103754 - RNA, 21 nt, synthetic construct
  source 1..21: mol_type = other RNA
tggggacagctcaattaagca

SEQ ID NO: 103755 - RNA, 21 nt, synthetic construct
  source 1..21: mol_type = other RNA
tggggacccctccctgcttta

SEQ ID NO: 103756 - RNA, 21 nt, synthetic construct
  source 1..21: mol_type = other RNA
tggggactcttatggctataa

SEQ ID NO: 103757 - RNA, 21 nt, synthetic construct
  source 1..21: mol_type = other RNA
tggggacttgctctcttgccc

SEQ ID NO: 103758 - RNA, 21 nt, synthetic construct
  source 1..21: mol_type = other RNA
tggggactttgtggcctcttc

SEQ ID NO: 103759 - RNA, 21 nt, synthetic construct
  source 1..21: mol_type = other RNA
tggggagagtgggcccagcag

SEQ ID NO: 103760 - RNA, 21 nt, synthetic construct
  source 1..21: mol_type = other RNA
tggggagataccttgaaagga

SEQ ID NO: 103761 - RNA, 21 nt, synthetic construct
  source 1..21: mol_type = other RNA
tggggagctagagggtaagac

SEQ ID NO: 103762 - RNA, 21 nt, synthetic construct
  source 1..21: mol_type = other RNA
tggggaggccaaggcaggact

SEQ ID NO: 103763 - RNA, 21 nt, synthetic construct
  source 1..21: mol_type = other RNA
tggggagtgtgcccaaggaag

SEQ ID NO: 103764 - RNA, 21 nt, synthetic construct
  source 1..21: mol_type = other RNA
tggggagttttaggaaaatag

SEQ ID NO: 103765 - RNA, 21 nt, synthetic construct
  source 1..21: mol_type = other RNA
tggggatatccaaagataaag

SEQ ID NO: 103766 - RNA, 21 nt, synthetic construct
  source 1..21: mol_type = other RNA
tggggatgcaacaaatgttgc

SEQ ID NO: 103767 - RNA, 21 nt, synthetic construct
  source 1..21: mol_type = other RNA
tggggatgctgtctataggca

SEQ ID NO: 103768 - RNA, 21 nt, synthetic construct
  source 1..21: mol_type = other RNA
tggggattctgctactagcaa

SEQ ID NO: 103769 - RNA, 21 nt, synthetic construct
  source 1..21: mol_type = other RNA
tggggattgagggttagattt

SEQ ID NO: 103770 - RNA, 21 nt, synthetic construct
  source 1..21: mol_type = other RNA
tggggcaatctcagctcatta

SEQ ID NO: 103771 - RNA, 21 nt, synthetic construct
  source 1..21: mol_type = other RNA
tggggcacctaaaaggttgct

SEQ ID NO: 103772 - RNA, 21 nt, synthetic construct
  source 1..21: mol_type = other RNA
tggggcagcaaagcaagaaaa

SEQ ID NO: 103773 - RNA, 21 nt, synthetic construct
  source 1..21: mol_type = other RNA
tggggccatctgaattcaagt

SEQ ID NO: 103774 - RNA, 21 nt, synthetic construct
  source 1..21: mol_type = other RNA
tggggcctcagcatgtcttca

SEQ ID NO: 103775 - RNA, 21 nt, synthetic construct
  source 1..21: mol_type = other RNA
tggggcgatcttggctcacca

SEQ ID NO: 103776 - RNA, 21 nt, synthetic construct
  source 1..21: mol_type = other RNA
tggggctaggatttcagtaaa

SEQ ID NO: 103777 - RNA, 21 nt, synthetic construct
  source 1..21: mol_type = other RNA
tggggctcaagtaagtgaaat

SEQ ID NO: 103778 - RNA, 21 nt, synthetic construct
  source 1..21: mol_type = other RNA
tggggctctaatgcaagagtt

SEQ ID NO: 103779 - RNA, 21 nt, synthetic construct
  source 1..21: mol_type = other RNA
tggggcttgaacccgaggtgc

SEQ ID NO: 103780 - RNA, 21 nt, synthetic construct
  source 1..21: mol_type = other RNA
tggggctttactgtattagga

SEQ ID NO: 103781 - RNA, 21 nt, synthetic construct
  source 1..21: mol_type = other RNA
tggggcttttgaacactctgc

SEQ ID NO: 103782 - RNA, 21 nt, synthetic construct
  source 1..21: mol_type = other RNA
tgggggaaaattgacattttt

SEQ ID NO: 103783 - RNA, 21 nt, synthetic construct
  source 1..21: mol_type = other RNA
tgggggaagagagcattgcct

SEQ ID NO: 103784 - RNA, 21 nt, synthetic construct
  source 1..21: mol_type = other RNA
tgggggaagcaggaactcata

SEQ ID NO: 103785 - RNA, 21 nt, synthetic construct
  source 1..21: mol_type = other RNA
tgggggacgacgtatgcaact

SEQ ID NO: 103786 - RNA, 21 nt, synthetic construct
  source 1..21: mol_type = other RNA
tgggggagactgtgcaatgtg

SEQ ID NO: 103787 - RNA, 21 nt, synthetic construct
  source 1..21: mol_type = other RNA
tgggggatccaggggaataga

SEQ ID NO: 103788 - RNA, 21 nt, synthetic construct
  source 1..21: mol_type = other RNA
tgggggcatcaaagctaccct

SEQ ID NO: 103789 - RNA, 21 nt, synthetic construct
  source 1..21: mol_type = other RNA
tgggggcgcgtgcctatggtc

SEQ ID NO: 103790 - RNA, 21 nt, synthetic construct
  source 1..21: mol_type = other RNA
tgggggctcacatctgtaatc

SEQ ID NO: 103791 - RNA, 21 nt, synthetic construct
  source 1..21: mol_type = other RNA
tgggggctggacataagggtc

SEQ ID NO: 103792 - RNA, 21 nt, synthetic construct
  source 1..21: mol_type = other RNA
tggggggatgtagaaggatat

SEQ ID NO: 103793 - RNA, 21 nt, synthetic construct
  source 1..21: mol_type = other RNA
tgggggtaagattgtggtcca

SEQ ID NO: 103794 - RNA, 21 nt, synthetic construct
  source 1..21: mol_type = other RNA
tggggtaattttggggccatc

SEQ ID NO: 103795 - RNA, 21 nt, synthetic construct
  source 1..21: mol_type = other RNA
tggggtatgtttgattagttg

SEQ ID NO: 103796 - RNA, 21 nt, synthetic construct
  source 1..21: mol_type = other RNA
tggggtctcattgtgttgccc

SEQ ID NO: 103797 - RNA, 21 nt, synthetic construct
  source 1..21: mol_type = other RNA
tggggtcttagttctgcttcc

SEQ ID NO: 103798 - RNA, 21 nt, synthetic construct
  source 1..21: mol_type = other RNA
tggggttagggcctagaaatc

SEQ ID NO: 103799 - RNA, 21 nt, synthetic construct
  source 1..21: mol_type = other RNA
tggggttcaaaccacctaact

SEQ ID NO: 103800 - RNA, 21 nt, synthetic construct
  source 1..21: mol_type = other RNA
tggggtttccttacctttatc

SEQ ID NO: 103801 - RNA, 21 nt, synthetic construct
  source 1..21: mol_type = other RNA
tggggtttgtccatgttggtc

SEQ ID NO: 103802 - RNA, 21 nt, synthetic construct
  source 1..21: mol_type = other RNA
tggggtttttatggttttaag

SEQ ID NO: 103803 - RNA, 21 nt, synthetic construct
  source 1..21: mol_type = other RNA
tgggtaaacaagactcaacat

SEQ ID NO: 103804 - RNA, 21 nt, synthetic construct
  source 1..21: mol_type = other RNA
tgggtaaatttctaaaaacgt

SEQ ID NO: 103805 - RNA, 21 nt, synthetic construct
  source 1..21: mol_type = other RNA
tgggtaatttatctccataag

SEQ ID NO: 103806 - RNA, 21 nt, synthetic construct
  source 1..21: mol_type = other RNA
tgggtacagggtttctgtttg

SEQ ID NO: 103807 - RNA, 21 nt, synthetic construct
  source 1..21: mol_type = other RNA
tgggtagaagcagcaagggtg

SEQ ID NO: 103808 - RNA, 21 nt, synthetic construct
  source 1..21: mol_type = other RNA
tgggtagagactggatcctgg

SEQ ID NO: 103809 - RNA, 21 nt, synthetic construct
  source 1..21: mol_type = other RNA
tgggtaggaagctgatcaagg

SEQ ID NO: 103810 - RNA, 21 nt, synthetic construct
  source 1..21: mol_type = other RNA
tgggtataaatgatgagctac

SEQ ID NO: 103811 - RNA, 21 nt, synthetic construct
  source 1..21: mol_type = other RNA
tgggtatacagcaaaagaatt

SEQ ID NO: 103812 - RNA, 21 nt, synthetic construct
  source 1..21: mol_type = other RNA
tgggtattttgttgttgttgt

SEQ ID NO: 103813 - RNA, 21 nt, synthetic construct
  source 1..21: mol_type = other RNA
tgggtcaacaaactaactaga

SEQ ID NO: 103814 - RNA, 21 nt, synthetic construct
  source 1..21: mol_type = other RNA
tgggtcaaccactaaggtcaa

SEQ ID NO: 103815 - RNA, 21 nt, synthetic construct
  source 1..21: mol_type = other RNA
tgggtcagaatcgtgatagtc

SEQ ID NO: 103816 - RNA, 21 nt, synthetic construct
  source 1..21: mol_type = other RNA
tgggtcagctagtgtgtctga

SEQ ID NO: 103817 - RNA, 21 nt, synthetic construct
  source 1..21: mol_type = other RNA
tgggtccaagacaggaagaat

SEQ ID NO: 103818 - RNA, 21 nt, synthetic construct
  source 1..21: mol_type = other RNA
tgggtccccggaggaggtggc

SEQ ID NO: 103819 - RNA, 21 nt, synthetic construct
  source 1..21: mol_type = other RNA
tgggtcgggtgtcagaaacca

SEQ ID NO: 103820 - RNA, 21 nt, synthetic construct
  source 1..21: mol_type = other RNA
tgggtctatagtttaattggg

SEQ ID NO: 103821 - RNA, 21 nt, synthetic construct
  source 1..21: mol_type = other RNA
tgggtctccattttggtctta

SEQ ID NO: 103822 - RNA, 21 nt, synthetic construct
  source 1..21: mol_type = other RNA
tgggtcttataggttgaatag

SEQ ID NO: 103823 - RNA, 21 nt, synthetic construct
  source 1..21: mol_type = other RNA
tgggtgaataacccatatctt

SEQ ID NO: 103824 - RNA, 21 nt, synthetic construct
  source 1..21: mol_type = other RNA
tgggtgacagagagagacctt

SEQ ID NO: 103825 - RNA, 21 nt, synthetic construct
  source 1..21: mol_type = other RNA
tgggtgacctcatgtaactaa

SEQ ID NO: 103826 - RNA, 21 nt, synthetic construct
  source 1..21: mol_type = other RNA
tgggtgatatctgtaagtcat

SEQ ID NO: 103827 - RNA, 21 nt, synthetic construct
  source 1..21: mol_type = other RNA
tgggtgatgttcaaccctcgg

SEQ ID NO: 103828 - RNA, 21 nt, synthetic construct
  source 1..21: mol_type = other RNA
tgggtgcgttgaccgctttcg

SEQ ID NO: 103829 - RNA, 21 nt, synthetic construct
  source 1..21: mol_type = other RNA
tgggtggaaattaaacacacc

SEQ ID NO: 103830 - RNA, 21 nt, synthetic construct
  source 1..21: mol_type = other RNA
tgggtggaagctgtccttctc

SEQ ID NO: 103831 - RNA, 21 nt, synthetic construct
  source 1..21: mol_type = other RNA
tgggtggatgggtgtagggtt

SEQ ID NO: 103832 - RNA, 21 nt, synthetic construct
  source 1..21: mol_type = other RNA
tgggtgtagggggaaaactcc

SEQ ID NO: 103833 - RNA, 21 nt, synthetic construct
  source 1..21: mol_type = other RNA
tgggtgtagggtttggcagtt

SEQ ID NO: 103834 - RNA, 21 nt, synthetic construct
  source 1..21: mol_type = other RNA
tgggtgtgcacgtttgctttg

SEQ ID NO: 103835 - RNA, 21 nt, synthetic construct
  source 1..21: mol_type = other RNA
tgggttaaaagttagctggca

SEQ ID NO: 103836 - RNA, 21 nt, synthetic construct
  source 1..21: mol_type = other RNA
tgggttattcacccaagaatt

SEQ ID NO: 103837 - RNA, 21 nt, synthetic construct
  source 1..21: mol_type = other RNA
tgggttcaattatgtggaaaa

SEQ ID NO: 103838 - RNA, 21 nt, synthetic construct
  source 1..21: mol_type = other RNA
tgggttcaggtgcctcctgcc

SEQ ID NO: 103839 - RNA, 21 nt, synthetic construct
  source 1..21: mol_type = other RNA
tgggttctcaccaacatccac

SEQ ID NO: 103840 - RNA, 21 nt, synthetic construct
  source 1..21: mol_type = other RNA
tgggttctcccttctattcca

SEQ ID NO: 103841 - RNA, 21 nt, synthetic construct
  source 1..21: mol_type = other RNA
tgggttgatttttaatgagat

SEQ ID NO: 103842 - RNA, 21 nt, synthetic construct
  source 1..21: mol_type = other RNA
tgggttggaggagaaggcctt

SEQ ID NO: 103843 - RNA, 21 nt, synthetic construct
  source 1..21: mol_type = other RNA
tgggtttaaaagagtgcacat

SEQ ID NO: 103844 - RNA, 21 nt, synthetic construct
  source 1..21: mol_type = other RNA
tgggtttaactgaggtgtttt

SEQ ID NO: 103845 - RNA, 21 nt, synthetic construct
  source 1..21: mol_type = other RNA
tgggtttgagtttccagaaaa

SEQ ID NO: 103846 - RNA, 21 nt, synthetic construct
  source 1..21: mol_type = other RNA
tggtaaaaagtgcttctagta

SEQ ID NO: 103847 - RNA, 21 nt, synthetic construct
  source 1..21: mol_type = other RNA
tggtaaaacaaattccctcta

SEQ ID NO: 103848 - RNA, 21 nt, synthetic construct
  source 1..21: mol_type = other RNA
tggtaaaatcactaattcaag

SEQ ID NO: 103849 - RNA, 21 nt, synthetic construct
  source 1..21: mol_type = other RNA
tggtaaaatgtggcaaattta

SEQ ID NO: 103850 - RNA, 21 nt, synthetic construct
  source 1..21: mol_type = other RNA
tggtaaacagcagtcttaacc

SEQ ID NO: 103851 - RNA, 21 nt, synthetic construct
  source 1..21: mol_type = other RNA
tggtaaattggtcctggaaaa

SEQ ID NO: 103852 - RNA, 21 nt, synthetic construct
  source 1..21: mol_type = other RNA
tggtaacagccaaataaaaca

SEQ ID NO: 103853 - RNA, 21 nt, synthetic construct
  source 1..21: mol_type = other RNA
tggtaactagatgcctcgaag

SEQ ID NO: 103854 - RNA, 21 nt, synthetic construct
  source 1..21: mol_type = other RNA
tggtaactcctgttctttgga

SEQ ID NO: 103855 - RNA, 21 nt, synthetic construct
  source 1..21: mol_type = other RNA
tggtaactgatgtgaggatct

SEQ ID NO: 103856 - RNA, 21 nt, synthetic construct
  source 1..21: mol_type = other RNA
tggtaagagtgagaccctgtc

SEQ ID NO: 103857 - RNA, 21 nt, synthetic construct
  source 1..21: mol_type = other RNA
tggtaagctgtgagtccttcc

SEQ ID NO: 103858 - RNA, 21 nt, synthetic construct
  source 1..21: mol_type = other RNA
tggtaaggaaacagagttttc

SEQ ID NO: 103859 - RNA, 21 nt, synthetic construct
  source 1..21: mol_type = other RNA
tggtaaggactgaagtccttt

SEQ ID NO: 103860 - RNA, 21 nt, synthetic construct
  source 1..21: mol_type = other RNA
tggtaaggagccaaacatcat

SEQ ID NO: 103861 - RNA, 21 nt, synthetic construct
  source 1..21: mol_type = other RNA
tggtaataatgaaagctccca

SEQ ID NO: 103862 - RNA, 21 nt, synthetic construct
  source 1..21: mol_type = other RNA
tggtaatacagtctgatttac

SEQ ID NO: 103863 - RNA, 21 nt, synthetic construct
  source 1..21: mol_type = other RNA
tggtaatgaatagaaaatcct

SEQ ID NO: 103864 - RNA, 21 nt, synthetic construct
  source 1..21: mol_type = other RNA
tggtaatgggaaagacaggta

SEQ ID NO: 103865 - RNA, 21 nt, synthetic construct
  source 1..21: mol_type = other RNA
tggtaatgttatatttccgta

SEQ ID NO: 103866 - RNA, 21 nt, synthetic construct
  source 1..21: mol_type = other RNA
tggtaattggttcgtttgagg

SEQ ID NO: 103867 - RNA, 21 nt, synthetic construct
  source 1..21: mol_type = other RNA
tggtaatttgtccatctggat

SEQ ID NO: 103868 - RNA, 21 nt, synthetic construct
  source 1..21: mol_type = other RNA
tggtaccaaagcagaaataca

SEQ ID NO: 103869 - RNA, 21 nt, synthetic construct
  source 1..21: mol_type = other RNA
tggtactctatgatatatact

SEQ ID NO: 103870 - RNA, 21 nt, synthetic construct
  source 1..21: mol_type = other RNA
tggtactgcctccacaggctt

SEQ ID NO: 103871 - RNA, 21 nt, synthetic construct
  source 1..21: mol_type = other RNA
tggtactggtaccaaagcaga

SEQ ID NO: 103872 - RNA, 21 nt, synthetic construct
  source 1..21: mol_type = other RNA
tggtagaccatataatctaac

SEQ ID NO: 103873 - RNA, 21 nt, synthetic construct
  source 1..21: mol_type = other RNA
tggtagaggattccaggttta

SEQ ID NO: 103874 - RNA, 21 nt, synthetic construct
  source 1..21: mol_type = other RNA
tggtagataccagacccttta

SEQ ID NO: 103875 - RNA, 21 nt, synthetic construct
  source 1..21: mol_type = other RNA
tggtagatttctgcatagaga

SEQ ID NO: 103876 - RNA, 21 nt, synthetic construct
  source 1..21: mol_type = other RNA
tggtagcttgggctaaggtgg

SEQ ID NO: 103877 - RNA, 21 nt, synthetic construct
  source 1..21: mol_type = other RNA
tggtaggccaaggcgggagga

SEQ ID NO: 103878 - RNA, 21 nt, synthetic construct
  source 1..21: mol_type = other RNA
tggtagggagggggctgagga

SEQ ID NO: 103879 - RNA, 21 nt, synthetic construct
  source 1..21: mol_type = other RNA
tggtaggtgctttttgtatcc

SEQ ID NO: 103880 - RNA, 21 nt, synthetic construct
  source 1..21: mol_type = other RNA
tggtaggtgtgtgtaatccca

SEQ ID NO: 103881 - RNA, 21 nt, synthetic construct
  source 1..21: mol_type = other RNA
tggtagtaaggatcgttagta

SEQ ID NO: 103882 - RNA, 21 nt, synthetic construct
  source 1..21: mol_type = other RNA
tggtagtcaacacttttccag

SEQ ID NO: 103883 - RNA, 21 nt, synthetic construct
  source 1..21: mol_type = other RNA
tggtagtcaatgcaatgcgtg

SEQ ID NO: 103884 - RNA, 21 nt, synthetic construct
  source 1..21: mol_type = other RNA
tggtagttacacaagtgtttc

SEQ ID NO: 103885 - RNA, 21 nt, synthetic construct
  source 1..21: mol_type = other RNA
tggtagtttgcacgtttttag

SEQ ID NO: 103886 - RNA, 21 nt, synthetic construct
  source 1..21: mol_type = other RNA
tggtatcactttttgtatttc

SEQ ID NO: 103887 - RNA, 21 nt, synthetic construct
  source 1..21: mol_type = other RNA
tggtatctaccaaaaaactac

SEQ ID NO: 103888 - RNA, 21 nt, synthetic construct
  source 1..21: mol_type = other RNA
tggtatgagtgtttcccttaa

SEQ ID NO: 103889 - RNA, 21 nt, synthetic construct
  source 1..21: mol_type = other RNA
tggtatgcactgtactcctag

SEQ ID NO: 103890 - RNA, 21 nt, synthetic construct
  source 1..21: mol_type = other RNA
tggtatgcatcttgaactaag

SEQ ID NO: 103891 - RNA, 21 nt, synthetic construct
  source 1..21: mol_type = other RNA
tggtatgggagatgtgtaatt

SEQ ID NO: 103892 - RNA, 21 nt, synthetic construct
  source 1..21: mol_type = other RNA
tggtatgtgccatctccttaa

SEQ ID NO: 103893 - RNA, 21 nt, synthetic construct
  source 1..21: mol_type = other RNA
tggtatgttgtgttttcattc

SEQ ID NO: 103894 - RNA, 21 nt, synthetic construct
  source 1..21: mol_type = other RNA
tggtattctatcatcaagaca

SEQ ID NO: 103895 - RNA, 21 nt, synthetic construct
  source 1..21: mol_type = other RNA
tggtattctgaactttcaacc

SEQ ID NO: 103896 - RNA, 21 nt, synthetic construct
  source 1..21: mol_type = other RNA
tggtattcttatccctaccta

SEQ ID NO: 103897 - RNA, 21 nt, synthetic construct
  source 1..21: mol_type = other RNA
tggtatttaatctgtcagcag

SEQ ID NO: 103898 - RNA, 21 nt, synthetic construct
  source 1..21: mol_type = other RNA
tggtattttttagagacaggg

SEQ ID NO: 103899 - RNA, 21 nt, synthetic construct
  source 1..21: mol_type = other RNA
tggtcaaaactgtattttcta

SEQ ID NO: 103900 - RNA, 21 nt, synthetic construct
  source 1..21: mol_type = other RNA
tggtcaaatcaatacttcatt

SEQ ID NO: 103901 - RNA, 21 nt, synthetic construct
  source 1..21: mol_type = other RNA
tggtcaacagggtaagattcc

SEQ ID NO: 103902 - RNA, 21 nt, synthetic construct
  source 1..21: mol_type = other RNA
tggtcaacatgaaaagatact

SEQ ID NO: 103903 - RNA, 21 nt, synthetic construct
  source 1..21: mol_type = other RNA
tggtcaattgatctgccagga

SEQ ID NO: 103904 - RNA, 21 nt, synthetic construct
  source 1..21: mol_type = other RNA
tggtcaatttcatcgtaaaaa

SEQ ID NO: 103905 - RNA, 21 nt, synthetic construct
  source 1..21: mol_type = other RNA
tggtcacaaacacaaaacaaa

SEQ ID NO: 103906 - RNA, 21 nt, synthetic construct
  source 1..21: mol_type = other RNA
tggtcacactttttgtgagtt

SEQ ID NO: 103907 - RNA, 21 nt, synthetic construct
  source 1..21: mol_type = other RNA
tggtcactgctgatgtaagtg

SEQ ID NO: 103908 - RNA, 21 nt, synthetic construct
  source 1..21: mol_type = other RNA
tggtcactggccactgattga

SEQ ID NO: 103909 - RNA, 21 nt, synthetic construct
  source 1..21: mol_type = other RNA
tggtcactgtttggacagtaa

SEQ ID NO: 103910 - RNA, 21 nt, synthetic construct
  source 1..21: mol_type = other RNA
tggtcagaaaaatggaatatt

SEQ ID NO: 103911 - RNA, 21 nt, synthetic construct
  source 1..21: mol_type = other RNA
tggtcagagttgtatctgtga

SEQ ID NO: 103912 - RNA, 21 nt, synthetic construct
  source 1..21: mol_type = other RNA
tggtcagtactatcttcccta

SEQ ID NO: 103913 - RNA, 21 nt, synthetic construct
  source 1..21: mol_type = other RNA
tggtccacagaggctttttat

SEQ ID NO: 103914 - RNA, 21 nt, synthetic construct
  source 1..21: mol_type = other RNA
tggtccagatgaagcagggaa

SEQ ID NO: 103915 - RNA, 21 nt, synthetic construct
  source 1..21: mol_type = other RNA
tggtccctgctactcaggaga

SEQ ID NO: 103916 - RNA, 21 nt, synthetic construct
  source 1..21: mol_type = other RNA
tggtcctgaactcgtggcctc

SEQ ID NO: 103917 - RNA, 21 nt, synthetic construct
  source 1..21: mol_type = other RNA
tggtcctgagctttccttagt

SEQ ID NO: 103918 - RNA, 21 nt, synthetic construct
  source 1..21: mol_type = other RNA
tggtcctgagggctttgtgaa

SEQ ID NO: 103919 - RNA, 21 nt, synthetic construct
  source 1..21: mol_type = other RNA
tggtcctgcatatgtttttat

SEQ ID NO: 103920 - RNA, 21 nt, synthetic construct
  source 1..21: mol_type = other RNA
tggtcctggaaaaagaccata

SEQ ID NO: 103921 - RNA, 21 nt, synthetic construct
  source 1..21: mol_type = other RNA
tggtccttaaatttctaaggt

SEQ ID NO: 103922 - RNA, 21 nt, synthetic construct
  source 1..21: mol_type = other RNA
tggtccttgctgaagaataac

SEQ ID NO: 103923 - RNA, 21 nt, synthetic construct
  source 1..21: mol_type = other RNA
tggtccttttttactgacttt

SEQ ID NO: 103924 - RNA, 21 nt, synthetic construct
  source 1..21: mol_type = other RNA
tggtcgaaaacctgaaatggc

SEQ ID NO: 103925 - RNA, 21 nt, synthetic construct
  source 1..21: mol_type = other RNA
tggtcgagctgggtgatgttc

SEQ ID NO: 103926 - RNA, 21 nt, synthetic construct
  source 1..21: mol_type = other RNA
tggtctaccatgttgttcttt

SEQ ID NO: 103927 - RNA, 21 nt, synthetic construct
  source 1..21: mol_type = other RNA
tggtctatctcattataacat

SEQ ID NO: 103928 - RNA, 21 nt, synthetic construct
  source 1..21: mol_type = other RNA
tggtctcaaactccaagtctc

SEQ ID NO: 103929 - RNA, 21 nt, synthetic construct
  source 1..21: mol_type = other RNA
tggtctcaatctcctgatcca

SEQ ID NO: 103930 - RNA, 21 nt, synthetic construct
  source 1..21: mol_type = other RNA
tggtctcaccctcaggactct

SEQ ID NO: 103931 - RNA, 21 nt, synthetic construct
  source 1..21: mol_type = other RNA
tggtctcagctcctcagaagg

SEQ ID NO: 103932 - RNA, 21 nt, synthetic construct
  source 1..21: mol_type = other RNA
tggtctcattcactagacaca

SEQ ID NO: 103933 - RNA, 21 nt, synthetic construct
  source 1..21: mol_type = other RNA
tggtctcccagcatgaagccc

SEQ ID NO: 103934 - RNA, 21 nt, synthetic construct
  source 1..21: mol_type = other RNA
tggtctcctttctatacttca

SEQ ID NO: 103935 - RNA, 21 nt, synthetic construct
  source 1..21: mol_type = other RNA
tggtctcgagctcctgacctc

SEQ ID NO: 103936 - RNA, 21 nt, synthetic construct
  source 1..21: mol_type = other RNA
tggtctcttcgagggggctga

SEQ ID NO: 103937 - RNA, 21 nt, synthetic construct
  source 1..21: mol_type = other RNA
tggtctgcagactcttgtccc

SEQ ID NO: 103938 - RNA, 21 nt, synthetic construct
  source 1..21: mol_type = other RNA
tggtctggaatgtgtagttct

SEQ ID NO: 103939 - RNA, 21 nt, synthetic construct
  source 1..21: mol_type = other RNA
tggtctgggtgatatctgtaa

SEQ ID NO: 103940 - RNA, 21 nt, synthetic construct
  source 1..21: mol_type = other RNA
tggtcttaagagactctcaag

SEQ ID NO: 103941 - RNA, 21 nt, synthetic construct
  source 1..21: mol_type = other RNA
tggtcttaccctctagctccc

SEQ ID NO: 103942 - RNA, 21 nt, synthetic construct
  source 1..21: mol_type = other RNA
tggtcttgtactcccagcctc

SEQ ID NO: 103943 - RNA, 21 nt, synthetic construct
  source 1..21: mol_type = other RNA
tggtcttgtctcaacctttgc

SEQ ID NO: 103944 - RNA, 21 nt, synthetic construct
  source 1..21: mol_type = other RNA
tggtctttctcccaggtcagt

SEQ ID NO: 103945 - RNA, 21 nt, synthetic construct
  source 1..21: mol_type = other RNA
tggtctttttccaggaccaat

SEQ ID NO: 103946 - RNA, 21 nt, synthetic construct
  source 1..21: mol_type = other RNA
tggtgaaaaaatggtgcagcc

SEQ ID NO: 103947 - RNA, 21 nt, synthetic construct
  source 1..21: mol_type = other RNA
tggtgaactgggtgtaggggg

SEQ ID NO: 103948 - RNA, 21 nt, synthetic construct
  source 1..21: mol_type = other RNA
tggtgaagaatgtgaaaaatt

SEQ ID NO: 103949 - RNA, 21 nt, synthetic construct
  source 1..21: mol_type = other RNA
tggtgaagagagcctgtggtc

SEQ ID NO: 103950 - RNA, 21 nt, synthetic construct
  source 1..21: mol_type = other RNA
tggtgaaggttcatgaacata

SEQ ID NO: 103951 - RNA, 21 nt, synthetic construct
  source 1..21: mol_type = other RNA
tggtgaatctgagtaaagggt

SEQ ID NO: 103952 - RNA, 21 nt, synthetic construct
  source 1..21: mol_type = other RNA
tggtgactgaattcccacaaa

SEQ ID NO: 103953 - RNA, 21 nt, synthetic construct
  source 1..21: mol_type = other RNA
tggtgagaacccagtgtctgc

SEQ ID NO: 103954 - RNA, 21 nt, synthetic construct
  source 1..21: mol_type = other RNA
tggtgataactggtgcttttt

SEQ ID NO: 103955 - RNA, 21 nt, synthetic construct
  source 1..21: mol_type = other RNA
tggtgatacctcttactaaaa

SEQ ID NO: 103956 - RNA, 21 nt, synthetic construct
  source 1..21: mol_type = other RNA
tggtgatcctaagccatctaa

SEQ ID NO: 103957 - RNA, 21 nt, synthetic construct
  source 1..21: mol_type = other RNA
tggtgatctatgaatttgcct

SEQ ID NO: 103958 - RNA, 21 nt, synthetic construct
  source 1..21: mol_type = other RNA
tggtgatgctaacgtgcttgc

SEQ ID NO: 103959 - RNA, 21 nt, synthetic construct
  source 1..21: mol_type = other RNA
tggtgcaaggataaacaaaga

SEQ ID NO: 103960 - RNA, 21 nt, synthetic construct
  source 1..21: mol_type = other RNA
tggtgcaatcacggctgatta

SEQ ID NO: 103961 - RNA, 21 nt, synthetic construct
  source 1..21: mol_type = other RNA
tggtgcaatgataggtcactg

SEQ ID NO: 103962 - RNA, 21 nt, synthetic construct
  source 1..21: mol_type = other RNA
tggtgcagccactatagaaaa

SEQ ID NO: 103963 - RNA, 21 nt, synthetic construct
  source 1..21: mol_type = other RNA
tggtgcaggccagatatccat

SEQ ID NO: 103964 - RNA, 21 nt, synthetic construct
  source 1..21: mol_type = other RNA
tggtgcatttgggacagccta

SEQ ID NO: 103965 - RNA, 21 nt, synthetic construct
  source 1..21: mol_type = other RNA
tggtgctgataaatggctttt

SEQ ID NO: 103966 - RNA, 21 nt, synthetic construct
  source 1..21: mol_type = other RNA
tggtgctgatttaaaattttg

SEQ ID NO: 103967 - RNA, 21 nt, synthetic construct
  source 1..21: mol_type = other RNA
tggtgctgcacgtctgtggtc

SEQ ID NO: 103968 - RNA, 21 nt, synthetic construct
  source 1..21: mol_type = other RNA
tggtgctggactggagggatg

SEQ ID NO: 103969 - RNA, 21 nt, synthetic construct
  source 1..21: mol_type = other RNA
tggtgctggcagccttctctc

SEQ ID NO: 103970 - RNA, 21 nt, synthetic construct
  source 1..21: mol_type = other RNA
tggtgcttaattcaaacaaat

SEQ ID NO: 103971 - RNA, 21 nt, synthetic construct
  source 1..21: mol_type = other RNA
tggtgcttagctgcctcttcc

SEQ ID NO: 103972 - RNA, 21 nt, synthetic construct
  source 1..21: mol_type = other RNA
tggtgcttccttctcttatac

SEQ ID NO: 103973 - RNA, 21 nt, synthetic construct
  source 1..21: mol_type = other RNA
tggtgcttgaactgctggtct

SEQ ID NO: 103974 - RNA, 21 nt, synthetic construct
  source 1..21: mol_type = other RNA
tggtgctttctatctctcaga

SEQ ID NO: 103975 - RNA, 21 nt, synthetic construct
  source 1..21: mol_type = other RNA
tggtgcttttgctgcatccca

SEQ ID NO: 103976 - RNA, 21 nt, synthetic construct
  source 1..21: mol_type = other RNA
tggtgcttttttggtgttttt

SEQ ID NO: 103977 - RNA, 21 nt, synthetic construct
  source 1..21: mol_type = other RNA
tggtggacaaaaaacgcggca

SEQ ID NO: 103978 - RNA, 21 nt, synthetic construct
  source 1..21: mol_type = other RNA
tggtggagtattctagttcta

SEQ ID NO: 103979 - RNA, 21 nt, synthetic construct
  source 1..21: mol_type = other RNA
tggtggatagagagattcaag

SEQ ID NO: 103980 - RNA, 21 nt, synthetic construct
  source 1..21: mol_type = other RNA
tggtggcccacacctgcaatc

SEQ ID NO: 103981 - RNA, 21 nt, synthetic construct
  source 1..21: mol_type = other RNA
tggtggcggatgccggtaatc

SEQ ID NO: 103982 - RNA, 21 nt, synthetic construct
  source 1..21: mol_type = other RNA
tggtgggagaggcatgccggg

SEQ ID NO: 103983 - RNA, 21 nt, synthetic construct
  source 1..21: mol_type = other RNA
tggtgggatctctgggctcac

SEQ ID NO: 103984 - RNA, 21 nt, synthetic construct
  source 1..21: mol_type = other RNA
tggtgggccttgcaagccaca

SEQ ID NO: 103985 - RNA, 21 nt, synthetic construct
  source 1..21: mol_type = other RNA
tggtgggctttgagaaaggtt

SEQ ID NO: 103986 - RNA, 21 nt, synthetic construct
  source 1..21: mol_type = other RNA
tggtgggttcatgccattctc

SEQ ID NO: 103987 - RNA, 21 nt, synthetic construct
  source 1..21: mol_type = other RNA
tggtggtaactgatgtgagga

SEQ ID NO: 103988 - RNA, 21 nt, synthetic construct
  source 1..21: mol_type = other RNA
tggtggtaggtgtgtgtaatc

SEQ ID NO: 103989 - RNA, 21 nt, synthetic construct
  source 1..21: mol_type = other RNA
tggtggtagtaaggatcgtta

SEQ ID NO: 103990 - RNA, 21 nt, synthetic construct
  source 1..21: mol_type = other RNA
tggtggtatgcactgtactcc

SEQ ID NO: 103991 - RNA, 21 nt, synthetic construct
  source 1..21: mol_type = other RNA
tggtggtctcaccctcaggac

SEQ ID NO: 103992 - RNA, 21 nt, synthetic construct
  source 1..21: mol_type = other RNA
tggtgtaaaatacaacagcac

SEQ ID NO: 103993 - RNA, 21 nt, synthetic construct
  source 1..21: mol_type = other RNA
tggtgtcatttttaagaaatc

SEQ ID NO: 103994 - RNA, 21 nt, synthetic construct
  source 1..21: mol_type = other RNA
tggtgtccttctgagaaggcg

SEQ ID NO: 103995 - RNA, 21 nt, synthetic construct
  source 1..21: mol_type = other RNA
tggtgtcgtttatttcttctc

SEQ ID NO: 103996 - RNA, 21 nt, synthetic construct
  source 1..21: mol_type = other RNA
tggtgtgaagttgggcttaac

SEQ ID NO: 103997 - RNA, 21 nt, synthetic construct
  source 1..21: mol_type = other RNA
tggtgtgatctctgctcaccg

SEQ ID NO: 103998 - RNA, 21 nt, synthetic construct
  source 1..21: mol_type = other RNA
tggtgtgctcttttcatcact

SEQ ID NO: 103999 - RNA, 21 nt, synthetic construct
  source 1..21: mol_type = other RNA
tggtgtgcttctgataggaat

SEQ ID NO: 104000 - RNA, 21 nt, synthetic construct
  source 1..21: mol_type = other RNA
tggtgtggcatgtctgtagtt

SEQ ID NO: 104001 - RNA, 21 nt, synthetic construct
  source 1..21: mol_type = other RNA
tggtgtggtcttgtctcaacc

SEQ ID NO: 104002 - RNA, 21 nt, synthetic construct
  source 1..21: mol_type = other RNA
tggtgtgtctgcgccttaaag

SEQ ID NO: 104003 - RNA, 21 nt, synthetic construct
  source 1..21: mol_type = other RNA
tggtgtgtgactgtagtccct

SEQ ID NO: 104004 - RNA, 21 nt, synthetic construct
  source 1..21: mol_type = other RNA
tggtgtgtgcaaaggattaga

SEQ ID NO: 104005 - RNA, 21 nt, synthetic construct
  source 1..21: mol_type = other RNA
tggtgttaggcaatccttccg

SEQ ID NO: 104006 - RNA, 21 nt, synthetic construct
  source 1..21: mol_type = other RNA
tggtgttatttgttctgtcac

SEQ ID NO: 104007 - RNA, 21 nt, synthetic construct
  source 1..21: mol_type = other RNA
tggtgttgactgaattaatct

SEQ ID NO: 104008 - RNA, 21 nt, synthetic construct
  source 1..21: mol_type = other RNA
tggtgttgcttgctctacaaa

SEQ ID NO: 104009 - RNA, 21 nt, synthetic construct
  source 1..21: mol_type = other RNA
tggtgtttctgacaggtggta

SEQ ID NO: 104010 - RNA, 21 nt, synthetic construct
  source 1..21: mol_type = other RNA
tggtgtttttctaggtagttt

SEQ ID NO: 104011 - RNA, 21 nt, synthetic construct
  source 1..21: mol_type = other RNA
tggttaaacttggtctgggtg

SEQ ID NO: 104012 - RNA, 21 nt, synthetic construct
  source 1..21: mol_type = other RNA
tggttaagactgctgtttacc

SEQ ID NO: 104013 - RNA, 21 nt, synthetic construct
  source 1..21: mol_type = other RNA
tggttaatagtgaccctttga

SEQ ID NO: 104014 - RNA, 21 nt, synthetic construct
  source 1..21: mol_type = other RNA
tggttagactgcacataaaag

SEQ ID NO: 104015 - RNA, 21 nt, synthetic construct
  source 1..21: mol_type = other RNA
tggttaggaaaatacatgagg

SEQ ID NO: 104016 - RNA, 21 nt, synthetic construct
  source 1..21: mol_type = other RNA
tggttagggagactttcactg

SEQ ID NO: 104017 - RNA, 21 nt, synthetic construct
  source 1..21: mol_type = other RNA
tggttagtgttgtttttaaac

SEQ ID NO: 104018 - RNA, 21 nt, synthetic construct
  source 1..21: mol_type = other RNA
tggttatagccataagagtcc

SEQ ID NO: 104019 - RNA, 21 nt, synthetic construct
  source 1..21: mol_type = other RNA
tggttatgcgaatttactttt

SEQ ID NO: 104020 - RNA, 21 nt, synthetic construct
  source 1..21: mol_type = other RNA
tggttattcatgtttgtggtt

SEQ ID NO: 104021 - RNA, 21 nt, synthetic construct
  source 1..21: mol_type = other RNA
tggttattgagtctgtagggt

SEQ ID NO: 104022 - RNA, 21 nt, synthetic construct
  source 1..21: mol_type = other RNA
tggttcaagctatgctcctgc

SEQ ID NO: 104023 - RNA, 21 nt, synthetic construct
  source 1..21: mol_type = other RNA
tggttcacacctgtagtccca

SEQ ID NO: 104024 - RNA, 21 nt, synthetic construct
  source 1..21: mol_type = other RNA
tggttcacttgaaacctgcca

SEQ ID NO: 104025 - RNA, 21 nt, synthetic construct
  source 1..21: mol_type = other RNA
tggttcataatatatcacaac

SEQ ID NO: 104026 - RNA, 21 nt, synthetic construct
  source 1..21: mol_type = other RNA
tggttcatatttcccttttgg

SEQ ID NO: 104027 - RNA, 21 nt, synthetic construct
  source 1..21: mol_type = other RNA
tggttcatttcaggaatgcaa

SEQ ID NO: 104028 - RNA, 21 nt, synthetic construct
  source 1..21: mol_type = other RNA
tggttccaaacttctgacctt

SEQ ID NO: 104029 - RNA, 21 nt, synthetic construct
  source 1..21: mol_type = other RNA
tggttccatttgttttgtgtt

SEQ ID NO: 104030 - RNA, 21 nt, synthetic construct
  source 1..21: mol_type = other RNA
tggttcgtttgaggcttttca

SEQ ID NO: 104031 - RNA, 21 nt, synthetic construct
  source 1..21: mol_type = other RNA
tggttctgcctaatctctagg

SEQ ID NO: 104032 - RNA, 21 nt, synthetic construct
  source 1..21: mol_type = other RNA
tggttctgcgtgttattttaa

SEQ ID NO: 104033 - RNA, 21 nt, synthetic construct
  source 1..21: mol_type = other RNA
tggttctgtgctagatgctaa

SEQ ID NO: 104034 - RNA, 21 nt, synthetic construct
  source 1..21: mol_type = other RNA
tggttgaagaaagtaggaatt

SEQ ID NO: 104035 - RNA, 21 nt, synthetic construct
  source 1..21: mol_type = other RNA
tggttgacccataaactgaac

SEQ ID NO: 104036 - RNA, 21 nt, synthetic construct
  source 1..21: mol_type = other RNA
tggttgcacaatgttgtggat

SEQ ID NO: 104037 - RNA, 21 nt, synthetic construct
  source 1..21: mol_type = other RNA
tggttggaaaacttttaactg

SEQ ID NO: 104038 - RNA, 21 nt, synthetic construct
  source 1..21: mol_type = other RNA
tggttggaaaagaaagctgtg

SEQ ID NO: 104039 - RNA, 21 nt, synthetic construct
  source 1..21: mol_type = other RNA
tggttggaagtttctggaagt

SEQ ID NO: 104040 - RNA, 21 nt, synthetic construct
  source 1..21: mol_type = other RNA
tggttggactccaccctgccc

SEQ ID NO: 104041 - RNA, 21 nt, synthetic construct
  source 1..21: mol_type = other RNA
tggttggccgaggccagtccc

SEQ ID NO: 104042 - RNA, 21 nt, synthetic construct
  source 1..21: mol_type = other RNA
tggttgtgcttcgaggtcgca

SEQ ID NO: 104043 - RNA, 21 nt, synthetic construct
  source 1..21: mol_type = other RNA
tggttgtggaattaactccag

SEQ ID NO: 104044 - RNA, 21 nt, synthetic construct
  source 1..21: mol_type = other RNA
tggttgttggctaaaagaccg

SEQ ID NO: 104045 - RNA, 21 nt, synthetic construct
  source 1..21: mol_type = other RNA
tggtttaacacatacaaacca

SEQ ID NO: 104046 - RNA, 21 nt, synthetic construct
  source 1..21: mol_type = other RNA
tggtttaaggtaagggtccag

SEQ ID NO: 104047 - RNA, 21 nt, synthetic construct
  source 1..21: mol_type = other RNA
tggtttacaatggttcataat

SEQ ID NO: 104048 - RNA, 21 nt, synthetic construct
  source 1..21: mol_type = other RNA
tggtttaggctgtctccaacg

SEQ ID NO: 104049 - RNA, 21 nt, synthetic construct
  source 1..21: mol_type = other RNA
tggtttattcatataatggag

SEQ ID NO: 104050 - RNA, 21 nt, synthetic construct
  source 1..21: mol_type = other RNA
tggtttattttctgcatttgg

SEQ ID NO: 104051 - RNA, 21 nt, synthetic construct
  source 1..21: mol_type = other RNA
tggtttcacacgcattgcatt

SEQ ID NO: 104052 - RNA, 21 nt, synthetic construct
  source 1..21: mol_type = other RNA
tggtttcagtacacgaaaata

SEQ ID NO: 104053 - RNA, 21 nt, synthetic construct
  source 1..21: mol_type = other RNA
tggtttcagtccctcctttct

SEQ ID NO: 104054 - RNA, 21 nt, synthetic construct
  source 1..21: mol_type = other RNA
tggtttcataaaatgatggca

SEQ ID NO: 104055 - RNA, 21 nt, synthetic construct
  source 1..21: mol_type = other RNA
tggtttctccttctgcaggct

SEQ ID NO: 104056 - RNA, 21 nt, synthetic construct
  source 1..21: mol_type = other RNA
tggtttctgacacccgaccca

SEQ ID NO: 104057 - RNA, 21 nt, synthetic construct
  source 1..21: mol_type = other RNA
tggtttctgcatacttagcta

SEQ ID NO: 104058 - RNA, 21 nt, synthetic construct
  source 1..21: mol_type = other RNA
tggtttcttcaagatactgca

SEQ ID NO: 104059 - RNA, 21 nt, synthetic construct
  source 1..21: mol_type = other RNA
tggtttcttgaatctctctat

SEQ ID NO: 104060 - RNA, 21 nt, synthetic construct
  source 1..21: mol_type = other RNA
tggtttgaaatgatcttttgt

SEQ ID NO: 104061 - RNA, 21 nt, synthetic construct
  source 1..21: mol_type = other RNA
tggtttgaaccccagaaggtt

SEQ ID NO: 104062 - RNA, 21 nt, synthetic construct
  source 1..21: mol_type = other RNA
tggtttgaagcttcacttctc

SEQ ID NO: 104063 - RNA, 21 nt, synthetic construct
  source 1..21: mol_type = other RNA
tggtttgatcccactagtgga

SEQ ID NO: 104064 - RNA, 21 nt, synthetic construct
  source 1..21: mol_type = other RNA
tggtttgattgttccaggggg

SEQ ID NO: 104065 - RNA, 21 nt, synthetic construct
  source 1..21: mol_type = other RNA
tggtttgcaaaaattttgttc

SEQ ID NO: 104066 - RNA, 21 nt, synthetic construct
  source 1..21: mol_type = other RNA
tggtttgccttttcactctta

SEQ ID NO: 104067 - RNA, 21 nt, synthetic construct
  source 1..21: mol_type = other RNA
tggtttgctttggagtcacag

SEQ ID NO: 104068 - RNA, 21 nt, synthetic construct
  source 1..21: mol_type = other RNA
tggtttggggcttttgaacac

SEQ ID NO: 104069 - RNA, 21 nt, synthetic construct
  source 1..21: mol_type = other RNA
tggtttgtatgtgttaaacca

SEQ ID NO: 104070 - RNA, 21 nt, synthetic construct
  source 1..21: mol_type = other RNA
tggtttgtgtgtttgtgaaaa

SEQ ID NO: 104071 - RNA, 21 nt, synthetic construct
  source 1..21: mol_type = other RNA
tggttttaacctcttgaagtc

SEQ ID NO: 104072 - RNA, 21 nt, synthetic construct
  source 1..21: mol_type = other RNA
tggttttaatgggcattagaa

SEQ ID NO: 104073 - RNA, 21 nt, synthetic construct
  source 1..21: mol_type = other RNA
tggttttactactgtactgtt

SEQ ID NO: 104074 - RNA, 21 nt, synthetic construct
  source 1..21: mol_type = other RNA
tggttttatggtaactcctgt

SEQ ID NO: 104075 - RNA, 21 nt, synthetic construct
  source 1..21: mol_type = other RNA
tggttttcctactaacaagaa

SEQ ID NO: 104076 - RNA, 21 nt, synthetic construct
  source 1..21: mol_type = other RNA
tggttttcctgatggacattc

SEQ ID NO: 104077 - RNA, 21 nt, synthetic construct
  source 1..21: mol_type = other RNA
tggttttctggaggctagaag

SEQ ID NO: 104078 - RNA, 21 nt, synthetic construct
  source 1..21: mol_type = other RNA
tggttttgactcagtacttcc

SEQ ID NO: 104079 - RNA, 21 nt, synthetic construct
  source 1..21: mol_type = other RNA
tggttttgatcatcgcattac

SEQ ID NO: 104080 - RNA, 21 nt, synthetic construct
  source 1..21: mol_type = other RNA
tggtttttatggaataatgga

SEQ ID NO: 104081 - RNA, 21 nt, synthetic construct
  source 1..21: mol_type = other RNA
tggtttttggttcacttgaaa

SEQ ID NO: 104082 - RNA, 21 nt, synthetic construct
  source 1..21: mol_type = other RNA
tggttttttcccccctggaac

SEQ ID NO: 104083 - RNA, 21 nt, synthetic construct
  source 1..21: mol_type = other RNA
tgtaaaaactgtttggctggg

SEQ ID NO: 104084 - RNA, 21 nt, synthetic construct
  source 1..21: mol_type = other RNA
tgtaaaaatatagaaggccag

SEQ ID NO: 104085 - RNA, 21 nt, synthetic construct
  source 1..21: mol_type = other RNA
tgtaaaaattttctcccaagg

SEQ ID NO: 104086 - RNA, 21 nt, synthetic construct
  source 1..21: mol_type = other RNA
tgtaaaacagacccttatgtc

SEQ ID NO: 104087 - RNA, 21 nt, synthetic construct
  source 1..21: mol_type = other RNA
tgtaaaacatcaaagtcccct

SEQ ID NO: 104088 - RNA, 21 nt, synthetic construct
  source 1..21: mol_type = other RNA
tgtaaaacatctggaaggaaa

SEQ ID NO: 104089 - RNA, 21 nt, synthetic construct
  source 1..21: mol_type = other RNA
tgtaaaatacaacagcacctt

SEQ ID NO: 104090 - RNA, 21 nt, synthetic construct
  source 1..21: mol_type = other RNA
tgtaaacaatgctgctatgaa

SEQ ID NO: 104091 - RNA, 21 nt, synthetic construct
  source 1..21: mol_type = other RNA
tgtaaacactgttctgcgtgg

SEQ ID NO: 104092 - RNA, 21 nt, synthetic construct
  source 1..21: mol_type = other RNA
tgtaaacagcatactgtggat

SEQ ID NO: 104093 - RNA, 21 nt, synthetic construct
  source 1..21: mol_type = other RNA
tgtaaacatgaacaagttaca

SEQ ID NO: 104094 - RNA, 21 nt, synthetic construct
  source 1..21: mol_type = other RNA
tgtaaaccatatggttaatag

SEQ ID NO: 104095 - RNA, 21 nt, synthetic construct
  source 1..21: mol_type = other RNA
tgtaaacctggaatcctctac

SEQ ID NO: 104096 - RNA, 21 nt, synthetic construct
  source 1..21: mol_type = other RNA
tgtaaactgttggaaaaatcg

SEQ ID NO: 104097 - RNA, 21 nt, synthetic construct
  source 1..21: mol_type = other RNA
tgtaaagtttctctctccctg

SEQ ID NO: 104098 - RNA, 21 nt, synthetic construct
  source 1..21: mol_type = other RNA
tgtaaatgaaacacttgtgta

SEQ ID NO: 104099 - RNA, 21 nt, synthetic construct
  source 1..21: mol_type = other RNA
tgtaaattcctaactcaagag

SEQ ID NO: 104100 - RNA, 21 nt, synthetic construct
  source 1..21: mol_type = other RNA
tgtaaattctgccacattcaa

SEQ ID NO: 104101 - RNA, 21 nt, synthetic construct
  source 1..21: mol_type = other RNA
tgtaacaaagatgccacaaat

SEQ ID NO: 104102 - RNA, 21 nt, synthetic construct
  source 1..21: mol_type = other RNA
tgtaacacagttctagttcta

SEQ ID NO: 104103 - RNA, 21 nt, synthetic construct
  source 1..21: mol_type = other RNA
tgtaacagaggcatgcacgga

SEQ ID NO: 104104 - RNA, 21 nt, synthetic construct
  source 1..21: mol_type = other RNA
tgtaacatacacatcagattt

SEQ ID NO: 104105 - RNA, 21 nt, synthetic construct
  source 1..21: mol_type = other RNA
tgtaacatgttagattaggaa

SEQ ID NO: 104106 - RNA, 21 nt, synthetic construct
  source 1..21: mol_type = other RNA
tgtaaccctgtttcccttaat

SEQ ID NO: 104107 - RNA, 21 nt, synthetic construct
  source 1..21: mol_type = other RNA
tgtaacctccacctcccagat

SEQ ID NO: 104108 - RNA, 21 nt, synthetic construct
  source 1..21: mol_type = other RNA
tgtaacgtgtatagctttttt

SEQ ID NO: 104109 - RNA, 21 nt, synthetic construct
  source 1..21: mol_type = other RNA
tgtaactacagacatgccaca

SEQ ID NO: 104110 - RNA, 21 nt, synthetic construct
  source 1..21: mol_type = other RNA
tgtaactgacttcaagaggtt

SEQ ID NO: 104111 - RNA, 21 nt, synthetic construct
  source 1..21: mol_type = other RNA
tgtaacttgaattcagatggc

SEQ ID NO: 104112 - RNA, 21 nt, synthetic construct
  source 1..21: mol_type = other RNA
tgtaacttgcttaggctgaag

SEQ ID NO: 104113 - RNA, 21 nt, synthetic construct
  source 1..21: mol_type = other RNA
tgtaacttgttcatgtttaca

SEQ ID NO: 104114 - RNA, 21 nt, synthetic construct
  source 1..21: mol_type = other RNA
tgtaagaaatgccacattttt

SEQ ID NO: 104115 - RNA, 21 nt, synthetic construct
  source 1..21: mol_type = other RNA
tgtaagacaatgtctttggct

SEQ ID NO: 104116 - RNA, 21 nt, synthetic construct
  source 1..21: mol_type = other RNA
tgtaagagattaattcagtca

SEQ ID NO: 104117 - RNA, 21 nt, synthetic construct
  source 1..21: mol_type = other RNA
tgtaagcacacatgaacctgc

SEQ ID NO: 104118 - RNA, 21 nt, synthetic construct
  source 1..21: mol_type = other RNA
tgtaagcacctgtataaataa

SEQ ID NO: 104119 - RNA, 21 nt, synthetic construct
  source 1..21: mol_type = other RNA
tgtaagctgaactctgtggag

SEQ ID NO: 104120 - RNA, 21 nt, synthetic construct
  source 1..21: mol_type = other RNA
tgtaagctggtaatacagtct

SEQ ID NO: 104121 - RNA, 21 nt, synthetic construct
  source 1..21: mol_type = other RNA
tgtaaggtgcacgctgtgaat

SEQ ID NO: 104122 - RNA, 21 nt, synthetic construct
  source 1..21: mol_type = other RNA
tgtaaggtgtttggtgaattt

SEQ ID NO: 104123 - RNA, 21 nt, synthetic construct
  source 1..21: mol_type = other RNA
tgtaagtcagttaacagtgct

SEQ ID NO: 104124 - RNA, 21 nt, synthetic construct
  source 1..21: mol_type = other RNA
tgtaagtcatcaaaggaagga

SEQ ID NO: 104125 - RNA, 21 nt, synthetic construct
  source 1..21: mol_type = other RNA
tgtaagtgggaggaggtcata

SEQ ID NO: 104126 - RNA, 21 nt, synthetic construct
  source 1..21: mol_type = other RNA
tgtaagttcctggactgtgat

SEQ ID NO: 104127 - RNA, 21 nt, synthetic construct
  source 1..21: mol_type = other RNA
tgtaagttggattcccaggta

SEQ ID NO: 104128 - RNA, 21 nt, synthetic construct
  source 1..21: mol_type = other RNA
tgtaataacttggagaactta

SEQ ID NO: 104129 - RNA, 21 nt, synthetic construct
  source 1..21: mol_type = other RNA
tgtaatatacttgtcaagttc

SEQ ID NO: 104130 - RNA, 21 nt, synthetic construct
  source 1..21: mol_type = other RNA
tgtaatcaagtatctccctgt

SEQ ID NO: 104131 - RNA, 21 nt, synthetic construct
  source 1..21: mol_type = other RNA
tgtaatcacagtacgctttta

SEQ ID NO: 104132 - RNA, 21 nt, synthetic construct
  source 1..21: mol_type = other RNA
tgtaatcctgtttctctacat

SEQ ID NO: 104133 - RNA, 21 nt, synthetic construct
  source 1..21: mol_type = other RNA
tgtaatctaaggattatggct

SEQ ID NO: 104134 - RNA, 21 nt, synthetic construct
  source 1..21: mol_type = other RNA
tgtaatctcatggaagttatt

SEQ ID NO: 104135 - RNA, 21 nt, synthetic construct
  source 1..21: mol_type = other RNA
tgtaatgacctggaaattatt

SEQ ID NO: 104136 - RNA, 21 nt, synthetic construct
  source 1..21: mol_type = other RNA
tgtaatgagctgagattgccc

SEQ ID NO: 104137 - RNA, 21 nt, synthetic construct
  source 1..21: mol_type = other RNA
tgtaatggatcaaggcacagt

SEQ ID NO: 104138 - RNA, 21 nt, synthetic construct
  source 1..21: mol_type = other RNA
tgtaatgtctcctctttcata

SEQ ID NO: 104139 - RNA, 21 nt, synthetic construct
  source 1..21: mol_type = other RNA
tgtaatgttacttctcagcta

SEQ ID NO: 104140 - RNA, 21 nt, synthetic construct
  source 1..21: mol_type = other RNA
tgtaatgtttgtacttctacc

SEQ ID NO: 104141 - RNA, 21 nt, synthetic construct
  source 1..21: mol_type = other RNA
tgtaattacaggggactttga

SEQ ID NO: 104142 - RNA, 21 nt, synthetic construct
  source 1..21: mol_type = other RNA
tgtaattacatacttcaaagg

SEQ ID NO: 104143 - RNA, 21 nt, synthetic construct
  source 1..21: mol_type = other RNA
tgtaattcatcctactagtat

SEQ ID NO: 104144 - RNA, 21 nt, synthetic construct
  source 1..21: mol_type = other RNA
tgtaattgtaccttggagaga

SEQ ID NO: 104145 - RNA, 21 nt, synthetic construct
  source 1..21: mol_type = other RNA
tgtacaaagatttacccctac

SEQ ID NO: 104146 - RNA, 21 nt, synthetic construct
  source 1..21: mol_type = other RNA
tgtacaacattcatccctcta

SEQ ID NO: 104147 - RNA, 21 nt, synthetic construct
  source 1..21: mol_type = other RNA
tgtacaatgaattagcaatgc

SEQ ID NO: 104148 - RNA, 21 nt, synthetic construct
  source 1..21: mol_type = other RNA
tgtacaatggggctttactgt

SEQ ID NO: 104149 - RNA, 21 nt, synthetic construct
  source 1..21: mol_type = other RNA
tgtacaattaggctgtttgag

SEQ ID NO: 104150 - RNA, 21 nt, synthetic construct
  source 1..21: mol_type = other RNA
tgtacaattcggtggcattaa

SEQ ID NO: 104151 - RNA, 21 nt, synthetic construct
  source 1..21: mol_type = other RNA
tgtacaattttcttacccttt

SEQ ID NO: 104152 - RNA, 21 nt, synthetic construct
  source 1..21: mol_type = other RNA
tgtacacctcaaactagaaaa

SEQ ID NO: 104153 - RNA, 21 nt, synthetic construct
  source 1..21: mol_type = other RNA
tgtacacgtcttgtcaataat

SEQ ID NO: 104154 - RNA, 21 nt, synthetic construct
  source 1..21: mol_type = other RNA
tgtacagtaattgtagtttcc

SEQ ID NO: 104155 - RNA, 21 nt, synthetic construct
  source 1..21: mol_type = other RNA
tgtacatgaagtcctcaatca

SEQ ID NO: 104156 - RNA, 21 nt, synthetic construct
  source 1..21: mol_type = other RNA
tgtacatgacctatctattaa

SEQ ID NO: 104157 - RNA, 21 nt, synthetic construct
  source 1..21: mol_type = other RNA
tgtacatttaaaattgcagag

SEQ ID NO: 104158 - RNA, 21 nt, synthetic construct
  source 1..21: mol_type = other RNA
tgtacattttaccatatacac

SEQ ID NO: 104159 - RNA, 21 nt, synthetic construct
  source 1..21: mol_type = other RNA
tgtaccaaaagtcctgttctt

SEQ ID NO: 104160 - RNA, 21 nt, synthetic construct
  source 1..21: mol_type = other RNA
tgtacccaatggattataaat

SEQ ID NO: 104161 - RNA, 21 nt, synthetic construct
  source 1..21: mol_type = other RNA
tgtacccattagacactaact

SEQ ID NO: 104162 - RNA, 21 nt, synthetic construct
  source 1..21: mol_type = other RNA
tgtacccgtgtgttttgttgt

SEQ ID NO: 104163 - RNA, 21 nt, synthetic construct
  source 1..21: mol_type = other RNA
tgtacccttacgcgtggatgt

SEQ ID NO: 104164 - RNA, 21 nt, synthetic construct
  source 1..21: mol_type = other RNA
tgtaccttgatttatggccta

SEQ ID NO: 104165 - RNA, 21 nt, synthetic construct
  source 1..21: mol_type = other RNA
tgtaccttggagagaaacctt

SEQ ID NO: 104166 - RNA, 21 nt, synthetic construct
  source 1..21: mol_type = other RNA
tgtacgccaattttcatagca

SEQ ID NO: 104167 - RNA, 21 nt, synthetic construct
  source 1..21: mol_type = other RNA
tgtactaagcctatgtaagac

SEQ ID NO: 104168 - RNA, 21 nt, synthetic construct
  source 1..21: mol_type = other RNA
tgtactacctatagaattctt

SEQ ID NO: 104169 - RNA, 21 nt, synthetic construct
  source 1..21: mol_type = other RNA
tgtactactgacctgggagaa

SEQ ID NO: 104170 - RNA, 21 nt, synthetic construct
  source 1..21: mol_type = other RNA
tgtactacttgtcaggtgggc

SEQ ID NO: 104171 - RNA, 21 nt, synthetic construct
  source 1..21: mol_type = other RNA
tgtactagtctccatacaagg

SEQ ID NO: 104172 - RNA, 21 nt, synthetic construct
  source 1..21: mol_type = other RNA
tgtactcccagcctcaaacaa

SEQ ID NO: 104173 - RNA, 21 nt, synthetic construct
  source 1..21: mol_type = other RNA
tgtactgaaaccagtgctctc

SEQ ID NO: 104174 - RNA, 21 nt, synthetic construct
  source 1..21: mol_type = other RNA
tgtactggaagtgtaacatac

SEQ ID NO: 104175 - RNA, 21 nt, synthetic construct
  source 1..21: mol_type = other RNA
tgtactgtgtggcttctcaaa

SEQ ID NO: 104176 - RNA, 21 nt, synthetic construct
  source 1..21: mol_type = other RNA
tgtactgtttagcatctagca

SEQ ID NO: 104177 - RNA, 21 nt, synthetic construct
  source 1..21: mol_type = other RNA
tgtacttctaccttgaaaatg

SEQ ID NO: 104178 - RNA, 21 nt, synthetic construct
  source 1..21: mol_type = other RNA
tgtacttgacacaaaggactg

SEQ ID NO: 104179 - RNA, 21 nt, synthetic construct
  source 1..21: mol_type = other RNA
tgtagaaaatagggacggcct

SEQ ID NO: 104180 - RNA, 21 nt, synthetic construct
  source 1..21: mol_type = other RNA
tgtagaaatgtggagataaag

SEQ ID NO: 104181 - RNA, 21 nt, synthetic construct
  source 1..21: mol_type = other RNA
tgtagaaggatatgttttcta

SEQ ID NO: 104182 - RNA, 21 nt, synthetic construct
  source 1..21: mol_type = other RNA
tgtagaatatccaagcacaaa

SEQ ID NO: 104183 - RNA, 21 nt, synthetic construct
  source 1..21: mol_type = other RNA
tgtagaatgtttttccgtcta

SEQ ID NO: 104184 - RNA, 21 nt, synthetic construct
  source 1..21: mol_type = other RNA
tgtagaccctgttagtcccct

SEQ ID NO: 104185 - RNA, 21 nt, synthetic construct
  source 1..21: mol_type = other RNA
tgtagagaaaatgttatacag

SEQ ID NO: 104186 - RNA, 21 nt, synthetic construct
  source 1..21: mol_type = other RNA
tgtagagaaacaggattacaa

SEQ ID NO: 104187 - RNA, 21 nt, synthetic construct
  source 1..21: mol_type = other RNA
tgtagagacagaatcttactg

SEQ ID NO: 104188 - RNA, 21 nt, synthetic construct
  source 1..21: mol_type = other RNA
tgtagagcaagcaacaccaga

SEQ ID NO: 104189 - RNA, 21 nt, synthetic construct
  source 1..21: mol_type = other RNA
tgtagaggaggagggttagat

SEQ ID NO: 104190 - RNA, 21 nt, synthetic construct
  source 1..21: mol_type = other RNA
tgtagaggcagttgagttttc

SEQ ID NO: 104191 - RNA, 21 nt, synthetic construct
  source 1..21: mol_type = other RNA
tgtagagggaatttgttttac

SEQ ID NO: 104192 - RNA, 21 nt, synthetic construct
  source 1..21: mol_type = other RNA
tgtagaggtgaagttaagggc

SEQ ID NO: 104193 - RNA, 21 nt, synthetic construct
  source 1..21: mol_type = other RNA
tgtagatatgggagtccctgc

SEQ ID NO: 104194 - RNA, 21 nt, synthetic construct
  source 1..21: mol_type = other RNA
tgtagatattttctgtcattc

SEQ ID NO: 104195 - RNA, 21 nt, synthetic construct
  source 1..21: mol_type = other RNA
tgtagatcaagtatttcctat

SEQ ID NO: 104196 - RNA, 21 nt, synthetic construct
  source 1..21: mol_type = other RNA
tgtagatcctgaggaagctaa

SEQ ID NO: 104197 - RNA, 21 nt, synthetic construct
  source 1..21: mol_type = other RNA
tgtagattgggcttttcatat

SEQ ID NO: 104198 - RNA, 21 nt, synthetic construct
  source 1..21: mol_type = other RNA
tgtagattgttttaggtagtc

SEQ ID NO: 104199 - RNA, 21 nt, synthetic construct
  source 1..21: mol_type = other RNA
tgtagcagacactgggttctc

SEQ ID NO: 104200 - RNA, 21 nt, synthetic construct
  source 1..21: mol_type = other RNA
tgtagcattgaagtatagttt

SEQ ID NO: 104201 - RNA, 21 nt, synthetic construct
  source 1..21: mol_type = other RNA
tgtagccacaagccacatgtg

SEQ ID NO: 104202 - RNA, 21 nt, synthetic construct
  source 1..21: mol_type = other RNA
tgtagcgggaaaaaataatat

SEQ ID NO: 104203 - RNA, 21 nt, synthetic construct
  source 1..21: mol_type = other RNA
tgtagctaatatctttgggga

SEQ ID NO: 104204 - RNA, 21 nt, synthetic construct
  source 1..21: mol_type = other RNA
tgtagctatatcccaaattgg

SEQ ID NO: 104205 - RNA, 21 nt, synthetic construct
  source 1..21: mol_type = other RNA
tgtagctcaaagcatatgaat

SEQ ID NO: 104206 - RNA, 21 nt, synthetic construct
  source 1..21: mol_type = other RNA
tgtagctgggatggctgaaag

SEQ ID NO: 104207 - RNA, 21 nt, synthetic construct
  source 1..21: mol_type = other RNA
tgtagctgtggctcactcatt

SEQ ID NO: 104208 - RNA, 21 nt, synthetic construct
  source 1..21: mol_type = other RNA
tgtagcttcacgtgcattcat

SEQ ID NO: 104209 - RNA, 21 nt, synthetic construct
  source 1..21: mol_type = other RNA
tgtaggaaactttgcattcct

SEQ ID NO: 104210 - RNA, 21 nt, synthetic construct
  source 1..21: mol_type = other RNA
tgtaggaaagcctgtgacagt

SEQ ID NO: 104211 - RNA, 21 nt, synthetic construct
  source 1..21: mol_type = other RNA
tgtaggaaggaacacacacct

SEQ ID NO: 104212 - RNA, 21 nt, synthetic construct
  source 1..21: mol_type = other RNA
tgtaggcacattcaagcagaa

SEQ ID NO: 104213 - RNA, 21 nt, synthetic construct
  source 1..21: mol_type = other RNA
tgtaggccccgatgccatgtg

SEQ ID NO: 104214 - RNA, 21 nt, synthetic construct
  source 1..21: mol_type = other RNA
tgtagggaatagacaaagaca

SEQ ID NO: 104215 - RNA, 21 nt, synthetic construct
  source 1..21: mol_type = other RNA
tgtagggcaccgtgacagaac

SEQ ID NO: 104216 - RNA, 21 nt, synthetic construct
  source 1..21: mol_type = other RNA
tgtagggggaaaactccaagt

SEQ ID NO: 104217 - RNA, 21 nt, synthetic construct
  source 1..21: mol_type = other RNA
tgtagggtgactagtgtgaat

SEQ ID NO: 104218 - RNA, 21 nt, synthetic construct
  source 1..21: mol_type = other RNA
tgtagggtttggcagtttaag

SEQ ID NO: 104219 - RNA, 21 nt, synthetic construct
  source 1..21: mol_type = other RNA
tgtaggtgtctcatttaataa

SEQ ID NO: 104220 - RNA, 21 nt, synthetic construct
  source 1..21: mol_type = other RNA
tgtaggtgtctgatgtgtgtc

SEQ ID NO: 104221 - RNA, 21 nt, synthetic construct
  source 1..21: mol_type = other RNA
tgtagtcagacacactagctg

SEQ ID NO: 104222 - RNA, 21 nt, synthetic construct
  source 1..21: mol_type = other RNA
tgtagtcagtgaagatgctga

SEQ ID NO: 104223 - RNA, 21 nt, synthetic construct
  source 1..21: mol_type = other RNA
tgtagtgagccaaaatcgtgc

SEQ ID NO: 104224 - RNA, 21 nt, synthetic construct
  source 1..21: mol_type = other RNA
tgtagtgattcacttttgagt

SEQ ID NO: 104225 - RNA, 21 nt, synthetic construct
  source 1..21: mol_type = other RNA
tgtagtggtgtgtgactgtag

SEQ ID NO: 104226 - RNA, 21 nt, synthetic construct
  source 1..21: mol_type = other RNA
tgtagtgtcttaatcctattt

SEQ ID NO: 104227 - RNA, 21 nt, synthetic construct
  source 1..21: mol_type = other RNA
tgtagttacaactactcggga

SEQ ID NO: 104228 - RNA, 21 nt, synthetic construct
  source 1..21: mol_type = other RNA
tgtagttcagtttttctttct

SEQ ID NO: 104229 - RNA, 21 nt, synthetic construct
  source 1..21: mol_type = other RNA
tgtagttcatcagcataaata

SEQ ID NO: 104230 - RNA, 21 nt, synthetic construct
  source 1..21: mol_type = other RNA
tgtagttctggtgtcgtttat

SEQ ID NO: 104231 - RNA, 21 nt, synthetic construct
  source 1..21: mol_type = other RNA
tgtagtttccatggaggggcc

SEQ ID NO: 104232 - RNA, 21 nt, synthetic construct
  source 1..21: mol_type = other RNA
tgtagttttccctgtgtatgt

SEQ ID NO: 104233 - RNA, 21 nt, synthetic construct
  source 1..21: mol_type = other RNA
tgtagttttggtgtcattttt

SEQ ID NO: 104234 - RNA, 21 nt, synthetic construct
  source 1..21: mol_type = other RNA
tgtataaataaaatgtctggc

SEQ ID NO: 104235 - RNA, 21 nt, synthetic construct
  source 1..21: mol_type = other RNA
tgtataaattactgtctgtga

SEQ ID NO: 104236 - RNA, 21 nt, synthetic construct
  source 1..21: mol_type = other RNA
tgtataacattttctctacag

SEQ ID NO: 104237 - RNA, 21 nt, synthetic construct
  source 1..21: mol_type = other RNA
tgtataacccgttttttcctt

SEQ ID NO: 104238 - RNA, 21 nt, synthetic construct
  source 1..21: mol_type = other RNA
tgtatacccaggtgtgagatt

SEQ ID NO: 104239 - RNA, 21 nt, synthetic construct
  source 1..21: mol_type = other RNA
tgtatactgggtgtgatggcg

SEQ ID NO: 104240 - RNA, 21 nt, synthetic construct
  source 1..21: mol_type = other RNA
tgtatatacccttctgttaat

SEQ ID NO: 104241 - RNA, 21 nt, synthetic construct
  source 1..21: mol_type = other RNA
tgtatatctccttttaagagt

SEQ ID NO: 104242 - RNA, 21 nt, synthetic construct
  source 1..21: mol_type = other RNA
tgtatatgaaaagcttccccc

SEQ ID NO: 104243 - RNA, 21 nt, synthetic construct
  source 1..21: mol_type = other RNA
tgtatatggtttaaggtaagg

SEQ ID NO: 104244 - RNA, 21 nt, synthetic construct
  source 1..21: mol_type = other RNA
tgtatcagatgcttctagcca

SEQ ID NO: 104245 - RNA, 21 nt, synthetic construct
  source 1..21: mol_type = other RNA
tgtatccagtaatcttgctaa

SEQ ID NO: 104246 - RNA, 21 nt, synthetic construct
  source 1..21: mol_type = other RNA
tgtatcctgagacttaggcaa

SEQ ID NO: 104247 - RNA, 21 nt, synthetic construct
  source 1..21: mol_type = other RNA
tgtatcctgtttgagaagtct

SEQ ID NO: 104248 - RNA, 21 nt, synthetic construct
  source 1..21: mol_type = other RNA
tgtatctgtgatccctgatat

SEQ ID NO: 104249 - RNA, 21 nt, synthetic construct
  source 1..21: mol_type = other RNA
tgtatcttcacaaacaaatcc

SEQ ID NO: 104250 - RNA, 21 nt, synthetic construct
  source 1..21: mol_type = other RNA
tgtatcttttcagtccagata

SEQ ID NO: 104251 - RNA, 21 nt, synthetic construct
  source 1..21: mol_type = other RNA
tgtatgagaagactggaaaag

SEQ ID NO: 104252 - RNA, 21 nt, synthetic construct
  source 1..21: mol_type = other RNA
tgtatgatcaaagtgaaaggc

SEQ ID NO: 104253 - RNA, 21 nt, synthetic construct
  source 1..21: mol_type = other RNA
tgtatgatttctaggccctaa

SEQ ID NO: 104254 - RNA, 21 nt, synthetic construct
  source 1..21: mol_type = other RNA
tgtatgattttctaggaaact

SEQ ID NO: 104255 - RNA, 21 nt, synthetic construct
  source 1..21: mol_type = other RNA
tgtatgcagggaaatcattca

SEQ ID NO: 104256 - RNA, 21 nt, synthetic construct
  source 1..21: mol_type = other RNA
tgtatgccgctggtgaaaaaa

SEQ ID NO: 104257 - RNA, 21 nt, synthetic construct
  source 1..21: mol_type = other RNA
tgtatggagactagtacactg

SEQ ID NO: 104258 - RNA, 21 nt, synthetic construct
  source 1..21: mol_type = other RNA
tgtatggttcttaagatgata

SEQ ID NO: 104259 - RNA, 21 nt, synthetic construct
  source 1..21: mol_type = other RNA
tgtatgtggctcacattgtat

SEQ ID NO: 104260 - RNA, 21 nt, synthetic construct
  source 1..21: mol_type = other RNA
tgtatgtgtagtcagtgaaga

SEQ ID NO: 104261 - RNA, 21 nt, synthetic construct
  source 1..21: mol_type = other RNA
tgtatgtgttaaaccattctt

SEQ ID NO: 104262 - RNA, 21 nt, synthetic construct
  source 1..21: mol_type = other RNA
tgtatgttacacttccagtac

SEQ ID NO: 104263 - RNA, 21 nt, synthetic construct
  source 1..21: mol_type = other RNA
tgtatgtttctcattcttctc

SEQ ID NO: 104264 - RNA, 21 nt, synthetic construct
  source 1..21: mol_type = other RNA
tgtattaccagcttacagcag

SEQ ID NO: 104265 - RNA, 21 nt, synthetic construct
  source 1..21: mol_type = other RNA
tgtattaggatgtgtacccgt

SEQ ID NO: 104266 - RNA, 21 nt, synthetic construct
  source 1..21: mol_type = other RNA
tgtattattctaaacacacgg

SEQ ID NO: 104267 - RNA, 21 nt, synthetic construct
  source 1..21: mol_type = other RNA
tgtattatttctgtcatctga

SEQ ID NO: 104268 - RNA, 21 nt, synthetic construct
  source 1..21: mol_type = other RNA
tgtattcatccagtttaaagc

SEQ ID NO: 104269 - RNA, 21 nt, synthetic construct
  source 1..21: mol_type = other RNA
tgtattctgacctaaagtttt

SEQ ID NO: 104270 - RNA, 21 nt, synthetic construct
  source 1..21: mol_type = other RNA
tgtattgagtgtagctgtggc

SEQ ID NO: 104271 - RNA, 21 nt, synthetic construct
  source 1..21: mol_type = other RNA
tgtattgcaaactaagtggta

SEQ ID NO: 104272 - RNA, 21 nt, synthetic construct
  source 1..21: mol_type = other RNA
tgtattgtaccttgatttatg

SEQ ID NO: 104273 - RNA, 21 nt, synthetic construct
  source 1..21: mol_type = other RNA
tgtattgtaggaaagcctgtg

SEQ ID NO: 104274 - RNA, 21 nt, synthetic construct
  source 1..21: mol_type = other RNA
tgtatttagggagcatatata

SEQ ID NO: 104275 - RNA, 21 nt, synthetic construct
  source 1..21: mol_type = other RNA
tgtatttctgctttggtacca

SEQ ID NO: 104276 - RNA, 21 nt, synthetic construct
  source 1..21: mol_type = other RNA
tgtatttctgttagatggtgc

SEQ ID NO: 104277 - RNA, 21 nt, synthetic construct
  source 1..21: mol_type = other RNA
tgtattttacaccatgcaggt

SEQ ID NO: 104278 - RNA, 21 nt, synthetic construct
  source 1..21: mol_type = other RNA
tgtattttcctaaccactgtt

SEQ ID NO: 104279 - RNA, 21 nt, synthetic construct
  source 1..21: mol_type = other RNA
tgtatttttcacaaacacaca

SEQ ID NO: 104280 - RNA, 21 nt, synthetic construct
  source 1..21: mol_type = other RNA
tgtatttttgctcacacttac

SEQ ID NO: 104281 - RNA, 21 nt, synthetic construct
  source 1..21: mol_type = other RNA
tgtcaaaaagagaacacacaa

SEQ ID NO: 104282 - RNA, 21 nt, synthetic construct
  source 1..21: mol_type = other RNA
tgtcaaaaatgtgtctagtga

SEQ ID NO: 104283 - RNA, 21 nt, synthetic construct
  source 1..21: mol_type = other RNA
tgtcaacattaagggaaacag

SEQ ID NO: 104284 - RNA, 21 nt, synthetic construct
  source 1..21: mol_type = other RNA
tgtcaactgaggcagagtaga

SEQ ID NO: 104285 - RNA, 21 nt, synthetic construct
  source 1..21: mol_type = other RNA
tgtcaacttttagtaggtctc

SEQ ID NO: 104286 - RNA, 21 nt, synthetic construct
  source 1..21: mol_type = other RNA
tgtcaagaatgaagtcagaga

SEQ ID NO: 104287 - RNA, 21 nt, synthetic construct
  source 1..21: mol_type = other RNA
tgtcaagctatcagaatttta

SEQ ID NO: 104288 - RNA, 21 nt, synthetic construct
  source 1..21: mol_type = other RNA
tgtcaagctgtttgagctgaa

SEQ ID NO: 104289 - RNA, 21 nt, synthetic construct
  source 1..21: mol_type = other RNA
tgtcaaggtcatcctttccct

SEQ ID NO: 104290 - RNA, 21 nt, synthetic construct
  source 1..21: mol_type = other RNA
tgtcaagtgactccaagcaca

SEQ ID NO: 104291 - RNA, 21 nt, synthetic construct
  source 1..21: mol_type = other RNA
tgtcaagttctgatttcaaag

SEQ ID NO: 104292 - RNA, 21 nt, synthetic construct
  source 1..21: mol_type = other RNA
tgtcaataatttggatgaacg

SEQ ID NO: 104293 - RNA, 21 nt, synthetic construct
  source 1..21: mol_type = other RNA
tgtcaatggggaactttattt

SEQ ID NO: 104294 - RNA, 21 nt, synthetic construct
  source 1..21: mol_type = other RNA
tgtcaattttcccccaattaa

SEQ ID NO: 104295 - RNA, 21 nt, synthetic construct
  source 1..21: mol_type = other RNA
tgtcacaaaatgtggatgcat

SEQ ID NO: 104296 - RNA, 21 nt, synthetic construct
  source 1..21: mol_type = other RNA
tgtcacaagccagggtctgtc

SEQ ID NO: 104297 - RNA, 21 nt, synthetic construct
  source 1..21: mol_type = other RNA
tgtcacaattcacagaatata

SEQ ID NO: 104298 - RNA, 21 nt, synthetic construct
  source 1..21: mol_type = other RNA
tgtcacacggaaaacattatt

SEQ ID NO: 104299 - RNA, 21 nt, synthetic construct
  source 1..21: mol_type = other RNA
tgtcacaggctttcctacaat

SEQ ID NO: 104300 - RNA, 21 nt, synthetic construct
  source 1..21: mol_type = other RNA
tgtcacatagaagcgctcttc

SEQ ID NO: 104301 - RNA, 21 nt, synthetic construct
  source 1..21: mol_type = other RNA
tgtcacatagacctgaatgac

SEQ ID NO: 104302 - RNA, 21 nt, synthetic construct
  source 1..21: mol_type = other RNA
tgtcacatttgaaagaaagaa

SEQ ID NO: 104303 - RNA, 21 nt, synthetic construct
  source 1..21: mol_type = other RNA
tgtcacattttcttatctagg

SEQ ID NO: 104304 - RNA, 21 nt, synthetic construct
  source 1..21: mol_type = other RNA
tgtcaccaggctggaatgcag

SEQ ID NO: 104305 - RNA, 21 nt, synthetic construct
  source 1..21: mol_type = other RNA
tgtcacccacgtggagtgcaa

SEQ ID NO: 104306 - RNA, 21 nt, synthetic construct
  source 1..21: mol_type = other RNA
tgtcacccttgtaatcaagta

SEQ ID NO: 104307 - RNA, 21 nt, synthetic construct
  source 1..21: mol_type = other RNA
tgtcacggtgccctacatatg

SEQ ID NO: 104308 - RNA, 21 nt, synthetic construct
  source 1..21: mol_type = other RNA
tgtcactctctttaggaagct

SEQ ID NO: 104309 - RNA, 21 nt, synthetic construct
  source 1..21: mol_type = other RNA
tgtcactgacacaggctgaag

SEQ ID NO: 104310 - RNA, 21 nt, synthetic construct
  source 1..21: mol_type = other RNA
tgtcactggatagaagtgtat

SEQ ID NO: 104311 - RNA, 21 nt, synthetic construct
  source 1..21: mol_type = other RNA
tgtcactgtaagaataatgtc

SEQ ID NO: 104312 - RNA, 21 nt, synthetic construct
  source 1..21: mol_type = other RNA
tgtcactttcctattcacact

SEQ ID NO: 104313 - RNA, 21 nt, synthetic construct
  source 1..21: mol_type = other RNA
tgtcagaaaagatcagtaaaa

SEQ ID NO: 104314 - RNA, 21 nt, synthetic construct
  source 1..21: mol_type = other RNA
tgtcagaaacaccaacacaaa

SEQ ID NO: 104315 - RNA, 21 nt, synthetic construct
  source 1..21: mol_type = other RNA
tgtcagaaaccatcgttcaca

SEQ ID NO: 104316 - RNA, 21 nt, synthetic construct
  source 1..21: mol_type = other RNA
tgtcagaattagaaagctgga

SEQ ID NO: 104317 - RNA, 21 nt, synthetic construct
  source 1..21: mol_type = other RNA
tgtcagaattccatcagtggt

SEQ ID NO: 104318 - RNA, 21 nt, synthetic construct
  source 1..21: mol_type = other RNA
tgtcagactcattgcctatag

SEQ ID NO: 104319 - RNA, 21 nt, synthetic construct
  source 1..21: mol_type = other RNA
tgtcagagacacatactgaaa

SEQ ID NO: 104320 - RNA, 21 nt, synthetic construct
  source 1..21: mol_type = other RNA
tgtcagagatctgaaattgac

SEQ ID NO: 104321 - RNA, 21 nt, synthetic construct
  source 1..21: mol_type = other RNA
tgtcagatggtaaattggtcc

SEQ ID NO: 104322 - RNA, 21 nt, synthetic construct
  source 1..21: mol_type = other RNA
tgtcagcagttcagcctgcag

SEQ ID NO: 104323 - RNA, 21 nt, synthetic construct
  source 1..21: mol_type = other RNA
tgtcagccacaagacataagc

SEQ ID NO: 104324 - RNA, 21 nt, synthetic construct
  source 1..21: mol_type = other RNA
tgtcaggcaagggactgtcga

SEQ ID NO: 104325 - RNA, 21 nt, synthetic construct
  source 1..21: mol_type = other RNA
tgtcaggcatgctaactgcag

SEQ ID NO: 104326 - RNA, 21 nt, synthetic construct
  source 1..21: mol_type = other RNA
tgtcaggtgggcactgggagc

SEQ ID NO: 104327 - RNA, 21 nt, synthetic construct
  source 1..21: mol_type = other RNA
tgtcagtaattctgcagtgaa

SEQ ID NO: 104328 - RNA, 21 nt, synthetic construct
  source 1..21: mol_type = other RNA
tgtcagtcaacacactagcca

SEQ ID NO: 104329 - RNA, 21 nt, synthetic construct
  source 1..21: mol_type = other RNA
tgtcagtgacagttctgtgaa

SEQ ID NO: 104330 - RNA, 21 nt, synthetic construct
  source 1..21: mol_type = other RNA
tgtcagtgggactggagaaca

SEQ ID NO: 104331 - RNA, 21 nt, synthetic construct
  source 1..21: mol_type = other RNA
tgtcagtgtggttcatatttc

SEQ ID NO: 104332 - RNA, 21 nt, synthetic construct
  source 1..21: mol_type = other RNA
tgtcagtttctgatttatctt

SEQ ID NO: 104333 - RNA, 21 nt, synthetic construct
  source 1..21: mol_type = other RNA
tgtcataacagtattgtcttc

SEQ ID NO: 104334 - RNA, 21 nt, synthetic construct
  source 1..21: mol_type = other RNA
tgtcatcagcgtcctcactgt

SEQ ID NO: 104335 - RNA, 21 nt, synthetic construct
  source 1..21: mol_type = other RNA
tgtcatctgaatcaataagaa

SEQ ID NO: 104336 - RNA, 21 nt, synthetic construct
  source 1..21: mol_type = other RNA
tgtcatcttctctctctgctt

SEQ ID NO: 104337 - RNA, 21 nt, synthetic construct
  source 1..21: mol_type = other RNA
tgtcatgaatgaatgttgagt

SEQ ID NO: 104338 - RNA, 21 nt, synthetic construct
  source 1..21: mol_type = other RNA
tgtcatgggccgggcgtagtg

SEQ ID NO: 104339 - RNA, 21 nt, synthetic construct
  source 1..21: mol_type = other RNA
tgtcatggtgtgtctgcgcct

SEQ ID NO: 104340 - RNA, 21 nt, synthetic construct
  source 1..21: mol_type = other RNA
tgtcatgtatatgctgttttt

SEQ ID NO: 104341 - RNA, 21 nt, synthetic construct
  source 1..21: mol_type = other RNA
tgtcatgtcaaatttttcaca

SEQ ID NO: 104342 - RNA, 21 nt, synthetic construct
  source 1..21: mol_type = other RNA
tgtcatgttcccggattggaa

SEQ ID NO: 104343 - RNA, 21 nt, synthetic construct
  source 1..21: mol_type = other RNA
tgtcatgtttgaattttccat

SEQ ID NO: 104344 - RNA, 21 nt, synthetic construct
  source 1..21: mol_type = other RNA
tgtcattaccttatagatgac

SEQ ID NO: 104345 - RNA, 21 nt, synthetic construct
  source 1..21: mol_type = other RNA
tgtcattctgcagtttgtgtt

SEQ ID NO: 104346 - RNA, 21 nt, synthetic construct
  source 1..21: mol_type = other RNA
tgtcatttctgcttagtcttc

SEQ ID NO: 104347 - RNA, 21 nt, synthetic construct
  source 1..21: mol_type = other RNA
tgtcatttttgtattctgacc

SEQ ID NO: 104348 - RNA, 21 nt, synthetic construct
  source 1..21: mol_type = other RNA
tgtccaaacagtgaccacagt

SEQ ID NO: 104349 - RNA, 21 nt, synthetic construct
  source 1..21: mol_type = other RNA
tgtccaacaagggttggtgct

SEQ ID NO: 104350 - RNA, 21 nt, synthetic construct
  source 1..21: mol_type = other RNA
tgtccaacatggcaaaacccc

SEQ ID NO: 104351 - RNA, 21 nt, synthetic construct
  source 1..21: mol_type = other RNA
tgtccaagtatttctcatctg

SEQ ID NO: 104352 - RNA, 21 nt, synthetic construct
  source 1..21: mol_type = other RNA
tgtccacacaatggtcagagt

SEQ ID NO: 104353 - RNA, 21 nt, synthetic construct
  source 1..21: mol_type = other RNA
tgtccaccagacaaaaataga

SEQ ID NO: 104354 - RNA, 21 nt, synthetic construct
  source 1..21: mol_type = other RNA
tgtccactgtcagtgggactg

SEQ ID NO: 104355 - RNA, 21 nt, synthetic construct
  source 1..21: mol_type = other RNA
tgtccagaggaggaagagata

SEQ ID NO: 104356 - RNA, 21 nt, synthetic construct
  source 1..21: mol_type = other RNA
tgtccagcccccagttttgtt

SEQ ID NO: 104357 - RNA, 21 nt, synthetic construct
  source 1..21: mol_type = other RNA
tgtccaggccaacagggccac

SEQ ID NO: 104358 - RNA, 21 nt, synthetic construct
  source 1..21: mol_type = other RNA
tgtccaggcgcctgcattgca

SEQ ID NO: 104359 - RNA, 21 nt, synthetic construct
  source 1..21: mol_type = other RNA
tgtccatagttaatgtgtgaa

SEQ ID NO: 104360 - RNA, 21 nt, synthetic construct
  source 1..21: mol_type = other RNA
tgtccatcaggaaaaccagtt

SEQ ID NO: 104361 - RNA, 21 nt, synthetic construct
  source 1..21: mol_type = other RNA
tgtccatcgagagatgaatgg

SEQ ID NO: 104362 - RNA, 21 nt, synthetic construct
  source 1..21: mol_type = other RNA
tgtccatctcccatcactaga

SEQ ID NO: 104363 - RNA, 21 nt, synthetic construct
  source 1..21: mol_type = other RNA
tgtccatctggattatagtgg

SEQ ID NO: 104364 - RNA, 21 nt, synthetic construct
  source 1..21: mol_type = other RNA
tgtccatttccagtacttttt

SEQ ID NO: 104365 - RNA, 21 nt, synthetic construct
  source 1..21: mol_type = other RNA
tgtccatttccttaagcacag

SEQ ID NO: 104366 - RNA, 21 nt, synthetic construct
  source 1..21: mol_type = other RNA
tgtcccaaatgcaccaacacc

SEQ ID NO: 104367 - RNA, 21 nt, synthetic construct
  source 1..21: mol_type = other RNA
tgtcccatggtcaaatcaata

SEQ ID NO: 104368 - RNA, 21 nt, synthetic construct
  source 1..21: mol_type = other RNA
tgtccccaccgccttcctacc

SEQ ID NO: 104369 - RNA, 21 nt, synthetic construct
  source 1..21: mol_type = other RNA
tgtcccctggagttaattcca

SEQ ID NO: 104370 - RNA, 21 nt, synthetic construct
  source 1..21: mol_type = other RNA
tgtcccctggggcctcagcat

SEQ ID NO: 104371 - RNA, 21 nt, synthetic construct
  source 1..21: mol_type = other RNA
tgtcccctgtccaagtatttc

SEQ ID NO: 104372 - RNA, 21 nt, synthetic construct
  source 1..21: mol_type = other RNA
tgtcccggcatgcctctccca

SEQ ID NO: 104373 - RNA, 21 nt, synthetic construct
  source 1..21: mol_type = other RNA
tgtccgttgaagtctttggcc

SEQ ID NO: 104374 - RNA, 21 nt, synthetic construct
  source 1..21: mol_type = other RNA
tgtcctaaaattccttccttt

SEQ ID NO: 104375 - RNA, 21 nt, synthetic construct
  source 1..21: mol_type = other RNA
tgtcctcacctcacattcaca

SEQ ID NO: 104376 - RNA, 21 nt, synthetic construct
  source 1..21: mol_type = other RNA
tgtcctcaggctccaggtaga

SEQ ID NO: 104377 - RNA, 21 nt, synthetic construct
  source 1..21: mol_type = other RNA
tgtcctcgtaaaagctaatct

SEQ ID NO: 104378 - RNA, 21 nt, synthetic construct
  source 1..21: mol_type = other RNA
tgtcctctcttgttgaggatg

SEQ ID NO: 104379 - RNA, 21 nt, synthetic construct
  source 1..21: mol_type = other RNA
tgtcctgaatactattcctat

SEQ ID NO: 104380 - RNA, 21 nt, synthetic construct
  source 1..21: mol_type = other RNA
tgtcctgaatgatttccctgc

SEQ ID NO: 104381 - RNA, 21 nt, synthetic construct
  source 1..21: mol_type = other RNA
tgtcctgaattctaacattat

SEQ ID NO: 104382 - RNA, 21 nt, synthetic construct
  source 1..21: mol_type = other RNA
tgtcctgaattctaatgaact

SEQ ID NO: 104383 - RNA, 21 nt, synthetic construct
  source 1..21: mol_type = other RNA
tgtcctggcagatcaattgac

SEQ ID NO: 104384 - RNA, 21 nt, synthetic construct
  source 1..21: mol_type = other RNA
tgtcctgtcagtgtggttcat

SEQ ID NO: 104385 - RNA, 21 nt, synthetic construct
  source 1..21: mol_type = other RNA
tgtccttaatgccaccgaatt

SEQ ID NO: 104386 - RNA, 21 nt, synthetic construct
  source 1..21: mol_type = other RNA
tgtccttcattctgttaatgt

SEQ ID NO: 104387 - RNA, 21 nt, synthetic construct
  source 1..21: mol_type = other RNA
tgtccttctcgtgtgagctct

SEQ ID NO: 104388 - RNA, 21 nt, synthetic construct
  source 1..21: mol_type = other RNA
tgtccttctgagaaggcgaaa

SEQ ID NO: 104389 - RNA, 21 nt, synthetic construct
  source 1..21: mol_type = other RNA
tgtccttggattgctaaactg

SEQ ID NO: 104390 - RNA, 21 nt, synthetic construct
  source 1..21: mol_type = other RNA
tgtccttgtgttttatttggc

SEQ ID NO: 104391 - RNA, 21 nt, synthetic construct
  source 1..21: mol_type = other RNA
tgtcctttgatgcacaaaagt

SEQ ID NO: 104392 - RNA, 21 nt, synthetic construct
  source 1..21: mol_type = other RNA
tgtccttttcctgttccggga

SEQ ID NO: 104393 - RNA, 21 nt, synthetic construct
  source 1..21: mol_type = other RNA
tgtccttttgagtttggtgta

SEQ ID NO: 104394 - RNA, 21 nt, synthetic construct
  source 1..21: mol_type = other RNA
tgtcgaagcttaatttagatg

SEQ ID NO: 104395 - RNA, 21 nt, synthetic construct
  source 1..21: mol_type = other RNA
tgtcgagaaaaatggggatat

SEQ ID NO: 104396 - RNA, 21 nt, synthetic construct
  source 1..21: mol_type = other RNA
tgtcgcatgaaaacagctagg

SEQ ID NO: 104397 - RNA, 21 nt, synthetic construct
  source 1..21: mol_type = other RNA
tgtcgcccaggcggaatgcag

SEQ ID NO: 104398 - RNA, 21 nt, synthetic construct
  source 1..21: mol_type = other RNA
tgtcgctctcctgtgccaagt

SEQ ID NO: 104399 - RNA, 21 nt, synthetic construct
  source 1..21: mol_type = other RNA
tgtcggttttctagttagttt

SEQ ID NO: 104400 - RNA, 21 nt, synthetic construct
  source 1..21: mol_type = other RNA
tgtcgttgagtacctctggga

SEQ ID NO: 104401 - RNA, 21 nt, synthetic construct
  source 1..21: mol_type = other RNA
tgtcgtttatgcatttattag

SEQ ID NO: 104402 - RNA, 21 nt, synthetic construct
  source 1..21: mol_type = other RNA
tgtcgtttatttcttctccct

SEQ ID NO: 104403 - RNA, 21 nt, synthetic construct
  source 1..21: mol_type = other RNA
tgtctaatgggtacagggttt

SEQ ID NO: 104404 - RNA, 21 nt, synthetic construct
  source 1..21: mol_type = other RNA
tgtctacctgtctttcccatt

SEQ ID NO: 104405 - RNA, 21 nt, synthetic construct
  source 1..21: mol_type = other RNA
tgtctagtgaatgagaccaaa

SEQ ID NO: 104406 - RNA, 21 nt, synthetic construct
  source 1..21: mol_type = other RNA
tgtctataggcaatgagtctg

SEQ ID NO: 104407 - RNA, 21 nt, synthetic construct
  source 1..21: mol_type = other RNA
tgtctattccctacattgcct

SEQ ID NO: 104408 - RNA, 21 nt, synthetic construct
  source 1..21: mol_type = other RNA
tgtctcaacctttgcctcctg

SEQ ID NO: 104409 - RNA, 21 nt, synthetic construct
  source 1..21: mol_type = other RNA
tgtctcacctcaaggccaact

SEQ ID NO: 104410 - RNA, 21 nt, synthetic construct
  source 1..21: mol_type = other RNA
tgtctcagagtatatatgctc

SEQ ID NO: 104411 - RNA, 21 nt, synthetic construct
  source 1..21: mol_type = other RNA
tgtctcagatgtctccatttt

SEQ ID NO: 104412 - RNA, 21 nt, synthetic construct
  source 1..21: mol_type = other RNA
tgtctcagtcccaaatgggag

SEQ ID NO: 104413 - RNA, 21 nt, synthetic construct
  source 1..21: mol_type = other RNA
tgtctcataaagccggattcc

SEQ ID NO: 104414 - RNA, 21 nt, synthetic construct
  source 1..21: mol_type = other RNA
tgtctcattgtggatgagatt

SEQ ID NO: 104415 - RNA, 21 nt, synthetic construct
  source 1..21: mol_type = other RNA
tgtctccaacgctttttatgg

SEQ ID NO: 104416 - RNA, 21 nt, synthetic construct
  source 1..21: mol_type = other RNA
tgtctccataccccctggaaa

SEQ ID NO: 104417 - RNA, 21 nt, synthetic construct
  source 1..21: mol_type = other RNA
tgtctccatgtcctcacctca

SEQ ID NO: 104418 - RNA, 21 nt, synthetic construct
  source 1..21: mol_type = other RNA
tgtctccattttgccagctaa

SEQ ID NO: 104419 - RNA, 21 nt, synthetic construct
  source 1..21: mol_type = other RNA
tgtctcctctttcatatctga

SEQ ID NO: 104420 - RNA, 21 nt, synthetic construct
  source 1..21: mol_type = other RNA
tgtctcggatttaagagagga

SEQ ID NO: 104421 - RNA, 21 nt, synthetic construct
  source 1..21: mol_type = other RNA
tgtctctgacatgagagctaa

SEQ ID NO: 104422 - RNA, 21 nt, synthetic construct
  source 1..21: mol_type = other RNA
tgtctctgctctcaagtaatt

SEQ ID NO: 104423 - RNA, 21 nt, synthetic construct
  source 1..21: mol_type = other RNA
tgtctctggaaggctaagcat

SEQ ID NO: 104424 - RNA, 21 nt, synthetic construct
  source 1..21: mol_type = other RNA
tgtctgactacactgaaggga

SEQ ID NO: 104425 - RNA, 21 nt, synthetic construct
  source 1..21: mol_type = other RNA
tgtctgatgtgtgtctctgct

SEQ ID NO: 104426 - RNA, 21 nt, synthetic construct
  source 1..21: mol_type = other RNA
tgtctgcaagcagatctgctg

SEQ ID NO: 104427 - RNA, 21 nt, synthetic construct
  source 1..21: mol_type = other RNA
tgtctgcaggagccttgctgt

SEQ ID NO: 104428 - RNA, 21 nt, synthetic construct
  source 1..21: mol_type = other RNA
tgtctgcgccttaaagccaca

SEQ ID NO: 104429 - RNA, 21 nt, synthetic construct
  source 1..21: mol_type = other RNA
tgtctgctacaggggcattcc

SEQ ID NO: 104430 - RNA, 21 nt, synthetic construct
  source 1..21: mol_type = other RNA
tgtctggaacacacattagcc

SEQ ID NO: 104431 - RNA, 21 nt, synthetic construct
  source 1..21: mol_type = other RNA
tgtctggattgattccagttt

SEQ ID NO: 104432 - RNA, 21 nt, synthetic construct
  source 1..21: mol_type = other RNA
tgtctgggaagttatgtagct

SEQ ID NO: 104433 - RNA, 21 nt, synthetic construct
  source 1..21: mol_type = other RNA
tgtctgggataatgagtttaa

SEQ ID NO: 104434 - RNA, 21 nt, synthetic construct
  source 1..21: mol_type = other RNA
tgtctggtggacaaaaaacgc

SEQ ID NO: 104435 - RNA, 21 nt, synthetic construct
  source 1..21: mol_type = other RNA
tgtctggtttgctttggagtc

SEQ ID NO: 104436 - RNA, 21 nt, synthetic construct
  source 1..21: mol_type = other RNA
tgtctgtagttacaactactc

SEQ ID NO: 104437 - RNA, 21 nt, synthetic construct
  source 1..21: mol_type = other RNA
tgtctgtctgttcacatttcg

SEQ ID NO: 104438 - RNA, 21 nt, synthetic construct
  source 1..21: mol_type = other RNA
tgtctgtgaaaataataccta

SEQ ID NO: 104439 - RNA, 21 nt, synthetic construct
  source 1..21: mol_type = other RNA
tgtctgtgatgtagaggcagt

SEQ ID NO: 104440 - RNA, 21 nt, synthetic construct
  source 1..21: mol_type = other RNA
tgtctgtgtagttcatcagca

SEQ ID NO: 104441 - RNA, 21 nt, synthetic construct
  source 1..21: mol_type = other RNA
tgtctgttcacatttcgcctt

SEQ ID NO: 104442 - RNA, 21 nt, synthetic construct
  source 1..21: mol_type = other RNA
tgtcttaagaaggaaaagaac

SEQ ID NO: 104443 - RNA, 21 nt, synthetic construct
  source 1..21: mol_type = other RNA
tgtcttacataggcttagtac

SEQ ID NO: 104444 - RNA, 21 nt, synthetic construct
  source 1..21: mol_type = other RNA
tgtcttagtctgacttctctc

SEQ ID NO: 104445 - RNA, 21 nt, synthetic construct
  source 1..21: mol_type = other RNA
tgtcttattgttttgatttgc

SEQ ID NO: 104446 - RNA, 21 nt, synthetic construct
  source 1..21: mol_type = other RNA
tgtcttcagaggccctggtgc

SEQ ID NO: 104447 - RNA, 21 nt, synthetic construct
  source 1..21: mol_type = other RNA
tgtcttctaaccctcaaatgc

SEQ ID NO: 104448 - RNA, 21 nt, synthetic construct
  source 1..21: mol_type = other RNA
tgtcttctgtttttcttagtc

SEQ ID NO: 104449 - RNA, 21 nt, synthetic construct
  source 1..21: mol_type = other RNA
tgtcttcttggattttcttca

SEQ ID NO: 104450 - RNA, 21 nt, synthetic construct
  source 1..21: mol_type = other RNA
tgtcttgaatagcatcttagc

SEQ ID NO: 104451 - RNA, 21 nt, synthetic construct
  source 1..21: mol_type = other RNA
tgtcttgatgatagaatacca

SEQ ID NO: 104452 - RNA, 21 nt, synthetic construct
  source 1..21: mol_type = other RNA
tgtcttggacccatgcccatg

SEQ ID NO: 104453 - RNA, 21 nt, synthetic construct
  source 1..21: mol_type = other RNA
tgtcttggctattgtcagtaa

SEQ ID NO: 104454 - RNA, 21 nt, synthetic construct
  source 1..21: mol_type = other RNA
tgtcttggtgtgctcttttca

SEQ ID NO: 104455 - RNA, 21 nt, synthetic construct
  source 1..21: mol_type = other RNA
tgtcttgtgcatcctttatac

SEQ ID NO: 104456 - RNA, 21 nt, synthetic construct
  source 1..21: mol_type = other RNA
tgtcttgtggctgacatgtgt

SEQ ID NO: 104457 - RNA, 21 nt, synthetic construct
  source 1..21: mol_type = other RNA
tgtctttcagtatgtgtctct

SEQ ID NO: 104458 - RNA, 21 nt, synthetic construct
  source 1..21: mol_type = other RNA
tgtctttcccattaccaaaac

SEQ ID NO: 104459 - RNA, 21 nt, synthetic construct
  source 1..21: mol_type = other RNA
tgtctttctgtctgctttttt

SEQ ID NO: 104460 - RNA, 21 nt, synthetic construct
  source 1..21: mol_type = other RNA
tgtctttggcccatatccttt

SEQ ID NO: 104461 - RNA, 21 nt, synthetic construct
  source 1..21: mol_type = other RNA
tgtctttggctcttagaaaat

SEQ ID NO: 104462 - RNA, 21 nt, synthetic construct
  source 1..21: mol_type = other RNA
tgtctttgggaaggccctgat

SEQ ID NO: 104463 - RNA, 21 nt, synthetic construct
  source 1..21: mol_type = other RNA
tgtctttgtctattccctaca

SEQ ID NO: 104464 - RNA, 21 nt, synthetic construct
  source 1..21: mol_type = other RNA
tgtcttttaacttgctttgaa

SEQ ID NO: 104465 - RNA, 21 nt, synthetic construct
  source 1..21: mol_type = other RNA
tgtcttttctatctgaacatt

SEQ ID NO: 104466 - RNA, 21 nt, synthetic construct
  source 1..21: mol_type = other RNA
tgtcttttgaagaagttctta

SEQ ID NO: 104467 - RNA, 21 nt, synthetic construct
  source 1..21: mol_type = other RNA
tgtctttttacacttggagtt

SEQ ID NO: 104468 - RNA, 21 nt, synthetic construct
  source 1..21: mol_type = other RNA
tgtctttttgtgacttgttta

SEQ ID NO: 104469 - RNA, 21 nt, synthetic construct
  source 1..21: mol_type = other RNA
tgtgaaaaatttgacatgaca

SEQ ID NO: 104470 - RNA, 21 nt, synthetic construct
  source 1..21: mol_type = other RNA
tgtgaaaagaaaaaggttaag

SEQ ID NO: 104471 - RNA, 21 nt, synthetic construct
  source 1..21: mol_type = other RNA
tgtgaaaataatacctaacag

SEQ ID NO: 104472 - RNA, 21 nt, synthetic construct
  source 1..21: mol_type = other RNA
tgtgaaaatactaacgatcct

SEQ ID NO: 104473 - RNA, 21 nt, synthetic construct
  source 1..21: mol_type = other RNA
tgtgaaaatcattttggcaaa

SEQ ID NO: 104474 - RNA, 21 nt, synthetic construct
  source 1..21: mol_type = other RNA
tgtgaaaccaagcaagtaaaa

SEQ ID NO: 104475 - RNA, 21 nt, synthetic construct
  source 1..21: mol_type = other RNA
tgtgaaagtagaggactgcct

SEQ ID NO: 104476 - RNA, 21 nt, synthetic construct
  source 1..21: mol_type = other RNA
tgtgaaagtattaaaagcaca

SEQ ID NO: 104477 - RNA, 21 nt, synthetic construct
  source 1..21: mol_type = other RNA
tgtgaacagacagacatgcat

SEQ ID NO: 104478 - RNA, 21 nt, synthetic construct
  source 1..21: mol_type = other RNA
tgtgaaccacgcatctggtct

SEQ ID NO: 104479 - RNA, 21 nt, synthetic construct
  source 1..21: mol_type = other RNA
tgtgaaccttgaagtacttca

SEQ ID NO: 104480 - RNA, 21 nt, synthetic construct
  source 1..21: mol_type = other RNA
tgtgaacgatggtttctgaca

SEQ ID NO: 104481 - RNA, 21 nt, synthetic construct
  source 1..21: mol_type = other RNA
tgtgaagaaggaatgtgcact

SEQ ID NO: 104482 - RNA, 21 nt, synthetic construct
  source 1..21: mol_type = other RNA
tgtgaagattaagcacatctg

SEQ ID NO: 104483 - RNA, 21 nt, synthetic construct
  source 1..21: mol_type = other RNA
tgtgaagggaggtaggcttag

SEQ ID NO: 104484 - RNA, 21 nt, synthetic construct
  source 1..21: mol_type = other RNA
tgtgaagttgggcttaacatt

SEQ ID NO: 104485 - RNA, 21 nt, synthetic construct
  source 1..21: mol_type = other RNA
tgtgaataggaaagtgacaga

SEQ ID NO: 104486 - RNA, 21 nt, synthetic construct
  source 1..21: mol_type = other RNA
tgtgaatgaggagtgaatttt

SEQ ID NO: 104487 - RNA, 21 nt, synthetic construct
  source 1..21: mol_type = other RNA
tgtgaatggaaaattcaaaca

SEQ ID NO: 104488 - RNA, 21 nt, synthetic construct
  source 1..21: mol_type = other RNA
tgtgaatgtgaggtgaggaca

SEQ ID NO: 104489 - RNA, 21 nt, synthetic construct
  source 1..21: mol_type = other RNA
tgtgaattagatggcttagga

SEQ ID NO: 104490 - RNA, 21 nt, synthetic construct
  source 1..21: mol_type = other RNA
tgtgaattcactaatgcctca

SEQ ID NO: 104491 - RNA, 21 nt, synthetic construct
  source 1..21: mol_type = other RNA
tgtgaattgtgacagttctat

SEQ ID NO: 104492 - RNA, 21 nt, synthetic construct
  source 1..21: mol_type = other RNA
tgtgaatttggatttgagtaa

SEQ ID NO: 104493 - RNA, 21 nt, synthetic construct
  source 1..21: mol_type = other RNA
tgtgacaaaaagtaggggtaa

SEQ ID NO: 104494 - RNA, 21 nt, synthetic construct
  source 1..21: mol_type = other RNA
tgtgacaaacacttttcaaac

SEQ ID NO: 104495 - RNA, 21 nt, synthetic construct
  source 1..21: mol_type = other RNA
tgtgacaagttcagcatcttc

SEQ ID NO: 104496 - RNA, 21 nt, synthetic construct
  source 1..21: mol_type = other RNA
tgtgacagaacaaactcaagt

SEQ ID NO: 104497 - RNA, 21 nt, synthetic construct
  source 1..21: mol_type = other RNA
tgtgacagaatgcatctttta

SEQ ID NO: 104498 - RNA, 21 nt, synthetic construct
  source 1..21: mol_type = other RNA
tgtgacagtatgtcagactca

SEQ ID NO: 104499 - RNA, 21 nt, synthetic construct
  source 1..21: mol_type = other RNA
tgtgacagttctatttctttc

SEQ ID NO: 104500 - RNA, 21 nt, synthetic construct
  source 1..21: mol_type = other RNA
tgtgacatcaagggtggtgct

SEQ ID NO: 104501 - RNA, 21 nt, synthetic construct
  source 1..21: mol_type = other RNA
tgtgacattagtggtggtagt

SEQ ID NO: 104502 - RNA, 21 nt, synthetic construct
  source 1..21: mol_type = other RNA
tgtgaccacattcccaaatgt

SEQ ID NO: 104503 - RNA, 21 nt, synthetic construct
  source 1..21: mol_type = other RNA
tgtgaccagatcaaacgtgct

SEQ ID NO: 104504 - RNA, 21 nt, synthetic construct
  source 1..21: mol_type = other RNA
tgtgacctgtccttgtgtttt

SEQ ID NO: 104505 - RNA, 21 nt, synthetic construct
  source 1..21: mol_type = other RNA
tgtgactagaagaaatgttaa

SEQ ID NO: 104506 - RNA, 21 nt, synthetic construct
  source 1..21: mol_type = other RNA
tgtgactccaaagcaaaccag

SEQ ID NO: 104507 - RNA, 21 nt, synthetic construct
  source 1..21: mol_type = other RNA
tgtgactgtagtccctgctac

SEQ ID NO: 104508 - RNA, 21 nt, synthetic construct
  source 1..21: mol_type = other RNA
tgtgactgtgagggtaagaaa

SEQ ID NO: 104509 - RNA, 21 nt, synthetic construct
  source 1..21: mol_type = other RNA
tgtgacttcgtcaaggggaga

SEQ ID NO: 104510 - RNA, 21 nt, synthetic construct
  source 1..21: mol_type = other RNA
tgtgagattgatagatcatat

SEQ ID NO: 104511 - RNA, 21 nt, synthetic construct
  source 1..21: mol_type = other RNA
tgtgagcaaaaatacagctcc

SEQ ID NO: 104512 - RNA, 21 nt, synthetic construct
  source 1..21: mol_type = other RNA
tgtgagcatttagccccctga

SEQ ID NO: 104513 - RNA, 21 nt, synthetic construct
  source 1..21: mol_type = other RNA
tgtgagccacagtgcctggcc

SEQ ID NO: 104514 - RNA, 21 nt, synthetic construct
  source 1..21: mol_type = other RNA
tgtgagccacatacatagtat

SEQ ID NO: 104515 - RNA, 21 nt, synthetic construct
  source 1..21: mol_type = other RNA
tgtgagccaccgtgccgggct

SEQ ID NO: 104516 - RNA, 21 nt, synthetic construct
  source 1..21: mol_type = other RNA
tgtgagccactaaaacaggaa

SEQ ID NO: 104517 - RNA, 21 nt, synthetic construct
  source 1..21: mol_type = other RNA
tgtgagccactacgcccggcc

SEQ ID NO: 104518 - RNA, 21 nt, synthetic construct
  source 1..21: mol_type = other RNA
tgtgagctctagccttgtact

SEQ ID NO: 104519 - RNA, 21 nt, synthetic construct
  source 1..21: mol_type = other RNA
tgtgaggatctgttggtgctt

SEQ ID NO: 104520 - RNA, 21 nt, synthetic construct
  source 1..21: mol_type = other RNA
tgtgaggattcgattaaaata

SEQ ID NO: 104521 - RNA, 21 nt, synthetic construct
  source 1..21: mol_type = other RNA
tgtgagggagatatttcgcct

SEQ ID NO: 104522 - RNA, 21 nt, synthetic construct
  source 1..21: mol_type = other RNA
tgtgagggtaagaaaggagtt

SEQ ID NO: 104523 - RNA, 21 nt, synthetic construct
  source 1..21: mol_type = other RNA
tgtgaggtgaggacatggaga

SEQ ID NO: 104524 - RNA, 21 nt, synthetic construct
  source 1..21: mol_type = other RNA
tgtgagtccttccagtatgat

SEQ ID NO: 104525 - RNA, 21 nt, synthetic construct
  source 1..21: mol_type = other RNA
tgtgagttttaactcttgcat

SEQ ID NO: 104526 - RNA, 21 nt, synthetic construct
  source 1..21: mol_type = other RNA
tgtgataactgatatgaggga

SEQ ID NO: 104527 - RNA, 21 nt, synthetic construct
  source 1..21: mol_type = other RNA
tgtgatacctagtacgtaacc

SEQ ID NO: 104528 - RNA, 21 nt, synthetic construct
  source 1..21: mol_type = other RNA
tgtgatatgccacattttttg

SEQ ID NO: 104529 - RNA, 21 nt, synthetic construct
  source 1..21: mol_type = other RNA
tgtgatattggcataaagaca

SEQ ID NO: 104530 - RNA, 21 nt, synthetic construct
  source 1..21: mol_type = other RNA
tgtgatcagaagagcactatg

SEQ ID NO: 104531 - RNA, 21 nt, synthetic construct
  source 1..21: mol_type = other RNA
tgtgatcaggaaagatgaagt

SEQ ID NO: 104532 - RNA, 21 nt, synthetic construct
  source 1..21: mol_type = other RNA
tgtgatccctgatatgtcgca

SEQ ID NO: 104533 - RNA, 21 nt, synthetic construct
  source 1..21: mol_type = other RNA
tgtgatctatgcatactgcag

SEQ ID NO: 104534 - RNA, 21 nt, synthetic construct
  source 1..21: mol_type = other RNA
tgtgatctctgctcaccgcaa

SEQ ID NO: 104535 - RNA, 21 nt, synthetic construct
  source 1..21: mol_type = other RNA
tgtgatgactgtaagctgaac

SEQ ID NO: 104536 - RNA, 21 nt, synthetic construct
  source 1..21: mol_type = other RNA
tgtgatgattttagaaggtaa

SEQ ID NO: 104537 - RNA, 21 nt, synthetic construct
  source 1..21: mol_type = other RNA
tgtgatggcatcattcataaa

SEQ ID NO: 104538 - RNA, 21 nt, synthetic construct
  source 1..21: mol_type = other RNA
tgtgatggcgcatgcctgtgg

SEQ ID NO: 104539 - RNA, 21 nt, synthetic construct
  source 1..21: mol_type = other RNA
tgtgatgggggtaagattgtg

SEQ ID NO: 104540 - RNA, 21 nt, synthetic construct
  source 1..21: mol_type = other RNA
tgtgatgtagaggcagttgag

SEQ ID NO: 104541 - RNA, 21 nt, synthetic construct
  source 1..21: mol_type = other RNA
tgtgatgtctcagatgtctcc

SEQ ID NO: 104542 - RNA, 21 nt, synthetic construct
  source 1..21: mol_type = other RNA
tgtgattacaattcctttcta

SEQ ID NO: 104543 - RNA, 21 nt, synthetic construct
  source 1..21: mol_type = other RNA
tgtgattaccggcatccgcca

SEQ ID NO: 104544 - RNA, 21 nt, synthetic construct
  source 1..21: mol_type = other RNA
tgtgattatcagggatattgg

SEQ ID NO: 104545 - RNA, 21 nt, synthetic construct
  source 1..21: mol_type = other RNA
tgtgattgcaggtgtgggcca

SEQ ID NO: 104546 - RNA, 21 nt, synthetic construct
  source 1..21: mol_type = other RNA
tgtgatttatgtggcatttaa

SEQ ID NO: 104547 - RNA, 21 nt, synthetic construct
  source 1..21: mol_type = other RNA
tgtgatttccagtgtttggtt

SEQ ID NO: 104548 - RNA, 21 nt, synthetic construct
  source 1..21: mol_type = other RNA
tgtgcaaaggattagaaagta

SEQ ID NO: 104549 - RNA, 21 nt, synthetic construct
  source 1..21: mol_type = other RNA
tgtgcaacataaatagggtgc

SEQ ID NO: 104550 - RNA, 21 nt, synthetic construct
  source 1..21: mol_type = other RNA
tgtgcaaccatccccgctgtc

SEQ ID NO: 104551 - RNA, 21 nt, synthetic construct
  source 1..21: mol_type = other RNA
tgtgcaaggagagaaaaacaa

SEQ ID NO: 104552 - RNA, 21 nt, synthetic construct
  source 1..21: mol_type = other RNA
tgtgcacaacacatgcacact

SEQ ID NO: 104553 - RNA, 21 nt, synthetic construct
  source 1..21: mol_type = other RNA
tgtgcacacatccacgcgtaa

SEQ ID NO: 104554 - RNA, 21 nt, synthetic construct
  source 1..21: mol_type = other RNA
tgtgcacatgttccctagaac

SEQ ID NO: 104555 - RNA, 21 nt, synthetic construct
  source 1..21: mol_type = other RNA
tgtgcacctaataaaatgttt

SEQ ID NO: 104556 - RNA, 21 nt, synthetic construct
  source 1..21: mol_type = other RNA
tgtgcacctccagtgtcctga

SEQ ID NO: 104557 - RNA, 21 nt, synthetic construct
  source 1..21: mol_type = other RNA
tgtgcacctcgggttcaagcc

SEQ ID NO: 104558 - RNA, 21 nt, synthetic construct
  source 1..21: mol_type = other RNA
tgtgcacgtttgctttggagt

SEQ ID NO: 104559 - RNA, 21 nt, synthetic construct
  source 1..21: mol_type = other RNA
tgtgcactcttttaaacccat

SEQ ID NO: 104560 - RNA, 21 nt, synthetic construct
  source 1..21: mol_type = other RNA
tgtgcacttaaaatttagatc

SEQ ID NO: 104561 - RNA, 21 nt, synthetic construct
  source 1..21: mol_type = other RNA
tgtgcaggaaacttccagaaa

SEQ ID NO: 104562 - RNA, 21 nt, synthetic construct
  source 1..21: mol_type = other RNA
tgtgcagtctaaccattaaca

SEQ ID NO: 104563 - RNA, 21 nt, synthetic construct
  source 1..21: mol_type = other RNA
tgtgcagtggatgactaggct

SEQ ID NO: 104564 - RNA, 21 nt, synthetic construct
  source 1..21: mol_type = other RNA
tgtgcatactgtgatgatttt

SEQ ID NO: 104565 - RNA, 21 nt, synthetic construct
  source 1..21: mol_type = other RNA
tgtgcatatataccacatttt

SEQ ID NO: 104566 - RNA, 21 nt, synthetic construct
  source 1..21: mol_type = other RNA
tgtgcatcaaaggacactatt

SEQ ID NO: 104567 - RNA, 21 nt, synthetic construct
  source 1..21: mol_type = other RNA
tgtgcatcagaattccattcc

SEQ ID NO: 104568 - RNA, 21 nt, synthetic construct
  source 1..21: mol_type = other RNA
tgtgcatcctttatacctttt

SEQ ID NO: 104569 - RNA, 21 nt, synthetic construct
  source 1..21: mol_type = other RNA
tgtgcatgaccctgctatgca

SEQ ID NO: 104570 - RNA, 21 nt, synthetic construct
  source 1..21: mol_type = other RNA
tgtgcatgcatgtctgtctgt

SEQ ID NO: 104571 - RNA, 21 nt, synthetic construct
  source 1..21: mol_type = other RNA
tgtgcatgctcccatttggga

SEQ ID NO: 104572 - RNA, 21 nt, synthetic construct
  source 1..21: mol_type = other RNA
tgtgcatgtgcaggaaacttc

SEQ ID NO: 104573 - RNA, 21 nt, synthetic construct
  source 1..21: mol_type = other RNA
tgtgcatgtgttgtgcacaca

SEQ ID NO: 104574 - RNA, 21 nt, synthetic construct
  source 1..21: mol_type = other RNA
tgtgccaactctggcaggtca

SEQ ID NO: 104575 - RNA, 21 nt, synthetic construct
  source 1..21: mol_type = other RNA
tgtgccaagcaacttgatcag

SEQ ID NO: 104576 - RNA, 21 nt, synthetic construct
  source 1..21: mol_type = other RNA
tgtgccaagtccgtgcatgcc

SEQ ID NO: 104577 - RNA, 21 nt, synthetic construct
  source 1..21: mol_type = other RNA
tgtgccagtgaactccagtct

SEQ ID NO: 104578 - RNA, 21 nt, synthetic construct
  source 1..21: mol_type = other RNA
tgtgccagtgcaaacctcctg

SEQ ID NO: 104579 - RNA, 21 nt, synthetic construct
  source 1..21: mol_type = other RNA
tgtgccatctccttaatccag

SEQ ID NO: 104580 - RNA, 21 nt, synthetic construct
  source 1..21: mol_type = other RNA
tgtgcccaaggaaggcagggt

SEQ ID NO: 104581 - RNA, 21 nt, synthetic construct
  source 1..21: mol_type = other RNA
tgtgcccaggctgacttagag

SEQ ID NO: 104582 - RNA, 21 nt, synthetic construct
  source 1..21: mol_type = other RNA
tgtgccgaggcagagagagta

SEQ ID NO: 104583 - RNA, 21 nt, synthetic construct
  source 1..21: mol_type = other RNA
tgtgcctacatagtccacttt

SEQ ID NO: 104584 - RNA, 21 nt, synthetic construct
  source 1..21: mol_type = other RNA
tgtgccttgatccattacatc

SEQ ID NO: 104585 - RNA, 21 nt, synthetic construct
  source 1..21: mol_type = other RNA
tgtgcgtgaatctgttcctgg

SEQ ID NO: 104586 - RNA, 21 nt, synthetic construct
  source 1..21: mol_type = other RNA
tgtgctacctcaaattgtgtg

SEQ ID NO: 104587 - RNA, 21 nt, synthetic construct
  source 1..21: mol_type = other RNA
tgtgctagatgctaaacagta

SEQ ID NO: 104588 - RNA, 21 nt, synthetic construct
  source 1..21: mol_type = other RNA
tgtgctagccttcttggagta

SEQ ID NO: 104589 - RNA, 21 nt, synthetic construct
  source 1..21: mol_type = other RNA
tgtgctcagtggttctgcgtg

SEQ ID NO: 104590 - RNA, 21 nt, synthetic construct
  source 1..21: mol_type = other RNA
tgtgctctgtatttaatcttt

SEQ ID NO: 104591 - RNA, 21 nt, synthetic construct
  source 1..21: mol_type = other RNA
tgtgctcttttcatcactcac

SEQ ID NO: 104592 - RNA, 21 nt, synthetic construct
  source 1..21: mol_type = other RNA
tgtgctgaaaccccgcatact

SEQ ID NO: 104593 - RNA, 21 nt, synthetic construct
  source 1..21: mol_type = other RNA
tgtgctgactagtacgtgcag

SEQ ID NO: 104594 - RNA, 21 nt, synthetic construct
  source 1..21: mol_type = other RNA
tgtgctgagatggtcagtact

SEQ ID NO: 104595 - RNA, 21 nt, synthetic construct
  source 1..21: mol_type = other RNA
tgtgctgtccatttccttaag

SEQ ID NO: 104596 - RNA, 21 nt, synthetic construct
  source 1..21: mol_type = other RNA
tgtgcttaaggaaatggacag

SEQ ID NO: 104597 - RNA, 21 nt, synthetic construct
  source 1..21: mol_type = other RNA
tgtgcttaatcttcacactta

SEQ ID NO: 104598 - RNA, 21 nt, synthetic construct
  source 1..21: mol_type = other RNA
tgtgcttacacacacgtttat

SEQ ID NO: 104599 - RNA, 21 nt, synthetic construct
  source 1..21: mol_type = other RNA
tgtgcttccacagctatcagg

SEQ ID NO: 104600 - RNA, 21 nt, synthetic construct
  source 1..21: mol_type = other RNA
tgtgcttcctaaacctgctac

SEQ ID NO: 104601 - RNA, 21 nt, synthetic construct
  source 1..21: mol_type = other RNA
tgtgcttcgaggtcgcaccct

SEQ ID NO: 104602 - RNA, 21 nt, synthetic construct
  source 1..21: mol_type = other RNA
tgtgcttctgataggaatatc

SEQ ID NO: 104603 - RNA, 21 nt, synthetic construct
  source 1..21: mol_type = other RNA
tgtgcttggagtcacttgaca

SEQ ID NO: 104604 - RNA, 21 nt, synthetic construct
  source 1..21: mol_type = other RNA
tgtgcttggatattctacaga

SEQ ID NO: 104605 - RNA, 21 nt, synthetic construct
  source 1..21: mol_type = other RNA
tgtgcttgggctcccttccag

SEQ ID NO: 104606 - RNA, 21 nt, synthetic construct
  source 1..21: mol_type = other RNA
tgtgcttgtctctctctttct

SEQ ID NO: 104607 - RNA, 21 nt, synthetic construct
  source 1..21: mol_type = other RNA
tgtgcttgtgcttttaatact

SEQ ID NO: 104608 - RNA, 21 nt, synthetic construct
  source 1..21: mol_type = other RNA
tgtgctttctcaacactgtgt

SEQ ID NO: 104609 - RNA, 21 nt, synthetic construct
  source 1..21: mol_type = other RNA
tgtgcttttaatactttcaca

SEQ ID NO: 104610 - RNA, 21 nt, synthetic construct
  source 1..21: mol_type = other RNA
tgtgcttttctcgtgcatgtc

SEQ ID NO: 104611 - RNA, 21 nt, synthetic construct
  source 1..21: mol_type = other RNA
tgtggaaaaatataggaacat

SEQ ID NO: 104612 - RNA, 21 nt, synthetic construct
  source 1..21: mol_type = other RNA
tgtggaaaatgtatgattttc

SEQ ID NO: 104613 - RNA, 21 nt, synthetic construct
  source 1..21: mol_type = other RNA
tgtggaacataatctttggtg

SEQ ID NO: 104614 - RNA, 21 nt, synthetic construct
  source 1..21: mol_type = other RNA
tgtggaagcacagtctctgca

SEQ ID NO: 104615 - RNA, 21 nt, synthetic construct
  source 1..21: mol_type = other RNA
tgtggaagcagaactaagacc

SEQ ID NO: 104616 - RNA, 21 nt, synthetic construct
  source 1..21: mol_type = other RNA
tgtggaattaactccagggga

SEQ ID NO: 104617 - RNA, 21 nt, synthetic construct
  source 1..21: mol_type = other RNA
tgtggacacactgaaacaatc

SEQ ID NO: 104618 - RNA, 21 nt, synthetic construct
  source 1..21: mol_type = other RNA
tgtggaccatgttttaggagt

SEQ ID NO: 104619 - RNA, 21 nt, synthetic construct
  source 1..21: mol_type = other RNA
tgtggactttaggctgttcaa

SEQ ID NO: 104620 - RNA, 21 nt, synthetic construct
  source 1..21: mol_type = other RNA
tgtggagataaagagcaggtg

SEQ ID NO: 104621 - RNA, 21 nt, synthetic construct
  source 1..21: mol_type = other RNA
tgtggagatggggacttgctc

SEQ ID NO: 104622 - RNA, 21 nt, synthetic construct
  source 1..21: mol_type = other RNA
tgtggaggcagtaccattccc

SEQ ID NO: 104623 - RNA, 21 nt, synthetic construct
  source 1..21: mol_type = other RNA
tgtggagtcctgtcagtttct

SEQ ID NO: 104624 - RNA, 21 nt, synthetic construct
  source 1..21: mol_type = other RNA
tgtggagtggaggggcaggaa

SEQ ID NO: 104625 - RNA, 21 nt, synthetic construct
  source 1..21: mol_type = other RNA
tgtggagtggggcacctaaaa

SEQ ID NO: 104626 - RNA, 21 nt, synthetic construct
  source 1..21: mol_type = other RNA
tgtggagttggtgcaaggata

SEQ ID NO: 104627 - RNA, 21 nt, synthetic construct
  source 1..21: mol_type = other RNA
tgtggatagtgctttttactt

SEQ ID NO: 104628 - RNA, 21 nt, synthetic construct
  source 1..21: mol_type = other RNA
tgtggatgagattaatgtagg

SEQ ID NO: 104629 - RNA, 21 nt, synthetic construct
  source 1..21: mol_type = other RNA
tgtggatgcatgaggcatatt

SEQ ID NO: 104630 - RNA, 21 nt, synthetic construct
  source 1..21: mol_type = other RNA
tgtggatgtccttaatgccac

SEQ ID NO: 104631 - RNA, 21 nt, synthetic construct
  source 1..21: mol_type = other RNA
tgtggatgttggtgagaaccc

SEQ ID NO: 104632 - RNA, 21 nt, synthetic construct
  source 1..21: mol_type = other RNA
tgtggcaaatttatgtgaaaa

SEQ ID NO: 104633 - RNA, 21 nt, synthetic construct
  source 1..21: mol_type = other RNA
tgtggcagaatttacattttt

SEQ ID NO: 104634 - RNA, 21 nt, synthetic construct
  source 1..21: mol_type = other RNA
tgtggcaggggctgcatcatg

SEQ ID NO: 104635 - RNA, 21 nt, synthetic construct
  source 1..21: mol_type = other RNA
tgtggcatctttgttacagca

SEQ ID NO: 104636 - RNA, 21 nt, synthetic construct
  source 1..21: mol_type = other RNA
tgtggcatgtctgtagttaca

SEQ ID NO: 104637 - RNA, 21 nt, synthetic construct
  source 1..21: mol_type = other RNA
tgtggcatttcttacacatta

SEQ ID NO: 104638 - RNA, 21 nt, synthetic construct
  source 1..21: mol_type = other RNA
tgtggccaggaggaggagggt

SEQ ID NO: 104639 - RNA, 21 nt, synthetic construct
  source 1..21: mol_type = other RNA
tgtggccgagggagacggcga

SEQ ID NO: 104640 - RNA, 21 nt, synthetic construct
  source 1..21: mol_type = other RNA
tgtggcctcttcccttgtgca

SEQ ID NO: 104641 - RNA, 21 nt, synthetic construct
  source 1..21: mol_type = other RNA
tgtggctaacaatcaaattta

SEQ ID NO: 104642 - RNA, 21 nt, synthetic construct
  source 1..21: mol_type = other RNA
tgtggctacaccctgggaaag

SEQ ID NO: 104643 - RNA, 21 nt, synthetic construct
  source 1..21: mol_type = other RNA
tgtggctcacattgtatttct

SEQ ID NO: 104644 - RNA, 21 nt, synthetic construct
  source 1..21: mol_type = other RNA
tgtggctcactcatttccgtt

SEQ ID NO: 104645 - RNA, 21 nt, synthetic construct
  source 1..21: mol_type = other RNA
tgtggctgacatgtgtaaaac

SEQ ID NO: 104646 - RNA, 21 nt, synthetic construct
  source 1..21: mol_type = other RNA
tgtggcttctcaaactgtgtg

SEQ ID NO: 104647 - RNA, 21 nt, synthetic construct
  source 1..21: mol_type = other RNA
tgtggcttgcaaggcccacca

SEQ ID NO: 104648 - RNA, 21 nt, synthetic construct
  source 1..21: mol_type = other RNA
tgtggcttgggtgacctcatg

SEQ ID NO: 104649 - RNA, 21 nt, synthetic construct
  source 1..21: mol_type = other RNA
tgtggcttgtggctacaccct

SEQ ID NO: 104650 - RNA, 21 nt, synthetic construct
  source 1..21: mol_type = other RNA
tgtggctttaaggcgcagaca

SEQ ID NO: 104651 - RNA, 21 nt, synthetic construct
  source 1..21: mol_type = other RNA
tgtgggaattcagtcaccaaa

SEQ ID NO: 104652 - RNA, 21 nt, synthetic construct
  source 1..21: mol_type = other RNA
tgtgggccaccaagccctgcc

SEQ ID NO: 104653 - RNA, 21 nt, synthetic construct
  source 1..21: mol_type = other RNA
tgtggggaatgctcataatta

SEQ ID NO: 104654 - RNA, 21 nt, synthetic construct
  source 1..21: mol_type = other RNA
tgtggggactttgtggcctct

SEQ ID NO: 104655 - RNA, 21 nt, synthetic construct
  source 1..21: mol_type = other RNA
tgtgggtattttgttgttgtt

SEQ ID NO: 104656 - RNA, 21 nt, synthetic construct
  source 1..21: mol_type = other RNA
tgtgggttaaaagttagctgg

SEQ ID NO: 104657 - RNA, 21 nt, synthetic construct
  source 1..21: mol_type = other RNA
tgtggtcacactttttgtgag

SEQ ID NO: 104658 - RNA, 21 nt, synthetic construct
  source 1..21: mol_type = other RNA
tgtggtcactgtttggacagt

SEQ ID NO: 104659 - RNA, 21 nt, synthetic construct
  source 1..21: mol_type = other RNA
tgtggtccctgctactcagga

SEQ ID NO: 104660 - RNA, 21 nt, synthetic construct
  source 1..21: mol_type = other RNA
tgtggtctcagctcctcagaa

SEQ ID NO: 104661 - RNA, 21 nt, synthetic construct
  source 1..21: mol_type = other RNA
tgtggtctcttcgagggggct

SEQ ID NO: 104662 - RNA, 21 nt, synthetic construct
  source 1..21: mol_type = other RNA
tgtggtcttaagagactctca

SEQ ID NO: 104663 - RNA, 21 nt, synthetic construct
  source 1..21: mol_type = other RNA
tgtggtcttgtctcaaccttt

SEQ ID NO: 104664 - RNA, 21 nt, synthetic construct
  source 1..21: mol_type = other RNA
tgtggtgctgcacgtctgtgg

SEQ ID NO: 104665 - RNA, 21 nt, synthetic construct
  source 1..21: mol_type = other RNA
tgtggtggtatgcactgtact

SEQ ID NO: 104666 - RNA, 21 nt, synthetic construct
  source 1..21: mol_type = other RNA
tgtggtggtctcaccctcagg

SEQ ID NO: 104667 - RNA, 21 nt, synthetic construct
  source 1..21: mol_type = other RNA
tgtggtgtggcatgtctgtag

SEQ ID NO: 104668 - RNA, 21 nt, synthetic construct
  source 1..21: mol_type = other RNA
tgtggttattgagtctgtagg

SEQ ID NO: 104669 - RNA, 21 nt, synthetic construct
  source 1..21: mol_type = other RNA
tgtggttcatatttccctttt

SEQ ID NO: 104670 - RNA, 21 nt, synthetic construct
  source 1..21: mol_type = other RNA
tgtggtttcttgaatctctct

SEQ ID NO: 104671 - RNA, 21 nt, synthetic construct
  source 1..21: mol_type = other RNA
tgtggtttgccttttcactct

SEQ ID NO: 104672 - RNA, 21 nt, synthetic construct
  source 1..21: mol_type = other RNA
tgtggttttaacctcttgaag

SEQ ID NO: 104673 - RNA, 21 nt, synthetic construct
  source 1..21: mol_type = other RNA
tgtggtttttggttcacttga

SEQ ID NO: 104674 - RNA, 21 nt, synthetic construct
  source 1..21: mol_type = other RNA
tgtgtaaaacatctggaagga

SEQ ID NO: 104675 - RNA, 21 nt, synthetic construct
  source 1..21: mol_type = other RNA
tgtgtaaacactgttctgcgt

SEQ ID NO: 104676 - RNA, 21 nt, synthetic construct
  source 1..21: mol_type = other RNA
tgtgtaactaccactgaggtc

SEQ ID NO: 104677 - RNA, 21 nt, synthetic construct
  source 1..21: mol_type = other RNA
tgtgtaagaaatgccacattt

SEQ ID NO: 104678 - RNA, 21 nt, synthetic construct
  source 1..21: mol_type = other RNA
tgtgtaagcacacatgaacct

SEQ ID NO: 104679 - RNA, 21 nt, synthetic construct
  source 1..21: mol_type = other RNA
tgtgtaatactgtagaatgtt

SEQ ID NO: 104680 - RNA, 21 nt, synthetic construct
  source 1..21: mol_type = other RNA
tgtgtaattgtaccttggaga

SEQ ID NO: 104681 - RNA, 21 nt, synthetic construct
  source 1..21: mol_type = other RNA
tgtgtacaatggggctttact

SEQ ID NO: 104682 - RNA, 21 nt, synthetic construct
  source 1..21: mol_type = other RNA
tgtgtaccaaaagtcctgttc

SEQ ID NO: 104683 - RNA, 21 nt, synthetic construct
  source 1..21: mol_type = other RNA
tgtgtacccgtgtgttttgtt

SEQ ID NO: 104684 - RNA, 21 nt, synthetic construct
  source 1..21: mol_type = other RNA
tgtgtagaaatgtggagataa

SEQ ID NO: 104685 - RNA, 21 nt, synthetic construct
  source 1..21: mol_type = other RNA
tgtgtagaggtgaagttaagg

SEQ ID NO: 104686 - RNA, 21 nt, synthetic construct
  source 1..21: mol_type = other RNA
tgtgtagcgggaaaaaataat

SEQ ID NO: 104687 - RNA, 21 nt, synthetic construct
  source 1..21: mol_type = other RNA
tgtgtaggaaggaacacacac

SEQ ID NO: 104688 - RNA, 21 nt, synthetic construct
  source 1..21: mol_type = other RNA
tgtgtagtcagtgaagatgct

SEQ ID NO: 104689 - RNA, 21 nt, synthetic construct
  source 1..21: mol_type = other RNA
tgtgtagttcatcagcataaa

SEQ ID NO: 104690 - RNA, 21 nt, synthetic construct
  source 1..21: mol_type = other RNA
tgtgtagttctggtgtcgttt

SEQ ID NO: 104691 - RNA, 21 nt, synthetic construct
  source 1..21: mol_type = other RNA
tgtgtataacccgttttttcc

SEQ ID NO: 104692 - RNA, 21 nt, synthetic construct
  source 1..21: mol_type = other RNA
tgtgtatatggtaaaatgtac

SEQ ID NO: 104693 - RNA, 21 nt, synthetic construct
  source 1..21: mol_type = other RNA
tgtgtatgatcaaagtgaaag

SEQ ID NO: 104694 - RNA, 21 nt, synthetic construct
  source 1..21: mol_type = other RNA
tgtgtatgtgtagtcagtgaa

SEQ ID NO: 104695 - RNA, 21 nt, synthetic construct
  source 1..21: mol_type = other RNA
tgtgtatgttacacttccagt

SEQ ID NO: 104696 - RNA, 21 nt, synthetic construct
  source 1..21: mol_type = other RNA
tgtgtatttagggagcatata

SEQ ID NO: 104697 - RNA, 21 nt, synthetic construct
  source 1..21: mol_type = other RNA
tgtgtcaagtacaactaataa

SEQ ID NO: 104698 - RNA, 21 nt, synthetic construct
  source 1..21: mol_type = other RNA
tgtgtcagtgacagttctgtg

SEQ ID NO: 104699 - RNA, 21 nt, synthetic construct
  source 1..21: mol_type = other RNA
tgtgtcatttttgtattctga

SEQ ID NO: 104700 - RNA, 21 nt, synthetic construct
  source 1..21: mol_type = other RNA
tgtgtccacacaatggtcaga

SEQ ID NO: 104701 - RNA, 21 nt, synthetic construct
  source 1..21: mol_type = other RNA
tgtgtccaggccaacagggcc

SEQ ID NO: 104702 - RNA, 21 nt, synthetic construct
  source 1..21: mol_type = other RNA
tgtgtcgagaaaaatggggat

SEQ ID NO: 104703 - RNA, 21 nt, synthetic construct
  source 1..21: mol_type = other RNA
tgtgtctagtgaatgagacca

SEQ ID NO: 104704 - RNA, 21 nt, synthetic construct
  source 1..21: mol_type = other RNA
tgtgtctcataaagccggatt

SEQ ID NO: 104705 - RNA, 21 nt, synthetic construct
  source 1..21: mol_type = other RNA
tgtgtctctgacatgagagct

SEQ ID NO: 104706 - RNA, 21 nt, synthetic construct
  source 1..21: mol_type = other RNA
tgtgtctctgctctcaagtaa

SEQ ID NO: 104707 - RNA, 21 nt, synthetic construct
  source 1..21: mol_type = other RNA
tgtgtctgactacactgaagg

SEQ ID NO: 104708 - RNA, 21 nt, synthetic construct
  source 1..21: mol_type = other RNA
tgtgtctgcgccttaaagcca

SEQ ID NO: 104709 - RNA, 21 nt, synthetic construct
  source 1..21: mol_type = other RNA
tgtgtcttctgtttttcttag

SEQ ID NO: 104710 - RNA, 21 nt, synthetic construct
  source 1..21: mol_type = other RNA
tgtgtgaagaaggaatgtgca

SEQ ID NO: 104711 - RNA, 21 nt, synthetic construct
  source 1..21: mol_type = other RNA
tgtgtgaatggaaaattcaaa

SEQ ID NO: 104712 - RNA, 21 nt, synthetic construct
  source 1..21: mol_type = other RNA
tgtgtgactgtagtccctgct

SEQ ID NO: 104713 - RNA, 21 nt, synthetic construct
  source 1..21: mol_type = other RNA
tgtgtgcaaaggattagaaag

SEQ ID NO: 104714 - RNA, 21 nt, synthetic construct
  source 1..21: mol_type = other RNA
tgtgtgcacaacacatgcaca

SEQ ID NO: 104715 - RNA, 21 nt, synthetic construct
  source 1..21: mol_type = other RNA
tgtgtgcacctaataaaatgt

SEQ ID NO: 104716 - RNA, 21 nt, synthetic construct
  source 1..21: mol_type = other RNA
tgtgtgcatgcatgtctgtct

SEQ ID NO: 104717 - RNA, 21 nt, synthetic construct
  source 1..21: mol_type = other RNA
tgtgtgcatgctcccatttgg

SEQ ID NO: 104718 - RNA, 21 nt, synthetic construct
  source 1..21: mol_type = other RNA
tgtgtgcttacacacacgttt

SEQ ID NO: 104719 - RNA, 21 nt, synthetic construct
  source 1..21: mol_type = other RNA
tgtgtgcttggagtcacttga

SEQ ID NO: 104720 - RNA, 21 nt, synthetic construct
  source 1..21: mol_type = other RNA
tgtgtggacacactgaaacaa

SEQ ID NO: 104721 - RNA, 21 nt, synthetic construct
  source 1..21: mol_type = other RNA
tgtgtggagtggggcacctaa

SEQ ID NO: 104722 - RNA, 21 nt, synthetic construct
  source 1..21: mol_type = other RNA
tgtgtggcttctcaaactgtg

SEQ ID NO: 104723 - RNA, 21 nt, synthetic construct
  source 1..21: mol_type = other RNA
tgtgtggtttgccttttcact

SEQ ID NO: 104724 - RNA, 21 nt, synthetic construct
  source 1..21: mol_type = other RNA
tgtgtgtaagcacacatgaac

SEQ ID NO: 104725 - RNA, 21 nt, synthetic construct
  source 1..21: mol_type = other RNA
tgtgtgtataacccgtttttt

SEQ ID NO: 104726 - RNA, 21 nt, synthetic construct
  source 1..21: mol_type = other RNA
tgtgtgtccaggccaacaggg

SEQ ID NO: 104727 - RNA, 21 nt, synthetic construct
  source 1..21: mol_type = other RNA
tgtgtgtcgagaaaaatgggg

SEQ ID NO: 104728 - RNA, 21 nt, synthetic construct
  source 1..21: mol_type = other RNA
tgtgtgtctctgctctcaagt

SEQ ID NO: 104729 - RNA, 21 nt, synthetic construct
  source 1..21: mol_type = other RNA
tgtgtgtgtccaggccaacag

SEQ ID NO: 104730 - RNA, 21 nt, synthetic construct
  source 1..21: mol_type = other RNA
tgtgtgttccagacaaaaatt

SEQ ID NO: 104731 - RNA, 21 nt, synthetic construct
  source 1..21: mol_type = other RNA
tgtgtgttccttcctacacat

SEQ ID NO: 104732 - RNA, 21 nt, synthetic construct
  source 1..21: mol_type = other RNA
tgtgtgttctctttttgacag

SEQ ID NO: 104733 - RNA, 21 nt, synthetic construct
  source 1..21: mol_type = other RNA
tgtgtgtttgtgaaaaataca

SEQ ID NO: 104734 - RNA, 21 nt, synthetic construct
  source 1..21: mol_type = other RNA
tgtgttaaaccattcttgcat

SEQ ID NO: 104735 - RNA, 21 nt, synthetic construct
  source 1..21: mol_type = other RNA
tgtgttacaactctaataaca

SEQ ID NO: 104736 - RNA, 21 nt, synthetic construct
  source 1..21: mol_type = other RNA
tgtgttacattgccttcgcag

SEQ ID NO: 104737 - RNA, 21 nt, synthetic construct
  source 1..21: mol_type = other RNA
tgtgttccagacaaaaatttt

SEQ ID NO: 104738 - RNA, 21 nt, synthetic construct
  source 1..21: mol_type = other RNA
tgtgttccttcctacacatat

SEQ ID NO: 104739 - RNA, 21 nt, synthetic construct
  source 1..21: mol_type = other RNA
tgtgttctctttttgacagat

SEQ ID NO: 104740 - RNA, 21 nt, synthetic construct
  source 1..21: mol_type = other RNA
tgtgttctgccttgaggtgat

SEQ ID NO: 104741 - RNA, 21 nt, synthetic construct
  source 1..21: mol_type = other RNA
tgtgttcttttccttcttaag

SEQ ID NO: 104742 - RNA, 21 nt, synthetic construct
  source 1..21: mol_type = other RNA
tgtgttgaccttagtggttga

SEQ ID NO: 104743 - RNA, 21 nt, synthetic construct
  source 1..21: mol_type = other RNA
tgtgttgactgacataactgt

SEQ ID NO: 104744 - RNA, 21 nt, synthetic construct
  source 1..21: mol_type = other RNA
tgtgttggcactgaagccagt

SEQ ID NO: 104745 - RNA, 21 nt, synthetic construct
  source 1..21: mol_type = other RNA
tgtgttggtgtttctgacagg

SEQ ID NO: 104746 - RNA, 21 nt, synthetic construct
  source 1..21: mol_type = other RNA
tgtgttgtctgattcagtttg

SEQ ID NO: 104747 - RNA, 21 nt, synthetic construct
  source 1..21: mol_type = other RNA
tgtgttgtgcacacatccacg

SEQ ID NO: 104748 - RNA, 21 nt, synthetic construct
  source 1..21: mol_type = other RNA
tgtgtttaatttccacccatg

SEQ ID NO: 104749 - RNA, 21 nt, synthetic construct
  source 1..21: mol_type = other RNA
tgtgtttatgaatgatgccat

SEQ ID NO: 104750 - RNA, 21 nt, synthetic construct
  source 1..21: mol_type = other RNA
tgtgtttcgcaaagtaaaaag

SEQ ID NO: 104751 - RNA, 21 nt, synthetic construct
  source 1..21: mol_type = other RNA
tgtgtttctgctattctcttt

SEQ ID NO: 104752 - RNA, 21 nt, synthetic construct
  source 1..21: mol_type = other RNA
tgtgtttgtgaccagatcaaa

SEQ ID NO: 104753 - RNA, 21 nt, synthetic construct
  source 1..21: mol_type = other RNA
tgtgtttgtttgctagagctg

SEQ ID NO: 104754 - RNA, 21 nt, synthetic construct
  source 1..21: mol_type = other RNA
tgtgttttatttaggccctct

SEQ ID NO: 104755 - RNA, 21 nt, synthetic construct
  source 1..21: mol_type = other RNA
tgtgttttatttggctgttac

SEQ ID NO: 104756 - RNA, 21 nt, synthetic construct
  source 1..21: mol_type = other RNA
tgtgttttcactctcaatagt

SEQ ID NO: 104757 - RNA, 21 nt, synthetic construct
  source 1..21: mol_type = other RNA
tgtgttttcattcgttcaaaa

SEQ ID NO: 104758 - RNA, 21 nt, synthetic construct
  source 1..21: mol_type = other RNA
tgtgttttgttgttgttgttg

SEQ ID NO: 104759 - RNA, 21 nt, synthetic construct
  source 1..21: mol_type = other RNA
tgtgttttgttttgaataacc

SEQ ID NO: 104760 - RNA, 21 nt, synthetic construct
  source 1..21: mol_type = other RNA
tgttaaaagatacgaaaatcc

SEQ ID NO: 104761 - RNA, 21 nt, synthetic construct
  source 1..21: mol_type = other RNA
tgttaaatgaaggaaaaaacg

SEQ ID NO: 104762 - RNA, 21 nt, synthetic construct
  source 1..21: mol_type = other RNA
tgttaaatttgattgttagcc

SEQ ID NO: 104763 - RNA, 21 nt, synthetic construct
  source 1..21: mol_type = other RNA
tgttaacaattggtgaatctg

SEQ ID NO: 104764 - RNA, 21 nt, synthetic construct
  source 1..21: mol_type = other RNA
tgttaacatttcttctagtca

SEQ ID NO: 104765 - RNA, 21 nt, synthetic construct
  source 1..21: mol_type = other RNA
tgttaactgacttacagacct

SEQ ID NO: 104766 - RNA, 21 nt, synthetic construct
  source 1..21: mol_type = other RNA
tgttaactgtagagaaaatgt

SEQ ID NO: 104767 - RNA, 21 nt, synthetic construct
  source 1..21: mol_type = other RNA
tgttaagattcaacaaaactg

SEQ ID NO: 104768 - RNA, 21 nt, synthetic construct
  source 1..21: mol_type = other RNA
tgttaagcattttccggttgt

SEQ ID NO: 104769 - RNA, 21 nt, synthetic construct
  source 1..21: mol_type = other RNA
tgttaagcccaacttcacacc

SEQ ID NO: 104770 - RNA, 21 nt, synthetic construct
  source 1..21: mol_type = other RNA
tgttaagccgttccatcagag

SEQ ID NO: 104771 - RNA, 21 nt, synthetic construct
  source 1..21: mol_type = other RNA
tgttaagtgtttgaaaagtgt

SEQ ID NO: 104772 - RNA, 21 nt, synthetic construct
  source 1..21: mol_type = other RNA
tgttaataaccctgttttgta

SEQ ID NO: 104773 - RNA, 21 nt, synthetic construct
  source 1..21: mol_type = other RNA
tgttaatagataggtcatgta

SEQ ID NO: 104774 - RNA, 21 nt, synthetic construct
  source 1..21: mol_type = other RNA
tgttaatgggcacttgggatg

SEQ ID NO: 104775 - RNA, 21 nt, synthetic construct
  source 1..21: mol_type = other RNA
tgttaatggttagactgcaca

SEQ ID NO: 104776 - RNA, 21 nt, synthetic construct
  source 1..21: mol_type = other RNA
tgttaatgtgatatgccacat

SEQ ID NO: 104777 - RNA, 21 nt, synthetic construct
  source 1..21: mol_type = other RNA
tgttacaactctaataacagc

SEQ ID NO: 104778 - RNA, 21 nt, synthetic construct
  source 1..21: mol_type = other RNA
tgttacacaggtagacatgtg

SEQ ID NO: 104779 - RNA, 21 nt, synthetic construct
  source 1..21: mol_type = other RNA
tgttacacttccagtacatct

SEQ ID NO: 104780 - RNA, 21 nt, synthetic construct
  source 1..21: mol_type = other RNA
tgttacagcagctctagcaaa

SEQ ID NO: 104781 - RNA, 21 nt, synthetic construct
  source 1..21: mol_type = other RNA
tgttacagctcttctcagttg

SEQ ID NO: 104782 - RNA, 21 nt, synthetic construct
  source 1..21: mol_type = other RNA
tgttacatggttctgtgctag

SEQ ID NO: 104783 - RNA, 21 nt, synthetic construct
  source 1..21: mol_type = other RNA
tgttacattgccttcgcaggg

SEQ ID NO: 104784 - RNA, 21 nt, synthetic construct
  source 1..21: mol_type = other RNA
tgttaccatttgaccttcctt

SEQ ID NO: 104785 - RNA, 21 nt, synthetic construct
  source 1..21: mol_type = other RNA
tgttactcattatggttgttg

SEQ ID NO: 104786 - RNA, 21 nt, synthetic construct
  source 1..21: mol_type = other RNA
tgttactcccgatttcagtta

SEQ ID NO: 104787 - RNA, 21 nt, synthetic construct
  source 1..21: mol_type = other RNA
tgttactgatctgctcaagtt

SEQ ID NO: 104788 - RNA, 21 nt, synthetic construct
  source 1..21: mol_type = other RNA
tgttacttctcagctatagct

SEQ ID NO: 104789 - RNA, 21 nt, synthetic construct
  source 1..21: mol_type = other RNA
tgttacttgaaatcatttcac

SEQ ID NO: 104790 - RNA, 21 nt, synthetic construct
  source 1..21: mol_type = other RNA
tgttacttgactattttaccc

SEQ ID NO: 104791 - RNA, 21 nt, synthetic construct
  source 1..21: mol_type = other RNA
tgttagaattacaggcatgag

SEQ ID NO: 104792 - RNA, 21 nt, synthetic construct
  source 1..21: mol_type = other RNA
tgttagaattcaggacagtta

SEQ ID NO: 104793 - RNA, 21 nt, synthetic construct
  source 1..21: mol_type = other RNA
tgttagaattttgcttttgct

SEQ ID NO: 104794 - RNA, 21 nt, synthetic construct
  source 1..21: mol_type = other RNA
tgttagatatcccatataagg

SEQ ID NO: 104795 - RNA, 21 nt, synthetic construct
  source 1..21: mol_type = other RNA
tgttagatctgggataatgct

SEQ ID NO: 104796 - RNA, 21 nt, synthetic construct
  source 1..21: mol_type = other RNA
tgttagatggtgctgatttaa

SEQ ID NO: 104797 - RNA, 21 nt, synthetic construct
  source 1..21: mol_type = other RNA
tgttagattaggaaacagatt

SEQ ID NO: 104798 - RNA, 21 nt, synthetic construct
  source 1..21: mol_type = other RNA
tgttagcaggactggactcct

SEQ ID NO: 104799 - RNA, 21 nt, synthetic construct
  source 1..21: mol_type = other RNA
tgttagccacagcgttgttca

SEQ ID NO: 104800 - RNA, 21 nt, synthetic construct
  source 1..21: mol_type = other RNA
tgttagccttgccattctccc

SEQ ID NO: 104801 - RNA, 21 nt, synthetic construct
  source 1..21: mol_type = other RNA
tgttaggcaatccttccgcct

SEQ ID NO: 104802 - RNA, 21 nt, synthetic construct
  source 1..21: mol_type = other RNA
tgttagggacttatggagata

SEQ ID NO: 104803 - RNA, 21 nt, synthetic construct
  source 1..21: mol_type = other RNA
tgttaggtattattttcacag

SEQ ID NO: 104804 - RNA, 21 nt, synthetic construct
  source 1..21: mol_type = other RNA
tgttaggtgctggcttcaata

SEQ ID NO: 104805 - RNA, 21 nt, synthetic construct
  source 1..21: mol_type = other RNA
tgttaggttgaaagttcagaa

SEQ ID NO: 104806 - RNA, 21 nt, synthetic construct
  source 1..21: mol_type = other RNA
tgttagtaggaaaaccatgtc

SEQ ID NO: 104807 - RNA, 21 nt, synthetic construct
  source 1..21: mol_type = other RNA
tgttagtcccctagtggatgc

SEQ ID NO: 104808 - RNA, 21 nt, synthetic construct
  source 1..21: mol_type = other RNA
tgttagtgccttcagaaggag

SEQ ID NO: 104809 - RNA, 21 nt, synthetic construct
  source 1..21: mol_type = other RNA
tgttataagcaaagatatggg

SEQ ID NO: 104810 - RNA, 21 nt, synthetic construct
  source 1..21: mol_type = other RNA
tgttataatgagatagaccag

SEQ ID NO: 104811 - RNA, 21 nt, synthetic construct
  source 1..21: mol_type = other RNA
tgttatatccagattgatatc

SEQ ID NO: 104812 - RNA, 21 nt, synthetic construct
  source 1..21: mol_type = other RNA
tgttatatttccgtatccagt

SEQ ID NO: 104813 - RNA, 21 nt, synthetic construct
  source 1..21: mol_type = other RNA
tgttatctgaacgtctttaaa

SEQ ID NO: 104814 - RNA, 21 nt, synthetic construct
  source 1..21: mol_type = other RNA
tgttatctgggaacagcccct

SEQ ID NO: 104815 - RNA, 21 nt, synthetic construct
  source 1..21: mol_type = other RNA
tgttatgaagcttttctccta

SEQ ID NO: 104816 - RNA, 21 nt, synthetic construct
  source 1..21: mol_type = other RNA
tgttatgacaagactacctaa

SEQ ID NO: 104817 - RNA, 21 nt, synthetic construct
  source 1..21: mol_type = other RNA
tgttatgccccctcttctctc

SEQ ID NO: 104818 - RNA, 21 nt, synthetic construct
  source 1..21: mol_type = other RNA
tgttatggtaggtgctttttg

SEQ ID NO: 104819 - RNA, 21 nt, synthetic construct
  source 1..21: mol_type = other RNA
tgttattagagttgtaacaca

SEQ ID NO: 104820 - RNA, 21 nt, synthetic construct
  source 1..21: mol_type = other RNA
tgttattagggtaatgctggc

SEQ ID NO: 104821 - RNA, 21 nt, synthetic construct
  source 1..21: mol_type = other RNA
tgttatttggggattctgcta

SEQ ID NO: 104822 - RNA, 21 nt, synthetic construct
  source 1..21: mol_type = other RNA
tgttatttgttctgtcacggt

SEQ ID NO: 104823 - RNA, 21 nt, synthetic construct
  source 1..21: mol_type = other RNA
tgttattttaatcgaatcctc

SEQ ID NO: 104824 - RNA, 21 nt, synthetic construct
  source 1..21: mol_type = other RNA
tgttcaaaagccccaaaccat

SEQ ID NO: 104825 - RNA, 21 nt, synthetic construct
  source 1..21: mol_type = other RNA
tgttcaaccctcggcctctac

SEQ ID NO: 104826 - RNA, 21 nt, synthetic construct
  source 1..21: mol_type = other RNA
tgttcaagcgctgaagtactt

SEQ ID NO: 104827 - RNA, 21 nt, synthetic construct
  source 1..21: mol_type = other RNA
tgttcaaggtgttcctgaagt

SEQ ID NO: 104828 - RNA, 21 nt, synthetic construct
  source 1..21: mol_type = other RNA
tgttcaagtatttccacgggt

SEQ ID NO: 104829 - RNA, 21 nt, synthetic construct
  source 1..21: mol_type = other RNA
tgttcacatttcgccttctca

SEQ ID NO: 104830 - RNA, 21 nt, synthetic construct
  source 1..21: mol_type = other RNA
tgttcactgcagaattactga

SEQ ID NO: 104831 - RNA, 21 nt, synthetic construct
  source 1..21: mol_type = other RNA
tgttcagaaatagactcccaa

SEQ ID NO: 104832 - RNA, 21 nt, synthetic construct
  source 1..21: mol_type = other RNA
tgttcagatagaaaagacaat

SEQ ID NO: 104833 - RNA, 21 nt, synthetic construct
  source 1..21: mol_type = other RNA
tgttcaggagttttgcctctt

SEQ ID NO: 104834 - RNA, 21 nt, synthetic construct
  source 1..21: mol_type = other RNA
tgttcagggaaggctgcaagc

SEQ ID NO: 104835 - RNA, 21 nt, synthetic construct
  source 1..21: mol_type = other RNA
tgttcagttgaaaagtatggt

SEQ ID NO: 104836 - RNA, 21 nt, synthetic construct
  source 1..21: mol_type = other RNA
tgttcagtttatgggtcaacc

SEQ ID NO: 104837 - RNA, 21 nt, synthetic construct
  source 1..21: mol_type = other RNA
tgttcatcatcttttgcctgg

SEQ ID NO: 104838 - RNA, 21 nt, synthetic construct
  source 1..21: mol_type = other RNA
tgttcatgaaatcccctttag

SEQ ID NO: 104839 - RNA, 21 nt, synthetic construct
  source 1..21: mol_type = other RNA
tgttcatgaaccttcaccaaa

SEQ ID NO: 104840 - RNA, 21 nt, synthetic construct
  source 1..21: mol_type = other RNA
tgttcatgggaagatgctccc

SEQ ID NO: 104841 - RNA, 21 nt, synthetic construct
  source 1..21: mol_type = other RNA
tgttcatgtctgtgtagttca

SEQ ID NO: 104842 - RNA, 21 nt, synthetic construct
  source 1..21: mol_type = other RNA
tgttcattcatctgttaatgg

SEQ ID NO: 104843 - RNA, 21 nt, synthetic construct
  source 1..21: mol_type = other RNA
tgttcatttgagaatttcagg

SEQ ID NO: 104844 - RNA, 21 nt, synthetic construct
  source 1..21: mol_type = other RNA
tgttccacatgttactcatta

SEQ ID NO: 104845 - RNA, 21 nt, synthetic construct
  source 1..21: mol_type = other RNA
tgttccagacaaaaattttca

SEQ ID NO: 104846 - RNA, 21 nt, synthetic construct
  source 1..21: mol_type = other RNA
tgttccaggcctcgctcttgg

SEQ ID NO: 104847 - RNA, 21 nt, synthetic construct
  source 1..21: mol_type = other RNA
tgttccaggggggaaaaaacc

SEQ ID NO: 104848 - RNA, 21 nt, synthetic construct
  source 1..21: mol_type = other RNA
tgttccatcggtctgtatttc

SEQ ID NO: 104849 - RNA, 21 nt, synthetic construct
  source 1..21: mol_type = other RNA
tgttcccaagcaagtgtggtg

SEQ ID NO: 104850 - RNA, 21 nt, synthetic construct
  source 1..21: mol_type = other RNA
tgttcccagataacagtggtt

SEQ ID NO: 104851 - RNA, 21 nt, synthetic construct
  source 1..21: mol_type = other RNA
tgttccccaagccaaattaat

SEQ ID NO: 104852 - RNA, 21 nt, synthetic construct
  source 1..21: mol_type = other RNA
tgttcccggattggaaaacta

SEQ ID NO: 104853 - RNA, 21 nt, synthetic construct
  source 1..21: mol_type = other RNA
tgttccctagaacttaaaata

SEQ ID NO: 104854 - RNA, 21 nt, synthetic construct
  source 1..21: mol_type = other RNA
tgttccctcttcaatattttg

SEQ ID NO: 104855 - RNA, 21 nt, synthetic construct
  source 1..21: mol_type = other RNA
tgttcccttcttaaatgtgaa

SEQ ID NO: 104856 - RNA, 21 nt, synthetic construct
  source 1..21: mol_type = other RNA
tgttccgattttacttactag

SEQ ID NO: 104857 - RNA, 21 nt, synthetic construct
  source 1..21: mol_type = other RNA
tgttccgggatcctgtccagg

SEQ ID NO: 104858 - RNA, 21 nt, synthetic construct
  source 1..21: mol_type = other RNA
tgttcctatatttttccacat

SEQ ID NO: 104859 - RNA, 21 nt, synthetic construct
  source 1..21: mol_type = other RNA
tgttcctgaagtctttggtga

SEQ ID NO: 104860 - RNA, 21 nt, synthetic construct
  source 1..21: mol_type = other RNA
tgttcctgggttctcccttct

SEQ ID NO: 104861 - RNA, 21 nt, synthetic construct
  source 1..21: mol_type = other RNA
tgttccttcctacacatatct

SEQ ID NO: 104862 - RNA, 21 nt, synthetic construct
  source 1..21: mol_type = other RNA
tgttctaaagttagaagtatc

SEQ ID NO: 104863 - RNA, 21 nt, synthetic construct
  source 1..21: mol_type = other RNA
tgttctaatttgtgaaccttg

SEQ ID NO: 104864 - RNA, 21 nt, synthetic construct
  source 1..21: mol_type = other RNA
tgttctagctcctgggaaaag

SEQ ID NO: 104865 - RNA, 21 nt, synthetic construct
  source 1..21: mol_type = other RNA
tgttctcagtatcctttcaag

SEQ ID NO: 104866 - RNA, 21 nt, synthetic construct
  source 1..21: mol_type = other RNA
tgttctccagtcccactgaca

SEQ ID NO: 104867 - RNA, 21 nt, synthetic construct
  source 1..21: mol_type = other RNA
tgttctcgttcatgttcaagg

SEQ ID NO: 104868 - RNA, 21 nt, synthetic construct
  source 1..21: mol_type = other RNA
tgttctctgtgtggtttgcct

SEQ ID NO: 104869 - RNA, 21 nt, synthetic construct
  source 1..21: mol_type = other RNA
tgttctctttgtttatccttg

SEQ ID NO: 104870 - RNA, 21 nt, synthetic construct
  source 1..21: mol_type = other RNA
tgttctcttttcctcgttttc

SEQ ID NO: 104871 - RNA, 21 nt, synthetic construct
  source 1..21: mol_type = other RNA
tgttctctttttgacagatga

SEQ ID NO: 104872 - RNA, 21 nt, synthetic construct
  source 1..21: mol_type = other RNA
tgttctgccttgaggtgattc

SEQ ID NO: 104873 - RNA, 21 nt, synthetic construct
  source 1..21: mol_type = other RNA
tgttctgctgttgatggacgt

SEQ ID NO: 104874 - RNA, 21 nt, synthetic construct
  source 1..21: mol_type = other RNA
tgttctgtcacatttgaaaga

SEQ ID NO: 104875 - RNA, 21 nt, synthetic construct
  source 1..21: mol_type = other RNA
tgttctgtcacggtgccctac

SEQ ID NO: 104876 - RNA, 21 nt, synthetic construct
  source 1..21: mol_type = other RNA
tgttctgtgtttatgaatgat

SEQ ID NO: 104877 - RNA, 21 nt, synthetic construct
  source 1..21: mol_type = other RNA
tgttctgttccatcggtctgt

SEQ ID NO: 104878 - RNA, 21 nt, synthetic construct
  source 1..21: mol_type = other RNA
tgttcttggttaatattacag

SEQ ID NO: 104879 - RNA, 21 nt, synthetic construct
  source 1..21: mol_type = other RNA
tgttctttggagctgtatttt

SEQ ID NO: 104880 - RNA, 21 nt, synthetic construct
  source 1..21: mol_type = other RNA
tgttcttttcaaaaacagcat

SEQ ID NO: 104881 - RNA, 21 nt, synthetic construct
  source 1..21: mol_type = other RNA
tgttcttttccttcttaagac

SEQ ID NO: 104882 - RNA, 21 nt, synthetic construct
  source 1..21: mol_type = other RNA
tgttcttttgtaatctaagga

SEQ ID NO: 104883 - RNA, 21 nt, synthetic construct
  source 1..21: mol_type = other RNA
tgttgaaaacgaggaaaagag

SEQ ID NO: 104884 - RNA, 21 nt, synthetic construct
  source 1..21: mol_type = other RNA
tgttgaatagcaactgttttt

SEQ ID NO: 104885 - RNA, 21 nt, synthetic construct
  source 1..21: mol_type = other RNA
tgttgaatcttaacatttctc

SEQ ID NO: 104886 - RNA, 21 nt, synthetic construct
  source 1..21: mol_type = other RNA
tgttgaatgtggcagaattta

SEQ ID NO: 104887 - RNA, 21 nt, synthetic construct
  source 1..21: mol_type = other RNA
tgttgaattgttgcgcgtcaa

SEQ ID NO: 104888 - RNA, 21 nt, synthetic construct
  source 1..21: mol_type = other RNA
tgttgaattgttggagttctt

SEQ ID NO: 104889 - RNA, 21 nt, synthetic construct
  source 1..21: mol_type = other RNA
tgttgacatcctttgcgtctg

SEQ ID NO: 104890 - RNA, 21 nt, synthetic construct
  source 1..21: mol_type = other RNA
tgttgacatcttgcataactc

SEQ ID NO: 104891 - RNA, 21 nt, synthetic construct
  source 1..21: mol_type = other RNA
tgttgacccaatcatgttctt

SEQ ID NO: 104892 - RNA, 21 nt, synthetic construct
  source 1..21: mol_type = other RNA
tgttgaccttagtggttgacc

SEQ ID NO: 104893 - RNA, 21 nt, synthetic construct
  source 1..21: mol_type = other RNA
tgttgactaccatctctccaa

SEQ ID NO: 104894 - RNA, 21 nt, synthetic construct
  source 1..21: mol_type = other RNA
tgttgactgaattaatctctt

SEQ ID NO: 104895 - RNA, 21 nt, synthetic construct
  source 1..21: mol_type = other RNA
tgttgactgacataactgtaa

SEQ ID NO: 104896 - RNA, 21 nt, synthetic construct
  source 1..21: mol_type = other RNA
tgttgagaaagcacataaaaa

SEQ ID NO: 104897 - RNA, 21 nt, synthetic construct
  source 1..21: mol_type = other RNA
tgttgagaggctttaagcaga

SEQ ID NO: 104898 - RNA, 21 nt, synthetic construct
  source 1..21: mol_type = other RNA
tgttgaggatgactgtcctga

SEQ ID NO: 104899 - RNA, 21 nt, synthetic construct
  source 1..21: mol_type = other RNA
tgttgaggctgggccctgtgg

SEQ ID NO: 104900 - RNA, 21 nt, synthetic construct
  source 1..21: mol_type = other RNA
tgttgagtatcttttcatgtt

SEQ ID NO: 104901 - RNA, 21 nt, synthetic construct
  source 1..21: mol_type = other RNA
tgttgagtcttgtttacccag

SEQ ID NO: 104902 - RNA, 21 nt, synthetic construct
  source 1..21: mol_type = other RNA
tgttgatggacgtttgagttg

SEQ ID NO: 104903 - RNA, 21 nt, synthetic construct
  source 1..21: mol_type = other RNA
tgttgatgtaatggatcaagg

SEQ ID NO: 104904 - RNA, 21 nt, synthetic construct
  source 1..21: mol_type = other RNA
tgttgattgttgccatcattt

SEQ ID NO: 104905 - RNA, 21 nt, synthetic construct
  source 1..21: mol_type = other RNA
tgttgatttagaaatacctgc

SEQ ID NO: 104906 - RNA, 21 nt, synthetic construct
  source 1..21: mol_type = other RNA
tgttgattttgaggcagagag

SEQ ID NO: 104907 - RNA, 21 nt, synthetic construct
  source 1..21: mol_type = other RNA
tgttgcaaattattttcctcc

SEQ ID NO: 104908 - RNA, 21 nt, synthetic construct
  source 1..21: mol_type = other RNA
tgttgcacaaaagtgaaaact

SEQ ID NO: 104909 - RNA, 21 nt, synthetic construct
  source 1..21: mol_type = other RNA
tgttgcagagactggatagca

SEQ ID NO: 104910 - RNA, 21 nt, synthetic construct
  source 1..21: mol_type = other RNA
tgttgcagtccccggtctttc

SEQ ID NO: 104911 - RNA, 21 nt, synthetic construct
  source 1..21: mol_type = other RNA
tgttgcatccccattcaattg

SEQ ID NO: 104912 - RNA, 21 nt, synthetic construct
  source 1..21: mol_type = other RNA
tgttgccaatatctatcaggg

SEQ ID NO: 104913 - RNA, 21 nt, synthetic construct
  source 1..21: mol_type = other RNA
tgttgccaggtggacgcggcc

SEQ ID NO: 104914 - RNA, 21 nt, synthetic construct
  source 1..21: mol_type = other RNA
tgttgccatcattttatgaaa

SEQ ID NO: 104915 - RNA, 21 nt, synthetic construct
  source 1..21: mol_type = other RNA
tgttgcccagactggagttca

SEQ ID NO: 104916 - RNA, 21 nt, synthetic construct
  source 1..21: mol_type = other RNA
tgttgcctactagccagtgat

SEQ ID NO: 104917 - RNA, 21 nt, synthetic construct
  source 1..21: mol_type = other RNA
tgttgcctctgtgctagcctt

SEQ ID NO: 104918 - RNA, 21 nt, synthetic construct
  source 1..21: mol_type = other RNA
tgttgcctgtagttttggtgt

SEQ ID NO: 104919 - RNA, 21 nt, synthetic construct
  source 1..21: mol_type = other RNA
tgttgcgcgtcaaaagatgct

SEQ ID NO: 104920 - RNA, 21 nt, synthetic construct
  source 1..21: mol_type = other RNA
tgttgcggtgagcagagatca

SEQ ID NO: 104921 - RNA, 21 nt, synthetic construct
  source 1..21: mol_type = other RNA
tgttgctattgttgaattgtt

SEQ ID NO: 104922 - RNA, 21 nt, synthetic construct
  source 1..21: mol_type = other RNA
tgttgcttaagtcactccatt

SEQ ID NO: 104923 - RNA, 21 nt, synthetic construct
  source 1..21: mol_type = other RNA
tgttgcttgctctacaaacct

SEQ ID NO: 104924 - RNA, 21 nt, synthetic construct
  source 1..21: mol_type = other RNA
tgttgcttggtgttgactgaa

SEQ ID NO: 104925 - RNA, 21 nt, synthetic construct
  source 1..21: mol_type = other RNA
tgttgctttaacctctggtat

SEQ ID NO: 104926 - RNA, 21 nt, synthetic construct
  source 1..21: mol_type = other RNA
tgttgctttgcgaaatagtag

SEQ ID NO: 104927 - RNA, 21 nt, synthetic construct
  source 1..21: mol_type = other RNA
tgttggaaaaatcgtcctctt

SEQ ID NO: 104928 - RNA, 21 nt, synthetic construct
  source 1..21: mol_type = other RNA
tgttggacagctgggagaaag

SEQ ID NO: 104929 - RNA, 21 nt, synthetic construct
  source 1..21: mol_type = other RNA
tgttggagagatggtagtcaa

SEQ ID NO: 104930 - RNA, 21 nt, synthetic construct
  source 1..21: mol_type = other RNA
tgttggatagtttctcaactt

SEQ ID NO: 104931 - RNA, 21 nt, synthetic construct
  source 1..21: mol_type = other RNA
tgttggcactgaagccagtcc

SEQ ID NO: 104932 - RNA, 21 nt, synthetic construct
  source 1..21: mol_type = other RNA
tgttggcctggacacacacag

SEQ ID NO: 104933 - RNA, 21 nt, synthetic construct
  source 1..21: mol_type = other RNA
tgttggctaaaagaccgcaag

SEQ ID NO: 104934 - RNA, 21 nt, synthetic construct
  source 1..21: mol_type = other RNA
tgttgggaggtttttgattac

SEQ ID NO: 104935 - RNA, 21 nt, synthetic construct
  source 1..21: mol_type = other RNA
tgttgggccaacttccagcaa

SEQ ID NO: 104936 - RNA, 21 nt, synthetic construct
  source 1..21: mol_type = other RNA
tgttgggctattaagtattgc

SEQ ID NO: 104937 - RNA, 21 nt, synthetic construct
  source 1..21: mol_type = other RNA
tgttgggtaaaaataatcaac

SEQ ID NO: 104938 - RNA, 21 nt, synthetic construct
  source 1..21: mol_type = other RNA
tgttgggtttaactgaggtgt

SEQ ID NO: 104939 - RNA, 21 nt, synthetic construct
  source 1..21: mol_type = other RNA
tgttggtgagaacccagtgtc

SEQ ID NO: 104940 - RNA, 21 nt, synthetic construct
  source 1..21: mol_type = other RNA
tgttggtgcatttgggacagc

SEQ ID NO: 104941 - RNA, 21 nt, synthetic construct
  source 1..21: mol_type = other RNA
tgttggtgcttagctgcctct

SEQ ID NO: 104942 - RNA, 21 nt, synthetic construct
  source 1..21: mol_type = other RNA
tgttggtgtttctgacaggtg

SEQ ID NO: 104943 - RNA, 21 nt, synthetic construct
  source 1..21: mol_type = other RNA
tgttggttagtgttgttttta

SEQ ID NO: 104944 - RNA, 21 nt, synthetic construct
  source 1..21: mol_type = other RNA
tgttggtttgtgtgtttgtga

SEQ ID NO: 104945 - RNA, 21 nt, synthetic construct
  source 1..21: mol_type = other RNA
tgttgtaatgttacttctcag

SEQ ID NO: 104946 - RNA, 21 nt, synthetic construct
  source 1..21: mol_type = other RNA
tgttgtattttacaccatgca

SEQ ID NO: 104947 - RNA, 21 nt, synthetic construct
  source 1..21: mol_type = other RNA
tgttgtctgattcagtttgct

SEQ ID NO: 104948 - RNA, 21 nt, synthetic construct
  source 1..21: mol_type = other RNA
tgttgtgaggattcgattaaa

SEQ ID NO: 104949 - RNA, 21 nt, synthetic construct
  source 1..21: mol_type = other RNA
tgttgtgcacacatccacgcg

SEQ ID NO: 104950 - RNA, 21 nt, synthetic construct
  source 1..21: mol_type = other RNA
tgttgtggatgtccttaatgc

SEQ ID NO: 104951 - RNA, 21 nt, synthetic construct
  source 1..21: mol_type = other RNA
tgttgtgtagaaatgtggaga

SEQ ID NO: 104952 - RNA, 21 nt, synthetic construct
  source 1..21: mol_type = other RNA
tgttgtgtgcacctaataaaa

SEQ ID NO: 104953 - RNA, 21 nt, synthetic construct
  source 1..21: mol_type = other RNA
tgttgtgttttcattcgttca

SEQ ID NO: 104954 - RNA, 21 nt, synthetic construct
  source 1..21: mol_type = other RNA
tgttgttcttttcaaaaacag

SEQ ID NO: 104955 - RNA, 21 nt, synthetic construct
  source 1..21: mol_type = other RNA
tgttgttgaatgtggcagaat

SEQ ID NO: 104956 - RNA, 21 nt, synthetic construct
  source 1..21: mol_type = other RNA
tgttgttggtttgtgtgtttg

SEQ ID NO: 104957 - RNA, 21 nt, synthetic construct
  source 1..21: mol_type = other RNA
tgttgttgttgtttctgagcc

SEQ ID NO: 104958 - RNA, 21 nt, synthetic construct
  source 1..21: mol_type = other RNA
tgttgttgtttctgagccaga

SEQ ID NO: 104959 - RNA, 21 nt, synthetic construct
  source 1..21: mol_type = other RNA
tgttgtttctgagccagagtt

SEQ ID NO: 104960 - RNA, 21 nt, synthetic construct
  source 1..21: mol_type = other RNA
tgtttaaaaacaacactaacc

SEQ ID NO: 104961 - RNA, 21 nt, synthetic construct
  source 1..21: mol_type = other RNA
tgtttaactatcctatgtggg

SEQ ID NO: 104962 - RNA, 21 nt, synthetic construct
  source 1..21: mol_type = other RNA
tgtttaattacccaggcatga

SEQ ID NO: 104963 - RNA, 21 nt, synthetic construct
  source 1..21: mol_type = other RNA
tgtttaattagccgggtgtag

SEQ ID NO: 104964 - RNA, 21 nt, synthetic construct
  source 1..21: mol_type = other RNA
tgtttaattcctactttcttc

SEQ ID NO: 104965 - RNA, 21 nt, synthetic construct
  source 1..21: mol_type = other RNA
tgtttaattctgtttaccctt

SEQ ID NO: 104966 - RNA, 21 nt, synthetic construct
  source 1..21: mol_type = other RNA
tgtttaatttccacccatgaa

SEQ ID NO: 104967 - RNA, 21 nt, synthetic construct
  source 1..21: mol_type = other RNA
tgtttacacacctgaaattct

SEQ ID NO: 104968 - RNA, 21 nt, synthetic construct
  source 1..21: mol_type = other RNA
tgtttacagtagccaaaggta

SEQ ID NO: 104969 - RNA, 21 nt, synthetic construct
  source 1..21: mol_type = other RNA
tgtttacattagagaagaatg

SEQ ID NO: 104970 - RNA, 21 nt, synthetic construct
  source 1..21: mol_type = other RNA
tgtttaccaagggtgtgttta

SEQ ID NO: 104971 - RNA, 21 nt, synthetic construct
  source 1..21: mol_type = other RNA
tgtttacccagtgtgtttgtt

SEQ ID NO: 104972 - RNA, 21 nt, synthetic construct
  source 1..21: mol_type = other RNA
tgtttacttgggtataaatga

SEQ ID NO: 104973 - RNA, 21 nt, synthetic construct
  source 1..21: mol_type = other RNA
tgtttagcaagattactggat

SEQ ID NO: 104974 - RNA, 21 nt, synthetic construct
  source 1..21: mol_type = other RNA
tgtttagcatctagcacagaa

SEQ ID NO: 104975 - RNA, 21 nt, synthetic construct
  source 1..21: mol_type = other RNA
tgtttagcggaatgactatag

SEQ ID NO: 104976 - RNA, 21 nt, synthetic construct
  source 1..21: mol_type = other RNA
tgtttaggatataagagtggg

SEQ ID NO: 104977 - RNA, 21 nt, synthetic construct
  source 1..21: mol_type = other RNA
tgtttagggacgaatgcatgg

SEQ ID NO: 104978 - RNA, 21 nt, synthetic construct
  source 1..21: mol_type = other RNA
tgtttagtagaattctccagt

SEQ ID NO: 104979 - RNA, 21 nt, synthetic construct
  source 1..21: mol_type = other RNA
tgtttagtagctgtctttaat

SEQ ID NO: 104980 - RNA, 21 nt, synthetic construct
  source 1..21: mol_type = other RNA
tgtttatccttgcaccaactc

SEQ ID NO: 104981 - RNA, 21 nt, synthetic construct
  source 1..21: mol_type = other RNA
tgtttatgaatgatgccatca

SEQ ID NO: 104982 - RNA, 21 nt, synthetic construct
  source 1..21: mol_type = other RNA
tgtttatttgctgtcaggcaa

SEQ ID NO: 104983 - RNA, 21 nt, synthetic construct
  source 1..21: mol_type = other RNA
tgtttcacttttctggttttc

SEQ ID NO: 104984 - RNA, 21 nt, synthetic construct
  source 1..21: mol_type = other RNA
tgtttcagtgtgtccacacaa

SEQ ID NO: 104985 - RNA, 21 nt, synthetic construct
  source 1..21: mol_type = other RNA
tgtttccactttgaggttatt

SEQ ID NO: 104986 - RNA, 21 nt, synthetic construct
  source 1..21: mol_type = other RNA
tgtttccataaaaagcgttgg

SEQ ID NO: 104987 - RNA, 21 nt, synthetic construct
  source 1..21: mol_type = other RNA
tgtttccatgtcttggctatt

SEQ ID NO: 104988 - RNA, 21 nt, synthetic construct
  source 1..21: mol_type = other RNA
tgtttcccttaaaaggaacta

SEQ ID NO: 104989 - RNA, 21 nt, synthetic construct
  source 1..21: mol_type = other RNA
tgtttcccttaatgttgacat

SEQ ID NO: 104990 - RNA, 21 nt, synthetic construct
  source 1..21: mol_type = other RNA
tgtttcctaatctaacatgtt

SEQ ID NO: 104991 - RNA, 21 nt, synthetic construct
  source 1..21: mol_type = other RNA
tgtttcctagattccctctgg

SEQ ID NO: 104992 - RNA, 21 nt, synthetic construct
  source 1..21: mol_type = other RNA
tgtttccttaccagtgcttgc

SEQ ID NO: 104993 - RNA, 21 nt, synthetic construct
  source 1..21: mol_type = other RNA
tgtttccttccagatgtttta

SEQ ID NO: 104994 - RNA, 21 nt, synthetic construct
  source 1..21: mol_type = other RNA
tgtttcgcaaagtaaaaagca

SEQ ID NO: 104995 - RNA, 21 nt, synthetic construct
  source 1..21: mol_type = other RNA
tgtttctacctttggctactg

SEQ ID NO: 104996 - RNA, 21 nt, synthetic construct
  source 1..21: mol_type = other RNA
tgtttctcattcttctctaat

SEQ ID NO: 104997 - RNA, 21 nt, synthetic construct
  source 1..21: mol_type = other RNA
tgtttctcctgcatggggagt

SEQ ID NO: 104998 - RNA, 21 nt, synthetic construct
  source 1..21: mol_type = other RNA
tgtttctctacatctggatcc

SEQ ID NO: 104999 - RNA, 21 nt, synthetic construct
  source 1..21: mol_type = other RNA
tgtttctgacaggtggtatgg

SEQ ID NO: 105000 - RNA, 21 nt, synthetic construct
  source 1..21: mol_type = other RNA
tgtttctgagccagagtttca

SEQ ID NO: 105001 - RNA, 21 nt, synthetic construct
  source 1..21: mol_type = other RNA
tgtttctgaggtggagttctg

SEQ ID NO: 105002 - RNA, 21 nt, synthetic construct
  source 1..21: mol_type = other RNA
tgtttctgctattctctttct

SEQ ID NO: 105003 - RNA, 21 nt, synthetic construct
  source 1..21: mol_type = other RNA
tgtttcttagctatattcact

SEQ ID NO: 105004 - RNA, 21 nt, synthetic construct
  source 1..21: mol_type = other RNA
tgtttgaaaagtgtttgtcac

SEQ ID NO: 105005 - RNA, 21 nt, synthetic construct
  source 1..21: mol_type = other RNA
tgtttgaattaagcaccacta

SEQ ID NO: 105006 - RNA, 21 nt, synthetic construct
  source 1..21: mol_type = other RNA
tgtttgaattttccattcaca

SEQ ID NO: 105007 - RNA, 21 nt, synthetic construct
  source 1..21: mol_type = other RNA
tgtttgagaagtcttttccta

SEQ ID NO: 105008 - RNA, 21 nt, synthetic construct
  source 1..21: mol_type = other RNA
tgtttgagctgaaagtaaaga

SEQ ID NO: 105009 - RNA, 21 nt, synthetic construct
  source 1..21: mol_type = other RNA
tgtttgaggctgggagtacaa

SEQ ID NO: 105010 - RNA, 21 nt, synthetic construct
  source 1..21: mol_type = other RNA
tgtttgattactgtagcttcg

SEQ ID NO: 105011 - RNA, 21 nt, synthetic construct
  source 1..21: mol_type = other RNA
tgtttgattagttgactccta

SEQ ID NO: 105012 - RNA, 21 nt, synthetic construct
  source 1..21: mol_type = other RNA
tgtttgccatcttcaagattt

SEQ ID NO: 105013 - RNA, 21 nt, synthetic construct
  source 1..21: mol_type = other RNA
tgtttgcctgcgtccgtagac

SEQ ID NO: 105014 - RNA, 21 nt, synthetic construct
  source 1..21: mol_type = other RNA
tgtttgctaataatgatgact

SEQ ID NO: 105015 - RNA, 21 nt, synthetic construct
  source 1..21: mol_type = other RNA
tgtttgctagagctgctgtaa

SEQ ID NO: 105016 - RNA, 21 nt, synthetic construct
  source 1..21: mol_type = other RNA
tgtttggatgaaaaagtactg

SEQ ID NO: 105017 - RNA, 21 nt, synthetic construct
  source 1..21: mol_type = other RNA
tgtttggctccttaccactat

SEQ ID NO: 105018 - RNA, 21 nt, synthetic construct
  source 1..21: mol_type = other RNA
tgtttggctgggagcttatca

SEQ ID NO: 105019 - RNA, 21 nt, synthetic construct
  source 1..21: mol_type = other RNA
tgtttggtagatttctgcata

SEQ ID NO: 105020 - RNA, 21 nt, synthetic construct
  source 1..21: mol_type = other RNA
tgtttggtcaattgatctgcc

SEQ ID NO: 105021 - RNA, 21 nt, synthetic construct
  source 1..21: mol_type = other RNA
tgtttgtaacttgttcatgtt

SEQ ID NO: 105022 - RNA, 21 nt, synthetic construct
  source 1..21: mol_type = other RNA
tgtttgtacttctaccttgaa

SEQ ID NO: 105023 - RNA, 21 nt, synthetic construct
  source 1..21: mol_type = other RNA
tgtttgtcacatagaagcgct

SEQ ID NO: 105024 - RNA, 21 nt, synthetic construct
  source 1..21: mol_type = other RNA
tgtttgtgaagatacaaatag

SEQ ID NO: 105025 - RNA, 21 nt, synthetic construct
  source 1..21: mol_type = other RNA
tgtttgtgaccagatcaaacg

SEQ ID NO: 105026 - RNA, 21 nt, synthetic construct
  source 1..21: mol_type = other RNA
tgtttgtggttttaacctctt

SEQ ID NO: 105027 - RNA, 21 nt, synthetic construct
  source 1..21: mol_type = other RNA
tgtttgttgggtttaactgag

SEQ ID NO: 105028 - RNA, 21 nt, synthetic construct
  source 1..21: mol_type = other RNA
tgtttgtttaattagccgggt

SEQ ID NO: 105029 - RNA, 21 nt, synthetic construct
  source 1..21: mol_type = other RNA
tgtttgtttctgaggtggagt

SEQ ID NO: 105030 - RNA, 21 nt, synthetic construct
  source 1..21: mol_type = other RNA
tgtttgtttgctagagctgct

SEQ ID NO: 105031 - RNA, 21 nt, synthetic construct
  source 1..21: mol_type = other RNA
tgttttaaagcagggaggggt

SEQ ID NO: 105032 - RNA, 21 nt, synthetic construct
  source 1..21: mol_type = other RNA
tgttttaaggcagggcttggt

SEQ ID NO: 105033 - RNA, 21 nt, synthetic construct
  source 1..21: mol_type = other RNA
tgttttacacatgtcagccac

SEQ ID NO: 105034 - RNA, 21 nt, synthetic construct
  source 1..21: mol_type = other RNA
tgttttaccatctaaagccag

SEQ ID NO: 105035 - RNA, 21 nt, synthetic construct
  source 1..21: mol_type = other RNA
tgttttaggagtcaactaatc

SEQ ID NO: 105036 - RNA, 21 nt, synthetic construct
  source 1..21: mol_type = other RNA
tgttttaggggggaaaacacc

SEQ ID NO: 105037 - RNA, 21 nt, synthetic construct
  source 1..21: mol_type = other RNA
tgttttaggtagtcttgtcat

SEQ ID NO: 105038 - RNA, 21 nt, synthetic construct
  source 1..21: mol_type = other RNA
tgttttagtggctcacagtgc

SEQ ID NO: 105039 - RNA, 21 nt, synthetic construct
  source 1..21: mol_type = other RNA
tgttttatttagcccatgtct

SEQ ID NO: 105040 - RNA, 21 nt, synthetic construct
  source 1..21: mol_type = other RNA
tgttttatttaggccctctat

SEQ ID NO: 105041 - RNA, 21 nt, synthetic construct
  source 1..21: mol_type = other RNA
tgttttatttcttgacctcag

SEQ ID NO: 105042 - RNA, 21 nt, synthetic construct
  source 1..21: mol_type = other RNA
tgttttatttggctgttacca

SEQ ID NO: 105043 - RNA, 21 nt, synthetic construct
  source 1..21: mol_type = other RNA
tgttttcactctcaatagtgt

SEQ ID NO: 105044 - RNA, 21 nt, synthetic construct
  source 1..21: mol_type = other RNA
tgttttcagttgcatgaattt

SEQ ID NO: 105045 - RNA, 21 nt, synthetic construct
  source 1..21: mol_type = other RNA
tgttttcatgcgacatatcag

SEQ ID NO: 105046 - RNA, 21 nt, synthetic construct
  source 1..21: mol_type = other RNA
tgttttcattcgttcaaaaca

SEQ ID NO: 105047 - RNA, 21 nt, synthetic construct
  source 1..21: mol_type = other RNA
tgttttcatttattctgttgc

SEQ ID NO: 105048 - RNA, 21 nt, synthetic construct
  source 1..21: mol_type = other RNA
tgttttccacagtgactttac

SEQ ID NO: 105049 - RNA, 21 nt, synthetic construct
  source 1..21: mol_type = other RNA
tgttttcccccctaaaacact

SEQ ID NO: 105050 - RNA, 21 nt, synthetic construct
  source 1..21: mol_type = other RNA
tgttttcccttttgtagctaa

SEQ ID NO: 105051 - RNA, 21 nt, synthetic construct
  source 1..21: mol_type = other RNA
tgttttccgtgtgacaaaaag

SEQ ID NO: 105052 - RNA, 21 nt, synthetic construct
  source 1..21: mol_type = other RNA
tgttttctccttctggaagat

SEQ ID NO: 105053 - RNA, 21 nt, synthetic construct
  source 1..21: mol_type = other RNA
tgttttcttattttttcccag

SEQ ID NO: 105054 - RNA, 21 nt, synthetic construct
  source 1..21: mol_type = other RNA
tgttttcttcatggactagac

SEQ ID NO: 105055 - RNA, 21 nt, synthetic construct
  source 1..21: mol_type = other RNA
tgttttgaacgaatgaaaaca

SEQ ID NO: 105056 - RNA, 21 nt, synthetic construct
  source 1..21: mol_type = other RNA
tgttttgaataacctcataag

SEQ ID NO: 105057 - RNA, 21 nt, synthetic construct
  source 1..21: mol_type = other RNA
tgttttgatagttgcagattc

SEQ ID NO: 105058 - RNA, 21 nt, synthetic construct
  source 1..21: mol_type = other RNA
tgttttgatttgcatttctct

SEQ ID NO: 105059 - RNA, 21 nt, synthetic construct
  source 1..21: mol_type = other RNA
tgttttgcaagattaatcttg

SEQ ID NO: 105060 - RNA, 21 nt, synthetic construct
  source 1..21: mol_type = other RNA
tgttttgcagagatgaggtct

SEQ ID NO: 105061 - RNA, 21 nt, synthetic construct
  source 1..21: mol_type = other RNA
tgttttgcttactgtagcatt

SEQ ID NO: 105062 - RNA, 21 nt, synthetic construct
  source 1..21: mol_type = other RNA
tgttttgcttcgaagcttatt

SEQ ID NO: 105063 - RNA, 21 nt, synthetic construct
  source 1..21: mol_type = other RNA
tgttttggtaaaatgtggcaa

SEQ ID NO: 105064 - RNA, 21 nt, synthetic construct
  source 1..21: mol_type = other RNA
tgttttggtcaaaactgtatt

SEQ ID NO: 105065 - RNA, 21 nt, synthetic construct
  source 1..21: mol_type = other RNA
tgttttgtgtttgtgaccaga

SEQ ID NO: 105066 - RNA, 21 nt, synthetic construct
  source 1..21: mol_type = other RNA
tgttttgttctcgttcatgtt

SEQ ID NO: 105067 - RNA, 21 nt, synthetic construct
  source 1..21: mol_type = other RNA
tgttttgttgctattgttgaa

SEQ ID NO: 105068 - RNA, 21 nt, synthetic construct
  source 1..21: mol_type = other RNA
tgttttgttttgaataacctc

SEQ ID NO: 105069 - RNA, 21 nt, synthetic construct
  source 1..21: mol_type = other RNA
tgttttgtttttctctccttg

SEQ ID NO: 105070 - RNA, 21 nt, synthetic construct
  source 1..21: mol_type = other RNA
tgtttttagagagatgcctgt

SEQ ID NO: 105071 - RNA, 21 nt, synthetic construct
  source 1..21: mol_type = other RNA
tgtttttatatgcattaagcc

SEQ ID NO: 105072 - RNA, 21 nt, synthetic construct
  source 1..21: mol_type = other RNA
tgtttttcagccctgatagat

SEQ ID NO: 105073 - RNA, 21 nt, synthetic construct
  source 1..21: mol_type = other RNA
tgtttttccgtctagccactt

SEQ ID NO: 105074 - RNA, 21 nt, synthetic construct
  source 1..21: mol_type = other RNA
tgtttttctaggtagtttctt

SEQ ID NO: 105075 - RNA, 21 nt, synthetic construct
  source 1..21: mol_type = other RNA
tgtttttctctccttgcacat

SEQ ID NO: 105076 - RNA, 21 nt, synthetic construct
  source 1..21: mol_type = other RNA
tgtttttcttagtctagccaa

SEQ ID NO: 105077 - RNA, 21 nt, synthetic construct
  source 1..21: mol_type = other RNA
tgtttttcttttttgagttgg

SEQ ID NO: 105078 - RNA, 21 nt, synthetic construct
  source 1..21: mol_type = other RNA
tgttttttcacagaaacagaa

SEQ ID NO: 105079 - RNA, 21 nt, synthetic construct
  source 1..21: mol_type = other RNA
tgttttttcctcccttcagcc

SEQ ID NO: 105080 - RNA, 21 nt, synthetic construct
  source 1..21: mol_type = other RNA
tgttttttccttctttggggg

SEQ ID NO: 105081 - RNA, 21 nt, synthetic construct
  source 1..21: mol_type = other RNA
ttaaaaaatgcgcgtccgcga

SEQ ID NO: 105082 - RNA, 21 nt, synthetic construct
  source 1..21: mol_type = other RNA
ttaaaaacaacactaaccaac

SEQ ID NO: 105083 - RNA, 21 nt, synthetic construct
  source 1..21: mol_type = other RNA
ttaaaaactgagaccggatga

SEQ ID NO: 105084 - RNA, 21 nt, synthetic construct
  source 1..21: mol_type = other RNA
ttaaaaacttaagtatctcgg

SEQ ID NO: 105085 - RNA, 21 nt, synthetic construct
  source 1..21: mol_type = other RNA
ttaaaaactttttgggccttt

SEQ ID NO: 105086 - RNA, 21 nt, synthetic construct
  source 1..21: mol_type = other RNA
ttaaaaagaaaaagctcacct

SEQ ID NO: 105087 - RNA, 21 nt, synthetic construct
  source 1..21: mol_type = other RNA
ttaaaaagcagctacctgttg

SEQ ID NO: 105088 - RNA, 21 nt, synthetic construct
  source 1..21: mol_type = other RNA
ttaaaacactggcaaaaatca

SEQ ID NO: 105089 - RNA, 21 nt, synthetic construct
  source 1..21: mol_type = other RNA
ttaaaacatggatatttggcc

SEQ ID NO: 105090 - RNA, 21 nt, synthetic construct
  source 1..21: mol_type = other RNA
ttaaaaccagagcggaatttt

SEQ ID NO: 105091 - RNA, 21 nt, synthetic construct
  source 1..21: mol_type = other RNA
ttaaaacccatgatctttgga

SEQ ID NO: 105092 - RNA, 21 nt, synthetic construct
  source 1..21: mol_type = other RNA
ttaaaactcacaaaaagtgtg

SEQ ID NO: 105093 - RNA, 21 nt, synthetic construct
  source 1..21: mol_type = other RNA
ttaaaactgctgagtcttcta

SEQ ID NO: 105094 - RNA, 21 nt, synthetic construct
  source 1..21: mol_type = other RNA
ttaaaacttgtagaggaggag

SEQ ID NO: 105095 - RNA, 21 nt, synthetic construct
  source 1..21: mol_type = other RNA
ttaaaagaaaatggccaagag

SEQ ID NO: 105096 - RNA, 21 nt, synthetic construct
  source 1..21: mol_type = other RNA
ttaaaagaacctctggaaagg

SEQ ID NO: 105097 - RNA, 21 nt, synthetic construct
  source 1..21: mol_type = other RNA
ttaaaagacatctttcctgtg

SEQ ID NO: 105098 - RNA, 21 nt, synthetic construct
  source 1..21: mol_type = other RNA
ttaaaagagcgaagagggaga

SEQ ID NO: 105099 - RNA, 21 nt, synthetic construct
  source 1..21: mol_type = other RNA
ttaaaagagtgcacattcctt

SEQ ID NO: 105100 - RNA, 21 nt, synthetic construct
  source 1..21: mol_type = other RNA
ttaaaagatatccacagtatg

SEQ ID NO: 105101 - RNA, 21 nt, synthetic construct
  source 1..21: mol_type = other RNA
ttaaaagatgcattctgtcac

SEQ ID NO: 105102 - RNA, 21 nt, synthetic construct
  source 1..21: mol_type = other RNA
ttaaaagcacaagcacagagt

SEQ ID NO: 105103 - RNA, 21 nt, synthetic construct
  source 1..21: mol_type = other RNA
ttaaaaggagatatacaggaa

SEQ ID NO: 105104 - RNA, 21 nt, synthetic construct
  source 1..21: mol_type = other RNA
ttaaaaggtataaaggatgca

SEQ ID NO: 105105 - RNA, 21 nt, synthetic construct
  source 1..21: mol_type = other RNA
ttaaaagtcagctaggcgtag

SEQ ID NO: 105106 - RNA, 21 nt, synthetic construct
  source 1..21: mol_type = other RNA
ttaaaagtgctgcagtatgca

SEQ ID NO: 105107 - RNA, 21 nt, synthetic construct
  source 1..21: mol_type = other RNA
ttaaaagttagctggcaaaat

SEQ ID NO: 105108 - RNA, 21 nt, synthetic construct
  source 1..21: mol_type = other RNA
ttaaaagttttccaaccactg

SEQ ID NO: 105109 - RNA, 21 nt, synthetic construct
  source 1..21: mol_type = other RNA
ttaaaataacacgcagaacca

SEQ ID NO: 105110 - RNA, 21 nt, synthetic construct
  source 1..21: mol_type = other RNA
ttaaaataccagaggttaaag

SEQ ID NO: 105111 - RNA, 21 nt, synthetic construct
  source 1..21: mol_type = other RNA
ttaaaatctgattcagtggtt

SEQ ID NO: 105112 - RNA, 21 nt, synthetic construct
  source 1..21: mol_type = other RNA
ttaaaatgaaaatgttccctc

SEQ ID NO: 105113 - RNA, 21 nt, synthetic construct
  source 1..21: mol_type = other RNA
ttaaaatgaacctgctttcta

SEQ ID NO: 105114 - RNA, 21 nt, synthetic construct
  source 1..21: mol_type = other RNA
ttaaaatgatagcattatccc

SEQ ID NO: 105115 - RNA, 21 nt, synthetic construct
  source 1..21: mol_type = other RNA
ttaaaattcttccagcctggt

SEQ ID NO: 105116 - RNA, 21 nt, synthetic construct
  source 1..21: mol_type = other RNA
ttaaaattgcagagtgttcaa

SEQ ID NO: 105117 - RNA, 21 nt, synthetic construct
  source 1..21: mol_type = other RNA
ttaaacaatcttgaaaggggc

SEQ ID NO: 105118 - RNA, 21 nt, synthetic construct
  source 1..21: mol_type = other RNA
ttaaacacacccttggtaaac

SEQ ID NO: 105119 - RNA, 21 nt, synthetic construct
  source 1..21: mol_type = other RNA
ttaaacaggtgtaagagatta

SEQ ID NO: 105120 - RNA, 21 nt, synthetic construct
  source 1..21: mol_type = other RNA
ttaaacatgtaaaacagaccc

SEQ ID NO: 105121 - RNA, 21 nt, synthetic construct
  source 1..21: mol_type = other RNA
ttaaacccaacaaacaattag

SEQ ID NO: 105122 - RNA, 21 nt, synthetic construct
  source 1..21: mol_type = other RNA
ttaaacccatttcatgccatc

SEQ ID NO: 105123 - RNA, 21 nt, synthetic construct
  source 1..21: mol_type = other RNA
ttaaacctgttacatggttct

SEQ ID NO: 105124 - RNA, 21 nt, synthetic construct
  source 1..21: mol_type = other RNA
ttaaacgtcagagcagcactg

SEQ ID NO: 105125 - RNA, 21 nt, synthetic construct
  source 1..21: mol_type = other RNA
ttaaactatagacccaaagca

SEQ ID NO: 105126 - RNA, 21 nt, synthetic construct
  source 1..21: mol_type = other RNA
ttaaactcattatcccagaca

SEQ ID NO: 105127 - RNA, 21 nt, synthetic construct
  source 1..21: mol_type = other RNA
ttaaactgccaaaccctacac

SEQ ID NO: 105128 - RNA, 21 nt, synthetic construct
  source 1..21: mol_type = other RNA
ttaaactggatgaatacaaag

SEQ ID NO: 105129 - RNA, 21 nt, synthetic construct
  source 1..21: mol_type = other RNA
ttaaacttcaaggtaatctag

SEQ ID NO: 105130 - RNA, 21 nt, synthetic construct
  source 1..21: mol_type = other RNA
ttaaacttggtctgggtgata

SEQ ID NO: 105131 - RNA, 21 nt, synthetic construct
  source 1..21: mol_type = other RNA
ttaaagaaaggtctctctctg

SEQ ID NO: 105132 - RNA, 21 nt, synthetic construct
  source 1..21: mol_type = other RNA
ttaaagacagctactaaacaa

SEQ ID NO: 105133 - RNA, 21 nt, synthetic construct
  source 1..21: mol_type = other RNA
ttaaagacctcaggtttagaa

SEQ ID NO: 105134 - RNA, 21 nt, synthetic construct
  source 1..21: mol_type = other RNA
ttaaagacgttcagataacaa

SEQ ID NO: 105135 - RNA, 21 nt, synthetic construct
  source 1..21: mol_type = other RNA
ttaaagcaacaggaagaggca

SEQ ID NO: 105136 - RNA, 21 nt, synthetic construct
  source 1..21: mol_type = other RNA
ttaaagcagggaggggtcccc

SEQ ID NO: 105137 - RNA, 21 nt, synthetic construct
  source 1..21: mol_type = other RNA
ttaaagccacactcttggtct

SEQ ID NO: 105138 - RNA, 21 nt, synthetic construct
  source 1..21: mol_type = other RNA
ttaaagcctctcaacacttca

SEQ ID NO: 105139 - RNA, 21 nt, synthetic construct
  source 1..21: mol_type = other RNA
ttaaagcgctactcagctgtc

SEQ ID NO: 105140 - RNA, 21 nt, synthetic construct
  source 1..21: mol_type = other RNA
ttaaagctctaataaaagctg

SEQ ID NO: 105141 - RNA, 21 nt, synthetic construct
  source 1..21: mol_type = other RNA
ttaaagctctatggcatttga

SEQ ID NO: 105142 - RNA, 21 nt, synthetic construct
  source 1..21: mol_type = other RNA
ttaaagctgaactcctttctt

SEQ ID NO: 105143 - RNA, 21 nt, synthetic construct
  source 1..21: mol_type = other RNA
ttaaagctttgtgactgtgag

SEQ ID NO: 105144 - RNA, 21 nt, synthetic construct
  source 1..21: mol_type = other RNA
ttaaaggaaaagagatctagt

SEQ ID NO: 105145 - RNA, 21 nt, synthetic construct
  source 1..21: mol_type = other RNA
ttaaaggatgtcaactgaggc

SEQ ID NO: 105146 - RNA, 21 nt, synthetic construct
  source 1..21: mol_type = other RNA
ttaaaggccctgatttaaagt

SEQ ID NO: 105147 - RNA, 21 nt, synthetic construct
  source 1..21: mol_type = other RNA
ttaaaggctggaaataatttc

SEQ ID NO: 105148 - RNA, 21 nt, synthetic construct
  source 1..21: mol_type = other RNA
ttaaagggataatgctatcca

SEQ ID NO: 105149 - RNA, 21 nt, synthetic construct
  source 1..21: mol_type = other RNA
ttaaaggtttggagtttgtag

SEQ ID NO: 105150 - RNA, 21 nt, synthetic construct
  source 1..21: mol_type = other RNA
ttaaagtagaaggccctatgc

SEQ ID NO: 105151 - RNA, 21 nt, synthetic construct
  source 1..21: mol_type = other RNA
ttaaagtaggttgagacttag

SEQ ID NO: 105152 - RNA, 21 nt, synthetic construct
  source 1..21: mol_type = other RNA
ttaaagtgtaaagtttctctc

SEQ ID NO: 105153 - RNA, 21 nt, synthetic construct
  source 1..21: mol_type = other RNA
ttaaagttagtgaagcagaga

SEQ ID NO: 105154 - RNA, 21 nt, synthetic construct
  source 1..21: mol_type = other RNA
ttaaagttggtcctgcatatg

SEQ ID NO: 105155 - RNA, 21 nt, synthetic construct
  source 1..21: mol_type = other RNA
ttaaagtttcaaactgtggtc

SEQ ID NO: 105156 - RNA, 21 nt, synthetic construct
  source 1..21: mol_type = other RNA
ttaaataagggcattttcaag

SEQ ID NO: 105157 - RNA, 21 nt, synthetic construct
  source 1..21: mol_type = other RNA
ttaaatacagagcacagactc

SEQ ID NO: 105158 - RNA, 21 nt, synthetic construct
  source 1..21: mol_type = other RNA
ttaaataccacctgaaatctg

SEQ ID NO: 105159 - RNA, 21 nt, synthetic construct
  source 1..21: mol_type = other RNA
ttaaatcagcaccatctaaca

SEQ ID NO: 105160 - RNA, 21 nt, synthetic construct
  source 1..21: mol_type = other RNA
ttaaatcagggcctttaatca

SEQ ID NO: 105161 - RNA, 21 nt, synthetic construct
  source 1..21: mol_type = other RNA
ttaaatcatgatgtttggctc

SEQ ID NO: 105162 - RNA, 21 nt, synthetic construct
  source 1..21: mol_type = other RNA
ttaaatccgagacaagttctc

SEQ ID NO: 105163 - RNA, 21 nt, synthetic construct
  source 1..21: mol_type = other RNA
ttaaatgaaggaaaaaacggg

SEQ ID NO: 105164 - RNA, 21 nt, synthetic construct
  source 1..21: mol_type = other RNA
ttaaatgagacacctacaata

SEQ ID NO: 105165 - RNA, 21 nt, synthetic construct
  source 1..21: mol_type = other RNA
ttaaatgccaatttgggatat

SEQ ID NO: 105166 - RNA, 21 nt, synthetic construct
  source 1..21: mol_type = other RNA
ttaaatgccacataaatcaca

SEQ ID NO: 105167 - RNA, 21 nt, synthetic construct
  source 1..21: mol_type = other RNA
ttaaatgtacaacattcatcc

SEQ ID NO: 105168 - RNA, 21 nt, synthetic construct
  source 1..21: mol_type = other RNA
ttaaatgtgaattagatggct

SEQ ID NO: 105169 - RNA, 21 nt, synthetic construct
  source 1..21: mol_type = other RNA
ttaaatgttttgcagagatga

SEQ ID NO: 105170 - RNA, 21 nt, synthetic construct
  source 1..21: mol_type = other RNA
ttaaattaaaaactgagaccg

SEQ ID NO: 105171 - RNA, 21 nt, synthetic construct
  source 1..21: mol_type = other RNA
ttaaatttctaaggttctgct

SEQ ID NO: 105172 - RNA, 21 nt, synthetic construct
  source 1..21: mol_type = other RNA
ttaaatttgattgttagccac

SEQ ID NO: 105173 - RNA, 21 nt, synthetic construct
  source 1..21: mol_type = other RNA
ttaaattttgagacctcaggc

SEQ ID NO: 105174 - RNA, 21 nt, synthetic construct
  source 1..21: mol_type = other RNA
ttaacaagaatcctgctattt

SEQ ID NO: 105175 - RNA, 21 nt, synthetic construct
  source 1..21: mol_type = other RNA
ttaacaatactgcattgtgca

SEQ ID NO: 105176 - RNA, 21 nt, synthetic construct
  source 1..21: mol_type = other RNA
ttaacaattggtgaatctgag

SEQ ID NO: 105177 - RNA, 21 nt, synthetic construct
  source 1..21: mol_type = other RNA
ttaacacacaacaatgaattc

SEQ ID NO: 105178 - RNA, 21 nt, synthetic construct
  source 1..21: mol_type = other RNA
ttaacaccatggcaggtttca

SEQ ID NO: 105179 - RNA, 21 nt, synthetic construct
  source 1..21: mol_type = other RNA
ttaacacctttgtattcatcc

SEQ ID NO: 105180 - RNA, 21 nt, synthetic construct
  source 1..21: mol_type = other RNA
ttaacactaatccttctcata

SEQ ID NO: 105181 - RNA, 21 nt, synthetic construct
  source 1..21: mol_type = other RNA
ttaacagaagggtatatacaa

SEQ ID NO: 105182 - RNA, 21 nt, synthetic construct
  source 1..21: mol_type = other RNA
ttaacagatggtcctttttta

SEQ ID NO: 105183 - RNA, 21 nt, synthetic construct
  source 1..21: mol_type = other RNA
ttaacagctcagaagctatag

SEQ ID NO: 105184 - RNA, 21 nt, synthetic construct
  source 1..21: mol_type = other RNA
ttaacagtgctgtgccagtgc

SEQ ID NO: 105185 - RNA, 21 nt, synthetic construct
  source 1..21: mol_type = other RNA
ttaacataccgacggctcagg

SEQ ID NO: 105186 - RNA, 21 nt, synthetic construct
  source 1..21: mol_type = other RNA
ttaacatttcttctagtcaca

SEQ ID NO: 105187 - RNA, 21 nt, synthetic construct
  source 1..21: mol_type = other RNA
ttaacatttgaactcactggc

SEQ ID NO: 105188 - RNA, 21 nt, synthetic construct
  source 1..21: mol_type = other RNA
ttaaccaagaacaaccttatc

SEQ ID NO: 105189 - RNA, 21 nt, synthetic construct
  source 1..21: mol_type = other RNA
ttaaccaattatgctgagtga

SEQ ID NO: 105190 - RNA, 21 nt, synthetic construct
  source 1..21: mol_type = other RNA
ttaaccactgaaacttttctt

SEQ ID NO: 105191 - RNA, 21 nt, synthetic construct
  source 1..21: mol_type = other RNA
ttaaccatatggtttacaatg

SEQ ID NO: 105192 - RNA, 21 nt, synthetic construct
  source 1..21: mol_type = other RNA
ttaaccattgagccaaagaag

SEQ ID NO: 105193 - RNA, 21 nt, synthetic construct
  source 1..21: mol_type = other RNA
ttaacccacagataatttctt

SEQ ID NO: 105194 - RNA, 21 nt, synthetic construct
  source 1..21: mol_type = other RNA
ttaacctctggtattttaaga

SEQ ID NO: 105195 - RNA, 21 nt, synthetic construct
  source 1..21: mol_type = other RNA
ttaacctcttgaagtcagtta

SEQ ID NO: 105196 - RNA, 21 nt, synthetic construct
  source 1..21: mol_type = other RNA
ttaaccttctggggttcaaac

SEQ ID NO: 105197 - RNA, 21 nt, synthetic construct
  source 1..21: mol_type = other RNA
ttaacgtatctgggaaaaaat

SEQ ID NO: 105198 - RNA, 21 nt, synthetic construct
  source 1..21: mol_type = other RNA
ttaacgtttatctacagagga

SEQ ID NO: 105199 - RNA, 21 nt, synthetic construct
  source 1..21: mol_type = other RNA
ttaactaatagccagtgcagc

SEQ ID NO: 105200 - RNA, 21 nt, synthetic construct
  source 1..21: mol_type = other RNA
ttaactagaattgactttacc

SEQ ID NO: 105201 - RNA, 21 nt, synthetic construct
  source 1..21: mol_type = other RNA
ttaactataggagttcattcg

SEQ ID NO: 105202 - RNA, 21 nt, synthetic construct
  source 1..21: mol_type = other RNA
ttaactatcctatgtggggaa

SEQ ID NO: 105203 - RNA, 21 nt, synthetic construct
  source 1..21: mol_type = other RNA
ttaactatggacatgaggaaa

SEQ ID NO: 105204 - RNA, 21 nt, synthetic construct
  source 1..21: mol_type = other RNA
ttaactcatttaaacgtcaga

SEQ ID NO: 105205 - RNA, 21 nt, synthetic construct
  source 1..21: mol_type = other RNA
ttaactccaggggacatgctc

SEQ ID NO: 105206 - RNA, 21 nt, synthetic construct
  source 1..21: mol_type = other RNA
ttaactcttgcattagagccc

SEQ ID NO: 105207 - RNA, 21 nt, synthetic construct
  source 1..21: mol_type = other RNA
ttaactgaaatcgggagtaac

SEQ ID NO: 105208 - RNA, 21 nt, synthetic construct
  source 1..21: mol_type = other RNA
ttaactgacttacagacctta

SEQ ID NO: 105209 - RNA, 21 nt, synthetic construct
  source 1..21: mol_type = other RNA
ttaactgaggtgtttttcagc

SEQ ID NO: 105210 - RNA, 21 nt, synthetic construct
  source 1..21: mol_type = other RNA
ttaactgtattgcaaactaag

SEQ ID NO: 105211 - RNA, 21 nt, synthetic construct
  source 1..21: mol_type = other RNA
ttaacttattggaaaactctg

SEQ ID NO: 105212 - RNA, 21 nt, synthetic construct
  source 1..21: mol_type = other RNA
ttaacttcacctctacacaaa

SEQ ID NO: 105213 - RNA, 21 nt, synthetic construct
  source 1..21: mol_type = other RNA
ttaacttctaatgcccattaa

SEQ ID NO: 105214 - RNA, 21 nt, synthetic construct
  source 1..21: mol_type = other RNA
ttaacttgctttgaatttgga

SEQ ID NO: 105215 - RNA, 21 nt, synthetic construct
  source 1..21: mol_type = other RNA
ttaactttaaagctctatggc

SEQ ID NO: 105216 - RNA, 21 nt, synthetic construct
  source 1..21: mol_type = other RNA
ttaactttgatgaattccagt

SEQ ID NO: 105217 - RNA, 21 nt, synthetic construct
  source 1..21: mol_type = other RNA
ttaagaaaagaagttacggtt

SEQ ID NO: 105218 - RNA, 21 nt, synthetic construct
  source 1..21: mol_type = other RNA
ttaagaaaatcattgttcagg

SEQ ID NO: 105219 - RNA, 21 nt, synthetic construct
  source 1..21: mol_type = other RNA
ttaagaaccatacagtgcctt

SEQ ID NO: 105220 - RNA, 21 nt, synthetic construct
  source 1..21: mol_type = other RNA
ttaagaacttcttcaaaagac

SEQ ID NO: 105221 - RNA, 21 nt, synthetic construct
  source 1..21: mol_type = other RNA
ttaagaaggaaaagaacacag

SEQ ID NO: 105222 - RNA, 21 nt, synthetic construct
  source 1..21: mol_type = other RNA
ttaagaagggaacactaagaa

SEQ ID NO: 105223 - RNA, 21 nt, synthetic construct
  source 1..21: mol_type = other RNA
ttaagacaatgtggagttggt

SEQ ID NO: 105224 - RNA, 21 nt, synthetic construct
  source 1..21: mol_type = other RNA
ttaagacacaaggaaggtcaa

SEQ ID NO: 105225 - RNA, 21 nt, synthetic construct
  source 1..21: mol_type = other RNA
ttaagacatttgggaatgtgg

SEQ ID NO: 105226 - RNA, 21 nt, synthetic construct
  source 1..21: mol_type = other RNA
ttaagaccacaaggattaatc

SEQ ID NO: 105227 - RNA, 21 nt, synthetic construct
  source 1..21: mol_type = other RNA
ttaagactgctgtttaccaag

SEQ ID NO: 105228 - RNA, 21 nt, synthetic construct
  source 1..21: mol_type = other RNA
ttaagagaatggaaacttgcc

SEQ ID NO: 105229 - RNA, 21 nt, synthetic construct
  source 1..21: mol_type = other RNA
ttaagagactctcaagaaggt

SEQ ID NO: 105230 - RNA, 21 nt, synthetic construct
  source 1..21: mol_type = other RNA
ttaagagaggaagtgaccctg

SEQ ID NO: 105231 - RNA, 21 nt, synthetic construct
  source 1..21: mol_type = other RNA
ttaagagcatgttgggccaac

SEQ ID NO: 105232 - RNA, 21 nt, synthetic construct
  source 1..21: mol_type = other RNA
ttaagagtatctttttcagca

SEQ ID NO: 105233 - RNA, 21 nt, synthetic construct
  source 1..21: mol_type = other RNA
ttaagagtctcatctgtcaaa

SEQ ID NO: 105234 - RNA, 21 nt, synthetic construct
  source 1..21: mol_type = other RNA
ttaagagtgaagaaacctttc

SEQ ID NO: 105235 - RNA, 21 nt, synthetic construct
  source 1..21: mol_type = other RNA
ttaagagtgtgctgactagta

SEQ ID NO: 105236 - RNA, 21 nt, synthetic construct
  source 1..21: mol_type = other RNA
ttaagataatgctgttctctg

SEQ ID NO: 105237 - RNA, 21 nt, synthetic construct
  source 1..21: mol_type = other RNA
ttaagattcaacaaaactggg

SEQ ID NO: 105238 - RNA, 21 nt, synthetic construct
  source 1..21: mol_type = other RNA
ttaagattctctttagggaag

SEQ ID NO: 105239 - RNA, 21 nt, synthetic construct
  source 1..21: mol_type = other RNA
ttaagcaaaatggaagtgctg

SEQ ID NO: 105240 - RNA, 21 nt, synthetic construct
  source 1..21: mol_type = other RNA
ttaagcaaccttttaggtgcc

SEQ ID NO: 105241 - RNA, 21 nt, synthetic construct
  source 1..21: mol_type = other RNA
ttaagcacagactgtgccttg

SEQ ID NO: 105242 - RNA, 21 nt, synthetic construct
  source 1..21: mol_type = other RNA
ttaagcacatctgtcttgtgc

SEQ ID NO: 105243 - RNA, 21 nt, synthetic construct
  source 1..21: mol_type = other RNA
ttaagcaccactagagtatta

SEQ ID NO: 105244 - RNA, 21 nt, synthetic construct
  source 1..21: mol_type = other RNA
ttaagcatcccatatggaggc

SEQ ID NO: 105245 - RNA, 21 nt, synthetic construct
  source 1..21: mol_type = other RNA
ttaagcattttccggttgtat

SEQ ID NO: 105246 - RNA, 21 nt, synthetic construct
  source 1..21: mol_type = other RNA
ttaagccagtcactaaaaatc

SEQ ID NO: 105247 - RNA, 21 nt, synthetic construct
  source 1..21: mol_type = other RNA
ttaagccatttcaggttttcg

SEQ ID NO: 105248 - RNA, 21 nt, synthetic construct
  source 1..21: mol_type = other RNA
ttaagcccaacttcacaccat

SEQ ID NO: 105249 - RNA, 21 nt, synthetic construct
  source 1..21: mol_type = other RNA
ttaagccgttccatcagagag

SEQ ID NO: 105250 - RNA, 21 nt, synthetic construct
  source 1..21: mol_type = other RNA
ttaagcctagagattaggcag

SEQ ID NO: 105251 - RNA, 21 nt, synthetic construct
  source 1..21: mol_type = other RNA
ttaagcttaggtctttgatcc

SEQ ID NO: 105252 - RNA, 21 nt, synthetic construct
  source 1..21: mol_type = other RNA
ttaagcttcgacagtcccttg

SEQ ID NO: 105253 - RNA, 21 nt, synthetic construct
  source 1..21: mol_type = other RNA
ttaaggaaatggacagcacat

SEQ ID NO: 105254 - RNA, 21 nt, synthetic construct
  source 1..21: mol_type = other RNA
ttaaggaatgcctataaaatg

SEQ ID NO: 105255 - RNA, 21 nt, synthetic construct
  source 1..21: mol_type = other RNA
ttaaggacatccacaacattg

SEQ ID NO: 105256 - RNA, 21 nt, synthetic construct
  source 1..21: mol_type = other RNA
ttaaggaccaggtatggcgac

SEQ ID NO: 105257 - RNA, 21 nt, synthetic construct
  source 1..21: mol_type = other RNA
ttaaggagatggcacatacca

SEQ ID NO: 105258 - RNA, 21 nt, synthetic construct
  source 1..21: mol_type = other RNA
ttaaggcagggcttggtggcc

SEQ ID NO: 105259 - RNA, 21 nt, synthetic construct
  source 1..21: mol_type = other RNA
ttaaggcgcagacacaccatg

SEQ ID NO: 105260 - RNA, 21 nt, synthetic construct
  source 1..21: mol_type = other RNA
ttaaggctaaaacatacatga

SEQ ID NO: 105261 - RNA, 21 nt, synthetic construct
  source 1..21: mol_type = other RNA
ttaaggctgaacaatattcca

SEQ ID NO: 105262 - RNA, 21 nt, synthetic construct
  source 1..21: mol_type = other RNA
ttaaggctggaggatggcttg

SEQ ID NO: 105263 - RNA, 21 nt, synthetic construct
  source 1..21: mol_type = other RNA
ttaaggcttggaaaacaaatt

SEQ ID NO: 105264 - RNA, 21 nt, synthetic construct
  source 1..21: mol_type = other RNA
ttaagggaaacactcatacca

SEQ ID NO: 105265 - RNA, 21 nt, synthetic construct
  source 1..21: mol_type = other RNA
ttaagggaaacagggttacag

SEQ ID NO: 105266 - RNA, 21 nt, synthetic construct
  source 1..21: mol_type = other RNA
ttaagggaagagctaagatgc

SEQ ID NO: 105267 - RNA, 21 nt, synthetic construct
  source 1..21: mol_type = other RNA
ttaagggccatttcatttctg

SEQ ID NO: 105268 - RNA, 21 nt, synthetic construct
  source 1..21: mol_type = other RNA
ttaaggggtaaatggtttctc

SEQ ID NO: 105269 - RNA, 21 nt, synthetic construct
  source 1..21: mol_type = other RNA
ttaaggtaagggtccagcttc

SEQ ID NO: 105270 - RNA, 21 nt, synthetic construct
  source 1..21: mol_type = other RNA
ttaagtatctcggtcattctg

SEQ ID NO: 105271 - RNA, 21 nt, synthetic construct
  source 1..21: mol_type = other RNA
ttaagtattgcattgaatctg

SEQ ID NO: 105272 - RNA, 21 nt, synthetic construct
  source 1..21: mol_type = other RNA
ttaagtcactccatttgtggc

SEQ ID NO: 105273 - RNA, 21 nt, synthetic construct
  source 1..21: mol_type = other RNA
ttaagtctgaaagcttctgag

SEQ ID NO: 105274 - RNA, 21 nt, synthetic construct
  source 1..21: mol_type = other RNA
ttaagtgcacaatgcagtatt

SEQ ID NO: 105275 - RNA, 21 nt, synthetic construct
  source 1..21: mol_type = other RNA
ttaagtggcgctgtttgcctg

SEQ ID NO: 105276 - RNA, 21 nt, synthetic construct
  source 1..21: mol_type = other RNA
ttaagttaaaacttgtagagg

SEQ ID NO: 105277 - RNA, 21 nt, synthetic construct
  source 1..21: mol_type = other RNA
ttaagttactgattagaagga

SEQ ID NO: 105278 - RNA, 21 nt, synthetic construct
  source 1..21: mol_type = other RNA
ttaagttctccaagttattac

SEQ ID NO: 105279 - RNA, 21 nt, synthetic construct
  source 1..21: mol_type = other RNA
ttaataaccctgttttgtaga

SEQ ID NO: 105280 - RNA, 21 nt, synthetic construct
  source 1..21: mol_type = other RNA
ttaataacctcaaagtggaaa

SEQ ID NO: 105281 - RNA, 21 nt, synthetic construct
  source 1..21: mol_type = other RNA
ttaataactgcctaagtaatg

SEQ ID NO: 105282 - RNA, 21 nt, synthetic construct
  source 1..21: mol_type = other RNA
ttaataagatcatacacctgg

SEQ ID NO: 105283 - RNA, 21 nt, synthetic construct
  source 1..21: mol_type = other RNA
ttaataagcttcgaagcaaaa

SEQ ID NO: 105284 - RNA, 21 nt, synthetic construct
  source 1..21: mol_type = other RNA
ttaatactatgtatgtggctc

SEQ ID NO: 105285 - RNA, 21 nt, synthetic construct
  source 1..21: mol_type = other RNA
ttaatacttgtgtagcgggaa

SEQ ID NO: 105286 - RNA, 21 nt, synthetic construct
  source 1..21: mol_type = other RNA
ttaatagaggtctgtctttca

SEQ ID NO: 105287 - RNA, 21 nt, synthetic construct
  source 1..21: mol_type = other RNA
ttaatagataggtcatgtaca

SEQ ID NO: 105288 - RNA, 21 nt, synthetic construct
  source 1..21: mol_type = other RNA
ttaatagcccaacagggtttt

SEQ ID NO: 105289 - RNA, 21 nt, synthetic construct
  source 1..21: mol_type = other RNA
ttaatagcctcctaagttttg

SEQ ID NO: 105290 - RNA, 21 nt, synthetic construct
  source 1..21: mol_type = other RNA
ttaatagtgaccctttgaagt

SEQ ID NO: 105291 - RNA, 21 nt, synthetic construct
  source 1..21: mol_type = other RNA
ttaatatgtgtacaatggggc

SEQ ID NO: 105292 - RNA, 21 nt, synthetic construct
  source 1..21: mol_type = other RNA
ttaatattgtaggtgtctcat

SEQ ID NO: 105293 - RNA, 21 nt, synthetic construct
  source 1..21: mol_type = other RNA
ttaatcaccaggcgcggtggc

SEQ ID NO: 105294 - RNA, 21 nt, synthetic construct
  source 1..21: mol_type = other RNA
ttaatcacctcaagtgatgca

SEQ ID NO: 105295 - RNA, 21 nt, synthetic construct
  source 1..21: mol_type = other RNA
ttaatcagtctgtaagcacct

SEQ ID NO: 105296 - RNA, 21 nt, synthetic construct
  source 1..21: mol_type = other RNA
ttaatccttgtggtcttaaga

SEQ ID NO: 105297 - RNA, 21 nt, synthetic construct
  source 1..21: mol_type = other RNA
ttaatcgaatcctcacaacag

SEQ ID NO: 105298 - RNA, 21 nt, synthetic construct
  source 1..21: mol_type = other RNA
ttaatctacaaaacagggtta

SEQ ID NO: 105299 - RNA, 21 nt, synthetic construct
  source 1..21: mol_type = other RNA
ttaatctcatccacaatgaga

SEQ ID NO: 105300 - RNA, 21 nt, synthetic construct
  source 1..21: mol_type = other RNA
ttaatctcctgagtagcaggg

SEQ ID NO: 105301 - RNA, 21 nt, synthetic construct
  source 1..21: mol_type = other RNA
ttaatctctcttgaccttagt

SEQ ID NO: 105302 - RNA, 21 nt, synthetic construct
  source 1..21: mol_type = other RNA
ttaatctcttacacctgttta

SEQ ID NO: 105303 - RNA, 21 nt, synthetic construct
  source 1..21: mol_type = other RNA
ttaatctgtcagcagttcagc

SEQ ID NO: 105304 - RNA, 21 nt, synthetic construct
  source 1..21: mol_type = other RNA
ttaatctgtcctgaatactat

SEQ ID NO: 105305 - RNA, 21 nt, synthetic construct
  source 1..21: mol_type = other RNA
ttaatcttcacacttagttca

SEQ ID NO: 105306 - RNA, 21 nt, synthetic construct
  source 1..21: mol_type = other RNA
ttaatcttgcaaaacaatagc

SEQ ID NO: 105307 - RNA, 21 nt, synthetic construct
  source 1..21: mol_type = other RNA
ttaatgagtagtacttctgag

SEQ ID NO: 105308 - RNA, 21 nt, synthetic construct
  source 1..21: mol_type = other RNA
ttaatgcaacctgctttcctc

SEQ ID NO: 105309 - RNA, 21 nt, synthetic construct
  source 1..21: mol_type = other RNA
ttaatgcccaatcaaatccag

SEQ ID NO: 105310 - RNA, 21 nt, synthetic construct
  source 1..21: mol_type = other RNA
ttaatgccccatgtgttggca

SEQ ID NO: 105311 - RNA, 21 nt, synthetic construct
  source 1..21: mol_type = other RNA
ttaatgcttcatattttgtgg

SEQ ID NO: 105312 - RNA, 21 nt, synthetic construct
  source 1..21: mol_type = other RNA
ttaatgggcacttgggatgtt

SEQ ID NO: 105313 - RNA, 21 nt, synthetic construct
  source 1..21: mol_type = other RNA
ttaatgggcattagaagttaa

SEQ ID NO: 105314 - RNA, 21 nt, synthetic construct
  source 1..21: mol_type = other RNA
ttaatggttagactgcacata

SEQ ID NO: 105315 - RNA, 21 nt, synthetic construct
  source 1..21: mol_type = other RNA
ttaatgtagatcctgaggaag

SEQ ID NO: 105316 - RNA, 21 nt, synthetic construct
  source 1..21: mol_type = other RNA
ttaatgtaggtgtctgatgtg

SEQ ID NO: 105317 - RNA, 21 nt, synthetic construct
  source 1..21: mol_type = other RNA
ttaatgtgatatgccacattt

SEQ ID NO: 105318 - RNA, 21 nt, synthetic construct
  source 1..21: mol_type = other RNA
ttaatgtgctgtccatttcct

SEQ ID NO: 105319 - RNA, 21 nt, synthetic construct
  source 1..21: mol_type = other RNA
ttaatgtgtgaagaaggaatg

SEQ ID NO: 105320 - RNA, 21 nt, synthetic construct
  source 1..21: mol_type = other RNA
ttaatgtgttgtctgattcag

SEQ ID NO: 105321 - RNA, 21 nt, synthetic construct
  source 1..21: mol_type = other RNA
ttaatgttgacatcttgcata

SEQ ID NO: 105322 - RNA, 21 nt, synthetic construct
  source 1..21: mol_type = other RNA
ttaattacccaggcatgatgg

SEQ ID NO: 105323 - RNA, 21 nt, synthetic construct
  source 1..21: mol_type = other RNA
ttaattagccgggtgtagtgg

SEQ ID NO: 105324 - RNA, 21 nt, synthetic construct
  source 1..21: mol_type = other RNA
ttaattatgagcattccccac

SEQ ID NO: 105325 - RNA, 21 nt, synthetic construct
  source 1..21: mol_type = other RNA
ttaattcagtcaacaccaagc

SEQ ID NO: 105326 - RNA, 21 nt, synthetic construct
  source 1..21: mol_type = other RNA
ttaattccacaaccactgggg

SEQ ID NO: 105327 - RNA, 21 nt, synthetic construct
  source 1..21: mol_type = other RNA
ttaattcctactttcttcaac

SEQ ID NO: 105328 - RNA, 21 nt, synthetic construct
  source 1..21: mol_type = other RNA
ttaattctatctgaactttcg

SEQ ID NO: 105329 - RNA, 21 nt, synthetic construct
  source 1..21: mol_type = other RNA
ttaattctgaggcctcctgcc

SEQ ID NO: 105330 - RNA, 21 nt, synthetic construct
  source 1..21: mol_type = other RNA
ttaattctgtttacccttact

SEQ ID NO: 105331 - RNA, 21 nt, synthetic construct
  source 1..21: mol_type = other RNA
ttaattcttaaactgccaaac

SEQ ID NO: 105332 - RNA, 21 nt, synthetic construct
  source 1..21: mol_type = other RNA
ttaattcttttgctgtatacc

SEQ ID NO: 105333 - RNA, 21 nt, synthetic construct
  source 1..21: mol_type = other RNA
ttaattgagctgtccccaccg

SEQ ID NO: 105334 - RNA, 21 nt, synthetic construct
  source 1..21: mol_type = other RNA
ttaattgggggaaaattgaca

SEQ ID NO: 105335 - RNA, 21 nt, synthetic construct
  source 1..21: mol_type = other RNA
ttaatttagatgagagtggcc

SEQ ID NO: 105336 - RNA, 21 nt, synthetic construct
  source 1..21: mol_type = other RNA
ttaatttagcgttcatccaaa

SEQ ID NO: 105337 - RNA, 21 nt, synthetic construct
  source 1..21: mol_type = other RNA
ttaatttccacccatgaagcc

SEQ ID NO: 105338 - RNA, 21 nt, synthetic construct
  source 1..21: mol_type = other RNA
ttaatttgaggtctaggctaa

SEQ ID NO: 105339 - RNA, 21 nt, synthetic construct
  source 1..21: mol_type = other RNA
ttaatttggcttggggaacag

SEQ ID NO: 105340 - RNA, 21 nt, synthetic construct
  source 1..21: mol_type = other RNA
ttaatttgggtttgagtttcc

SEQ ID NO: 105341 - RNA, 21 nt, synthetic construct
  source 1..21: mol_type = other RNA
ttaattttctgactctgtgct

SEQ ID NO: 105342 - RNA, 21 nt, synthetic construct
  source 1..21: mol_type = other RNA
ttaattttgagagtgcagtat

SEQ ID NO: 105343 - RNA, 21 nt, synthetic construct
  source 1..21: mol_type = other RNA
ttaatttttgtcaagtgactc

SEQ ID NO: 105344 - RNA, 21 nt, synthetic construct
  source 1..21: mol_type = other RNA
ttacaaaaacacactgagctt

SEQ ID NO: 105345 - RNA, 21 nt, synthetic construct
  source 1..21: mol_type = other RNA
ttacaaaagaacaggactttt

SEQ ID NO: 105346 - RNA, 21 nt, synthetic construct
  source 1..21: mol_type = other RNA
ttacaaaataggcagtcctct

SEQ ID NO: 105347 - RNA, 21 nt, synthetic construct
  source 1..21: mol_type = other RNA
ttacaaatgaaagtcagctaa

SEQ ID NO: 105348 - RNA, 21 nt, synthetic construct
  source 1..21: mol_type = other RNA
ttacaacagcaaggctcctgc

SEQ ID NO: 105349 - RNA, 21 nt, synthetic construct
  source 1..21: mol_type = other RNA
ttacaactactcgggaggctg

SEQ ID NO: 105350 - RNA, 21 nt, synthetic construct
  source 1..21: mol_type = other RNA
ttacaactctaataacagcct

SEQ ID NO: 105351 - RNA, 21 nt, synthetic construct
  source 1..21: mol_type = other RNA
ttacaactggtttctgcatac

SEQ ID NO: 105352 - RNA, 21 nt, synthetic construct
  source 1..21: mol_type = other RNA
ttacaaggattgaatggaaag

SEQ ID NO: 105353 - RNA, 21 nt, synthetic construct
  source 1..21: mol_type = other RNA
ttacaagggtgacagagccga

SEQ ID NO: 105354 - RNA, 21 nt, synthetic construct
  source 1..21: mol_type = other RNA
ttacaagtacatgaaatactc

SEQ ID NO: 105355 - RNA, 21 nt, synthetic construct
  source 1..21: mol_type = other RNA
ttacaataatatgcctcatgc

SEQ ID NO: 105356 - RNA, 21 nt, synthetic construct
  source 1..21: mol_type = other RNA
ttacaataatgcacatgggca

SEQ ID NO: 105357 - RNA, 21 nt, synthetic construct
  source 1..21: mol_type = other RNA
ttacaatgaatatgtactacc

SEQ ID NO: 105358 - RNA, 21 nt, synthetic construct
  source 1..21: mol_type = other RNA
ttacaatgtaaggtgcacgct

SEQ ID NO: 105359 - RNA, 21 nt, synthetic construct
  source 1..21: mol_type = other RNA
ttacaattcctttctaggcat

SEQ ID NO: 105360 - RNA, 21 nt, synthetic construct
  source 1..21: mol_type = other RNA
ttacacaagtgtttcatttac

SEQ ID NO: 105361 - RNA, 21 nt, synthetic construct
  source 1..21: mol_type = other RNA
ttacacacacctaccaccatg

SEQ ID NO: 105362 - RNA, 21 nt, synthetic construct
  source 1..21: mol_type = other RNA
ttacacacacgtttatattcc

SEQ ID NO: 105363 - RNA, 21 nt, synthetic construct
  source 1..21: mol_type = other RNA
ttacacacctgaaattctcaa

SEQ ID NO: 105364 - RNA, 21 nt, synthetic construct
  source 1..21: mol_type = other RNA
ttacacagaaagcctcttcag

SEQ ID NO: 105365 - RNA, 21 nt, synthetic construct
  source 1..21: mol_type = other RNA
ttacacaggtagacatgtgcc

SEQ ID NO: 105366 - RNA, 21 nt, synthetic construct
  source 1..21: mol_type = other RNA
ttacacatctcccataccacc

SEQ ID NO: 105367 - RNA, 21 nt, synthetic construct
  source 1..21: mol_type = other RNA
ttacacatgtcagccacaaga

SEQ ID NO: 105368 - RNA, 21 nt, synthetic construct
  source 1..21: mol_type = other RNA
ttacacattaggctctgggtc

SEQ ID NO: 105369 - RNA, 21 nt, synthetic construct
  source 1..21: mol_type = other RNA
ttacaccatgcaggttcatgt

SEQ ID NO: 105370 - RNA, 21 nt, synthetic construct
  source 1..21: mol_type = other RNA
ttacaccctaggtagggttgg

SEQ ID NO: 105371 - RNA, 21 nt, synthetic construct
  source 1..21: mol_type = other RNA
ttacacgccttcgcgggcacc

SEQ ID NO: 105372 - RNA, 21 nt, synthetic construct
  source 1..21: mol_type = other RNA
ttacactatggcttttgagtg

SEQ ID NO: 105373 - RNA, 21 nt, synthetic construct
  source 1..21: mol_type = other RNA
ttacactcaaaagccatagtg

SEQ ID NO: 105374 - RNA, 21 nt, synthetic construct
  source 1..21: mol_type = other RNA
ttacacttccagtacatctca

SEQ ID NO: 105375 - RNA, 21 nt, synthetic construct
  source 1..21: mol_type = other RNA
ttacacttggagttttccccc

SEQ ID NO: 105376 - RNA, 21 nt, synthetic construct
  source 1..21: mol_type = other RNA
ttacagactgattaatttgag

SEQ ID NO: 105377 - RNA, 21 nt, synthetic construct
  source 1..21: mol_type = other RNA
ttacagatatcacccagacca

SEQ ID NO: 105378 - RNA, 21 nt, synthetic construct
  source 1..21: mol_type = other RNA
ttacagcagatctgcttgcag

SEQ ID NO: 105379 - RNA, 21 nt, synthetic construct
  source 1..21: mol_type = other RNA
ttacagcagctctagcaaaca

SEQ ID NO: 105380 - RNA, 21 nt, synthetic construct
  source 1..21: mol_type = other RNA
ttacagcatttcagccaaagc

SEQ ID NO: 105381 - RNA, 21 nt, synthetic construct
  source 1..21: mol_type = other RNA
ttacagctcttctcagttgca

SEQ ID NO: 105382 - RNA, 21 nt, synthetic construct
  source 1..21: mol_type = other RNA
ttacaggatatcagaagtgct

SEQ ID NO: 105383 - RNA, 21 nt, synthetic construct
  source 1..21: mol_type = other RNA
ttacaggcatgagccactgcg

SEQ ID NO: 105384 - RNA, 21 nt, synthetic construct
  source 1..21: mol_type = other RNA
ttacaggcatgagtcgccata

SEQ ID NO: 105385 - RNA, 21 nt, synthetic construct
  source 1..21: mol_type = other RNA
ttacaggcgcacgccatctcg

SEQ ID NO: 105386 - RNA, 21 nt, synthetic construct
  source 1..21: mol_type = other RNA
ttacaggcgtgagccacctca

SEQ ID NO: 105387 - RNA, 21 nt, synthetic construct
  source 1..21: mol_type = other RNA
ttacaggggactttgatgttt

SEQ ID NO: 105388 - RNA, 21 nt, synthetic construct
  source 1..21: mol_type = other RNA
ttacaggtcaaactcacttat

SEQ ID NO: 105389 - RNA, 21 nt, synthetic construct
  source 1..21: mol_type = other RNA
ttacagtaagatcctggattg

SEQ ID NO: 105390 - RNA, 21 nt, synthetic construct
  source 1..21: mol_type = other RNA
ttacagtaaggtttccctggg

SEQ ID NO: 105391 - RNA, 21 nt, synthetic construct
  source 1..21: mol_type = other RNA
ttacagtagccaaaggtagaa

SEQ ID NO: 105392 - RNA, 21 nt, synthetic construct
  source 1..21: mol_type = other RNA
ttacagtataggggaactctt

SEQ ID NO: 105393 - RNA, 21 nt, synthetic construct
  source 1..21: mol_type = other RNA
ttacagtcatcacagtccagg

SEQ ID NO: 105394 - RNA, 21 nt, synthetic construct
  source 1..21: mol_type = other RNA
ttacagtctcgaccccctggg

SEQ ID NO: 105395 - RNA, 21 nt, synthetic construct
  source 1..21: mol_type = other RNA
ttacagtgacatatgccggct

SEQ ID NO: 105396 - RNA, 21 nt, synthetic construct
  source 1..21: mol_type = other RNA
ttacagttatgtcagtcaaca

SEQ ID NO: 105397 - RNA, 21 nt, synthetic construct
  source 1..21: mol_type = other RNA
ttacatacttcaaagggtcac

SEQ ID NO: 105398 - RNA, 21 nt, synthetic construct
  source 1..21: mol_type = other RNA
ttacatagcaaggaagcagaa

SEQ ID NO: 105399 - RNA, 21 nt, synthetic construct
  source 1..21: mol_type = other RNA
ttacataggcttagtacagcc

SEQ ID NO: 105400 - RNA, 21 nt, synthetic construct
  source 1..21: mol_type = other RNA
ttacatagtgctcttctgatc

SEQ ID NO: 105401 - RNA, 21 nt, synthetic construct
  source 1..21: mol_type = other RNA
ttacatatagaagtaaatccc

SEQ ID NO: 105402 - RNA, 21 nt, synthetic construct
  source 1..21: mol_type = other RNA
ttacatcagcagtgaccatat

SEQ ID NO: 105403 - RNA, 21 nt, synthetic construct
  source 1..21: mol_type = other RNA
ttacatgaggtcacccaagcc

SEQ ID NO: 105404 - RNA, 21 nt, synthetic construct
  source 1..21: mol_type = other RNA
ttacatgcttagccttccaga

SEQ ID NO: 105405 - RNA, 21 nt, synthetic construct
  source 1..21: mol_type = other RNA
ttacatggttctgtgctagat

SEQ ID NO: 105406 - RNA, 21 nt, synthetic construct
  source 1..21: mol_type = other RNA
ttacatgtagttttccctgtg

SEQ ID NO: 105407 - RNA, 21 nt, synthetic construct
  source 1..21: mol_type = other RNA
ttacattaaagacagctacta

SEQ ID NO: 105408 - RNA, 21 nt, synthetic construct
  source 1..21: mol_type = other RNA
ttacattagagaagaatgaga

SEQ ID NO: 105409 - RNA, 21 nt, synthetic construct
  source 1..21: mol_type = other RNA
ttacattgccttcgcagggtg

SEQ ID NO: 105410 - RNA, 21 nt, synthetic construct
  source 1..21: mol_type = other RNA
ttacattgtaatcctgtttct

SEQ ID NO: 105411 - RNA, 21 nt, synthetic construct
  source 1..21: mol_type = other RNA
ttacatttgcttaggctgtta

SEQ ID NO: 105412 - RNA, 21 nt, synthetic construct
  source 1..21: mol_type = other RNA
ttaccaaaacagcttcttgtt

SEQ ID NO: 105413 - RNA, 21 nt, synthetic construct
  source 1..21: mol_type = other RNA
ttaccaaaacctggtatgagt

SEQ ID NO: 105414 - RNA, 21 nt, synthetic construct
  source 1..21: mol_type = other RNA
ttaccaaggctaagttgagaa

SEQ ID NO: 105415 - RNA, 21 nt, synthetic construct
  source 1..21: mol_type = other RNA
ttaccaagggtgtgtttaatt

SEQ ID NO: 105416 - RNA, 21 nt, synthetic construct
  source 1..21: mol_type = other RNA
ttaccaagtgccgcgtttttt

SEQ ID NO: 105417 - RNA, 21 nt, synthetic construct
  source 1..21: mol_type = other RNA
ttaccaagttgaatttctgtc

SEQ ID NO: 105418 - RNA, 21 nt, synthetic construct
  source 1..21: mol_type = other RNA
ttaccaataaaagcctcattt

SEQ ID NO: 105419 - RNA, 21 nt, synthetic construct
  source 1..21: mol_type = other RNA
ttaccaccaagaaaaagcaga

SEQ ID NO: 105420 - RNA, 21 nt, synthetic construct
  source 1..21: mol_type = other RNA
ttaccactagcaaactactga

SEQ ID NO: 105421 - RNA, 21 nt, synthetic construct
  source 1..21: mol_type = other RNA
ttaccactataatccagatgg

SEQ ID NO: 105422 - RNA, 21 nt, synthetic construct
  source 1..21: mol_type = other RNA
ttaccactgaagtgttgagag

SEQ ID NO: 105423 - RNA, 21 nt, synthetic construct
  source 1..21: mol_type = other RNA
ttaccagcttacagcagatct

SEQ ID NO: 105424 - RNA, 21 nt, synthetic construct
  source 1..21: mol_type = other RNA
ttaccaggctggaagaatttt

SEQ ID NO: 105425 - RNA, 21 nt, synthetic construct
  source 1..21: mol_type = other RNA
ttaccagtgcttgcagccttc

SEQ ID NO: 105426 - RNA, 21 nt, synthetic construct
  source 1..21: mol_type = other RNA
ttaccataaagtcttccattt

SEQ ID NO: 105427 - RNA, 21 nt, synthetic construct
  source 1..21: mol_type = other RNA
ttaccatctaaagccaggctt

SEQ ID NO: 105428 - RNA, 21 nt, synthetic construct
  source 1..21: mol_type = other RNA
ttaccatctgacatatgtttt

SEQ ID NO: 105429 - RNA, 21 nt, synthetic construct
  source 1..21: mol_type = other RNA
ttaccatgtttccataaaaag

SEQ ID NO: 105430 - RNA, 21 nt, synthetic construct
  source 1..21: mol_type = other RNA
ttaccatttgaccttccttgt

SEQ ID NO: 105431 - RNA, 21 nt, synthetic construct
  source 1..21: mol_type = other RNA
ttacccaaagactttgttttg

SEQ ID NO: 105432 - RNA, 21 nt, synthetic construct
  source 1..21: mol_type = other RNA
ttacccaacatgagagaaaat

SEQ ID NO: 105433 - RNA, 21 nt, synthetic construct
  source 1..21: mol_type = other RNA
ttacccaggcatgatggctca

SEQ ID NO: 105434 - RNA, 21 nt, synthetic construct
  source 1..21: mol_type = other RNA
ttacccagtgtgtttgtttgc

SEQ ID NO: 105435 - RNA, 21 nt, synthetic construct
  source 1..21: mol_type = other RNA
ttaccccattcactcagcata

SEQ ID NO: 105436 - RNA, 21 nt, synthetic construct
  source 1..21: mol_type = other RNA
ttacccccatcacactggtca

SEQ ID NO: 105437 - RNA, 21 nt, synthetic construct
  source 1..21: mol_type = other RNA
ttacccctactttttgtcaca

SEQ ID NO: 105438 - RNA, 21 nt, synthetic construct
  source 1..21: mol_type = other RNA
ttacccctgagaacttcagta

SEQ ID NO: 105439 - RNA, 21 nt, synthetic construct
  source 1..21: mol_type = other RNA
ttaccccttaaattccaaaag

SEQ ID NO: 105440 - RNA, 21 nt, synthetic construct
  source 1..21: mol_type = other RNA
ttacccggagaggtgaactat

SEQ ID NO: 105441 - RNA, 21 nt, synthetic construct
  source 1..21: mol_type = other RNA
ttacccgtggaaatacttgaa

SEQ ID NO: 105442 - RNA, 21 nt, synthetic construct
  source 1..21: mol_type = other RNA
ttaccctaataacaaaatagg

SEQ ID NO: 105443 - RNA, 21 nt, synthetic construct
  source 1..21: mol_type = other RNA
ttaccctcacagtcacaaagc

SEQ ID NO: 105444 - RNA, 21 nt, synthetic construct
  source 1..21: mol_type = other RNA
ttaccctcattttataagggt

SEQ ID NO: 105445 - RNA, 21 nt, synthetic construct
  source 1..21: mol_type = other RNA
ttaccctctagctccccattc

SEQ ID NO: 105446 - RNA, 21 nt, synthetic construct
  source 1..21: mol_type = other RNA
ttaccctctggaatgcccatc

SEQ ID NO: 105447 - RNA, 21 nt, synthetic construct
  source 1..21: mol_type = other RNA
ttaccctgctggaacgaatat

SEQ ID NO: 105448 - RNA, 21 nt, synthetic construct
  source 1..21: mol_type = other RNA
ttacccttactaaattttgag

SEQ ID NO: 105449 - RNA, 21 nt, synthetic construct
  source 1..21: mol_type = other RNA
ttaccctttactcagattcac

SEQ ID NO: 105450 - RNA, 21 nt, synthetic construct
  source 1..21: mol_type = other RNA
ttaccggcatccgccaccacg

SEQ ID NO: 105451 - RNA, 21 nt, synthetic construct
  source 1..21: mol_type = other RNA
ttacctaagcatcgtgaagtc

SEQ ID NO: 105452 - RNA, 21 nt, synthetic construct
  source 1..21: mol_type = other RNA
ttacctatgaataggtgtgtg

SEQ ID NO: 105453 - RNA, 21 nt, synthetic construct
  source 1..21: mol_type = other RNA
ttacctcaaaggagagaagag

SEQ ID NO: 105454 - RNA, 21 nt, synthetic construct
  source 1..21: mol_type = other RNA
ttacctcccatgcattcgtcc

SEQ ID NO: 105455 - RNA, 21 nt, synthetic construct
  source 1..21: mol_type = other RNA
ttaccttatagatgacgaaag

SEQ ID NO: 105456 - RNA, 21 nt, synthetic construct
  source 1..21: mol_type = other RNA
ttaccttctaaaatcatcaca

SEQ ID NO: 105457 - RNA, 21 nt, synthetic construct
  source 1..21: mol_type = other RNA
ttacctttatctttggatatc

SEQ ID NO: 105458 - RNA, 21 nt, synthetic construct
  source 1..21: mol_type = other RNA
ttacgaggacagactgcagtt

SEQ ID NO: 105459 - RNA, 21 nt, synthetic construct
  source 1..21: mol_type = other RNA
ttacgagttatgcaagatgtc

SEQ ID NO: 105460 - RNA, 21 nt, synthetic construct
  source 1..21: mol_type = other RNA
ttacgatgaaattgaccattc

SEQ ID NO: 105461 - RNA, 21 nt, synthetic construct
  source 1..21: mol_type = other RNA
ttacgcgtggatgtgtgcaca

SEQ ID NO: 105462 - RNA, 21 nt, synthetic construct
  source 1..21: mol_type = other RNA
ttacgctgccaaaagccaaga

SEQ ID NO: 105463 - RNA, 21 nt, synthetic construct
  source 1..21: mol_type = other RNA
ttacggttccctgtagagatt

SEQ ID NO: 105464 - RNA, 21 nt, synthetic construct
  source 1..21: mol_type = other RNA
ttacgtactaggtatcacagt

SEQ ID NO: 105465 - RNA, 21 nt, synthetic construct
  source 1..21: mol_type = other RNA
ttactaaactgaacgaagtga

SEQ ID NO: 105466 - RNA, 21 nt, synthetic construct
  source 1..21: mol_type = other RNA
ttactaaatgatctttcaagg

SEQ ID NO: 105467 - RNA, 21 nt, synthetic construct
  source 1..21: mol_type = other RNA
ttactaagaagtgaaactgct

SEQ ID NO: 105468 - RNA, 21 nt, synthetic construct
  source 1..21: mol_type = other RNA
ttactaccaccactaatgtca

SEQ ID NO: 105469 - RNA, 21 nt, synthetic construct
  source 1..21: mol_type = other RNA
ttactacgaagctacagtaat

SEQ ID NO: 105470 - RNA, 21 nt, synthetic construct
  source 1..21: mol_type = other RNA
ttactactgcattttttgcca

SEQ ID NO: 105471 - RNA, 21 nt, synthetic construct
  source 1..21: mol_type = other RNA
ttactactgtactgtttagca

SEQ ID NO: 105472 - RNA, 21 nt, synthetic construct
  source 1..21: mol_type = other RNA
ttactagaagcactttttacc

SEQ ID NO: 105473 - RNA, 21 nt, synthetic construct
  source 1..21: mol_type = other RNA
ttactagatcaagcccttcct

SEQ ID NO: 105474 - RNA, 21 nt, synthetic construct
  source 1..21: mol_type = other RNA
ttactagttgtgctacctcaa

SEQ ID NO: 105475 - RNA, 21 nt, synthetic construct
  source 1..21: mol_type = other RNA
ttactatatgatccagcagtt

SEQ ID NO: 105476 - RNA, 21 nt, synthetic construct
  source 1..21: mol_type = other RNA
ttactcaaatccaaattcaca

SEQ ID NO: 105477 - RNA, 21 nt, synthetic construct
  source 1..21: mol_type = other RNA
ttactcagattcaccaattgt

SEQ ID NO: 105478 - RNA, 21 nt, synthetic construct
  source 1..21: mol_type = other RNA
ttactcagtctcgaaaaggaa

SEQ ID NO: 105479 - RNA, 21 nt, synthetic construct
  source 1..21: mol_type = other RNA
ttactcatgtctacctgtctt

SEQ ID NO: 105480 - RNA, 21 nt, synthetic construct
  source 1..21: mol_type = other RNA
ttactcattatggttgttggc

SEQ ID NO: 105481 - RNA, 21 nt, synthetic construct
  source 1..21: mol_type = other RNA
ttactccaagaaggctagcac

SEQ ID NO: 105482 - RNA, 21 nt, synthetic construct
  source 1..21: mol_type = other RNA
ttactcccgatttcagttaac

SEQ ID NO: 105483 - RNA, 21 nt, synthetic construct
  source 1..21: mol_type = other RNA
ttactcctgagcaaggaagga

SEQ ID NO: 105484 - RNA, 21 nt, synthetic construct
  source 1..21: mol_type = other RNA
ttactcgagggtagcttttcc

SEQ ID NO: 105485 - RNA, 21 nt, synthetic construct
  source 1..21: mol_type = other RNA
ttactcggtatgtacccaatg

SEQ ID NO: 105486 - RNA, 21 nt, synthetic construct
  source 1..21: mol_type = other RNA
ttactcgtggttatagccata

SEQ ID NO: 105487 - RNA, 21 nt, synthetic construct
  source 1..21: mol_type = other RNA
ttactctaatggggaaataga

SEQ ID NO: 105488 - RNA, 21 nt, synthetic construct
  source 1..21: mol_type = other RNA
ttactctcaaataatttggca

SEQ ID NO: 105489 - RNA, 21 nt, synthetic construct
  source 1..21: mol_type = other RNA
ttactctctctgcctcggcac

SEQ ID NO: 105490 - RNA, 21 nt, synthetic construct
  source 1..21: mol_type = other RNA
ttactctctttaattatgagc

SEQ ID NO: 105491 - RNA, 21 nt, synthetic construct
  source 1..21: mol_type = other RNA
ttactcttctactcactgtac

SEQ ID NO: 105492 - RNA, 21 nt, synthetic construct
  source 1..21: mol_type = other RNA
ttactgaaatcctagccccaa

SEQ ID NO: 105493 - RNA, 21 nt, synthetic construct
  source 1..21: mol_type = other RNA
ttactgacaatagccaagaca

SEQ ID NO: 105494 - RNA, 21 nt, synthetic construct
  source 1..21: mol_type = other RNA
ttactgactcaatcttcttat

SEQ ID NO: 105495 - RNA, 21 nt, synthetic construct
  source 1..21: mol_type = other RNA
ttactgatctgctcaagtttt

SEQ ID NO: 105496 - RNA, 21 nt, synthetic construct
  source 1..21: mol_type = other RNA
ttactgatcttttctgacaat

SEQ ID NO: 105497 - RNA, 21 nt, synthetic construct
  source 1..21: mol_type = other RNA
ttactgattagaaggattgtt

SEQ ID NO: 105498 - RNA, 21 nt, synthetic construct
  source 1..21: mol_type = other RNA
ttactgatttatagtgtttcc

SEQ ID NO: 105499 - RNA, 21 nt, synthetic construct
  source 1..21: mol_type = other RNA
ttactgcaacctccgtttttc

SEQ ID NO: 105500 - RNA, 21 nt, synthetic construct
  source 1..21: mol_type = other RNA
ttactgctataaacttccctc

SEQ ID NO: 105501 - RNA, 21 nt, synthetic construct
  source 1..21: mol_type = other RNA
ttactgctatacaaccggaaa

SEQ ID NO: 105502 - RNA, 21 nt, synthetic construct
  source 1..21: mol_type = other RNA
ttactgcttgctgcactggct

SEQ ID NO: 105503 - RNA, 21 nt, synthetic construct
  source 1..21: mol_type = other RNA
ttactggatacaaggtcaatc

SEQ ID NO: 105504 - RNA, 21 nt, synthetic construct
  source 1..21: mol_type = other RNA
ttactggtgttaggcaatcct

SEQ ID NO: 105505 - RNA, 21 nt, synthetic construct
  source 1..21: mol_type = other RNA
ttactgtaagttcctggactg

SEQ ID NO: 105506 - RNA, 21 nt, synthetic construct
  source 1..21: mol_type = other RNA
ttactgtacaaagatttaccc

SEQ ID NO: 105507 - RNA, 21 nt, synthetic construct
  source 1..21: mol_type = other RNA
ttactgtattaggatgtgtac

SEQ ID NO: 105508 - RNA, 21 nt, synthetic construct
  source 1..21: mol_type = other RNA
ttactgtccaaacagtgacca

SEQ ID NO: 105509 - RNA, 21 nt, synthetic construct
  source 1..21: mol_type = other RNA
ttactgttctccagtcccact

SEQ ID NO: 105510 - RNA, 21 nt, synthetic construct
  source 1..21: mol_type = other RNA
ttacttactagttgtgctacc

SEQ ID NO: 105511 - RNA, 21 nt, synthetic construct
  source 1..21: mol_type = other RNA
ttacttaggcagttattaaga

SEQ ID NO: 105512 - RNA, 21 nt, synthetic construct
  source 1..21: mol_type = other RNA
ttacttcatagatgttatgcc

SEQ ID NO: 105513 - RNA, 21 nt, synthetic construct
  source 1..21: mol_type = other RNA
ttacttccagctcacgttacc

SEQ ID NO: 105514 - RNA, 21 nt, synthetic construct
  source 1..21: mol_type = other RNA
ttacttccagtgttttagggg

SEQ ID NO: 105515 - RNA, 21 nt, synthetic construct
  source 1..21: mol_type = other RNA
ttacttcccttctcgaagtgg

SEQ ID NO: 105516 - RNA, 21 nt, synthetic construct
  source 1..21: mol_type = other RNA
ttacttctacagaatgttcaa

SEQ ID NO: 105517 - RNA, 21 nt, synthetic construct
  source 1..21: mol_type = other RNA
ttacttctcagctatagcttc

SEQ ID NO: 105518 - RNA, 21 nt, synthetic construct
  source 1..21: mol_type = other RNA
ttacttctggaaagttcaaat

SEQ ID NO: 105519 - RNA, 21 nt, synthetic construct
  source 1..21: mol_type = other RNA
ttacttctttctctttcagcc

SEQ ID NO: 105520 - RNA, 21 nt, synthetic construct
  source 1..21: mol_type = other RNA
ttacttgaaatcatttcactc

SEQ ID NO: 105521 - RNA, 21 nt, synthetic construct
  source 1..21: mol_type = other RNA
ttacttgactattttaccctc

SEQ ID NO: 105522 - RNA, 21 nt, synthetic construct
  source 1..21: mol_type = other RNA
ttacttgagagcagagacaca

SEQ ID NO: 105523 - RNA, 21 nt, synthetic construct
  source 1..21: mol_type = other RNA
ttacttgagccccagaatagg

SEQ ID NO: 105524 - RNA, 21 nt, synthetic construct
  source 1..21: mol_type = other RNA
ttacttgcttggtttcacacg

SEQ ID NO: 105525 - RNA, 21 nt, synthetic construct
  source 1..21: mol_type = other RNA
ttacttggctcctcccggcta

SEQ ID NO: 105526 - RNA, 21 nt, synthetic construct
  source 1..21: mol_type = other RNA
ttacttggggagagtgggccc

SEQ ID NO: 105527 - RNA, 21 nt, synthetic construct
  source 1..21: mol_type = other RNA
ttacttgggtataaatgatga

SEQ ID NO: 105528 - RNA, 21 nt, synthetic construct
  source 1..21: mol_type = other RNA
ttacttgtcatttctgcttag

SEQ ID NO: 105529 - RNA, 21 nt, synthetic construct
  source 1..21: mol_type = other RNA
ttactttacagttatgtcagt

SEQ ID NO: 105530 - RNA, 21 nt, synthetic construct
  source 1..21: mol_type = other RNA
ttactttcagctcaaacagct

SEQ ID NO: 105531 - RNA, 21 nt, synthetic construct
  source 1..21: mol_type = other RNA
ttactttgcgaaacacactcg

SEQ ID NO: 105532 - RNA, 21 nt, synthetic construct
  source 1..21: mol_type = other RNA
ttacttttaaagaaaggtctc

SEQ ID NO: 105533 - RNA, 21 nt, synthetic construct
  source 1..21: mol_type = other RNA
ttacttttttgtagagacaga

SEQ ID NO: 105534 - RNA, 21 nt, synthetic construct
  source 1..21: mol_type = other RNA
ttagaaaacatatccttctac

SEQ ID NO: 105535 - RNA, 21 nt, synthetic construct
  source 1..21: mol_type = other RNA
ttagaaaatacagttttgacc

SEQ ID NO: 105536 - RNA, 21 nt, synthetic construct
  source 1..21: mol_type = other RNA
ttagaaaatgcttatgtcttg

SEQ ID NO: 105537 - RNA, 21 nt, synthetic construct
  source 1..21: mol_type = other RNA
ttagaaaattagctgactttc

SEQ ID NO: 105538 - RNA, 21 nt, synthetic construct
  source 1..21: mol_type = other RNA
ttagaaactggtgaactgggt

SEQ ID NO: 105539 - RNA, 21 nt, synthetic construct
  source 1..21: mol_type = other RNA
ttagaaagaaaatccaaaagc

SEQ ID NO: 105540 - RNA, 21 nt, synthetic construct
  source 1..21: mol_type = other RNA
ttagaaagctggactcattcc

SEQ ID NO: 105541 - RNA, 21 nt, synthetic construct
  source 1..21: mol_type = other RNA
ttagaaatacctgcaggttga

SEQ ID NO: 105542 - RNA, 21 nt, synthetic construct
  source 1..21: mol_type = other RNA
ttagaaatgaagatggcctcc

SEQ ID NO: 105543 - RNA, 21 nt, synthetic construct
  source 1..21: mol_type = other RNA
ttagaaatgtggaagcagaac

SEQ ID NO: 105544 - RNA, 21 nt, synthetic construct
  source 1..21: mol_type = other RNA
ttagaaatttaaggaccaggt

SEQ ID NO: 105545 - RNA, 21 nt, synthetic construct
  source 1..21: mol_type = other RNA
ttagaacatataatccaactg

SEQ ID NO: 105546 - RNA, 21 nt, synthetic construct
  source 1..21: mol_type = other RNA
ttagaacatctggcagcaggg

SEQ ID NO: 105547 - RNA, 21 nt, synthetic construct
  source 1..21: mol_type = other RNA
ttagaactagaactgtgttac

SEQ ID NO: 105548 - RNA, 21 nt, synthetic construct
  source 1..21: mol_type = other RNA
ttagaagaagacttaggagaa

SEQ ID NO: 105549 - RNA, 21 nt, synthetic construct
  source 1..21: mol_type = other RNA
ttagaagaatgattatttgcg

SEQ ID NO: 105550 - RNA, 21 nt, synthetic construct
  source 1..21: mol_type = other RNA
ttagaagacaatactgttatg

SEQ ID NO: 105551 - RNA, 21 nt, synthetic construct
  source 1..21: mol_type = other RNA
ttagaaggattgttcatgtct

SEQ ID NO: 105552 - RNA, 21 nt, synthetic construct
  source 1..21: mol_type = other RNA
ttagaaggtaagaatgtcaag

SEQ ID NO: 105553 - RNA, 21 nt, synthetic construct
  source 1..21: mol_type = other RNA
ttagaagtatcccagatgggg

SEQ ID NO: 105554 - RNA, 21 nt, synthetic construct
  source 1..21: mol_type = other RNA
ttagaatcatccggggagctt

SEQ ID NO: 105555 - RNA, 21 nt, synthetic construct
  source 1..21: mol_type = other RNA
ttagaattacaggcatgagtc

SEQ ID NO: 105556 - RNA, 21 nt, synthetic construct
  source 1..21: mol_type = other RNA
ttagaattcaggacagtcatc

SEQ ID NO: 105557 - RNA, 21 nt, synthetic construct
  source 1..21: mol_type = other RNA
ttagaattcaggacagttatt

SEQ ID NO: 105558 - RNA, 21 nt, synthetic construct
  source 1..21: mol_type = other RNA
ttagaattctctctcaactgg

SEQ ID NO: 105559 - RNA, 21 nt, synthetic construct
  source 1..21: mol_type = other RNA
ttagacactaactttctattc

SEQ ID NO: 105560 - RNA, 21 nt, synthetic construct
  source 1..21: mol_type = other RNA
ttagacatgggctaaataaaa

SEQ ID NO: 105561 - RNA, 21 nt, synthetic construct
  source 1..21: mol_type = other RNA
ttagacctcctagattgacct

SEQ ID NO: 105562 - RNA, 21 nt, synthetic construct
  source 1..21: mol_type = other RNA
ttagactgcacataaaaggat

SEQ ID NO: 105563 - RNA, 21 nt, synthetic construct
  source 1..21: mol_type = other RNA
ttagagaagaatgagaaacat

SEQ ID NO: 105564 - RNA, 21 nt, synthetic construct
  source 1..21: mol_type = other RNA
ttagagagatgcctgtgcttg

SEQ ID NO: 105565 - RNA, 21 nt, synthetic construct
  source 1..21: mol_type = other RNA
ttagagccccaagaaagcagg

SEQ ID NO: 105566 - RNA, 21 nt, synthetic construct
  source 1..21: mol_type = other RNA
ttagaggctgcaccctcctcc

SEQ ID NO: 105567 - RNA, 21 nt, synthetic construct
  source 1..21: mol_type = other RNA
ttagaggctgtattgtaggaa

SEQ ID NO: 105568 - RNA, 21 nt, synthetic construct
  source 1..21: mol_type = other RNA
ttagagggatgaatgttgtac

SEQ ID NO: 105569 - RNA, 21 nt, synthetic construct
  source 1..21: mol_type = other RNA
ttagagggcttcatgctggga

SEQ ID NO: 105570 - RNA, 21 nt, synthetic construct
  source 1..21: mol_type = other RNA
ttagagtaactgtcatcagcg

SEQ ID NO: 105571 - RNA, 21 nt, synthetic construct
  source 1..21: mol_type = other RNA
ttagagtaagcaactgcatct

SEQ ID NO: 105572 - RNA, 21 nt, synthetic construct
  source 1..21: mol_type = other RNA
ttagagtcagttgtttacttg

SEQ ID NO: 105573 - RNA, 21 nt, synthetic construct
  source 1..21: mol_type = other RNA
ttagagtgaaaagaaacaagt

SEQ ID NO: 105574 - RNA, 21 nt, synthetic construct
  source 1..21: mol_type = other RNA
ttagagtttgcattacatgaa

SEQ ID NO: 105575 - RNA, 21 nt, synthetic construct
  source 1..21: mol_type = other RNA
ttagataggatgggcagactc

SEQ ID NO: 105576 - RNA, 21 nt, synthetic construct
  source 1..21: mol_type = other RNA
ttagatagtggtttgaagctt

SEQ ID NO: 105577 - RNA, 21 nt, synthetic construct
  source 1..21: mol_type = other RNA
ttagatatcccatataagggg

SEQ ID NO: 105578 - RNA, 21 nt, synthetic construct
  source 1..21: mol_type = other RNA
ttagatcaagtcctttccaga

SEQ ID NO: 105579 - RNA, 21 nt, synthetic construct
  source 1..21: mol_type = other RNA
ttagatctcatgttaagtgtt

SEQ ID NO: 105580 - RNA, 21 nt, synthetic construct
  source 1..21: mol_type = other RNA
ttagatctgggataatgctat

SEQ ID NO: 105581 - RNA, 21 nt, synthetic construct
  source 1..21: mol_type = other RNA
ttagatgagagtggcctaaat

SEQ ID NO: 105582 - RNA, 21 nt, synthetic construct
  source 1..21: mol_type = other RNA
ttagatgagcccaggagttgc

SEQ ID NO: 105583 - RNA, 21 nt, synthetic construct
  source 1..21: mol_type = other RNA
ttagatgatgttttgaacgaa

SEQ ID NO: 105584 - RNA, 21 nt, synthetic construct
  source 1..21: mol_type = other RNA
ttagatggcttaggatcacca

SEQ ID NO: 105585 - RNA, 21 nt, synthetic construct
  source 1..21: mol_type = other RNA
ttagatggtaaaacaaattcc

SEQ ID NO: 105586 - RNA, 21 nt, synthetic construct
  source 1..21: mol_type = other RNA
ttagatggtgctgatttaaaa

SEQ ID NO: 105587 - RNA, 21 nt, synthetic construct
  source 1..21: mol_type = other RNA
ttagattacaaaagaacagga

SEQ ID NO: 105588 - RNA, 21 nt, synthetic construct
  source 1..21: mol_type = other RNA
ttagattaggaaacagattga

SEQ ID NO: 105589 - RNA, 21 nt, synthetic construct
  source 1..21: mol_type = other RNA
ttagattatatggtctaccat

SEQ ID NO: 105590 - RNA, 21 nt, synthetic construct
  source 1..21: mol_type = other RNA
ttagatttatcaatagcagtg

SEQ ID NO: 105591 - RNA, 21 nt, synthetic construct
  source 1..21: mol_type = other RNA
ttagatttatttttacccgtg

SEQ ID NO: 105592 - RNA, 21 nt, synthetic construct
  source 1..21: mol_type = other RNA
ttagatttttcctttgcctaa

SEQ ID NO: 105593 - RNA, 21 nt, synthetic construct
  source 1..21: mol_type = other RNA
ttagcaaagaggcaaaactcc

SEQ ID NO: 105594 - RNA, 21 nt, synthetic construct
  source 1..21: mol_type = other RNA
ttagcaagattactggataca

SEQ ID NO: 105595 - RNA, 21 nt, synthetic construct
  source 1..21: mol_type = other RNA
ttagcaatccaaggacagaaa

SEQ ID NO: 105596 - RNA, 21 nt, synthetic construct
  source 1..21: mol_type = other RNA
ttagcaatgcgaatcatctag

SEQ ID NO: 105597 - RNA, 21 nt, synthetic construct
  source 1..21: mol_type = other RNA
ttagcacctttattaactaga

SEQ ID NO: 105598 - RNA, 21 nt, synthetic construct
  source 1..21: mol_type = other RNA
ttagcaggactggactccttc

SEQ ID NO: 105599 - RNA, 21 nt, synthetic construct
  source 1..21: mol_type = other RNA
ttagcagttctgtacccttac

SEQ ID NO: 105600 - RNA, 21 nt, synthetic construct
  source 1..21: mol_type = other RNA
ttagcatcaccatcatcatca

SEQ ID NO: 105601 - RNA, 21 nt, synthetic construct
  source 1..21: mol_type = other RNA
ttagcatctagcacagaacca

SEQ ID NO: 105602 - RNA, 21 nt, synthetic construct
  source 1..21: mol_type = other RNA
ttagcatgcctgacaaagtat

SEQ ID NO: 105603 - RNA, 21 nt, synthetic construct
  source 1..21: mol_type = other RNA
ttagcatgttgctttgcgaaa

SEQ ID NO: 105604 - RNA, 21 nt, synthetic construct
  source 1..21: mol_type = other RNA
ttagccaacaaccataatgag

SEQ ID NO: 105605 - RNA, 21 nt, synthetic construct
  source 1..21: mol_type = other RNA
ttagccaagcatggtggtagg

SEQ ID NO: 105606 - RNA, 21 nt, synthetic construct
  source 1..21: mol_type = other RNA
ttagccacagcgttgttcagt

SEQ ID NO: 105607 - RNA, 21 nt, synthetic construct
  source 1..21: mol_type = other RNA
ttagccactctgaattctctg

SEQ ID NO: 105608 - RNA, 21 nt, synthetic construct
  source 1..21: mol_type = other RNA
ttagccaggcatgggggcgcg

SEQ ID NO: 105609 - RNA, 21 nt, synthetic construct
  source 1..21: mol_type = other RNA
ttagccaggcgtggtggcgga

SEQ ID NO: 105610 - RNA, 21 nt, synthetic construct
  source 1..21: mol_type = other RNA
ttagcccaagctaccatttat

SEQ ID NO: 105611 - RNA, 21 nt, synthetic construct
  source 1..21: mol_type = other RNA
ttagcccacttgttgatgggg

SEQ ID NO: 105612 - RNA, 21 nt, synthetic construct
  source 1..21: mol_type = other RNA
ttagcccatgtctaaagtatt

SEQ ID NO: 105613 - RNA, 21 nt, synthetic construct
  source 1..21: mol_type = other RNA
ttagccccctgaatacccctc

SEQ ID NO: 105614 - RNA, 21 nt, synthetic construct
  source 1..21: mol_type = other RNA
ttagcccctgctgccagatgt

SEQ ID NO: 105615 - RNA, 21 nt, synthetic construct
  source 1..21: mol_type = other RNA
ttagccgggaggagccaagta

SEQ ID NO: 105616 - RNA, 21 nt, synthetic construct
  source 1..21: mol_type = other RNA
ttagccgggtgtagtggtgtg

SEQ ID NO: 105617 - RNA, 21 nt, synthetic construct
  source 1..21: mol_type = other RNA
ttagcctagacctcaaattaa

SEQ ID NO: 105618 - RNA, 21 nt, synthetic construct
  source 1..21: mol_type = other RNA
ttagccttccagagacaaagc

SEQ ID NO: 105619 - RNA, 21 nt, synthetic construct
  source 1..21: mol_type = other RNA
ttagccttgccattctcccag

SEQ ID NO: 105620 - RNA, 21 nt, synthetic construct
  source 1..21: mol_type = other RNA
ttagccttggtaaaatcacta

SEQ ID NO: 105621 - RNA, 21 nt, synthetic construct
  source 1..21: mol_type = other RNA
ttagccttttacaccctaggt

SEQ ID NO: 105622 - RNA, 21 nt, synthetic construct
  source 1..21: mol_type = other RNA
ttagcgaaagggattctggcc

SEQ ID NO: 105623 - RNA, 21 nt, synthetic construct
  source 1..21: mol_type = other RNA
ttagcgctgatgtgttgacct

SEQ ID NO: 105624 - RNA, 21 nt, synthetic construct
  source 1..21: mol_type = other RNA
ttagcgctggaggtcgggctg

SEQ ID NO: 105625 - RNA, 21 nt, synthetic construct
  source 1..21: mol_type = other RNA
ttagcggaatgactatagaaa

SEQ ID NO: 105626 - RNA, 21 nt, synthetic construct
  source 1..21: mol_type = other RNA
ttagcgttcatccaaattatt

SEQ ID NO: 105627 - RNA, 21 nt, synthetic construct
  source 1..21: mol_type = other RNA
ttagctaagtatgcagaaacc

SEQ ID NO: 105628 - RNA, 21 nt, synthetic construct
  source 1..21: mol_type = other RNA
ttagctaatttcagagagacc

SEQ ID NO: 105629 - RNA, 21 nt, synthetic construct
  source 1..21: mol_type = other RNA
ttagctacaaaagggaaaaca

SEQ ID NO: 105630 - RNA, 21 nt, synthetic construct
  source 1..21: mol_type = other RNA
ttagctatattcacttttgga

SEQ ID NO: 105631 - RNA, 21 nt, synthetic construct
  source 1..21: mol_type = other RNA
ttagctctcatgtcagagaca

SEQ ID NO: 105632 - RNA, 21 nt, synthetic construct
  source 1..21: mol_type = other RNA
ttagctcttaagcttaggtct

SEQ ID NO: 105633 - RNA, 21 nt, synthetic construct
  source 1..21: mol_type = other RNA
ttagctcttcccttaaccttt

SEQ ID NO: 105634 - RNA, 21 nt, synthetic construct
  source 1..21: mol_type = other RNA
ttagctgactttcatttgtaa

SEQ ID NO: 105635 - RNA, 21 nt, synthetic construct
  source 1..21: mol_type = other RNA
ttagctgcctcttcctgttgc

SEQ ID NO: 105636 - RNA, 21 nt, synthetic construct
  source 1..21: mol_type = other RNA
ttagctggatgtggtgtggca

SEQ ID NO: 105637 - RNA, 21 nt, synthetic construct
  source 1..21: mol_type = other RNA
ttagctggcaaaatggagaca

SEQ ID NO: 105638 - RNA, 21 nt, synthetic construct
  source 1..21: mol_type = other RNA
ttagctgggcgagatggcgtg

SEQ ID NO: 105639 - RNA, 21 nt, synthetic construct
  source 1..21: mol_type = other RNA
ttagctggggcagcaaagcaa

SEQ ID NO: 105640 - RNA, 21 nt, synthetic construct
  source 1..21: mol_type = other RNA
ttagctgtctggattgattcc

SEQ ID NO: 105641 - RNA, 21 nt, synthetic construct
  source 1..21: mol_type = other RNA
ttagcttagaagaagacttag

SEQ ID NO: 105642 - RNA, 21 nt, synthetic construct
  source 1..21: mol_type = other RNA
ttagcttcatataagtggaat

SEQ ID NO: 105643 - RNA, 21 nt, synthetic construct
  source 1..21: mol_type = other RNA
ttagcttcctcaggatctaca

SEQ ID NO: 105644 - RNA, 21 nt, synthetic construct
  source 1..21: mol_type = other RNA
ttagcttctgaattgagatgt

SEQ ID NO: 105645 - RNA, 21 nt, synthetic construct
  source 1..21: mol_type = other RNA
ttagcttgctagtagcagaat

SEQ ID NO: 105646 - RNA, 21 nt, synthetic construct
  source 1..21: mol_type = other RNA
ttagctttctcccagctgtcc

SEQ ID NO: 105647 - RNA, 21 nt, synthetic construct
  source 1..21: mol_type = other RNA
ttagcttttacgaggacagac

SEQ ID NO: 105648 - RNA, 21 nt, synthetic construct
  source 1..21: mol_type = other RNA
ttaggaaaatacatgaggcct

SEQ ID NO: 105649 - RNA, 21 nt, synthetic construct
  source 1..21: mol_type = other RNA
ttaggaaaatagagttccatc

SEQ ID NO: 105650 - RNA, 21 nt, synthetic construct
  source 1..21: mol_type = other RNA
ttaggaagcacattccttccg

SEQ ID NO: 105651 - RNA, 21 nt, synthetic construct
  source 1..21: mol_type = other RNA
ttaggaagccactgcattcat

SEQ ID NO: 105652 - RNA, 21 nt, synthetic construct
  source 1..21: mol_type = other RNA
ttaggaagctatggagcactg

SEQ ID NO: 105653 - RNA, 21 nt, synthetic construct
  source 1..21: mol_type = other RNA
ttaggaagcttccttgatcag

SEQ ID NO: 105654 - RNA, 21 nt, synthetic construct
  source 1..21: mol_type = other RNA
ttaggacaaggaaaggatggt

SEQ ID NO: 105655 - RNA, 21 nt, synthetic construct
  source 1..21: mol_type = other RNA
ttaggagaaaagcttcataac

SEQ ID NO: 105656 - RNA, 21 nt, synthetic construct
  source 1..21: mol_type = other RNA
ttaggaggctattaactttga

SEQ ID NO: 105657 - RNA, 21 nt, synthetic construct
  source 1..21: mol_type = other RNA
ttaggagtcaactaatcaaac

SEQ ID NO: 105658 - RNA, 21 nt, synthetic construct
  source 1..21: mol_type = other RNA
ttaggatataagagtgggcaa

SEQ ID NO: 105659 - RNA, 21 nt, synthetic construct
  source 1..21: mol_type = other RNA
ttaggatcaccaaagacttca

SEQ ID NO: 105660 - RNA, 21 nt, synthetic construct
  source 1..21: mol_type = other RNA
ttaggatcccagtcctttggg

SEQ ID NO: 105661 - RNA, 21 nt, synthetic construct
  source 1..21: mol_type = other RNA
ttaggatgtgtacccgtgtgt

SEQ ID NO: 105662 - RNA, 21 nt, synthetic construct
  source 1..21: mol_type = other RNA
ttaggcaaaggaaaaatctaa

SEQ ID NO: 105663 - RNA, 21 nt, synthetic construct
  source 1..21: mol_type = other RNA
ttaggcaatccttccgcctca

SEQ ID NO: 105664 - RNA, 21 nt, synthetic construct
  source 1..21: mol_type = other RNA
ttaggcagaaccacctggggg

SEQ ID NO: 105665 - RNA, 21 nt, synthetic construct
  source 1..21: mol_type = other RNA
ttaggcagttattaagagtgt

SEQ ID NO: 105666 - RNA, 21 nt, synthetic construct
  source 1..21: mol_type = other RNA
ttaggccactctcatctaaat

SEQ ID NO: 105667 - RNA, 21 nt, synthetic construct
  source 1..21: mol_type = other RNA
ttaggccataaatcaaggtac

SEQ ID NO: 105668 - RNA, 21 nt, synthetic construct
  source 1..21: mol_type = other RNA
ttaggccctctataattctgc

SEQ ID NO: 105669 - RNA, 21 nt, synthetic construct
  source 1..21: mol_type = other RNA
ttaggctctgggtcagaatcg

SEQ ID NO: 105670 - RNA, 21 nt, synthetic construct
  source 1..21: mol_type = other RNA
ttaggctctgtggtttcttga

SEQ ID NO: 105671 - RNA, 21 nt, synthetic construct
  source 1..21: mol_type = other RNA
ttaggctgaagcaggcttttt

SEQ ID NO: 105672 - RNA, 21 nt, synthetic construct
  source 1..21: mol_type = other RNA
ttaggctgtctccaacgcttt

SEQ ID NO: 105673 - RNA, 21 nt, synthetic construct
  source 1..21: mol_type = other RNA
ttaggctgttattagagttgt

SEQ ID NO: 105674 - RNA, 21 nt, synthetic construct
  source 1..21: mol_type = other RNA
ttaggctgttcaatttagaaa

SEQ ID NO: 105675 - RNA, 21 nt, synthetic construct
  source 1..21: mol_type = other RNA
ttaggctgtttgagatctttc

SEQ ID NO: 105676 - RNA, 21 nt, synthetic construct
  source 1..21: mol_type = other RNA
ttagggaagatagtactgacc

SEQ ID NO: 105677 - RNA, 21 nt, synthetic construct
  source 1..21: mol_type = other RNA
ttagggacgaatgcatgggag

SEQ ID NO: 105678 - RNA, 21 nt, synthetic construct
  source 1..21: mol_type = other RNA
ttagggacttatggagataaa

SEQ ID NO: 105679 - RNA, 21 nt, synthetic construct
  source 1..21: mol_type = other RNA
ttagggagactttcactgctc

SEQ ID NO: 105680 - RNA, 21 nt, synthetic construct
  source 1..21: mol_type = other RNA
ttagggagcatatatactctg

SEQ ID NO: 105681 - RNA, 21 nt, synthetic construct
  source 1..21: mol_type = other RNA
ttagggcctagaaatcataca

SEQ ID NO: 105682 - RNA, 21 nt, synthetic construct
  source 1..21: mol_type = other RNA
ttaggggggaaaacacccttg

SEQ ID NO: 105683 - RNA, 21 nt, synthetic construct
  source 1..21: mol_type = other RNA
ttagggtaatgctggcttcat

SEQ ID NO: 105684 - RNA, 21 nt, synthetic construct
  source 1..21: mol_type = other RNA
ttaggtaagaaaaattccctc

SEQ ID NO: 105685 - RNA, 21 nt, synthetic construct
  source 1..21: mol_type = other RNA
ttaggtagggataagaatacc

SEQ ID NO: 105686 - RNA, 21 nt, synthetic construct
  source 1..21: mol_type = other RNA
ttaggtagtcttgtcataaca

SEQ ID NO: 105687 - RNA, 21 nt, synthetic construct
  source 1..21: mol_type = other RNA
ttaggtattattttcacagac

SEQ ID NO: 105688 - RNA, 21 nt, synthetic construct
  source 1..21: mol_type = other RNA
ttaggtcagaatacaaaaatg

SEQ ID NO: 105689 - RNA, 21 nt, synthetic construct
  source 1..21: mol_type = other RNA
ttaggtcatttttcacttctt

SEQ ID NO: 105690 - RNA, 21 nt, synthetic construct
  source 1..21: mol_type = other RNA
ttaggtgcacacaacactcag

SEQ ID NO: 105691 - RNA, 21 nt, synthetic construct
  source 1..21: mol_type = other RNA
ttaggtgccccactccacaca

SEQ ID NO: 105692 - RNA, 21 nt, synthetic construct
  source 1..21: mol_type = other RNA
ttaggtgctggcttcaatatg

SEQ ID NO: 105693 - RNA, 21 nt, synthetic construct
  source 1..21: mol_type = other RNA
ttaggtggtttgaaccccaga

SEQ ID NO: 105694 - RNA, 21 nt, synthetic construct
  source 1..21: mol_type = other RNA
ttaggtgttttttccttcttt

SEQ ID NO: 105695 - RNA, 21 nt, synthetic construct
  source 1..21: mol_type = other RNA
ttaggttacgtactaggtatc

SEQ ID NO: 105696 - RNA, 21 nt, synthetic construct
  source 1..21: mol_type = other RNA
ttaggttgaaagttcagaata

SEQ ID NO: 105697 - RNA, 21 nt, synthetic construct
  source 1..21: mol_type = other RNA
ttaggttgatggctgtactaa

SEQ ID NO: 105698 - RNA, 21 nt, synthetic construct
  source 1..21: mol_type = other RNA
ttaggtttctcatttttcagg

SEQ ID NO: 105699 - RNA, 21 nt, synthetic construct
  source 1..21: mol_type = other RNA
ttaggtttttcttgtgggtat

SEQ ID NO: 105700 - RNA, 21 nt, synthetic construct
  source 1..21: mol_type = other RNA
ttagtaaatatccgaaagaac

SEQ ID NO: 105701 - RNA, 21 nt, synthetic construct
  source 1..21: mol_type = other RNA
ttagtaaatctttggtgaagg

SEQ ID NO: 105702 - RNA, 21 nt, synthetic construct
  source 1..21: mol_type = other RNA
ttagtaagaggtatcaccatc

SEQ ID NO: 105703 - RNA, 21 nt, synthetic construct
  source 1..21: mol_type = other RNA
ttagtaagggtaaacagaatt

SEQ ID NO: 105704 - RNA, 21 nt, synthetic construct
  source 1..21: mol_type = other RNA
ttagtaagtgtgagcaaaaat

SEQ ID NO: 105705 - RNA, 21 nt, synthetic construct
  source 1..21: mol_type = other RNA
ttagtaattctccactttcat

SEQ ID NO: 105706 - RNA, 21 nt, synthetic construct
  source 1..21: mol_type = other RNA
ttagtacagccatcaacctaa

SEQ ID NO: 105707 - RNA, 21 nt, synthetic construct
  source 1..21: mol_type = other RNA
ttagtagaattctccagtgaa

SEQ ID NO: 105708 - RNA, 21 nt, synthetic construct
  source 1..21: mol_type = other RNA
ttagtagagatgaggttttac

SEQ ID NO: 105709 - RNA, 21 nt, synthetic construct
  source 1..21: mol_type = other RNA
ttagtagctgtctttaatgta

SEQ ID NO: 105710 - RNA, 21 nt, synthetic construct
  source 1..21: mol_type = other RNA
ttagtaggaaaaccatgtcat

SEQ ID NO: 105711 - RNA, 21 nt, synthetic construct
  source 1..21: mol_type = other RNA
ttagtaggtctccttgtatgg

SEQ ID NO: 105712 - RNA, 21 nt, synthetic construct
  source 1..21: mol_type = other RNA
ttagtagtaagttgtgtcatt

SEQ ID NO: 105713 - RNA, 21 nt, synthetic construct
  source 1..21: mol_type = other RNA
ttagtagttaggtggtttgaa

SEQ ID NO: 105714 - RNA, 21 nt, synthetic construct
  source 1..21: mol_type = other RNA
ttagtatacatgtttagcaag

SEQ ID NO: 105715 - RNA, 21 nt, synthetic construct
  source 1..21: mol_type = other RNA
ttagtatattttcaaggcttg

SEQ ID NO: 105716 - RNA, 21 nt, synthetic construct
  source 1..21: mol_type = other RNA
ttagtcatagcagtgggaagt

SEQ ID NO: 105717 - RNA, 21 nt, synthetic construct
  source 1..21: mol_type = other RNA
ttagtcccctagtggatgctg

SEQ ID NO: 105718 - RNA, 21 nt, synthetic construct
  source 1..21: mol_type = other RNA
ttagtctgacttctctcagag

SEQ ID NO: 105719 - RNA, 21 nt, synthetic construct
  source 1..21: mol_type = other RNA
ttagtctgtagcttcacgtgc

SEQ ID NO: 105720 - RNA, 21 nt, synthetic construct
  source 1..21: mol_type = other RNA
ttagtcttctcagatctgttg

SEQ ID NO: 105721 - RNA, 21 nt, synthetic construct
  source 1..21: mol_type = other RNA
ttagtgaaatagttggtcaga

SEQ ID NO: 105722 - RNA, 21 nt, synthetic construct
  source 1..21: mol_type = other RNA
ttagtgaagcagagagagaag

SEQ ID NO: 105723 - RNA, 21 nt, synthetic construct
  source 1..21: mol_type = other RNA
ttagtgaattcacagtagaag

SEQ ID NO: 105724 - RNA, 21 nt, synthetic construct
  source 1..21: mol_type = other RNA
ttagtgactggcttaatgcat

SEQ ID NO: 105725 - RNA, 21 nt, synthetic construct
  source 1..21: mol_type = other RNA
ttagtgagggaggccatcttc

SEQ ID NO: 105726 - RNA, 21 nt, synthetic construct
  source 1..21: mol_type = other RNA
ttagtgatgtcttttgaagaa

SEQ ID NO: 105727 - RNA, 21 nt, synthetic construct
  source 1..21: mol_type = other RNA
ttagtgattttaccaaggcta

SEQ ID NO: 105728 - RNA, 21 nt, synthetic construct
  source 1..21: mol_type = other RNA
ttagtgcagtatcttgaagaa

SEQ ID NO: 105729 - RNA, 21 nt, synthetic construct
  source 1..21: mol_type = other RNA
ttagtgccttcagaaggagtc

SEQ ID NO: 105730 - RNA, 21 nt, synthetic construct
  source 1..21: mol_type = other RNA
ttagtggaaaaactgcagcaa

SEQ ID NO: 105731 - RNA, 21 nt, synthetic construct
  source 1..21: mol_type = other RNA
ttagtggctcacagtgctcca

SEQ ID NO: 105732 - RNA, 21 nt, synthetic construct
  source 1..21: mol_type = other RNA
ttagtggtggtagtaaggatc

SEQ ID NO: 105733 - RNA, 21 nt, synthetic construct
  source 1..21: mol_type = other RNA
ttagtggttgacccataaact

SEQ ID NO: 105734 - RNA, 21 nt, synthetic construct
  source 1..21: mol_type = other RNA
ttagtgtattgtaccttgatt

SEQ ID NO: 105735 - RNA, 21 nt, synthetic construct
  source 1..21: mol_type = other RNA
ttagtgtctaatgggtacagg

SEQ ID NO: 105736 - RNA, 21 nt, synthetic construct
  source 1..21: mol_type = other RNA
ttagtgttcccttcttaaatg

SEQ ID NO: 105737 - RNA, 21 nt, synthetic construct
  source 1..21: mol_type = other RNA
ttagtgttctgtgtttatgaa

SEQ ID NO: 105738 - RNA, 21 nt, synthetic construct
  source 1..21: mol_type = other RNA
ttagtgttgcttggtgttgac

SEQ ID NO: 105739 - RNA, 21 nt, synthetic construct
  source 1..21: mol_type = other RNA
ttagttaaccttctggggttc

SEQ ID NO: 105740 - RNA, 21 nt, synthetic construct
  source 1..21: mol_type = other RNA
ttagttacatgaggtcaccca

SEQ ID NO: 105741 - RNA, 21 nt, synthetic construct
  source 1..21: mol_type = other RNA
ttagttatctcttagacctcc

SEQ ID NO: 105742 - RNA, 21 nt, synthetic construct
  source 1..21: mol_type = other RNA
ttagttattaaatgagacacc

SEQ ID NO: 105743 - RNA, 21 nt, synthetic construct
  source 1..21: mol_type = other RNA
ttagttcaagatgcataccaa

SEQ ID NO: 105744 - RNA, 21 nt, synthetic construct
  source 1..21: mol_type = other RNA
ttagttcctccttttgtagag

SEQ ID NO: 105745 - RNA, 21 nt, synthetic construct
  source 1..21: mol_type = other RNA
ttagttccttttaagggaaac

SEQ ID NO: 105746 - RNA, 21 nt, synthetic construct
  source 1..21: mol_type = other RNA
ttagttctgcttccacatttc

SEQ ID NO: 105747 - RNA, 21 nt, synthetic construct
  source 1..21: mol_type = other RNA
ttagttgactcctaaaacatg

SEQ ID NO: 105748 - RNA, 21 nt, synthetic construct
  source 1..21: mol_type = other RNA
ttagttgtacttgacacaaag

SEQ ID NO: 105749 - RNA, 21 nt, synthetic construct
  source 1..21: mol_type = other RNA
ttagtttacactatggctttt

SEQ ID NO: 105750 - RNA, 21 nt, synthetic construct
  source 1..21: mol_type = other RNA
ttagtttcatctatgtcccct

SEQ ID NO: 105751 - RNA, 21 nt, synthetic construct
  source 1..21: mol_type = other RNA
ttagtttgcaatacagttaac

SEQ ID NO: 105752 - RNA, 21 nt, synthetic construct
  source 1..21: mol_type = other RNA
ttagtttgttgacccaatcat

SEQ ID NO: 105753 - RNA, 21 nt, synthetic construct
  source 1..21: mol_type = other RNA
ttagttttcacttttgtgcaa

SEQ ID NO: 105754 - RNA, 21 nt, synthetic construct
  source 1..21: mol_type = other RNA
ttataaaaatggcacatactg

SEQ ID NO: 105755 - RNA, 21 nt, synthetic construct
  source 1..21: mol_type = other RNA
ttataaaataggaagtccatg

SEQ ID NO: 105756 - RNA, 21 nt, synthetic construct
  source 1..21: mol_type = other RNA
ttataacataaaagcgtactg

SEQ ID NO: 105757 - RNA, 21 nt, synthetic construct
  source 1..21: mol_type = other RNA
ttataaccttgaacttccagg

SEQ ID NO: 105758 - RNA, 21 nt, synthetic construct
  source 1..21: mol_type = other RNA
ttataagcaaagatatgggtt

SEQ ID NO: 105759 - RNA, 21 nt, synthetic construct
  source 1..21: mol_type = other RNA
ttataagcttcctctggctga

SEQ ID NO: 105760 - RNA, 21 nt, synthetic construct
  source 1..21: mol_type = other RNA
ttataagggtgataaaaagga

SEQ ID NO: 105761 - RNA, 21 nt, synthetic construct
  source 1..21: mol_type = other RNA
ttataagttgggagtctattt

SEQ ID NO: 105762 - RNA, 21 nt, synthetic construct
  source 1..21: mol_type = other RNA
ttataatcagccgtgattgca

SEQ ID NO: 105763 - RNA, 21 nt, synthetic construct
  source 1..21: mol_type = other RNA
ttataatccattgggtacata

SEQ ID NO: 105764 - RNA, 21 nt, synthetic construct
  source 1..21: mol_type = other RNA
ttataatgagatagaccagat

SEQ ID NO: 105765 - RNA, 21 nt, synthetic construct
  source 1..21: mol_type = other RNA
ttataatgggcaatcagaaaa

SEQ ID NO: 105766 - RNA, 21 nt, synthetic construct
  source 1..21: mol_type = other RNA
ttatacaaataactccagctt

SEQ ID NO: 105767 - RNA, 21 nt, synthetic construct
  source 1..21: mol_type = other RNA
ttatacacacataagggggaa

SEQ ID NO: 105768 - RNA, 21 nt, synthetic construct
  source 1..21: mol_type = other RNA
ttatacagcaaatctctagaa

SEQ ID NO: 105769 - RNA, 21 nt, synthetic construct
  source 1..21: mol_type = other RNA
ttatacaggtgcttacagact

SEQ ID NO: 105770 - RNA, 21 nt, synthetic construct
  source 1..21: mol_type = other RNA
ttatacagttggaactcttgc

SEQ ID NO: 105771 - RNA, 21 nt, synthetic construct
  source 1..21: mol_type = other RNA
ttatacccaagtaaacaactg

SEQ ID NO: 105772 - RNA, 21 nt, synthetic construct
  source 1..21: mol_type = other RNA
ttatacctgttgaatagcaac

SEQ ID NO: 105773 - RNA, 21 nt, synthetic construct
  source 1..21: mol_type = other RNA
ttatactagtagaaagcaggt

SEQ ID NO: 105774 - RNA, 21 nt, synthetic construct
  source 1..21: mol_type = other RNA
ttatagagggcctaaataaaa

SEQ ID NO: 105775 - RNA, 21 nt, synthetic construct
  source 1..21: mol_type = other RNA
ttatagatgacgaaagtgaag

SEQ ID NO: 105776 - RNA, 21 nt, synthetic construct
  source 1..21: mol_type = other RNA
ttatagccataagagtcccca

SEQ ID NO: 105777 - RNA, 21 nt, synthetic construct
  source 1..21: mol_type = other RNA
ttatagctccaaaagcgaaag

SEQ ID NO: 105778 - RNA, 21 nt, synthetic construct
  source 1..21: mol_type = other RNA
ttataggttgaatagggcctc

SEQ ID NO: 105779 - RNA, 21 nt, synthetic construct
  source 1..21: mol_type = other RNA
ttatagtattacctcccatgc

SEQ ID NO: 105780 - RNA, 21 nt, synthetic construct
  source 1..21: mol_type = other RNA
ttatagtcttagctcttaagc

SEQ ID NO: 105781 - RNA, 21 nt, synthetic construct
  source 1..21: mol_type = other RNA
ttatagtggtaaggagccaaa

SEQ ID NO: 105782 - RNA, 21 nt, synthetic construct
  source 1..21: mol_type = other RNA
ttatagtgtttccttccagat

SEQ ID NO: 105783 - RNA, 21 nt, synthetic construct
  source 1..21: mol_type = other RNA
ttatataaatgctcagtgggt

SEQ ID NO: 105784 - RNA, 21 nt, synthetic construct
  source 1..21: mol_type = other RNA
ttatatccagattgatatctg

SEQ ID NO: 105785 - RNA, 21 nt, synthetic construct
  source 1..21: mol_type = other RNA
ttatatcctaaacacttagca

SEQ ID NO: 105786 - RNA, 21 nt, synthetic construct
  source 1..21: mol_type = other RNA
ttatatcctcagggtaggaaa

SEQ ID NO: 105787 - RNA, 21 nt, synthetic construct
  source 1..21: mol_type = other RNA
ttatatgaataaaccacgcag

SEQ ID NO: 105788 - RNA, 21 nt, synthetic construct
  source 1..21: mol_type = other RNA
ttatatgcattaagccagtca

SEQ ID NO: 105789 - RNA, 21 nt, synthetic construct
  source 1..21: mol_type = other RNA
ttatatgcctagatgattcgc

SEQ ID NO: 105790 - RNA, 21 nt, synthetic construct
  source 1..21: mol_type = other RNA
ttatatgcctagatttcaatc

SEQ ID NO: 105791 - RNA, 21 nt, synthetic construct
  source 1..21: mol_type = other RNA
ttatatggtctaccatgttgt

SEQ ID NO: 105792 - RNA, 21 nt, synthetic construct
  source 1..21: mol_type = other RNA
ttatattaattctgaggcctc

SEQ ID NO: 105793 - RNA, 21 nt, synthetic construct
  source 1..21: mol_type = other RNA
ttatattatgtgcaagttctc

SEQ ID NO: 105794 - RNA, 21 nt, synthetic construct
  source 1..21: mol_type = other RNA
ttatatttactagatcaagcc

SEQ ID NO: 105795 - RNA, 21 nt, synthetic construct
  source 1..21: mol_type = other RNA
ttatatttccgatgatacctt

SEQ ID NO: 105796 - RNA, 21 nt, synthetic construct
  source 1..21: mol_type = other RNA
ttatatttccgtatccagtgg

SEQ ID NO: 105797 - RNA, 21 nt, synthetic construct
  source 1..21: mol_type = other RNA
ttatattttggtagagatggg

SEQ ID NO: 105798 - RNA, 21 nt, synthetic construct
  source 1..21: mol_type = other RNA
ttatcaaaatcaaggtgcggg

SEQ ID NO: 105799 - RNA, 21 nt, synthetic construct
  source 1..21: mol_type = other RNA
ttatcaatagcagtgctgaaa

SEQ ID NO: 105800 - RNA, 21 nt, synthetic construct
  source 1..21: mol_type = other RNA
ttatcaattagttcctccttt

SEQ ID NO: 105801 - RNA, 21 nt, synthetic construct
  source 1..21: mol_type = other RNA
ttatcacacctaggcctattt

SEQ ID NO: 105802 - RNA, 21 nt, synthetic construct
  source 1..21: mol_type = other RNA
ttatcaccatgtgcttatcaa

SEQ ID NO: 105803 - RNA, 21 nt, synthetic construct
  source 1..21: mol_type = other RNA
ttatcacccttataaaatgag

SEQ ID NO: 105804 - RNA, 21 nt, synthetic construct
  source 1..21: mol_type = other RNA
ttatcagatcccaattacttc

SEQ ID NO: 105805 - RNA, 21 nt, synthetic construct
  source 1..21: mol_type = other RNA
ttatcagatggtgatacctct

SEQ ID NO: 105806 - RNA, 21 nt, synthetic construct
  source 1..21: mol_type = other RNA
ttatcagcaccaaagattatg

SEQ ID NO: 105807 - RNA, 21 nt, synthetic construct
  source 1..21: mol_type = other RNA
ttatcaggaaagtgccagcca

SEQ ID NO: 105808 - RNA, 21 nt, synthetic construct
  source 1..21: mol_type = other RNA
ttatcaggcttgagtctgtgc

SEQ ID NO: 105809 - RNA, 21 nt, synthetic construct
  source 1..21: mol_type = other RNA
ttatcagggatattggcttat

SEQ ID NO: 105810 - RNA, 21 nt, synthetic construct
  source 1..21: mol_type = other RNA
ttatcagtctccaatcctcag

SEQ ID NO: 105811 - RNA, 21 nt, synthetic construct
  source 1..21: mol_type = other RNA
ttatcatgtcttcttggattt

SEQ ID NO: 105812 - RNA, 21 nt, synthetic construct
  source 1..21: mol_type = other RNA
ttatccaattttttggcatac

SEQ ID NO: 105813 - RNA, 21 nt, synthetic construct
  source 1..21: mol_type = other RNA
ttatccattcatctctcgatg

SEQ ID NO: 105814 - RNA, 21 nt, synthetic construct
  source 1..21: mol_type = other RNA
ttatcccagacagatatatgc

SEQ ID NO: 105815 - RNA, 21 nt, synthetic construct
  source 1..21: mol_type = other RNA
ttatcccagatctaacaaacg

SEQ ID NO: 105816 - RNA, 21 nt, synthetic construct
  source 1..21: mol_type = other RNA
ttatccctacctaaaaaggga

SEQ ID NO: 105817 - RNA, 21 nt, synthetic construct
  source 1..21: mol_type = other RNA
ttatccctttaaaatgatagc

SEQ ID NO: 105818 - RNA, 21 nt, synthetic construct
  source 1..21: mol_type = other RNA
ttatccgataaagggtctggt

SEQ ID NO: 105819 - RNA, 21 nt, synthetic construct
  source 1..21: mol_type = other RNA
ttatcctatcagagcatgtcc

SEQ ID NO: 105820 - RNA, 21 nt, synthetic construct
  source 1..21: mol_type = other RNA
ttatcctcttctgaagaggct

SEQ ID NO: 105821 - RNA, 21 nt, synthetic construct
  source 1..21: mol_type = other RNA
ttatccttgcaccaactccac

SEQ ID NO: 105822 - RNA, 21 nt, synthetic construct
  source 1..21: mol_type = other RNA
ttatcggataaggaagagttt

SEQ ID NO: 105823 - RNA, 21 nt, synthetic construct
  source 1..21: mol_type = other RNA
ttatctacagaggattttgga

SEQ ID NO: 105824 - RNA, 21 nt, synthetic construct
  source 1..21: mol_type = other RNA
ttatctaggcgaaatatctcc

SEQ ID NO: 105825 - RNA, 21 nt, synthetic construct
  source 1..21: mol_type = other RNA
ttatctccacatttctacaca

SEQ ID NO: 105826 - RNA, 21 nt, synthetic construct
  source 1..21: mol_type = other RNA
ttatctccataagtccctaac

SEQ ID NO: 105827 - RNA, 21 nt, synthetic construct
  source 1..21: mol_type = other RNA
ttatctctctcaagcaatctg

SEQ ID NO: 105828 - RNA, 21 nt, synthetic construct
  source 1..21: mol_type = other RNA
ttatctctgccctcattgaag

SEQ ID NO: 105829 - RNA, 21 nt, synthetic construct
  source 1..21: mol_type = other RNA
ttatctcttagacctcctaga

SEQ ID NO: 105830 - RNA, 21 nt, synthetic construct
  source 1..21: mol_type = other RNA
ttatctgctgtcggttttcta

SEQ ID NO: 105831 - RNA, 21 nt, synthetic construct
  source 1..21: mol_type = other RNA
ttatctggatttttgtgtaga

SEQ ID NO: 105832 - RNA, 21 nt, synthetic construct
  source 1..21: mol_type = other RNA
ttatctgggaacagcccctag

SEQ ID NO: 105833 - RNA, 21 nt, synthetic construct
  source 1..21: mol_type = other RNA
ttatctgtgggttaaaagtta

SEQ ID NO: 105834 - RNA, 21 nt, synthetic construct
  source 1..21: mol_type = other RNA
ttatctttggatatccccatt

SEQ ID NO: 105835 - RNA, 21 nt, synthetic construct
  source 1..21: mol_type = other RNA
ttatcttttcaaaaacccaac

SEQ ID NO: 105836 - RNA, 21 nt, synthetic construct
  source 1..21: mol_type = other RNA
ttatgaaccattgtaaaccat

SEQ ID NO: 105837 - RNA, 21 nt, synthetic construct
  source 1..21: mol_type = other RNA
ttatgaagcttttctcctaag

SEQ ID NO: 105838 - RNA, 21 nt, synthetic construct
  source 1..21: mol_type = other RNA
ttatgaatgatgccatcacat

SEQ ID NO: 105839 - RNA, 21 nt, synthetic construct
  source 1..21: mol_type = other RNA
ttatgacaagactacctaaaa

SEQ ID NO: 105840 - RNA, 21 nt, synthetic construct
  source 1..21: mol_type = other RNA
ttatgactgagatacttaagt

SEQ ID NO: 105841 - RNA, 21 nt, synthetic construct
  source 1..21: mol_type = other RNA
ttatgagacacacgagtattc

SEQ ID NO: 105842 - RNA, 21 nt, synthetic construct
  source 1..21: mol_type = other RNA
ttatgagcagttgtatgccaa

SEQ ID NO: 105843 - RNA, 21 nt, synthetic construct
  source 1..21: mol_type = other RNA
ttatgagcattccccacatag

SEQ ID NO: 105844 - RNA, 21 nt, synthetic construct
  source 1..21: mol_type = other RNA
ttatgataaaaataacgggcc

SEQ ID NO: 105845 - RNA, 21 nt, synthetic construct
  source 1..21: mol_type = other RNA
ttatgatcttgggaatacttt

SEQ ID NO: 105846 - RNA, 21 nt, synthetic construct
  source 1..21: mol_type = other RNA
ttatgatttcacttacttgag

SEQ ID NO: 105847 - RNA, 21 nt, synthetic construct
  source 1..21: mol_type = other RNA
ttatgcaagatggcaagtttc

SEQ ID NO: 105848 - RNA, 21 nt, synthetic construct
  source 1..21: mol_type = other RNA
ttatgcaagatgtcaacatta

SEQ ID NO: 105849 - RNA, 21 nt, synthetic construct
  source 1..21: mol_type = other RNA
ttatgcatcttgcaaaacgga

SEQ ID NO: 105850 - RNA, 21 nt, synthetic construct
  source 1..21: mol_type = other RNA
ttatgcatttggtctcattca

SEQ ID NO: 105851 - RNA, 21 nt, synthetic construct
  source 1..21: mol_type = other RNA
ttatgccaatatcacactgtt

SEQ ID NO: 105852 - RNA, 21 nt, synthetic construct
  source 1..21: mol_type = other RNA
ttatgccccctcttctctcct

SEQ ID NO: 105853 - RNA, 21 nt, synthetic construct
  source 1..21: mol_type = other RNA
ttatgctaacatgaactactc

SEQ ID NO: 105854 - RNA, 21 nt, synthetic construct
  source 1..21: mol_type = other RNA
ttatgctgagtgaatggggta

SEQ ID NO: 105855 - RNA, 21 nt, synthetic construct
  source 1..21: mol_type = other RNA
ttatgctgatgaactacacag

SEQ ID NO: 105856 - RNA, 21 nt, synthetic construct
  source 1..21: mol_type = other RNA
ttatgctggtgggctttgaga

SEQ ID NO: 105857 - RNA, 21 nt, synthetic construct
  source 1..21: mol_type = other RNA
ttatgctttgtctctggaagg

SEQ ID NO: 105858 - RNA, 21 nt, synthetic construct
  source 1..21: mol_type = other RNA
ttatggaaacatggtaatttg

SEQ ID NO: 105859 - RNA, 21 nt, synthetic construct
  source 1..21: mol_type = other RNA
ttatggaataatggaactaag

SEQ ID NO: 105860 - RNA, 21 nt, synthetic construct
  source 1..21: mol_type = other RNA
ttatggaattgccatatgtag

SEQ ID NO: 105861 - RNA, 21 nt, synthetic construct
  source 1..21: mol_type = other RNA
ttatggagataaattacccaa

SEQ ID NO: 105862 - RNA, 21 nt, synthetic construct
  source 1..21: mol_type = other RNA
ttatggatatctggcctgcac

SEQ ID NO: 105863 - RNA, 21 nt, synthetic construct
  source 1..21: mol_type = other RNA
ttatggcctaagatggaaagt

SEQ ID NO: 105864 - RNA, 21 nt, synthetic construct
  source 1..21: mol_type = other RNA
ttatggctagaaacttggatt

SEQ ID NO: 105865 - RNA, 21 nt, synthetic construct
  source 1..21: mol_type = other RNA
ttatggctataaccacgagta

SEQ ID NO: 105866 - RNA, 21 nt, synthetic construct
  source 1..21: mol_type = other RNA
ttatgggtcaaccactaaggt

SEQ ID NO: 105867 - RNA, 21 nt, synthetic construct
  source 1..21: mol_type = other RNA
ttatggtaactcctgttcttt

SEQ ID NO: 105868 - RNA, 21 nt, synthetic construct
  source 1..21: mol_type = other RNA
ttatggtaattggttcgtttg

SEQ ID NO: 105869 - RNA, 21 nt, synthetic construct
  source 1..21: mol_type = other RNA
ttatggtaggtgctttttgta

SEQ ID NO: 105870 - RNA, 21 nt, synthetic construct
  source 1..21: mol_type = other RNA
ttatggtctttttccaggacc

SEQ ID NO: 105871 - RNA, 21 nt, synthetic construct
  source 1..21: mol_type = other RNA
ttatggttgttggctaaaaga

SEQ ID NO: 105872 - RNA, 21 nt, synthetic construct
  source 1..21: mol_type = other RNA
ttatggttttttcccccctgg

SEQ ID NO: 105873 - RNA, 21 nt, synthetic construct
  source 1..21: mol_type = other RNA
ttatgtacacgtcttgtcaat

SEQ ID NO: 105874 - RNA, 21 nt, synthetic construct
  source 1..21: mol_type = other RNA
ttatgtacatgacctatctat

SEQ ID NO: 105875 - RNA, 21 nt, synthetic construct
  source 1..21: mol_type = other RNA
ttatgtagctgggatggctga

SEQ ID NO: 105876 - RNA, 21 nt, synthetic construct
  source 1..21: mol_type = other RNA
ttatgtcagtcaacacactag

SEQ ID NO: 105877 - RNA, 21 nt, synthetic construct
  source 1..21: mol_type = other RNA
ttatgtccagcccccagtttt

SEQ ID NO: 105878 - RNA, 21 nt, synthetic construct
  source 1..21: mol_type = other RNA
ttatgtcttgtggctgacatg

SEQ ID NO: 105879 - RNA, 21 nt, synthetic construct
  source 1..21: mol_type = other RNA
ttatgtgaaagtagaggactg

SEQ ID NO: 105880 - RNA, 21 nt, synthetic construct
  source 1..21: mol_type = other RNA
ttatgtgcaagttctcttttt

SEQ ID NO: 105881 - RNA, 21 nt, synthetic construct
  source 1..21: mol_type = other RNA
ttatgtgcagtctaaccatta

SEQ ID NO: 105882 - RNA, 21 nt, synthetic construct
  source 1..21: mol_type = other RNA
ttatgtgctttctcaacactg

SEQ ID NO: 105883 - RNA, 21 nt, synthetic construct
  source 1..21: mol_type = other RNA
ttatgtgtgtataacccgttt

SEQ ID NO: 105884 - RNA, 21 nt, synthetic construct
  source 1..21: mol_type = other RNA
ttatgttcatgaaccttcacc

SEQ ID NO: 105885 - RNA, 21 nt, synthetic construct
  source 1..21: mol_type = other RNA
ttatgttccacatgttactca

SEQ ID NO: 105886 - RNA, 21 nt, synthetic construct
  source 1..21: mol_type = other RNA
ttatgttgcacaaaagtgaaa

SEQ ID NO: 105887 - RNA, 21 nt, synthetic construct
  source 1..21: mol_type = other RNA
ttattaaacctgttacatggt

SEQ ID NO: 105888 - RNA, 21 nt, synthetic construct
  source 1..21: mol_type = other RNA
ttattaaagtagaaggcccta

SEQ ID NO: 105889 - RNA, 21 nt, synthetic construct
  source 1..21: mol_type = other RNA
ttattaaatgagacacctaca

SEQ ID NO: 105890 - RNA, 21 nt, synthetic construct
  source 1..21: mol_type = other RNA
ttattaacataccgacggctc

SEQ ID NO: 105891 - RNA, 21 nt, synthetic construct
  source 1..21: mol_type = other RNA
ttattaagagtgtgctgacta

SEQ ID NO: 105892 - RNA, 21 nt, synthetic construct
  source 1..21: mol_type = other RNA
ttattaagcaaaatggaagtg

SEQ ID NO: 105893 - RNA, 21 nt, synthetic construct
  source 1..21: mol_type = other RNA
ttattaatttggcttggggaa

SEQ ID NO: 105894 - RNA, 21 nt, synthetic construct
  source 1..21: mol_type = other RNA
ttattagaactagaactgtgt

SEQ ID NO: 105895 - RNA, 21 nt, synthetic construct
  source 1..21: mol_type = other RNA
ttattagatagtggtttgaag

SEQ ID NO: 105896 - RNA, 21 nt, synthetic construct
  source 1..21: mol_type = other RNA
ttattagcaaagaggcaaaac

SEQ ID NO: 105897 - RNA, 21 nt, synthetic construct
  source 1..21: mol_type = other RNA
ttattagcttgctagtagcag

SEQ ID NO: 105898 - RNA, 21 nt, synthetic construct
  source 1..21: mol_type = other RNA
ttattagggtaatgctggctt

SEQ ID NO: 105899 - RNA, 21 nt, synthetic construct
  source 1..21: mol_type = other RNA
ttattaggtgcacacaacact

SEQ ID NO: 105900 - RNA, 21 nt, synthetic construct
  source 1..21: mol_type = other RNA
ttattagtagttaggtggttt

SEQ ID NO: 105901 - RNA, 21 nt, synthetic construct
  source 1..21: mol_type = other RNA
ttattagttgtacttgacaca

SEQ ID NO: 105902 - RNA, 21 nt, synthetic construct
  source 1..21: mol_type = other RNA
ttattcaaataattgctgcag

SEQ ID NO: 105903 - RNA, 21 nt, synthetic construct
  source 1..21: mol_type = other RNA
ttattcacccaagaatttcat

SEQ ID NO: 105904 - RNA, 21 nt, synthetic construct
  source 1..21: mol_type = other RNA
ttattccccagggaaacctta

SEQ ID NO: 105905 - RNA, 21 nt, synthetic construct
  source 1..21: mol_type = other RNA
ttattcctctcttggaatgtg

SEQ ID NO: 105906 - RNA, 21 nt, synthetic construct
  source 1..21: mol_type = other RNA
ttattctaaacacacgggctg

SEQ ID NO: 105907 - RNA, 21 nt, synthetic construct
  source 1..21: mol_type = other RNA
ttattctgttctagctcctgg

SEQ ID NO: 105908 - RNA, 21 nt, synthetic construct
  source 1..21: mol_type = other RNA
ttattcttacagtgacatatg

SEQ ID NO: 105909 - RNA, 21 nt, synthetic construct
  source 1..21: mol_type = other RNA
ttattcttcagcaaggaccat

SEQ ID NO: 105910 - RNA, 21 nt, synthetic construct
  source 1..21: mol_type = other RNA
ttattgacaagacgtgtacat

SEQ ID NO: 105911 - RNA, 21 nt, synthetic construct
  source 1..21: mol_type = other RNA
ttattgagaagcagaaaatca

SEQ ID NO: 105912 - RNA, 21 nt, synthetic construct
  source 1..21: mol_type = other RNA
ttattgagtctgtagggtgac

SEQ ID NO: 105913 - RNA, 21 nt, synthetic construct
  source 1..21: mol_type = other RNA
ttattgataagcacatggtga

SEQ ID NO: 105914 - RNA, 21 nt, synthetic construct
  source 1..21: mol_type = other RNA
ttattgattcagatgacagaa

SEQ ID NO: 105915 - RNA, 21 nt, synthetic construct
  source 1..21: mol_type = other RNA
ttattgcatagggatgttgcc

SEQ ID NO: 105916 - RNA, 21 nt, synthetic construct
  source 1..21: mol_type = other RNA
ttattggaaaactctgtttcc

SEQ ID NO: 105917 - RNA, 21 nt, synthetic construct
  source 1..21: mol_type = other RNA
ttattgtcaaggtcatccttt

SEQ ID NO: 105918 - RNA, 21 nt, synthetic construct
  source 1..21: mol_type = other RNA
ttattgtctgcaagcagatct

SEQ ID NO: 105919 - RNA, 21 nt, synthetic construct
  source 1..21: mol_type = other RNA
ttattgtttcacttttctggt

SEQ ID NO: 105920 - RNA, 21 nt, synthetic construct
  source 1..21: mol_type = other RNA
ttatttaatctctcttgacct

SEQ ID NO: 105921 - RNA, 21 nt, synthetic construct
  source 1..21: mol_type = other RNA
ttatttaatgtgctgtccatt

SEQ ID NO: 105922 - RNA, 21 nt, synthetic construct
  source 1..21: mol_type = other RNA
ttatttagcccatgtctaaag

SEQ ID NO: 105923 - RNA, 21 nt, synthetic construct
  source 1..21: mol_type = other RNA
ttatttaggccctctataatt

SEQ ID NO: 105924 - RNA, 21 nt, synthetic construct
  source 1..21: mol_type = other RNA
ttatttatacaggtgcttaca

SEQ ID NO: 105925 - RNA, 21 nt, synthetic construct
  source 1..21: mol_type = other RNA
ttatttatgctgatgaactac

SEQ ID NO: 105926 - RNA, 21 nt, synthetic construct
  source 1..21: mol_type = other RNA
ttatttccagggggtatggag

SEQ ID NO: 105927 - RNA, 21 nt, synthetic construct
  source 1..21: mol_type = other RNA
ttatttccttaagccatttca

SEQ ID NO: 105928 - RNA, 21 nt, synthetic construct
  source 1..21: mol_type = other RNA
ttatttctgggctctctattc

SEQ ID NO: 105929 - RNA, 21 nt, synthetic construct
  source 1..21: mol_type = other RNA
ttatttctgtcatctgaatca

SEQ ID NO: 105930 - RNA, 21 nt, synthetic construct
  source 1..21: mol_type = other RNA
ttatttcttctccctcttcgc

SEQ ID NO: 105931 - RNA, 21 nt, synthetic construct
  source 1..21: mol_type = other RNA
ttatttcttgacctcagtggt

SEQ ID NO: 105932 - RNA, 21 nt, synthetic construct
  source 1..21: mol_type = other RNA
ttatttgagagtaagttgcat

SEQ ID NO: 105933 - RNA, 21 nt, synthetic construct
  source 1..21: mol_type = other RNA
ttatttgcggcttgattagct

SEQ ID NO: 105934 - RNA, 21 nt, synthetic construct
  source 1..21: mol_type = other RNA
ttatttgctgtcaggcaaggg

SEQ ID NO: 105935 - RNA, 21 nt, synthetic construct
  source 1..21: mol_type = other RNA
ttatttggaaatatggtcact

SEQ ID NO: 105936 - RNA, 21 nt, synthetic construct
  source 1..21: mol_type = other RNA
ttatttggaagagagaaggct

SEQ ID NO: 105937 - RNA, 21 nt, synthetic construct
  source 1..21: mol_type = other RNA
ttatttggctgttaccatttg

SEQ ID NO: 105938 - RNA, 21 nt, synthetic construct
  source 1..21: mol_type = other RNA
ttatttggggattctgctact

SEQ ID NO: 105939 - RNA, 21 nt, synthetic construct
  source 1..21: mol_type = other RNA
ttatttgtgcatactgtgatg

SEQ ID NO: 105940 - RNA, 21 nt, synthetic construct
  source 1..21: mol_type = other RNA
ttatttgttactgatctgctc

SEQ ID NO: 105941 - RNA, 21 nt, synthetic construct
  source 1..21: mol_type = other RNA
ttatttgttctgtcacggtgc

SEQ ID NO: 105942 - RNA, 21 nt, synthetic construct
  source 1..21: mol_type = other RNA
ttattttaatcgaatcctcac

SEQ ID NO: 105943 - RNA, 21 nt, synthetic construct
  source 1..21: mol_type = other RNA
ttattttatgtacacgtcttg

SEQ ID NO: 105944 - RNA, 21 nt, synthetic construct
  source 1..21: mol_type = other RNA
ttattttcctccttctgctca

SEQ ID NO: 105945 - RNA, 21 nt, synthetic construct
  source 1..21: mol_type = other RNA
ttattttctgcatttggtttg

SEQ ID NO: 105946 - RNA, 21 nt, synthetic construct
  source 1..21: mol_type = other RNA
ttatttttacccaacatgaga

SEQ ID NO: 105947 - RNA, 21 nt, synthetic construct
  source 1..21: mol_type = other RNA
ttatttttacccgtggaaata

SEQ ID NO: 105948 - RNA, 21 nt, synthetic construct
  source 1..21: mol_type = other RNA
ttatttttgagacaggttgtt

SEQ ID NO: 105949 - RNA, 21 nt, synthetic construct
  source 1..21: mol_type = other RNA
ttattttttcccagatacgtt

SEQ ID NO: 105950 - RNA, 21 nt, synthetic construct
  source 1..21: mol_type = other RNA
ttattttttcccgctacacaa

SEQ ID NO: 105951 - RNA, 21 nt, synthetic construct
  source 1..21: mol_type = other RNA
ttattttttcttcccatctca

SEQ ID NO: 105952 - RNA, 21 nt, synthetic construct
  source 1..21: mol_type = other RNA
ttcaaaaacagcatatacatg

SEQ ID NO: 105953 - RNA, 21 nt, synthetic construct
  source 1..21: mol_type = other RNA
ttcaaaaacccaactctttct

SEQ ID NO: 105954 - RNA, 21 nt, synthetic construct
  source 1..21: mol_type = other RNA
ttcaaaacaaaacacatggca

SEQ ID NO: 105955 - RNA, 21 nt, synthetic construct
  source 1..21: mol_type = other RNA
ttcaaaagacatcactaagag

SEQ ID NO: 105956 - RNA, 21 nt, synthetic construct
  source 1..21: mol_type = other RNA
ttcaaaagccccaaaccatca

SEQ ID NO: 105957 - RNA, 21 nt, synthetic construct
  source 1..21: mol_type = other RNA
ttcaaaagctccccggatgat

SEQ ID NO: 105958 - RNA, 21 nt, synthetic construct
  source 1..21: mol_type = other RNA
ttcaaaatctgatgtgtatgt

SEQ ID NO: 105959 - RNA, 21 nt, synthetic construct
  source 1..21: mol_type = other RNA
ttcaaaatgtgatggcatcat

SEQ ID NO: 105960 - RNA, 21 nt, synthetic construct
  source 1..21: mol_type = other RNA
ttcaaacatgacagatcccaa

SEQ ID NO: 105961 - RNA, 21 nt, synthetic construct
  source 1..21: mol_type = other RNA
ttcaaaccaatgttctctttt

SEQ ID NO: 105962 - RNA, 21 nt, synthetic construct
  source 1..21: mol_type = other RNA
ttcaaaccacctaactactaa

SEQ ID NO: 105963 - RNA, 21 nt, synthetic construct
  source 1..21: mol_type = other RNA
ttcaaactgtggtcactgttt

SEQ ID NO: 105964 - RNA, 21 nt, synthetic construct
  source 1..21: mol_type = other RNA
ttcaaagaaactacctagaaa

SEQ ID NO: 105965 - RNA, 21 nt, synthetic construct
  source 1..21: mol_type = other RNA
ttcaaagagaacaaaatacct

SEQ ID NO: 105966 - RNA, 21 nt, synthetic construct
  source 1..21: mol_type = other RNA
ttcaaagagacctgattcttc

SEQ ID NO: 105967 - RNA, 21 nt, synthetic construct
  source 1..21: mol_type = other RNA
ttcaaagatcatttcacttga

SEQ ID NO: 105968 - RNA, 21 nt, synthetic construct
  source 1..21: mol_type = other RNA
ttcaaagcaagttaaaagaca

SEQ ID NO: 105969 - RNA, 21 nt, synthetic construct
  source 1..21: mol_type = other RNA
ttcaaagggtcactattaacc

SEQ ID NO: 105970 - RNA, 21 nt, synthetic construct
  source 1..21: mol_type = other RNA
ttcaaagttaatagcctccta

SEQ ID NO: 105971 - RNA, 21 nt, synthetic construct
  source 1..21: mol_type = other RNA
ttcaaataattgctgcagttt

SEQ ID NO: 105972 - RNA, 21 nt, synthetic construct
  source 1..21: mol_type = other RNA
ttcaaatacctagttttccaa

SEQ ID NO: 105973 - RNA, 21 nt, synthetic construct
  source 1..21: mol_type = other RNA
ttcaaatgaggcttttattgg

SEQ ID NO: 105974 - RNA, 21 nt, synthetic construct
  source 1..21: mol_type = other RNA
ttcaaatgtgacagaacaaac

SEQ ID NO: 105975 - RNA, 21 nt, synthetic construct
  source 1..21: mol_type = other RNA
ttcaaatgttaagcccaactt

SEQ ID NO: 105976 - RNA, 21 nt, synthetic construct
  source 1..21: mol_type = other RNA
ttcaacaaaactgggggctgg

SEQ ID NO: 105977 - RNA, 21 nt, synthetic construct
  source 1..21: mol_type = other RNA
ttcaacaaaggttgaaaactc

SEQ ID NO: 105978 - RNA, 21 nt, synthetic construct
  source 1..21: mol_type = other RNA
ttcaacaatagcaacaaaaca

SEQ ID NO: 105979 - RNA, 21 nt, synthetic construct
  source 1..21: mol_type = other RNA
ttcaacagctactatgaatat

SEQ ID NO: 105980 - RNA, 21 nt, synthetic construct
  source 1..21: mol_type = other RNA
ttcaacaggtataaagtttcc

SEQ ID NO: 105981 - RNA, 21 nt, synthetic construct
  source 1..21: mol_type = other RNA
ttcaaccatacttttcaactg

SEQ ID NO: 105982 - RNA, 21 nt, synthetic construct
  source 1..21: mol_type = other RNA
ttcaaccctcggcctctactg

SEQ ID NO: 105983 - RNA, 21 nt, synthetic construct
  source 1..21: mol_type = other RNA
ttcaacctaacatgtcttggt

SEQ ID NO: 105984 - RNA, 21 nt, synthetic construct
  source 1..21: mol_type = other RNA
ttcaacctataagacccagtg

SEQ ID NO: 105985 - RNA, 21 nt, synthetic construct
  source 1..21: mol_type = other RNA
ttcaacctcaactttaggtta

SEQ ID NO: 105986 - RNA, 21 nt, synthetic construct
  source 1..21: mol_type = other RNA
ttcaacctcctgggctcaaat

SEQ ID NO: 105987 - RNA, 21 nt, synthetic construct
  source 1..21: mol_type = other RNA
ttcaacctttgttgaaaacga

SEQ ID NO: 105988 - RNA, 21 nt, synthetic construct
  source 1..21: mol_type = other RNA
ttcaacggacatttttccaaa

SEQ ID NO: 105989 - RNA, 21 nt, synthetic construct
  source 1..21: mol_type = other RNA
ttcaactgaacaacgctgtgg

SEQ ID NO: 105990 - RNA, 21 nt, synthetic construct
  source 1..21: mol_type = other RNA
ttcaacttggtaaaaagtgct

SEQ ID NO: 105991 - RNA, 21 nt, synthetic construct
  source 1..21: mol_type = other RNA
ttcaagaaaccacagagccta

SEQ ID NO: 105992 - RNA, 21 nt, synthetic construct
  source 1..21: mol_type = other RNA
ttcaagacaagcaaggaaggg

SEQ ID NO: 105993 - RNA, 21 nt, synthetic construct
  source 1..21: mol_type = other RNA
ttcaagaggttaaaaccacaa

SEQ ID NO: 105994 - RNA, 21 nt, synthetic construct
  source 1..21: mol_type = other RNA
ttcaagatactgcactaaact

SEQ ID NO: 105995 - RNA, 21 nt, synthetic construct
  source 1..21: mol_type = other RNA
ttcaagatgcataccaagccc

SEQ ID NO: 105996 - RNA, 21 nt, synthetic construct
  source 1..21: mol_type = other RNA
ttcaagatttcataggcatct

SEQ ID NO: 105997 - RNA, 21 nt, synthetic construct
  source 1..21: mol_type = other RNA
ttcaagcaccacttcgagaag

SEQ ID NO: 105998 - RNA, 21 nt, synthetic construct
  source 1..21: mol_type = other RNA
ttcaagcagaaatgagttcca

SEQ ID NO: 105999 - RNA, 21 nt, synthetic construct
  source 1..21: mol_type = other RNA
ttcaagcattgggagctttca

SEQ ID NO: 106000 - RNA, 21 nt, synthetic construct
  source 1..21: mol_type = other RNA
ttcaagccccagttctgcgca

SEQ ID NO: 106001 - RNA, 21 nt, synthetic construct
  source 1..21: mol_type = other RNA
ttcaagcgctgaagtacttca

SEQ ID NO: 106002 - RNA, 21 nt, synthetic construct
  source 1..21: mol_type = other RNA
ttcaaggcttgtgcatcagaa

SEQ ID NO: 106003 - RNA, 21 nt, synthetic construct
  source 1..21: mol_type = other RNA
ttcaaggggccttttgtcaag

SEQ ID NO: 106004 - RNA, 21 nt, synthetic construct
  source 1..21: mol_type = other RNA
ttcaagggtgttttcccccct

SEQ ID NO: 106005 - RNA, 21 nt, synthetic construct
  source 1..21: mol_type = other RNA
ttcaaggtaatctagtttatc

SEQ ID NO: 106006 - RNA, 21 nt, synthetic construct
  source 1..21: mol_type = other RNA
ttcaaggtagaagtacaaaca

SEQ ID NO: 106007 - RNA, 21 nt, synthetic construct
  source 1..21: mol_type = other RNA
ttcaaggtatctccccaaaga

SEQ ID NO: 106008 - RNA, 21 nt, synthetic construct
  source 1..21: mol_type = other RNA
ttcaaggtgttagcaggactg

SEQ ID NO: 106009 - RNA, 21 nt, synthetic construct
  source 1..21: mol_type = other RNA
ttcaaggtgttcctgaagtct

SEQ ID NO: 106010 - RNA, 21 nt, synthetic construct
  source 1..21: mol_type = other RNA
ttcaaggttataatcagccgt

SEQ ID NO: 106011 - RNA, 21 nt, synthetic construct
  source 1..21: mol_type = other RNA
ttcaaggttcacaaattagaa

SEQ ID NO: 106012 - RNA, 21 nt, synthetic construct
  source 1..21: mol_type = other RNA
ttcaagtaacactcagaagta

SEQ ID NO: 106013 - RNA, 21 nt, synthetic construct
  source 1..21: mol_type = other RNA
ttcaagtatttccacgggtaa

SEQ ID NO: 106014 - RNA, 21 nt, synthetic construct
  source 1..21: mol_type = other RNA
ttcaagtgaaccaaaaaccac

SEQ ID NO: 106015 - RNA, 21 nt, synthetic construct
  source 1..21: mol_type = other RNA
ttcaagttacaataatatgcc

SEQ ID NO: 106016 - RNA, 21 nt, synthetic construct
  source 1..21: mol_type = other RNA
ttcaagttgctttttcttctt

SEQ ID NO: 106017 - RNA, 21 nt, synthetic construct
  source 1..21: mol_type = other RNA
ttcaagtttcaccctgcgaag

SEQ ID NO: 106018 - RNA, 21 nt, synthetic construct
  source 1..21: mol_type = other RNA
ttcaagtttggctcccatgat

SEQ ID NO: 106019 - RNA, 21 nt, synthetic construct
  source 1..21: mol_type = other RNA
ttcaatactactgcaaatatc

SEQ ID NO: 106020 - RNA, 21 nt, synthetic construct
  source 1..21: mol_type = other RNA
ttcaatagtgggtagaagcag

SEQ ID NO: 106021 - RNA, 21 nt, synthetic construct
  source 1..21: mol_type = other RNA
ttcaatatgcagtatgtgcca

SEQ ID NO: 106022 - RNA, 21 nt, synthetic construct
  source 1..21: mol_type = other RNA
ttcaatattaagagtctcatc

SEQ ID NO: 106023 - RNA, 21 nt, synthetic construct
  source 1..21: mol_type = other RNA
ttcaatctggaatgcatcgtt

SEQ ID NO: 106024 - RNA, 21 nt, synthetic construct
  source 1..21: mol_type = other RNA
ttcaatcttggaaatgatacc

SEQ ID NO: 106025 - RNA, 21 nt, synthetic construct
  source 1..21: mol_type = other RNA
ttcaatgagggcagagataac

SEQ ID NO: 106026 - RNA, 21 nt, synthetic construct
  source 1..21: mol_type = other RNA
ttcaatgcaatacttaatagc

SEQ ID NO: 106027 - RNA, 21 nt, synthetic construct
  source 1..21: mol_type = other RNA
ttcaatgctacagtaagcaaa

SEQ ID NO: 106028 - RNA, 21 nt, synthetic construct
  source 1..21: mol_type = other RNA
ttcaatgtttggtagatttct

SEQ ID NO: 106029 - RNA, 21 nt, synthetic construct
  source 1..21: mol_type = other RNA
ttcaattgtcctggcagatca

SEQ ID NO: 106030 - RNA, 21 nt, synthetic construct
  source 1..21: mol_type = other RNA
ttcaattttcatgggttgatt

SEQ ID NO: 106031 - RNA, 21 nt, synthetic construct
  source 1..21: mol_type = other RNA
ttcacaaacaaatccttttcc

SEQ ID NO: 106032 - RNA, 21 nt, synthetic construct
  source 1..21: mol_type = other RNA
ttcacaaacacacaaaccaac

SEQ ID NO: 106033 - RNA, 21 nt, synthetic construct
  source 1..21: mol_type = other RNA
ttcacaaagccctcaggacca

SEQ ID NO: 106034 - RNA, 21 nt, synthetic construct
  source 1..21: mol_type = other RNA
ttcacaagattaatcttgcaa

SEQ ID NO: 106035 - RNA, 21 nt, synthetic construct
  source 1..21: mol_type = other RNA
ttcacacaccctttcttagga

SEQ ID NO: 106036 - RNA, 21 nt, synthetic construct
  source 1..21: mol_type = other RNA
ttcacacattaactatggaca

SEQ ID NO: 106037 - RNA, 21 nt, synthetic construct
  source 1..21: mol_type = other RNA
ttcacaccatttagatcatct

SEQ ID NO: 106038 - RNA, 21 nt, synthetic construct
  source 1..21: mol_type = other RNA
ttcacacctgtagtcccagct

SEQ ID NO: 106039 - RNA, 21 nt, synthetic construct
  source 1..21: mol_type = other RNA
ttcacacgcattgcattgact

SEQ ID NO: 106040 - RNA, 21 nt, synthetic construct
  source 1..21: mol_type = other RNA
ttcacactagtcaccctacag

SEQ ID NO: 106041 - RNA, 21 nt, synthetic construct
  source 1..21: mol_type = other RNA
ttcacactataacagatggaa

SEQ ID NO: 106042 - RNA, 21 nt, synthetic construct
  source 1..21: mol_type = other RNA
ttcacactcgcactccacttc

SEQ ID NO: 106043 - RNA, 21 nt, synthetic construct
  source 1..21: mol_type = other RNA
ttcacactgattttctgcttc

SEQ ID NO: 106044 - RNA, 21 nt, synthetic construct
  source 1..21: mol_type = other RNA
ttcacactgctcctgcctttg

SEQ ID NO: 106045 - RNA, 21 nt, synthetic construct
  source 1..21: mol_type = other RNA
ttcacacttagttcaagatgc

SEQ ID NO: 106046 - RNA, 21 nt, synthetic construct
  source 1..21: mol_type = other RNA
ttcacagaaacagaaaaatcc

SEQ ID NO: 106047 - RNA, 21 nt, synthetic construct
  source 1..21: mol_type = other RNA
ttcacagaactgtcactgaca

SEQ ID NO: 106048 - RNA, 21 nt, synthetic construct
  source 1..21: mol_type = other RNA
ttcacagaatatactcagaaa

SEQ ID NO: 106049 - RNA, 21 nt, synthetic construct
  source 1..21: mol_type = other RNA
ttcacagacagtaatttatac

SEQ ID NO: 106050 - RNA, 21 nt, synthetic construct
  source 1..21: mol_type = other RNA
ttcacagcatgaatacctatt

SEQ ID NO: 106051 - RNA, 21 nt, synthetic construct
  source 1..21: mol_type = other RNA
ttcacagcgtgcaccttacat

SEQ ID NO: 106052 - RNA, 21 nt, synthetic construct
  source 1..21: mol_type = other RNA
ttcacagggcagggagagaga

SEQ ID NO: 106053 - RNA, 21 nt, synthetic construct
  source 1..21: mol_type = other RNA
ttcacagtagaagactcagca

SEQ ID NO: 106054 - RNA, 21 nt, synthetic construct
  source 1..21: mol_type = other RNA
ttcacataaatttgccacatt

SEQ ID NO: 106055 - RNA, 21 nt, synthetic construct
  source 1..21: mol_type = other RNA
ttcacataaggtatatttctg

SEQ ID NO: 106056 - RNA, 21 nt, synthetic construct
  source 1..21: mol_type = other RNA
ttcacattcttcaccattcca

SEQ ID NO: 106057 - RNA, 21 nt, synthetic construct
  source 1..21: mol_type = other RNA
ttcacattgcacagtctcccc

SEQ ID NO: 106058 - RNA, 21 nt, synthetic construct
  source 1..21: mol_type = other RNA
ttcacatttaagaagggaaca

SEQ ID NO: 106059 - RNA, 21 nt, synthetic construct
  source 1..21: mol_type = other RNA
ttcacatttcgccttctcaga

SEQ ID NO: 106060 - RNA, 21 nt, synthetic construct
  source 1..21: mol_type = other RNA
ttcaccaaacaccttacactc

SEQ ID NO: 106061 - RNA, 21 nt, synthetic construct
  source 1..21: mol_type = other RNA
ttcaccaaagatttactaaac

SEQ ID NO: 106062 - RNA, 21 nt, synthetic construct
  source 1..21: mol_type = other RNA
ttcaccaactgaagcggggct

SEQ ID NO: 106063 - RNA, 21 nt, synthetic construct
  source 1..21: mol_type = other RNA
ttcaccaattgttaacatttc

SEQ ID NO: 106064 - RNA, 21 nt, synthetic construct
  source 1..21: mol_type = other RNA
ttcaccagcggcatacaggag

SEQ ID NO: 106065 - RNA, 21 nt, synthetic construct
  source 1..21: mol_type = other RNA
ttcaccagtttctaattagaa

SEQ ID NO: 106066 - RNA, 21 nt, synthetic construct
  source 1..21: mol_type = other RNA
ttcaccattccagccattctc

SEQ ID NO: 106067 - RNA, 21 nt, synthetic construct
  source 1..21: mol_type = other RNA
ttcacccaagaatttcatgcc

SEQ ID NO: 106068 - RNA, 21 nt, synthetic construct
  source 1..21: mol_type = other RNA
ttcaccctgcgaaggcaatgt

SEQ ID NO: 106069 - RNA, 21 nt, synthetic construct
  source 1..21: mol_type = other RNA
ttcaccgtgcaactagagaaa

SEQ ID NO: 106070 - RNA, 21 nt, synthetic construct
  source 1..21: mol_type = other RNA
ttcacctctacacaaaaatcc

SEQ ID NO: 106071 - RNA, 21 nt, synthetic construct
  source 1..21: mol_type = other RNA
ttcacctctccgggtaaaaag

SEQ ID NO: 106072 - RNA, 21 nt, synthetic construct
  source 1..21: mol_type = other RNA
ttcacgagactgttagggact

SEQ ID NO: 106073 - RNA, 21 nt, synthetic construct
  source 1..21: mol_type = other RNA
ttcacgatgcttaggtaagaa

SEQ ID NO: 106074 - RNA, 21 nt, synthetic construct
  source 1..21: mol_type = other RNA
ttcacgcacagggagatactt

SEQ ID NO: 106075 - RNA, 21 nt, synthetic construct
  source 1..21: mol_type = other RNA
ttcacgtgcattcatactgaa

SEQ ID NO: 106076 - RNA, 21 nt, synthetic construct
  source 1..21: mol_type = other RNA
ttcacgtggcgctccctctgt

SEQ ID NO: 106077 - RNA, 21 nt, synthetic construct
  source 1..21: mol_type = other RNA
ttcactaatgcctcaaattag

SEQ ID NO: 106078 - RNA, 21 nt, synthetic construct
  source 1..21: mol_type = other RNA
ttcactagacacatttttgac

SEQ ID NO: 106079 - RNA, 21 nt, synthetic construct
  source 1..21: mol_type = other RNA
ttcactagatctcttttcctt

SEQ ID NO: 106080 - RNA, 21 nt, synthetic construct
  source 1..21: mol_type = other RNA
ttcactagtgggtcgggtgtc

SEQ ID NO: 106081 - RNA, 21 nt, synthetic construct
  source 1..21: mol_type = other RNA
ttcactcagcataattggtta

SEQ ID NO: 106082 - RNA, 21 nt, synthetic construct
  source 1..21: mol_type = other RNA
ttcactcctcattcacactag

SEQ ID NO: 106083 - RNA, 21 nt, synthetic construct
  source 1..21: mol_type = other RNA
ttcactctaatatggttccta

SEQ ID NO: 106084 - RNA, 21 nt, synthetic construct
  source 1..21: mol_type = other RNA
ttcactctcaatagtgtcctt

SEQ ID NO: 106085 - RNA, 21 nt, synthetic construct
  source 1..21: mol_type = other RNA
ttcactctgtcgcccaggctg

SEQ ID NO: 106086 - RNA, 21 nt, synthetic construct
  source 1..21: mol_type = other RNA
ttcactcttaaaaggagatat

SEQ ID NO: 106087 - RNA, 21 nt, synthetic construct
  source 1..21: mol_type = other RNA
ttcactcttagtgatgtcttt

SEQ ID NO: 106088 - RNA, 21 nt, synthetic construct
  source 1..21: mol_type = other RNA
ttcactcttctgcaagttgct

SEQ ID NO: 106089 - RNA, 21 nt, synthetic construct
  source 1..21: mol_type = other RNA
ttcactcttttaaggtttaga

SEQ ID NO: 106090 - RNA, 21 nt, synthetic construct
  source 1..21: mol_type = other RNA
ttcactgactacacatacaca

SEQ ID NO: 106091 - RNA, 21 nt, synthetic construct
  source 1..21: mol_type = other RNA
ttcactgcagaattactgaca

SEQ ID NO: 106092 - RNA, 21 nt, synthetic construct
  source 1..21: mol_type = other RNA
ttcactgctcagtccctcacc

SEQ ID NO: 106093 - RNA, 21 nt, synthetic construct
  source 1..21: mol_type = other RNA
ttcactggagaattctactaa

SEQ ID NO: 106094 - RNA, 21 nt, synthetic construct
  source 1..21: mol_type = other RNA
ttcactgtgactccaaagcaa

SEQ ID NO: 106095 - RNA, 21 nt, synthetic construct
  source 1..21: mol_type = other RNA
ttcacttacttgagccccaga

SEQ ID NO: 106096 - RNA, 21 nt, synthetic construct
  source 1..21: mol_type = other RNA
ttcacttccaagtcccggaag

SEQ ID NO: 106097 - RNA, 21 nt, synthetic construct
  source 1..21: mol_type = other RNA
ttcacttcgttcagtttagta

SEQ ID NO: 106098 - RNA, 21 nt, synthetic construct
  source 1..21: mol_type = other RNA
ttcacttctctgctgctgaaa

SEQ ID NO: 106099 - RNA, 21 nt, synthetic construct
  source 1..21: mol_type = other RNA
ttcacttcttagtaaatatcc

SEQ ID NO: 106100 - RNA, 21 nt, synthetic construct
  source 1..21: mol_type = other RNA
ttcacttcttattggttatct

SEQ ID NO: 106101 - RNA, 21 nt, synthetic construct
  source 1..21: mol_type = other RNA
ttcacttgaaacctgccatgg

SEQ ID NO: 106102 - RNA, 21 nt, synthetic construct
  source 1..21: mol_type = other RNA
ttcacttgattactttacagt

SEQ ID NO: 106103 - RNA, 21 nt, synthetic construct
  source 1..21: mol_type = other RNA
ttcacttgtttcttttcactc

SEQ ID NO: 106104 - RNA, 21 nt, synthetic construct
  source 1..21: mol_type = other RNA
ttcactttcgtcatctataag

SEQ ID NO: 106105 - RNA, 21 nt, synthetic construct
  source 1..21: mol_type = other RNA
ttcactttgatcatacacatc

SEQ ID NO: 106106 - RNA, 21 nt, synthetic construct
  source 1..21: mol_type = other RNA
ttcacttttctggttttctgg

SEQ ID NO: 106107 - RNA, 21 nt, synthetic construct
  source 1..21: mol_type = other RNA
ttcacttttgagttcagaaag

SEQ ID NO: 106108 - RNA, 21 nt, synthetic construct
  source 1..21: mol_type = other RNA
ttcacttttggaatttaaggg

SEQ ID NO: 106109 - RNA, 21 nt, synthetic construct
  source 1..21: mol_type = other RNA
ttcacttttgtgcaacataaa

SEQ ID NO: 106110 - RNA, 21 nt, synthetic construct
  source 1..21: mol_type = other RNA
ttcagaaagagaatagcagaa

SEQ ID NO: 106111 - RNA, 21 nt, synthetic construct
  source 1..21: mol_type = other RNA
ttcagaaagattaatccttgt

SEQ ID NO: 106112 - RNA, 21 nt, synthetic construct
  source 1..21: mol_type = other RNA
ttcagaaatagactcccaact

SEQ ID NO: 106113 - RNA, 21 nt, synthetic construct
  source 1..21: mol_type = other RNA
ttcagaactcttctccaagga

SEQ ID NO: 106114 - RNA, 21 nt, synthetic construct
  source 1..21: mol_type = other RNA
ttcagaagaggataaggggca

SEQ ID NO: 106115 - RNA, 21 nt, synthetic construct
  source 1..21: mol_type = other RNA
ttcagaagccctgcagccaga

SEQ ID NO: 106116 - RNA, 21 nt, synthetic construct
  source 1..21: mol_type = other RNA
ttcagaaggagtccagtcctg

SEQ ID NO: 106117 - RNA, 21 nt, synthetic construct
  source 1..21: mol_type = other RNA
ttcagaataccagagattggg

SEQ ID NO: 106118 - RNA, 21 nt, synthetic construct
  source 1..21: mol_type = other RNA
ttcagacttaactataggagt

SEQ ID NO: 106119 - RNA, 21 nt, synthetic construct
  source 1..21: mol_type = other RNA
ttcagagagacctgaagactg

SEQ ID NO: 106120 - RNA, 21 nt, synthetic construct
  source 1..21: mol_type = other RNA
ttcagaggccctggtgctttc

SEQ ID NO: 106121 - RNA, 21 nt, synthetic construct
  source 1..21: mol_type = other RNA
ttcagaggtatttggggctag

SEQ ID NO: 106122 - RNA, 21 nt, synthetic construct
  source 1..21: mol_type = other RNA
ttcagaggtctgttactcccg

SEQ ID NO: 106123 - RNA, 21 nt, synthetic construct
  source 1..21: mol_type = other RNA
ttcagagtgctgggtagagac

SEQ ID NO: 106124 - RNA, 21 nt, synthetic construct
  source 1..21: mol_type = other RNA
ttcagagtggctaatgtggct

SEQ ID NO: 106125 - RNA, 21 nt, synthetic construct
  source 1..21: mol_type = other RNA
ttcagataacaaagggttctt

SEQ ID NO: 106126 - RNA, 21 nt, synthetic construct
  source 1..21: mol_type = other RNA
ttcagatagaaaagacaatag

SEQ ID NO: 106127 - RNA, 21 nt, synthetic construct
  source 1..21: mol_type = other RNA
ttcagatctctgacattggtt

SEQ ID NO: 106128 - RNA, 21 nt, synthetic construct
  source 1..21: mol_type = other RNA
ttcagatgacagaaataatac

SEQ ID NO: 106129 - RNA, 21 nt, synthetic construct
  source 1..21: mol_type = other RNA
ttcagatggccccaaaattac

SEQ ID NO: 106130 - RNA, 21 nt, synthetic construct
  source 1..21: mol_type = other RNA
ttcagattgaccttgtatcca

SEQ ID NO: 106131 - RNA, 21 nt, synthetic construct
  source 1..21: mol_type = other RNA
ttcagattgcttgagagagat

SEQ ID NO: 106132 - RNA, 21 nt, synthetic construct
  source 1..21: mol_type = other RNA
ttcagcaaggaccattagcag

SEQ ID NO: 106133 - RNA, 21 nt, synthetic construct
  source 1..21: mol_type = other RNA
ttcagcacaatactgtctcag

SEQ ID NO: 106134 - RNA, 21 nt, synthetic construct
  source 1..21: mol_type = other RNA
ttcagcactgctattgataaa

SEQ ID NO: 106135 - RNA, 21 nt, synthetic construct
  source 1..21: mol_type = other RNA
ttcagcagcagagaagtgaag

SEQ ID NO: 106136 - RNA, 21 nt, synthetic construct
  source 1..21: mol_type = other RNA
ttcagcatagcagaaccttag

SEQ ID NO: 106137 - RNA, 21 nt, synthetic construct
  source 1..21: mol_type = other RNA
ttcagcatcttcactgactac

SEQ ID NO: 106138 - RNA, 21 nt, synthetic construct
  source 1..21: mol_type = other RNA
ttcagccaaagctggcatgtt

SEQ ID NO: 106139 - RNA, 21 nt, synthetic construct
  source 1..21: mol_type = other RNA
ttcagccatcccagctacata

SEQ ID NO: 106140 - RNA, 21 nt, synthetic construct
  source 1..21: mol_type = other RNA
ttcagccctgatagatattgg

SEQ ID NO: 106141 - RNA, 21 nt, synthetic construct
  source 1..21: mol_type = other RNA
ttcagcctaagcaagttacat

SEQ ID NO: 106142 - RNA, 21 nt, synthetic construct
  source 1..21: mol_type = other RNA
ttcagcctgcagaaggagaaa

SEQ ID NO: 106143 - RNA, 21 nt, synthetic construct
  source 1..21: mol_type = other RNA
ttcagcctgtgtcagtgacag

SEQ ID NO: 106144 - RNA, 21 nt, synthetic construct
  source 1..21: mol_type = other RNA
ttcagcgcttgaacaaatatg

SEQ ID NO: 106145 - RNA, 21 nt, synthetic construct
  source 1..21: mol_type = other RNA
ttcagctatggtgttatttgt

SEQ ID NO: 106146 - RNA, 21 nt, synthetic construct
  source 1..21: mol_type = other RNA
ttcagctcaaacagcttgaca

SEQ ID NO: 106147 - RNA, 21 nt, synthetic construct
  source 1..21: mol_type = other RNA
ttcagcttacagtcatcacag

SEQ ID NO: 106148 - RNA, 21 nt, synthetic construct
  source 1..21: mol_type = other RNA
ttcagctttaaagagaaatag

SEQ ID NO: 106149 - RNA, 21 nt, synthetic construct
  source 1..21: mol_type = other RNA
ttcaggaacaccttgaacatg

SEQ ID NO: 106150 - RNA, 21 nt, synthetic construct
  source 1..21: mol_type = other RNA
ttcaggaatgcaaagtttcct

SEQ ID NO: 106151 - RNA, 21 nt, synthetic construct
  source 1..21: mol_type = other RNA
ttcaggacactggaggtgcac

SEQ ID NO: 106152 - RNA, 21 nt, synthetic construct
  source 1..21: mol_type = other RNA
ttcaggacagattaaaatcag

SEQ ID NO: 106153 - RNA, 21 nt, synthetic construct
  source 1..21: mol_type = other RNA
ttcaggacagtcatcctcaac

SEQ ID NO: 106154 - RNA, 21 nt, synthetic construct
  source 1..21: mol_type = other RNA
ttcaggacagttattcttcag

SEQ ID NO: 106155 - RNA, 21 nt, synthetic construct
  source 1..21: mol_type = other RNA
ttcaggaccagcttgggcaag

SEQ ID NO: 106156 - RNA, 21 nt, synthetic construct
  source 1..21: mol_type = other RNA
ttcaggactcatgagagctgt

SEQ ID NO: 106157 - RNA, 21 nt, synthetic construct
  source 1..21: mol_type = other RNA
ttcaggagttttgcctctttg

SEQ ID NO: 106158 - RNA, 21 nt, synthetic construct
  source 1..21: mol_type = other RNA
ttcagggaaggctgcaagcac

SEQ ID NO: 106159 - RNA, 21 nt, synthetic construct
  source 1..21: mol_type = other RNA
ttcagggagaattggtagtca

SEQ ID NO: 106160 - RNA, 21 nt, synthetic construct
  source 1..21: mol_type = other RNA
ttcagggggctaaatgctcac

SEQ ID NO: 106161 - RNA, 21 nt, synthetic construct
  source 1..21: mol_type = other RNA
ttcaggggggccactggaaac

SEQ ID NO: 106162 - RNA, 21 nt, synthetic construct
  source 1..21: mol_type = other RNA
ttcaggtattgagcctgttcc

SEQ ID NO: 106163 - RNA, 21 nt, synthetic construct
  source 1..21: mol_type = other RNA
ttcaggtctatgtgacagaat

SEQ ID NO: 106164 - RNA, 21 nt, synthetic construct
  source 1..21: mol_type = other RNA
ttcaggtctctctgaaattag

SEQ ID NO: 106165 - RNA, 21 nt, synthetic construct
  source 1..21: mol_type = other RNA
ttcaggtgcctcctgcctcag

SEQ ID NO: 106166 - RNA, 21 nt, synthetic construct
  source 1..21: mol_type = other RNA
ttcaggtggtatttaatctgt

SEQ ID NO: 106167 - RNA, 21 nt, synthetic construct
  source 1..21: mol_type = other RNA
ttcaggtgtgtaaacactgtt

SEQ ID NO: 106168 - RNA, 21 nt, synthetic construct
  source 1..21: mol_type = other RNA
ttcaggttcaagcgactctcc

SEQ ID NO: 106169 - RNA, 21 nt, synthetic construct
  source 1..21: mol_type = other RNA
ttcaggttttcgaccaagtta

SEQ ID NO: 106170 - RNA, 21 nt, synthetic construct
  source 1..21: mol_type = other RNA
ttcagtaaatgaaatttgagg

SEQ ID NO: 106171 - RNA, 21 nt, synthetic construct
  source 1..21: mol_type = other RNA
ttcagtacacgaaaatatccc

SEQ ID NO: 106172 - RNA, 21 nt, synthetic construct
  source 1..21: mol_type = other RNA
ttcagtatgaatgcacgtgaa

SEQ ID NO: 106173 - RNA, 21 nt, synthetic construct
  source 1..21: mol_type = other RNA
ttcagtatgtgtctctgacat

SEQ ID NO: 106174 - RNA, 21 nt, synthetic construct
  source 1..21: mol_type = other RNA
ttcagtcaacaccaagcaaca

SEQ ID NO: 106175 - RNA, 21 nt, synthetic construct
  source 1..21: mol_type = other RNA
ttcagtcaccaaacgtttaga

SEQ ID NO: 106176 - RNA, 21 nt, synthetic construct
  source 1..21: mol_type = other RNA
ttcagtcagttctctgccccg

SEQ ID NO: 106177 - RNA, 21 nt, synthetic construct
  source 1..21: mol_type = other RNA
ttcagtccagatattatcctc

SEQ ID NO: 106178 - RNA, 21 nt, synthetic construct
  source 1..21: mol_type = other RNA
ttcagtccctcctttctagaa

SEQ ID NO: 106179 - RNA, 21 nt, synthetic construct
  source 1..21: mol_type = other RNA
ttcagtccttaccactgaagt

SEQ ID NO: 106180 - RNA, 21 nt, synthetic construct
  source 1..21: mol_type = other RNA
ttcagtcggttcttcaccgtg

SEQ ID NO: 106181 - RNA, 21 nt, synthetic construct
  source 1..21: mol_type = other RNA
ttcagtcttggtagtttgcac

SEQ ID NO: 106182 - RNA, 21 nt, synthetic construct
  source 1..21: mol_type = other RNA
ttcagtgagtagggaaggtgc

SEQ ID NO: 106183 - RNA, 21 nt, synthetic construct
  source 1..21: mol_type = other RNA
ttcagtgccaacacatggggc

SEQ ID NO: 106184 - RNA, 21 nt, synthetic construct
  source 1..21: mol_type = other RNA
ttcagtggtaaggactgaagt

SEQ ID NO: 106185 - RNA, 21 nt, synthetic construct
  source 1..21: mol_type = other RNA
ttcagtggtgcaatcacggct

SEQ ID NO: 106186 - RNA, 21 nt, synthetic construct
  source 1..21: mol_type = other RNA
ttcagtggttggaaaactttt

SEQ ID NO: 106187 - RNA, 21 nt, synthetic construct
  source 1..21: mol_type = other RNA
ttcagtgtagtcagacacact

SEQ ID NO: 106188 - RNA, 21 nt, synthetic construct
  source 1..21: mol_type = other RNA
ttcagtgtgtccacacaatgg

SEQ ID NO: 106189 - RNA, 21 nt, synthetic construct
  source 1..21: mol_type = other RNA
ttcagttaaaagttttccaac

SEQ ID NO: 106190 - RNA, 21 nt, synthetic construct
  source 1..21: mol_type = other RNA
ttcagttctttcggatattta

SEQ ID NO: 106191 - RNA, 21 nt, synthetic construct
  source 1..21: mol_type = other RNA
ttcagttgaaaagtatggttg

SEQ ID NO: 106192 - RNA, 21 nt, synthetic construct
  source 1..21: mol_type = other RNA
ttcagttgcatgaatttgttt

SEQ ID NO: 106193 - RNA, 21 nt, synthetic construct
  source 1..21: mol_type = other RNA
ttcagttggtgaagagagcct

SEQ ID NO: 106194 - RNA, 21 nt, synthetic construct
  source 1..21: mol_type = other RNA
ttcagtttagtaaatctttgg

SEQ ID NO: 106195 - RNA, 21 nt, synthetic construct
  source 1..21: mol_type = other RNA
ttcagtttatgggtcaaccac

SEQ ID NO: 106196 - RNA, 21 nt, synthetic construct
  source 1..21: mol_type = other RNA
ttcagtttgctagtattttgt

SEQ ID NO: 106197 - RNA, 21 nt, synthetic construct
  source 1..21: mol_type = other RNA
ttcagttttgagtggcatcat

SEQ ID NO: 106198 - RNA, 21 nt, synthetic construct
  source 1..21: mol_type = other RNA
ttcataaaatgatggcaacaa

SEQ ID NO: 106199 - RNA, 21 nt, synthetic construct
  source 1..21: mol_type = other RNA
ttcataaacacagaacactaa

SEQ ID NO: 106200 - RNA, 21 nt, synthetic construct
  source 1..21: mol_type = other RNA
ttcataacaaagctctgatgc

SEQ ID NO: 106201 - RNA, 21 nt, synthetic construct
  source 1..21: mol_type = other RNA
ttcatacgttaactgtattgc

SEQ ID NO: 106202 - RNA, 21 nt, synthetic construct
  source 1..21: mol_type = other RNA
ttcatactgaaggcatagggc

SEQ ID NO: 106203 - RNA, 21 nt, synthetic construct
  source 1..21: mol_type = other RNA
ttcatagatcaccaggggctg

SEQ ID NO: 106204 - RNA, 21 nt, synthetic construct
  source 1..21: mol_type = other RNA
ttcatagatgttatgccccct

SEQ ID NO: 106205 - RNA, 21 nt, synthetic construct
  source 1..21: mol_type = other RNA
ttcatagcagaatggccctgc

SEQ ID NO: 106206 - RNA, 21 nt, synthetic construct
  source 1..21: mol_type = other RNA
ttcatagcagcattgtttaca

SEQ ID NO: 106207 - RNA, 21 nt, synthetic construct
  source 1..21: mol_type = other RNA
ttcataggaaatacttgatct

SEQ ID NO: 106208 - RNA, 21 nt, synthetic construct
  source 1..21: mol_type = other RNA
ttcataggcatctctcccttc

SEQ ID NO: 106209 - RNA, 21 nt, synthetic construct
  source 1..21: mol_type = other RNA
ttcataggtaatactctagtg

SEQ ID NO: 106210 - RNA, 21 nt, synthetic construct
  source 1..21: mol_type = other RNA
ttcatagtagctgttgaattg

SEQ ID NO: 106211 - RNA, 21 nt, synthetic construct
  source 1..21: mol_type = other RNA
ttcatagtcatcattattagc

SEQ ID NO: 106212 - RNA, 21 nt, synthetic construct
  source 1..21: mol_type = other RNA
ttcatataagtggaatcattc

SEQ ID NO: 106213 - RNA, 21 nt, synthetic construct
  source 1..21: mol_type = other RNA
ttcatataatggagtactatg

SEQ ID NO: 106214 - RNA, 21 nt, synthetic construct
  source 1..21: mol_type = other RNA
ttcatatctgattttgtgtct

SEQ ID NO: 106215 - RNA, 21 nt, synthetic construct
  source 1..21: mol_type = other RNA
ttcatatgaaatcacacaatc

SEQ ID NO: 106216 - RNA, 21 nt, synthetic construct
  source 1..21: mol_type = other RNA
ttcatatgctttgagctacaa

SEQ ID NO: 106217 - RNA, 21 nt, synthetic construct
  source 1..21: mol_type = other RNA
ttcatatttcccttttggatg

SEQ ID NO: 106218 - RNA, 21 nt, synthetic construct
  source 1..21: mol_type = other RNA
ttcatatttgttcaagcgctg

SEQ ID NO: 106219 - RNA, 21 nt, synthetic construct
  source 1..21: mol_type = other RNA
ttcatattttgtgggaattca

SEQ ID NO: 106220 - RNA, 21 nt, synthetic construct
  source 1..21: mol_type = other RNA
ttcatcactcactggcctgag

SEQ ID NO: 106221 - RNA, 21 nt, synthetic construct
  source 1..21: mol_type = other RNA
ttcatcagtccctgtgttttt

SEQ ID NO: 106222 - RNA, 21 nt, synthetic construct
  source 1..21: mol_type = other RNA
ttcatcatcttttgcctggat

SEQ ID NO: 106223 - RNA, 21 nt, synthetic construct
  source 1..21: mol_type = other RNA
ttcatccaaacagaaaccctg

SEQ ID NO: 106224 - RNA, 21 nt, synthetic construct
  source 1..21: mol_type = other RNA
ttcatccaaattattgacaag

SEQ ID NO: 106225 - RNA, 21 nt, synthetic construct
  source 1..21: mol_type = other RNA
ttcatccaggcaaaagatgat

SEQ ID NO: 106226 - RNA, 21 nt, synthetic construct
  source 1..21: mol_type = other RNA
ttcatccagtttaaagctttg

SEQ ID NO: 106227 - RNA, 21 nt, synthetic construct
  source 1..21: mol_type = other RNA
ttcatccatgttgttgaatgt

SEQ ID NO: 106228 - RNA, 21 nt, synthetic construct
  source 1..21: mol_type = other RNA
ttcatccctctaaataggtat

SEQ ID NO: 106229 - RNA, 21 nt, synthetic construct
  source 1..21: mol_type = other RNA
ttcatcgtaaaaagccattta

SEQ ID NO: 106230 - RNA, 21 nt, synthetic construct
  source 1..21: mol_type = other RNA
ttcatctaaacgtttggtgac

SEQ ID NO: 106231 - RNA, 21 nt, synthetic construct
  source 1..21: mol_type = other RNA
ttcatctatgtcccctggggc

SEQ ID NO: 106232 - RNA, 21 nt, synthetic construct
  source 1..21: mol_type = other RNA
ttcatctctcgatggacattt

SEQ ID NO: 106233 - RNA, 21 nt, synthetic construct
  source 1..21: mol_type = other RNA
ttcatctgcagtgtccatctc

SEQ ID NO: 106234 - RNA, 21 nt, synthetic construct
  source 1..21: mol_type = other RNA
ttcatctggaccagttactct

SEQ ID NO: 106235 - RNA, 21 nt, synthetic construct
  source 1..21: mol_type = other RNA
ttcatctgttaatgggcactt

SEQ ID NO: 106236 - RNA, 21 nt, synthetic construct
  source 1..21: mol_type = other RNA
ttcatcttgacttcacttcca

SEQ ID NO: 106237 - RNA, 21 nt, synthetic construct
  source 1..21: mol_type = other RNA
ttcatctttcctgatcacacc

SEQ ID NO: 106238 - RNA, 21 nt, synthetic construct
  source 1..21: mol_type = other RNA
ttcatgaaatcccctttagtg

SEQ ID NO: 106239 - RNA, 21 nt, synthetic construct
  source 1..21: mol_type = other RNA
ttcatgaacaattttctctca

SEQ ID NO: 106240 - RNA, 21 nt, synthetic construct
  source 1..21: mol_type = other RNA
ttcatgaaccttcaccaaaga

SEQ ID NO: 106241 - RNA, 21 nt, synthetic construct
  source 1..21: mol_type = other RNA
ttcatgacaagaatctttggc

SEQ ID NO: 106242 - RNA, 21 nt, synthetic construct
  source 1..21: mol_type = other RNA
ttcatgattcagtcttggtag

SEQ ID NO: 106243 - RNA, 21 nt, synthetic construct
  source 1..21: mol_type = other RNA
ttcatgatttggtgtgtgcaa

SEQ ID NO: 106244 - RNA, 21 nt, synthetic construct
  source 1..21: mol_type = other RNA
ttcatgcaactgaaaacatct

SEQ ID NO: 106245 - RNA, 21 nt, synthetic construct
  source 1..21: mol_type = other RNA
ttcatgccatcctggatttgg

SEQ ID NO: 106246 - RNA, 21 nt, synthetic construct
  source 1..21: mol_type = other RNA
ttcatgcctttcagcatagca

SEQ ID NO: 106247 - RNA, 21 nt, synthetic construct
  source 1..21: mol_type = other RNA
ttcatgcgacatatcagggat

SEQ ID NO: 106248 - RNA, 21 nt, synthetic construct
  source 1..21: mol_type = other RNA
ttcatgctgggagaccaggag

SEQ ID NO: 106249 - RNA, 21 nt, synthetic construct
  source 1..21: mol_type = other RNA
ttcatgctgtgaatttggatt

SEQ ID NO: 106250 - RNA, 21 nt, synthetic construct
  source 1..21: mol_type = other RNA
ttcatggactagactgcctga

SEQ ID NO: 106251 - RNA, 21 nt, synthetic construct
  source 1..21: mol_type = other RNA
ttcatggacttcctattttat

SEQ ID NO: 106252 - RNA, 21 nt, synthetic construct
  source 1..21: mol_type = other RNA
ttcatgggaagatgctccctc

SEQ ID NO: 106253 - RNA, 21 nt, synthetic construct
  source 1..21: mol_type = other RNA
ttcatgggtggaaattaaaca

SEQ ID NO: 106254 - RNA, 21 nt, synthetic construct
  source 1..21: mol_type = other RNA
ttcatgggttgatttttaatg

SEQ ID NO: 106255 - RNA, 21 nt, synthetic construct
  source 1..21: mol_type = other RNA
ttcatggtatcaattgtaatg

SEQ ID NO: 106256 - RNA, 21 nt, synthetic construct
  source 1..21: mol_type = other RNA
ttcatggttttaatgggcatt

SEQ ID NO: 106257 - RNA, 21 nt, synthetic construct
  source 1..21: mol_type = other RNA
ttcatgtaatgcaaactctaa

SEQ ID NO: 106258 - RNA, 21 nt, synthetic construct
  source 1..21: mol_type = other RNA
ttcatgtacaatgaattagca

SEQ ID NO: 106259 - RNA, 21 nt, synthetic construct
  source 1..21: mol_type = other RNA
ttcatgtcccctgtccaagta

SEQ ID NO: 106260 - RNA, 21 nt, synthetic construct
  source 1..21: mol_type = other RNA
ttcatgtctgtgtagttcatc

SEQ ID NO: 106261 - RNA, 21 nt, synthetic construct
  source 1..21: mol_type = other RNA
ttcatgtgtgcttacacacac

SEQ ID NO: 106262 - RNA, 21 nt, synthetic construct
  source 1..21: mol_type = other RNA
ttcatgttagcataattcgaa

SEQ ID NO: 106263 - RNA, 21 nt, synthetic construct
  source 1..21: mol_type = other RNA
ttcatgttcaaggtgttcctg

SEQ ID NO: 106264 - RNA, 21 nt, synthetic construct
  source 1..21: mol_type = other RNA
ttcatgtttgtggttttaacc

SEQ ID NO: 106265 - RNA, 21 nt, synthetic construct
  source 1..21: mol_type = other RNA
ttcattacatttgcttaggct

SEQ ID NO: 106266 - RNA, 21 nt, synthetic construct
  source 1..21: mol_type = other RNA
ttcattaccaggctggaagaa

SEQ ID NO: 106267 - RNA, 21 nt, synthetic construct
  source 1..21: mol_type = other RNA
ttcattagaattcaggacagt

SEQ ID NO: 106268 - RNA, 21 nt, synthetic construct
  source 1..21: mol_type = other RNA
ttcattaggttgatggctgta

SEQ ID NO: 106269 - RNA, 21 nt, synthetic construct
  source 1..21: mol_type = other RNA
ttcattcatatttgttcaagc

SEQ ID NO: 106270 - RNA, 21 nt, synthetic construct
  source 1..21: mol_type = other RNA
ttcattcatctgttaatgggc

SEQ ID NO: 106271 - RNA, 21 nt, synthetic construct
  source 1..21: mol_type = other RNA
ttcattcatgacaagaatctt

SEQ ID NO: 106272 - RNA, 21 nt, synthetic construct
  source 1..21: mol_type = other RNA
ttcattccgcgtttattagaa

SEQ ID NO: 106273 - RNA, 21 nt, synthetic construct
  source 1..21: mol_type = other RNA
ttcattcgtagcaggtttagg

SEQ ID NO: 106274 - RNA, 21 nt, synthetic construct
  source 1..21: mol_type = other RNA
ttcattcgttcaaaacatcat

SEQ ID NO: 106275 - RNA, 21 nt, synthetic construct
  source 1..21: mol_type = other RNA
ttcattctacctggagcctga

SEQ ID NO: 106276 - RNA, 21 nt, synthetic construct
  source 1..21: mol_type = other RNA
ttcattcttgacatgattgag

SEQ ID NO: 106277 - RNA, 21 nt, synthetic construct
  source 1..21: mol_type = other RNA
ttcattctttttactcgaggg

SEQ ID NO: 106278 - RNA, 21 nt, synthetic construct
  source 1..21: mol_type = other RNA
ttcattgtacatgaagtcctc

SEQ ID NO: 106279 - RNA, 21 nt, synthetic construct
  source 1..21: mol_type = other RNA
ttcatttacaaaaacacactg

SEQ ID NO: 106280 - RNA, 21 nt, synthetic construct
  source 1..21: mol_type = other RNA
ttcatttactgaaatcctagc

SEQ ID NO: 106281 - RNA, 21 nt, synthetic construct
  source 1..21: mol_type = other RNA
ttcatttcaggaatgcaaagt

SEQ ID NO: 106282 - RNA, 21 nt, synthetic construct
  source 1..21: mol_type = other RNA
ttcatttccaaagatcatggg

SEQ ID NO: 106283 - RNA, 21 nt, synthetic construct
  source 1..21: mol_type = other RNA
ttcatttctaagccatgtttc

SEQ ID NO: 106284 - RNA, 21 nt, synthetic construct
  source 1..21: mol_type = other RNA
ttcatttgagaatttcaggtg

SEQ ID NO: 106285 - RNA, 21 nt, synthetic construct
  source 1..21: mol_type = other RNA
ttcatttggcctctgcggcgg

SEQ ID NO: 106286 - RNA, 21 nt, synthetic construct
  source 1..21: mol_type = other RNA
ttcatttgtaattcatcctac

SEQ ID NO: 106287 - RNA, 21 nt, synthetic construct
  source 1..21: mol_type = other RNA
ttcattttactgctatacaac

SEQ ID NO: 106288 - RNA, 21 nt, synthetic construct
  source 1..21: mol_type = other RNA
ttccaaaagcaggccctgaga

SEQ ID NO: 106289 - RNA, 21 nt, synthetic construct
  source 1..21: mol_type = other RNA
ttccaaaagtgaatatagcta

SEQ ID NO: 106290 - RNA, 21 nt, synthetic construct
  source 1..21: mol_type = other RNA
ttccaaaatattgaagaggga

SEQ ID NO: 106291 - RNA, 21 nt, synthetic construct
  source 1..21: mol_type = other RNA
ttccaaacttctgaccttgtg

SEQ ID NO: 106292 - RNA, 21 nt, synthetic construct
  source 1..21: mol_type = other RNA
ttccaaagatcatgggtttta

SEQ ID NO: 106293 - RNA, 21 nt, synthetic construct
  source 1..21: mol_type = other RNA
ttccaaagtatgcatagcagg

SEQ ID NO: 106294 - RNA, 21 nt, synthetic construct
  source 1..21: mol_type = other RNA
ttccaaataatcccgcacctt

SEQ ID NO: 106295 - RNA, 21 nt, synthetic construct
  source 1..21: mol_type = other RNA
ttccaaatgtctgtctttatg

SEQ ID NO: 106296 - RNA, 21 nt, synthetic construct
  source 1..21: mol_type = other RNA
ttccaaattagctttctccca

SEQ ID NO: 106297 - RNA, 21 nt, synthetic construct
  source 1..21: mol_type = other RNA
ttccaaattcaaagcaagtta

SEQ ID NO: 106298 - RNA, 21 nt, synthetic construct
  source 1..21: mol_type = other RNA
ttccaacagtttacacgcctt

SEQ ID NO: 106299 - RNA, 21 nt, synthetic construct
  source 1..21: mol_type = other RNA
ttccaaccaagcccaactttt

SEQ ID NO: 106300 - RNA, 21 nt, synthetic construct
  source 1..21: mol_type = other RNA
ttccaaccactgaatcagatt

SEQ ID NO: 106301 - RNA, 21 nt, synthetic construct
  source 1..21: mol_type = other RNA
ttccaaccatcttcttagtgt

SEQ ID NO: 106302 - RNA, 21 nt, synthetic construct
  source 1..21: mol_type = other RNA
ttccaactgtataaatgttca

SEQ ID NO: 106303 - RNA, 21 nt, synthetic construct
  source 1..21: mol_type = other RNA
ttccaagaaccctttgttatc

SEQ ID NO: 106304 - RNA, 21 nt, synthetic construct
  source 1..21: mol_type = other RNA
ttccaagagaggaataaatgg

SEQ ID NO: 106305 - RNA, 21 nt, synthetic construct
  source 1..21: mol_type = other RNA
ttccaagattgaaaatggttt

SEQ ID NO: 106306 - RNA, 21 nt, synthetic construct
  source 1..21: mol_type = other RNA
ttccaagattttcccaatctc

SEQ ID NO: 106307 - RNA, 21 nt, synthetic construct
  source 1..21: mol_type = other RNA
ttccaagccttaaaagtgctg

SEQ ID NO: 106308 - RNA, 21 nt, synthetic construct
  source 1..21: mol_type = other RNA
ttccaagtcccggaagctggg

SEQ ID NO: 106309 - RNA, 21 nt, synthetic construct
  source 1..21: mol_type = other RNA
ttccaatccgggaacatgaca

SEQ ID NO: 106310 - RNA, 21 nt, synthetic construct
  source 1..21: mol_type = other RNA
ttccaatccttccttcatgtc

SEQ ID NO: 106311 - RNA, 21 nt, synthetic construct
  source 1..21: mol_type = other RNA
ttccaattgcagaaaaataga

SEQ ID NO: 106312 - RNA, 21 nt, synthetic construct
  source 1..21: mol_type = other RNA
ttccacaaccactggggagtg

SEQ ID NO: 106313 - RNA, 21 nt, synthetic construct
  source 1..21: mol_type = other RNA
ttccacagctatcaggccttc

SEQ ID NO: 106314 - RNA, 21 nt, synthetic construct
  source 1..21: mol_type = other RNA
ttccacagtgactttactgtt

SEQ ID NO: 106315 - RNA, 21 nt, synthetic construct
  source 1..21: mol_type = other RNA
ttccacataaagtcttgctgg

SEQ ID NO: 106316 - RNA, 21 nt, synthetic construct
  source 1..21: mol_type = other RNA
ttccacataattgaacccact

SEQ ID NO: 106317 - RNA, 21 nt, synthetic construct
  source 1..21: mol_type = other RNA
ttccacatgttactcattatg

SEQ ID NO: 106318 - RNA, 21 nt, synthetic construct
  source 1..21: mol_type = other RNA
ttccacatttctaatttccaa

SEQ ID NO: 106319 - RNA, 21 nt, synthetic construct
  source 1..21: mol_type = other RNA
ttccacccaagtggagcctgc

SEQ ID NO: 106320 - RNA, 21 nt, synthetic construct
  source 1..21: mol_type = other RNA
ttccacccatgaagccagcat

SEQ ID NO: 106321 - RNA, 21 nt, synthetic construct
  source 1..21: mol_type = other RNA
ttccacctccatcactgactg

SEQ ID NO: 106322 - RNA, 21 nt, synthetic construct
  source 1..21: mol_type = other RNA
ttccacctgctctttatctcc

SEQ ID NO: 106323 - RNA, 21 nt, synthetic construct
  source 1..21: mol_type = other RNA
ttccacgctgtggcttgggtg

SEQ ID NO: 106324 - RNA, 21 nt, synthetic construct
  source 1..21: mol_type = other RNA
ttccacggaatgcccctttga

SEQ ID NO: 106325 - RNA, 21 nt, synthetic construct
  source 1..21: mol_type = other RNA
ttccacgggtaaaaataaatc

SEQ ID NO: 106326 - RNA, 21 nt, synthetic construct
  source 1..21: mol_type = other RNA
ttccactaatgtccttttcct

SEQ ID NO: 106327 - RNA, 21 nt, synthetic construct
  source 1..21: mol_type = other RNA
ttccactagtgggatcaaacc

SEQ ID NO: 106328 - RNA, 21 nt, synthetic construct
  source 1..21: mol_type = other RNA
ttccactctctggctgcaatt

SEQ ID NO: 106329 - RNA, 21 nt, synthetic construct
  source 1..21: mol_type = other RNA
ttccacttatatgaagctaaa

SEQ ID NO: 106330 - RNA, 21 nt, synthetic construct
  source 1..21: mol_type = other RNA
ttccactttgaggttattaag

SEQ ID NO: 106331 - RNA, 21 nt, synthetic construct
  source 1..21: mol_type = other RNA
ttccagaaaactggcaatcaa

SEQ ID NO: 106332 - RNA, 21 nt, synthetic construct
  source 1..21: mol_type = other RNA
ttccagaaacttccaaccatc

SEQ ID NO: 106333 - RNA, 21 nt, synthetic construct
  source 1..21: mol_type = other RNA
ttccagaaggagaaaacaaaa

SEQ ID NO: 106334 - RNA, 21 nt, synthetic construct
  source 1..21: mol_type = other RNA
ttccagaagtaactcttgagt

SEQ ID NO: 106335 - RNA, 21 nt, synthetic construct
  source 1..21: mol_type = other RNA
ttccagaccagcagttcaagc

SEQ ID NO: 106336 - RNA, 21 nt, synthetic construct
  source 1..21: mol_type = other RNA
ttccagagaattcagagtggc

SEQ ID NO: 106337 - RNA, 21 nt, synthetic construct
  source 1..21: mol_type = other RNA
ttccagagacaaagcataaaa

SEQ ID NO: 106338 - RNA, 21 nt, synthetic construct
  source 1..21: mol_type = other RNA
ttccagagggtaacgtgagct

SEQ ID NO: 106339 - RNA, 21 nt, synthetic construct
  source 1..21: mol_type = other RNA
ttccagaggttcttttaaatg

SEQ ID NO: 106340 - RNA, 21 nt, synthetic construct
  source 1..21: mol_type = other RNA
ttccagatgttttacacatgt

SEQ ID NO: 106341 - RNA, 21 nt, synthetic construct
  source 1..21: mol_type = other RNA
ttccagattgaaatctaggca

SEQ ID NO: 106342 - RNA, 21 nt, synthetic construct
  source 1..21: mol_type = other RNA
ttccagcaagactttatgtgg

SEQ ID NO: 106343 - RNA, 21 nt, synthetic construct
  source 1..21: mol_type = other RNA
ttccagcagggtaaagtcaat

SEQ ID NO: 106344 - RNA, 21 nt, synthetic construct
  source 1..21: mol_type = other RNA
ttccagcattttataggcatt

SEQ ID NO: 106345 - RNA, 21 nt, synthetic construct
  source 1..21: mol_type = other RNA
ttccagccattctcttctgga

SEQ ID NO: 106346 - RNA, 21 nt, synthetic construct
  source 1..21: mol_type = other RNA
ttccagcctggtaatgaatag

SEQ ID NO: 106347 - RNA, 21 nt, synthetic construct
  source 1..21: mol_type = other RNA
ttccagcctttaatttagcgt

SEQ ID NO: 106348 - RNA, 21 nt, synthetic construct
  source 1..21: mol_type = other RNA
ttccagcgtgtgcatgaccct

SEQ ID NO: 106349 - RNA, 21 nt, synthetic construct
  source 1..21: mol_type = other RNA
ttccagctcacgttaccctct

SEQ ID NO: 106350 - RNA, 21 nt, synthetic construct
  source 1..21: mol_type = other RNA
ttccaggaaaagcaaatgtca

SEQ ID NO: 106351 - RNA, 21 nt, synthetic construct
  source 1..21: mol_type = other RNA
ttccaggaccaatttaccatc

SEQ ID NO: 106352 - RNA, 21 nt, synthetic construct
  source 1..21: mol_type = other RNA
ttccaggatcaaatctggctg

SEQ ID NO: 106353 - RNA, 21 nt, synthetic construct
  source 1..21: mol_type = other RNA
ttccaggcctcgctcttggct

SEQ ID NO: 106354 - RNA, 21 nt, synthetic construct
  source 1..21: mol_type = other RNA
ttccaggggggaaaaaaccat

SEQ ID NO: 106355 - RNA, 21 nt, synthetic construct
  source 1..21: mol_type = other RNA
ttccagggggtatggagacac

SEQ ID NO: 106356 - RNA, 21 nt, synthetic construct
  source 1..21: mol_type = other RNA
ttccaggtcattacatatttt

SEQ ID NO: 106357 - RNA, 21 nt, synthetic construct
  source 1..21: mol_type = other RNA
ttccaggtttacaggatatca

SEQ ID NO: 106358 - RNA, 21 nt, synthetic construct
  source 1..21: mol_type = other RNA
ttccaggttttatctctctca

SEQ ID NO: 106359 - RNA, 21 nt, synthetic construct
  source 1..21: mol_type = other RNA
ttccagtacatctcaattcag

SEQ ID NO: 106360 - RNA, 21 nt, synthetic construct
  source 1..21: mol_type = other RNA
ttccagtactttttcatccaa

SEQ ID NO: 106361 - RNA, 21 nt, synthetic construct
  source 1..21: mol_type = other RNA
ttccagtatattcatagtagc

SEQ ID NO: 106362 - RNA, 21 nt, synthetic construct
  source 1..21: mol_type = other RNA
ttccagtatgatgccactcaa

SEQ ID NO: 106363 - RNA, 21 nt, synthetic construct
  source 1..21: mol_type = other RNA
ttccagtcctttgtgtcaagt

SEQ ID NO: 106364 - RNA, 21 nt, synthetic construct
  source 1..21: mol_type = other RNA
ttccagtcttctcatacagat

SEQ ID NO: 106365 - RNA, 21 nt, synthetic construct
  source 1..21: mol_type = other RNA
ttccagtggcccccctgaaaa

SEQ ID NO: 106366 - RNA, 21 nt, synthetic construct
  source 1..21: mol_type = other RNA
ttccagtgtttggtttttatg

SEQ ID NO: 106367 - RNA, 21 nt, synthetic construct
  source 1..21: mol_type = other RNA
ttccagtgttttaggggggaa

SEQ ID NO: 106368 - RNA, 21 nt, synthetic construct
  source 1..21: mol_type = other RNA
ttccagtttatatgcctagat

SEQ ID NO: 106369 - RNA, 21 nt, synthetic construct
  source 1..21: mol_type = other RNA
ttccagtttctctgctttttc

SEQ ID NO: 106370 - RNA, 21 nt, synthetic construct
  source 1..21: mol_type = other RNA
ttccataaaaaccaaacactg

SEQ ID NO: 106371 - RNA, 21 nt, synthetic construct
  source 1..21: mol_type = other RNA
ttccataaaaagcgttggaga

SEQ ID NO: 106372 - RNA, 21 nt, synthetic construct
  source 1..21: mol_type = other RNA
ttccataagatctgtctttgg

SEQ ID NO: 106373 - RNA, 21 nt, synthetic construct
  source 1..21: mol_type = other RNA
ttccatacgaaagcctttatt

SEQ ID NO: 106374 - RNA, 21 nt, synthetic construct
  source 1..21: mol_type = other RNA
ttccatcagagaggcttttta

SEQ ID NO: 106375 - RNA, 21 nt, synthetic construct
  source 1..21: mol_type = other RNA
ttccatcagtggttgtgcttc

SEQ ID NO: 106376 - RNA, 21 nt, synthetic construct
  source 1..21: mol_type = other RNA
ttccatcggtctgtatttctg

SEQ ID NO: 106377 - RNA, 21 nt, synthetic construct
  source 1..21: mol_type = other RNA
ttccatctgttatagtgtgaa

SEQ ID NO: 106378 - RNA, 21 nt, synthetic construct
  source 1..21: mol_type = other RNA
ttccatcttaggccataaatc

SEQ ID NO: 106379 - RNA, 21 nt, synthetic construct
  source 1..21: mol_type = other RNA
ttccatgagattacatagcaa

SEQ ID NO: 106380 - RNA, 21 nt, synthetic construct
  source 1..21: mol_type = other RNA
ttccatggaggggccagttga

SEQ ID NO: 106381 - RNA, 21 nt, synthetic construct
  source 1..21: mol_type = other RNA
ttccatggtatgtgccatctc

SEQ ID NO: 106382 - RNA, 21 nt, synthetic construct
  source 1..21: mol_type = other RNA
ttccatgtcttggctattgtc

SEQ ID NO: 106383 - RNA, 21 nt, synthetic construct
  source 1..21: mol_type = other RNA
ttccattattccataaaaacc

SEQ ID NO: 106384 - RNA, 21 nt, synthetic construct
  source 1..21: mol_type = other RNA
ttccattcaatccttgtaact

SEQ ID NO: 106385 - RNA, 21 nt, synthetic construct
  source 1..21: mol_type = other RNA
ttccattcacacaccctttct

SEQ ID NO: 106386 - RNA, 21 nt, synthetic construct
  source 1..21: mol_type = other RNA
ttccattcatgtaatgcaaac

SEQ ID NO: 106387 - RNA, 21 nt, synthetic construct
  source 1..21: mol_type = other RNA
ttccattccttttcgagactg

SEQ ID NO: 106388 - RNA, 21 nt, synthetic construct
  source 1..21: mol_type = other RNA
ttccattgttctctttgttta

SEQ ID NO: 106389 - RNA, 21 nt, synthetic construct
  source 1..21: mol_type = other RNA
ttccatttgttttgtgtttgt

SEQ ID NO: 106390 - RNA, 21 nt, synthetic construct
  source 1..21: mol_type = other RNA
ttccattttagatcaagtcct

SEQ ID NO: 106391 - RNA, 21 nt, synthetic construct
  source 1..21: mol_type = other RNA
ttccatttttctgaccaacta

SEQ ID NO: 106392 - RNA, 21 nt, synthetic construct
  source 1..21: mol_type = other RNA
ttcccaaagacatcctgattt

SEQ ID NO: 106393 - RNA, 21 nt, synthetic construct
  source 1..21: mol_type = other RNA
ttcccaaagatagactcttca

SEQ ID NO: 106394 - RNA, 21 nt, synthetic construct
  source 1..21: mol_type = other RNA
ttcccaaatccaggatggcat

SEQ ID NO: 106395 - RNA, 21 nt, synthetic construct
  source 1..21: mol_type = other RNA
ttcccaaatgtcttaagaagg

SEQ ID NO: 106396 - RNA, 21 nt, synthetic construct
  source 1..21: mol_type = other RNA
ttcccaagatcataagctttt

SEQ ID NO: 106397 - RNA, 21 nt, synthetic construct
  source 1..21: mol_type = other RNA
ttcccaagcaagtgtggtggt

SEQ ID NO: 106398 - RNA, 21 nt, synthetic construct
  source 1..21: mol_type = other RNA
ttcccaatcctttgtgcaggt

SEQ ID NO: 106399 - RNA, 21 nt, synthetic construct
  source 1..21: mol_type = other RNA
ttcccaatctctggtattctg

SEQ ID NO: 106400 - RNA, 21 nt, synthetic construct
  source 1..21: mol_type = other RNA
ttcccacaaaatatgaagcat

SEQ ID NO: 106401 - RNA, 21 nt, synthetic construct
  source 1..21: mol_type = other RNA
ttcccactgctatgactaatt

SEQ ID NO: 106402 - RNA, 21 nt, synthetic construct
  source 1..21: mol_type = other RNA
ttcccacttcgaaagttcaga

SEQ ID NO: 106403 - RNA, 21 nt, synthetic construct
  source 1..21: mol_type = other RNA
ttcccagacagggaatgcccc

SEQ ID NO: 106404 - RNA, 21 nt, synthetic construct
  source 1..21: mol_type = other RNA
ttcccagataacagtggttag

SEQ ID NO: 106405 - RNA, 21 nt, synthetic construct
  source 1..21: mol_type = other RNA
ttcccagatacgttaaaggaa

SEQ ID NO: 106406 - RNA, 21 nt, synthetic construct
  source 1..21: mol_type = other RNA
ttcccaggagctagaacagaa

SEQ ID NO: 106407 - RNA, 21 nt, synthetic construct
  source 1..21: mol_type = other RNA
ttcccagggtgtagccacaag

SEQ ID NO: 106408 - RNA, 21 nt, synthetic construct
  source 1..21: mol_type = other RNA
ttcccaggtattttgttctct

SEQ ID NO: 106409 - RNA, 21 nt, synthetic construct
  source 1..21: mol_type = other RNA
ttcccatctcactcacctagc

SEQ ID NO: 106410 - RNA, 21 nt, synthetic construct
  source 1..21: mol_type = other RNA
ttcccatctctagttttccag

SEQ ID NO: 106411 - RNA, 21 nt, synthetic construct
  source 1..21: mol_type = other RNA
ttcccatgaacatggtttgat

SEQ ID NO: 106412 - RNA, 21 nt, synthetic construct
  source 1..21: mol_type = other RNA
ttcccatgttcactgcagaat

SEQ ID NO: 106413 - RNA, 21 nt, synthetic construct
  source 1..21: mol_type = other RNA
ttcccattaccaaaacctggt

SEQ ID NO: 106414 - RNA, 21 nt, synthetic construct
  source 1..21: mol_type = other RNA
ttcccatttgatttcttcttt

SEQ ID NO: 106415 - RNA, 21 nt, synthetic construct
  source 1..21: mol_type = other RNA
ttccccaagccaaattaataa

SEQ ID NO: 106416 - RNA, 21 nt, synthetic construct
  source 1..21: mol_type = other RNA
ttccccacataggatagttaa

SEQ ID NO: 106417 - RNA, 21 nt, synthetic construct
  source 1..21: mol_type = other RNA
ttccccacctttcctgcccct

SEQ ID NO: 106418 - RNA, 21 nt, synthetic construct
  source 1..21: mol_type = other RNA
ttccccagcctcagcctccca

SEQ ID NO: 106419 - RNA, 21 nt, synthetic construct
  source 1..21: mol_type = other RNA
ttccccagggaaaccttactg

SEQ ID NO: 106420 - RNA, 21 nt, synthetic construct
  source 1..21: mol_type = other RNA
ttccccattagagtaagcaac

SEQ ID NO: 106421 - RNA, 21 nt, synthetic construct
  source 1..21: mol_type = other RNA
ttccccattgacaatatagga

SEQ ID NO: 106422 - RNA, 21 nt, synthetic construct
  source 1..21: mol_type = other RNA
ttcccccaaaacttaggaggc

SEQ ID NO: 106423 - RNA, 21 nt, synthetic construct
  source 1..21: mol_type = other RNA
ttcccccaaagaaggaaaaaa

SEQ ID NO: 106424 - RNA, 21 nt, synthetic construct
  source 1..21: mol_type = other RNA
ttcccccaattaaactataga

SEQ ID NO: 106425 - RNA, 21 nt, synthetic construct
  source 1..21: mol_type = other RNA
ttcccccctaaaacactggaa

SEQ ID NO: 106426 - RNA, 21 nt, synthetic construct
  source 1..21: mol_type = other RNA
ttcccccctctctctttctgg

SEQ ID NO: 106427 - RNA, 21 nt, synthetic construct
  source 1..21: mol_type = other RNA
ttcccccctggaacaatcaaa

SEQ ID NO: 106428 - RNA, 21 nt, synthetic construct
  source 1..21: mol_type = other RNA
ttccccctacacccagttcac

SEQ ID NO: 106429 - RNA, 21 nt, synthetic construct
  source 1..21: mol_type = other RNA
ttcccccttatgtgtgtataa

SEQ ID NO: 106430 - RNA, 21 nt, synthetic construct
  source 1..21: mol_type = other RNA
ttcccctatactgtaaccctg

SEQ ID NO: 106431 - RNA, 21 nt, synthetic construct
  source 1..21: mol_type = other RNA
ttcccctgctgttcccaagca

SEQ ID NO: 106432 - RNA, 21 nt, synthetic construct
  source 1..21: mol_type = other RNA
ttcccctggatcccccagccc

SEQ ID NO: 106433 - RNA, 21 nt, synthetic construct
  source 1..21: mol_type = other RNA
ttcccctggtcgagctgggtg

SEQ ID NO: 106434 - RNA, 21 nt, synthetic construct
  source 1..21: mol_type = other RNA
ttccccttatatgggatatct

SEQ ID NO: 106435 - RNA, 21 nt, synthetic construct
  source 1..21: mol_type = other RNA
ttccccttgccaaggcttgct

SEQ ID NO: 106436 - RNA, 21 nt, synthetic construct
  source 1..21: mol_type = other RNA
ttcccctttctttggttttga

SEQ ID NO: 106437 - RNA, 21 nt, synthetic construct
  source 1..21: mol_type = other RNA
ttcccgctacacaagtattaa

SEQ ID NO: 106438 - RNA, 21 nt, synthetic construct
  source 1..21: mol_type = other RNA
ttcccggattggaaaactagg

SEQ ID NO: 106439 - RNA, 21 nt, synthetic construct
  source 1..21: mol_type = other RNA
ttccctaaagagaatcttaaa

SEQ ID NO: 106440 - RNA, 21 nt, synthetic construct
  source 1..21: mol_type = other RNA
ttccctacattgccttcaagt

SEQ ID NO: 106441 - RNA, 21 nt, synthetic construct
  source 1..21: mol_type = other RNA
ttccctactcactgaaaccct

SEQ ID NO: 106442 - RNA, 21 nt, synthetic construct
  source 1..21: mol_type = other RNA
ttccctagcccagcacttcca

SEQ ID NO: 106443 - RNA, 21 nt, synthetic construct
  source 1..21: mol_type = other RNA
ttccctcagaatttgaggtct

SEQ ID NO: 106444 - RNA, 21 nt, synthetic construct
  source 1..21: mol_type = other RNA
ttccctcagcaaaagcaatta

SEQ ID NO: 106445 - RNA, 21 nt, synthetic construct
  source 1..21: mol_type = other RNA
ttccctcctttttatcaccct

SEQ ID NO: 106446 - RNA, 21 nt, synthetic construct
  source 1..21: mol_type = other RNA
ttccctctacaaaaggaggaa

SEQ ID NO: 106447 - RNA, 21 nt, synthetic construct
  source 1..21: mol_type = other RNA
ttccctctcagtggtgctttt

SEQ ID NO: 106448 - RNA, 21 nt, synthetic construct
  source 1..21: mol_type = other RNA
ttccctctgagagaagtcaga

SEQ ID NO: 106449 - RNA, 21 nt, synthetic construct
  source 1..21: mol_type = other RNA
ttccctctggccttctatatt

SEQ ID NO: 106450 - RNA, 21 nt, synthetic construct
  source 1..21: mol_type = other RNA
ttccctcttcaatattttgga

SEQ ID NO: 106451 - RNA, 21 nt, synthetic construct
  source 1..21: mol_type = other RNA
ttccctctttctcaacttcct

SEQ ID NO: 106452 - RNA, 21 nt, synthetic construct
  source 1..21: mol_type = other RNA
ttccctgaacaatgattttct

SEQ ID NO: 106453 - RNA, 21 nt, synthetic construct
  source 1..21: mol_type = other RNA
ttccctgcatacactcatttc

SEQ ID NO: 106454 - RNA, 21 nt, synthetic construct
  source 1..21: mol_type = other RNA
ttccctgcttcatctggacca

SEQ ID NO: 106455 - RNA, 21 nt, synthetic construct
  source 1..21: mol_type = other RNA
ttccctggggaataagatttt

SEQ ID NO: 106456 - RNA, 21 nt, synthetic construct
  source 1..21: mol_type = other RNA
ttccctgtagagatttttatc

SEQ ID NO: 106457 - RNA, 21 nt, synthetic construct
  source 1..21: mol_type = other RNA
ttccctgtctgggaagttatg

SEQ ID NO: 106458 - RNA, 21 nt, synthetic construct
  source 1..21: mol_type = other RNA
ttccctgtctgtgatgtagag

SEQ ID NO: 106459 - RNA, 21 nt, synthetic construct
  source 1..21: mol_type = other RNA
ttccctgtgtatgtgtagtca

SEQ ID NO: 106460 - RNA, 21 nt, synthetic construct
  source 1..21: mol_type = other RNA
ttcccttaaaaggaactaatt

SEQ ID NO: 106461 - RNA, 21 nt, synthetic construct
  source 1..21: mol_type = other RNA
ttcccttaacctttttctttt

SEQ ID NO: 106462 - RNA, 21 nt, synthetic construct
  source 1..21: mol_type = other RNA
ttcccttaatgttgacatctt

SEQ ID NO: 106463 - RNA, 21 nt, synthetic construct
  source 1..21: mol_type = other RNA
ttcccttagctctcatgtcag

SEQ ID NO: 106464 - RNA, 21 nt, synthetic construct
  source 1..21: mol_type = other RNA
ttcccttcagtgtagtcagac

SEQ ID NO: 106465 - RNA, 21 nt, synthetic construct
  source 1..21: mol_type = other RNA
ttcccttctcgaagtggtgct

SEQ ID NO: 106466 - RNA, 21 nt, synthetic construct
  source 1..21: mol_type = other RNA
ttcccttctgctcggctctgt

SEQ ID NO: 106467 - RNA, 21 nt, synthetic construct
  source 1..21: mol_type = other RNA
ttcccttcttaaatgtgaatt

SEQ ID NO: 106468 - RNA, 21 nt, synthetic construct
  source 1..21: mol_type = other RNA
ttcccttgtgcacctcgggtt

SEQ ID NO: 106469 - RNA, 21 nt, synthetic construct
  source 1..21: mol_type = other RNA
ttcccttttggatgcagattt

SEQ ID NO: 106470 - RNA, 21 nt, synthetic construct
  source 1..21: mol_type = other RNA
ttcccttttgtagctaatatc

SEQ ID NO: 106471 - RNA, 21 nt, synthetic construct
  source 1..21: mol_type = other RNA
ttccgacctgtagattgggct

SEQ ID NO: 106472 - RNA, 21 nt, synthetic construct
  source 1..21: mol_type = other RNA
ttccgatgataccttcttgag

SEQ ID NO: 106473 - RNA, 21 nt, synthetic construct
  source 1..21: mol_type = other RNA
ttccgatttctcggccgggcg

SEQ ID NO: 106474 - RNA, 21 nt, synthetic construct
  source 1..21: mol_type = other RNA
ttccgattttacttactagtt

SEQ ID NO: 106475 - RNA, 21 nt, synthetic construct
  source 1..21: mol_type = other RNA
ttccgcgtttattagaactag

SEQ ID NO: 106476 - RNA, 21 nt, synthetic construct
  source 1..21: mol_type = other RNA
ttccgctaaacattttattag

SEQ ID NO: 106477 - RNA, 21 nt, synthetic construct
  source 1..21: mol_type = other RNA
ttccgctctggttttaaagaa

SEQ ID NO: 106478 - RNA, 21 nt, synthetic construct
  source 1..21: mol_type = other RNA
ttccgggacttggaagtgaag

SEQ ID NO: 106479 - RNA, 21 nt, synthetic construct
  source 1..21: mol_type = other RNA
ttccgggatcctgtccaggcg

SEQ ID NO: 106480 - RNA, 21 nt, synthetic construct
  source 1..21: mol_type = other RNA
ttccggttctcaggagcctag

SEQ ID NO: 106481 - RNA, 21 nt, synthetic construct
  source 1..21: mol_type = other RNA
ttccggttgtatagcagtaaa

SEQ ID NO: 106482 - RNA, 21 nt, synthetic construct
  source 1..21: mol_type = other RNA
ttccgtatccagtggtttttt

SEQ ID NO: 106483 - RNA, 21 nt, synthetic construct
  source 1..21: mol_type = other RNA
ttccgtctagccacttcctat

SEQ ID NO: 106484 - RNA, 21 nt, synthetic construct
  source 1..21: mol_type = other RNA
ttccgtctcaagattgtgtga

SEQ ID NO: 106485 - RNA, 21 nt, synthetic construct
  source 1..21: mol_type = other RNA
ttccgtggaaggccttctcct

SEQ ID NO: 106486 - RNA, 21 nt, synthetic construct
  source 1..21: mol_type = other RNA
ttccgtgtgacaaaaagtagg

SEQ ID NO: 106487 - RNA, 21 nt, synthetic construct
  source 1..21: mol_type = other RNA
ttccgttgctgcatagtactc

SEQ ID NO: 106488 - RNA, 21 nt, synthetic construct
  source 1..21: mol_type = other RNA
ttccgttttgcaagatgcata

SEQ ID NO: 106489 - RNA, 21 nt, synthetic construct
  source 1..21: mol_type = other RNA
ttcctaaaactccccatgcag

SEQ ID NO: 106490 - RNA, 21 nt, synthetic construct
  source 1..21: mol_type = other RNA
ttcctaaacctgctacgaatg

SEQ ID NO: 106491 - RNA, 21 nt, synthetic construct
  source 1..21: mol_type = other RNA
ttcctaaagagagtgacagct

SEQ ID NO: 106492 - RNA, 21 nt, synthetic construct
  source 1..21: mol_type = other RNA
ttcctaaccactgttatctgg

SEQ ID NO: 106493 - RNA, 21 nt, synthetic construct
  source 1..21: mol_type = other RNA
ttcctaactcaagagttactt

SEQ ID NO: 106494 - RNA, 21 nt, synthetic construct
  source 1..21: mol_type = other RNA
ttcctaactggtctcctttct

SEQ ID NO: 106495 - RNA, 21 nt, synthetic construct
  source 1..21: mol_type = other RNA
ttcctaagaaagggtgtgtga

SEQ ID NO: 106496 - RNA, 21 nt, synthetic construct
  source 1..21: mol_type = other RNA
ttcctaatctaacatgttaca

SEQ ID NO: 106497 - RNA, 21 nt, synthetic construct
  source 1..21: mol_type = other RNA
ttcctacacatatctttaggt

SEQ ID NO: 106498 - RNA, 21 nt, synthetic construct
  source 1..21: mol_type = other RNA
ttcctacatactgcactctca

SEQ ID NO: 106499 - RNA, 21 nt, synthetic construct
  source 1..21: mol_type = other RNA
ttcctacccaagcttaggtca

SEQ ID NO: 106500 - RNA, 21 nt, synthetic construct
  source 1..21: mol_type = other RNA
ttcctaccctgaggatataac

SEQ ID NO: 106501 - RNA, 21 nt, synthetic construct
  source 1..21: mol_type = other RNA
ttcctaccctgccttccttgg

SEQ ID NO: 106502 - RNA, 21 nt, synthetic construct
  source 1..21: mol_type = other RNA
ttcctactaacaagaaagggt

SEQ ID NO: 106503 - RNA, 21 nt, synthetic construct
  source 1..21: mol_type = other RNA
ttcctactttcttcaaccata

SEQ ID NO: 106504 - RNA, 21 nt, synthetic construct
  source 1..21: mol_type = other RNA
ttcctagactgccaggtaggg

SEQ ID NO: 106505 - RNA, 21 nt, synthetic construct
  source 1..21: mol_type = other RNA
ttcctagattccctctggcct

SEQ ID NO: 106506 - RNA, 21 nt, synthetic construct
  source 1..21: mol_type = other RNA
ttcctatcagaagcacaccaa

SEQ ID NO: 106507 - RNA, 21 nt, synthetic construct
  source 1..21: mol_type = other RNA
ttcctatgaaaatttagcttc

SEQ ID NO: 106508 - RNA, 21 nt, synthetic construct
  source 1..21: mol_type = other RNA
ttcctattcacactgctcctg

SEQ ID NO: 106509 - RNA, 21 nt, synthetic construct
  source 1..21: mol_type = other RNA
ttcctattttataatgggcaa

SEQ ID NO: 106510 - RNA, 21 nt, synthetic construct
  source 1..21: mol_type = other RNA
ttcctcaggatctacattaaa

SEQ ID NO: 106511 - RNA, 21 nt, synthetic construct
  source 1..21: mol_type = other RNA
ttcctcatccctcatatcagt

SEQ ID NO: 106512 - RNA, 21 nt, synthetic construct
  source 1..21: mol_type = other RNA
ttcctcatgtccatagttaat

SEQ ID NO: 106513 - RNA, 21 nt, synthetic construct
  source 1..21: mol_type = other RNA
ttcctccctggagaggcaaag

SEQ ID NO: 106514 - RNA, 21 nt, synthetic construct
  source 1..21: mol_type = other RNA
ttcctcccttcagcctgtgtc

SEQ ID NO: 106515 - RNA, 21 nt, synthetic construct
  source 1..21: mol_type = other RNA
ttcctcctctggacattatcc

SEQ ID NO: 106516 - RNA, 21 nt, synthetic construct
  source 1..21: mol_type = other RNA
ttcctccttctgctcactttg

SEQ ID NO: 106517 - RNA, 21 nt, synthetic construct
  source 1..21: mol_type = other RNA
ttcctccttttgtagagggaa

SEQ ID NO: 106518 - RNA, 21 nt, synthetic construct
  source 1..21: mol_type = other RNA
ttcctcggtctacggacgcag

SEQ ID NO: 106519 - RNA, 21 nt, synthetic construct
  source 1..21: mol_type = other RNA
ttcctcgttttcaacaaaggt

SEQ ID NO: 106520 - RNA, 21 nt, synthetic construct
  source 1..21: mol_type = other RNA
ttcctctcttaaatccgagac

SEQ ID NO: 106521 - RNA, 21 nt, synthetic construct
  source 1..21: mol_type = other RNA
ttcctctcttggaatgtgcac

SEQ ID NO: 106522 - RNA, 21 nt, synthetic construct
  source 1..21: mol_type = other RNA
ttcctctggctgacctggtac

SEQ ID NO: 106523 - RNA, 21 nt, synthetic construct
  source 1..21: mol_type = other RNA
ttcctcttcctcatccctcat

SEQ ID NO: 106524 - RNA, 21 nt, synthetic construct
  source 1..21: mol_type = other RNA
ttcctgaaatgaaccaaactt

SEQ ID NO: 106525 - RNA, 21 nt, synthetic construct
  source 1..21: mol_type = other RNA
ttcctgaagtctttggtgatc

SEQ ID NO: 106526 - RNA, 21 nt, synthetic construct
  source 1..21: mol_type = other RNA
ttcctgacctctgcagttagc

SEQ ID NO: 106527 - RNA, 21 nt, synthetic construct
  source 1..21: mol_type = other RNA
ttcctgataaggggctatctt

SEQ ID NO: 106528 - RNA, 21 nt, synthetic construct
  source 1..21: mol_type = other RNA
ttcctgatcacaccctcctac

SEQ ID NO: 106529 - RNA, 21 nt, synthetic construct
  source 1..21: mol_type = other RNA
ttcctgatcagcaccctcaaa

SEQ ID NO: 106530 - RNA, 21 nt, synthetic construct
  source 1..21: mol_type = other RNA
ttcctgatggacattctgctt

SEQ ID NO: 106531 - RNA, 21 nt, synthetic construct
  source 1..21: mol_type = other RNA
ttcctgcacatgcacaaggtc

SEQ ID NO: 106532 - RNA, 21 nt, synthetic construct
  source 1..21: mol_type = other RNA
ttcctgcccctccactccaca

SEQ ID NO: 106533 - RNA, 21 nt, synthetic construct
  source 1..21: mol_type = other RNA
ttcctgctgtcgtttatgcat

SEQ ID NO: 106534 - RNA, 21 nt, synthetic construct
  source 1..21: mol_type = other RNA
ttcctgcttcccccaaagaag

SEQ ID NO: 106535 - RNA, 21 nt, synthetic construct
  source 1..21: mol_type = other RNA
ttcctggaaaacttctctgga

SEQ ID NO: 106536 - RNA, 21 nt, synthetic construct
  source 1..21: mol_type = other RNA
ttcctggactgtgatgactgt

SEQ ID NO: 106537 - RNA, 21 nt, synthetic construct
  source 1..21: mol_type = other RNA
ttcctggctctagcccagctt

SEQ ID NO: 106538 - RNA, 21 nt, synthetic construct
  source 1..21: mol_type = other RNA
ttcctgggttctcccttctat

SEQ ID NO: 106539 - RNA, 21 nt, synthetic construct
  source 1..21: mol_type = other RNA
ttcctgtatatctccttttaa

SEQ ID NO: 106540 - RNA, 21 nt, synthetic construct
  source 1..21: mol_type = other RNA
ttcctgtcttggacccatgcc

SEQ ID NO: 106541 - RNA, 21 nt, synthetic construct
  source 1..21: mol_type = other RNA
ttcctgtgatttatgtggcat

SEQ ID NO: 106542 - RNA, 21 nt, synthetic construct
  source 1..21: mol_type = other RNA
ttcctgttccgggatcctgtc

SEQ ID NO: 106543 - RNA, 21 nt, synthetic construct
  source 1..21: mol_type = other RNA
ttcctgttctttgttagttta

SEQ ID NO: 106544 - RNA, 21 nt, synthetic construct
  source 1..21: mol_type = other RNA
ttcctgttgctttaacctctg

SEQ ID NO: 106545 - RNA, 21 nt, synthetic construct
  source 1..21: mol_type = other RNA
ttcctgttttagtggctcaca

SEQ ID NO: 106546 - RNA, 21 nt, synthetic construct
  source 1..21: mol_type = other RNA
ttccttaagcacagactgtgc

SEQ ID NO: 106547 - RNA, 21 nt, synthetic construct
  source 1..21: mol_type = other RNA
ttccttaagccatttcaggtt

SEQ ID NO: 106548 - RNA, 21 nt, synthetic construct
  source 1..21: mol_type = other RNA
ttccttaccagtgcttgcagc

SEQ ID NO: 106549 - RNA, 21 nt, synthetic construct
  source 1..21: mol_type = other RNA
ttccttacctttatctttgga

SEQ ID NO: 106550 - RNA, 21 nt, synthetic construct
  source 1..21: mol_type = other RNA
ttccttagttcgaagtttttt

SEQ ID NO: 106551 - RNA, 21 nt, synthetic construct
  source 1..21: mol_type = other RNA
ttccttatagtattacctccc

SEQ ID NO: 106552 - RNA, 21 nt, synthetic construct
  source 1..21: mol_type = other RNA
ttccttatccattcatctctc

SEQ ID NO: 106553 - RNA, 21 nt, synthetic construct
  source 1..21: mol_type = other RNA
ttccttatccgataaagggtc

SEQ ID NO: 106554 - RNA, 21 nt, synthetic construct
  source 1..21: mol_type = other RNA
ttccttatggatatctggcct

SEQ ID NO: 106555 - RNA, 21 nt, synthetic construct
  source 1..21: mol_type = other RNA
ttccttattgagaagcagaaa

SEQ ID NO: 106556 - RNA, 21 nt, synthetic construct
  source 1..21: mol_type = other RNA
ttccttcatgtcccctgtcca

SEQ ID NO: 106557 - RNA, 21 nt, synthetic construct
  source 1..21: mol_type = other RNA
ttccttccagatgttttacac

SEQ ID NO: 106558 - RNA, 21 nt, synthetic construct
  source 1..21: mol_type = other RNA
ttccttccagtttatatgcct

SEQ ID NO: 106559 - RNA, 21 nt, synthetic construct
  source 1..21: mol_type = other RNA
ttccttcccctttctttggtt

SEQ ID NO: 106560 - RNA, 21 nt, synthetic construct
  source 1..21: mol_type = other RNA
ttccttccgacctgtagattg

SEQ ID NO: 106561 - RNA, 21 nt, synthetic construct
  source 1..21: mol_type = other RNA
ttccttcctacacatatcttt

SEQ ID NO: 106562 - RNA, 21 nt, synthetic construct
  source 1..21: mol_type = other RNA
ttccttccttgctcaggagta

SEQ ID NO: 106563 - RNA, 21 nt, synthetic construct
  source 1..21: mol_type = other RNA
ttccttcctttgatgacttac

SEQ ID NO: 106564 - RNA, 21 nt, synthetic construct
  source 1..21: mol_type = other RNA
ttccttctcttatactagtag

SEQ ID NO: 106565 - RNA, 21 nt, synthetic construct
  source 1..21: mol_type = other RNA
ttccttcttaagacatttggg

SEQ ID NO: 106566 - RNA, 21 nt, synthetic construct
  source 1..21: mol_type = other RNA
ttccttcttcacacattaact

SEQ ID NO: 106567 - RNA, 21 nt, synthetic construct
  source 1..21: mol_type = other RNA
ttccttctttgggggaagcag

SEQ ID NO: 106568 - RNA, 21 nt, synthetic construct
  source 1..21: mol_type = other RNA
ttccttgatcagcttcctacc

SEQ ID NO: 106569 - RNA, 21 nt, synthetic construct
  source 1..21: mol_type = other RNA
ttccttgctatgtaatctcat

SEQ ID NO: 106570 - RNA, 21 nt, synthetic construct
  source 1..21: mol_type = other RNA
ttccttgctcaggagtaactg

SEQ ID NO: 106571 - RNA, 21 nt, synthetic construct
  source 1..21: mol_type = other RNA
ttccttgcttgtcttgaatag

SEQ ID NO: 106572 - RNA, 21 nt, synthetic construct
  source 1..21: mol_type = other RNA
ttccttggagaagagttctga

SEQ ID NO: 106573 - RNA, 21 nt, synthetic construct
  source 1..21: mol_type = other RNA
ttccttgggcacactccccag

SEQ ID NO: 106574 - RNA, 21 nt, synthetic construct
  source 1..21: mol_type = other RNA
ttccttgtcctaaaattcctt

SEQ ID NO: 106575 - RNA, 21 nt, synthetic construct
  source 1..21: mol_type = other RNA
ttccttgtgtcttaaattcaa

SEQ ID NO: 106576 - RNA, 21 nt, synthetic construct
  source 1..21: mol_type = other RNA
ttcctttaacgtatctgggaa

SEQ ID NO: 106577 - RNA, 21 nt, synthetic construct
  source 1..21: mol_type = other RNA
ttcctttcaaagagacctgat

SEQ ID NO: 106578 - RNA, 21 nt, synthetic construct
  source 1..21: mol_type = other RNA
ttcctttcagtcggttcttca

SEQ ID NO: 106579 - RNA, 21 nt, synthetic construct
  source 1..21: mol_type = other RNA
ttcctttctaggcatctattt

SEQ ID NO: 106580 - RNA, 21 nt, synthetic construct
  source 1..21: mol_type = other RNA
ttcctttgatgacttacagat

SEQ ID NO: 106581 - RNA, 21 nt, synthetic construct
  source 1..21: mol_type = other RNA
ttcctttgcctaagtctcagg

SEQ ID NO: 106582 - RNA, 21 nt, synthetic construct
  source 1..21: mol_type = other RNA
ttcctttgcctttcactttga

SEQ ID NO: 106583 - RNA, 21 nt, synthetic construct
  source 1..21: mol_type = other RNA
ttccttttaagggaaacactc

SEQ ID NO: 106584 - RNA, 21 nt, synthetic construct
  source 1..21: mol_type = other RNA
ttccttttcgagactgagtaa

SEQ ID NO: 106585 - RNA, 21 nt, synthetic construct
  source 1..21: mol_type = other RNA
ttccttttttatgtgctttct

SEQ ID NO: 106586 - RNA, 21 nt, synthetic construct
  source 1..21: mol_type = other RNA
ttcgaaaatgggccaaagact

SEQ ID NO: 106587 - RNA, 21 nt, synthetic construct
  source 1..21: mol_type = other RNA
ttcgaaagttcagatagaatt

SEQ ID NO: 106588 - RNA, 21 nt, synthetic construct
  source 1..21: mol_type = other RNA
ttcgaaataatcattgttagg

SEQ ID NO: 106589 - RNA, 21 nt, synthetic construct
  source 1..21: mol_type = other RNA
ttcgaactaaggaaagctcag

SEQ ID NO: 106590 - RNA, 21 nt, synthetic construct
  source 1..21: mol_type = other RNA
ttcgaagcaaaacatatgtca

SEQ ID NO: 106591 - RNA, 21 nt, synthetic construct
  source 1..21: mol_type = other RNA
ttcgaagtgggaagcaaagga

SEQ ID NO: 106592 - RNA, 21 nt, synthetic construct
  source 1..21: mol_type = other RNA
ttcgaattatgctaacatgaa

SEQ ID NO: 106593 - RNA, 21 nt, synthetic construct
  source 1..21: mol_type = other RNA
ttcgacagtcccttgcctgac

SEQ ID NO: 106594 - RNA, 21 nt, synthetic construct
  source 1..21: mol_type = other RNA
ttcgaccaagttactagaagc

SEQ ID NO: 106595 - RNA, 21 nt, synthetic construct
  source 1..21: mol_type = other RNA
ttcgagaagggaagtaaagat

SEQ ID NO: 106596 - RNA, 21 nt, synthetic construct
  source 1..21: mol_type = other RNA
ttcgagactgagtaatattcc

SEQ ID NO: 106597 - RNA, 21 nt, synthetic construct
  source 1..21: mol_type = other RNA
ttcgaggcatctagttaccac

SEQ ID NO: 106598 - RNA, 21 nt, synthetic construct
  source 1..21: mol_type = other RNA
ttcgagggggctgagtatggg

SEQ ID NO: 106599 - RNA, 21 nt, synthetic construct
  source 1..21: mol_type = other RNA
ttcgaggtcgcaccctgagca

SEQ ID NO: 106600 - RNA, 21 nt, synthetic construct
  source 1..21: mol_type = other RNA
ttcgagttctgggagttcatt

SEQ ID NO: 106601 - RNA, 21 nt, synthetic construct
  source 1..21: mol_type = other RNA
ttcgattaaaataacacgcag

SEQ ID NO: 106602 - RNA, 21 nt, synthetic construct
  source 1..21: mol_type = other RNA
ttcgcaaagcaacatgctaag

SEQ ID NO: 106603 - RNA, 21 nt, synthetic construct
  source 1..21: mol_type = other RNA
ttcgcaaagtaaaaagcacta

SEQ ID NO: 106604 - RNA, 21 nt, synthetic construct
  source 1..21: mol_type = other RNA
ttcgcagggtgaaacttgaat

SEQ ID NO: 106605 - RNA, 21 nt, synthetic construct
  source 1..21: mol_type = other RNA
ttcgcataaccaaattatttc

SEQ ID NO: 106606 - RNA, 21 nt, synthetic construct
  source 1..21: mol_type = other RNA
ttcgcatcattcaaatgatat

SEQ ID NO: 106607 - RNA, 21 nt, synthetic construct
  source 1..21: mol_type = other RNA
ttcgcattgctaattcattgt

SEQ ID NO: 106608 - RNA, 21 nt, synthetic construct
  source 1..21: mol_type = other RNA
ttcgcctagataagaaaatgt

SEQ ID NO: 106609 - RNA, 21 nt, synthetic construct
  source 1..21: mol_type = other RNA
ttcgccttctcagaaggacac

SEQ ID NO: 106610 - RNA, 21 nt, synthetic construct
  source 1..21: mol_type = other RNA
ttcgcctttctcgcagcgggg

SEQ ID NO: 106611 - RNA, 21 nt, synthetic construct
  source 1..21: mol_type = other RNA
ttcgcctttgttgccaggtgg

SEQ ID NO: 106612 - RNA, 21 nt, synthetic construct
  source 1..21: mol_type = other RNA
ttcgcgcgcggcagggatgct

SEQ ID NO: 106613 - RNA, 21 nt, synthetic construct
  source 1..21: mol_type = other RNA
ttcgcgggcaccttccctact

SEQ ID NO: 106614 - RNA, 21 nt, synthetic construct
  source 1..21: mol_type = other RNA
ttcgctaatctcaatcagggc

SEQ ID NO: 106615 - RNA, 21 nt, synthetic construct
  source 1..21: mol_type = other RNA
ttcgctatcagtagtttgcta

SEQ ID NO: 106616 - RNA, 21 nt, synthetic construct
  source 1..21: mol_type = other RNA
ttcgcttttggagctataatt

SEQ ID NO: 106617 - RNA, 21 nt, synthetic construct
  source 1..21: mol_type = other RNA
ttcggatatttactaagaagt

SEQ ID NO: 106618 - RNA, 21 nt, synthetic construct
  source 1..21: mol_type = other RNA
ttcggccaagatctgtttttc

SEQ ID NO: 106619 - RNA, 21 nt, synthetic construct
  source 1..21: mol_type = other RNA
ttcggctctgtgctgagatgg

SEQ ID NO: 106620 - RNA, 21 nt, synthetic construct
  source 1..21: mol_type = other RNA
ttcgggggagagcactggttt

SEQ ID NO: 106621 - RNA, 21 nt, synthetic construct
  source 1..21: mol_type = other RNA
ttcgggtgtcagaattccatc

SEQ ID NO: 106622 - RNA, 21 nt, synthetic construct
  source 1..21: mol_type = other RNA
ttcggtggcattaaggacatc

SEQ ID NO: 106623 - RNA, 21 nt, synthetic construct
  source 1..21: mol_type = other RNA
ttcgtagcaggtttaggaagc

SEQ ID NO: 106624 - RNA, 21 nt, synthetic construct
  source 1..21: mol_type = other RNA
ttcgtatcttttaacagatgg

SEQ ID NO: 106625 - RNA, 21 nt, synthetic construct
  source 1..21: mol_type = other RNA
ttcgtatggaagatgggactt

SEQ ID NO: 106626 - RNA, 21 nt, synthetic construct
  source 1..21: mol_type = other RNA
ttcgtcaaggggagaggcctc

SEQ ID NO: 106627 - RNA, 21 nt, synthetic construct
  source 1..21: mol_type = other RNA
ttcgtcatctataaggtaatg

SEQ ID NO: 106628 - RNA, 21 nt, synthetic construct
  source 1..21: mol_type = other RNA
ttcgtccctaaacactgtagt

SEQ ID NO: 106629 - RNA, 21 nt, synthetic construct
  source 1..21: mol_type = other RNA
ttcgtgagggtttcagtgagt

SEQ ID NO: 106630 - RNA, 21 nt, synthetic construct
  source 1..21: mol_type = other RNA
ttcgtgtactgaaaccagtgc

SEQ ID NO: 106631 - RNA, 21 nt, synthetic construct
  source 1..21: mol_type = other RNA
ttcgtgtgtggagtggggcac

SEQ ID NO: 106632 - RNA, 21 nt, synthetic construct
  source 1..21: mol_type = other RNA
ttcgttaatacttgtgtagcg

SEQ ID NO: 106633 - RNA, 21 nt, synthetic construct
  source 1..21: mol_type = other RNA
ttcgttcaaaacatcatctaa

SEQ ID NO: 106634 - RNA, 21 nt, synthetic construct
  source 1..21: mol_type = other RNA
ttcgttcagtttagtaaatct

SEQ ID NO: 106635 - RNA, 21 nt, synthetic construct
  source 1..21: mol_type = other RNA
ttcgttccagcagggtaaagt

SEQ ID NO: 106636 - RNA, 21 nt, synthetic construct
  source 1..21: mol_type = other RNA
ttcgtttgaggcttttcatag

SEQ ID NO: 106637 - RNA, 21 nt, synthetic construct
  source 1..21: mol_type = other RNA
ttctaaaaacgtgcaaactac

SEQ ID NO: 106638 - RNA, 21 nt, synthetic construct
  source 1..21: mol_type = other RNA
ttctaaaatcatcacagtatg

SEQ ID NO: 106639 - RNA, 21 nt, synthetic construct
  source 1..21: mol_type = other RNA
ttctaaacacacgggctgggc

SEQ ID NO: 106640 - RNA, 21 nt, synthetic construct
  source 1..21: mol_type = other RNA
ttctaaacctgaggtctttaa

SEQ ID NO: 106641 - RNA, 21 nt, synthetic construct
  source 1..21: mol_type = other RNA
ttctaaaccttaaaagagtga

SEQ ID NO: 106642 - RNA, 21 nt, synthetic construct
  source 1..21: mol_type = other RNA
ttctaaactggttttcctgat

SEQ ID NO: 106643 - RNA, 21 nt, synthetic construct
  source 1..21: mol_type = other RNA
ttctaaagttagaagtatccc

SEQ ID NO: 106644 - RNA, 21 nt, synthetic construct
  source 1..21: mol_type = other RNA
ttctaaatcaacagtgtacta

SEQ ID NO: 106645 - RNA, 21 nt, synthetic construct
  source 1..21: mol_type = other RNA
ttctaaattgaacagcctaaa

SEQ ID NO: 106646 - RNA, 21 nt, synthetic construct
  source 1..21: mol_type = other RNA
ttctaacaagaagctgttttg

SEQ ID NO: 106647 - RNA, 21 nt, synthetic construct
  source 1..21: mol_type = other RNA
ttctaacattatcttctacct

SEQ ID NO: 106648 - RNA, 21 nt, synthetic construct
  source 1..21: mol_type = other RNA
ttctaaccctcaaatgccata

SEQ ID NO: 106649 - RNA, 21 nt, synthetic construct
  source 1..21: mol_type = other RNA
ttctaagagccaaagacattg

SEQ ID NO: 106650 - RNA, 21 nt, synthetic construct
  source 1..21: mol_type = other RNA
ttctaagccatgtttctcctg

SEQ ID NO: 106651 - RNA, 21 nt, synthetic construct
  source 1..21: mol_type = other RNA
ttctaaggttctgctatgctg

SEQ ID NO: 106652 - RNA, 21 nt, synthetic construct
  source 1..21: mol_type = other RNA
ttctaagtttgccaaagattc

SEQ ID NO: 106653 - RNA, 21 nt, synthetic construct
  source 1..21: mol_type = other RNA
ttctaataaacgcggaatgaa

SEQ ID NO: 106654 - RNA, 21 nt, synthetic construct
  source 1..21: mol_type = other RNA
ttctaataggaagtggctaga

SEQ ID NO: 106655 - RNA, 21 nt, synthetic construct
  source 1..21: mol_type = other RNA
ttctaatcctttgcacacacc

SEQ ID NO: 106656 - RNA, 21 nt, synthetic construct
  source 1..21: mol_type = other RNA
ttctaatgaactcccagaact

SEQ ID NO: 106657 - RNA, 21 nt, synthetic construct
  source 1..21: mol_type = other RNA
ttctaatgcccattaaaacca

SEQ ID NO: 106658 - RNA, 21 nt, synthetic construct
  source 1..21: mol_type = other RNA
ttctaatgtgcaaggagagaa

SEQ ID NO: 106659 - RNA, 21 nt, synthetic construct
  source 1..21: mol_type = other RNA
ttctaattagaaactggtgaa

SEQ ID NO: 106660 - RNA, 21 nt, synthetic construct
  source 1..21: mol_type = other RNA
ttctaattctgacaactggga

SEQ ID NO: 106661 - RNA, 21 nt, synthetic construct
  source 1..21: mol_type = other RNA
ttctaatttccaagaaccctt

SEQ ID NO: 106662 - RNA, 21 nt, synthetic construct
  source 1..21: mol_type = other RNA
ttctaatttgtgaaccttgaa

SEQ ID NO: 106663 - RNA, 21 nt, synthetic construct
  source 1..21: mol_type = other RNA
ttctacaatggttgaactagt

SEQ ID NO: 106664 - RNA, 21 nt, synthetic construct
  source 1..21: mol_type = other RNA
ttctacagaaaacccttcatc

SEQ ID NO: 106665 - RNA, 21 nt, synthetic construct
  source 1..21: mol_type = other RNA
ttctacagaatgttcaagtat

SEQ ID NO: 106666 - RNA, 21 nt, synthetic construct
  source 1..21: mol_type = other RNA
ttctacagtattacacagaaa

SEQ ID NO: 106667 - RNA, 21 nt, synthetic construct
  source 1..21: mol_type = other RNA
ttctacatccccccacccctg

SEQ ID NO: 106668 - RNA, 21 nt, synthetic construct
  source 1..21: mol_type = other RNA
ttctacccactattgaaagcc

SEQ ID NO: 106669 - RNA, 21 nt, synthetic construct
  source 1..21: mol_type = other RNA
ttctacctggagcctgaggac

SEQ ID NO: 106670 - RNA, 21 nt, synthetic construct
  source 1..21: mol_type = other RNA
ttctaccttgaaaatgccctt

SEQ ID NO: 106671 - RNA, 21 nt, synthetic construct
  source 1..21: mol_type = other RNA
ttctacctttggctactgtaa

SEQ ID NO: 106672 - RNA, 21 nt, synthetic construct
  source 1..21: mol_type = other RNA
ttctactaaacattaaggaag

SEQ ID NO: 106673 - RNA, 21 nt, synthetic construct
  source 1..21: mol_type = other RNA
ttctactagtataagagaagg

SEQ ID NO: 106674 - RNA, 21 nt, synthetic construct
  source 1..21: mol_type = other RNA
ttctactcactgtactactga

SEQ ID NO: 106675 - RNA, 21 nt, synthetic construct
  source 1..21: mol_type = other RNA
ttctactggggtcttagttct

SEQ ID NO: 106676 - RNA, 21 nt, synthetic construct
  source 1..21: mol_type = other RNA
ttctactgtgaattcactaat

SEQ ID NO: 106677 - RNA, 21 nt, synthetic construct
  source 1..21: mol_type = other RNA
ttctagaaaggagggactgaa

SEQ ID NO: 106678 - RNA, 21 nt, synthetic construct
  source 1..21: mol_type = other RNA
ttctagaatgcatccctcctc

SEQ ID NO: 106679 - RNA, 21 nt, synthetic construct
  source 1..21: mol_type = other RNA
ttctagagatttgctgtataa

SEQ ID NO: 106680 - RNA, 21 nt, synthetic construct
  source 1..21: mol_type = other RNA
ttctagattcatatgctttga

SEQ ID NO: 106681 - RNA, 21 nt, synthetic construct
  source 1..21: mol_type = other RNA
ttctagccaaagcaagccttg

SEQ ID NO: 106682 - RNA, 21 nt, synthetic construct
  source 1..21: mol_type = other RNA
ttctagccataatccttagat

SEQ ID NO: 106683 - RNA, 21 nt, synthetic construct
  source 1..21: mol_type = other RNA
ttctagcctccagaaaaccag

SEQ ID NO: 106684 - RNA, 21 nt, synthetic construct
  source 1..21: mol_type = other RNA
ttctagctcctgggaaaagga

SEQ ID NO: 106685 - RNA, 21 nt, synthetic construct
  source 1..21: mol_type = other RNA
ttctagctttcagcactgcta

SEQ ID NO: 106686 - RNA, 21 nt, synthetic construct
  source 1..21: mol_type = other RNA
ttctaggaaccatattagagt

SEQ ID NO: 106687 - RNA, 21 nt, synthetic construct
  source 1..21: mol_type = other RNA
ttctaggcatctatttcccca

SEQ ID NO: 106688 - RNA, 21 nt, synthetic construct
  source 1..21: mol_type = other RNA
ttctaggccctaaccccagag

SEQ ID NO: 106689 - RNA, 21 nt, synthetic construct
  source 1..21: mol_type = other RNA
ttctaggtagtttctttgaac

SEQ ID NO: 106690 - RNA, 21 nt, synthetic construct
  source 1..21: mol_type = other RNA
ttctagtaacttggtcgaaaa

SEQ ID NO: 106691 - RNA, 21 nt, synthetic construct
  source 1..21: mol_type = other RNA
ttctagtcacatttgctttac

SEQ ID NO: 106692 - RNA, 21 nt, synthetic construct
  source 1..21: mol_type = other RNA
ttctagtgatgggagatggac

SEQ ID NO: 106693 - RNA, 21 nt, synthetic construct
  source 1..21: mol_type = other RNA
ttctagttaataaaggtgcta

SEQ ID NO: 106694 - RNA, 21 nt, synthetic construct
  source 1..21: mol_type = other RNA
ttctagttagtttgttgaccc

SEQ ID NO: 106695 - RNA, 21 nt, synthetic construct
  source 1..21: mol_type = other RNA
ttctagttctaataaacgcgg

SEQ ID NO: 106696 - RNA, 21 nt, synthetic construct
  source 1..21: mol_type = other RNA
ttctagttctagctctgtctt

SEQ ID NO: 106697 - RNA, 21 nt, synthetic construct
  source 1..21: mol_type = other RNA
ttctagtttgaggtgtacaat

SEQ ID NO: 106698 - RNA, 21 nt, synthetic construct
  source 1..21: mol_type = other RNA
ttctatacttcatctttcctg

SEQ ID NO: 106699 - RNA, 21 nt, synthetic construct
  source 1..21: mol_type = other RNA
ttctataggtagtacatattc

SEQ ID NO: 106700 - RNA, 21 nt, synthetic construct
  source 1..21: mol_type = other RNA
ttctatagtcattccgctaaa

SEQ ID NO: 106701 - RNA, 21 nt, synthetic construct
  source 1..21: mol_type = other RNA
ttctatagtggctgcaccatt

SEQ ID NO: 106702 - RNA, 21 nt, synthetic construct
  source 1..21: mol_type = other RNA
ttctatcatcaagacagagct

SEQ ID NO: 106703 - RNA, 21 nt, synthetic construct
  source 1..21: mol_type = other RNA
ttctatccagtgacacctgag

SEQ ID NO: 106704 - RNA, 21 nt, synthetic construct
  source 1..21: mol_type = other RNA
ttctatctctcagatctgagt

SEQ ID NO: 106705 - RNA, 21 nt, synthetic construct
  source 1..21: mol_type = other RNA
ttctatctgaacattttagct

SEQ ID NO: 106706 - RNA, 21 nt, synthetic construct
  source 1..21: mol_type = other RNA
ttctatctgaactttcgaagt

SEQ ID NO: 106707 - RNA, 21 nt, synthetic construct
  source 1..21: mol_type = other RNA
ttctatgtgacaaacactttt

SEQ ID NO: 106708 - RNA, 21 nt, synthetic construct
  source 1..21: mol_type = other RNA
ttctattcattaccaggctgg

SEQ ID NO: 106709 - RNA, 21 nt, synthetic construct
  source 1..21: mol_type = other RNA
ttctattccagagaattcaga

SEQ ID NO: 106710 - RNA, 21 nt, synthetic construct
  source 1..21: mol_type = other RNA
ttctattccattgttctcttt

SEQ ID NO: 106711 - RNA, 21 nt, synthetic construct
  source 1..21: mol_type = other RNA
ttctattcccctggatccccc

SEQ ID NO: 106712 - RNA, 21 nt, synthetic construct
  source 1..21: mol_type = other RNA
ttctatttttctgcaattgga

SEQ ID NO: 106713 - RNA, 21 nt, synthetic construct
  source 1..21: mol_type = other RNA
ttctcaaaaatttaagcacag

SEQ ID NO: 106714 - RNA, 21 nt, synthetic construct
  source 1..21: mol_type = other RNA
ttctcaaacaggatacaaaaa

SEQ ID NO: 106715 - RNA, 21 nt, synthetic construct
  source 1..21: mol_type = other RNA
ttctcaaactgtgtgcttgga

SEQ ID NO: 106716 - RNA, 21 nt, synthetic construct
  source 1..21: mol_type = other RNA
ttctcaaagcccaccagcata

SEQ ID NO: 106717 - RNA, 21 nt, synthetic construct
  source 1..21: mol_type = other RNA
ttctcaaatgaacaggttctt

SEQ ID NO: 106718 - RNA, 21 nt, synthetic construct
  source 1..21: mol_type = other RNA
ttctcaacactgtgttctttt

SEQ ID NO: 106719 - RNA, 21 nt, synthetic construct
  source 1..21: mol_type = other RNA
ttctcaacttagccttggtaa

SEQ ID NO: 106720 - RNA, 21 nt, synthetic construct
  source 1..21: mol_type = other RNA
ttctcaacttcctgttttagt

SEQ ID NO: 106721 - RNA, 21 nt, synthetic construct
  source 1..21: mol_type = other RNA
ttctcaataaggaaagcacgt

SEQ ID NO: 106722 - RNA, 21 nt, synthetic construct
  source 1..21: mol_type = other RNA
ttctcaatcccttccccacct

SEQ ID NO: 106723 - RNA, 21 nt, synthetic construct
  source 1..21: mol_type = other RNA
ttctcaccaacatccacagct

SEQ ID NO: 106724 - RNA, 21 nt, synthetic construct
  source 1..21: mol_type = other RNA
ttctcagatctgttgcagtcc

SEQ ID NO: 106725 - RNA, 21 nt, synthetic construct
  source 1..21: mol_type = other RNA
ttctcagctatagcttctgag

SEQ ID NO: 106726 - RNA, 21 nt, synthetic construct
  source 1..21: mol_type = other RNA
ttctcaggagcctagtcatcc

SEQ ID NO: 106727 - RNA, 21 nt, synthetic construct
  source 1..21: mol_type = other RNA
ttctcagggcctgcttttgga

SEQ ID NO: 106728 - RNA, 21 nt, synthetic construct
  source 1..21: mol_type = other RNA
ttctcaggggtaaaggggatg

SEQ ID NO: 106729 - RNA, 21 nt, synthetic construct
  source 1..21: mol_type = other RNA
ttctcagtatcctttcaaggt

SEQ ID NO: 106730 - RNA, 21 nt, synthetic construct
  source 1..21: mol_type = other RNA
ttctcagttgcagcatgctca

SEQ ID NO: 106731 - RNA, 21 nt, synthetic construct
  source 1..21: mol_type = other RNA
ttctcatactttgtcaggcat

SEQ ID NO: 106732 - RNA, 21 nt, synthetic construct
  source 1..21: mol_type = other RNA
ttctcatagtcttccaaaata

SEQ ID NO: 106733 - RNA, 21 nt, synthetic construct
  source 1..21: mol_type = other RNA
ttctcatattattttttcccg

SEQ ID NO: 106734 - RNA, 21 nt, synthetic construct
  source 1..21: mol_type = other RNA
ttctcatctgtcactttccta

SEQ ID NO: 106735 - RNA, 21 nt, synthetic construct
  source 1..21: mol_type = other RNA
ttctcatgtatgttttagcct

SEQ ID NO: 106736 - RNA, 21 nt, synthetic construct
  source 1..21: mol_type = other RNA
ttctcattagttatctcttag

SEQ ID NO: 106737 - RNA, 21 nt, synthetic construct
  source 1..21: mol_type = other RNA
ttctcattcttctctaatgta

SEQ ID NO: 106738 - RNA, 21 nt, synthetic construct
  source 1..21: mol_type = other RNA
ttctcatttttcaggggggcc

SEQ ID NO: 106739 - RNA, 21 nt, synthetic construct
  source 1..21: mol_type = other RNA
ttctccaaggaaagtgtgctt

SEQ ID NO: 106740 - RNA, 21 nt, synthetic construct
  source 1..21: mol_type = other RNA
ttctccacatccttgccaaca

SEQ ID NO: 106741 - RNA, 21 nt, synthetic construct
  source 1..21: mol_type = other RNA
ttctccactttcatgatttgg

SEQ ID NO: 106742 - RNA, 21 nt, synthetic construct
  source 1..21: mol_type = other RNA
ttctccagtcccactgacagt

SEQ ID NO: 106743 - RNA, 21 nt, synthetic construct
  source 1..21: mol_type = other RNA
ttctccagtgaagtcatctgg

SEQ ID NO: 106744 - RNA, 21 nt, synthetic construct
  source 1..21: mol_type = other RNA
ttctcccaaggttgcctgttc

SEQ ID NO: 106745 - RNA, 21 nt, synthetic construct
  source 1..21: mol_type = other RNA
ttctcccagctgtccaacaag

SEQ ID NO: 106746 - RNA, 21 nt, synthetic construct
  source 1..21: mol_type = other RNA
ttctcccaggtcagtagtaca

SEQ ID NO: 106747 - RNA, 21 nt, synthetic construct
  source 1..21: mol_type = other RNA
ttctcccagttgtcagaatta

SEQ ID NO: 106748 - RNA, 21 nt, synthetic construct
  source 1..21: mol_type = other RNA
ttctccctcttcgctctttta

SEQ ID NO: 106749 - RNA, 21 nt, synthetic construct
  source 1..21: mol_type = other RNA
ttctccctgaaattgtcagaa

SEQ ID NO: 106750 - RNA, 21 nt, synthetic construct
  source 1..21: mol_type = other RNA
ttctcccttctattccattgt

SEQ ID NO: 106751 - RNA, 21 nt, synthetic construct
  source 1..21: mol_type = other RNA
ttctcctaagtcttcttctaa

SEQ ID NO: 106752 - RNA, 21 nt, synthetic construct
  source 1..21: mol_type = other RNA
ttctcctccaacccattccag

SEQ ID NO: 106753 - RNA, 21 nt, synthetic construct
  source 1..21: mol_type = other RNA
ttctcctgcatggggagtttt

SEQ ID NO: 106754 - RNA, 21 nt, synthetic construct
  source 1..21: mol_type = other RNA
ttctcctgtgtgcatgctccc

SEQ ID NO: 106755 - RNA, 21 nt, synthetic construct
  source 1..21: mol_type = other RNA
ttctccttctgcaggctgaac

SEQ ID NO: 106756 - RNA, 21 nt, synthetic construct
  source 1..21: mol_type = other RNA
ttctccttctggaagatttct

SEQ ID NO: 106757 - RNA, 21 nt, synthetic construct
  source 1..21: mol_type = other RNA
ttctcgaagtggtgcttgaac

SEQ ID NO: 106758 - RNA, 21 nt, synthetic construct
  source 1..21: mol_type = other RNA
ttctcgacacacaatccaagt

SEQ ID NO: 106759 - RNA, 21 nt, synthetic construct
  source 1..21: mol_type = other RNA
ttctcgcagcggggatgctca

SEQ ID NO: 106760 - RNA, 21 nt, synthetic construct
  source 1..21: mol_type = other RNA
ttctcgtgcatgtctgcagga

SEQ ID NO: 106761 - RNA, 21 nt, synthetic construct
  source 1..21: mol_type = other RNA
ttctcgtgtgagctctagcct

SEQ ID NO: 106762 - RNA, 21 nt, synthetic construct
  source 1..21: mol_type = other RNA
ttctcgttcatgttcaaggtg

SEQ ID NO: 106763 - RNA, 21 nt, synthetic construct
  source 1..21: mol_type = other RNA
ttctctaatagctagtgatgt

SEQ ID NO: 106764 - RNA, 21 nt, synthetic construct
  source 1..21: mol_type = other RNA
ttctctaatgtaaacagcata

SEQ ID NO: 106765 - RNA, 21 nt, synthetic construct
  source 1..21: mol_type = other RNA
ttctctacagttaacaatact

SEQ ID NO: 106766 - RNA, 21 nt, synthetic construct
  source 1..21: mol_type = other RNA
ttctctacatctggatcctgt

SEQ ID NO: 106767 - RNA, 21 nt, synthetic construct
  source 1..21: mol_type = other RNA
ttctctactctgcctcagttg

SEQ ID NO: 106768 - RNA, 21 nt, synthetic construct
  source 1..21: mol_type = other RNA
ttctctagttgcacggtgaag

SEQ ID NO: 106769 - RNA, 21 nt, synthetic construct
  source 1..21: mol_type = other RNA
ttctctcagagggaaactgtt

SEQ ID NO: 106770 - RNA, 21 nt, synthetic construct
  source 1..21: mol_type = other RNA
ttctctcatgttgggtaaaaa

SEQ ID NO: 106771 - RNA, 21 nt, synthetic construct
  source 1..21: mol_type = other RNA
ttctctccaaggtacaattac

SEQ ID NO: 106772 - RNA, 21 nt, synthetic construct
  source 1..21: mol_type = other RNA
ttctctccttgcacattagaa

SEQ ID NO: 106773 - RNA, 21 nt, synthetic construct
  source 1..21: mol_type = other RNA
ttctctcctttgaggtaagaa

SEQ ID NO: 106774 - RNA, 21 nt, synthetic construct
  source 1..21: mol_type = other RNA
ttctctctcaactggcccctc

SEQ ID NO: 106775 - RNA, 21 nt, synthetic construct
  source 1..21: mol_type = other RNA
ttctctctccctgccctgtga

SEQ ID NO: 106776 - RNA, 21 nt, synthetic construct
  source 1..21: mol_type = other RNA
ttctctctctgcttcactaac

SEQ ID NO: 106777 - RNA, 21 nt, synthetic construct
  source 1..21: mol_type = other RNA
ttctctcttccaaataatccc

SEQ ID NO: 106778 - RNA, 21 nt, synthetic construct
  source 1..21: mol_type = other RNA
ttctctgccccgggcctggtt

SEQ ID NO: 106779 - RNA, 21 nt, synthetic construct
  source 1..21: mol_type = other RNA
ttctctgctgctgaaaaagat

SEQ ID NO: 106780 - RNA, 21 nt, synthetic construct
  source 1..21: mol_type = other RNA
ttctctgctttttcttggtgg

SEQ ID NO: 106781 - RNA, 21 nt, synthetic construct
  source 1..21: mol_type = other RNA
ttctctggaatagaagagcag

SEQ ID NO: 106782 - RNA, 21 nt, synthetic construct
  source 1..21: mol_type = other RNA
ttctctggagcaagcatgagt

SEQ ID NO: 106783 - RNA, 21 nt, synthetic construct
  source 1..21: mol_type = other RNA
ttctctgtctctgttgcccag

SEQ ID NO: 106784 - RNA, 21 nt, synthetic construct
  source 1..21: mol_type = other RNA
ttctctgtgtggtttgccttt

SEQ ID NO: 106785 - RNA, 21 nt, synthetic construct
  source 1..21: mol_type = other RNA
ttctcttatactagtagaaag

SEQ ID NO: 106786 - RNA, 21 nt, synthetic construct
  source 1..21: mol_type = other RNA
ttctcttctggatagcattat

SEQ ID NO: 106787 - RNA, 21 nt, synthetic construct
  source 1..21: mol_type = other RNA
ttctctttaaagctgaactcc

SEQ ID NO: 106788 - RNA, 21 nt, synthetic construct
  source 1..21: mol_type = other RNA
ttctctttagggaagatagta

SEQ ID NO: 106789 - RNA, 21 nt, synthetic construct
  source 1..21: mol_type = other RNA
ttctctttcagccatcccagc

SEQ ID NO: 106790 - RNA, 21 nt, synthetic construct
  source 1..21: mol_type = other RNA
ttctctttctgaaattctcat

SEQ ID NO: 106791 - RNA, 21 nt, synthetic construct
  source 1..21: mol_type = other RNA
ttctctttgtttatccttgca

SEQ ID NO: 106792 - RNA, 21 nt, synthetic construct
  source 1..21: mol_type = other RNA
ttctcttttcctcgttttcaa

SEQ ID NO: 106793 - RNA, 21 nt, synthetic construct
  source 1..21: mol_type = other RNA
ttctctttttgacagatgaga

SEQ ID NO: 106794 - RNA, 21 nt, synthetic construct
  source 1..21: mol_type = other RNA
ttctgaaaaatggttttatgg

SEQ ID NO: 106795 - RNA, 21 nt, synthetic construct
  source 1..21: mol_type = other RNA
ttctgaactcaaaagtgaatc

SEQ ID NO: 106796 - RNA, 21 nt, synthetic construct
  source 1..21: mol_type = other RNA
ttctgaactttcaacctaaca

SEQ ID NO: 106797 - RNA, 21 nt, synthetic construct
  source 1..21: mol_type = other RNA
ttctgaagaaattatctgtgg

SEQ ID NO: 106798 - RNA, 21 nt, synthetic construct
  source 1..21: mol_type = other RNA
ttctgaagaggctttctgtgt

SEQ ID NO: 106799 - RNA, 21 nt, synthetic construct
  source 1..21: mol_type = other RNA
ttctgaaggcactaacaaagg

SEQ ID NO: 106800 - RNA, 21 nt, synthetic construct
  source 1..21: mol_type = other RNA
ttctgaaggctcagcccctca

SEQ ID NO: 106801 - RNA, 21 nt, synthetic construct
  source 1..21: mol_type = other RNA
ttctgaaggtgcctgccatag

SEQ ID NO: 106802 - RNA, 21 nt, synthetic construct
  source 1..21: mol_type = other RNA
ttctgaattgagatgtactgg

SEQ ID NO: 106803 - RNA, 21 nt, synthetic construct
  source 1..21: mol_type = other RNA
ttctgacaactgggagaatgg

SEQ ID NO: 106804 - RNA, 21 nt, synthetic construct
  source 1..21: mol_type = other RNA
ttctgacaatttcagggagaa

SEQ ID NO: 106805 - RNA, 21 nt, synthetic construct
  source 1..21: mol_type = other RNA
ttctgacacccgaagaggacg

SEQ ID NO: 106806 - RNA, 21 nt, synthetic construct
  source 1..21: mol_type = other RNA
ttctgacacccgacccactag

SEQ ID NO: 106807 - RNA, 21 nt, synthetic construct
  source 1..21: mol_type = other RNA
ttctgacaggtggtatgggag

SEQ ID NO: 106808 - RNA, 21 nt, synthetic construct
  source 1..21: mol_type = other RNA
ttctgaccaactatttcacta

SEQ ID NO: 106809 - RNA, 21 nt, synthetic construct
  source 1..21: mol_type = other RNA
ttctgacccagagcctaatgt

SEQ ID NO: 106810 - RNA, 21 nt, synthetic construct
  source 1..21: mol_type = other RNA
ttctgaccctttattcaaaga

SEQ ID NO: 106811 - RNA, 21 nt, synthetic construct
  source 1..21: mol_type = other RNA
ttctgacctaaagttttaaga

SEQ ID NO: 106812 - RNA, 21 nt, synthetic construct
  source 1..21: mol_type = other RNA
ttctgactctgtgcttgtgct

SEQ ID NO: 106813 - RNA, 21 nt, synthetic construct
  source 1..21: mol_type = other RNA
ttctgacttagtgagggaggc

SEQ ID NO: 106814 - RNA, 21 nt, synthetic construct
  source 1..21: mol_type = other RNA
ttctgagaaggcgaaatgtga

SEQ ID NO: 106815 - RNA, 21 nt, synthetic construct
  source 1..21: mol_type = other RNA
ttctgagagtattgccaggtt

SEQ ID NO: 106816 - RNA, 21 nt, synthetic construct
  source 1..21: mol_type = other RNA
ttctgagcaactactatttcg

SEQ ID NO: 106817 - RNA, 21 nt, synthetic construct
  source 1..21: mol_type = other RNA
ttctgagcagtgtttcctaga

SEQ ID NO: 106818 - RNA, 21 nt, synthetic construct
  source 1..21: mol_type = other RNA
ttctgagccagagtttcactc

SEQ ID NO: 106819 - RNA, 21 nt, synthetic construct
  source 1..21: mol_type = other RNA
ttctgagctgttaatggttag

SEQ ID NO: 106820 - RNA, 21 nt, synthetic construct
  source 1..21: mol_type = other RNA
ttctgaggagctgagaccaca

SEQ ID NO: 106821 - RNA, 21 nt, synthetic construct
  source 1..21: mol_type = other RNA
ttctgaggcctcctgccttcc

SEQ ID NO: 106822 - RNA, 21 nt, synthetic construct
  source 1..21: mol_type = other RNA
ttctgagggaaattatttcca

SEQ ID NO: 106823 - RNA, 21 nt, synthetic construct
  source 1..21: mol_type = other RNA
ttctgaggtggagttctgctc

SEQ ID NO: 106824 - RNA, 21 nt, synthetic construct
  source 1..21: mol_type = other RNA
ttctgagtatattctgtgaat

SEQ ID NO: 106825 - RNA, 21 nt, synthetic construct
  source 1..21: mol_type = other RNA
ttctgagtgttacttgaaatc

SEQ ID NO: 106826 - RNA, 21 nt, synthetic construct
  source 1..21: mol_type = other RNA
ttctgatagcttgacaaaagg

SEQ ID NO: 106827 - RNA, 21 nt, synthetic construct
  source 1..21: mol_type = other RNA
ttctgataggaatatcgtctt

SEQ ID NO: 106828 - RNA, 21 nt, synthetic construct
  source 1..21: mol_type = other RNA
ttctgatatcctgtaaacctg

SEQ ID NO: 106829 - RNA, 21 nt, synthetic construct
  source 1..21: mol_type = other RNA
ttctgatcacagaagtgtttt

SEQ ID NO: 106830 - RNA, 21 nt, synthetic construct
  source 1..21: mol_type = other RNA
ttctgatgcacaagccttgaa

SEQ ID NO: 106831 - RNA, 21 nt, synthetic construct
  source 1..21: mol_type = other RNA
ttctgattgcccattataaaa

SEQ ID NO: 106832 - RNA, 21 nt, synthetic construct
  source 1..21: mol_type = other RNA
ttctgatttgctggctcagtc

SEQ ID NO: 106833 - RNA, 21 nt, synthetic construct
  source 1..21: mol_type = other RNA
ttctgcaagttgctatccagt

SEQ ID NO: 106834 - RNA, 21 nt, synthetic construct
  source 1..21: mol_type = other RNA
ttctgcaattggaagactatc

SEQ ID NO: 106835 - RNA, 21 nt, synthetic construct
  source 1..21: mol_type = other RNA
ttctgcaggctgaactgctga

SEQ ID NO: 106836 - RNA, 21 nt, synthetic construct
  source 1..21: mol_type = other RNA
ttctgcagtgaacatgggaat

SEQ ID NO: 106837 - RNA, 21 nt, synthetic construct
  source 1..21: mol_type = other RNA
ttctgcagtttgtgttttcac

SEQ ID NO: 106838 - RNA, 21 nt, synthetic construct
  source 1..21: mol_type = other RNA
ttctgcatacttagctaattt

SEQ ID NO: 106839 - RNA, 21 nt, synthetic construct
  source 1..21: mol_type = other RNA
ttctgcatagagatcttgtgt

SEQ ID NO: 106840 - RNA, 21 nt, synthetic construct
  source 1..21: mol_type = other RNA
ttctgcatcttttgagggtat

SEQ ID NO: 106841 - RNA, 21 nt, synthetic construct
  source 1..21: mol_type = other RNA
ttctgcatttggtttgcaaaa

SEQ ID NO: 106842 - RNA, 21 nt, synthetic construct
  source 1..21: mol_type = other RNA
ttctgccacattcaacaacat

SEQ ID NO: 106843 - RNA, 21 nt, synthetic construct
  source 1..21: mol_type = other RNA
ttctgcctaatctctaggctt

SEQ ID NO: 106844 - RNA, 21 nt, synthetic construct
  source 1..21: mol_type = other RNA
ttctgcctgcagactgcaggt

SEQ ID NO: 106845 - RNA, 21 nt, synthetic construct
  source 1..21: mol_type = other RNA
ttctgccttcaatgtttggta

SEQ ID NO: 106846 - RNA, 21 nt, synthetic construct
  source 1..21: mol_type = other RNA
ttctgccttgacctcccaaag

SEQ ID NO: 106847 - RNA, 21 nt, synthetic construct
  source 1..21: mol_type = other RNA
ttctgccttgaggtgattcag

SEQ ID NO: 106848 - RNA, 21 nt, synthetic construct
  source 1..21: mol_type = other RNA
ttctgcgcaattgcagccaga

SEQ ID NO: 106849 - RNA, 21 nt, synthetic construct
  source 1..21: mol_type = other RNA
ttctgcgtgttattttaatcg

SEQ ID NO: 106850 - RNA, 21 nt, synthetic construct
  source 1..21: mol_type = other RNA
ttctgctactagcaagctaat

SEQ ID NO: 106851 - RNA, 21 nt, synthetic construct
  source 1..21: mol_type = other RNA
ttctgctatgaaatgtggttt

SEQ ID NO: 106852 - RNA, 21 nt, synthetic construct
  source 1..21: mol_type = other RNA
ttctgctatgctgaaaggcat

SEQ ID NO: 106853 - RNA, 21 nt, synthetic construct
  source 1..21: mol_type = other RNA
ttctgctattctctttctgaa

SEQ ID NO: 106854 - RNA, 21 nt, synthetic construct
  source 1..21: mol_type = other RNA
ttctgctcactttgggattag

SEQ ID NO: 106855 - RNA, 21 nt, synthetic construct
  source 1..21: mol_type = other RNA
ttctgctcggctctgtcaccc

SEQ ID NO: 106856 - RNA, 21 nt, synthetic construct
  source 1..21: mol_type = other RNA
ttctgctgggcccactctccc

SEQ ID NO: 106857 - RNA, 21 nt, synthetic construct
  source 1..21: mol_type = other RNA
ttctgctgttgatggacgttt

SEQ ID NO: 106858 - RNA, 21 nt, synthetic construct
  source 1..21: mol_type = other RNA
ttctgcttaaagcctctcaac

SEQ ID NO: 106859 - RNA, 21 nt, synthetic construct
  source 1..21: mol_type = other RNA
ttctgcttagtcttctcagat

SEQ ID NO: 106860 - RNA, 21 nt, synthetic construct
  source 1..21: mol_type = other RNA
ttctgcttattatatgcctag

SEQ ID NO: 106861 - RNA, 21 nt, synthetic construct
  source 1..21: mol_type = other RNA
ttctgcttccacatttctaat

SEQ ID NO: 106862 - RNA, 21 nt, synthetic construct
  source 1..21: mol_type = other RNA
ttctgcttccttgctatgtaa

SEQ ID NO: 106863 - RNA, 21 nt, synthetic construct
  source 1..21: mol_type = other RNA
ttctgcttctcaataaggaaa

SEQ ID NO: 106864 - RNA, 21 nt, synthetic construct
  source 1..21: mol_type = other RNA
ttctgcttgaatgtgcctaca

SEQ ID NO: 106865 - RNA, 21 nt, synthetic construct
  source 1..21: mol_type = other RNA
ttctggaaactcaaacccaaa

SEQ ID NO: 106866 - RNA, 21 nt, synthetic construct
  source 1..21: mol_type = other RNA
ttctggaaagttcaaatgagg

SEQ ID NO: 106867 - RNA, 21 nt, synthetic construct
  source 1..21: mol_type = other RNA
ttctggaagatttctactggg

SEQ ID NO: 106868 - RNA, 21 nt, synthetic construct
  source 1..21: mol_type = other RNA
ttctggaagtttcctgcacat

SEQ ID NO: 106869 - RNA, 21 nt, synthetic construct
  source 1..21: mol_type = other RNA
ttctggaccacaatcttaccc

SEQ ID NO: 106870 - RNA, 21 nt, synthetic construct
  source 1..21: mol_type = other RNA
ttctggaggctagaagtccca

SEQ ID NO: 106871 - RNA, 21 nt, synthetic construct
  source 1..21: mol_type = other RNA
ttctggagtgttttcttcatg

SEQ ID NO: 106872 - RNA, 21 nt, synthetic construct
  source 1..21: mol_type = other RNA
ttctggatagcattatccctt

SEQ ID NO: 106873 - RNA, 21 nt, synthetic construct
  source 1..21: mol_type = other RNA
ttctggatgtgtatgatcaaa

SEQ ID NO: 106874 - RNA, 21 nt, synthetic construct
  source 1..21: mol_type = other RNA
ttctggccaaatccctgatca

SEQ ID NO: 106875 - RNA, 21 nt, synthetic construct
  source 1..21: mol_type = other RNA
ttctgggagttcattagaatt

SEQ ID NO: 106876 - RNA, 21 nt, synthetic construct
  source 1..21: mol_type = other RNA
ttctgggctctctattccaaa

SEQ ID NO: 106877 - RNA, 21 nt, synthetic construct
  source 1..21: mol_type = other RNA
ttctggggatgctgtctatag

SEQ ID NO: 106878 - RNA, 21 nt, synthetic construct
  source 1..21: mol_type = other RNA
ttctggggctcaagtaagtga

SEQ ID NO: 106879 - RNA, 21 nt, synthetic construct
  source 1..21: mol_type = other RNA
ttctggggttcaaaccaccta

SEQ ID NO: 106880 - RNA, 21 nt, synthetic construct
  source 1..21: mol_type = other RNA
ttctggtgtcgtttatttctt

SEQ ID NO: 106881 - RNA, 21 nt, synthetic construct
  source 1..21: mol_type = other RNA
ttctggttttctggaggctag

SEQ ID NO: 106882 - RNA, 21 nt, synthetic construct
  source 1..21: mol_type = other RNA
ttctgtaaacatgaacaagtt

SEQ ID NO: 106883 - RNA, 21 nt, synthetic construct
  source 1..21: mol_type = other RNA
ttctgtaatgtttgtacttct

SEQ ID NO: 106884 - RNA, 21 nt, synthetic construct
  source 1..21: mol_type = other RNA
ttctgtacccttacgcgtgga

SEQ ID NO: 106885 - RNA, 21 nt, synthetic construct
  source 1..21: mol_type = other RNA
ttctgtagaatatccaagcac

SEQ ID NO: 106886 - RNA, 21 nt, synthetic construct
  source 1..21: mol_type = other RNA
ttctgtatcttttcagtccag

SEQ ID NO: 106887 - RNA, 21 nt, synthetic construct
  source 1..21: mol_type = other RNA
ttctgtcacatagacctgaat

SEQ ID NO: 106888 - RNA, 21 nt, synthetic construct
  source 1..21: mol_type = other RNA
ttctgtcacatttgaaagaaa

SEQ ID NO: 106889 - RNA, 21 nt, synthetic construct
  source 1..21: mol_type = other RNA
ttctgtcacggtgccctacat

SEQ ID NO: 106890 - RNA, 21 nt, synthetic construct
  source 1..21: mol_type = other RNA
ttctgtcatctgaatcaataa

SEQ ID NO: 106891 - RNA, 21 nt, synthetic construct
  source 1..21: mol_type = other RNA
ttctgtcattctgcagtttgt

SEQ ID NO: 106892 - RNA, 21 nt, synthetic construct
  source 1..21: mol_type = other RNA
ttctgtccttggattgctaaa

SEQ ID NO: 106893 - RNA, 21 nt, synthetic construct
  source 1..21: mol_type = other RNA
ttctgtctctacaaaaaagta

SEQ ID NO: 106894 - RNA, 21 nt, synthetic construct
  source 1..21: mol_type = other RNA
ttctgtgaattgtgacagttc

SEQ ID NO: 106895 - RNA, 21 nt, synthetic construct
  source 1..21: mol_type = other RNA
ttctgtgatcagaagagcact

SEQ ID NO: 106896 - RNA, 21 nt, synthetic construct
  source 1..21: mol_type = other RNA
ttctgtgccaagcaacttgat

SEQ ID NO: 106897 - RNA, 21 nt, synthetic construct
  source 1..21: mol_type = other RNA
ttctgtgctagatgctaaaca

SEQ ID NO: 106898 - RNA, 21 nt, synthetic construct
  source 1..21: mol_type = other RNA
ttctgtgcttaaatttttgag

SEQ ID NO: 106899 - RNA, 21 nt, synthetic construct
  source 1..21: mol_type = other RNA
ttctgtgtaatactgtagaat

SEQ ID NO: 106900 - RNA, 21 nt, synthetic construct
  source 1..21: mol_type = other RNA
ttctgtgtttatgaatgatgc

SEQ ID NO: 106901 - RNA, 21 nt, synthetic construct
  source 1..21: mol_type = other RNA
ttctgttaatagataggtcat

SEQ ID NO: 106902 - RNA, 21 nt, synthetic construct
  source 1..21: mol_type = other RNA
ttctgttaatgtgatatgcca

SEQ ID NO: 106903 - RNA, 21 nt, synthetic construct
  source 1..21: mol_type = other RNA
ttctgttagatggtgctgatt

SEQ ID NO: 106904 - RNA, 21 nt, synthetic construct
  source 1..21: mol_type = other RNA
ttctgttccatcggtctgtat

SEQ ID NO: 106905 - RNA, 21 nt, synthetic construct
  source 1..21: mol_type = other RNA
ttctgttctagctcctgggaa

SEQ ID NO: 106906 - RNA, 21 nt, synthetic construct
  source 1..21: mol_type = other RNA
ttctgttctcagtatcctttc

SEQ ID NO: 106907 - RNA, 21 nt, synthetic construct
  source 1..21: mol_type = other RNA
ttctgttgcaaattattttcc

SEQ ID NO: 106908 - RNA, 21 nt, synthetic construct
  source 1..21: mol_type = other RNA
ttctgttgcttaagtcactcc

SEQ ID NO: 106909 - RNA, 21 nt, synthetic construct
  source 1..21: mol_type = other RNA
ttctgttggagagatggtagt

SEQ ID NO: 106910 - RNA, 21 nt, synthetic construct
  source 1..21: mol_type = other RNA
ttctgtttacccttactaaat

SEQ ID NO: 106911 - RNA, 21 nt, synthetic construct
  source 1..21: mol_type = other RNA
ttctgtttctgtgaaaaaaca

SEQ ID NO: 106912 - RNA, 21 nt, synthetic construct
  source 1..21: mol_type = other RNA
ttctgtttggatgaaaaagta

SEQ ID NO: 106913 - RNA, 21 nt, synthetic construct
  source 1..21: mol_type = other RNA
ttctgtttgtttgttttgaga

SEQ ID NO: 106914 - RNA, 21 nt, synthetic construct
  source 1..21: mol_type = other RNA
ttctgtttttcttagtctagc

SEQ ID NO: 106915 - RNA, 21 nt, synthetic construct
  source 1..21: mol_type = other RNA
ttcttaaaactttaggtcaga

SEQ ID NO: 106916 - RNA, 21 nt, synthetic construct
  source 1..21: mol_type = other RNA
ttcttaaactgccaaacccta

SEQ ID NO: 106917 - RNA, 21 nt, synthetic construct
  source 1..21: mol_type = other RNA
ttcttaagacatttgggaatg

SEQ ID NO: 106918 - RNA, 21 nt, synthetic construct
  source 1..21: mol_type = other RNA
ttcttacacattaggctctgg

SEQ ID NO: 106919 - RNA, 21 nt, synthetic construct
  source 1..21: mol_type = other RNA
ttcttacagtgacatatgccg

SEQ ID NO: 106920 - RNA, 21 nt, synthetic construct
  source 1..21: mol_type = other RNA
ttcttaccctcacagtcacaa

SEQ ID NO: 106921 - RNA, 21 nt, synthetic construct
  source 1..21: mol_type = other RNA
ttcttaccctttactcagatt

SEQ ID NO: 106922 - RNA, 21 nt, synthetic construct
  source 1..21: mol_type = other RNA
ttcttacctaagcatcgtgaa

SEQ ID NO: 106923 - RNA, 21 nt, synthetic construct
  source 1..21: mol_type = other RNA
ttcttacctcaaaggagagaa

SEQ ID NO: 106924 - RNA, 21 nt, synthetic construct
  source 1..21: mol_type = other RNA
ttcttaccttctaaaatcatc

SEQ ID NO: 106925 - RNA, 21 nt, synthetic construct
  source 1..21: mol_type = other RNA
ttcttaggaagctatggagca

SEQ ID NO: 106926 - RNA, 21 nt, synthetic construct
  source 1..21: mol_type = other RNA
ttcttaggtttctcatttttc

SEQ ID NO: 106927 - RNA, 21 nt, synthetic construct
  source 1..21: mol_type = other RNA
ttcttagtaaatatccgaaag

SEQ ID NO: 106928 - RNA, 21 nt, synthetic construct
  source 1..21: mol_type = other RNA
ttcttagtgttcccttcttaa

SEQ ID NO: 106929 - RNA, 21 nt, synthetic construct
  source 1..21: mol_type = other RNA
ttcttagttccattattccat

SEQ ID NO: 106930 - RNA, 21 nt, synthetic construct
  source 1..21: mol_type = other RNA
ttcttatccctacctaaaaag

SEQ ID NO: 106931 - RNA, 21 nt, synthetic construct
  source 1..21: mol_type = other RNA
ttcttatctaggcgaaatatc

SEQ ID NO: 106932 - RNA, 21 nt, synthetic construct
  source 1..21: mol_type = other RNA
ttcttattgattcagatgaca

SEQ ID NO: 106933 - RNA, 21 nt, synthetic construct
  source 1..21: mol_type = other RNA
ttcttattggttatctgtact

SEQ ID NO: 106934 - RNA, 21 nt, synthetic construct
  source 1..21: mol_type = other RNA
ttcttatttccttccagttta

SEQ ID NO: 106935 - RNA, 21 nt, synthetic construct
  source 1..21: mol_type = other RNA
ttcttatttgttactgatctg

SEQ ID NO: 106936 - RNA, 21 nt, synthetic construct
  source 1..21: mol_type = other RNA
ttcttattttttcccagatac

SEQ ID NO: 106937 - RNA, 21 nt, synthetic construct
  source 1..21: mol_type = other RNA
ttcttcaaaagacatcactaa

SEQ ID NO: 106938 - RNA, 21 nt, synthetic construct
  source 1..21: mol_type = other RNA
ttcttcaaccatacttttcaa

SEQ ID NO: 106939 - RNA, 21 nt, synthetic construct
  source 1..21: mol_type = other RNA
ttcttcaagatactgcactaa

SEQ ID NO: 106940 - RNA, 21 nt, synthetic construct
  source 1..21: mol_type = other RNA
ttcttcacacattaactatgg

SEQ ID NO: 106941 - RNA, 21 nt, synthetic construct
  source 1..21: mol_type = other RNA
ttcttcaccattccagccatt

SEQ ID NO: 106942 - RNA, 21 nt, synthetic construct
  source 1..21: mol_type = other RNA
ttcttcaccgtgcaactagag

SEQ ID NO: 106943 - RNA, 21 nt, synthetic construct
  source 1..21: mol_type = other RNA
ttcttcactcttaaaaggaga

SEQ ID NO: 106944 - RNA, 21 nt, synthetic construct
  source 1..21: mol_type = other RNA
ttcttcagaagaaattacttc

SEQ ID NO: 106945 - RNA, 21 nt, synthetic construct
  source 1..21: mol_type = other RNA
ttcttcagcaaggaccattag

SEQ ID NO: 106946 - RNA, 21 nt, synthetic construct
  source 1..21: mol_type = other RNA
ttcttcatcagtccctgtgtt

SEQ ID NO: 106947 - RNA, 21 nt, synthetic construct
  source 1..21: mol_type = other RNA
ttcttcatggactagactgcc

SEQ ID NO: 106948 - RNA, 21 nt, synthetic construct
  source 1..21: mol_type = other RNA
ttcttccactagtgggatcaa

SEQ ID NO: 106949 - RNA, 21 nt, synthetic construct
  source 1..21: mol_type = other RNA
ttcttccagcctggtaatgaa

SEQ ID NO: 106950 - RNA, 21 nt, synthetic construct
  source 1..21: mol_type = other RNA
ttcttcccatctcactcacct

SEQ ID NO: 106951 - RNA, 21 nt, synthetic construct
  source 1..21: mol_type = other RNA
ttcttcctgtcttggacccat

SEQ ID NO: 106952 - RNA, 21 nt, synthetic construct
  source 1..21: mol_type = other RNA
ttcttccttaatgtttagtag

SEQ ID NO: 106953 - RNA, 21 nt, synthetic construct
  source 1..21: mol_type = other RNA
ttcttctaagctaagagtttt

SEQ ID NO: 106954 - RNA, 21 nt, synthetic construct
  source 1..21: mol_type = other RNA
ttcttctaataggaagtggct

SEQ ID NO: 106955 - RNA, 21 nt, synthetic construct
  source 1..21: mol_type = other RNA
ttcttctagtcacatttgctt

SEQ ID NO: 106956 - RNA, 21 nt, synthetic construct
  source 1..21: mol_type = other RNA
ttcttctccctcttcgctctt

SEQ ID NO: 106957 - RNA, 21 nt, synthetic construct
  source 1..21: mol_type = other RNA
ttcttctctaatgtaaacagc

SEQ ID NO: 106958 - RNA, 21 nt, synthetic construct
  source 1..21: mol_type = other RNA
ttcttctgaagaaattatctg

SEQ ID NO: 106959 - RNA, 21 nt, synthetic construct
  source 1..21: mol_type = other RNA
ttcttctgttggagagatggt

SEQ ID NO: 106960 - RNA, 21 nt, synthetic construct
  source 1..21: mol_type = other RNA
ttcttcttgttttgttctcgt

SEQ ID NO: 106961 - RNA, 21 nt, synthetic construct
  source 1..21: mol_type = other RNA
ttcttctttggctcaatggtt

SEQ ID NO: 106962 - RNA, 21 nt, synthetic construct
  source 1..21: mol_type = other RNA
ttcttgaatctctctatccac

SEQ ID NO: 106963 - RNA, 21 nt, synthetic construct
  source 1..21: mol_type = other RNA
ttcttgacatgattgaggact

SEQ ID NO: 106964 - RNA, 21 nt, synthetic construct
  source 1..21: mol_type = other RNA
ttcttgacctcaaatgatcca

SEQ ID NO: 106965 - RNA, 21 nt, synthetic construct
  source 1..21: mol_type = other RNA
ttcttgacctcagtggtagtt

SEQ ID NO: 106966 - RNA, 21 nt, synthetic construct
  source 1..21: mol_type = other RNA
ttcttgagagtctcttaagac

SEQ ID NO: 106967 - RNA, 21 nt, synthetic construct
  source 1..21: mol_type = other RNA
ttcttgctttgctgccccagc

SEQ ID NO: 106968 - RNA, 21 nt, synthetic construct
  source 1..21: mol_type = other RNA
ttcttggaaattagaaatgtg

SEQ ID NO: 106969 - RNA, 21 nt, synthetic construct
  source 1..21: mol_type = other RNA
ttcttggagtaaacctgcaat

SEQ ID NO: 106970 - RNA, 21 nt, synthetic construct
  source 1..21: mol_type = other RNA
ttcttggggctctaatgcaag

SEQ ID NO: 106971 - RNA, 21 nt, synthetic construct
  source 1..21: mol_type = other RNA
ttcttgggtgaataacccata

SEQ ID NO: 106972 - RNA, 21 nt, synthetic construct
  source 1..21: mol_type = other RNA
ttcttggtctgcagactcttg

SEQ ID NO: 106973 - RNA, 21 nt, synthetic construct
  source 1..21: mol_type = other RNA
ttcttggtggtaactgatgtg

SEQ ID NO: 106974 - RNA, 21 nt, synthetic construct
  source 1..21: mol_type = other RNA
ttcttgtcatgaatgaatgtt

SEQ ID NO: 106975 - RNA, 21 nt, synthetic construct
  source 1..21: mol_type = other RNA
ttcttgtgggtattttgttgt

SEQ ID NO: 106976 - RNA, 21 nt, synthetic construct
  source 1..21: mol_type = other RNA
ttcttgttaagcattttccgg

SEQ ID NO: 106977 - RNA, 21 nt, synthetic construct
  source 1..21: mol_type = other RNA
ttcttgttagtaggaaaacca

SEQ ID NO: 106978 - RNA, 21 nt, synthetic construct
  source 1..21: mol_type = other RNA
ttcttgttttcttgagatgga

SEQ ID NO: 106979 - RNA, 21 nt, synthetic construct
  source 1..21: mol_type = other RNA
ttcttgttttgttctcgttca

SEQ ID NO: 106980 - RNA, 21 nt, synthetic construct
  source 1..21: mol_type = other RNA
ttctttaaaaccagagcggaa

SEQ ID NO: 106981 - RNA, 21 nt, synthetic construct
  source 1..21: mol_type = other RNA
ttctttaaaactgctgagtct

SEQ ID NO: 106982 - RNA, 21 nt, synthetic construct
  source 1..21: mol_type = other RNA
ttctttcaaatgtgacagaac

SEQ ID NO: 106983 - RNA, 21 nt, synthetic construct
  source 1..21: mol_type = other RNA
ttctttccattcaatccttgt

SEQ ID NO: 106984 - RNA, 21 nt, synthetic construct
  source 1..21: mol_type = other RNA
ttctttcgcatcattcaaatg

SEQ ID NO: 106985 - RNA, 21 nt, synthetic construct
  source 1..21: mol_type = other RNA
ttctttcggatatttactaag

SEQ ID NO: 106986 - RNA, 21 nt, synthetic construct
  source 1..21: mol_type = other RNA
ttctttctctttcagccatcc

SEQ ID NO: 106987 - RNA, 21 nt, synthetic construct
  source 1..21: mol_type = other RNA
ttctttctttcaaatgtgaca

SEQ ID NO: 106988 - RNA, 21 nt, synthetic construct
  source 1..21: mol_type = other RNA
ttctttgagtagttcatgtta

SEQ ID NO: 106989 - RNA, 21 nt, synthetic construct
  source 1..21: mol_type = other RNA
ttctttggagctgtatttttg

SEQ ID NO: 106990 - RNA, 21 nt, synthetic construct
  source 1..21: mol_type = other RNA
ttctttggctcaatggttaag

SEQ ID NO: 106991 - RNA, 21 nt, synthetic construct
  source 1..21: mol_type = other RNA
ttctttggctgttagccttgc

SEQ ID NO: 106992 - RNA, 21 nt, synthetic construct
  source 1..21: mol_type = other RNA
ttctttgggggaagcaggaac

SEQ ID NO: 106993 - RNA, 21 nt, synthetic construct
  source 1..21: mol_type = other RNA
ttctttggttttgactcagta

SEQ ID NO: 106994 - RNA, 21 nt, synthetic construct
  source 1..21: mol_type = other RNA
ttcttttaaagacctcaggtt

SEQ ID NO: 106995 - RNA, 21 nt, synthetic construct
  source 1..21: mol_type = other RNA
ttcttttaaatgccaatttgg

SEQ ID NO: 106996 - RNA, 21 nt, synthetic construct
  source 1..21: mol_type = other RNA
ttcttttacttgcttggtttc

SEQ ID NO: 106997 - RNA, 21 nt, synthetic construct
  source 1..21: mol_type = other RNA
ttcttttagagtaactgtcat

SEQ ID NO: 106998 - RNA, 21 nt, synthetic construct
  source 1..21: mol_type = other RNA
ttcttttcacataaatttgcc

SEQ ID NO: 106999 - RNA, 21 nt, synthetic construct
  source 1..21: mol_type = other RNA
ttcttttcactctaatatggt

SEQ ID NO: 107000 - RNA, 21 nt, synthetic construct
  source 1..21: mol_type = other RNA
ttcttttccaaccaagcccaa

SEQ ID NO: 107001 - RNA, 21 nt, synthetic construct
  source 1..21: mol_type = other RNA
ttcttttccttcttaagacat

SEQ ID NO: 107002 - RNA, 21 nt, synthetic construct
  source 1..21: mol_type = other RNA
ttcttttgctgtatacccagg

SEQ ID NO: 107003 - RNA, 21 nt, synthetic construct
  source 1..21: mol_type = other RNA
ttcttttgtgggtaaattaag

SEQ ID NO: 107004 - RNA, 21 nt, synthetic construct
  source 1..21: mol_type = other RNA
ttcttttgttgcctgtagttt

SEQ ID NO: 107005 - RNA, 21 nt, synthetic construct
  source 1..21: mol_type = other RNA
ttctttttaaacaggtgtaag

SEQ ID NO: 107006 - RNA, 21 nt, synthetic construct
  source 1..21: mol_type = other RNA
ttctttttactcatgtctacc

SEQ ID NO: 107007 - RNA, 21 nt, synthetic construct
  source 1..21: mol_type = other RNA
ttctttttactcgagggtagc

SEQ ID NO: 107008 - RNA, 21 nt, synthetic construct
  source 1..21: mol_type = other RNA
ttctttttagtaagaggtatc

SEQ ID NO: 107009 - RNA, 21 nt, synthetic construct
  source 1..21: mol_type = other RNA
ttctttttctagtttgaggtg

SEQ ID NO: 107010 - RNA, 21 nt, synthetic construct
  source 1..21: mol_type = other RNA
ttctttttcttgctttgctgc

SEQ ID NO: 107011 - RNA, 21 nt, synthetic construct
  source 1..21: mol_type = other RNA
ttctttttgttttctccttct

SEQ ID NO: 107012 - RNA, 21 nt, synthetic construct
  source 1..21: mol_type = other RNA
ttgaaaaaacttcccttagct

SEQ ID NO: 107013 - RNA, 21 nt, synthetic construct
  source 1..21: mol_type = other RNA
ttgaaaaacagatcttggccg

SEQ ID NO: 107014 - RNA, 21 nt, synthetic construct
  source 1..21: mol_type = other RNA
ttgaaaaaggaaagtaactgt

SEQ ID NO: 107015 - RNA, 21 nt, synthetic construct
  source 1..21: mol_type = other RNA
ttgaaaaatgtcaattttccc

SEQ ID NO: 107016 - RNA, 21 nt, synthetic construct
  source 1..21: mol_type = other RNA
ttgaaaacgaggaaaagagaa

SEQ ID NO: 107017 - RNA, 21 nt, synthetic construct
  source 1..21: mol_type = other RNA
ttgaaaactcaactgcctcta

SEQ ID NO: 107018 - RNA, 21 nt, synthetic construct
  source 1..21: mol_type = other RNA
ttgaaaagaacaacatggtag

SEQ ID NO: 107019 - RNA, 21 nt, synthetic construct
  source 1..21: mol_type = other RNA
ttgaaaagctcaaaaatactc

SEQ ID NO: 107020 - RNA, 21 nt, synthetic construct
  source 1..21: mol_type = other RNA
ttgaaaagtatggttgaagaa

SEQ ID NO: 107021 - RNA, 21 nt, synthetic construct
  source 1..21: mol_type = other RNA
ttgaaaagtgtttgtcacata

SEQ ID NO: 107022 - RNA, 21 nt, synthetic construct
  source 1..21: mol_type = other RNA
ttgaaaatggtttaggctgtc

SEQ ID NO: 107023 - RNA, 21 nt, synthetic construct
  source 1..21: mol_type = other RNA
ttgaaacctgccatggtgtta

SEQ ID NO: 107024 - RNA, 21 nt, synthetic construct
  source 1..21: mol_type = other RNA
ttgaaacgatgcattccagat

SEQ ID NO: 107025 - RNA, 21 nt, synthetic construct
  source 1..21: mol_type = other RNA
ttgaaactcaatgttggttag

SEQ ID NO: 107026 - RNA, 21 nt, synthetic construct
  source 1..21: mol_type = other RNA
ttgaaactgagcatcccagag

SEQ ID NO: 107027 - RNA, 21 nt, synthetic construct
  source 1..21: mol_type = other RNA
ttgaaagaaagaaggccattt

SEQ ID NO: 107028 - RNA, 21 nt, synthetic construct
  source 1..21: mol_type = other RNA
ttgaaagcccttgagtatttt

SEQ ID NO: 107029 - RNA, 21 nt, synthetic construct
  source 1..21: mol_type = other RNA
ttgaaaggaatccggctttat

SEQ ID NO: 107030 - RNA, 21 nt, synthetic construct
  source 1..21: mol_type = other RNA
ttgaaaggatactgagaacag

SEQ ID NO: 107031 - RNA, 21 nt, synthetic construct
  source 1..21: mol_type = other RNA
ttgaaaggggccaggtgtgga

SEQ ID NO: 107032 - RNA, 21 nt, synthetic construct
  source 1..21: mol_type = other RNA
ttgaaagttcagaataccaga

SEQ ID NO: 107033 - RNA, 21 nt, synthetic construct
  source 1..21: mol_type = other RNA
ttgaaatcagaacttgacaag

SEQ ID NO: 107034 - RNA, 21 nt, synthetic construct
  source 1..21: mol_type = other RNA
ttgaaatcaggaagtatgagt

SEQ ID NO: 107035 - RNA, 21 nt, synthetic construct
  source 1..21: mol_type = other RNA
ttgaaatttaaagacgttcag

SEQ ID NO: 107036 - RNA, 21 nt, synthetic construct
  source 1..21: mol_type = other RNA
ttgaacaagagcgtcgtacct

SEQ ID NO: 107037 - RNA, 21 nt, synthetic construct
  source 1..21: mol_type = other RNA
ttgaacactctgcaattttaa

SEQ ID NO: 107038 - RNA, 21 nt, synthetic construct
  source 1..21: mol_type = other RNA
ttgaacagcctaaagtccaca

SEQ ID NO: 107039 - RNA, 21 nt, synthetic construct
  source 1..21: mol_type = other RNA
ttgaacatcacccagctcgac

SEQ ID NO: 107040 - RNA, 21 nt, synthetic construct
  source 1..21: mol_type = other RNA
ttgaacatgaacgagaacaaa

SEQ ID NO: 107041 - RNA, 21 nt, synthetic construct
  source 1..21: mol_type = other RNA
ttgaacattctgtagaagtaa

SEQ ID NO: 107042 - RNA, 21 nt, synthetic construct
  source 1..21: mol_type = other RNA
ttgaacccactgagcatttat

SEQ ID NO: 107043 - RNA, 21 nt, synthetic construct
  source 1..21: mol_type = other RNA
ttgaaccccagaaggttaact

SEQ ID NO: 107044 - RNA, 21 nt, synthetic construct
  source 1..21: mol_type = other RNA
ttgaacccgaggtgcacaagg

SEQ ID NO: 107045 - RNA, 21 nt, synthetic construct
  source 1..21: mol_type = other RNA
ttgaacctgaaaaacggaggt

SEQ ID NO: 107046 - RNA, 21 nt, synthetic construct
  source 1..21: mol_type = other RNA
ttgaaccttcctcttcctcat

SEQ ID NO: 107047 - RNA, 21 nt, synthetic construct
  source 1..21: mol_type = other RNA
ttgaacgaatgaaaacacaac

SEQ ID NO: 107048 - RNA, 21 nt, synthetic construct
  source 1..21: mol_type = other RNA
ttgaactaagtgtgaagatta

SEQ ID NO: 107049 - RNA, 21 nt, synthetic construct
  source 1..21: mol_type = other RNA
ttgaactcactggccagcatt

SEQ ID NO: 107050 - RNA, 21 nt, synthetic construct
  source 1..21: mol_type = other RNA
ttgaactgctggtctggaatg

SEQ ID NO: 107051 - RNA, 21 nt, synthetic construct
  source 1..21: mol_type = other RNA
ttgaactgggacttctagcct

SEQ ID NO: 107052 - RNA, 21 nt, synthetic construct
  source 1..21: mol_type = other RNA
ttgaactgttacttgactatt

SEQ ID NO: 107053 - RNA, 21 nt, synthetic construct
  source 1..21: mol_type = other RNA
ttgaactttccagaagtaact

SEQ ID NO: 107054 - RNA, 21 nt, synthetic construct
  source 1..21: mol_type = other RNA
ttgaagaaaccaagagcatag

SEQ ID NO: 107055 - RNA, 21 nt, synthetic construct
  source 1..21: mol_type = other RNA
ttgaagaaagttttgcagttg

SEQ ID NO: 107056 - RNA, 21 nt, synthetic construct
  source 1..21: mol_type = other RNA
ttgaagacctgcagtctgcag

SEQ ID NO: 107057 - RNA, 21 nt, synthetic construct
  source 1..21: mol_type = other RNA
ttgaagagcgcttctatgtga

SEQ ID NO: 107058 - RNA, 21 nt, synthetic construct
  source 1..21: mol_type = other RNA
ttgaagagggaacattttcat

SEQ ID NO: 107059 - RNA, 21 nt, synthetic construct
  source 1..21: mol_type = other RNA
ttgaagatggcaaacagactg

SEQ ID NO: 107060 - RNA, 21 nt, synthetic construct
  source 1..21: mol_type = other RNA
ttgaagccagcacctaacaat

SEQ ID NO: 107061 - RNA, 21 nt, synthetic construct
  source 1..21: mol_type = other RNA
ttgaagctactattccaggat

SEQ ID NO: 107062 - RNA, 21 nt, synthetic construct
  source 1..21: mol_type = other RNA
ttgaagctctagtgagctatg

SEQ ID NO: 107063 - RNA, 21 nt, synthetic construct
  source 1..21: mol_type = other RNA
ttgaagcttcacttctctgct

SEQ ID NO: 107064 - RNA, 21 nt, synthetic construct
  source 1..21: mol_type = other RNA
ttgaaggcaatgtagggaata

SEQ ID NO: 107065 - RNA, 21 nt, synthetic construct
  source 1..21: mol_type = other RNA
ttgaaggcagaattatagagg

SEQ ID NO: 107066 - RNA, 21 nt, synthetic construct
  source 1..21: mol_type = other RNA
ttgaagtacttcagcgcttga

SEQ ID NO: 107067 - RNA, 21 nt, synthetic construct
  source 1..21: mol_type = other RNA
ttgaagtatgtaattacaggg

SEQ ID NO: 107068 - RNA, 21 nt, synthetic construct
  source 1..21: mol_type = other RNA
ttgaagtcagttacagcattt

SEQ ID NO: 107069 - RNA, 21 nt, synthetic construct
  source 1..21: mol_type = other RNA
ttgaagtctttggcccatttt

SEQ ID NO: 107070 - RNA, 21 nt, synthetic construct
  source 1..21: mol_type = other RNA
ttgaataaagggtcagaattt

SEQ ID NO: 107071 - RNA, 21 nt, synthetic construct
  source 1..21: mol_type = other RNA
ttgaataacctcataagaact

SEQ ID NO: 107072 - RNA, 21 nt, synthetic construct
  source 1..21: mol_type = other RNA
ttgaataaggtctgtaagtca

SEQ ID NO: 107073 - RNA, 21 nt, synthetic construct
  source 1..21: mol_type = other RNA
ttgaataatttccaggtcatt

SEQ ID NO: 107074 - RNA, 21 nt, synthetic construct
  source 1..21: mol_type = other RNA
ttgaatactcgtgtgtctcat

SEQ ID NO: 107075 - RNA, 21 nt, synthetic construct
  source 1..21: mol_type = other RNA
ttgaatagcaactgttttttc

SEQ ID NO: 107076 - RNA, 21 nt, synthetic construct
  source 1..21: mol_type = other RNA
ttgaatagcatcttagctctt

SEQ ID NO: 107077 - RNA, 21 nt, synthetic construct
  source 1..21: mol_type = other RNA
ttgaatagggcctcaaatttc

SEQ ID NO: 107078 - RNA, 21 nt, synthetic construct
  source 1..21: mol_type = other RNA
ttgaatcatgggagccaaact

SEQ ID NO: 107079 - RNA, 21 nt, synthetic construct
  source 1..21: mol_type = other RNA
ttgaatctctctatccaccac

SEQ ID NO: 107080 - RNA, 21 nt, synthetic construct
  source 1..21: mol_type = other RNA
ttgaatgatgcgaaagaaaaa

SEQ ID NO: 107081 - RNA, 21 nt, synthetic construct
  source 1..21: mol_type = other RNA
ttgaatggaaagaaatagaac

SEQ ID NO: 107082 - RNA, 21 nt, synthetic construct
  source 1..21: mol_type = other RNA
ttgaatggggatgcaacaaat

SEQ ID NO: 107083 - RNA, 21 nt, synthetic construct
  source 1..21: mol_type = other RNA
ttgaatgtgcctacatagtcc

SEQ ID NO: 107084 - RNA, 21 nt, synthetic construct
  source 1..21: mol_type = other RNA
ttgaatgtggcagaatttaca

SEQ ID NO: 107085 - RNA, 21 nt, synthetic construct
  source 1..21: mol_type = other RNA
ttgaattaagcaccactagag

SEQ ID NO: 107086 - RNA, 21 nt, synthetic construct
  source 1..21: mol_type = other RNA
ttgaattcagatggccccaaa

SEQ ID NO: 107087 - RNA, 21 nt, synthetic construct
  source 1..21: mol_type = other RNA
ttgaattgttgcgcgtcaaaa

SEQ ID NO: 107088 - RNA, 21 nt, synthetic construct
  source 1..21: mol_type = other RNA
ttgaattgttggagttcttta

SEQ ID NO: 107089 - RNA, 21 nt, synthetic construct
  source 1..21: mol_type = other RNA
ttgaatttaagacacaaggaa

SEQ ID NO: 107090 - RNA, 21 nt, synthetic construct
  source 1..21: mol_type = other RNA
ttgaatttctgtccttggatt

SEQ ID NO: 107091 - RNA, 21 nt, synthetic construct
  source 1..21: mol_type = other RNA
ttgaatttggaaagggtagag

SEQ ID NO: 107092 - RNA, 21 nt, synthetic construct
  source 1..21: mol_type = other RNA
ttgaattttccattcacacac

SEQ ID NO: 107093 - RNA, 21 nt, synthetic construct
  source 1..21: mol_type = other RNA
ttgacaaaaggccccttgaaa

SEQ ID NO: 107094 - RNA, 21 nt, synthetic construct
  source 1..21: mol_type = other RNA
ttgacaagacgtgtacataaa

SEQ ID NO: 107095 - RNA, 21 nt, synthetic construct
  source 1..21: mol_type = other RNA
ttgacaataaatggtgcaggc

SEQ ID NO: 107096 - RNA, 21 nt, synthetic construct
  source 1..21: mol_type = other RNA
ttgacaatataggagactatc

SEQ ID NO: 107097 - RNA, 21 nt, synthetic construct
  source 1..21: mol_type = other RNA
ttgacacaaaggactggaact

SEQ ID NO: 107098 - RNA, 21 nt, synthetic construct
  source 1..21: mol_type = other RNA
ttgacagatgagactcttaat

SEQ ID NO: 107099 - RNA, 21 nt, synthetic construct
  source 1..21: mol_type = other RNA
ttgacagccacgtgtattgag

SEQ ID NO: 107100 - RNA, 21 nt, synthetic construct
  source 1..21: mol_type = other RNA
ttgacatcctttaatttgggt

SEQ ID NO: 107101 - RNA, 21 nt, synthetic construct
  source 1..21: mol_type = other RNA
ttgacatcctttgcgtctgtg

SEQ ID NO: 107102 - RNA, 21 nt, synthetic construct
  source 1..21: mol_type = other RNA
ttgacatcttgcataactcgt

SEQ ID NO: 107103 - RNA, 21 nt, synthetic construct
  source 1..21: mol_type = other RNA
ttgacatgacaggtgagtgga

SEQ ID NO: 107104 - RNA, 21 nt, synthetic construct
  source 1..21: mol_type = other RNA
ttgacatgattgaggacttca

SEQ ID NO: 107105 - RNA, 21 nt, synthetic construct
  source 1..21: mol_type = other RNA
ttgacattcttaccttctaaa

SEQ ID NO: 107106 - RNA, 21 nt, synthetic construct
  source 1..21: mol_type = other RNA
ttgaccaaacatgtgaggatt

SEQ ID NO: 107107 - RNA, 21 nt, synthetic construct
  source 1..21: mol_type = other RNA
ttgaccatgggacaagtgggt

SEQ ID NO: 107108 - RNA, 21 nt, synthetic construct
  source 1..21: mol_type = other RNA
ttgaccattccacgctgtggc

SEQ ID NO: 107109 - RNA, 21 nt, synthetic construct
  source 1..21: mol_type = other RNA
ttgacccaatcatgttcttta

SEQ ID NO: 107110 - RNA, 21 nt, synthetic construct
  source 1..21: mol_type = other RNA
ttgacccataaactgaacatt

SEQ ID NO: 107111 - RNA, 21 nt, synthetic construct
  source 1..21: mol_type = other RNA
ttgaccgctttcgtgagggtt

SEQ ID NO: 107112 - RNA, 21 nt, synthetic construct
  source 1..21: mol_type = other RNA
ttgacctcagtggtagttaca

SEQ ID NO: 107113 - RNA, 21 nt, synthetic construct
  source 1..21: mol_type = other RNA
ttgacctcccaaaggactggg

SEQ ID NO: 107114 - RNA, 21 nt, synthetic construct
  source 1..21: mol_type = other RNA
ttgacctgtaatttttctctt

SEQ ID NO: 107115 - RNA, 21 nt, synthetic construct
  source 1..21: mol_type = other RNA
ttgaccttagtggttgaccca

SEQ ID NO: 107116 - RNA, 21 nt, synthetic construct
  source 1..21: mol_type = other RNA
ttgaccttagttttcactttt

SEQ ID NO: 107117 - RNA, 21 nt, synthetic construct
  source 1..21: mol_type = other RNA
ttgaccttccttgtgtcttaa

SEQ ID NO: 107118 - RNA, 21 nt, synthetic construct
  source 1..21: mol_type = other RNA
ttgaccttctacttatctttt

SEQ ID NO: 107119 - RNA, 21 nt, synthetic construct
  source 1..21: mol_type = other RNA
ttgaccttgtatccagtaatc

SEQ ID NO: 107120 - RNA, 21 nt, synthetic construct
  source 1..21: mol_type = other RNA
ttgaccttgtgcatgtgcagg

SEQ ID NO: 107121 - RNA, 21 nt, synthetic construct
  source 1..21: mol_type = other RNA
ttgacgaagtcacattctagt

SEQ ID NO: 107122 - RNA, 21 nt, synthetic construct
  source 1..21: mol_type = other RNA
ttgacgcgcaacaattcaaca

SEQ ID NO: 107123 - RNA, 21 nt, synthetic construct
  source 1..21: mol_type = other RNA
ttgactaccaattctccctga

SEQ ID NO: 107124 - RNA, 21 nt, synthetic construct
  source 1..21: mol_type = other RNA
ttgactaccatctctccaaca

SEQ ID NO: 107125 - RNA, 21 nt, synthetic construct
  source 1..21: mol_type = other RNA
ttgactattttaccctcattt

SEQ ID NO: 107126 - RNA, 21 nt, synthetic construct
  source 1..21: mol_type = other RNA
ttgactcagtacttccctctt

SEQ ID NO: 107127 - RNA, 21 nt, synthetic construct
  source 1..21: mol_type = other RNA
ttgactcctaaaacatggtcc

SEQ ID NO: 107128 - RNA, 21 nt, synthetic construct
  source 1..21: mol_type = other RNA
ttgactgaattaatctcttac

SEQ ID NO: 107129 - RNA, 21 nt, synthetic construct
  source 1..21: mol_type = other RNA
ttgactgacataactgtaaag

SEQ ID NO: 107130 - RNA, 21 nt, synthetic construct
  source 1..21: mol_type = other RNA
ttgacttcactagatctcttt

SEQ ID NO: 107131 - RNA, 21 nt, synthetic construct
  source 1..21: mol_type = other RNA
ttgacttcacttccaagtccc

SEQ ID NO: 107132 - RNA, 21 nt, synthetic construct
  source 1..21: mol_type = other RNA
ttgacttctcagggcctgctt

SEQ ID NO: 107133 - RNA, 21 nt, synthetic construct
  source 1..21: mol_type = other RNA
ttgactttaccctgctggaac

SEQ ID NO: 107134 - RNA, 21 nt, synthetic construct
  source 1..21: mol_type = other RNA
ttgagaaactatccaacatgc

SEQ ID NO: 107135 - RNA, 21 nt, synthetic construct
  source 1..21: mol_type = other RNA
ttgagaaagagggaagtactg

SEQ ID NO: 107136 - RNA, 21 nt, synthetic construct
  source 1..21: mol_type = other RNA
ttgagaaagcacataaaaaag

SEQ ID NO: 107137 - RNA, 21 nt, synthetic construct
  source 1..21: mol_type = other RNA
ttgagaaaggtttcttcactc

SEQ ID NO: 107138 - RNA, 21 nt, synthetic construct
  source 1..21: mol_type = other RNA
ttgagaagcagaaaatcagtg

SEQ ID NO: 107139 - RNA, 21 nt, synthetic construct
  source 1..21: mol_type = other RNA
ttgagaagccacacagtacaa

SEQ ID NO: 107140 - RNA, 21 nt, synthetic construct
  source 1..21: mol_type = other RNA
ttgagaagtcttttcctaccc

SEQ ID NO: 107141 - RNA, 21 nt, synthetic construct
  source 1..21: mol_type = other RNA
ttgagaatttcaggtgtgtaa

SEQ ID NO: 107142 - RNA, 21 nt, synthetic construct
  source 1..21: mol_type = other RNA
ttgagacaagaccacaccact

SEQ ID NO: 107143 - RNA, 21 nt, synthetic construct
  source 1..21: mol_type = other RNA
ttgagacacggtctcacactg

SEQ ID NO: 107144 - RNA, 21 nt, synthetic construct
  source 1..21: mol_type = other RNA
ttgagacagattctctgtctc

SEQ ID NO: 107145 - RNA, 21 nt, synthetic construct
  source 1..21: mol_type = other RNA
ttgagacagggtctcactctt

SEQ ID NO: 107146 - RNA, 21 nt, synthetic construct
  source 1..21: mol_type = other RNA
ttgagaccagcgtgggcaaca

SEQ ID NO: 107147 - RNA, 21 nt, synthetic construct
  source 1..21: mol_type = other RNA
ttgagacctcaggcagtctag

SEQ ID NO: 107148 - RNA, 21 nt, synthetic construct
  source 1..21: mol_type = other RNA
ttgagacggaagactcatact

SEQ ID NO: 107149 - RNA, 21 nt, synthetic construct
  source 1..21: mol_type = other RNA
ttgagacggaatcttaccctg

SEQ ID NO: 107150 - RNA, 21 nt, synthetic construct
  source 1..21: mol_type = other RNA
ttgagactgcagtgacctatc

SEQ ID NO: 107151 - RNA, 21 nt, synthetic construct
  source 1..21: mol_type = other RNA
ttgagagagaattctaaattg

SEQ ID NO: 107152 - RNA, 21 nt, synthetic construct
  source 1..21: mol_type = other RNA
ttgagagagataaaacctgga

SEQ ID NO: 107153 - RNA, 21 nt, synthetic construct
  source 1..21: mol_type = other RNA
ttgagagcagagacacacatc

SEQ ID NO: 107154 - RNA, 21 nt, synthetic construct
  source 1..21: mol_type = other RNA
ttgagagctttcttttaaaga

SEQ ID NO: 107155 - RNA, 21 nt, synthetic construct
  source 1..21: mol_type = other RNA
ttgagaggctttaagcagaaa

SEQ ID NO: 107156 - RNA, 21 nt, synthetic construct
  source 1..21: mol_type = other RNA
ttgagagtaagttgcatacgt

SEQ ID NO: 107157 - RNA, 21 nt, synthetic construct
  source 1..21: mol_type = other RNA
ttgagagtctcttaagaccac

SEQ ID NO: 107158 - RNA, 21 nt, synthetic construct
  source 1..21: mol_type = other RNA
ttgagagtgaaaacacaaact

SEQ ID NO: 107159 - RNA, 21 nt, synthetic construct
  source 1..21: mol_type = other RNA
ttgagagtgcagtatgtagga

SEQ ID NO: 107160 - RNA, 21 nt, synthetic construct
  source 1..21: mol_type = other RNA
ttgagatgtactggaagtgta

SEQ ID NO: 107161 - RNA, 21 nt, synthetic construct
  source 1..21: mol_type = other RNA
ttgagattagcgaaagggatt

SEQ ID NO: 107162 - RNA, 21 nt, synthetic construct
  source 1..21: mol_type = other RNA
ttgagatttgagtcttgctct

SEQ ID NO: 107163 - RNA, 21 nt, synthetic construct
  source 1..21: mol_type = other RNA
ttgagcagagtcctgagggtg

SEQ ID NO: 107164 - RNA, 21 nt, synthetic construct
  source 1..21: mol_type = other RNA
ttgagcagatcagtaacaaat

SEQ ID NO: 107165 - RNA, 21 nt, synthetic construct
  source 1..21: mol_type = other RNA
ttgagccaaagaagaaatcaa

SEQ ID NO: 107166 - RNA, 21 nt, synthetic construct
  source 1..21: mol_type = other RNA
ttgagccatcatgcctgggta

SEQ ID NO: 107167 - RNA, 21 nt, synthetic construct
  source 1..21: mol_type = other RNA
ttgagcccaggaggttgaagc

SEQ ID NO: 107168 - RNA, 21 nt, synthetic construct
  source 1..21: mol_type = other RNA
ttgagcccagggggtcgagac

SEQ ID NO: 107169 - RNA, 21 nt, synthetic construct
  source 1..21: mol_type = other RNA
ttgagccccagaataggcaaa

SEQ ID NO: 107170 - RNA, 21 nt, synthetic construct
  source 1..21: mol_type = other RNA
ttgagcctggaagttcaaggt

SEQ ID NO: 107171 - RNA, 21 nt, synthetic construct
  source 1..21: mol_type = other RNA
ttgagcctgttccgattttac

SEQ ID NO: 107172 - RNA, 21 nt, synthetic construct
  source 1..21: mol_type = other RNA
ttgagctacaaactccaaacc

SEQ ID NO: 107173 - RNA, 21 nt, synthetic construct
  source 1..21: mol_type = other RNA
ttgagctgaaagtaaagatag

SEQ ID NO: 107174 - RNA, 21 nt, synthetic construct
  source 1..21: mol_type = other RNA
ttgagctgtccccaccgcctt

SEQ ID NO: 107175 - RNA, 21 nt, synthetic construct
  source 1..21: mol_type = other RNA
ttgaggacttcatgtacaatg

SEQ ID NO: 107176 - RNA, 21 nt, synthetic construct
  source 1..21: mol_type = other RNA
ttgaggatgactgtcctgaat

SEQ ID NO: 107177 - RNA, 21 nt, synthetic construct
  source 1..21: mol_type = other RNA
ttgaggcagagagatggtggg

SEQ ID NO: 107178 - RNA, 21 nt, synthetic construct
  source 1..21: mol_type = other RNA
ttgaggcattagtgaattcac

SEQ ID NO: 107179 - RNA, 21 nt, synthetic construct
  source 1..21: mol_type = other RNA
ttgaggccctattcaacctat

SEQ ID NO: 107180 - RNA, 21 nt, synthetic construct
  source 1..21: mol_type = other RNA
ttgaggccgcagtgagccatg

SEQ ID NO: 107181 - RNA, 21 nt, synthetic construct
  source 1..21: mol_type = other RNA
ttgaggctgggagtacaagac

SEQ ID NO: 107182 - RNA, 21 nt, synthetic construct
  source 1..21: mol_type = other RNA
ttgaggctgggccctgtggct

SEQ ID NO: 107183 - RNA, 21 nt, synthetic construct
  source 1..21: mol_type = other RNA
ttgaggcttttcatagtcatc

SEQ ID NO: 107184 - RNA, 21 nt, synthetic construct
  source 1..21: mol_type = other RNA
ttgaggcttttggattttctt

SEQ ID NO: 107185 - RNA, 21 nt, synthetic construct
  source 1..21: mol_type = other RNA
ttgagggtgctgatcaggaaa

SEQ ID NO: 107186 - RNA, 21 nt, synthetic construct
  source 1..21: mol_type = other RNA
ttgagggttagaagacaatac

SEQ ID NO: 107187 - RNA, 21 nt, synthetic construct
  source 1..21: mol_type = other RNA
ttgagggttagatttttcctt

SEQ ID NO: 107188 - RNA, 21 nt, synthetic construct
  source 1..21: mol_type = other RNA
ttgaggtaagaacttgtcttt

SEQ ID NO: 107189 - RNA, 21 nt, synthetic construct
  source 1..21: mol_type = other RNA
ttgaggtagcacaactagtaa

SEQ ID NO: 107190 - RNA, 21 nt, synthetic construct
  source 1..21: mol_type = other RNA
ttgaggtctaggctaatgtgt

SEQ ID NO: 107191 - RNA, 21 nt, synthetic construct
  source 1..21: mol_type = other RNA
ttgaggtcttctagctttcag

SEQ ID NO: 107192 - RNA, 21 nt, synthetic construct
  source 1..21: mol_type = other RNA
ttgaggtgagacagaccctgg

SEQ ID NO: 107193 - RNA, 21 nt, synthetic construct
  source 1..21: mol_type = other RNA
ttgaggtgattaaaggccctg

SEQ ID NO: 107194 - RNA, 21 nt, synthetic construct
  source 1..21: mol_type = other RNA
ttgaggtgattcagagtgctg

SEQ ID NO: 107195 - RNA, 21 nt, synthetic construct
  source 1..21: mol_type = other RNA
ttgaggtgtacaattaggctg

SEQ ID NO: 107196 - RNA, 21 nt, synthetic construct
  source 1..21: mol_type = other RNA
ttgaggttattaagataatgc

SEQ ID NO: 107197 - RNA, 21 nt, synthetic construct
  source 1..21: mol_type = other RNA
ttgaggttgaagacctgcagt

SEQ ID NO: 107198 - RNA, 21 nt, synthetic construct
  source 1..21: mol_type = other RNA
ttgaggtttacttggggagag

SEQ ID NO: 107199 - RNA, 21 nt, synthetic construct
  source 1..21: mol_type = other RNA
ttgagtacctctgggatgctc

SEQ ID NO: 107200 - RNA, 21 nt, synthetic construct
  source 1..21: mol_type = other RNA
ttgagtagcaccctatttatg

SEQ ID NO: 107201 - RNA, 21 nt, synthetic construct
  source 1..21: mol_type = other RNA
ttgagtagttcatgttagcat

SEQ ID NO: 107202 - RNA, 21 nt, synthetic construct
  source 1..21: mol_type = other RNA
ttgagtatctggtgctggcag

SEQ ID NO: 107203 - RNA, 21 nt, synthetic construct
  source 1..21: mol_type = other RNA
ttgagtatcttttcatgttga

SEQ ID NO: 107204 - RNA, 21 nt, synthetic construct
  source 1..21: mol_type = other RNA
ttgagtatttcatgtacttgt

SEQ ID NO: 107205 - RNA, 21 nt, synthetic construct
  source 1..21: mol_type = other RNA
ttgagtatttttgagcttttc

SEQ ID NO: 107206 - RNA, 21 nt, synthetic construct
  source 1..21: mol_type = other RNA
ttgagtcagtaatcaaaaacc

SEQ ID NO: 107207 - RNA, 21 nt, synthetic construct
  source 1..21: mol_type = other RNA
ttgagtctgtagggtgactag

SEQ ID NO: 107208 - RNA, 21 nt, synthetic construct
  source 1..21: mol_type = other RNA
ttgagtctgtgctctgtattt

SEQ ID NO: 107209 - RNA, 21 nt, synthetic construct
  source 1..21: mol_type = other RNA
ttgagtcttgctctcttgcct

SEQ ID NO: 107210 - RNA, 21 nt, synthetic construct
  source 1..21: mol_type = other RNA
ttgagtcttgtttacccagtg

SEQ ID NO: 107211 - RNA, 21 nt, synthetic construct
  source 1..21: mol_type = other RNA
ttgagtgcaggagtttgagac

SEQ ID NO: 107212 - RNA, 21 nt, synthetic construct
  source 1..21: mol_type = other RNA
ttgagtggcatcatactggaa

SEQ ID NO: 107213 - RNA, 21 nt, synthetic construct
  source 1..21: mol_type = other RNA
ttgagtgtaaggtgtttggtg

SEQ ID NO: 107214 - RNA, 21 nt, synthetic construct
  source 1..21: mol_type = other RNA
ttgagtgtagctgtggctcac

SEQ ID NO: 107215 - RNA, 21 nt, synthetic construct
  source 1..21: mol_type = other RNA
ttgagttattgcatagggatg

SEQ ID NO: 107216 - RNA, 21 nt, synthetic construct
  source 1..21: mol_type = other RNA
ttgagttcagaaagattaatc

SEQ ID NO: 107217 - RNA, 21 nt, synthetic construct
  source 1..21: mol_type = other RNA
ttgagttcagttttgtatatg

SEQ ID NO: 107218 - RNA, 21 nt, synthetic construct
  source 1..21: mol_type = other RNA
ttgagttcatgtcctttgtag

SEQ ID NO: 107219 - RNA, 21 nt, synthetic construct
  source 1..21: mol_type = other RNA
ttgagttgtttccactttgag

SEQ ID NO: 107220 - RNA, 21 nt, synthetic construct
  source 1..21: mol_type = other RNA
ttgagtttccagaaaactggc

SEQ ID NO: 107221 - RNA, 21 nt, synthetic construct
  source 1..21: mol_type = other RNA
ttgagtttggtgtatttagta

SEQ ID NO: 107222 - RNA, 21 nt, synthetic construct
  source 1..21: mol_type = other RNA
ttgagtttgttctgtcacatt

SEQ ID NO: 107223 - RNA, 21 nt, synthetic construct
  source 1..21: mol_type = other RNA
ttgagttttcaacctttgttg

SEQ ID NO: 107224 - RNA, 21 nt, synthetic construct
  source 1..21: mol_type = other RNA
ttgataaaaatctctacaggg

SEQ ID NO: 107225 - RNA, 21 nt, synthetic construct
  source 1..21: mol_type = other RNA
ttgataaatctaaagccaatc

SEQ ID NO: 107226 - RNA, 21 nt, synthetic construct
  source 1..21: mol_type = other RNA
ttgataagcacatggtgataa

SEQ ID NO: 107227 - RNA, 21 nt, synthetic construct
  source 1..21: mol_type = other RNA
ttgatacaatacttggatctt

SEQ ID NO: 107228 - RNA, 21 nt, synthetic construct
  source 1..21: mol_type = other RNA
ttgatacggagtctcgctctg

SEQ ID NO: 107229 - RNA, 21 nt, synthetic construct
  source 1..21: mol_type = other RNA
ttgatactagtttagtgcagt

SEQ ID NO: 107230 - RNA, 21 nt, synthetic construct
  source 1..21: mol_type = other RNA
ttgatagttgcagattcatct

SEQ ID NO: 107231 - RNA, 21 nt, synthetic construct
  source 1..21: mol_type = other RNA
ttgatatctgagtgttgtgtg

SEQ ID NO: 107232 - RNA, 21 nt, synthetic construct
  source 1..21: mol_type = other RNA
ttgatatttttcagattgacc

SEQ ID NO: 107233 - RNA, 21 nt, synthetic construct
  source 1..21: mol_type = other RNA
ttgatcagcttcctacccaag

SEQ ID NO: 107234 - RNA, 21 nt, synthetic construct
  source 1..21: mol_type = other RNA
ttgatcagggatttggccaga

SEQ ID NO: 107235 - RNA, 21 nt, synthetic construct
  source 1..21: mol_type = other RNA
ttgatcatacacatccagaag

SEQ ID NO: 107236 - RNA, 21 nt, synthetic construct
  source 1..21: mol_type = other RNA
ttgatcatcgcattacgagtt

SEQ ID NO: 107237 - RNA, 21 nt, synthetic construct
  source 1..21: mol_type = other RNA
ttgatccaggtgtatgatctt

SEQ ID NO: 107238 - RNA, 21 nt, synthetic construct
  source 1..21: mol_type = other RNA
ttgatccattacatcaacata

SEQ ID NO: 107239 - RNA, 21 nt, synthetic construct
  source 1..21: mol_type = other RNA
ttgatccattttgagttcagt

SEQ ID NO: 107240 - RNA, 21 nt, synthetic construct
  source 1..21: mol_type = other RNA
ttgatcccactagtggaagaa

SEQ ID NO: 107241 - RNA, 21 nt, synthetic construct
  source 1..21: mol_type = other RNA
ttgatcctggaatagtagctt

SEQ ID NO: 107242 - RNA, 21 nt, synthetic construct
  source 1..21: mol_type = other RNA
ttgatctaaaatggaagactt

SEQ ID NO: 107243 - RNA, 21 nt, synthetic construct
  source 1..21: mol_type = other RNA
ttgatctgccaggacaattga

SEQ ID NO: 107244 - RNA, 21 nt, synthetic construct
  source 1..21: mol_type = other RNA
ttgatctggtcacaaacacaa

SEQ ID NO: 107245 - RNA, 21 nt, synthetic construct
  source 1..21: mol_type = other RNA
ttgatctttacttcccttctc

SEQ ID NO: 107246 - RNA, 21 nt, synthetic construct
  source 1..21: mol_type = other RNA
ttgatgaattccagtttatct

SEQ ID NO: 107247 - RNA, 21 nt, synthetic construct
  source 1..21: mol_type = other RNA
ttgatgacttacagatatcac

SEQ ID NO: 107248 - RNA, 21 nt, synthetic construct
  source 1..21: mol_type = other RNA
ttgatgatagaataccactta

SEQ ID NO: 107249 - RNA, 21 nt, synthetic construct
  source 1..21: mol_type = other RNA
ttgatgcaatttgttttccaa

SEQ ID NO: 107250 - RNA, 21 nt, synthetic construct
  source 1..21: mol_type = other RNA
ttgatgcacaaaagtttaact

SEQ ID NO: 107251 - RNA, 21 nt, synthetic construct
  source 1..21: mol_type = other RNA
ttgatgcccccaccctttttt

SEQ ID NO: 107252 - RNA, 21 nt, synthetic construct
  source 1..21: mol_type = other RNA
ttgatggacgtttgagttgtt

SEQ ID NO: 107253 - RNA, 21 nt, synthetic construct
  source 1..21: mol_type = other RNA
ttgatggctgtactaagccta

SEQ ID NO: 107254 - RNA, 21 nt, synthetic construct
  source 1..21: mol_type = other RNA
ttgatggtttggggcttttga

SEQ ID NO: 107255 - RNA, 21 nt, synthetic construct
  source 1..21: mol_type = other RNA
ttgatgtaatggatcaaggca

SEQ ID NO: 107256 - RNA, 21 nt, synthetic construct
  source 1..21: mol_type = other RNA
ttgatgtcacaagccagggtc

SEQ ID NO: 107257 - RNA, 21 nt, synthetic construct
  source 1..21: mol_type = other RNA
ttgattacaagggtgacagag

SEQ ID NO: 107258 - RNA, 21 nt, synthetic construct
  source 1..21: mol_type = other RNA
ttgattactgactcaatcttc

SEQ ID NO: 107259 - RNA, 21 nt, synthetic construct
  source 1..21: mol_type = other RNA
ttgattagcttcctcaggatc

SEQ ID NO: 107260 - RNA, 21 nt, synthetic construct
  source 1..21: mol_type = other RNA
ttgattagttgactcctaaaa

SEQ ID NO: 107261 - RNA, 21 nt, synthetic construct
  source 1..21: mol_type = other RNA
ttgattatgttagatatccca

SEQ ID NO: 107262 - RNA, 21 nt, synthetic construct
  source 1..21: mol_type = other RNA
ttgattcagatgacagaaata

SEQ ID NO: 107263 - RNA, 21 nt, synthetic construct
  source 1..21: mol_type = other RNA
ttgattccagtttctctgctt

SEQ ID NO: 107264 - RNA, 21 nt, synthetic construct
  source 1..21: mol_type = other RNA
ttgattgccagttttctggaa

SEQ ID NO: 107265 - RNA, 21 nt, synthetic construct
  source 1..21: mol_type = other RNA
ttgattggcaaatctttagtg

SEQ ID NO: 107266 - RNA, 21 nt, synthetic construct
  source 1..21: mol_type = other RNA
ttgattgggcattaattgaga

SEQ ID NO: 107267 - RNA, 21 nt, synthetic construct
  source 1..21: mol_type = other RNA
ttgattgttagccacagcgtt

SEQ ID NO: 107268 - RNA, 21 nt, synthetic construct
  source 1..21: mol_type = other RNA
ttgattgttccaggggggaaa

SEQ ID NO: 107269 - RNA, 21 nt, synthetic construct
  source 1..21: mol_type = other RNA
ttgattgttgccatcatttta

SEQ ID NO: 107270 - RNA, 21 nt, synthetic construct
  source 1..21: mol_type = other RNA
ttgatttagaaatacctgcag

SEQ ID NO: 107271 - RNA, 21 nt, synthetic construct
  source 1..21: mol_type = other RNA
ttgatttatggcctaagatgg

SEQ ID NO: 107272 - RNA, 21 nt, synthetic construct
  source 1..21: mol_type = other RNA
ttgatttcttctttggctcaa

SEQ ID NO: 107273 - RNA, 21 nt, synthetic construct
  source 1..21: mol_type = other RNA
ttgatttgaccatgggacaag

SEQ ID NO: 107274 - RNA, 21 nt, synthetic construct
  source 1..21: mol_type = other RNA
ttgattttgaggcagagagat

SEQ ID NO: 107275 - RNA, 21 nt, synthetic construct
  source 1..21: mol_type = other RNA
ttgattttgtatcctgagact

SEQ ID NO: 107276 - RNA, 21 nt, synthetic construct
  source 1..21: mol_type = other RNA
ttgcaaaaacagtttccctct

SEQ ID NO: 107277 - RNA, 21 nt, synthetic construct
  source 1..21: mol_type = other RNA
ttgcaaaaatactacaagagt

SEQ ID NO: 107278 - RNA, 21 nt, synthetic construct
  source 1..21: mol_type = other RNA
ttgcaaaaattttgttcagga

SEQ ID NO: 107279 - RNA, 21 nt, synthetic construct
  source 1..21: mol_type = other RNA
ttgcaaaacaatagcccagca

SEQ ID NO: 107280 - RNA, 21 nt, synthetic construct
  source 1..21: mol_type = other RNA
ttgcaaaacggaaactttata

SEQ ID NO: 107281 - RNA, 21 nt, synthetic construct
  source 1..21: mol_type = other RNA
ttgcaaaccaaatgcagaaaa

SEQ ID NO: 107282 - RNA, 21 nt, synthetic construct
  source 1..21: mol_type = other RNA
ttgcaaactaagtggtattct

SEQ ID NO: 107283 - RNA, 21 nt, synthetic construct
  source 1..21: mol_type = other RNA
ttgcaaattattttcctcctt

SEQ ID NO: 107284 - RNA, 21 nt, synthetic construct
  source 1..21: mol_type = other RNA
ttgcaagatgcataagttcta

SEQ ID NO: 107285 - RNA, 21 nt, synthetic construct
  source 1..21: mol_type = other RNA
ttgcaagattaatcttgtgaa

SEQ ID NO: 107286 - RNA, 21 nt, synthetic construct
  source 1..21: mol_type = other RNA
ttgcaagccacattagccact

SEQ ID NO: 107287 - RNA, 21 nt, synthetic construct
  source 1..21: mol_type = other RNA
ttgcaaggcccaccatgatgc

SEQ ID NO: 107288 - RNA, 21 nt, synthetic construct
  source 1..21: mol_type = other RNA
ttgcaatacagttaacgtatg

SEQ ID NO: 107289 - RNA, 21 nt, synthetic construct
  source 1..21: mol_type = other RNA
ttgcaatttatatgatactcg

SEQ ID NO: 107290 - RNA, 21 nt, synthetic construct
  source 1..21: mol_type = other RNA
ttgcacaaaagtgaaaactaa

SEQ ID NO: 107291 - RNA, 21 nt, synthetic construct
  source 1..21: mol_type = other RNA
ttgcacaatgttgtggatgtc

SEQ ID NO: 107292 - RNA, 21 nt, synthetic construct
  source 1..21: mol_type = other RNA
ttgcacacaccaaatcatgaa

SEQ ID NO: 107293 - RNA, 21 nt, synthetic construct
  source 1..21: mol_type = other RNA
ttgcacagtctcccccaggtg

SEQ ID NO: 107294 - RNA, 21 nt, synthetic construct
  source 1..21: mol_type = other RNA
ttgcacattagaatcatccgg

SEQ ID NO: 107295 - RNA, 21 nt, synthetic construct
  source 1..21: mol_type = other RNA
ttgcaccaactccacattgtc

SEQ ID NO: 107296 - RNA, 21 nt, synthetic construct
  source 1..21: mol_type = other RNA
ttgcacggtgaagaaccgact

SEQ ID NO: 107297 - RNA, 21 nt, synthetic construct
  source 1..21: mol_type = other RNA
ttgcactccacgtgggtgaca

SEQ ID NO: 107298 - RNA, 21 nt, synthetic construct
  source 1..21: mol_type = other RNA
ttgcactccagcctaggcaag

SEQ ID NO: 107299 - RNA, 21 nt, synthetic construct
  source 1..21: mol_type = other RNA
ttgcactggcacagcactgtt

SEQ ID NO: 107300 - RNA, 21 nt, synthetic construct
  source 1..21: mol_type = other RNA
ttgcagaagagtgaagctgga

SEQ ID NO: 107301 - RNA, 21 nt, synthetic construct
  source 1..21: mol_type = other RNA
ttgcagacaataattcttcct

SEQ ID NO: 107302 - RNA, 21 nt, synthetic construct
  source 1..21: mol_type = other RNA
ttgcagagacggggtcccact

SEQ ID NO: 107303 - RNA, 21 nt, synthetic construct
  source 1..21: mol_type = other RNA
ttgcagagactggatagcaac

SEQ ID NO: 107304 - RNA, 21 nt, synthetic construct
  source 1..21: mol_type = other RNA
ttgcagagcaaactcagatct

SEQ ID NO: 107305 - RNA, 21 nt, synthetic construct
  source 1..21: mol_type = other RNA
ttgcagagtgttcaaaagccc

SEQ ID NO: 107306 - RNA, 21 nt, synthetic construct
  source 1..21: mol_type = other RNA
ttgcagattcatcttgacttc

SEQ ID NO: 107307 - RNA, 21 nt, synthetic construct
  source 1..21: mol_type = other RNA
ttgcagcatgctcactgtctc

SEQ ID NO: 107308 - RNA, 21 nt, synthetic construct
  source 1..21: mol_type = other RNA
ttgcagccagagagtggaaag

SEQ ID NO: 107309 - RNA, 21 nt, synthetic construct
  source 1..21: mol_type = other RNA
ttgcagccttccctgaacaat

SEQ ID NO: 107310 - RNA, 21 nt, synthetic construct
  source 1..21: mol_type = other RNA
ttgcaggtgtgggccaccaag

SEQ ID NO: 107311 - RNA, 21 nt, synthetic construct
  source 1..21: mol_type = other RNA
ttgcaggtttactccaagaag

SEQ ID NO: 107312 - RNA, 21 nt, synthetic construct
  source 1..21: mol_type = other RNA
ttgcagtagtattgaactgtt

SEQ ID NO: 107313 - RNA, 21 nt, synthetic construct
  source 1..21: mol_type = other RNA
ttgcagtccccggtctttcct

SEQ ID NO: 107314 - RNA, 21 nt, synthetic construct
  source 1..21: mol_type = other RNA
ttgcagtgagcccagagatcc

SEQ ID NO: 107315 - RNA, 21 nt, synthetic construct
  source 1..21: mol_type = other RNA
ttgcagttggggactcttatg

SEQ ID NO: 107316 - RNA, 21 nt, synthetic construct
  source 1..21: mol_type = other RNA
ttgcataactcgtaatgcgat

SEQ ID NO: 107317 - RNA, 21 nt, synthetic construct
  source 1..21: mol_type = other RNA
ttgcatacgtcgtcccccatc

SEQ ID NO: 107318 - RNA, 21 nt, synthetic construct
  source 1..21: mol_type = other RNA
ttgcatagggatgttgcctac

SEQ ID NO: 107319 - RNA, 21 nt, synthetic construct
  source 1..21: mol_type = other RNA
ttgcatcaactgcttccctag

SEQ ID NO: 107320 - RNA, 21 nt, synthetic construct
  source 1..21: mol_type = other RNA
ttgcatcacttgaggtgatta

SEQ ID NO: 107321 - RNA, 21 nt, synthetic construct
  source 1..21: mol_type = other RNA
ttgcatccccattcaattgtc

SEQ ID NO: 107322 - RNA, 21 nt, synthetic construct
  source 1..21: mol_type = other RNA
ttgcatgagacttggagtttg

SEQ ID NO: 107323 - RNA, 21 nt, synthetic construct
  source 1..21: mol_type = other RNA
ttgcattacatgaatggaaaa

SEQ ID NO: 107324 - RNA, 21 nt, synthetic construct
  source 1..21: mol_type = other RNA
ttgcattagagccccaagaaa

SEQ ID NO: 107325 - RNA, 21 nt, synthetic construct
  source 1..21: mol_type = other RNA
ttgcattcctgaaatgaacca

SEQ ID NO: 107326 - RNA, 21 nt, synthetic construct
  source 1..21: mol_type = other RNA
ttgcattgactaccaattctc

SEQ ID NO: 107327 - RNA, 21 nt, synthetic construct
  source 1..21: mol_type = other RNA
ttgcatttacttgtcatttct

SEQ ID NO: 107328 - RNA, 21 nt, synthetic construct
  source 1..21: mol_type = other RNA
ttgcatttctctaatagctag

SEQ ID NO: 107329 - RNA, 21 nt, synthetic construct
  source 1..21: mol_type = other RNA
ttgccaaaatgattttcacag

SEQ ID NO: 107330 - RNA, 21 nt, synthetic construct
  source 1..21: mol_type = other RNA
ttgccaaactgttttccacag

SEQ ID NO: 107331 - RNA, 21 nt, synthetic construct
  source 1..21: mol_type = other RNA
ttgccaaagattcttgtcatg

SEQ ID NO: 107332 - RNA, 21 nt, synthetic construct
  source 1..21: mol_type = other RNA
ttgccaaattatttgagagta

SEQ ID NO: 107333 - RNA, 21 nt, synthetic construct
  source 1..21: mol_type = other RNA
ttgccaacagttactttcctt

SEQ ID NO: 107334 - RNA, 21 nt, synthetic construct
  source 1..21: mol_type = other RNA
ttgccaaggcttgctttggct

SEQ ID NO: 107335 - RNA, 21 nt, synthetic construct
  source 1..21: mol_type = other RNA
ttgccaagtataagatgatga

SEQ ID NO: 107336 - RNA, 21 nt, synthetic construct
  source 1..21: mol_type = other RNA
ttgccaatatctatcagggct

SEQ ID NO: 107337 - RNA, 21 nt, synthetic construct
  source 1..21: mol_type = other RNA
ttgccaatcaataattctgtg

SEQ ID NO: 107338 - RNA, 21 nt, synthetic construct
  source 1..21: mol_type = other RNA
ttgccacattttaccaaaaca

SEQ ID NO: 107339 - RNA, 21 nt, synthetic construct
  source 1..21: mol_type = other RNA
ttgccagctaacttttaaccc

SEQ ID NO: 107340 - RNA, 21 nt, synthetic construct
  source 1..21: mol_type = other RNA
ttgccaggtggacgcggcccc

SEQ ID NO: 107341 - RNA, 21 nt, synthetic construct
  source 1..21: mol_type = other RNA
ttgccaggtttgtgcttggat

SEQ ID NO: 107342 - RNA, 21 nt, synthetic construct
  source 1..21: mol_type = other RNA
ttgccagtgttttaaagcagg

SEQ ID NO: 107343 - RNA, 21 nt, synthetic construct
  source 1..21: mol_type = other RNA
ttgccagttttctggaaactc

SEQ ID NO: 107344 - RNA, 21 nt, synthetic construct
  source 1..21: mol_type = other RNA
ttgccatatgtagggcaccgt

SEQ ID NO: 107345 - RNA, 21 nt, synthetic construct
  source 1..21: mol_type = other RNA
ttgccatcattttatgaaacc

SEQ ID NO: 107346 - RNA, 21 nt, synthetic construct
  source 1..21: mol_type = other RNA
ttgccatcttcaagatttcat

SEQ ID NO: 107347 - RNA, 21 nt, synthetic construct
  source 1..21: mol_type = other RNA
ttgccatcttgcataagtttt

SEQ ID NO: 107348 - RNA, 21 nt, synthetic construct
  source 1..21: mol_type = other RNA
ttgccattctcccagttgtca

SEQ ID NO: 107349 - RNA, 21 nt, synthetic construct
  source 1..21: mol_type = other RNA
ttgcccactcttatatcctaa

SEQ ID NO: 107350 - RNA, 21 nt, synthetic construct
  source 1..21: mol_type = other RNA
ttgcccagactggagttcact

SEQ ID NO: 107351 - RNA, 21 nt, synthetic construct
  source 1..21: mol_type = other RNA
ttgcccaggctggtcttgtac

SEQ ID NO: 107352 - RNA, 21 nt, synthetic construct
  source 1..21: mol_type = other RNA
ttgcccattataaaataggaa

SEQ ID NO: 107353 - RNA, 21 nt, synthetic construct
  source 1..21: mol_type = other RNA
ttgccccattgcactccacgt

SEQ ID NO: 107354 - RNA, 21 nt, synthetic construct
  source 1..21: mol_type = other RNA
ttgcctaacaccagtaagatt

SEQ ID NO: 107355 - RNA, 21 nt, synthetic construct
  source 1..21: mol_type = other RNA
ttgcctaagtctcaggataca

SEQ ID NO: 107356 - RNA, 21 nt, synthetic construct
  source 1..21: mol_type = other RNA
ttgcctactagccagtgattg

SEQ ID NO: 107357 - RNA, 21 nt, synthetic construct
  source 1..21: mol_type = other RNA
ttgcctatagacagcatcccc

SEQ ID NO: 107358 - RNA, 21 nt, synthetic construct
  source 1..21: mol_type = other RNA
ttgcctattctggggctcaag

SEQ ID NO: 107359 - RNA, 21 nt, synthetic construct
  source 1..21: mol_type = other RNA
ttgcctccatatgggatgctt

SEQ ID NO: 107360 - RNA, 21 nt, synthetic construct
  source 1..21: mol_type = other RNA
ttgcctcctgggttcaggtgc

SEQ ID NO: 107361 - RNA, 21 nt, synthetic construct
  source 1..21: mol_type = other RNA
ttgcctctccagggaggaatc

SEQ ID NO: 107362 - RNA, 21 nt, synthetic construct
  source 1..21: mol_type = other RNA
ttgcctctgtgctagccttct

SEQ ID NO: 107363 - RNA, 21 nt, synthetic construct
  source 1..21: mol_type = other RNA
ttgcctctttgctaataagtg

SEQ ID NO: 107364 - RNA, 21 nt, synthetic construct
  source 1..21: mol_type = other RNA
ttgcctgacagcaaataaaca

SEQ ID NO: 107365 - RNA, 21 nt, synthetic construct
  source 1..21: mol_type = other RNA
ttgcctgcgtccgtagaccga

SEQ ID NO: 107366 - RNA, 21 nt, synthetic construct
  source 1..21: mol_type = other RNA
ttgcctggatgaatgcagtgg

SEQ ID NO: 107367 - RNA, 21 nt, synthetic construct
  source 1..21: mol_type = other RNA
ttgcctgtagttttggtgtca

SEQ ID NO: 107368 - RNA, 21 nt, synthetic construct
  source 1..21: mol_type = other RNA
ttgccttcaagttgctttttc

SEQ ID NO: 107369 - RNA, 21 nt, synthetic construct
  source 1..21: mol_type = other RNA
ttgccttcgcagggtgaaact

SEQ ID NO: 107370 - RNA, 21 nt, synthetic construct
  source 1..21: mol_type = other RNA
ttgcctttcactttgatcata

SEQ ID NO: 107371 - RNA, 21 nt, synthetic construct
  source 1..21: mol_type = other RNA
ttgcctttcgcttttggagct

SEQ ID NO: 107372 - RNA, 21 nt, synthetic construct
  source 1..21: mol_type = other RNA
ttgccttttcactcttagtga

SEQ ID NO: 107373 - RNA, 21 nt, synthetic construct
  source 1..21: mol_type = other RNA
ttgcgaaacacactcgtgtat

SEQ ID NO: 107374 - RNA, 21 nt, synthetic construct
  source 1..21: mol_type = other RNA
ttgcgaaatagtagttgctca

SEQ ID NO: 107375 - RNA, 21 nt, synthetic construct
  source 1..21: mol_type = other RNA
ttgcgattgtttcagtgtgtc

SEQ ID NO: 107376 - RNA, 21 nt, synthetic construct
  source 1..21: mol_type = other RNA
ttgcgcagaactggggcttga

SEQ ID NO: 107377 - RNA, 21 nt, synthetic construct
  source 1..21: mol_type = other RNA
ttgcgcgtcaaaagatgctgg

SEQ ID NO: 107378 - RNA, 21 nt, synthetic construct
  source 1..21: mol_type = other RNA
ttgcggcttgattagcttcct

SEQ ID NO: 107379 - RNA, 21 nt, synthetic construct
  source 1..21: mol_type = other RNA
ttgcggtcttttagccaacaa

SEQ ID NO: 107380 - RNA, 21 nt, synthetic construct
  source 1..21: mol_type = other RNA
ttgcggtgacgtgagatcatg

SEQ ID NO: 107381 - RNA, 21 nt, synthetic construct
  source 1..21: mol_type = other RNA
ttgcgtctgtgattatcaggg

SEQ ID NO: 107382 - RNA, 21 nt, synthetic construct
  source 1..21: mol_type = other RNA
ttgctaaactgttccccaagc

SEQ ID NO: 107383 - RNA, 21 nt, synthetic construct
  source 1..21: mol_type = other RNA
ttgctaataagtgagtttgac

SEQ ID NO: 107384 - RNA, 21 nt, synthetic construct
  source 1..21: mol_type = other RNA
ttgctaataatgatgactatg

SEQ ID NO: 107385 - RNA, 21 nt, synthetic construct
  source 1..21: mol_type = other RNA
ttgctaattcattgtacatga

SEQ ID NO: 107386 - RNA, 21 nt, synthetic construct
  source 1..21: mol_type = other RNA
ttgctagagctgctgtaacaa

SEQ ID NO: 107387 - RNA, 21 nt, synthetic construct
  source 1..21: mol_type = other RNA
ttgctagtagcagaatcccca

SEQ ID NO: 107388 - RNA, 21 nt, synthetic construct
  source 1..21: mol_type = other RNA
ttgctagtattttgttgacat

SEQ ID NO: 107389 - RNA, 21 nt, synthetic construct
  source 1..21: mol_type = other RNA
ttgctagtggtaactagatgc

SEQ ID NO: 107390 - RNA, 21 nt, synthetic construct
  source 1..21: mol_type = other RNA
ttgctagtgtcctcaggctcc

SEQ ID NO: 107391 - RNA, 21 nt, synthetic construct
  source 1..21: mol_type = other RNA
ttgctatccagtctctgcaac

SEQ ID NO: 107392 - RNA, 21 nt, synthetic construct
  source 1..21: mol_type = other RNA
ttgctatgtaatctcatggaa

SEQ ID NO: 107393 - RNA, 21 nt, synthetic construct
  source 1..21: mol_type = other RNA
ttgctattcaacaggtataaa

SEQ ID NO: 107394 - RNA, 21 nt, synthetic construct
  source 1..21: mol_type = other RNA
ttgctattgttgaattgttgg

SEQ ID NO: 107395 - RNA, 21 nt, synthetic construct
  source 1..21: mol_type = other RNA
ttgctcacacttactaaatga

SEQ ID NO: 107396 - RNA, 21 nt, synthetic construct
  source 1..21: mol_type = other RNA
ttgctcaggagtaactgctcc

SEQ ID NO: 107397 - RNA, 21 nt, synthetic construct
  source 1..21: mol_type = other RNA
ttgctcattcatctgcagtgt

SEQ ID NO: 107398 - RNA, 21 nt, synthetic construct
  source 1..21: mol_type = other RNA
ttgctccagagaagttttcca

SEQ ID NO: 107399 - RNA, 21 nt, synthetic construct
  source 1..21: mol_type = other RNA
ttgctctacaaaccttcttat

SEQ ID NO: 107400 - RNA, 21 nt, synthetic construct
  source 1..21: mol_type = other RNA
ttgctctcttgcccaagctgg

SEQ ID NO: 107401 - RNA, 21 nt, synthetic construct
  source 1..21: mol_type = other RNA
ttgctctgcaaatgaggttgc

SEQ ID NO: 107402 - RNA, 21 nt, synthetic construct
  source 1..21: mol_type = other RNA
ttgctctgcggcaggcattgt

SEQ ID NO: 107403 - RNA, 21 nt, synthetic construct
  source 1..21: mol_type = other RNA
ttgctctgtcacccacgtgga

SEQ ID NO: 107404 - RNA, 21 nt, synthetic construct
  source 1..21: mol_type = other RNA
ttgctgaagaataactgtcct

SEQ ID NO: 107405 - RNA, 21 nt, synthetic construct
  source 1..21: mol_type = other RNA
ttgctgacttcctggctctag

SEQ ID NO: 107406 - RNA, 21 nt, synthetic construct
  source 1..21: mol_type = other RNA
ttgctgagggaatttttctta

SEQ ID NO: 107407 - RNA, 21 nt, synthetic construct
  source 1..21: mol_type = other RNA
ttgctgcactggctattagtt

SEQ ID NO: 107408 - RNA, 21 nt, synthetic construct
  source 1..21: mol_type = other RNA
ttgctgcagtttttccactaa

SEQ ID NO: 107409 - RNA, 21 nt, synthetic construct
  source 1..21: mol_type = other RNA
ttgctgcatagtactccatta

SEQ ID NO: 107410 - RNA, 21 nt, synthetic construct
  source 1..21: mol_type = other RNA
ttgctgcatcccaagggtttt

SEQ ID NO: 107411 - RNA, 21 nt, synthetic construct
  source 1..21: mol_type = other RNA
ttgctgccaagtcagcacttc

SEQ ID NO: 107412 - RNA, 21 nt, synthetic construct
  source 1..21: mol_type = other RNA
ttgctgccccagctaaaatgt

SEQ ID NO: 107413 - RNA, 21 nt, synthetic construct
  source 1..21: mol_type = other RNA
ttgctgcttctacccactatt

SEQ ID NO: 107414 - RNA, 21 nt, synthetic construct
  source 1..21: mol_type = other RNA
ttgctggaagttggcccaaca

SEQ ID NO: 107415 - RNA, 21 nt, synthetic construct
  source 1..21: mol_type = other RNA
ttgctggctcagtctgtttgc

SEQ ID NO: 107416 - RNA, 21 nt, synthetic construct
  source 1..21: mol_type = other RNA
ttgctgtataacattttctct

SEQ ID NO: 107417 - RNA, 21 nt, synthetic construct
  source 1..21: mol_type = other RNA
ttgctgtatacccaggtgtga

SEQ ID NO: 107418 - RNA, 21 nt, synthetic construct
  source 1..21: mol_type = other RNA
ttgctgtcaggcaagggactg

SEQ ID NO: 107419 - RNA, 21 nt, synthetic construct
  source 1..21: mol_type = other RNA
ttgctgttgtaatgttacttc

SEQ ID NO: 107420 - RNA, 21 nt, synthetic construct
  source 1..21: mol_type = other RNA
ttgcttaaagttggtcctgca

SEQ ID NO: 107421 - RNA, 21 nt, synthetic construct
  source 1..21: mol_type = other RNA
ttgcttaagtcactccatttg

SEQ ID NO: 107422 - RNA, 21 nt, synthetic construct
  source 1..21: mol_type = other RNA
ttgcttaattgagctgtcccc

SEQ ID NO: 107423 - RNA, 21 nt, synthetic construct
  source 1..21: mol_type = other RNA
ttgcttactctaatggggaaa

SEQ ID NO: 107424 - RNA, 21 nt, synthetic construct
  source 1..21: mol_type = other RNA
ttgcttactgtagcattgaag

SEQ ID NO: 107425 - RNA, 21 nt, synthetic construct
  source 1..21: mol_type = other RNA
ttgcttaggctgaagcaggct

SEQ ID NO: 107426 - RNA, 21 nt, synthetic construct
  source 1..21: mol_type = other RNA
ttgcttaggctgttattagag

SEQ ID NO: 107427 - RNA, 21 nt, synthetic construct
  source 1..21: mol_type = other RNA
ttgcttcaaagagaacaaaat

SEQ ID NO: 107428 - RNA, 21 nt, synthetic construct
  source 1..21: mol_type = other RNA
ttgcttcccacttcgaaagtt

SEQ ID NO: 107429 - RNA, 21 nt, synthetic construct
  source 1..21: mol_type = other RNA
ttgcttcgaagcttattaaaa

SEQ ID NO: 107430 - RNA, 21 nt, synthetic construct
  source 1..21: mol_type = other RNA
ttgcttgagagagataaaacc

SEQ ID NO: 107431 - RNA, 21 nt, synthetic construct
  source 1..21: mol_type = other RNA
ttgcttgagtgcaggagtttg

SEQ ID NO: 107432 - RNA, 21 nt, synthetic construct
  source 1..21: mol_type = other RNA
ttgcttgctctacaaaccttc

SEQ ID NO: 107433 - RNA, 21 nt, synthetic construct
  source 1..21: mol_type = other RNA
ttgcttggcacagaattattg

SEQ ID NO: 107434 - RNA, 21 nt, synthetic construct
  source 1..21: mol_type = other RNA
ttgcttgggaacagcagggga

SEQ ID NO: 107435 - RNA, 21 nt, synthetic construct
  source 1..21: mol_type = other RNA
ttgcttggtgttgactgaatt

SEQ ID NO: 107436 - RNA, 21 nt, synthetic construct
  source 1..21: mol_type = other RNA
ttgcttggtttcacacgcatt

SEQ ID NO: 107437 - RNA, 21 nt, synthetic construct
  source 1..21: mol_type = other RNA
ttgcttgtcttgaatagcatc

SEQ ID NO: 107438 - RNA, 21 nt, synthetic construct
  source 1..21: mol_type = other RNA
ttgctttaacctctggtattt

SEQ ID NO: 107439 - RNA, 21 nt, synthetic construct
  source 1..21: mol_type = other RNA
ttgctttactactgcattttt

SEQ ID NO: 107440 - RNA, 21 nt, synthetic construct
  source 1..21: mol_type = other RNA
ttgctttgaatttggaaaggg

SEQ ID NO: 107441 - RNA, 21 nt, synthetic construct
  source 1..21: mol_type = other RNA
ttgctttgcgaaatagtagtt

SEQ ID NO: 107442 - RNA, 21 nt, synthetic construct
  source 1..21: mol_type = other RNA
ttgctttgctgccccagctaa

SEQ ID NO: 107443 - RNA, 21 nt, synthetic construct
  source 1..21: mol_type = other RNA
ttgctttggagtcacagtgaa

SEQ ID NO: 107444 - RNA, 21 nt, synthetic construct
  source 1..21: mol_type = other RNA
ttgctttggagtgagaggact

SEQ ID NO: 107445 - RNA, 21 nt, synthetic construct
  source 1..21: mol_type = other RNA
ttgctttggctagaagcatct

SEQ ID NO: 107446 - RNA, 21 nt, synthetic construct
  source 1..21: mol_type = other RNA
ttgctttgggtctatagttta

SEQ ID NO: 107447 - RNA, 21 nt, synthetic construct
  source 1..21: mol_type = other RNA
ttgcttttacttggctcctcc

SEQ ID NO: 107448 - RNA, 21 nt, synthetic construct
  source 1..21: mol_type = other RNA
ttgcttttcctggaaaacttc

SEQ ID NO: 107449 - RNA, 21 nt, synthetic construct
  source 1..21: mol_type = other RNA
ttgcttttgctgagggaattt

SEQ ID NO: 107450 - RNA, 21 nt, synthetic construct
  source 1..21: mol_type = other RNA
ttgcttttgctttgggtctat

SEQ ID NO: 107451 - RNA, 21 nt, synthetic construct
  source 1..21: mol_type = other RNA
ttgctttttcttcttgttttg

SEQ ID NO: 107452 - RNA, 21 nt, synthetic construct
  source 1..21: mol_type = other RNA
ttggaaaaatcgtcctcttcg

SEQ ID NO: 107453 - RNA, 21 nt, synthetic construct
  source 1..21: mol_type = other RNA
ttggaaaaatgtccgttgaag

SEQ ID NO: 107454 - RNA, 21 nt, synthetic construct
  source 1..21: mol_type = other RNA
ttggaaaacaaattgcatcaa

SEQ ID NO: 107455 - RNA, 21 nt, synthetic construct
  source 1..21: mol_type = other RNA
ttggaaaactaggtatttgaa

SEQ ID NO: 107456 - RNA, 21 nt, synthetic construct
  source 1..21: mol_type = other RNA
ttggaaaactctgtttcctta

SEQ ID NO: 107457 - RNA, 21 nt, synthetic construct
  source 1..21: mol_type = other RNA
ttggaaaagaaagctgtggat

SEQ ID NO: 107458 - RNA, 21 nt, synthetic construct
  source 1..21: mol_type = other RNA
ttggaaagggtagagcacttt

SEQ ID NO: 107459 - RNA, 21 nt, synthetic construct
  source 1..21: mol_type = other RNA
ttggaaatatggtcactgctg

SEQ ID NO: 107460 - RNA, 21 nt, synthetic construct
  source 1..21: mol_type = other RNA
ttggaaatgatacctcattta

SEQ ID NO: 107461 - RNA, 21 nt, synthetic construct
  source 1..21: mol_type = other RNA
ttggaaattagaaatgtggaa

SEQ ID NO: 107462 - RNA, 21 nt, synthetic construct
  source 1..21: mol_type = other RNA
ttggaacctttgtccactgtc

SEQ ID NO: 107463 - RNA, 21 nt, synthetic construct
  source 1..21: mol_type = other RNA
ttggaactcttgcggtctttt

SEQ ID NO: 107464 - RNA, 21 nt, synthetic construct
  source 1..21: mol_type = other RNA
ttggaagactatcacgattct

SEQ ID NO: 107465 - RNA, 21 nt, synthetic construct
  source 1..21: mol_type = other RNA
ttggaagactatgagaaggat

SEQ ID NO: 107466 - RNA, 21 nt, synthetic construct
  source 1..21: mol_type = other RNA
ttggaagagagaaggctgcca

SEQ ID NO: 107467 - RNA, 21 nt, synthetic construct
  source 1..21: mol_type = other RNA
ttggaagcatgtggccaggag

SEQ ID NO: 107468 - RNA, 21 nt, synthetic construct
  source 1..21: mol_type = other RNA
ttggaaggtaggagggtgtga

SEQ ID NO: 107469 - RNA, 21 nt, synthetic construct
  source 1..21: mol_type = other RNA
ttggaagtgaagtcaagatga

SEQ ID NO: 107470 - RNA, 21 nt, synthetic construct
  source 1..21: mol_type = other RNA
ttggaagtttctggaagtttc

SEQ ID NO: 107471 - RNA, 21 nt, synthetic construct
  source 1..21: mol_type = other RNA
ttggaatagagagcccagaaa

SEQ ID NO: 107472 - RNA, 21 nt, synthetic construct
  source 1..21: mol_type = other RNA
ttggaatgagtccagctttct

SEQ ID NO: 107473 - RNA, 21 nt, synthetic construct
  source 1..21: mol_type = other RNA
ttggaatgtgcacctccagtg

SEQ ID NO: 107474 - RNA, 21 nt, synthetic construct
  source 1..21: mol_type = other RNA
ttggaattaaaatgttgccaa

SEQ ID NO: 107475 - RNA, 21 nt, synthetic construct
  source 1..21: mol_type = other RNA
ttggaatttaaggggtaaatg

SEQ ID NO: 107476 - RNA, 21 nt, synthetic construct
  source 1..21: mol_type = other RNA
ttggaattttagtaattctcc

SEQ ID NO: 107477 - RNA, 21 nt, synthetic construct
  source 1..21: mol_type = other RNA
ttggacagctgggagaaagct

SEQ ID NO: 107478 - RNA, 21 nt, synthetic construct
  source 1..21: mol_type = other RNA
ttggacaggggacatgaagga

SEQ ID NO: 107479 - RNA, 21 nt, synthetic construct
  source 1..21: mol_type = other RNA
ttggacccatgcccatgtgca

SEQ ID NO: 107480 - RNA, 21 nt, synthetic construct
  source 1..21: mol_type = other RNA
ttggacgggtggtagggaggg

SEQ ID NO: 107481 - RNA, 21 nt, synthetic construct
  source 1..21: mol_type = other RNA
ttggactccaccctgcccctt

SEQ ID NO: 107482 - RNA, 21 nt, synthetic construct
  source 1..21: mol_type = other RNA
ttggagaacttaaaggtttgg

SEQ ID NO: 107483 - RNA, 21 nt, synthetic construct
  source 1..21: mol_type = other RNA
ttggagaagagttctgaaggc

SEQ ID NO: 107484 - RNA, 21 nt, synthetic construct
  source 1..21: mol_type = other RNA
ttggagacagcctaaaccatt

SEQ ID NO: 107485 - RNA, 21 nt, synthetic construct
  source 1..21: mol_type = other RNA
ttggagactgataaacttcag

SEQ ID NO: 107486 - RNA, 21 nt, synthetic construct
  source 1..21: mol_type = other RNA
ttggagagaaaccttggtgtg

SEQ ID NO: 107487 - RNA, 21 nt, synthetic construct
  source 1..21: mol_type = other RNA
ttggagagatggtagtcaaca

SEQ ID NO: 107488 - RNA, 21 nt, synthetic construct
  source 1..21: mol_type = other RNA
ttggagctataatttatctgg

SEQ ID NO: 107489 - RNA, 21 nt, synthetic construct
  source 1..21: mol_type = other RNA
ttggagctgtatttttgctca

SEQ ID NO: 107490 - RNA, 21 nt, synthetic construct
  source 1..21: mol_type = other RNA
ttggaggagaaggccttccac

SEQ ID NO: 107491 - RNA, 21 nt, synthetic construct
  source 1..21: mol_type = other RNA
ttggaggagccctgctgtggc

SEQ ID NO: 107492 - RNA, 21 nt, synthetic construct
  source 1..21: mol_type = other RNA
ttggaggataatatctggact

SEQ ID NO: 107493 - RNA, 21 nt, synthetic construct
  source 1..21: mol_type = other RNA
ttggagtaaacctgcaatttt

SEQ ID NO: 107494 - RNA, 21 nt, synthetic construct
  source 1..21: mol_type = other RNA
ttggagtcacagtgaattctg

SEQ ID NO: 107495 - RNA, 21 nt, synthetic construct
  source 1..21: mol_type = other RNA
ttggagtcacttgacaaaaat

SEQ ID NO: 107496 - RNA, 21 nt, synthetic construct
  source 1..21: mol_type = other RNA
ttggagtgagaggactgcctg

SEQ ID NO: 107497 - RNA, 21 nt, synthetic construct
  source 1..21: mol_type = other RNA
ttggagtttgtagctcaaagc

SEQ ID NO: 107498 - RNA, 21 nt, synthetic construct
  source 1..21: mol_type = other RNA
ttggagttttccccctacacc

SEQ ID NO: 107499 - RNA, 21 nt, synthetic construct
  source 1..21: mol_type = other RNA
ttggatagtttctcaacttag

SEQ ID NO: 107500 - RNA, 21 nt, synthetic construct
  source 1..21: mol_type = other RNA
ttggatatccccatttttctc

SEQ ID NO: 107501 - RNA, 21 nt, synthetic construct
  source 1..21: mol_type = other RNA
ttggatattctacagaaaacc

SEQ ID NO: 107502 - RNA, 21 nt, synthetic construct
  source 1..21: mol_type = other RNA
ttggatatttgcagtagtatt

SEQ ID NO: 107503 - RNA, 21 nt, synthetic construct
  source 1..21: mol_type = other RNA
ttggatcttatctgctgtcgg

SEQ ID NO: 107504 - RNA, 21 nt, synthetic construct
  source 1..21: mol_type = other RNA
ttggatgaaaaagtactggaa

SEQ ID NO: 107505 - RNA, 21 nt, synthetic construct
  source 1..21: mol_type = other RNA
ttggatgaacgctaaattaaa

SEQ ID NO: 107506 - RNA, 21 nt, synthetic construct
  source 1..21: mol_type = other RNA
ttggatgcagatttcttttta

SEQ ID NO: 107507 - RNA, 21 nt, synthetic construct
  source 1..21: mol_type = other RNA
ttggattaagggcccaccctg

SEQ ID NO: 107508 - RNA, 21 nt, synthetic construct
  source 1..21: mol_type = other RNA
ttggattcccaggtattttgt

SEQ ID NO: 107509 - RNA, 21 nt, synthetic construct
  source 1..21: mol_type = other RNA
ttggattgcgattgtttcagt

SEQ ID NO: 107510 - RNA, 21 nt, synthetic construct
  source 1..21: mol_type = other RNA
ttggattgctaaactgttccc

SEQ ID NO: 107511 - RNA, 21 nt, synthetic construct
  source 1..21: mol_type = other RNA
ttggattgtgtgtcgagaaaa

SEQ ID NO: 107512 - RNA, 21 nt, synthetic construct
  source 1..21: mol_type = other RNA
ttggatttgagtaactaaact

SEQ ID NO: 107513 - RNA, 21 nt, synthetic construct
  source 1..21: mol_type = other RNA
ttggcaaaaaatgcagtagta

SEQ ID NO: 107514 - RNA, 21 nt, synthetic construct
  source 1..21: mol_type = other RNA
ttggcaaatctttagtgttgc

SEQ ID NO: 107515 - RNA, 21 nt, synthetic construct
  source 1..21: mol_type = other RNA
ttggcaaattgtcagattttc

SEQ ID NO: 107516 - RNA, 21 nt, synthetic construct
  source 1..21: mol_type = other RNA
ttggcaacattttaattccaa

SEQ ID NO: 107517 - RNA, 21 nt, synthetic construct
  source 1..21: mol_type = other RNA
ttggcaaggggaatggtactg

SEQ ID NO: 107518 - RNA, 21 nt, synthetic construct
  source 1..21: mol_type = other RNA
ttggcacagaattattgattg

SEQ ID NO: 107519 - RNA, 21 nt, synthetic construct
  source 1..21: mol_type = other RNA
ttggcacagccagtcagtgat

SEQ ID NO: 107520 - RNA, 21 nt, synthetic construct
  source 1..21: mol_type = other RNA
ttggcacaggagagcgacagc

SEQ ID NO: 107521 - RNA, 21 nt, synthetic construct
  source 1..21: mol_type = other RNA
ttggcactgaagccagtcctt

SEQ ID NO: 107522 - RNA, 21 nt, synthetic construct
  source 1..21: mol_type = other RNA
ttggcagcgtaactccatctt

SEQ ID NO: 107523 - RNA, 21 nt, synthetic construct
  source 1..21: mol_type = other RNA
ttggcataaagacagacattt

SEQ ID NO: 107524 - RNA, 21 nt, synthetic construct
  source 1..21: mol_type = other RNA
ttggcatacaactgctcataa

SEQ ID NO: 107525 - RNA, 21 nt, synthetic construct
  source 1..21: mol_type = other RNA
ttggcatttaaaagaacctct

SEQ ID NO: 107526 - RNA, 21 nt, synthetic construct
  source 1..21: mol_type = other RNA
ttggccaacatggcgaaacgc

SEQ ID NO: 107527 - RNA, 21 nt, synthetic construct
  source 1..21: mol_type = other RNA
ttggccagaatccctttcgct

SEQ ID NO: 107528 - RNA, 21 nt, synthetic construct
  source 1..21: mol_type = other RNA
ttggccaggctggttccaaac

SEQ ID NO: 107529 - RNA, 21 nt, synthetic construct
  source 1..21: mol_type = other RNA
ttggccattttcttttaaatg

SEQ ID NO: 107530 - RNA, 21 nt, synthetic construct
  source 1..21: mol_type = other RNA
ttggcccaacatgctcttaag

SEQ ID NO: 107531 - RNA, 21 nt, synthetic construct
  source 1..21: mol_type = other RNA
ttggcccagccatcccattac

SEQ ID NO: 107532 - RNA, 21 nt, synthetic construct
  source 1..21: mol_type = other RNA
ttggcccatatccttttatgt

SEQ ID NO: 107533 - RNA, 21 nt, synthetic construct
  source 1..21: mol_type = other RNA
ttggcccattttcgaattaga

SEQ ID NO: 107534 - RNA, 21 nt, synthetic construct
  source 1..21: mol_type = other RNA
ttggccgaatgtggtggtatg

SEQ ID NO: 107535 - RNA, 21 nt, synthetic construct
  source 1..21: mol_type = other RNA
ttggccgaggccagtccctag

SEQ ID NO: 107536 - RNA, 21 nt, synthetic construct
  source 1..21: mol_type = other RNA
ttggcctccccaagtgctgtg

SEQ ID NO: 107537 - RNA, 21 nt, synthetic construct
  source 1..21: mol_type = other RNA
ttggcctctgcggcggctgag

SEQ ID NO: 107538 - RNA, 21 nt, synthetic construct
  source 1..21: mol_type = other RNA
ttggcctggacacacacagtc

SEQ ID NO: 107539 - RNA, 21 nt, synthetic construct
  source 1..21: mol_type = other RNA
ttggccttctgaggagctgag

SEQ ID NO: 107540 - RNA, 21 nt, synthetic construct
  source 1..21: mol_type = other RNA
ttggccttgaggtgagacaga

SEQ ID NO: 107541 - RNA, 21 nt, synthetic construct
  source 1..21: mol_type = other RNA
ttggcgcagtgcttagcgctg

SEQ ID NO: 107542 - RNA, 21 nt, synthetic construct
  source 1..21: mol_type = other RNA
ttggcgtacatgtagatatgg

SEQ ID NO: 107543 - RNA, 21 nt, synthetic construct
  source 1..21: mol_type = other RNA
ttggctaaaagaccgcaagag

SEQ ID NO: 107544 - RNA, 21 nt, synthetic construct
  source 1..21: mol_type = other RNA
ttggctactgtaaacaatgct

SEQ ID NO: 107545 - RNA, 21 nt, synthetic construct
  source 1..21: mol_type = other RNA
ttggctagaagcatctgatac

SEQ ID NO: 107546 - RNA, 21 nt, synthetic construct
  source 1..21: mol_type = other RNA
ttggctagactaagaaaaaca

SEQ ID NO: 107547 - RNA, 21 nt, synthetic construct
  source 1..21: mol_type = other RNA
ttggctattgtcagtaattct

SEQ ID NO: 107548 - RNA, 21 nt, synthetic construct
  source 1..21: mol_type = other RNA
ttggctcaatggttaagactg

SEQ ID NO: 107549 - RNA, 21 nt, synthetic construct
  source 1..21: mol_type = other RNA
ttggctcccatgattcaaaat

SEQ ID NO: 107550 - RNA, 21 nt, synthetic construct
  source 1..21: mol_type = other RNA
ttggctcctcccggctaagat

SEQ ID NO: 107551 - RNA, 21 nt, synthetic construct
  source 1..21: mol_type = other RNA
ttggctccttaccactataat

SEQ ID NO: 107552 - RNA, 21 nt, synthetic construct
  source 1..21: mol_type = other RNA
ttggctgaaatgctgtaactg

SEQ ID NO: 107553 - RNA, 21 nt, synthetic construct
  source 1..21: mol_type = other RNA
ttggctgggagcttatcaggc

SEQ ID NO: 107554 - RNA, 21 nt, synthetic construct
  source 1..21: mol_type = other RNA
ttggctgttaccatttgacct

SEQ ID NO: 107555 - RNA, 21 nt, synthetic construct
  source 1..21: mol_type = other RNA
ttggctgttagccttgccatt

SEQ ID NO: 107556 - RNA, 21 nt, synthetic construct
  source 1..21: mol_type = other RNA
ttggcttatagtgttcttttt

SEQ ID NO: 107557 - RNA, 21 nt, synthetic construct
  source 1..21: mol_type = other RNA
ttggcttggggaacagtttag

SEQ ID NO: 107558 - RNA, 21 nt, synthetic construct
  source 1..21: mol_type = other RNA
ttggcttttggcagcgtaact

SEQ ID NO: 107559 - RNA, 21 nt, synthetic construct
  source 1..21: mol_type = other RNA
ttgggaaaatctctgacttca

SEQ ID NO: 107560 - RNA, 21 nt, synthetic construct
  source 1..21: mol_type = other RNA
ttgggaaaatcttggaacttt

SEQ ID NO: 107561 - RNA, 21 nt, synthetic construct
  source 1..21: mol_type = other RNA
ttgggaacagcaggggaaggc

SEQ ID NO: 107562 - RNA, 21 nt, synthetic construct
  source 1..21: mol_type = other RNA
ttgggaagattggctttagat

SEQ ID NO: 107563 - RNA, 21 nt, synthetic construct
  source 1..21: mol_type = other RNA
ttgggaaggatggccagtcat

SEQ ID NO: 107564 - RNA, 21 nt, synthetic construct
  source 1..21: mol_type = other RNA
ttgggaaggccctgattgaga

SEQ ID NO: 107565 - RNA, 21 nt, synthetic construct
  source 1..21: mol_type = other RNA
ttgggaatactttcccatctc

SEQ ID NO: 107566 - RNA, 21 nt, synthetic construct
  source 1..21: mol_type = other RNA
ttgggaatgtggtcacacttt

SEQ ID NO: 107567 - RNA, 21 nt, synthetic construct
  source 1..21: mol_type = other RNA
ttgggactgagacagtattgt

SEQ ID NO: 107568 - RNA, 21 nt, synthetic construct
  source 1..21: mol_type = other RNA
ttgggagaaaatttttacagt

SEQ ID NO: 107569 - RNA, 21 nt, synthetic construct
  source 1..21: mol_type = other RNA
ttgggagctttcattattacc

SEQ ID NO: 107570 - RNA, 21 nt, synthetic construct
  source 1..21: mol_type = other RNA
ttgggaggctgaggcggaagg

SEQ ID NO: 107571 - RNA, 21 nt, synthetic construct
  source 1..21: mol_type = other RNA
ttgggaggctgaggctgggga

SEQ ID NO: 107572 - RNA, 21 nt, synthetic construct
  source 1..21: mol_type = other RNA
ttgggaggtttttgattactg

SEQ ID NO: 107573 - RNA, 21 nt, synthetic construct
  source 1..21: mol_type = other RNA
ttgggagtctatttctgaaca

SEQ ID NO: 107574 - RNA, 21 nt, synthetic construct
  source 1..21: mol_type = other RNA
ttgggatatagctacaatgat

SEQ ID NO: 107575 - RNA, 21 nt, synthetic construct
  source 1..21: mol_type = other RNA
ttgggatcacacttgatggtt

SEQ ID NO: 107576 - RNA, 21 nt, synthetic construct
  source 1..21: mol_type = other RNA
ttgggatctgtcatgtttgaa

SEQ ID NO: 107577 - RNA, 21 nt, synthetic construct
  source 1..21: mol_type = other RNA
ttgggatgcagcaaaagcacc

SEQ ID NO: 107578 - RNA, 21 nt, synthetic construct
  source 1..21: mol_type = other RNA
ttgggatgtttctacctttgg

SEQ ID NO: 107579 - RNA, 21 nt, synthetic construct
  source 1..21: mol_type = other RNA
ttgggattacaggcatgagcc

SEQ ID NO: 107580 - RNA, 21 nt, synthetic construct
  source 1..21: mol_type = other RNA
ttgggattagcttattctttt

SEQ ID NO: 107581 - RNA, 21 nt, synthetic construct
  source 1..21: mol_type = other RNA
ttgggcaagagagcaagtccc

SEQ ID NO: 107582 - RNA, 21 nt, synthetic construct
  source 1..21: mol_type = other RNA
ttgggcacactccccagtggt

SEQ ID NO: 107583 - RNA, 21 nt, synthetic construct
  source 1..21: mol_type = other RNA
ttgggcattaattgagagctt

SEQ ID NO: 107584 - RNA, 21 nt, synthetic construct
  source 1..21: mol_type = other RNA
ttgggccaacttccagcaaga

SEQ ID NO: 107585 - RNA, 21 nt, synthetic construct
  source 1..21: mol_type = other RNA
ttgggcctttctgtttgtttg

SEQ ID NO: 107586 - RNA, 21 nt, synthetic construct
  source 1..21: mol_type = other RNA
ttgggctaaggtggagtggtg

SEQ ID NO: 107587 - RNA, 21 nt, synthetic construct
  source 1..21: mol_type = other RNA
ttgggctattaagtattgcat

SEQ ID NO: 107588 - RNA, 21 nt, synthetic construct
  source 1..21: mol_type = other RNA
ttgggctcccttccagcgtgt

SEQ ID NO: 107589 - RNA, 21 nt, synthetic construct
  source 1..21: mol_type = other RNA
ttgggcttaacatttgaactc

SEQ ID NO: 107590 - RNA, 21 nt, synthetic construct
  source 1..21: mol_type = other RNA
ttgggcttatcagatggtgat

SEQ ID NO: 107591 - RNA, 21 nt, synthetic construct
  source 1..21: mol_type = other RNA
ttgggcttggttggaaaagaa

SEQ ID NO: 107592 - RNA, 21 nt, synthetic construct
  source 1..21: mol_type = other RNA
ttgggcttttcatatacgtat

SEQ ID NO: 107593 - RNA, 21 nt, synthetic construct
  source 1..21: mol_type = other RNA
ttggggaacagtttagcaatc

SEQ ID NO: 107594 - RNA, 21 nt, synthetic construct
  source 1..21: mol_type = other RNA
ttggggactcttatggctata

SEQ ID NO: 107595 - RNA, 21 nt, synthetic construct
  source 1..21: mol_type = other RNA
ttggggagagtgggcccagca

SEQ ID NO: 107596 - RNA, 21 nt, synthetic construct
  source 1..21: mol_type = other RNA
ttggggagataccttgaaagg

SEQ ID NO: 107597 - RNA, 21 nt, synthetic construct
  source 1..21: mol_type = other RNA
ttggggaggccaaggcaggac

SEQ ID NO: 107598 - RNA, 21 nt, synthetic construct
  source 1..21: mol_type = other RNA
ttggggattctgctactagca

SEQ ID NO: 107599 - RNA, 21 nt, synthetic construct
  source 1..21: mol_type = other RNA
ttggggccatctgaattcaag

SEQ ID NO: 107600 - RNA, 21 nt, synthetic construct
  source 1..21: mol_type = other RNA
ttggggctaggatttcagtaa

SEQ ID NO: 107601 - RNA, 21 nt, synthetic construct
  source 1..21: mol_type = other RNA
ttggggctctaatgcaagagt

SEQ ID NO: 107602 - RNA, 21 nt, synthetic construct
  source 1..21: mol_type = other RNA
ttggggcttttgaacactctg

SEQ ID NO: 107603 - RNA, 21 nt, synthetic construct
  source 1..21: mol_type = other RNA
ttgggggaaaattgacatttt

SEQ ID NO: 107604 - RNA, 21 nt, synthetic construct
  source 1..21: mol_type = other RNA
ttgggggaagagagcattgcc

SEQ ID NO: 107605 - RNA, 21 nt, synthetic construct
  source 1..21: mol_type = other RNA
ttgggggaagcaggaactcat

SEQ ID NO: 107606 - RNA, 21 nt, synthetic construct
  source 1..21: mol_type = other RNA
ttgggggctgggtcggccgag

SEQ ID NO: 107607 - RNA, 21 nt, synthetic construct
  source 1..21: mol_type = other RNA
ttggggtatgtttgattagtt

SEQ ID NO: 107608 - RNA, 21 nt, synthetic construct
  source 1..21: mol_type = other RNA
ttgggtaatttatctccataa

SEQ ID NO: 107609 - RNA, 21 nt, synthetic construct
  source 1..21: mol_type = other RNA
ttgggtaggaagctgatcaag

SEQ ID NO: 107610 - RNA, 21 nt, synthetic construct
  source 1..21: mol_type = other RNA
ttgggtataaatgatgagcta

SEQ ID NO: 107611 - RNA, 21 nt, synthetic construct
  source 1..21: mol_type = other RNA
ttgggtcaacaaactaactag

SEQ ID NO: 107612 - RNA, 21 nt, synthetic construct
  source 1..21: mol_type = other RNA
ttgggtctatagtttaattgg

SEQ ID NO: 107613 - RNA, 21 nt, synthetic construct
  source 1..21: mol_type = other RNA
ttgggtgaataacccatatct

SEQ ID NO: 107614 - RNA, 21 nt, synthetic construct
  source 1..21: mol_type = other RNA
ttgggtgacagagagagacct

SEQ ID NO: 107615 - RNA, 21 nt, synthetic construct
  source 1..21: mol_type = other RNA
ttgggtgacctcatgtaacta

SEQ ID NO: 107616 - RNA, 21 nt, synthetic construct
  source 1..21: mol_type = other RNA
ttgggtggaagctgtccttct

SEQ ID NO: 107617 - RNA, 21 nt, synthetic construct
  source 1..21: mol_type = other RNA
ttgggtttaactgaggtgttt

SEQ ID NO: 107618 - RNA, 21 nt, synthetic construct
  source 1..21: mol_type = other RNA
ttgggtttgagtttccagaaa

SEQ ID NO: 107619 - RNA, 21 nt, synthetic construct
  source 1..21: mol_type = other RNA
ttggtaaaaagtgcttctagt

SEQ ID NO: 107620 - RNA, 21 nt, synthetic construct
  source 1..21: mol_type = other RNA
ttggtaaaatgtggcaaattt

SEQ ID NO: 107621 - RNA, 21 nt, synthetic construct
  source 1..21: mol_type = other RNA
ttggtaaacagcagtcttaac

SEQ ID NO: 107622 - RNA, 21 nt, synthetic construct
  source 1..21: mol_type = other RNA
ttggtaagagtgagaccctgt

SEQ ID NO: 107623 - RNA, 21 nt, synthetic construct
  source 1..21: mol_type = other RNA
ttggtaagctgtgagtccttc

SEQ ID NO: 107624 - RNA, 21 nt, synthetic construct
  source 1..21: mol_type = other RNA
ttggtaatgggaaagacaggt

SEQ ID NO: 107625 - RNA, 21 nt, synthetic construct
  source 1..21: mol_type = other RNA
ttggtaatgttatatttccgt

SEQ ID NO: 107626 - RNA, 21 nt, synthetic construct
  source 1..21: mol_type = other RNA
ttggtagaggattccaggttt

SEQ ID NO: 107627 - RNA, 21 nt, synthetic construct
  source 1..21: mol_type = other RNA
ttggtagataccagacccttt

SEQ ID NO: 107628 - RNA, 21 nt, synthetic construct
  source 1..21: mol_type = other RNA
ttggtagatttctgcatagag

SEQ ID NO: 107629 - RNA, 21 nt, synthetic construct
  source 1..21: mol_type = other RNA
ttggtaggccaaggcgggagg

SEQ ID NO: 107630 - RNA, 21 nt, synthetic construct
  source 1..21: mol_type = other RNA
ttggtagtcaatgcaatgcgt

SEQ ID NO: 107631 - RNA, 21 nt, synthetic construct
  source 1..21: mol_type = other RNA
ttggtagtttgcacgttttta

SEQ ID NO: 107632 - RNA, 21 nt, synthetic construct
  source 1..21: mol_type = other RNA
ttggtatgcatcttgaactaa

SEQ ID NO: 107633 - RNA, 21 nt, synthetic construct
  source 1..21: mol_type = other RNA
ttggtatgttgtgttttcatt

SEQ ID NO: 107634 - RNA, 21 nt, synthetic construct
  source 1..21: mol_type = other RNA
ttggtattcttatccctacct

SEQ ID NO: 107635 - RNA, 21 nt, synthetic construct
  source 1..21: mol_type = other RNA
ttggtattttttagagacagg

SEQ ID NO: 107636 - RNA, 21 nt, synthetic construct
  source 1..21: mol_type = other RNA
ttggtcaaaactgtattttct

SEQ ID NO: 107637 - RNA, 21 nt, synthetic construct
  source 1..21: mol_type = other RNA
ttggtcaattgatctgccagg

SEQ ID NO: 107638 - RNA, 21 nt, synthetic construct
  source 1..21: mol_type = other RNA
ttggtcagaaaaatggaatat

SEQ ID NO: 107639 - RNA, 21 nt, synthetic construct
  source 1..21: mol_type = other RNA
ttggtcctgcatatgttttta

SEQ ID NO: 107640 - RNA, 21 nt, synthetic construct
  source 1..21: mol_type = other RNA
ttggtcctggaaaaagaccat

SEQ ID NO: 107641 - RNA, 21 nt, synthetic construct
  source 1..21: mol_type = other RNA
ttggtcgaaaacctgaaatgg

SEQ ID NO: 107642 - RNA, 21 nt, synthetic construct
  source 1..21: mol_type = other RNA
ttggtctcattcactagacac

SEQ ID NO: 107643 - RNA, 21 nt, synthetic construct
  source 1..21: mol_type = other RNA
ttggtctgcagactcttgtcc

SEQ ID NO: 107644 - RNA, 21 nt, synthetic construct
  source 1..21: mol_type = other RNA
ttggtctgggtgatatctgta

SEQ ID NO: 107645 - RNA, 21 nt, synthetic construct
  source 1..21: mol_type = other RNA
ttggtcttaccctctagctcc

SEQ ID NO: 107646 - RNA, 21 nt, synthetic construct
  source 1..21: mol_type = other RNA
ttggtctttctcccaggtcag

SEQ ID NO: 107647 - RNA, 21 nt, synthetic construct
  source 1..21: mol_type = other RNA
ttggtgaagagagcctgtggt

SEQ ID NO: 107648 - RNA, 21 nt, synthetic construct
  source 1..21: mol_type = other RNA
ttggtgaaggttcatgaacat

SEQ ID NO: 107649 - RNA, 21 nt, synthetic construct
  source 1..21: mol_type = other RNA
ttggtgaatctgagtaaaggg

SEQ ID NO: 107650 - RNA, 21 nt, synthetic construct
  source 1..21: mol_type = other RNA
ttggtgactgaattcccacaa

SEQ ID NO: 107651 - RNA, 21 nt, synthetic construct
  source 1..21: mol_type = other RNA
ttggtgagaacccagtgtctg

SEQ ID NO: 107652 - RNA, 21 nt, synthetic construct
  source 1..21: mol_type = other RNA
ttggtgatcctaagccatcta

SEQ ID NO: 107653 - RNA, 21 nt, synthetic construct
  source 1..21: mol_type = other RNA
ttggtgcaaggataaacaaag

SEQ ID NO: 107654 - RNA, 21 nt, synthetic construct
  source 1..21: mol_type = other RNA
ttggtgcatttgggacagcct

SEQ ID NO: 107655 - RNA, 21 nt, synthetic construct
  source 1..21: mol_type = other RNA
ttggtgctgataaatggcttt

SEQ ID NO: 107656 - RNA, 21 nt, synthetic construct
  source 1..21: mol_type = other RNA
ttggtgcttagctgcctcttc

SEQ ID NO: 107657 - RNA, 21 nt, synthetic construct
  source 1..21: mol_type = other RNA
ttggtgcttccttctcttata

SEQ ID NO: 107658 - RNA, 21 nt, synthetic construct
  source 1..21: mol_type = other RNA
ttggtggcccacacctgcaat

SEQ ID NO: 107659 - RNA, 21 nt, synthetic construct
  source 1..21: mol_type = other RNA
ttggtggtaactgatgtgagg

SEQ ID NO: 107660 - RNA, 21 nt, synthetic construct
  source 1..21: mol_type = other RNA
ttggtgtgctcttttcatcac

SEQ ID NO: 107661 - RNA, 21 nt, synthetic construct
  source 1..21: mol_type = other RNA
ttggtgtgcttctgataggaa

SEQ ID NO: 107662 - RNA, 21 nt, synthetic construct
  source 1..21: mol_type = other RNA
ttggtgtgtgcaaaggattag

SEQ ID NO: 107663 - RNA, 21 nt, synthetic construct
  source 1..21: mol_type = other RNA
ttggtgttgactgaattaatc

SEQ ID NO: 107664 - RNA, 21 nt, synthetic construct
  source 1..21: mol_type = other RNA
ttggtgtttctgacaggtggt

SEQ ID NO: 107665 - RNA, 21 nt, synthetic construct
  source 1..21: mol_type = other RNA
ttggtgtttttctaggtagtt

SEQ ID NO: 107666 - RNA, 21 nt, synthetic construct
  source 1..21: mol_type = other RNA
ttggttaaacttggtctgggt

SEQ ID NO: 107667 - RNA, 21 nt, synthetic construct
  source 1..21: mol_type = other RNA
ttggttatgcgaatttacttt

SEQ ID NO: 107668 - RNA, 21 nt, synthetic construct
  source 1..21: mol_type = other RNA
ttggttattcatgtttgtggt

SEQ ID NO: 107669 - RNA, 21 nt, synthetic construct
  source 1..21: mol_type = other RNA
ttggttcacttgaaacctgcc

SEQ ID NO: 107670 - RNA, 21 nt, synthetic construct
  source 1..21: mol_type = other RNA
ttggttcatttcaggaatgca

SEQ ID NO: 107671 - RNA, 21 nt, synthetic construct
  source 1..21: mol_type = other RNA
ttggttcgtttgaggcttttc

SEQ ID NO: 107672 - RNA, 21 nt, synthetic construct
  source 1..21: mol_type = other RNA
ttggttggaaaagaaagctgt

SEQ ID NO: 107673 - RNA, 21 nt, synthetic construct
  source 1..21: mol_type = other RNA
ttggttggactccaccctgcc

SEQ ID NO: 107674 - RNA, 21 nt, synthetic construct
  source 1..21: mol_type = other RNA
ttggtttattttctgcatttg

SEQ ID NO: 107675 - RNA, 21 nt, synthetic construct
  source 1..21: mol_type = other RNA
ttggtttcacacgcattgcat

SEQ ID NO: 107676 - RNA, 21 nt, synthetic construct
  source 1..21: mol_type = other RNA
ttggtttcttcaagatactgc

SEQ ID NO: 107677 - RNA, 21 nt, synthetic construct
  source 1..21: mol_type = other RNA
ttggtttgaaatgatcttttg

SEQ ID NO: 107678 - RNA, 21 nt, synthetic construct
  source 1..21: mol_type = other RNA
ttggtttgtatgtgttaaacc

SEQ ID NO: 107679 - RNA, 21 nt, synthetic construct
  source 1..21: mol_type = other RNA
ttggtttgtgtgtttgtgaaa

SEQ ID NO: 107680 - RNA, 21 nt, synthetic construct
  source 1..21: mol_type = other RNA
ttggttttactactgtactgt

SEQ ID NO: 107681 - RNA, 21 nt, synthetic construct
  source 1..21: mol_type = other RNA
ttggttttgactcagtacttc

SEQ ID NO: 107682 - RNA, 21 nt, synthetic construct
  source 1..21: mol_type = other RNA
ttggtttttatggaataatgg

SEQ ID NO: 107683 - RNA, 21 nt, synthetic construct
  source 1..21: mol_type = other RNA
ttgtaaatgaaacacttgtgt

SEQ ID NO: 107684 - RNA, 21 nt, synthetic construct
  source 1..21: mol_type = other RNA
ttgtaacatgttagattagga

SEQ ID NO: 107685 - RNA, 21 nt, synthetic construct
  source 1..21: mol_type = other RNA
ttgtaacgtgtatagcttttt

SEQ ID NO: 107686 - RNA, 21 nt, synthetic construct
  source 1..21: mol_type = other RNA
ttgtaactacagacatgccac

SEQ ID NO: 107687 - RNA, 21 nt, synthetic construct
  source 1..21: mol_type = other RNA
ttgtaacttgaattcagatgg

SEQ ID NO: 107688 - RNA, 21 nt, synthetic construct
  source 1..21: mol_type = other RNA
ttgtaacttgttcatgtttac

SEQ ID NO: 107689 - RNA, 21 nt, synthetic construct
  source 1..21: mol_type = other RNA
ttgtaagttggattcccaggt

SEQ ID NO: 107690 - RNA, 21 nt, synthetic construct
  source 1..21: mol_type = other RNA
ttgtaataacttggagaactt

SEQ ID NO: 107691 - RNA, 21 nt, synthetic construct
  source 1..21: mol_type = other RNA
ttgtaatcaagtatctccctg

SEQ ID NO: 107692 - RNA, 21 nt, synthetic construct
  source 1..21: mol_type = other RNA
ttgtaatcacagtacgctttt

SEQ ID NO: 107693 - RNA, 21 nt, synthetic construct
  source 1..21: mol_type = other RNA
ttgtaatcctgtttctctaca

SEQ ID NO: 107694 - RNA, 21 nt, synthetic construct
  source 1..21: mol_type = other RNA
ttgtaatctaaggattatggc

SEQ ID NO: 107695 - RNA, 21 nt, synthetic construct
  source 1..21: mol_type = other RNA
ttgtaatgtctcctctttcat

SEQ ID NO: 107696 - RNA, 21 nt, synthetic construct
  source 1..21: mol_type = other RNA
ttgtaatgttacttctcagct

SEQ ID NO: 107697 - RNA, 21 nt, synthetic construct
  source 1..21: mol_type = other RNA
ttgtaattcatcctactagta

SEQ ID NO: 107698 - RNA, 21 nt, synthetic construct
  source 1..21: mol_type = other RNA
ttgtacaattttcttaccctt

SEQ ID NO: 107699 - RNA, 21 nt, synthetic construct
  source 1..21: mol_type = other RNA
ttgtacacctcaaactagaaa

SEQ ID NO: 107700 - RNA, 21 nt, synthetic construct
  source 1..21: mol_type = other RNA
ttgtacagtaattgtagtttc

SEQ ID NO: 107701 - RNA, 21 nt, synthetic construct
  source 1..21: mol_type = other RNA
ttgtacatgaagtcctcaatc

SEQ ID NO: 107702 - RNA, 21 nt, synthetic construct
  source 1..21: mol_type = other RNA
ttgtaccttgatttatggcct

SEQ ID NO: 107703 - RNA, 21 nt, synthetic construct
  source 1..21: mol_type = other RNA
ttgtaccttggagagaaacct

SEQ ID NO: 107704 - RNA, 21 nt, synthetic construct
  source 1..21: mol_type = other RNA
ttgtactacttgtcaggtggg

SEQ ID NO: 107705 - RNA, 21 nt, synthetic construct
  source 1..21: mol_type = other RNA
ttgtactcccagcctcaaaca

SEQ ID NO: 107706 - RNA, 21 nt, synthetic construct
  source 1..21: mol_type = other RNA
ttgtactgtgtggcttctcaa

SEQ ID NO: 107707 - RNA, 21 nt, synthetic construct
  source 1..21: mol_type = other RNA
ttgtacttctaccttgaaaat

SEQ ID NO: 107708 - RNA, 21 nt, synthetic construct
  source 1..21: mol_type = other RNA
ttgtacttgacacaaaggact

SEQ ID NO: 107709 - RNA, 21 nt, synthetic construct
  source 1..21: mol_type = other RNA
ttgtagaccctgttagtcccc

SEQ ID NO: 107710 - RNA, 21 nt, synthetic construct
  source 1..21: mol_type = other RNA
ttgtagagacagaatcttact

SEQ ID NO: 107711 - RNA, 21 nt, synthetic construct
  source 1..21: mol_type = other RNA
ttgtagagcaagcaacaccag

SEQ ID NO: 107712 - RNA, 21 nt, synthetic construct
  source 1..21: mol_type = other RNA
ttgtagaggaggagggttaga

SEQ ID NO: 107713 - RNA, 21 nt, synthetic construct
  source 1..21: mol_type = other RNA
ttgtagagggaatttgtttta

SEQ ID NO: 107714 - RNA, 21 nt, synthetic construct
  source 1..21: mol_type = other RNA
ttgtagctaatatctttgggg

SEQ ID NO: 107715 - RNA, 21 nt, synthetic construct
  source 1..21: mol_type = other RNA
ttgtagctatatcccaaattg

SEQ ID NO: 107716 - RNA, 21 nt, synthetic construct
  source 1..21: mol_type = other RNA
ttgtagctcaaagcatatgaa

SEQ ID NO: 107717 - RNA, 21 nt, synthetic construct
  source 1..21: mol_type = other RNA
ttgtaggaaagcctgtgacag

SEQ ID NO: 107718 - RNA, 21 nt, synthetic construct
  source 1..21: mol_type = other RNA
ttgtaggtgtctcatttaata

SEQ ID NO: 107719 - RNA, 21 nt, synthetic construct
  source 1..21: mol_type = other RNA
ttgtagtgtcttaatcctatt

SEQ ID NO: 107720 - RNA, 21 nt, synthetic construct
  source 1..21: mol_type = other RNA
ttgtagtttccatggaggggc

SEQ ID NO: 107721 - RNA, 21 nt, synthetic construct
  source 1..21: mol_type = other RNA
ttgtataaattactgtctgtg

SEQ ID NO: 107722 - RNA, 21 nt, synthetic construct
  source 1..21: mol_type = other RNA
ttgtatatacccttctgttaa

SEQ ID NO: 107723 - RNA, 21 nt, synthetic construct
  source 1..21: mol_type = other RNA
ttgtatatggtttaaggtaag

SEQ ID NO: 107724 - RNA, 21 nt, synthetic construct
  source 1..21: mol_type = other RNA
ttgtatccagtaatcttgcta

SEQ ID NO: 107725 - RNA, 21 nt, synthetic construct
  source 1..21: mol_type = other RNA
ttgtatcctgagacttaggca

SEQ ID NO: 107726 - RNA, 21 nt, synthetic construct
  source 1..21: mol_type = other RNA
ttgtatcctgtttgagaagtc

SEQ ID NO: 107727 - RNA, 21 nt, synthetic construct
  source 1..21: mol_type = other RNA
ttgtatctgtgatccctgata

SEQ ID NO: 107728 - RNA, 21 nt, synthetic construct
  source 1..21: mol_type = other RNA
ttgtatcttcacaaacaaatc

SEQ ID NO: 107729 - RNA, 21 nt, synthetic construct
  source 1..21: mol_type = other RNA
ttgtatggagactagtacact

SEQ ID NO: 107730 - RNA, 21 nt, synthetic construct
  source 1..21: mol_type = other RNA
ttgtatgtgttaaaccattct

SEQ ID NO: 107731 - RNA, 21 nt, synthetic construct
  source 1..21: mol_type = other RNA
ttgtattatttctgtcatctg

SEQ ID NO: 107732 - RNA, 21 nt, synthetic construct
  source 1..21: mol_type = other RNA
ttgtattcatccagtttaaag

SEQ ID NO: 107733 - RNA, 21 nt, synthetic construct
  source 1..21: mol_type = other RNA
ttgtattctgacctaaagttt

SEQ ID NO: 107734 - RNA, 21 nt, synthetic construct
  source 1..21: mol_type = other RNA
ttgtatttctgttagatggtg

SEQ ID NO: 107735 - RNA, 21 nt, synthetic construct
  source 1..21: mol_type = other RNA
ttgtattttacaccatgcagg

SEQ ID NO: 107736 - RNA, 21 nt, synthetic construct
  source 1..21: mol_type = other RNA
ttgtatttttcacaaacacac

SEQ ID NO: 107737 - RNA, 21 nt, synthetic construct
  source 1..21: mol_type = other RNA
ttgtcaacttttagtaggtct

SEQ ID NO: 107738 - RNA, 21 nt, synthetic construct
  source 1..21: mol_type = other RNA
ttgtcaagctatcagaatttt

SEQ ID NO: 107739 - RNA, 21 nt, synthetic construct
  source 1..21: mol_type = other RNA
ttgtcaaggtcatcctttccc

SEQ ID NO: 107740 - RNA, 21 nt, synthetic construct
  source 1..21: mol_type = other RNA
ttgtcaagtgactccaagcac

SEQ ID NO: 107741 - RNA, 21 nt, synthetic construct
  source 1..21: mol_type = other RNA
ttgtcaagttctgatttcaaa

SEQ ID NO: 107742 - RNA, 21 nt, synthetic construct
  source 1..21: mol_type = other RNA
ttgtcaataatttggatgaac

SEQ ID NO: 107743 - RNA, 21 nt, synthetic construct
  source 1..21: mol_type = other RNA
ttgtcaatggggaactttatt

SEQ ID NO: 107744 - RNA, 21 nt, synthetic construct
  source 1..21: mol_type = other RNA
ttgtcacaaaatgtggatgca

SEQ ID NO: 107745 - RNA, 21 nt, synthetic construct
  source 1..21: mol_type = other RNA
ttgtcacacggaaaacattat

SEQ ID NO: 107746 - RNA, 21 nt, synthetic construct
  source 1..21: mol_type = other RNA
ttgtcacatagaagcgctctt

SEQ ID NO: 107747 - RNA, 21 nt, synthetic construct
  source 1..21: mol_type = other RNA
ttgtcagaaaagatcagtaaa

SEQ ID NO: 107748 - RNA, 21 nt, synthetic construct
  source 1..21: mol_type = other RNA
ttgtcagaattagaaagctgg

SEQ ID NO: 107749 - RNA, 21 nt, synthetic construct
  source 1..21: mol_type = other RNA
ttgtcaggcatgctaactgca

SEQ ID NO: 107750 - RNA, 21 nt, synthetic construct
  source 1..21: mol_type = other RNA
ttgtcaggtgggcactgggag

SEQ ID NO: 107751 - RNA, 21 nt, synthetic construct
  source 1..21: mol_type = other RNA
ttgtcagtaattctgcagtga

SEQ ID NO: 107752 - RNA, 21 nt, synthetic construct
  source 1..21: mol_type = other RNA
ttgtcataacagtattgtctt

SEQ ID NO: 107753 - RNA, 21 nt, synthetic construct
  source 1..21: mol_type = other RNA
ttgtcatgaatgaatgttgag

SEQ ID NO: 107754 - RNA, 21 nt, synthetic construct
  source 1..21: mol_type = other RNA
ttgtcattaccttatagatga

SEQ ID NO: 107755 - RNA, 21 nt, synthetic construct
  source 1..21: mol_type = other RNA
ttgtcatttctgcttagtctt

SEQ ID NO: 107756 - RNA, 21 nt, synthetic construct
  source 1..21: mol_type = other RNA
ttgtccaccagacaaaaatag

SEQ ID NO: 107757 - RNA, 21 nt, synthetic construct
  source 1..21: mol_type = other RNA
ttgtccactgtcagtgggact

SEQ ID NO: 107758 - RNA, 21 nt, synthetic construct
  source 1..21: mol_type = other RNA
ttgtccatctggattatagtg

SEQ ID NO: 107759 - RNA, 21 nt, synthetic construct
  source 1..21: mol_type = other RNA
ttgtcccatggtcaaatcaat

SEQ ID NO: 107760 - RNA, 21 nt, synthetic construct
  source 1..21: mol_type = other RNA
ttgtcccggcatgcctctccc

SEQ ID NO: 107761 - RNA, 21 nt, synthetic construct
  source 1..21: mol_type = other RNA
ttgtcctaaaattccttcctt

SEQ ID NO: 107762 - RNA, 21 nt, synthetic construct
  source 1..21: mol_type = other RNA
ttgtcctggcagatcaattga

SEQ ID NO: 107763 - RNA, 21 nt, synthetic construct
  source 1..21: mol_type = other RNA
ttgtcgttgagtacctctggg

SEQ ID NO: 107764 - RNA, 21 nt, synthetic construct
  source 1..21: mol_type = other RNA
ttgtctattccctacattgcc

SEQ ID NO: 107765 - RNA, 21 nt, synthetic construct
  source 1..21: mol_type = other RNA
ttgtctcaacctttgcctcct

SEQ ID NO: 107766 - RNA, 21 nt, synthetic construct
  source 1..21: mol_type = other RNA
ttgtctcccgggttcaagcga

SEQ ID NO: 107767 - RNA, 21 nt, synthetic construct
  source 1..21: mol_type = other RNA
ttgtctcggatttaagagagg

SEQ ID NO: 107768 - RNA, 21 nt, synthetic construct
  source 1..21: mol_type = other RNA
ttgtctctggaaggctaagca

SEQ ID NO: 107769 - RNA, 21 nt, synthetic construct
  source 1..21: mol_type = other RNA
ttgtctgattcagtttgctag

SEQ ID NO: 107770 - RNA, 21 nt, synthetic construct
  source 1..21: mol_type = other RNA
ttgtctgcaagcagatctgct

SEQ ID NO: 107771 - RNA, 21 nt, synthetic construct
  source 1..21: mol_type = other RNA
ttgtctggaacacacattagc

SEQ ID NO: 107772 - RNA, 21 nt, synthetic construct
  source 1..21: mol_type = other RNA
ttgtctggtggacaaaaaacg

SEQ ID NO: 107773 - RNA, 21 nt, synthetic construct
  source 1..21: mol_type = other RNA
ttgtcttacataggcttagta

SEQ ID NO: 107774 - RNA, 21 nt, synthetic construct
  source 1..21: mol_type = other RNA
ttgtcttctaaccctcaaatg

SEQ ID NO: 107775 - RNA, 21 nt, synthetic construct
  source 1..21: mol_type = other RNA
ttgtcttgaatagcatcttag

SEQ ID NO: 107776 - RNA, 21 nt, synthetic construct
  source 1..21: mol_type = other RNA
ttgtctttgtctattccctac

SEQ ID NO: 107777 - RNA, 21 nt, synthetic construct
  source 1..21: mol_type = other RNA
ttgtcttttctatctgaacat

SEQ ID NO: 107778 - RNA, 21 nt, synthetic construct
  source 1..21: mol_type = other RNA
ttgtctttttgtgacttgttt

SEQ ID NO: 107779 - RNA, 21 nt, synthetic construct
  source 1..21: mol_type = other RNA
ttgtgaaccttgaagtacttc

SEQ ID NO: 107780 - RNA, 21 nt, synthetic construct
  source 1..21: mol_type = other RNA
ttgtgaagggaggtaggctta

SEQ ID NO: 107781 - RNA, 21 nt, synthetic construct
  source 1..21: mol_type = other RNA
ttgtgacaagttcagcatctt

SEQ ID NO: 107782 - RNA, 21 nt, synthetic construct
  source 1..21: mol_type = other RNA
ttgtgacagttctatttcttt

SEQ ID NO: 107783 - RNA, 21 nt, synthetic construct
  source 1..21: mol_type = other RNA
ttgtgacatcaagggtggtgc

SEQ ID NO: 107784 - RNA, 21 nt, synthetic construct
  source 1..21: mol_type = other RNA
ttgtgaccagatcaaacgtgc

SEQ ID NO: 107785 - RNA, 21 nt, synthetic construct
  source 1..21: mol_type = other RNA
ttgtgactgtgagggtaagaa

SEQ ID NO: 107786 - RNA, 21 nt, synthetic construct
  source 1..21: mol_type = other RNA
ttgtgaggattcgattaaaat

SEQ ID NO: 107787 - RNA, 21 nt, synthetic construct
  source 1..21: mol_type = other RNA
ttgtgagttttaactcttgca

SEQ ID NO: 107788 - RNA, 21 nt, synthetic construct
  source 1..21: mol_type = other RNA
ttgtgatctatgcatactgca

SEQ ID NO: 107789 - RNA, 21 nt, synthetic construct
  source 1..21: mol_type = other RNA
ttgtgatgtctcagatgtctc

SEQ ID NO: 107790 - RNA, 21 nt, synthetic construct
  source 1..21: mol_type = other RNA
ttgtgcaacataaatagggtg

SEQ ID NO: 107791 - RNA, 21 nt, synthetic construct
  source 1..21: mol_type = other RNA
ttgtgcaaccatccccgctgt

SEQ ID NO: 107792 - RNA, 21 nt, synthetic construct
  source 1..21: mol_type = other RNA
ttgtgcacacatccacgcgta

SEQ ID NO: 107793 - RNA, 21 nt, synthetic construct
  source 1..21: mol_type = other RNA
ttgtgcacctcgggttcaagc

SEQ ID NO: 107794 - RNA, 21 nt, synthetic construct
  source 1..21: mol_type = other RNA
ttgtgcaggtctgggtttttt

SEQ ID NO: 107795 - RNA, 21 nt, synthetic construct
  source 1..21: mol_type = other RNA
ttgtgcatactgtgatgattt

SEQ ID NO: 107796 - RNA, 21 nt, synthetic construct
  source 1..21: mol_type = other RNA
ttgtgcatatataccacattt

SEQ ID NO: 107797 - RNA, 21 nt, synthetic construct
  source 1..21: mol_type = other RNA
ttgtgcatcaaaggacactat

SEQ ID NO: 107798 - RNA, 21 nt, synthetic construct
  source 1..21: mol_type = other RNA
ttgtgcatcagaattccattc

SEQ ID NO: 107799 - RNA, 21 nt, synthetic construct
  source 1..21: mol_type = other RNA
ttgtgcatcctttataccttt

SEQ ID NO: 107800 - RNA, 21 nt, synthetic construct
  source 1..21: mol_type = other RNA
ttgtgcatgtgcaggaaactt

SEQ ID NO: 107801 - RNA, 21 nt, synthetic construct
  source 1..21: mol_type = other RNA
ttgtgccagtgaactccagtc

SEQ ID NO: 107802 - RNA, 21 nt, synthetic construct
  source 1..21: mol_type = other RNA
ttgtgctacctcaaattgtgt

SEQ ID NO: 107803 - RNA, 21 nt, synthetic construct
  source 1..21: mol_type = other RNA
ttgtgctcagtggttctgcgt

SEQ ID NO: 107804 - RNA, 21 nt, synthetic construct
  source 1..21: mol_type = other RNA
ttgtgctgaaaccccgcatac

SEQ ID NO: 107805 - RNA, 21 nt, synthetic construct
  source 1..21: mol_type = other RNA
ttgtgcttcgaggtcgcaccc

SEQ ID NO: 107806 - RNA, 21 nt, synthetic construct
  source 1..21: mol_type = other RNA
ttgtgcttggatattctacag

SEQ ID NO: 107807 - RNA, 21 nt, synthetic construct
  source 1..21: mol_type = other RNA
ttgtgcttttaatactttcac

SEQ ID NO: 107808 - RNA, 21 nt, synthetic construct
  source 1..21: mol_type = other RNA
ttgtggaattaactccagggg

SEQ ID NO: 107809 - RNA, 21 nt, synthetic construct
  source 1..21: mol_type = other RNA
ttgtggagatggggacttgct

SEQ ID NO: 107810 - RNA, 21 nt, synthetic construct
  source 1..21: mol_type = other RNA
ttgtggagtggaggggcagga

SEQ ID NO: 107811 - RNA, 21 nt, synthetic construct
  source 1..21: mol_type = other RNA
ttgtggatgagattaatgtag

SEQ ID NO: 107812 - RNA, 21 nt, synthetic construct
  source 1..21: mol_type = other RNA
ttgtggatgtccttaatgcca

SEQ ID NO: 107813 - RNA, 21 nt, synthetic construct
  source 1..21: mol_type = other RNA
ttgtggcatctttgttacagc

SEQ ID NO: 107814 - RNA, 21 nt, synthetic construct
  source 1..21: mol_type = other RNA
ttgtggcctcttcccttgtgc

SEQ ID NO: 107815 - RNA, 21 nt, synthetic construct
  source 1..21: mol_type = other RNA
ttgtggctacaccctgggaaa

SEQ ID NO: 107816 - RNA, 21 nt, synthetic construct
  source 1..21: mol_type = other RNA
ttgtggctgacatgtgtaaaa

SEQ ID NO: 107817 - RNA, 21 nt, synthetic construct
  source 1..21: mol_type = other RNA
ttgtgggaattcagtcaccaa

SEQ ID NO: 107818 - RNA, 21 nt, synthetic construct
  source 1..21: mol_type = other RNA
ttgtgggtattttgttgttgt

SEQ ID NO: 107819 - RNA, 21 nt, synthetic construct
  source 1..21: mol_type = other RNA
ttgtggtcttaagagactctc

SEQ ID NO: 107820 - RNA, 21 nt, synthetic construct
  source 1..21: mol_type = other RNA
ttgtggttttaacctcttgaa

SEQ ID NO: 107821 - RNA, 21 nt, synthetic construct
  source 1..21: mol_type = other RNA
ttgtgtaactaccactgaggt

SEQ ID NO: 107822 - RNA, 21 nt, synthetic construct
  source 1..21: mol_type = other RNA
ttgtgtagaaatgtggagata

SEQ ID NO: 107823 - RNA, 21 nt, synthetic construct
  source 1..21: mol_type = other RNA
ttgtgtagaggtgaagttaag

SEQ ID NO: 107824 - RNA, 21 nt, synthetic construct
  source 1..21: mol_type = other RNA
ttgtgtagcgggaaaaaataa

SEQ ID NO: 107825 - RNA, 21 nt, synthetic construct
  source 1..21: mol_type = other RNA
ttgtgtcaagtacaactaata

SEQ ID NO: 107826 - RNA, 21 nt, synthetic construct
  source 1..21: mol_type = other RNA
ttgtgtcatttttgtattctg

SEQ ID NO: 107827 - RNA, 21 nt, synthetic construct
  source 1..21: mol_type = other RNA
ttgtgtcttctgtttttctta

SEQ ID NO: 107828 - RNA, 21 nt, synthetic construct
  source 1..21: mol_type = other RNA
ttgtgtgcacctaataaaatg

SEQ ID NO: 107829 - RNA, 21 nt, synthetic construct
  source 1..21: mol_type = other RNA
ttgtgtggacacactgaaaca

SEQ ID NO: 107830 - RNA, 21 nt, synthetic construct
  source 1..21: mol_type = other RNA
ttgtgtgtcgagaaaaatggg

SEQ ID NO: 107831 - RNA, 21 nt, synthetic construct
  source 1..21: mol_type = other RNA
ttgtgtgttctctttttgaca

SEQ ID NO: 107832 - RNA, 21 nt, synthetic construct
  source 1..21: mol_type = other RNA
ttgtgtgtttgtgaaaaatac

SEQ ID NO: 107833 - RNA, 21 nt, synthetic construct
  source 1..21: mol_type = other RNA
ttgtgttgcccacgctggtct

SEQ ID NO: 107834 - RNA, 21 nt, synthetic construct
  source 1..21: mol_type = other RNA
ttgtgttggtgtttctgacag

SEQ ID NO: 107835 - RNA, 21 nt, synthetic construct
  source 1..21: mol_type = other RNA
ttgtgtttgtgaccagatcaa

SEQ ID NO: 107836 - RNA, 21 nt, synthetic construct
  source 1..21: mol_type = other RNA
ttgtgttttatttggctgtta

SEQ ID NO: 107837 - RNA, 21 nt, synthetic construct
  source 1..21: mol_type = other RNA
ttgtgttttcactctcaatag

SEQ ID NO: 107838 - RNA, 21 nt, synthetic construct
  source 1..21: mol_type = other RNA
ttgtgttttcattcgttcaaa

SEQ ID NO: 107839 - RNA, 21 nt, synthetic construct
  source 1..21: mol_type = other RNA
ttgttaacatttcttctagtc

SEQ ID NO: 107840 - RNA, 21 nt, synthetic construct
  source 1..21: mol_type = other RNA
ttgttaactgtagagaaaatg

SEQ ID NO: 107841 - RNA, 21 nt, synthetic construct
  source 1..21: mol_type = other RNA
ttgttaagcattttccggttg

SEQ ID NO: 107842 - RNA, 21 nt, synthetic construct
  source 1..21: mol_type = other RNA
ttgttacagcagctctagcaa

SEQ ID NO: 107843 - RNA, 21 nt, synthetic construct
  source 1..21: mol_type = other RNA
ttgttactgatctgctcaagt

SEQ ID NO: 107844 - RNA, 21 nt, synthetic construct
  source 1..21: mol_type = other RNA
ttgttagaattttgcttttgc

SEQ ID NO: 107845 - RNA, 21 nt, synthetic construct
  source 1..21: mol_type = other RNA
ttgttagatctgggataatgc

SEQ ID NO: 107846 - RNA, 21 nt, synthetic construct
  source 1..21: mol_type = other RNA
ttgttagccacagcgttgttc

SEQ ID NO: 107847 - RNA, 21 nt, synthetic construct
  source 1..21: mol_type = other RNA
ttgttaggtgctggcttcaat

SEQ ID NO: 107848 - RNA, 21 nt, synthetic construct
  source 1..21: mol_type = other RNA
ttgttagtaggaaaaccatgt

SEQ ID NO: 107849 - RNA, 21 nt, synthetic construct
  source 1..21: mol_type = other RNA
ttgttagtgccttcagaagga

SEQ ID NO: 107850 - RNA, 21 nt, synthetic construct
  source 1..21: mol_type = other RNA
ttgttataagcaaagatatgg

SEQ ID NO: 107851 - RNA, 21 nt, synthetic construct
  source 1..21: mol_type = other RNA
ttgttatctgaacgtctttaa

SEQ ID NO: 107852 - RNA, 21 nt, synthetic construct
  source 1..21: mol_type = other RNA
ttgttatggtaggtgcttttt

SEQ ID NO: 107853 - RNA, 21 nt, synthetic construct
  source 1..21: mol_type = other RNA
ttgttcaagcgctgaagtact

SEQ ID NO: 107854 - RNA, 21 nt, synthetic construct
  source 1..21: mol_type = other RNA
ttgttcagaaatagactccca

SEQ ID NO: 107855 - RNA, 21 nt, synthetic construct
  source 1..21: mol_type = other RNA
ttgttcaggagttttgcctct

SEQ ID NO: 107856 - RNA, 21 nt, synthetic construct
  source 1..21: mol_type = other RNA
ttgttcagggaaggctgcaag

SEQ ID NO: 107857 - RNA, 21 nt, synthetic construct
  source 1..21: mol_type = other RNA
ttgttcagttgaaaagtatgg

SEQ ID NO: 107858 - RNA, 21 nt, synthetic construct
  source 1..21: mol_type = other RNA
ttgttcatcatcttttgcctg

SEQ ID NO: 107859 - RNA, 21 nt, synthetic construct
  source 1..21: mol_type = other RNA
ttgttcatgaaatccccttta

SEQ ID NO: 107860 - RNA, 21 nt, synthetic construct
  source 1..21: mol_type = other RNA
ttgttcatgtctgtgtagttc

SEQ ID NO: 107861 - RNA, 21 nt, synthetic construct
  source 1..21: mol_type = other RNA
ttgttcattcatctgttaatg

SEQ ID NO: 107862 - RNA, 21 nt, synthetic construct
  source 1..21: mol_type = other RNA
ttgttccaggggggaaaaaac

SEQ ID NO: 107863 - RNA, 21 nt, synthetic construct
  source 1..21: mol_type = other RNA
ttgttctaatttgtgaacctt

SEQ ID NO: 107864 - RNA, 21 nt, synthetic construct
  source 1..21: mol_type = other RNA
ttgttctcgttcatgttcaag

SEQ ID NO: 107865 - RNA, 21 nt, synthetic construct
  source 1..21: mol_type = other RNA
ttgttctctttgtttatcctt

SEQ ID NO: 107866 - RNA, 21 nt, synthetic construct
  source 1..21: mol_type = other RNA
ttgttctgctgttgatggacg

SEQ ID NO: 107867 - RNA, 21 nt, synthetic construct
  source 1..21: mol_type = other RNA
ttgttctgtcacatttgaaag

SEQ ID NO: 107868 - RNA, 21 nt, synthetic construct
  source 1..21: mol_type = other RNA
ttgttctgtcacggtgcccta

SEQ ID NO: 107869 - RNA, 21 nt, synthetic construct
  source 1..21: mol_type = other RNA
ttgttcttttcaaaaacagca

SEQ ID NO: 107870 - RNA, 21 nt, synthetic construct
  source 1..21: mol_type = other RNA
ttgttgaaaacgaggaaaaga

SEQ ID NO: 107871 - RNA, 21 nt, synthetic construct
  source 1..21: mol_type = other RNA
ttgttgaatgtggcagaattt

SEQ ID NO: 107872 - RNA, 21 nt, synthetic construct
  source 1..21: mol_type = other RNA
ttgttgaattgttggagttct

SEQ ID NO: 107873 - RNA, 21 nt, synthetic construct
  source 1..21: mol_type = other RNA
ttgttgacatcctttgcgtct

SEQ ID NO: 107874 - RNA, 21 nt, synthetic construct
  source 1..21: mol_type = other RNA
ttgttgacccaatcatgttct

SEQ ID NO: 107875 - RNA, 21 nt, synthetic construct
  source 1..21: mol_type = other RNA
ttgttgaggatgactgtcctg

SEQ ID NO: 107876 - RNA, 21 nt, synthetic construct
  source 1..21: mol_type = other RNA
ttgttgcatccccattcaatt

SEQ ID NO: 107877 - RNA, 21 nt, synthetic construct
  source 1..21: mol_type = other RNA
ttgttgccaggtggacgcggc

SEQ ID NO: 107878 - RNA, 21 nt, synthetic construct
  source 1..21: mol_type = other RNA
ttgttgccatcattttatgaa

SEQ ID NO: 107879 - RNA, 21 nt, synthetic construct
  source 1..21: mol_type = other RNA
ttgttgcctgtagttttggtg

SEQ ID NO: 107880 - RNA, 21 nt, synthetic construct
  source 1..21: mol_type = other RNA
ttgttgcgcgtcaaaagatgc

SEQ ID NO: 107881 - RNA, 21 nt, synthetic construct
  source 1..21: mol_type = other RNA
ttgttgctattgttgaattgt

SEQ ID NO: 107882 - RNA, 21 nt, synthetic construct
  source 1..21: mol_type = other RNA
ttgttggacagctgggagaaa

SEQ ID NO: 107883 - RNA, 21 nt, synthetic construct
  source 1..21: mol_type = other RNA
ttgttggctaaaagaccgcaa

SEQ ID NO: 107884 - RNA, 21 nt, synthetic construct
  source 1..21: mol_type = other RNA
ttgttgggtttaactgaggtg

SEQ ID NO: 107885 - RNA, 21 nt, synthetic construct
  source 1..21: mol_type = other RNA
ttgttggtttgtgtgtttgtg

SEQ ID NO: 107886 - RNA, 21 nt, synthetic construct
  source 1..21: mol_type = other RNA
ttgttgttggtttgtgtgttt

SEQ ID NO: 107887 - RNA, 21 nt, synthetic construct
  source 1..21: mol_type = other RNA
ttgttgttgttgtttctgagc

SEQ ID NO: 107888 - RNA, 21 nt, synthetic construct
  source 1..21: mol_type = other RNA
ttgttgttgtttctgagccag

SEQ ID NO: 107889 - RNA, 21 nt, synthetic construct
  source 1..21: mol_type = other RNA
ttgttgtttctgagccagagt

SEQ ID NO: 107890 - RNA, 21 nt, synthetic construct
  source 1..21: mol_type = other RNA
ttgtttaattagccgggtgta

SEQ ID NO: 107891 - RNA, 21 nt, synthetic construct
  source 1..21: mol_type = other RNA
ttgtttaattctgtttaccct

SEQ ID NO: 107892 - RNA, 21 nt, synthetic construct
  source 1..21: mol_type = other RNA
ttgtttacagtagccaaaggt

SEQ ID NO: 107893 - RNA, 21 nt, synthetic construct
  source 1..21: mol_type = other RNA
ttgtttacccagtgtgtttgt

SEQ ID NO: 107894 - RNA, 21 nt, synthetic construct
  source 1..21: mol_type = other RNA
ttgtttacttgggtataaatg

SEQ ID NO: 107895 - RNA, 21 nt, synthetic construct
  source 1..21: mol_type = other RNA
ttgtttagtagctgtctttaa

SEQ ID NO: 107896 - RNA, 21 nt, synthetic construct
  source 1..21: mol_type = other RNA
ttgtttatccttgcaccaact

SEQ ID NO: 107897 - RNA, 21 nt, synthetic construct
  source 1..21: mol_type = other RNA
ttgtttatttgctgtcaggca

SEQ ID NO: 107898 - RNA, 21 nt, synthetic construct
  source 1..21: mol_type = other RNA
ttgtttcacttttctggtttt

SEQ ID NO: 107899 - RNA, 21 nt, synthetic construct
  source 1..21: mol_type = other RNA
ttgtttcagtgtgtccacaca

SEQ ID NO: 107900 - RNA, 21 nt, synthetic construct
  source 1..21: mol_type = other RNA
ttgtttccactttgaggttat

SEQ ID NO: 107901 - RNA, 21 nt, synthetic construct
  source 1..21: mol_type = other RNA
ttgtttccatgtcttggctat

SEQ ID NO: 107902 - RNA, 21 nt, synthetic construct
  source 1..21: mol_type = other RNA
ttgtttctgagccagagtttc

SEQ ID NO: 107903 - RNA, 21 nt, synthetic construct
  source 1..21: mol_type = other RNA
ttgtttctgaggtggagttct

SEQ ID NO: 107904 - RNA, 21 nt, synthetic construct
  source 1..21: mol_type = other RNA
ttgtttgaattaagcaccact

SEQ ID NO: 107905 - RNA, 21 nt, synthetic construct
  source 1..21: mol_type = other RNA
ttgtttgaggctgggagtaca

SEQ ID NO: 107906 - RNA, 21 nt, synthetic construct
  source 1..21: mol_type = other RNA
ttgtttgctagagctgctgta

SEQ ID NO: 107907 - RNA, 21 nt, synthetic construct
  source 1..21: mol_type = other RNA
ttgtttgttgggtttaactga

SEQ ID NO: 107908 - RNA, 21 nt, synthetic construct
  source 1..21: mol_type = other RNA
ttgtttgtttctgaggtggag

SEQ ID NO: 107909 - RNA, 21 nt, synthetic construct
  source 1..21: mol_type = other RNA
ttgttttaccatctaaagcca

SEQ ID NO: 107910 - RNA, 21 nt, synthetic construct
  source 1..21: mol_type = other RNA
ttgttttaggtagtcttgtca

SEQ ID NO: 107911 - RNA, 21 nt, synthetic construct
  source 1..21: mol_type = other RNA
ttgttttcccttttgtagcta

SEQ ID NO: 107912 - RNA, 21 nt, synthetic construct
  source 1..21: mol_type = other RNA
ttgttttctccttctggaaga

SEQ ID NO: 107913 - RNA, 21 nt, synthetic construct
  source 1..21: mol_type = other RNA
ttgttttgatttgcatttctc

SEQ ID NO: 107914 - RNA, 21 nt, synthetic construct
  source 1..21: mol_type = other RNA
ttgttttggtcaaaactgtat

SEQ ID NO: 107915 - RNA, 21 nt, synthetic construct
  source 1..21: mol_type = other RNA
ttgttttgtgtttgtgaccag

SEQ ID NO: 107916 - RNA, 21 nt, synthetic construct
  source 1..21: mol_type = other RNA
ttgttttgttctcgttcatgt

SEQ ID NO: 107917 - RNA, 21 nt, synthetic construct
  source 1..21: mol_type = other RNA
ttgttttgttgctattgttga

SEQ ID NO: 107918 - RNA, 21 nt, synthetic construct
  source 1..21: mol_type = other RNA
ttgttttgtttttctctcctt

SEQ ID NO: 107919 - RNA, 21 nt, synthetic construct
  source 1..21: mol_type = other RNA
ttgtttttctctccttgcaca

SEQ ID NO: 107920 - RNA, 21 nt, synthetic construct
  source 1..21: mol_type = other RNA
ttgttttttcacagaaacaga

SEQ ID NO: 107921 - RNA, 21 nt, synthetic construct
  source 1..21: mol_type = other RNA
tttaaaaactttttgggcctt

SEQ ID NO: 107922 - RNA, 21 nt, synthetic construct
  source 1..21: mol_type = other RNA
tttaaaaagaaaaagctcacc

SEQ ID NO: 107923 - RNA, 21 nt, synthetic construct
  source 1..21: mol_type = other RNA
tttaaaaagcagctacctgtt

SEQ ID NO: 107924 - RNA, 21 nt, synthetic construct
  source 1..21: mol_type = other RNA
tttaaaacactggcaaaaatc

SEQ ID NO: 107925 - RNA, 21 nt, synthetic construct
  source 1..21: mol_type = other RNA
tttaaaaccagagcggaattt

SEQ ID NO: 107926 - RNA, 21 nt, synthetic construct
  source 1..21: mol_type = other RNA
tttaaaactgctgagtcttct

SEQ ID NO: 107927 - RNA, 21 nt, synthetic construct
  source 1..21: mol_type = other RNA
tttaaaagaaaatggccaaga

SEQ ID NO: 107928 - RNA, 21 nt, synthetic construct
  source 1..21: mol_type = other RNA
tttaaaagaacctctggaaag

SEQ ID NO: 107929 - RNA, 21 nt, synthetic construct
  source 1..21: mol_type = other RNA
tttaaaagagcgaagagggag

SEQ ID NO: 107930 - RNA, 21 nt, synthetic construct
  source 1..21: mol_type = other RNA
tttaaaagagtgcacattcct

SEQ ID NO: 107931 - RNA, 21 nt, synthetic construct
  source 1..21: mol_type = other RNA
tttaaaagatgcattctgtca

SEQ ID NO: 107932 - RNA, 21 nt, synthetic construct
  source 1..21: mol_type = other RNA
tttaaaagtcagctaggcgta

SEQ ID NO: 107933 - RNA, 21 nt, synthetic construct
  source 1..21: mol_type = other RNA
tttaaaatctgattcagtggt

SEQ ID NO: 107934 - RNA, 21 nt, synthetic construct
  source 1..21: mol_type = other RNA
tttaaaattgcagagtgttca

SEQ ID NO: 107935 - RNA, 21 nt, synthetic construct
  source 1..21: mol_type = other RNA
tttaaacaggtgtaagagatt

SEQ ID NO: 107936 - RNA, 21 nt, synthetic construct
  source 1..21: mol_type = other RNA
tttaaacccatttcatgccat

SEQ ID NO: 107937 - RNA, 21 nt, synthetic construct
  source 1..21: mol_type = other RNA
tttaaacgtcagagcagcact

SEQ ID NO: 107938 - RNA, 21 nt, synthetic construct
  source 1..21: mol_type = other RNA
tttaaagaaaggtctctctct

SEQ ID NO: 107939 - RNA, 21 nt, synthetic construct
  source 1..21: mol_type = other RNA
tttaaagacctcaggtttaga

SEQ ID NO: 107940 - RNA, 21 nt, synthetic construct
  source 1..21: mol_type = other RNA
tttaaagacgttcagataaca

SEQ ID NO: 107941 - RNA, 21 nt, synthetic construct
  source 1..21: mol_type = other RNA
tttaaagcagggaggggtccc

SEQ ID NO: 107942 - RNA, 21 nt, synthetic construct
  source 1..21: mol_type = other RNA
tttaaagctctatggcatttg

SEQ ID NO: 107943 - RNA, 21 nt, synthetic construct
  source 1..21: mol_type = other RNA
tttaaagctgaactcctttct

SEQ ID NO: 107944 - RNA, 21 nt, synthetic construct
  source 1..21: mol_type = other RNA
tttaaagctttgtgactgtga

SEQ ID NO: 107945 - RNA, 21 nt, synthetic construct
  source 1..21: mol_type = other RNA
tttaaagggataatgctatcc

SEQ ID NO: 107946 - RNA, 21 nt, synthetic construct
  source 1..21: mol_type = other RNA
tttaaagtaggttgagactta

SEQ ID NO: 107947 - RNA, 21 nt, synthetic construct
  source 1..21: mol_type = other RNA
tttaaagttagtgaagcagag

SEQ ID NO: 107948 - RNA, 21 nt, synthetic construct
  source 1..21: mol_type = other RNA
tttaaatcagcaccatctaac

SEQ ID NO: 107949 - RNA, 21 nt, synthetic construct
  source 1..21: mol_type = other RNA
tttaaatcagggcctttaatc

SEQ ID NO: 107950 - RNA, 21 nt, synthetic construct
  source 1..21: mol_type = other RNA
tttaaatgccaatttgggata

SEQ ID NO: 107951 - RNA, 21 nt, synthetic construct
  source 1..21: mol_type = other RNA
tttaaatgccacataaatcac

SEQ ID NO: 107952 - RNA, 21 nt, synthetic construct
  source 1..21: mol_type = other RNA
tttaaatgttttgcagagatg

SEQ ID NO: 107953 - RNA, 21 nt, synthetic construct
  source 1..21: mol_type = other RNA
tttaaattttgagacctcagg

SEQ ID NO: 107954 - RNA, 21 nt, synthetic construct
  source 1..21: mol_type = other RNA
tttaacaccatggcaggtttc

SEQ ID NO: 107955 - RNA, 21 nt, synthetic construct
  source 1..21: mol_type = other RNA
tttaacagatggtcctttttt

SEQ ID NO: 107956 - RNA, 21 nt, synthetic construct
  source 1..21: mol_type = other RNA
tttaaccaattatgctgagtg

SEQ ID NO: 107957 - RNA, 21 nt, synthetic construct
  source 1..21: mol_type = other RNA
tttaacccacagataatttct

SEQ ID NO: 107958 - RNA, 21 nt, synthetic construct
  source 1..21: mol_type = other RNA
tttaacctctggtattttaag

SEQ ID NO: 107959 - RNA, 21 nt, synthetic construct
  source 1..21: mol_type = other RNA
tttaacctcttgaagtcagtt

SEQ ID NO: 107960 - RNA, 21 nt, synthetic construct
  source 1..21: mol_type = other RNA
tttaacgtatctgggaaaaaa

SEQ ID NO: 107961 - RNA, 21 nt, synthetic construct
  source 1..21: mol_type = other RNA
tttaactatcctatgtgggga

SEQ ID NO: 107962 - RNA, 21 nt, synthetic construct
  source 1..21: mol_type = other RNA
tttaactcttgcattagagcc

SEQ ID NO: 107963 - RNA, 21 nt, synthetic construct
  source 1..21: mol_type = other RNA
tttaactgaggtgtttttcag

SEQ ID NO: 107964 - RNA, 21 nt, synthetic construct
  source 1..21: mol_type = other RNA
tttaacttctaatgcccatta

SEQ ID NO: 107965 - RNA, 21 nt, synthetic construct
  source 1..21: mol_type = other RNA
tttaacttgctttgaatttgg

SEQ ID NO: 107966 - RNA, 21 nt, synthetic construct
  source 1..21: mol_type = other RNA
tttaactttgatgaattccag

SEQ ID NO: 107967 - RNA, 21 nt, synthetic construct
  source 1..21: mol_type = other RNA
tttaagaaaagaagttacggt

SEQ ID NO: 107968 - RNA, 21 nt, synthetic construct
  source 1..21: mol_type = other RNA
tttaagaagggaacactaaga

SEQ ID NO: 107969 - RNA, 21 nt, synthetic construct
  source 1..21: mol_type = other RNA
tttaagacacaaggaaggtca

SEQ ID NO: 107970 - RNA, 21 nt, synthetic construct
  source 1..21: mol_type = other RNA
tttaagagaggaagtgaccct

SEQ ID NO: 107971 - RNA, 21 nt, synthetic construct
  source 1..21: mol_type = other RNA
tttaagagtatctttttcagc

SEQ ID NO: 107972 - RNA, 21 nt, synthetic construct
  source 1..21: mol_type = other RNA
tttaagagtgaagaaaccttt

SEQ ID NO: 107973 - RNA, 21 nt, synthetic construct
  source 1..21: mol_type = other RNA
tttaagattctctttagggaa

SEQ ID NO: 107974 - RNA, 21 nt, synthetic construct
  source 1..21: mol_type = other RNA
tttaagcatcccatatggagg

SEQ ID NO: 107975 - RNA, 21 nt, synthetic construct
  source 1..21: mol_type = other RNA
tttaagcctagagattaggca

SEQ ID NO: 107976 - RNA, 21 nt, synthetic construct
  source 1..21: mol_type = other RNA
tttaaggaccaggtatggcga

SEQ ID NO: 107977 - RNA, 21 nt, synthetic construct
  source 1..21: mol_type = other RNA
tttaaggcagggcttggtggc

SEQ ID NO: 107978 - RNA, 21 nt, synthetic construct
  source 1..21: mol_type = other RNA
tttaaggcgcagacacaccat

SEQ ID NO: 107979 - RNA, 21 nt, synthetic construct
  source 1..21: mol_type = other RNA
tttaaggctaaaacatacatg

SEQ ID NO: 107980 - RNA, 21 nt, synthetic construct
  source 1..21: mol_type = other RNA
tttaaggctgaacaatattcc

SEQ ID NO: 107981 - RNA, 21 nt, synthetic construct
  source 1..21: mol_type = other RNA
tttaaggcttggaaaacaaat

SEQ ID NO: 107982 - RNA, 21 nt, synthetic construct
  source 1..21: mol_type = other RNA
tttaagggaaacactcatacc

SEQ ID NO: 107983 - RNA, 21 nt, synthetic construct
  source 1..21: mol_type = other RNA
tttaaggggtaaatggtttct

SEQ ID NO: 107984 - RNA, 21 nt, synthetic construct
  source 1..21: mol_type = other RNA
tttaaggtaagggtccagctt

SEQ ID NO: 107985 - RNA, 21 nt, synthetic construct
  source 1..21: mol_type = other RNA
tttaagtgcacaatgcagtat

SEQ ID NO: 107986 - RNA, 21 nt, synthetic construct
  source 1..21: mol_type = other RNA
tttaagtggcgctgtttgcct

SEQ ID NO: 107987 - RNA, 21 nt, synthetic construct
  source 1..21: mol_type = other RNA
tttaagttactgattagaagg

SEQ ID NO: 107988 - RNA, 21 nt, synthetic construct
  source 1..21: mol_type = other RNA
tttaataagcttcgaagcaaa

SEQ ID NO: 107989 - RNA, 21 nt, synthetic construct
  source 1..21: mol_type = other RNA
tttaatactatgtatgtggct

SEQ ID NO: 107990 - RNA, 21 nt, synthetic construct
  source 1..21: mol_type = other RNA
tttaatagaggtctgtctttc

SEQ ID NO: 107991 - RNA, 21 nt, synthetic construct
  source 1..21: mol_type = other RNA
tttaatatgtgtacaatgggg

SEQ ID NO: 107992 - RNA, 21 nt, synthetic construct
  source 1..21: mol_type = other RNA
tttaatcaccaggcgcggtgg

SEQ ID NO: 107993 - RNA, 21 nt, synthetic construct
  source 1..21: mol_type = other RNA
tttaatcacctcaagtgatgc

SEQ ID NO: 107994 - RNA, 21 nt, synthetic construct
  source 1..21: mol_type = other RNA
tttaatcgaatcctcacaaca

SEQ ID NO: 107995 - RNA, 21 nt, synthetic construct
  source 1..21: mol_type = other RNA
tttaatctacaaaacagggtt

SEQ ID NO: 107996 - RNA, 21 nt, synthetic construct
  source 1..21: mol_type = other RNA
tttaatctctcttgaccttag

SEQ ID NO: 107997 - RNA, 21 nt, synthetic construct
  source 1..21: mol_type = other RNA
tttaatctgtcagcagttcag

SEQ ID NO: 107998 - RNA, 21 nt, synthetic construct
  source 1..21: mol_type = other RNA
tttaatctgtcctgaatacta

SEQ ID NO: 107999 - RNA, 21 nt, synthetic construct
  source 1..21: mol_type = other RNA
tttaatgagtagtacttctga

SEQ ID NO: 108000 - RNA, 21 nt, synthetic construct
  source 1..21: mol_type = other RNA
tttaatgggcattagaagtta

SEQ ID NO: 108001 - RNA, 21 nt, synthetic construct
  source 1..21: mol_type = other RNA
tttaatgtagatcctgaggaa

SEQ ID NO: 108002 - RNA, 21 nt, synthetic construct
  source 1..21: mol_type = other RNA
tttaatgtgctgtccatttcc

SEQ ID NO: 108003 - RNA, 21 nt, synthetic construct
  source 1..21: mol_type = other RNA
tttaattacccaggcatgatg

SEQ ID NO: 108004 - RNA, 21 nt, synthetic construct
  source 1..21: mol_type = other RNA
tttaattagccgggtgtagtg

SEQ ID NO: 108005 - RNA, 21 nt, synthetic construct
  source 1..21: mol_type = other RNA
tttaattatgagcattcccca

SEQ ID NO: 108006 - RNA, 21 nt, synthetic construct
  source 1..21: mol_type = other RNA
tttaattctgtttacccttac

SEQ ID NO: 108007 - RNA, 21 nt, synthetic construct
  source 1..21: mol_type = other RNA
tttaattgggggaaaattgac

SEQ ID NO: 108008 - RNA, 21 nt, synthetic construct
  source 1..21: mol_type = other RNA
tttaatttagcgttcatccaa

SEQ ID NO: 108009 - RNA, 21 nt, synthetic construct
  source 1..21: mol_type = other RNA
tttaatttccacccatgaagc

SEQ ID NO: 108010 - RNA, 21 nt, synthetic construct
  source 1..21: mol_type = other RNA
tttaatttgggtttgagtttc

SEQ ID NO: 108011 - RNA, 21 nt, synthetic construct
  source 1..21: mol_type = other RNA
tttaattttctgactctgtgc

SEQ ID NO: 108012 - RNA, 21 nt, synthetic construct
  source 1..21: mol_type = other RNA
tttaattttgagagtgcagta

SEQ ID NO: 108013 - RNA, 21 nt, synthetic construct
  source 1..21: mol_type = other RNA
tttacaaaaacacactgagct

SEQ ID NO: 108014 - RNA, 21 nt, synthetic construct
  source 1..21: mol_type = other RNA
tttacacacctgaaattctca

SEQ ID NO: 108015 - RNA, 21 nt, synthetic construct
  source 1..21: mol_type = other RNA
tttacacatgtcagccacaag

SEQ ID NO: 108016 - RNA, 21 nt, synthetic construct
  source 1..21: mol_type = other RNA
tttacaccatgcaggttcatg

SEQ ID NO: 108017 - RNA, 21 nt, synthetic construct
  source 1..21: mol_type = other RNA
tttacaccctaggtagggttg

SEQ ID NO: 108018 - RNA, 21 nt, synthetic construct
  source 1..21: mol_type = other RNA
tttacacgccttcgcgggcac

SEQ ID NO: 108019 - RNA, 21 nt, synthetic construct
  source 1..21: mol_type = other RNA
tttacactatggcttttgagt

SEQ ID NO: 108020 - RNA, 21 nt, synthetic construct
  source 1..21: mol_type = other RNA
tttacacttggagttttcccc

SEQ ID NO: 108021 - RNA, 21 nt, synthetic construct
  source 1..21: mol_type = other RNA
tttacaggatatcagaagtgc

SEQ ID NO: 108022 - RNA, 21 nt, synthetic construct
  source 1..21: mol_type = other RNA
tttacagtagccaaaggtaga

SEQ ID NO: 108023 - RNA, 21 nt, synthetic construct
  source 1..21: mol_type = other RNA
tttacagttatgtcagtcaac

SEQ ID NO: 108024 - RNA, 21 nt, synthetic construct
  source 1..21: mol_type = other RNA
tttacatagtgctcttctgat

SEQ ID NO: 108025 - RNA, 21 nt, synthetic construct
  source 1..21: mol_type = other RNA
tttacatgtagttttccctgt

SEQ ID NO: 108026 - RNA, 21 nt, synthetic construct
  source 1..21: mol_type = other RNA
tttacattaaagacagctact

SEQ ID NO: 108027 - RNA, 21 nt, synthetic construct
  source 1..21: mol_type = other RNA
tttacattagagaagaatgag

SEQ ID NO: 108028 - RNA, 21 nt, synthetic construct
  source 1..21: mol_type = other RNA
tttaccaaaacagcttcttgt

SEQ ID NO: 108029 - RNA, 21 nt, synthetic construct
  source 1..21: mol_type = other RNA
tttaccaaggctaagttgaga

SEQ ID NO: 108030 - RNA, 21 nt, synthetic construct
  source 1..21: mol_type = other RNA
tttaccaagggtgtgtttaat

SEQ ID NO: 108031 - RNA, 21 nt, synthetic construct
  source 1..21: mol_type = other RNA
tttaccaagttgaatttctgt

SEQ ID NO: 108032 - RNA, 21 nt, synthetic construct
  source 1..21: mol_type = other RNA
tttaccatctaaagccaggct

SEQ ID NO: 108033 - RNA, 21 nt, synthetic construct
  source 1..21: mol_type = other RNA
tttaccatctgacatatgttt

SEQ ID NO: 108034 - RNA, 21 nt, synthetic construct
  source 1..21: mol_type = other RNA
tttacccaacatgagagaaaa

SEQ ID NO: 108035 - RNA, 21 nt, synthetic construct
  source 1..21: mol_type = other RNA
tttacccagtgtgtttgtttg

SEQ ID NO: 108036 - RNA, 21 nt, synthetic construct
  source 1..21: mol_type = other RNA
tttacccctactttttgtcac

SEQ ID NO: 108037 - RNA, 21 nt, synthetic construct
  source 1..21: mol_type = other RNA
tttacccctgagaacttcagt

SEQ ID NO: 108038 - RNA, 21 nt, synthetic construct
  source 1..21: mol_type = other RNA
tttaccccttaaattccaaaa

SEQ ID NO: 108039 - RNA, 21 nt, synthetic construct
  source 1..21: mol_type = other RNA
tttacccggagaggtgaacta

SEQ ID NO: 108040 - RNA, 21 nt, synthetic construct
  source 1..21: mol_type = other RNA
tttacccgtggaaatacttga

SEQ ID NO: 108041 - RNA, 21 nt, synthetic construct
  source 1..21: mol_type = other RNA
tttaccctcattttataaggg

SEQ ID NO: 108042 - RNA, 21 nt, synthetic construct
  source 1..21: mol_type = other RNA
tttaccctgctggaacgaata

SEQ ID NO: 108043 - RNA, 21 nt, synthetic construct
  source 1..21: mol_type = other RNA
tttacgaggacagactgcagt

SEQ ID NO: 108044 - RNA, 21 nt, synthetic construct
  source 1..21: mol_type = other RNA
tttacgatgaaattgaccatt

SEQ ID NO: 108045 - RNA, 21 nt, synthetic construct
  source 1..21: mol_type = other RNA
tttactaaactgaacgaagtg

SEQ ID NO: 108046 - RNA, 21 nt, synthetic construct
  source 1..21: mol_type = other RNA
tttactaagaagtgaaactgc

SEQ ID NO: 108047 - RNA, 21 nt, synthetic construct
  source 1..21: mol_type = other RNA
tttactactgcattttttgcc

SEQ ID NO: 108048 - RNA, 21 nt, synthetic construct
  source 1..21: mol_type = other RNA
tttactactgtactgtttagc

SEQ ID NO: 108049 - RNA, 21 nt, synthetic construct
  source 1..21: mol_type = other RNA
tttactagatcaagcccttcc

SEQ ID NO: 108050 - RNA, 21 nt, synthetic construct
  source 1..21: mol_type = other RNA
tttactcagattcaccaattg

SEQ ID NO: 108051 - RNA, 21 nt, synthetic construct
  source 1..21: mol_type = other RNA
tttactcatgtctacctgtct

SEQ ID NO: 108052 - RNA, 21 nt, synthetic construct
  source 1..21: mol_type = other RNA
tttactccaagaaggctagca

SEQ ID NO: 108053 - RNA, 21 nt, synthetic construct
  source 1..21: mol_type = other RNA
tttactcgagggtagcttttc

SEQ ID NO: 108054 - RNA, 21 nt, synthetic construct
  source 1..21: mol_type = other RNA
tttactgaaatcctagcccca

SEQ ID NO: 108055 - RNA, 21 nt, synthetic construct
  source 1..21: mol_type = other RNA
tttactgatcttttctgacaa

SEQ ID NO: 108056 - RNA, 21 nt, synthetic construct
  source 1..21: mol_type = other RNA
tttactgctatacaaccggaa

SEQ ID NO: 108057 - RNA, 21 nt, synthetic construct
  source 1..21: mol_type = other RNA
tttactgcttgctgcactggc

SEQ ID NO: 108058 - RNA, 21 nt, synthetic construct
  source 1..21: mol_type = other RNA
tttactgtattaggatgtgta

SEQ ID NO: 108059 - RNA, 21 nt, synthetic construct
  source 1..21: mol_type = other RNA
tttactgtccaaacagtgacc

SEQ ID NO: 108060 - RNA, 21 nt, synthetic construct
  source 1..21: mol_type = other RNA
tttactgttctccagtcccac

SEQ ID NO: 108061 - RNA, 21 nt, synthetic construct
  source 1..21: mol_type = other RNA
tttacttactagttgtgctac

SEQ ID NO: 108062 - RNA, 21 nt, synthetic construct
  source 1..21: mol_type = other RNA
tttacttcccttctcgaagtg

SEQ ID NO: 108063 - RNA, 21 nt, synthetic construct
  source 1..21: mol_type = other RNA
tttacttctacagaatgttca

SEQ ID NO: 108064 - RNA, 21 nt, synthetic construct
  source 1..21: mol_type = other RNA
tttacttgcttggtttcacac

SEQ ID NO: 108065 - RNA, 21 nt, synthetic construct
  source 1..21: mol_type = other RNA
tttacttggctcctcccggct

SEQ ID NO: 108066 - RNA, 21 nt, synthetic construct
  source 1..21: mol_type = other RNA
tttacttggggagagtgggcc

SEQ ID NO: 108067 - RNA, 21 nt, synthetic construct
  source 1..21: mol_type = other RNA
tttacttgggtataaatgatg

SEQ ID NO: 108068 - RNA, 21 nt, synthetic construct
  source 1..21: mol_type = other RNA
tttacttgtcatttctgctta

SEQ ID NO: 108069 - RNA, 21 nt, synthetic construct
  source 1..21: mol_type = other RNA
tttactttcagctcaaacagc

SEQ ID NO: 108070 - RNA, 21 nt, synthetic construct
  source 1..21: mol_type = other RNA
tttactttgcgaaacacactc

SEQ ID NO: 108071 - RNA, 21 nt, synthetic construct
  source 1..21: mol_type = other RNA
tttagaaatacctgcaggttg

SEQ ID NO: 108072 - RNA, 21 nt, synthetic construct
  source 1..21: mol_type = other RNA
tttagaaggtaagaatgtcaa

SEQ ID NO: 108073 - RNA, 21 nt, synthetic construct
  source 1..21: mol_type = other RNA
tttagaattctctctcaactg

SEQ ID NO: 108074 - RNA, 21 nt, synthetic construct
  source 1..21: mol_type = other RNA
tttagacatgggctaaataaa

SEQ ID NO: 108075 - RNA, 21 nt, synthetic construct
  source 1..21: mol_type = other RNA
tttagagagatgcctgtgctt

SEQ ID NO: 108076 - RNA, 21 nt, synthetic construct
  source 1..21: mol_type = other RNA
tttagagggatgaatgttgta

SEQ ID NO: 108077 - RNA, 21 nt, synthetic construct
  source 1..21: mol_type = other RNA
tttagagtaactgtcatcagc

SEQ ID NO: 108078 - RNA, 21 nt, synthetic construct
  source 1..21: mol_type = other RNA
tttagagtcagttgtttactt

SEQ ID NO: 108079 - RNA, 21 nt, synthetic construct
  source 1..21: mol_type = other RNA
tttagagtttgcattacatga

SEQ ID NO: 108080 - RNA, 21 nt, synthetic construct
  source 1..21: mol_type = other RNA
tttagatcaagtcctttccag

SEQ ID NO: 108081 - RNA, 21 nt, synthetic construct
  source 1..21: mol_type = other RNA
tttagatctcatgttaagtgt

SEQ ID NO: 108082 - RNA, 21 nt, synthetic construct
  source 1..21: mol_type = other RNA
tttagatgagagtggcctaaa

SEQ ID NO: 108083 - RNA, 21 nt, synthetic construct
  source 1..21: mol_type = other RNA
tttagcaagattactggatac

SEQ ID NO: 108084 - RNA, 21 nt, synthetic construct
  source 1..21: mol_type = other RNA
tttagcaatccaaggacagaa

SEQ ID NO: 108085 - RNA, 21 nt, synthetic construct
  source 1..21: mol_type = other RNA
tttagcatctagcacagaacc

SEQ ID NO: 108086 - RNA, 21 nt, synthetic construct
  source 1..21: mol_type = other RNA
tttagccaacaaccataatga

SEQ ID NO: 108087 - RNA, 21 nt, synthetic construct
  source 1..21: mol_type = other RNA
tttagcccatgtctaaagtat

SEQ ID NO: 108088 - RNA, 21 nt, synthetic construct
  source 1..21: mol_type = other RNA
tttagccccctgaatacccct

SEQ ID NO: 108089 - RNA, 21 nt, synthetic construct
  source 1..21: mol_type = other RNA
tttagcggaatgactatagaa

SEQ ID NO: 108090 - RNA, 21 nt, synthetic construct
  source 1..21: mol_type = other RNA
tttagcgttcatccaaattat

SEQ ID NO: 108091 - RNA, 21 nt, synthetic construct
  source 1..21: mol_type = other RNA
tttagctggggcagcaaagca

SEQ ID NO: 108092 - RNA, 21 nt, synthetic construct
  source 1..21: mol_type = other RNA
tttagcttcatataagtggaa

SEQ ID NO: 108093 - RNA, 21 nt, synthetic construct
  source 1..21: mol_type = other RNA
tttagcttctgaattgagatg

SEQ ID NO: 108094 - RNA, 21 nt, synthetic construct
  source 1..21: mol_type = other RNA
tttaggaaaatagagttccat

SEQ ID NO: 108095 - RNA, 21 nt, synthetic construct
  source 1..21: mol_type = other RNA
tttaggaagcacattccttcc

SEQ ID NO: 108096 - RNA, 21 nt, synthetic construct
  source 1..21: mol_type = other RNA
tttaggaagcttccttgatca

SEQ ID NO: 108097 - RNA, 21 nt, synthetic construct
  source 1..21: mol_type = other RNA
tttaggacaaggaaaggatgg

SEQ ID NO: 108098 - RNA, 21 nt, synthetic construct
  source 1..21: mol_type = other RNA
tttaggagtcaactaatcaaa

SEQ ID NO: 108099 - RNA, 21 nt, synthetic construct
  source 1..21: mol_type = other RNA
tttaggatataagagtgggca

SEQ ID NO: 108100 - RNA, 21 nt, synthetic construct
  source 1..21: mol_type = other RNA
tttaggccactctcatctaaa

SEQ ID NO: 108101 - RNA, 21 nt, synthetic construct
  source 1..21: mol_type = other RNA
tttaggccctctataattctg

SEQ ID NO: 108102 - RNA, 21 nt, synthetic construct
  source 1..21: mol_type = other RNA
tttaggctctgtggtttcttg

SEQ ID NO: 108103 - RNA, 21 nt, synthetic construct
  source 1..21: mol_type = other RNA
tttaggctgtctccaacgctt

SEQ ID NO: 108104 - RNA, 21 nt, synthetic construct
  source 1..21: mol_type = other RNA
tttaggctgttcaatttagaa

SEQ ID NO: 108105 - RNA, 21 nt, synthetic construct
  source 1..21: mol_type = other RNA
tttagggaagatagtactgac

SEQ ID NO: 108106 - RNA, 21 nt, synthetic construct
  source 1..21: mol_type = other RNA
tttagggacgaatgcatggga

SEQ ID NO: 108107 - RNA, 21 nt, synthetic construct
  source 1..21: mol_type = other RNA
tttagggagcatatatactct

SEQ ID NO: 108108 - RNA, 21 nt, synthetic construct
  source 1..21: mol_type = other RNA
tttaggggggaaaacaccctt

SEQ ID NO: 108109 - RNA, 21 nt, synthetic construct
  source 1..21: mol_type = other RNA
tttaggtagggataagaatac

SEQ ID NO: 108110 - RNA, 21 nt, synthetic construct
  source 1..21: mol_type = other RNA
tttaggtagtcttgtcataac

SEQ ID NO: 108111 - RNA, 21 nt, synthetic construct
  source 1..21: mol_type = other RNA
tttaggtcatttttcacttct

SEQ ID NO: 108112 - RNA, 21 nt, synthetic construct
  source 1..21: mol_type = other RNA
tttaggtgccccactccacac

SEQ ID NO: 108113 - RNA, 21 nt, synthetic construct
  source 1..21: mol_type = other RNA
tttaggtgttttttccttctt

SEQ ID NO: 108114 - RNA, 21 nt, synthetic construct
  source 1..21: mol_type = other RNA
tttaggttacgtactaggtat

SEQ ID NO: 108115 - RNA, 21 nt, synthetic construct
  source 1..21: mol_type = other RNA
tttaggtttttcttgtgggta

SEQ ID NO: 108116 - RNA, 21 nt, synthetic construct
  source 1..21: mol_type = other RNA
tttagtaaatctttggtgaag

SEQ ID NO: 108117 - RNA, 21 nt, synthetic construct
  source 1..21: mol_type = other RNA
tttagtaagaggtatcaccat

SEQ ID NO: 108118 - RNA, 21 nt, synthetic construct
  source 1..21: mol_type = other RNA
tttagtaagggtaaacagaat

SEQ ID NO: 108119 - RNA, 21 nt, synthetic construct
  source 1..21: mol_type = other RNA
tttagtaagtgtgagcaaaaa

SEQ ID NO: 108120 - RNA, 21 nt, synthetic construct
  source 1..21: mol_type = other RNA
tttagtaattctccactttca

SEQ ID NO: 108121 - RNA, 21 nt, synthetic construct
  source 1..21: mol_type = other RNA
tttagtagaattctccagtga

SEQ ID NO: 108122 - RNA, 21 nt, synthetic construct
  source 1..21: mol_type = other RNA
tttagtagagatgaggtttta

SEQ ID NO: 108123 - RNA, 21 nt, synthetic construct
  source 1..21: mol_type = other RNA
tttagtagctgtctttaatgt

SEQ ID NO: 108124 - RNA, 21 nt, synthetic construct
  source 1..21: mol_type = other RNA
tttagtaggtctccttgtatg

SEQ ID NO: 108125 - RNA, 21 nt, synthetic construct
  source 1..21: mol_type = other RNA
tttagtagtaagttgtgtcat

SEQ ID NO: 108126 - RNA, 21 nt, synthetic construct
  source 1..21: mol_type = other RNA
tttagtgaaatagttggtcag

SEQ ID NO: 108127 - RNA, 21 nt, synthetic construct
  source 1..21: mol_type = other RNA
tttagtgactggcttaatgca

SEQ ID NO: 108128 - RNA, 21 nt, synthetic construct
  source 1..21: mol_type = other RNA
tttagtgcagtatcttgaaga

SEQ ID NO: 108129 - RNA, 21 nt, synthetic construct
  source 1..21: mol_type = other RNA
tttagtggctcacagtgctcc

SEQ ID NO: 108130 - RNA, 21 nt, synthetic construct
  source 1..21: mol_type = other RNA
tttagtgtattgtaccttgat

SEQ ID NO: 108131 - RNA, 21 nt, synthetic construct
  source 1..21: mol_type = other RNA
tttagtgttctgtgtttatga

SEQ ID NO: 108132 - RNA, 21 nt, synthetic construct
  source 1..21: mol_type = other RNA
tttagtgttgcttggtgttga

SEQ ID NO: 108133 - RNA, 21 nt, synthetic construct
  source 1..21: mol_type = other RNA
tttagtttacactatggcttt

SEQ ID NO: 108134 - RNA, 21 nt, synthetic construct
  source 1..21: mol_type = other RNA
tttagtttcatctatgtcccc

SEQ ID NO: 108135 - RNA, 21 nt, synthetic construct
  source 1..21: mol_type = other RNA
tttataagggtgataaaaagg

SEQ ID NO: 108136 - RNA, 21 nt, synthetic construct
  source 1..21: mol_type = other RNA
tttataatccattgggtacat

SEQ ID NO: 108137 - RNA, 21 nt, synthetic construct
  source 1..21: mol_type = other RNA
tttataatgggcaatcagaaa

SEQ ID NO: 108138 - RNA, 21 nt, synthetic construct
  source 1..21: mol_type = other RNA
tttatacaaataactccagct

SEQ ID NO: 108139 - RNA, 21 nt, synthetic construct
  source 1..21: mol_type = other RNA
tttatacaggtgcttacagac

SEQ ID NO: 108140 - RNA, 21 nt, synthetic construct
  source 1..21: mol_type = other RNA
tttatacagttggaactcttg

SEQ ID NO: 108141 - RNA, 21 nt, synthetic construct
  source 1..21: mol_type = other RNA
tttatacccaagtaaacaact

SEQ ID NO: 108142 - RNA, 21 nt, synthetic construct
  source 1..21: mol_type = other RNA
tttatacctgttgaatagcaa

SEQ ID NO: 108143 - RNA, 21 nt, synthetic construct
  source 1..21: mol_type = other RNA
tttatagtcttagctcttaag

SEQ ID NO: 108144 - RNA, 21 nt, synthetic construct
  source 1..21: mol_type = other RNA
tttatagtgtttccttccaga

SEQ ID NO: 108145 - RNA, 21 nt, synthetic construct
  source 1..21: mol_type = other RNA
tttatatgcattaagccagtc

SEQ ID NO: 108146 - RNA, 21 nt, synthetic construct
  source 1..21: mol_type = other RNA
tttatatgcctagatgattcg

SEQ ID NO: 108147 - RNA, 21 nt, synthetic construct
  source 1..21: mol_type = other RNA
tttatatttccgatgatacct

SEQ ID NO: 108148 - RNA, 21 nt, synthetic construct
  source 1..21: mol_type = other RNA
tttatattttggtagagatgg

SEQ ID NO: 108149 - RNA, 21 nt, synthetic construct
  source 1..21: mol_type = other RNA
tttatcaaaatcaaggtgcgg

SEQ ID NO: 108150 - RNA, 21 nt, synthetic construct
  source 1..21: mol_type = other RNA
tttatcaatagcagtgctgaa

SEQ ID NO: 108151 - RNA, 21 nt, synthetic construct
  source 1..21: mol_type = other RNA
tttatcaattagttcctcctt

SEQ ID NO: 108152 - RNA, 21 nt, synthetic construct
  source 1..21: mol_type = other RNA
tttatcagatcccaattactt

SEQ ID NO: 108153 - RNA, 21 nt, synthetic construct
  source 1..21: mol_type = other RNA
tttatcagcaccaaagattat

SEQ ID NO: 108154 - RNA, 21 nt, synthetic construct
  source 1..21: mol_type = other RNA
tttatcagtctccaatcctca

SEQ ID NO: 108155 - RNA, 21 nt, synthetic construct
  source 1..21: mol_type = other RNA
tttatcatgtcttcttggatt

SEQ ID NO: 108156 - RNA, 21 nt, synthetic construct
  source 1..21: mol_type = other RNA
tttatccttgcaccaactcca

SEQ ID NO: 108157 - RNA, 21 nt, synthetic construct
  source 1..21: mol_type = other RNA
tttatcggataaggaagagtt

SEQ ID NO: 108158 - RNA, 21 nt, synthetic construct
  source 1..21: mol_type = other RNA
tttatctacagaggattttgg

SEQ ID NO: 108159 - RNA, 21 nt, synthetic construct
  source 1..21: mol_type = other RNA
tttatctccacatttctacac

SEQ ID NO: 108160 - RNA, 21 nt, synthetic construct
  source 1..21: mol_type = other RNA
tttatctccataagtccctaa

SEQ ID NO: 108161 - RNA, 21 nt, synthetic construct
  source 1..21: mol_type = other RNA
tttatctctctcaagcaatct

SEQ ID NO: 108162 - RNA, 21 nt, synthetic construct
  source 1..21: mol_type = other RNA
tttatctggatttttgtgtag

SEQ ID NO: 108163 - RNA, 21 nt, synthetic construct
  source 1..21: mol_type = other RNA
tttatctttggatatccccat

SEQ ID NO: 108164 - RNA, 21 nt, synthetic construct
  source 1..21: mol_type = other RNA
tttatgaatgatgccatcaca

SEQ ID NO: 108165 - RNA, 21 nt, synthetic construct
  source 1..21: mol_type = other RNA
tttatgagacacacgagtatt

SEQ ID NO: 108166 - RNA, 21 nt, synthetic construct
  source 1..21: mol_type = other RNA
tttatgcatttggtctcattc

SEQ ID NO: 108167 - RNA, 21 nt, synthetic construct
  source 1..21: mol_type = other RNA
tttatgccaatatcacactgt

SEQ ID NO: 108168 - RNA, 21 nt, synthetic construct
  source 1..21: mol_type = other RNA
tttatgctgatgaactacaca

SEQ ID NO: 108169 - RNA, 21 nt, synthetic construct
  source 1..21: mol_type = other RNA
tttatgctttgtctctggaag

SEQ ID NO: 108170 - RNA, 21 nt, synthetic construct
  source 1..21: mol_type = other RNA
tttatggaattgccatatgta

SEQ ID NO: 108171 - RNA, 21 nt, synthetic construct
  source 1..21: mol_type = other RNA
tttatggcctaagatggaaag

SEQ ID NO: 108172 - RNA, 21 nt, synthetic construct
  source 1..21: mol_type = other RNA
tttatgggtcaaccactaagg

SEQ ID NO: 108173 - RNA, 21 nt, synthetic construct
  source 1..21: mol_type = other RNA
tttatggtaactcctgttctt

SEQ ID NO: 108174 - RNA, 21 nt, synthetic construct
  source 1..21: mol_type = other RNA
tttatggtaattggttcgttt

SEQ ID NO: 108175 - RNA, 21 nt, synthetic construct
  source 1..21: mol_type = other RNA
tttatggttttttcccccctg

SEQ ID NO: 108176 - RNA, 21 nt, synthetic construct
  source 1..21: mol_type = other RNA
tttatgtacacgtcttgtcaa

SEQ ID NO: 108177 - RNA, 21 nt, synthetic construct
  source 1..21: mol_type = other RNA
tttatgtacatgacctatcta

SEQ ID NO: 108178 - RNA, 21 nt, synthetic construct
  source 1..21: mol_type = other RNA
tttatgtgcagtctaaccatt

SEQ ID NO: 108179 - RNA, 21 nt, synthetic construct
  source 1..21: mol_type = other RNA
tttatgtgctttctcaacact

SEQ ID NO: 108180 - RNA, 21 nt, synthetic construct
  source 1..21: mol_type = other RNA
tttatgttcatgaaccttcac

SEQ ID NO: 108181 - RNA, 21 nt, synthetic construct
  source 1..21: mol_type = other RNA
tttatgttgcacaaaagtgaa

SEQ ID NO: 108182 - RNA, 21 nt, synthetic construct
  source 1..21: mol_type = other RNA
tttattaaacctgttacatgg

SEQ ID NO: 108183 - RNA, 21 nt, synthetic construct
  source 1..21: mol_type = other RNA
tttattaaagtagaaggccct

SEQ ID NO: 108184 - RNA, 21 nt, synthetic construct
  source 1..21: mol_type = other RNA
tttattaatttggcttgggga

SEQ ID NO: 108185 - RNA, 21 nt, synthetic construct
  source 1..21: mol_type = other RNA
tttattagaactagaactgtg

SEQ ID NO: 108186 - RNA, 21 nt, synthetic construct
  source 1..21: mol_type = other RNA
tttattaggtgcacacaacac

SEQ ID NO: 108187 - RNA, 21 nt, synthetic construct
  source 1..21: mol_type = other RNA
tttattagtagttaggtggtt

SEQ ID NO: 108188 - RNA, 21 nt, synthetic construct
  source 1..21: mol_type = other RNA
tttattcctctcttggaatgt

SEQ ID NO: 108189 - RNA, 21 nt, synthetic construct
  source 1..21: mol_type = other RNA
tttattctgttctagctcctg

SEQ ID NO: 108190 - RNA, 21 nt, synthetic construct
  source 1..21: mol_type = other RNA
tttattgataagcacatggtg

SEQ ID NO: 108191 - RNA, 21 nt, synthetic construct
  source 1..21: mol_type = other RNA
tttattgtcaaggtcatcctt

SEQ ID NO: 108192 - RNA, 21 nt, synthetic construct
  source 1..21: mol_type = other RNA
tttattgtttcacttttctgg

SEQ ID NO: 108193 - RNA, 21 nt, synthetic construct
  source 1..21: mol_type = other RNA
tttatttagcccatgtctaaa

SEQ ID NO: 108194 - RNA, 21 nt, synthetic construct
  source 1..21: mol_type = other RNA
tttatttaggccctctataat

SEQ ID NO: 108195 - RNA, 21 nt, synthetic construct
  source 1..21: mol_type = other RNA
tttatttatacaggtgcttac

SEQ ID NO: 108196 - RNA, 21 nt, synthetic construct
  source 1..21: mol_type = other RNA
tttatttccttaagccatttc

SEQ ID NO: 108197 - RNA, 21 nt, synthetic construct
  source 1..21: mol_type = other RNA
tttatttctgggctctctatt

SEQ ID NO: 108198 - RNA, 21 nt, synthetic construct
  source 1..21: mol_type = other RNA
tttatttcttctccctcttcg

SEQ ID NO: 108199 - RNA, 21 nt, synthetic construct
  source 1..21: mol_type = other RNA
tttatttcttgacctcagtgg

SEQ ID NO: 108200 - RNA, 21 nt, synthetic construct
  source 1..21: mol_type = other RNA
tttatttgctgtcaggcaagg

SEQ ID NO: 108201 - RNA, 21 nt, synthetic construct
  source 1..21: mol_type = other RNA
tttatttggctgttaccattt

SEQ ID NO: 108202 - RNA, 21 nt, synthetic construct
  source 1..21: mol_type = other RNA
tttatttttacccgtggaaat

SEQ ID NO: 108203 - RNA, 21 nt, synthetic construct
  source 1..21: mol_type = other RNA
tttatttttgagacaggttgt

SEQ ID NO: 108204 - RNA, 21 nt, synthetic construct
  source 1..21: mol_type = other RNA
tttattttttcttcccatctc

SEQ ID NO: 108205 - RNA, 21 nt, synthetic construct
  source 1..21: mol_type = other RNA
tttcaaaaacccaactctttc

SEQ ID NO: 108206 - RNA, 21 nt, synthetic construct
  source 1..21: mol_type = other RNA
tttcaaaagctccccggatga

SEQ ID NO: 108207 - RNA, 21 nt, synthetic construct
  source 1..21: mol_type = other RNA
tttcaaaccaatgttctcttt

SEQ ID NO: 108208 - RNA, 21 nt, synthetic construct
  source 1..21: mol_type = other RNA
tttcaaactgtggtcactgtt

SEQ ID NO: 108209 - RNA, 21 nt, synthetic construct
  source 1..21: mol_type = other RNA
tttcaaagagacctgattctt

SEQ ID NO: 108210 - RNA, 21 nt, synthetic construct
  source 1..21: mol_type = other RNA
tttcaaagttaatagcctcct

SEQ ID NO: 108211 - RNA, 21 nt, synthetic construct
  source 1..21: mol_type = other RNA
tttcaaatacctagttttcca

SEQ ID NO: 108212 - RNA, 21 nt, synthetic construct
  source 1..21: mol_type = other RNA
tttcaaatgtgacagaacaaa

SEQ ID NO: 108213 - RNA, 21 nt, synthetic construct
  source 1..21: mol_type = other RNA
tttcaacaaaggttgaaaact

SEQ ID NO: 108214 - RNA, 21 nt, synthetic construct
  source 1..21: mol_type = other RNA
tttcaacctaacatgtcttgg

SEQ ID NO: 108215 - RNA, 21 nt, synthetic construct
  source 1..21: mol_type = other RNA
tttcaacctttgttgaaaacg

SEQ ID NO: 108216 - RNA, 21 nt, synthetic construct
  source 1..21: mol_type = other RNA
tttcaactgaacaacgctgtg

SEQ ID NO: 108217 - RNA, 21 nt, synthetic construct
  source 1..21: mol_type = other RNA
tttcaaggcttgtgcatcaga

SEQ ID NO: 108218 - RNA, 21 nt, synthetic construct
  source 1..21: mol_type = other RNA
tttcaaggggccttttgtcaa

SEQ ID NO: 108219 - RNA, 21 nt, synthetic construct
  source 1..21: mol_type = other RNA
tttcaagggtgttttcccccc

SEQ ID NO: 108220 - RNA, 21 nt, synthetic construct
  source 1..21: mol_type = other RNA
tttcaaggtagaagtacaaac

SEQ ID NO: 108221 - RNA, 21 nt, synthetic construct
  source 1..21: mol_type = other RNA
tttcaaggtatctccccaaag

SEQ ID NO: 108222 - RNA, 21 nt, synthetic construct
  source 1..21: mol_type = other RNA
tttcaagtaacactcagaagt

SEQ ID NO: 108223 - RNA, 21 nt, synthetic construct
  source 1..21: mol_type = other RNA
tttcaagtgaaccaaaaacca

SEQ ID NO: 108224 - RNA, 21 nt, synthetic construct
  source 1..21: mol_type = other RNA
tttcaatagtgggtagaagca

SEQ ID NO: 108225 - RNA, 21 nt, synthetic construct
  source 1..21: mol_type = other RNA
tttcaatctggaatgcatcgt

SEQ ID NO: 108226 - RNA, 21 nt, synthetic construct
  source 1..21: mol_type = other RNA
tttcaatcttggaaatgatac

SEQ ID NO: 108227 - RNA, 21 nt, synthetic construct
  source 1..21: mol_type = other RNA
tttcacaaacacacaaaccaa

SEQ ID NO: 108228 - RNA, 21 nt, synthetic construct
  source 1..21: mol_type = other RNA
tttcacacgcattgcattgac

SEQ ID NO: 108229 - RNA, 21 nt, synthetic construct
  source 1..21: mol_type = other RNA
tttcacactataacagatgga

SEQ ID NO: 108230 - RNA, 21 nt, synthetic construct
  source 1..21: mol_type = other RNA
tttcacactgattttctgctt

SEQ ID NO: 108231 - RNA, 21 nt, synthetic construct
  source 1..21: mol_type = other RNA
tttcacagaaacagaaaaatc

SEQ ID NO: 108232 - RNA, 21 nt, synthetic construct
  source 1..21: mol_type = other RNA
tttcacagggcagggagagag

SEQ ID NO: 108233 - RNA, 21 nt, synthetic construct
  source 1..21: mol_type = other RNA
tttcacataaatttgccacat

SEQ ID NO: 108234 - RNA, 21 nt, synthetic construct
  source 1..21: mol_type = other RNA
tttcacattcttcaccattcc

SEQ ID NO: 108235 - RNA, 21 nt, synthetic construct
  source 1..21: mol_type = other RNA
tttcacattgcacagtctccc

SEQ ID NO: 108236 - RNA, 21 nt, synthetic construct
  source 1..21: mol_type = other RNA
tttcaccagcggcatacagga

SEQ ID NO: 108237 - RNA, 21 nt, synthetic construct
  source 1..21: mol_type = other RNA
tttcaccctgcgaaggcaatg

SEQ ID NO: 108238 - RNA, 21 nt, synthetic construct
  source 1..21: mol_type = other RNA
tttcactctaatatggttcct

SEQ ID NO: 108239 - RNA, 21 nt, synthetic construct
  source 1..21: mol_type = other RNA
tttcactctcaatagtgtcct

SEQ ID NO: 108240 - RNA, 21 nt, synthetic construct
  source 1..21: mol_type = other RNA
tttcactctgtcgcccaggct

SEQ ID NO: 108241 - RNA, 21 nt, synthetic construct
  source 1..21: mol_type = other RNA
tttcactcttagtgatgtctt

SEQ ID NO: 108242 - RNA, 21 nt, synthetic construct
  source 1..21: mol_type = other RNA
tttcactcttttaaggtttag

SEQ ID NO: 108243 - RNA, 21 nt, synthetic construct
  source 1..21: mol_type = other RNA
tttcactgctcagtccctcac

SEQ ID NO: 108244 - RNA, 21 nt, synthetic construct
  source 1..21: mol_type = other RNA
tttcacttacttgagccccag

SEQ ID NO: 108245 - RNA, 21 nt, synthetic construct
  source 1..21: mol_type = other RNA
tttcacttcgttcagtttagt

SEQ ID NO: 108246 - RNA, 21 nt, synthetic construct
  source 1..21: mol_type = other RNA
tttcacttcttattggttatc

SEQ ID NO: 108247 - RNA, 21 nt, synthetic construct
  source 1..21: mol_type = other RNA
tttcacttgattactttacag

SEQ ID NO: 108248 - RNA, 21 nt, synthetic construct
  source 1..21: mol_type = other RNA
tttcacttgtttcttttcact

SEQ ID NO: 108249 - RNA, 21 nt, synthetic construct
  source 1..21: mol_type = other RNA
tttcactttgatcatacacat

SEQ ID NO: 108250 - RNA, 21 nt, synthetic construct
  source 1..21: mol_type = other RNA
tttcacttttctggttttctg

SEQ ID NO: 108251 - RNA, 21 nt, synthetic construct
  source 1..21: mol_type = other RNA
tttcacttttgtgcaacataa

SEQ ID NO: 108252 - RNA, 21 nt, synthetic construct
  source 1..21: mol_type = other RNA
tttcagaaagagaatagcaga

SEQ ID NO: 108253 - RNA, 21 nt, synthetic construct
  source 1..21: mol_type = other RNA
tttcagacttaactataggag

SEQ ID NO: 108254 - RNA, 21 nt, synthetic construct
  source 1..21: mol_type = other RNA
tttcagagagacctgaagact

SEQ ID NO: 108255 - RNA, 21 nt, synthetic construct
  source 1..21: mol_type = other RNA
tttcagatctctgacattggt

SEQ ID NO: 108256 - RNA, 21 nt, synthetic construct
  source 1..21: mol_type = other RNA
tttcagattgaccttgtatcc

SEQ ID NO: 108257 - RNA, 21 nt, synthetic construct
  source 1..21: mol_type = other RNA
tttcagattgcttgagagaga

SEQ ID NO: 108258 - RNA, 21 nt, synthetic construct
  source 1..21: mol_type = other RNA
tttcagcacaatactgtctca

SEQ ID NO: 108259 - RNA, 21 nt, synthetic construct
  source 1..21: mol_type = other RNA
tttcagcactgctattgataa

SEQ ID NO: 108260 - RNA, 21 nt, synthetic construct
  source 1..21: mol_type = other RNA
tttcagcagcagagaagtgaa

SEQ ID NO: 108261 - RNA, 21 nt, synthetic construct
  source 1..21: mol_type = other RNA
tttcagcatagcagaacctta

SEQ ID NO: 108262 - RNA, 21 nt, synthetic construct
  source 1..21: mol_type = other RNA
tttcagccaaagctggcatgt

SEQ ID NO: 108263 - RNA, 21 nt, synthetic construct
  source 1..21: mol_type = other RNA
tttcagccatcccagctacat

SEQ ID NO: 108264 - RNA, 21 nt, synthetic construct
  source 1..21: mol_type = other RNA
tttcagccctgatagatattg

SEQ ID NO: 108265 - RNA, 21 nt, synthetic construct
  source 1..21: mol_type = other RNA
tttcagctcaaacagcttgac

SEQ ID NO: 108266 - RNA, 21 nt, synthetic construct
  source 1..21: mol_type = other RNA
tttcaggaatgcaaagtttcc

SEQ ID NO: 108267 - RNA, 21 nt, synthetic construct
  source 1..21: mol_type = other RNA
tttcaggactcatgagagctg

SEQ ID NO: 108268 - RNA, 21 nt, synthetic construct
  source 1..21: mol_type = other RNA
tttcagggagaattggtagtc

SEQ ID NO: 108269 - RNA, 21 nt, synthetic construct
  source 1..21: mol_type = other RNA
tttcaggggggccactggaaa

SEQ ID NO: 108270 - RNA, 21 nt, synthetic construct
  source 1..21: mol_type = other RNA
tttcaggtattgagcctgttc

SEQ ID NO: 108271 - RNA, 21 nt, synthetic construct
  source 1..21: mol_type = other RNA
tttcaggtggtatttaatctg

SEQ ID NO: 108272 - RNA, 21 nt, synthetic construct
  source 1..21: mol_type = other RNA
tttcaggtgtgtaaacactgt

SEQ ID NO: 108273 - RNA, 21 nt, synthetic construct
  source 1..21: mol_type = other RNA
tttcaggttcaagcgactctc

SEQ ID NO: 108274 - RNA, 21 nt, synthetic construct
  source 1..21: mol_type = other RNA
tttcaggttttcgaccaagtt

SEQ ID NO: 108275 - RNA, 21 nt, synthetic construct
  source 1..21: mol_type = other RNA
tttcagtacacgaaaatatcc

SEQ ID NO: 108276 - RNA, 21 nt, synthetic construct
  source 1..21: mol_type = other RNA
tttcagtatgtgtctctgaca

SEQ ID NO: 108277 - RNA, 21 nt, synthetic construct
  source 1..21: mol_type = other RNA
tttcagtccagatattatcct

SEQ ID NO: 108278 - RNA, 21 nt, synthetic construct
  source 1..21: mol_type = other RNA
tttcagtccctcctttctaga

SEQ ID NO: 108279 - RNA, 21 nt, synthetic construct
  source 1..21: mol_type = other RNA
tttcagtcggttcttcaccgt

SEQ ID NO: 108280 - RNA, 21 nt, synthetic construct
  source 1..21: mol_type = other RNA
tttcagtgagtagggaaggtg

SEQ ID NO: 108281 - RNA, 21 nt, synthetic construct
  source 1..21: mol_type = other RNA
tttcagtgtgtccacacaatg

SEQ ID NO: 108282 - RNA, 21 nt, synthetic construct
  source 1..21: mol_type = other RNA
tttcagttctttcggatattt

SEQ ID NO: 108283 - RNA, 21 nt, synthetic construct
  source 1..21: mol_type = other RNA
tttcagttgcatgaatttgtt

SEQ ID NO: 108284 - RNA, 21 nt, synthetic construct
  source 1..21: mol_type = other RNA
tttcataaaatgatggcaaca

SEQ ID NO: 108285 - RNA, 21 nt, synthetic construct
  source 1..21: mol_type = other RNA
tttcataacaaagctctgatg

SEQ ID NO: 108286 - RNA, 21 nt, synthetic construct
  source 1..21: mol_type = other RNA
tttcatagcagaatggccctg

SEQ ID NO: 108287 - RNA, 21 nt, synthetic construct
  source 1..21: mol_type = other RNA
tttcatagcagcattgtttac

SEQ ID NO: 108288 - RNA, 21 nt, synthetic construct
  source 1..21: mol_type = other RNA
tttcataggaaatacttgatc

SEQ ID NO: 108289 - RNA, 21 nt, synthetic construct
  source 1..21: mol_type = other RNA
tttcataggcatctctccctt

SEQ ID NO: 108290 - RNA, 21 nt, synthetic construct
  source 1..21: mol_type = other RNA
tttcatatctgattttgtgtc

SEQ ID NO: 108291 - RNA, 21 nt, synthetic construct
  source 1..21: mol_type = other RNA
tttcatcactcactggcctga

SEQ ID NO: 108292 - RNA, 21 nt, synthetic construct
  source 1..21: mol_type = other RNA
tttcatccaaacagaaaccct

SEQ ID NO: 108293 - RNA, 21 nt, synthetic construct
  source 1..21: mol_type = other RNA
tttcatcgtaaaaagccattt

SEQ ID NO: 108294 - RNA, 21 nt, synthetic construct
  source 1..21: mol_type = other RNA
tttcatctatgtcccctgggg

SEQ ID NO: 108295 - RNA, 21 nt, synthetic construct
  source 1..21: mol_type = other RNA
tttcatgaacaattttctctc

SEQ ID NO: 108296 - RNA, 21 nt, synthetic construct
  source 1..21: mol_type = other RNA
tttcatgatttggtgtgtgca

SEQ ID NO: 108297 - RNA, 21 nt, synthetic construct
  source 1..21: mol_type = other RNA
tttcatgccatcctggatttg

SEQ ID NO: 108298 - RNA, 21 nt, synthetic construct
  source 1..21: mol_type = other RNA
tttcatgcctttcagcatagc

SEQ ID NO: 108299 - RNA, 21 nt, synthetic construct
  source 1..21: mol_type = other RNA
tttcatgcgacatatcaggga

SEQ ID NO: 108300 - RNA, 21 nt, synthetic construct
  source 1..21: mol_type = other RNA
tttcatggacttcctatttta

SEQ ID NO: 108301 - RNA, 21 nt, synthetic construct
  source 1..21: mol_type = other RNA
tttcatggttttaatgggcat

SEQ ID NO: 108302 - RNA, 21 nt, synthetic construct
  source 1..21: mol_type = other RNA
tttcattacatttgcttaggc

SEQ ID NO: 108303 - RNA, 21 nt, synthetic construct
  source 1..21: mol_type = other RNA
tttcattaggttgatggctgt

SEQ ID NO: 108304 - RNA, 21 nt, synthetic construct
  source 1..21: mol_type = other RNA
tttcattcgttcaaaacatca

SEQ ID NO: 108305 - RNA, 21 nt, synthetic construct
  source 1..21: mol_type = other RNA
tttcattctacctggagcctg

SEQ ID NO: 108306 - RNA, 21 nt, synthetic construct
  source 1..21: mol_type = other RNA
tttcatttactgaaatcctag

SEQ ID NO: 108307 - RNA, 21 nt, synthetic construct
  source 1..21: mol_type = other RNA
tttcatttggcctctgcggcg

SEQ ID NO: 108308 - RNA, 21 nt, synthetic construct
  source 1..21: mol_type = other RNA
tttccaaagatcatgggtttt

SEQ ID NO: 108309 - RNA, 21 nt, synthetic construct
  source 1..21: mol_type = other RNA
tttccaaattcaaagcaagtt

SEQ ID NO: 108310 - RNA, 21 nt, synthetic construct
  source 1..21: mol_type = other RNA
tttccaacagtttacacgcct

SEQ ID NO: 108311 - RNA, 21 nt, synthetic construct
  source 1..21: mol_type = other RNA
tttccaaccaagcccaacttt

SEQ ID NO: 108312 - RNA, 21 nt, synthetic construct
  source 1..21: mol_type = other RNA
tttccaaccactgaatcagat

SEQ ID NO: 108313 - RNA, 21 nt, synthetic construct
  source 1..21: mol_type = other RNA
tttccaagaaccctttgttat

SEQ ID NO: 108314 - RNA, 21 nt, synthetic construct
  source 1..21: mol_type = other RNA
tttccaagattgaaaatggtt

SEQ ID NO: 108315 - RNA, 21 nt, synthetic construct
  source 1..21: mol_type = other RNA
tttccaagccttaaaagtgct

SEQ ID NO: 108316 - RNA, 21 nt, synthetic construct
  source 1..21: mol_type = other RNA
tttccaatccgggaacatgac

SEQ ID NO: 108317 - RNA, 21 nt, synthetic construct
  source 1..21: mol_type = other RNA
tttccacagtgactttactgt

SEQ ID NO: 108318 - RNA, 21 nt, synthetic construct
  source 1..21: mol_type = other RNA
tttccacataaagtcttgctg

SEQ ID NO: 108319 - RNA, 21 nt, synthetic construct
  source 1..21: mol_type = other RNA
tttccacataattgaacccac

SEQ ID NO: 108320 - RNA, 21 nt, synthetic construct
  source 1..21: mol_type = other RNA
tttccacccatgaagccagca

SEQ ID NO: 108321 - RNA, 21 nt, synthetic construct
  source 1..21: mol_type = other RNA
tttccacgggtaaaaataaat

SEQ ID NO: 108322 - RNA, 21 nt, synthetic construct
  source 1..21: mol_type = other RNA
tttccactctctggctgcaat

SEQ ID NO: 108323 - RNA, 21 nt, synthetic construct
  source 1..21: mol_type = other RNA
tttccactttgaggttattaa

SEQ ID NO: 108324 - RNA, 21 nt, synthetic construct
  source 1..21: mol_type = other RNA
tttccagaaaactggcaatca

SEQ ID NO: 108325 - RNA, 21 nt, synthetic construct
  source 1..21: mol_type = other RNA
tttccagaagtaactcttgag

SEQ ID NO: 108326 - RNA, 21 nt, synthetic construct
  source 1..21: mol_type = other RNA
tttccagaggttcttttaaat

SEQ ID NO: 108327 - RNA, 21 nt, synthetic construct
  source 1..21: mol_type = other RNA
tttccagcattttataggcat

SEQ ID NO: 108328 - RNA, 21 nt, synthetic construct
  source 1..21: mol_type = other RNA
tttccagcctttaatttagcg

SEQ ID NO: 108329 - RNA, 21 nt, synthetic construct
  source 1..21: mol_type = other RNA
tttccaggaaaagcaaatgtc

SEQ ID NO: 108330 - RNA, 21 nt, synthetic construct
  source 1..21: mol_type = other RNA
tttccaggaccaatttaccat

SEQ ID NO: 108331 - RNA, 21 nt, synthetic construct
  source 1..21: mol_type = other RNA
tttccagggggtatggagaca

SEQ ID NO: 108332 - RNA, 21 nt, synthetic construct
  source 1..21: mol_type = other RNA
tttccaggtcattacatattt

SEQ ID NO: 108333 - RNA, 21 nt, synthetic construct
  source 1..21: mol_type = other RNA
tttccagtactttttcatcca

SEQ ID NO: 108334 - RNA, 21 nt, synthetic construct
  source 1..21: mol_type = other RNA
tttccagtatattcatagtag

SEQ ID NO: 108335 - RNA, 21 nt, synthetic construct
  source 1..21: mol_type = other RNA
tttccagtcttctcatacaga

SEQ ID NO: 108336 - RNA, 21 nt, synthetic construct
  source 1..21: mol_type = other RNA
tttccagtggcccccctgaaa

SEQ ID NO: 108337 - RNA, 21 nt, synthetic construct
  source 1..21: mol_type = other RNA
tttccagtgtttggtttttat

SEQ ID NO: 108338 - RNA, 21 nt, synthetic construct
  source 1..21: mol_type = other RNA
tttccataaaaagcgttggag

SEQ ID NO: 108339 - RNA, 21 nt, synthetic construct
  source 1..21: mol_type = other RNA
tttccatcttaggccataaat

SEQ ID NO: 108340 - RNA, 21 nt, synthetic construct
  source 1..21: mol_type = other RNA
tttccatggaggggccagttg

SEQ ID NO: 108341 - RNA, 21 nt, synthetic construct
  source 1..21: mol_type = other RNA
tttccatgtcttggctattgt

SEQ ID NO: 108342 - RNA, 21 nt, synthetic construct
  source 1..21: mol_type = other RNA
tttccattcaatccttgtaac

SEQ ID NO: 108343 - RNA, 21 nt, synthetic construct
  source 1..21: mol_type = other RNA
tttccattcacacaccctttc

SEQ ID NO: 108344 - RNA, 21 nt, synthetic construct
  source 1..21: mol_type = other RNA
tttccattcatgtaatgcaaa

SEQ ID NO: 108345 - RNA, 21 nt, synthetic construct
  source 1..21: mol_type = other RNA
tttcccaaagatagactcttc

SEQ ID NO: 108346 - RNA, 21 nt, synthetic construct
  source 1..21: mol_type = other RNA
tttcccaatctctggtattct

SEQ ID NO: 108347 - RNA, 21 nt, synthetic construct
  source 1..21: mol_type = other RNA
tttcccagatacgttaaagga

SEQ ID NO: 108348 - RNA, 21 nt, synthetic construct
  source 1..21: mol_type = other RNA
tttcccaggagctagaacaga

SEQ ID NO: 108349 - RNA, 21 nt, synthetic construct
  source 1..21: mol_type = other RNA
tttcccagggtgtagccacaa

SEQ ID NO: 108350 - RNA, 21 nt, synthetic construct
  source 1..21: mol_type = other RNA
tttcccatctctagttttcca

SEQ ID NO: 108351 - RNA, 21 nt, synthetic construct
  source 1..21: mol_type = other RNA
tttcccattaccaaaacctgg

SEQ ID NO: 108352 - RNA, 21 nt, synthetic construct
  source 1..21: mol_type = other RNA
tttcccatttgatttcttctt

SEQ ID NO: 108353 - RNA, 21 nt, synthetic construct
  source 1..21: mol_type = other RNA
tttccccattagagtaagcaa

SEQ ID NO: 108354 - RNA, 21 nt, synthetic construct
  source 1..21: mol_type = other RNA
tttcccccaattaaactatag

SEQ ID NO: 108355 - RNA, 21 nt, synthetic construct
  source 1..21: mol_type = other RNA
tttcccccctaaaacactgga

SEQ ID NO: 108356 - RNA, 21 nt, synthetic construct
  source 1..21: mol_type = other RNA
tttcccccctggaacaatcaa

SEQ ID NO: 108357 - RNA, 21 nt, synthetic construct
  source 1..21: mol_type = other RNA
tttccccctacacccagttca

SEQ ID NO: 108358 - RNA, 21 nt, synthetic construct
  source 1..21: mol_type = other RNA
tttcccgctacacaagtatta

SEQ ID NO: 108359 - RNA, 21 nt, synthetic construct
  source 1..21: mol_type = other RNA
tttccctcagaatttgaggtc

SEQ ID NO: 108360 - RNA, 21 nt, synthetic construct
  source 1..21: mol_type = other RNA
tttccctcctttttatcaccc

SEQ ID NO: 108361 - RNA, 21 nt, synthetic construct
  source 1..21: mol_type = other RNA
tttccctctgagagaagtcag

SEQ ID NO: 108362 - RNA, 21 nt, synthetic construct
  source 1..21: mol_type = other RNA
tttccctgcatacactcattt

SEQ ID NO: 108363 - RNA, 21 nt, synthetic construct
  source 1..21: mol_type = other RNA
tttccctgcttcatctggacc

SEQ ID NO: 108364 - RNA, 21 nt, synthetic construct
  source 1..21: mol_type = other RNA
tttccctggggaataagattt

SEQ ID NO: 108365 - RNA, 21 nt, synthetic construct
  source 1..21: mol_type = other RNA
tttccctgtgtatgtgtagtc

SEQ ID NO: 108366 - RNA, 21 nt, synthetic construct
  source 1..21: mol_type = other RNA
tttcccttaaaaggaactaat

SEQ ID NO: 108367 - RNA, 21 nt, synthetic construct
  source 1..21: mol_type = other RNA
tttcccttaatgttgacatct

SEQ ID NO: 108368 - RNA, 21 nt, synthetic construct
  source 1..21: mol_type = other RNA
tttcccttctgctcggctctg

SEQ ID NO: 108369 - RNA, 21 nt, synthetic construct
  source 1..21: mol_type = other RNA
tttcccttttggatgcagatt

SEQ ID NO: 108370 - RNA, 21 nt, synthetic construct
  source 1..21: mol_type = other RNA
tttcccttttgtagctaatat

SEQ ID NO: 108371 - RNA, 21 nt, synthetic construct
  source 1..21: mol_type = other RNA
tttccgatgataccttcttga

SEQ ID NO: 108372 - RNA, 21 nt, synthetic construct
  source 1..21: mol_type = other RNA
tttccggttgtatagcagtaa

SEQ ID NO: 108373 - RNA, 21 nt, synthetic construct
  source 1..21: mol_type = other RNA
tttccgtatccagtggttttt

SEQ ID NO: 108374 - RNA, 21 nt, synthetic construct
  source 1..21: mol_type = other RNA
tttccgtctagccacttccta

SEQ ID NO: 108375 - RNA, 21 nt, synthetic construct
  source 1..21: mol_type = other RNA
tttccgtgtgacaaaaagtag

SEQ ID NO: 108376 - RNA, 21 nt, synthetic construct
  source 1..21: mol_type = other RNA
tttccgttgctgcatagtact

SEQ ID NO: 108377 - RNA, 21 nt, synthetic construct
  source 1..21: mol_type = other RNA
tttccgttttgcaagatgcat

SEQ ID NO: 108378 - RNA, 21 nt, synthetic construct
  source 1..21: mol_type = other RNA
tttcctaaaactccccatgca

SEQ ID NO: 108379 - RNA, 21 nt, synthetic construct
  source 1..21: mol_type = other RNA
tttcctaaccactgttatctg

SEQ ID NO: 108380 - RNA, 21 nt, synthetic construct
  source 1..21: mol_type = other RNA
tttcctaatctaacatgttac

SEQ ID NO: 108381 - RNA, 21 nt, synthetic construct
  source 1..21: mol_type = other RNA
tttcctacatactgcactctc

SEQ ID NO: 108382 - RNA, 21 nt, synthetic construct
  source 1..21: mol_type = other RNA
tttcctaccctgaggatataa

SEQ ID NO: 108383 - RNA, 21 nt, synthetic construct
  source 1..21: mol_type = other RNA
tttcctactaacaagaaaggg

SEQ ID NO: 108384 - RNA, 21 nt, synthetic construct
  source 1..21: mol_type = other RNA
tttcctagactgccaggtagg

SEQ ID NO: 108385 - RNA, 21 nt, synthetic construct
  source 1..21: mol_type = other RNA
tttcctagattccctctggcc

SEQ ID NO: 108386 - RNA, 21 nt, synthetic construct
  source 1..21: mol_type = other RNA
tttcctattcacactgctcct

SEQ ID NO: 108387 - RNA, 21 nt, synthetic construct
  source 1..21: mol_type = other RNA
tttcctcatgtccatagttaa

SEQ ID NO: 108388 - RNA, 21 nt, synthetic construct
  source 1..21: mol_type = other RNA
tttcctcccttcagcctgtgt

SEQ ID NO: 108389 - RNA, 21 nt, synthetic construct
  source 1..21: mol_type = other RNA
tttcctccttctgctcacttt

SEQ ID NO: 108390 - RNA, 21 nt, synthetic construct
  source 1..21: mol_type = other RNA
tttcctcggtctacggacgca

SEQ ID NO: 108391 - RNA, 21 nt, synthetic construct
  source 1..21: mol_type = other RNA
tttcctcgttttcaacaaagg

SEQ ID NO: 108392 - RNA, 21 nt, synthetic construct
  source 1..21: mol_type = other RNA
tttcctgataaggggctatct

SEQ ID NO: 108393 - RNA, 21 nt, synthetic construct
  source 1..21: mol_type = other RNA
tttcctgatcacaccctccta

SEQ ID NO: 108394 - RNA, 21 nt, synthetic construct
  source 1..21: mol_type = other RNA
tttcctgatcagcaccctcaa

SEQ ID NO: 108395 - RNA, 21 nt, synthetic construct
  source 1..21: mol_type = other RNA
tttcctgatggacattctgct

SEQ ID NO: 108396 - RNA, 21 nt, synthetic construct
  source 1..21: mol_type = other RNA
tttcctgcacatgcacaaggt

SEQ ID NO: 108397 - RNA, 21 nt, synthetic construct
  source 1..21: mol_type = other RNA
tttcctgcccctccactccac

SEQ ID NO: 108398 - RNA, 21 nt, synthetic construct
  source 1..21: mol_type = other RNA
tttcctgctgtcgtttatgca

SEQ ID NO: 108399 - RNA, 21 nt, synthetic construct
  source 1..21: mol_type = other RNA
tttcctggaaaacttctctgg

SEQ ID NO: 108400 - RNA, 21 nt, synthetic construct
  source 1..21: mol_type = other RNA
tttcctgtgatttatgtggca

SEQ ID NO: 108401 - RNA, 21 nt, synthetic construct
  source 1..21: mol_type = other RNA
tttcctgttccgggatcctgt

SEQ ID NO: 108402 - RNA, 21 nt, synthetic construct
  source 1..21: mol_type = other RNA
tttccttaagcacagactgtg

SEQ ID NO: 108403 - RNA, 21 nt, synthetic construct
  source 1..21: mol_type = other RNA
tttccttaagccatttcaggt

SEQ ID NO: 108404 - RNA, 21 nt, synthetic construct
  source 1..21: mol_type = other RNA
tttccttaccagtgcttgcag

SEQ ID NO: 108405 - RNA, 21 nt, synthetic construct
  source 1..21: mol_type = other RNA
tttccttacctttatctttgg

SEQ ID NO: 108406 - RNA, 21 nt, synthetic construct
  source 1..21: mol_type = other RNA
tttccttagttcgaagttttt

SEQ ID NO: 108407 - RNA, 21 nt, synthetic construct
  source 1..21: mol_type = other RNA
tttccttatagtattacctcc

SEQ ID NO: 108408 - RNA, 21 nt, synthetic construct
  source 1..21: mol_type = other RNA
tttccttatccattcatctct

SEQ ID NO: 108409 - RNA, 21 nt, synthetic construct
  source 1..21: mol_type = other RNA
tttccttatggatatctggcc

SEQ ID NO: 108410 - RNA, 21 nt, synthetic construct
  source 1..21: mol_type = other RNA
tttccttattgagaagcagaa

SEQ ID NO: 108411 - RNA, 21 nt, synthetic construct
  source 1..21: mol_type = other RNA
tttccttccagatgttttaca

SEQ ID NO: 108412 - RNA, 21 nt, synthetic construct
  source 1..21: mol_type = other RNA
tttccttccagtttatatgcc

SEQ ID NO: 108413 - RNA, 21 nt, synthetic construct
  source 1..21: mol_type = other RNA
tttccttccttgctcaggagt

SEQ ID NO: 108414 - RNA, 21 nt, synthetic construct
  source 1..21: mol_type = other RNA
tttccttcttaagacatttgg

SEQ ID NO: 108415 - RNA, 21 nt, synthetic construct
  source 1..21: mol_type = other RNA
tttccttctttgggggaagca

SEQ ID NO: 108416 - RNA, 21 nt, synthetic construct
  source 1..21: mol_type = other RNA
tttccttggagaagagttctg

SEQ ID NO: 108417 - RNA, 21 nt, synthetic construct
  source 1..21: mol_type = other RNA
tttccttgtcctaaaattcct

SEQ ID NO: 108418 - RNA, 21 nt, synthetic construct
  source 1..21: mol_type = other RNA
tttcctttaacgtatctggga

SEQ ID NO: 108419 - RNA, 21 nt, synthetic construct
  source 1..21: mol_type = other RNA
tttcctttcagtcggttcttc

SEQ ID NO: 108420 - RNA, 21 nt, synthetic construct
  source 1..21: mol_type = other RNA
tttcctttgcctaagtctcag

SEQ ID NO: 108421 - RNA, 21 nt, synthetic construct
  source 1..21: mol_type = other RNA
tttcctttgcctttcactttg

SEQ ID NO: 108422 - RNA, 21 nt, synthetic construct
  source 1..21: mol_type = other RNA
tttcgaagtgggaagcaaagg

SEQ ID NO: 108423 - RNA, 21 nt, synthetic construct
  source 1..21: mol_type = other RNA
tttcgaattatgctaacatga

SEQ ID NO: 108424 - RNA, 21 nt, synthetic construct
  source 1..21: mol_type = other RNA
tttcgaccaagttactagaag

SEQ ID NO: 108425 - RNA, 21 nt, synthetic construct
  source 1..21: mol_type = other RNA
tttcgagactgagtaatattc

SEQ ID NO: 108426 - RNA, 21 nt, synthetic construct
  source 1..21: mol_type = other RNA
tttcgcaaagcaacatgctaa

SEQ ID NO: 108427 - RNA, 21 nt, synthetic construct
  source 1..21: mol_type = other RNA
tttcgcaaagtaaaaagcact

SEQ ID NO: 108428 - RNA, 21 nt, synthetic construct
  source 1..21: mol_type = other RNA
tttcgcatcattcaaatgata

SEQ ID NO: 108429 - RNA, 21 nt, synthetic construct
  source 1..21: mol_type = other RNA
tttcgcctagataagaaaatg

SEQ ID NO: 108430 - RNA, 21 nt, synthetic construct
  source 1..21: mol_type = other RNA
tttcgccttctcagaaggaca

SEQ ID NO: 108431 - RNA, 21 nt, synthetic construct
  source 1..21: mol_type = other RNA
tttcgctaatctcaatcaggg

SEQ ID NO: 108432 - RNA, 21 nt, synthetic construct
  source 1..21: mol_type = other RNA
tttcgctatcagtagtttgct

SEQ ID NO: 108433 - RNA, 21 nt, synthetic construct
  source 1..21: mol_type = other RNA
tttcgcttttggagctataat

SEQ ID NO: 108434 - RNA, 21 nt, synthetic construct
  source 1..21: mol_type = other RNA
tttcggatatttactaagaag

SEQ ID NO: 108435 - RNA, 21 nt, synthetic construct
  source 1..21: mol_type = other RNA
tttcggctctgtgctgagatg

SEQ ID NO: 108436 - RNA, 21 nt, synthetic construct
  source 1..21: mol_type = other RNA
tttcgtatcttttaacagatg

SEQ ID NO: 108437 - RNA, 21 nt, synthetic construct
  source 1..21: mol_type = other RNA
tttcgtatggaagatgggact

SEQ ID NO: 108438 - RNA, 21 nt, synthetic construct
  source 1..21: mol_type = other RNA
tttcgtcatctataaggtaat

SEQ ID NO: 108439 - RNA, 21 nt, synthetic construct
  source 1..21: mol_type = other RNA
tttcgtgagggtttcagtgag

SEQ ID NO: 108440 - RNA, 21 nt, synthetic construct
  source 1..21: mol_type = other RNA
tttcgtgtactgaaaccagtg

SEQ ID NO: 108441 - RNA, 21 nt, synthetic construct
  source 1..21: mol_type = other RNA
tttctaaaaacgtgcaaacta

SEQ ID NO: 108442 - RNA, 21 nt, synthetic construct
  source 1..21: mol_type = other RNA
tttctaaaccttaaaagagtg

SEQ ID NO: 108443 - RNA, 21 nt, synthetic construct
  source 1..21: mol_type = other RNA
tttctaaactggttttcctga

SEQ ID NO: 108444 - RNA, 21 nt, synthetic construct
  source 1..21: mol_type = other RNA
tttctaaatcaacagtgtact

SEQ ID NO: 108445 - RNA, 21 nt, synthetic construct
  source 1..21: mol_type = other RNA
tttctaaattgaacagcctaa

SEQ ID NO: 108446 - RNA, 21 nt, synthetic construct
  source 1..21: mol_type = other RNA
tttctaagagccaaagacatt

SEQ ID NO: 108447 - RNA, 21 nt, synthetic construct
  source 1..21: mol_type = other RNA
tttctaagccatgtttctcct

SEQ ID NO: 108448 - RNA, 21 nt, synthetic construct
  source 1..21: mol_type = other RNA
tttctaaggttctgctatgct

SEQ ID NO: 108449 - RNA, 21 nt, synthetic construct
  source 1..21: mol_type = other RNA
tttctaatcctttgcacacac

SEQ ID NO: 108450 - RNA, 21 nt, synthetic construct
  source 1..21: mol_type = other RNA
tttctaattctgacaactggg

SEQ ID NO: 108451 - RNA, 21 nt, synthetic construct
  source 1..21: mol_type = other RNA
tttctaatttccaagaaccct

SEQ ID NO: 108452 - RNA, 21 nt, synthetic construct
  source 1..21: mol_type = other RNA
tttctacctttggctactgta

SEQ ID NO: 108453 - RNA, 21 nt, synthetic construct
  source 1..21: mol_type = other RNA
tttctactagtataagagaag

SEQ ID NO: 108454 - RNA, 21 nt, synthetic construct
  source 1..21: mol_type = other RNA
tttctactggggtcttagttc

SEQ ID NO: 108455 - RNA, 21 nt, synthetic construct
  source 1..21: mol_type = other RNA
tttctagaatgcatccctcct

SEQ ID NO: 108456 - RNA, 21 nt, synthetic construct
  source 1..21: mol_type = other RNA
tttctagattcatatgctttg

SEQ ID NO: 108457 - RNA, 21 nt, synthetic construct
  source 1..21: mol_type = other RNA
tttctagccataatccttaga

SEQ ID NO: 108458 - RNA, 21 nt, synthetic construct
  source 1..21: mol_type = other RNA
tttctaggaaccatattagag

SEQ ID NO: 108459 - RNA, 21 nt, synthetic construct
  source 1..21: mol_type = other RNA
tttctaggcatctatttcccc

SEQ ID NO: 108460 - RNA, 21 nt, synthetic construct
  source 1..21: mol_type = other RNA
tttctaggccctaaccccaga

SEQ ID NO: 108461 - RNA, 21 nt, synthetic construct
  source 1..21: mol_type = other RNA
tttctaggtagtttctttgaa

SEQ ID NO: 108462 - RNA, 21 nt, synthetic construct
  source 1..21: mol_type = other RNA
tttctagttagtttgttgacc

SEQ ID NO: 108463 - RNA, 21 nt, synthetic construct
  source 1..21: mol_type = other RNA
tttctagtttgaggtgtacaa

SEQ ID NO: 108464 - RNA, 21 nt, synthetic construct
  source 1..21: mol_type = other RNA
tttctatacttcatctttcct

SEQ ID NO: 108465 - RNA, 21 nt, synthetic construct
  source 1..21: mol_type = other RNA
tttctatagtcattccgctaa

SEQ ID NO: 108466 - RNA, 21 nt, synthetic construct
  source 1..21: mol_type = other RNA
tttctatagtggctgcaccat

SEQ ID NO: 108467 - RNA, 21 nt, synthetic construct
  source 1..21: mol_type = other RNA
tttctatctctcagatctgag

SEQ ID NO: 108468 - RNA, 21 nt, synthetic construct
  source 1..21: mol_type = other RNA
tttctatctgaacattttagc

SEQ ID NO: 108469 - RNA, 21 nt, synthetic construct
  source 1..21: mol_type = other RNA
tttctattcattaccaggctg

SEQ ID NO: 108470 - RNA, 21 nt, synthetic construct
  source 1..21: mol_type = other RNA
tttctattcccctggatcccc

SEQ ID NO: 108471 - RNA, 21 nt, synthetic construct
  source 1..21: mol_type = other RNA
tttctcaaagcccaccagcat

SEQ ID NO: 108472 - RNA, 21 nt, synthetic construct
  source 1..21: mol_type = other RNA
tttctcaacactgtgttcttt

SEQ ID NO: 108473 - RNA, 21 nt, synthetic construct
  source 1..21: mol_type = other RNA
tttctcaacttagccttggta

SEQ ID NO: 108474 - RNA, 21 nt, synthetic construct
  source 1..21: mol_type = other RNA
tttctcaacttcctgttttag

SEQ ID NO: 108475 - RNA, 21 nt, synthetic construct
  source 1..21: mol_type = other RNA
tttctcaatcccttccccacc

SEQ ID NO: 108476 - RNA, 21 nt, synthetic construct
  source 1..21: mol_type = other RNA
tttctcatactttgtcaggca

SEQ ID NO: 108477 - RNA, 21 nt, synthetic construct
  source 1..21: mol_type = other RNA
tttctcatctgtcactttcct

SEQ ID NO: 108478 - RNA, 21 nt, synthetic construct
  source 1..21: mol_type = other RNA
tttctcatgtatgttttagcc

SEQ ID NO: 108479 - RNA, 21 nt, synthetic construct
  source 1..21: mol_type = other RNA
tttctcattcttctctaatgt

SEQ ID NO: 108480 - RNA, 21 nt, synthetic construct
  source 1..21: mol_type = other RNA
tttctcatttttcaggggggc

SEQ ID NO: 108481 - RNA, 21 nt, synthetic construct
  source 1..21: mol_type = other RNA
tttctccacatccttgccaac

SEQ ID NO: 108482 - RNA, 21 nt, synthetic construct
  source 1..21: mol_type = other RNA
tttctccaggggcggccccgc

SEQ ID NO: 108483 - RNA, 21 nt, synthetic construct
  source 1..21: mol_type = other RNA
tttctcccaaggttgcctgtt

SEQ ID NO: 108484 - RNA, 21 nt, synthetic construct
  source 1..21: mol_type = other RNA
tttctcccagctgtccaacaa

SEQ ID NO: 108485 - RNA, 21 nt, synthetic construct
  source 1..21: mol_type = other RNA
tttctcccaggtcagtagtac

SEQ ID NO: 108486 - RNA, 21 nt, synthetic construct
  source 1..21: mol_type = other RNA
tttctcctaagtcttcttcta

SEQ ID NO: 108487 - RNA, 21 nt, synthetic construct
  source 1..21: mol_type = other RNA
tttctcctgcatggggagttt

SEQ ID NO: 108488 - RNA, 21 nt, synthetic construct
  source 1..21: mol_type = other RNA
tttctccttctgcaggctgaa

SEQ ID NO: 108489 - RNA, 21 nt, synthetic construct
  source 1..21: mol_type = other RNA
tttctccttctggaagatttc

SEQ ID NO: 108490 - RNA, 21 nt, synthetic construct
  source 1..21: mol_type = other RNA
tttctcgacacacaatccaag

SEQ ID NO: 108491 - RNA, 21 nt, synthetic construct
  source 1..21: mol_type = other RNA
tttctcgcagcggggatgctc

SEQ ID NO: 108492 - RNA, 21 nt, synthetic construct
  source 1..21: mol_type = other RNA
tttctcggccgggcgcggtgc

SEQ ID NO: 108493 - RNA, 21 nt, synthetic construct
  source 1..21: mol_type = other RNA
tttctcgtgcatgtctgcagg

SEQ ID NO: 108494 - RNA, 21 nt, synthetic construct
  source 1..21: mol_type = other RNA
tttctctaatagctagtgatg

SEQ ID NO: 108495 - RNA, 21 nt, synthetic construct
  source 1..21: mol_type = other RNA
tttctctacagttaacaatac

SEQ ID NO: 108496 - RNA, 21 nt, synthetic construct
  source 1..21: mol_type = other RNA
tttctctacatctggatcctg

SEQ ID NO: 108497 - RNA, 21 nt, synthetic construct
  source 1..21: mol_type = other RNA
tttctctagttgcacggtgaa

SEQ ID NO: 108498 - RNA, 21 nt, synthetic construct
  source 1..21: mol_type = other RNA
tttctctcatgttgggtaaaa

SEQ ID NO: 108499 - RNA, 21 nt, synthetic construct
  source 1..21: mol_type = other RNA
tttctctccaaggtacaatta

SEQ ID NO: 108500 - RNA, 21 nt, synthetic construct
  source 1..21: mol_type = other RNA
tttctctccttgcacattaga

SEQ ID NO: 108501 - RNA, 21 nt, synthetic construct
  source 1..21: mol_type = other RNA
tttctctctccctgccctgtg

SEQ ID NO: 108502 - RNA, 21 nt, synthetic construct
  source 1..21: mol_type = other RNA
tttctctgctttttcttggtg

SEQ ID NO: 108503 - RNA, 21 nt, synthetic construct
  source 1..21: mol_type = other RNA
tttctctttaaagctgaactc

SEQ ID NO: 108504 - RNA, 21 nt, synthetic construct
  source 1..21: mol_type = other RNA
tttctctttcagccatcccag

SEQ ID NO: 108505 - RNA, 21 nt, synthetic construct
  source 1..21: mol_type = other RNA
tttctgaactcaaaagtgaat

SEQ ID NO: 108506 - RNA, 21 nt, synthetic construct
  source 1..21: mol_type = other RNA
tttctgacaatttcagggaga

SEQ ID NO: 108507 - RNA, 21 nt, synthetic construct
  source 1..21: mol_type = other RNA
tttctgacacccgacccacta

SEQ ID NO: 108508 - RNA, 21 nt, synthetic construct
  source 1..21: mol_type = other RNA
tttctgacaggtggtatggga

SEQ ID NO: 108509 - RNA, 21 nt, synthetic construct
  source 1..21: mol_type = other RNA
tttctgaccaactatttcact

SEQ ID NO: 108510 - RNA, 21 nt, synthetic construct
  source 1..21: mol_type = other RNA
tttctgactctgtgcttgtgc

SEQ ID NO: 108511 - RNA, 21 nt, synthetic construct
  source 1..21: mol_type = other RNA
tttctgagagtattgccaggt

SEQ ID NO: 108512 - RNA, 21 nt, synthetic construct
  source 1..21: mol_type = other RNA
tttctgagcaactactatttc

SEQ ID NO: 108513 - RNA, 21 nt, synthetic construct
  source 1..21: mol_type = other RNA
tttctgagccagagtttcact

SEQ ID NO: 108514 - RNA, 21 nt, synthetic construct
  source 1..21: mol_type = other RNA
tttctgaggtggagttctgct

SEQ ID NO: 108515 - RNA, 21 nt, synthetic construct
  source 1..21: mol_type = other RNA
tttctgagtatattctgtgaa

SEQ ID NO: 108516 - RNA, 21 nt, synthetic construct
  source 1..21: mol_type = other RNA
tttctgattgcccattataaa

SEQ ID NO: 108517 - RNA, 21 nt, synthetic construct
  source 1..21: mol_type = other RNA
tttctgatttgctggctcagt

SEQ ID NO: 108518 - RNA, 21 nt, synthetic construct
  source 1..21: mol_type = other RNA
tttctgcaattggaagactat

SEQ ID NO: 108519 - RNA, 21 nt, synthetic construct
  source 1..21: mol_type = other RNA
tttctgcatacttagctaatt

SEQ ID NO: 108520 - RNA, 21 nt, synthetic construct
  source 1..21: mol_type = other RNA
tttctgcatagagatcttgtg

SEQ ID NO: 108521 - RNA, 21 nt, synthetic construct
  source 1..21: mol_type = other RNA
tttctgcatcttttgagggta

SEQ ID NO: 108522 - RNA, 21 nt, synthetic construct
  source 1..21: mol_type = other RNA
tttctgcatttggtttgcaaa

SEQ ID NO: 108523 - RNA, 21 nt, synthetic construct
  source 1..21: mol_type = other RNA
tttctgctattctctttctga

SEQ ID NO: 108524 - RNA, 21 nt, synthetic construct
  source 1..21: mol_type = other RNA
tttctgcttaaagcctctcaa

SEQ ID NO: 108525 - RNA, 21 nt, synthetic construct
  source 1..21: mol_type = other RNA
tttctgcttagtcttctcaga

SEQ ID NO: 108526 - RNA, 21 nt, synthetic construct
  source 1..21: mol_type = other RNA
tttctgcttctcaataaggaa

SEQ ID NO: 108527 - RNA, 21 nt, synthetic construct
  source 1..21: mol_type = other RNA
tttctgcttgaatgtgcctac

SEQ ID NO: 108528 - RNA, 21 nt, synthetic construct
  source 1..21: mol_type = other RNA
tttctggaaactcaaacccaa

SEQ ID NO: 108529 - RNA, 21 nt, synthetic construct
  source 1..21: mol_type = other RNA
tttctggaagtttcctgcaca

SEQ ID NO: 108530 - RNA, 21 nt, synthetic construct
  source 1..21: mol_type = other RNA
tttctggaccacaatcttacc

SEQ ID NO: 108531 - RNA, 21 nt, synthetic construct
  source 1..21: mol_type = other RNA
tttctggaggctagaagtccc

SEQ ID NO: 108532 - RNA, 21 nt, synthetic construct
  source 1..21: mol_type = other RNA
tttctgggctctctattccaa

SEQ ID NO: 108533 - RNA, 21 nt, synthetic construct
  source 1..21: mol_type = other RNA
tttctggggatgctgtctata

SEQ ID NO: 108534 - RNA, 21 nt, synthetic construct
  source 1..21: mol_type = other RNA
tttctggttttctggaggcta

SEQ ID NO: 108535 - RNA, 21 nt, synthetic construct
  source 1..21: mol_type = other RNA
tttctgtaaacatgaacaagt

SEQ ID NO: 108536 - RNA, 21 nt, synthetic construct
  source 1..21: mol_type = other RNA
tttctgtaatgtttgtacttc

SEQ ID NO: 108537 - RNA, 21 nt, synthetic construct
  source 1..21: mol_type = other RNA
tttctgtagaatatccaagca

SEQ ID NO: 108538 - RNA, 21 nt, synthetic construct
  source 1..21: mol_type = other RNA
tttctgtatcttttcagtcca

SEQ ID NO: 108539 - RNA, 21 nt, synthetic construct
  source 1..21: mol_type = other RNA
tttctgtcatctgaatcaata

SEQ ID NO: 108540 - RNA, 21 nt, synthetic construct
  source 1..21: mol_type = other RNA
tttctgtcattctgcagtttg

SEQ ID NO: 108541 - RNA, 21 nt, synthetic construct
  source 1..21: mol_type = other RNA
tttctgtccttggattgctaa

SEQ ID NO: 108542 - RNA, 21 nt, synthetic construct
  source 1..21: mol_type = other RNA
tttctgtgtaatactgtagaa

SEQ ID NO: 108543 - RNA, 21 nt, synthetic construct
  source 1..21: mol_type = other RNA
tttctgttagatggtgctgat

SEQ ID NO: 108544 - RNA, 21 nt, synthetic construct
  source 1..21: mol_type = other RNA
tttctgttgcttaagtcactc

SEQ ID NO: 108545 - RNA, 21 nt, synthetic construct
  source 1..21: mol_type = other RNA
tttctgtttctgtgaaaaaac

SEQ ID NO: 108546 - RNA, 21 nt, synthetic construct
  source 1..21: mol_type = other RNA
tttctgtttggatgaaaaagt

SEQ ID NO: 108547 - RNA, 21 nt, synthetic construct
  source 1..21: mol_type = other RNA
tttctgtttgtttgttttgag

SEQ ID NO: 108548 - RNA, 21 nt, synthetic construct
  source 1..21: mol_type = other RNA
tttcttaaaactttaggtcag

SEQ ID NO: 108549 - RNA, 21 nt, synthetic construct
  source 1..21: mol_type = other RNA
tttcttacacattaggctctg

SEQ ID NO: 108550 - RNA, 21 nt, synthetic construct
  source 1..21: mol_type = other RNA
tttcttaccctcacagtcaca

SEQ ID NO: 108551 - RNA, 21 nt, synthetic construct
  source 1..21: mol_type = other RNA
tttcttaccctttactcagat

SEQ ID NO: 108552 - RNA, 21 nt, synthetic construct
  source 1..21: mol_type = other RNA
tttcttacctaagcatcgtga

SEQ ID NO: 108553 - RNA, 21 nt, synthetic construct
  source 1..21: mol_type = other RNA
tttcttaggaagctatggagc

SEQ ID NO: 108554 - RNA, 21 nt, synthetic construct
  source 1..21: mol_type = other RNA
tttcttagttccattattcca

SEQ ID NO: 108555 - RNA, 21 nt, synthetic construct
  source 1..21: mol_type = other RNA
tttcttatctaggcgaaatat

SEQ ID NO: 108556 - RNA, 21 nt, synthetic construct
  source 1..21: mol_type = other RNA
tttcttcaaccatacttttca

SEQ ID NO: 108557 - RNA, 21 nt, synthetic construct
  source 1..21: mol_type = other RNA
tttcttcaagatactgcacta

SEQ ID NO: 108558 - RNA, 21 nt, synthetic construct
  source 1..21: mol_type = other RNA
tttcttcactcttaaaaggag

SEQ ID NO: 108559 - RNA, 21 nt, synthetic construct
  source 1..21: mol_type = other RNA
tttcttcatggactagactgc

SEQ ID NO: 108560 - RNA, 21 nt, synthetic construct
  source 1..21: mol_type = other RNA
tttcttcccatctcactcacc

SEQ ID NO: 108561 - RNA, 21 nt, synthetic construct
  source 1..21: mol_type = other RNA
tttcttctagtcacatttgct

SEQ ID NO: 108562 - RNA, 21 nt, synthetic construct
  source 1..21: mol_type = other RNA
tttcttctccctcttcgctct

SEQ ID NO: 108563 - RNA, 21 nt, synthetic construct
  source 1..21: mol_type = other RNA
tttcttcttgttttgttctcg

SEQ ID NO: 108564 - RNA, 21 nt, synthetic construct
  source 1..21: mol_type = other RNA
tttcttctttggctcaatggt

SEQ ID NO: 108565 - RNA, 21 nt, synthetic construct
  source 1..21: mol_type = other RNA
tttcttgaatctctctatcca

SEQ ID NO: 108566 - RNA, 21 nt, synthetic construct
  source 1..21: mol_type = other RNA
tttcttgacctcagtggtagt

SEQ ID NO: 108567 - RNA, 21 nt, synthetic construct
  source 1..21: mol_type = other RNA
tttcttgctttgctgccccag

SEQ ID NO: 108568 - RNA, 21 nt, synthetic construct
  source 1..21: mol_type = other RNA
tttcttggggctctaatgcaa

SEQ ID NO: 108569 - RNA, 21 nt, synthetic construct
  source 1..21: mol_type = other RNA
tttcttggtctgcagactctt

SEQ ID NO: 108570 - RNA, 21 nt, synthetic construct
  source 1..21: mol_type = other RNA
tttcttggtggtaactgatgt

SEQ ID NO: 108571 - RNA, 21 nt, synthetic construct
  source 1..21: mol_type = other RNA
tttcttgtgggtattttgttg

SEQ ID NO: 108572 - RNA, 21 nt, synthetic construct
  source 1..21: mol_type = other RNA
tttcttgttagtaggaaaacc

SEQ ID NO: 108573 - RNA, 21 nt, synthetic construct
  source 1..21: mol_type = other RNA
tttctttaaaaccagagcgga

SEQ ID NO: 108574 - RNA, 21 nt, synthetic construct
  source 1..21: mol_type = other RNA
tttctttcaaatgtgacagaa

SEQ ID NO: 108575 - RNA, 21 nt, synthetic construct
  source 1..21: mol_type = other RNA
tttctttccattcaatccttg

SEQ ID NO: 108576 - RNA, 21 nt, synthetic construct
  source 1..21: mol_type = other RNA
tttctttcgcatcattcaaat

SEQ ID NO: 108577 - RNA, 21 nt, synthetic construct
  source 1..21: mol_type = other RNA
tttctttgagtagttcatgtt

SEQ ID NO: 108578 - RNA, 21 nt, synthetic construct
  source 1..21: mol_type = other RNA
tttctttggctgttagccttg

SEQ ID NO: 108579 - RNA, 21 nt, synthetic construct
  source 1..21: mol_type = other RNA
tttctttggttttgactcagt

SEQ ID NO: 108580 - RNA, 21 nt, synthetic construct
  source 1..21: mol_type = other RNA
tttcttttaaagacctcaggt

SEQ ID NO: 108581 - RNA, 21 nt, synthetic construct
  source 1..21: mol_type = other RNA
tttcttttcactctaatatgg

SEQ ID NO: 108582 - RNA, 21 nt, synthetic construct
  source 1..21: mol_type = other RNA
tttcttttccaaccaagccca

SEQ ID NO: 108583 - RNA, 21 nt, synthetic construct
  source 1..21: mol_type = other RNA
tttcttttgttgcctgtagtt

SEQ ID NO: 108584 - RNA, 21 nt, synthetic construct
  source 1..21: mol_type = other RNA
tttctttttactcatgtctac

SEQ ID NO: 108585 - RNA, 21 nt, synthetic construct
  source 1..21: mol_type = other RNA
tttctttttcttgctttgctg

SEQ ID NO: 108586 - RNA, 21 nt, synthetic construct
  source 1..21: mol_type = other RNA
tttctttttgttttctccttc

SEQ ID NO: 108587 - RNA, 21 nt, synthetic construct
  source 1..21: mol_type = other RNA
tttgaaaaaacttcccttagc

SEQ ID NO: 108588 - RNA, 21 nt, synthetic construct
  source 1..21: mol_type = other RNA
tttgaaaaacagatcttggcc

SEQ ID NO: 108589 - RNA, 21 nt, synthetic construct
  source 1..21: mol_type = other RNA
tttgaaaaaggaaagtaactg

SEQ ID NO: 108590 - RNA, 21 nt, synthetic construct
  source 1..21: mol_type = other RNA
tttgaaaagaacaacatggta

SEQ ID NO: 108591 - RNA, 21 nt, synthetic construct
  source 1..21: mol_type = other RNA
tttgaaaagtgtttgtcacat

SEQ ID NO: 108592 - RNA, 21 nt, synthetic construct
  source 1..21: mol_type = other RNA
tttgaaactgagcatcccaga

SEQ ID NO: 108593 - RNA, 21 nt, synthetic construct
  source 1..21: mol_type = other RNA
tttgaaagaaagaaggccatt

SEQ ID NO: 108594 - RNA, 21 nt, synthetic construct
  source 1..21: mol_type = other RNA
tttgaaaggaatccggcttta

SEQ ID NO: 108595 - RNA, 21 nt, synthetic construct
  source 1..21: mol_type = other RNA
tttgaaatcagaacttgacaa

SEQ ID NO: 108596 - RNA, 21 nt, synthetic construct
  source 1..21: mol_type = other RNA
tttgaacaagagcgtcgtacc

SEQ ID NO: 108597 - RNA, 21 nt, synthetic construct
  source 1..21: mol_type = other RNA
tttgaacactctgcaatttta

SEQ ID NO: 108598 - RNA, 21 nt, synthetic construct
  source 1..21: mol_type = other RNA
tttgaaccccagaaggttaac

SEQ ID NO: 108599 - RNA, 21 nt, synthetic construct
  source 1..21: mol_type = other RNA
tttgaacgaatgaaaacacaa

SEQ ID NO: 108600 - RNA, 21 nt, synthetic construct
  source 1..21: mol_type = other RNA
tttgaactcactggccagcat

SEQ ID NO: 108601 - RNA, 21 nt, synthetic construct
  source 1..21: mol_type = other RNA
tttgaactttccagaagtaac

SEQ ID NO: 108602 - RNA, 21 nt, synthetic construct
  source 1..21: mol_type = other RNA
tttgaagaaagttttgcagtt

SEQ ID NO: 108603 - RNA, 21 nt, synthetic construct
  source 1..21: mol_type = other RNA
tttgaagcttcacttctctgc

SEQ ID NO: 108604 - RNA, 21 nt, synthetic construct
  source 1..21: mol_type = other RNA
tttgaagtatgtaattacagg

SEQ ID NO: 108605 - RNA, 21 nt, synthetic construct
  source 1..21: mol_type = other RNA
tttgaataaagggtcagaatt

SEQ ID NO: 108606 - RNA, 21 nt, synthetic construct
  source 1..21: mol_type = other RNA
tttgaataacctcataagaac

SEQ ID NO: 108607 - RNA, 21 nt, synthetic construct
  source 1..21: mol_type = other RNA
tttgaataaggtctgtaagtc

SEQ ID NO: 108608 - RNA, 21 nt, synthetic construct
  source 1..21: mol_type = other RNA
tttgaatcatgggagccaaac

SEQ ID NO: 108609 - RNA, 21 nt, synthetic construct
  source 1..21: mol_type = other RNA
tttgaatgatgcgaaagaaaa

SEQ ID NO: 108610 - RNA, 21 nt, synthetic construct
  source 1..21: mol_type = other RNA
tttgaattaagcaccactaga

SEQ ID NO: 108611 - RNA, 21 nt, synthetic construct
  source 1..21: mol_type = other RNA
tttgaatttaagacacaagga

SEQ ID NO: 108612 - RNA, 21 nt, synthetic construct
  source 1..21: mol_type = other RNA
tttgaatttggaaagggtaga

SEQ ID NO: 108613 - RNA, 21 nt, synthetic construct
  source 1..21: mol_type = other RNA
tttgaattttccattcacaca

SEQ ID NO: 108614 - RNA, 21 nt, synthetic construct
  source 1..21: mol_type = other RNA
tttgacagatgagactcttaa

SEQ ID NO: 108615 - RNA, 21 nt, synthetic construct
  source 1..21: mol_type = other RNA
tttgacagccacgtgtattga

SEQ ID NO: 108616 - RNA, 21 nt, synthetic construct
  source 1..21: mol_type = other RNA
tttgacatgacaggtgagtgg

SEQ ID NO: 108617 - RNA, 21 nt, synthetic construct
  source 1..21: mol_type = other RNA
tttgaccatgggacaagtggg

SEQ ID NO: 108618 - RNA, 21 nt, synthetic construct
  source 1..21: mol_type = other RNA
tttgacctgtaatttttctct

SEQ ID NO: 108619 - RNA, 21 nt, synthetic construct
  source 1..21: mol_type = other RNA
tttgaccttccttgtgtctta

SEQ ID NO: 108620 - RNA, 21 nt, synthetic construct
  source 1..21: mol_type = other RNA
tttgacgcgcaacaattcaac

SEQ ID NO: 108621 - RNA, 21 nt, synthetic construct
  source 1..21: mol_type = other RNA
tttgactcagtacttccctct

SEQ ID NO: 108622 - RNA, 21 nt, synthetic construct
  source 1..21: mol_type = other RNA
tttgacttctcagggcctgct

SEQ ID NO: 108623 - RNA, 21 nt, synthetic construct
  source 1..21: mol_type = other RNA
tttgagaaaggtttcttcact

SEQ ID NO: 108624 - RNA, 21 nt, synthetic construct
  source 1..21: mol_type = other RNA
tttgagaagccacacagtaca

SEQ ID NO: 108625 - RNA, 21 nt, synthetic construct
  source 1..21: mol_type = other RNA
tttgagaagtcttttcctacc

SEQ ID NO: 108626 - RNA, 21 nt, synthetic construct
  source 1..21: mol_type = other RNA
tttgagaatttcaggtgtgta

SEQ ID NO: 108627 - RNA, 21 nt, synthetic construct
  source 1..21: mol_type = other RNA
tttgagacacggtctcacact

SEQ ID NO: 108628 - RNA, 21 nt, synthetic construct
  source 1..21: mol_type = other RNA
tttgagacagattctctgtct

SEQ ID NO: 108629 - RNA, 21 nt, synthetic construct
  source 1..21: mol_type = other RNA
tttgagacagggtctcactct

SEQ ID NO: 108630 - RNA, 21 nt, synthetic construct
  source 1..21: mol_type = other RNA
tttgagaccagcgtgggcaac

SEQ ID NO: 108631 - RNA, 21 nt, synthetic construct
  source 1..21: mol_type = other RNA
tttgagacctcaggcagtcta

SEQ ID NO: 108632 - RNA, 21 nt, synthetic construct
  source 1..21: mol_type = other RNA
tttgagacggaatcttaccct

SEQ ID NO: 108633 - RNA, 21 nt, synthetic construct
  source 1..21: mol_type = other RNA
tttgagactgcagtgacctat

SEQ ID NO: 108634 - RNA, 21 nt, synthetic construct
  source 1..21: mol_type = other RNA
tttgagagtaagttgcatacg

SEQ ID NO: 108635 - RNA, 21 nt, synthetic construct
  source 1..21: mol_type = other RNA
tttgagagtgcagtatgtagg

SEQ ID NO: 108636 - RNA, 21 nt, synthetic construct
  source 1..21: mol_type = other RNA
tttgagatttgagtcttgctc

SEQ ID NO: 108637 - RNA, 21 nt, synthetic construct
  source 1..21: mol_type = other RNA
tttgagcagagtcctgagggt

SEQ ID NO: 108638 - RNA, 21 nt, synthetic construct
  source 1..21: mol_type = other RNA
tttgagcccaggaggttgaag

SEQ ID NO: 108639 - RNA, 21 nt, synthetic construct
  source 1..21: mol_type = other RNA
tttgagctacaaactccaaac

SEQ ID NO: 108640 - RNA, 21 nt, synthetic construct
  source 1..21: mol_type = other RNA
tttgagctgaaagtaaagata

SEQ ID NO: 108641 - RNA, 21 nt, synthetic construct
  source 1..21: mol_type = other RNA
tttgaggcagagagatggtgg

SEQ ID NO: 108642 - RNA, 21 nt, synthetic construct
  source 1..21: mol_type = other RNA
tttgaggcattagtgaattca

SEQ ID NO: 108643 - RNA, 21 nt, synthetic construct
  source 1..21: mol_type = other RNA
tttgaggccctattcaaccta

SEQ ID NO: 108644 - RNA, 21 nt, synthetic construct
  source 1..21: mol_type = other RNA
tttgaggccgcagtgagccat

SEQ ID NO: 108645 - RNA, 21 nt, synthetic construct
  source 1..21: mol_type = other RNA
tttgaggctgggagtacaaga

SEQ ID NO: 108646 - RNA, 21 nt, synthetic construct
  source 1..21: mol_type = other RNA
tttgaggcttttcatagtcat

SEQ ID NO: 108647 - RNA, 21 nt, synthetic construct
  source 1..21: mol_type = other RNA
tttgaggcttttggattttct

SEQ ID NO: 108648 - RNA, 21 nt, synthetic construct
  source 1..21: mol_type = other RNA
tttgagggtgctgatcaggaa

SEQ ID NO: 108649 - RNA, 21 nt, synthetic construct
  source 1..21: mol_type = other RNA
tttgagggttagaagacaata

SEQ ID NO: 108650 - RNA, 21 nt, synthetic construct
  source 1..21: mol_type = other RNA
tttgaggtaagaacttgtctt

SEQ ID NO: 108651 - RNA, 21 nt, synthetic construct
  source 1..21: mol_type = other RNA
tttgaggtagcacaactagta

SEQ ID NO: 108652 - RNA, 21 nt, synthetic construct
  source 1..21: mol_type = other RNA
tttgaggtctaggctaatgtg

SEQ ID NO: 108653 - RNA, 21 nt, synthetic construct
  source 1..21: mol_type = other RNA
tttgaggtcttctagctttca

SEQ ID NO: 108654 - RNA, 21 nt, synthetic construct
  source 1..21: mol_type = other RNA
tttgaggtgtacaattaggct

SEQ ID NO: 108655 - RNA, 21 nt, synthetic construct
  source 1..21: mol_type = other RNA
tttgagtagcaccctatttat

SEQ ID NO: 108656 - RNA, 21 nt, synthetic construct
  source 1..21: mol_type = other RNA
tttgagtagttcatgttagca

SEQ ID NO: 108657 - RNA, 21 nt, synthetic construct
  source 1..21: mol_type = other RNA
tttgagtatttcatgtacttg

SEQ ID NO: 108658 - RNA, 21 nt, synthetic construct
  source 1..21: mol_type = other RNA
tttgagtcttgctctcttgcc

SEQ ID NO: 108659 - RNA, 21 nt, synthetic construct
  source 1..21: mol_type = other RNA
tttgagtggcatcatactgga

SEQ ID NO: 108660 - RNA, 21 nt, synthetic construct
  source 1..21: mol_type = other RNA
tttgagtgtaaggtgtttggt

SEQ ID NO: 108661 - RNA, 21 nt, synthetic construct
  source 1..21: mol_type = other RNA
tttgagttattgcatagggat

SEQ ID NO: 108662 - RNA, 21 nt, synthetic construct
  source 1..21: mol_type = other RNA
tttgagttgtttccactttga

SEQ ID NO: 108663 - RNA, 21 nt, synthetic construct
  source 1..21: mol_type = other RNA
tttgagtttccagaaaactgg

SEQ ID NO: 108664 - RNA, 21 nt, synthetic construct
  source 1..21: mol_type = other RNA
tttgagtttggtgtatttagt

SEQ ID NO: 108665 - RNA, 21 nt, synthetic construct
  source 1..21: mol_type = other RNA
tttgataaaaatctctacagg

SEQ ID NO: 108666 - RNA, 21 nt, synthetic construct
  source 1..21: mol_type = other RNA
tttgatacggagtctcgctct

SEQ ID NO: 108667 - RNA, 21 nt, synthetic construct
  source 1..21: mol_type = other RNA
tttgatagttgcagattcatc

SEQ ID NO: 108668 - RNA, 21 nt, synthetic construct
  source 1..21: mol_type = other RNA
tttgatcatacacatccagaa

SEQ ID NO: 108669 - RNA, 21 nt, synthetic construct
  source 1..21: mol_type = other RNA
tttgatcatcgcattacgagt

SEQ ID NO: 108670 - RNA, 21 nt, synthetic construct
  source 1..21: mol_type = other RNA
tttgatccattttgagttcag

SEQ ID NO: 108671 - RNA, 21 nt, synthetic construct
  source 1..21: mol_type = other RNA
tttgatcccactagtggaaga

SEQ ID NO: 108672 - RNA, 21 nt, synthetic construct
  source 1..21: mol_type = other RNA
tttgatcctggaatagtagct

SEQ ID NO: 108673 - RNA, 21 nt, synthetic construct
  source 1..21: mol_type = other RNA
tttgatctggtcacaaacaca

SEQ ID NO: 108674 - RNA, 21 nt, synthetic construct
  source 1..21: mol_type = other RNA
tttgatgaattccagtttatc

SEQ ID NO: 108675 - RNA, 21 nt, synthetic construct
  source 1..21: mol_type = other RNA
tttgatgacttacagatatca

SEQ ID NO: 108676 - RNA, 21 nt, synthetic construct
  source 1..21: mol_type = other RNA
tttgatgcacaaaagtttaac

SEQ ID NO: 108677 - RNA, 21 nt, synthetic construct
  source 1..21: mol_type = other RNA
tttgatgcccccacccttttt

SEQ ID NO: 108678 - RNA, 21 nt, synthetic construct
  source 1..21: mol_type = other RNA
tttgattactgactcaatctt

SEQ ID NO: 108679 - RNA, 21 nt, synthetic construct
  source 1..21: mol_type = other RNA
tttgattagttgactcctaaa

SEQ ID NO: 108680 - RNA, 21 nt, synthetic construct
  source 1..21: mol_type = other RNA
tttgattatgttagatatccc

SEQ ID NO: 108681 - RNA, 21 nt, synthetic construct
  source 1..21: mol_type = other RNA
tttgattgccagttttctgga

SEQ ID NO: 108682 - RNA, 21 nt, synthetic construct
  source 1..21: mol_type = other RNA
tttgattgggcattaattgag

SEQ ID NO: 108683 - RNA, 21 nt, synthetic construct
  source 1..21: mol_type = other RNA
tttgattgttagccacagcgt

SEQ ID NO: 108684 - RNA, 21 nt, synthetic construct
  source 1..21: mol_type = other RNA
tttgattgttccaggggggaa

SEQ ID NO: 108685 - RNA, 21 nt, synthetic construct
  source 1..21: mol_type = other RNA
tttgatttcttctttggctca

SEQ ID NO: 108686 - RNA, 21 nt, synthetic construct
  source 1..21: mol_type = other RNA
tttgcaaaaattttgttcagg

SEQ ID NO: 108687 - RNA, 21 nt, synthetic construct
  source 1..21: mol_type = other RNA
tttgcaaaccaaatgcagaaa

SEQ ID NO: 108688 - RNA, 21 nt, synthetic construct
  source 1..21: mol_type = other RNA
tttgcaagatgcataagttct

SEQ ID NO: 108689 - RNA, 21 nt, synthetic construct
  source 1..21: mol_type = other RNA
tttgcaagattaatcttgtga

SEQ ID NO: 108690 - RNA, 21 nt, synthetic construct
  source 1..21: mol_type = other RNA
tttgcaatacagttaacgtat

SEQ ID NO: 108691 - RNA, 21 nt, synthetic construct
  source 1..21: mol_type = other RNA
tttgcacacaccaaatcatga

SEQ ID NO: 108692 - RNA, 21 nt, synthetic construct
  source 1..21: mol_type = other RNA
tttgcactggcacagcactgt

SEQ ID NO: 108693 - RNA, 21 nt, synthetic construct
  source 1..21: mol_type = other RNA
tttgcagagacggggtcccac

SEQ ID NO: 108694 - RNA, 21 nt, synthetic construct
  source 1..21: mol_type = other RNA
tttgcagagcaaactcagatc

SEQ ID NO: 108695 - RNA, 21 nt, synthetic construct
  source 1..21: mol_type = other RNA
tttgcagtagtattgaactgt

SEQ ID NO: 108696 - RNA, 21 nt, synthetic construct
  source 1..21: mol_type = other RNA
tttgcagttggggactcttat

SEQ ID NO: 108697 - RNA, 21 nt, synthetic construct
  source 1..21: mol_type = other RNA
tttgcattacatgaatggaaa

SEQ ID NO: 108698 - RNA, 21 nt, synthetic construct
  source 1..21: mol_type = other RNA
tttgcattcctgaaatgaacc

SEQ ID NO: 108699 - RNA, 21 nt, synthetic construct
  source 1..21: mol_type = other RNA
tttgcatttctctaatagcta

SEQ ID NO: 108700 - RNA, 21 nt, synthetic construct
  source 1..21: mol_type = other RNA
tttgccaaaatgattttcaca

SEQ ID NO: 108701 - RNA, 21 nt, synthetic construct
  source 1..21: mol_type = other RNA
tttgccaaagattcttgtcat

SEQ ID NO: 108702 - RNA, 21 nt, synthetic construct
  source 1..21: mol_type = other RNA
tttgccaaattatttgagagt

SEQ ID NO: 108703 - RNA, 21 nt, synthetic construct
  source 1..21: mol_type = other RNA
tttgccaagtataagatgatg

SEQ ID NO: 108704 - RNA, 21 nt, synthetic construct
  source 1..21: mol_type = other RNA
tttgccaatcaataattctgt

SEQ ID NO: 108705 - RNA, 21 nt, synthetic construct
  source 1..21: mol_type = other RNA
tttgccacattttaccaaaac

SEQ ID NO: 108706 - RNA, 21 nt, synthetic construct
  source 1..21: mol_type = other RNA
tttgccagctaacttttaacc

SEQ ID NO: 108707 - RNA, 21 nt, synthetic construct
  source 1..21: mol_type = other RNA
tttgccagtgttttaaagcag

SEQ ID NO: 108708 - RNA, 21 nt, synthetic construct
  source 1..21: mol_type = other RNA
tttgccatcttcaagatttca

SEQ ID NO: 108709 - RNA, 21 nt, synthetic construct
  source 1..21: mol_type = other RNA
tttgcccactcttatatccta

SEQ ID NO: 108710 - RNA, 21 nt, synthetic construct
  source 1..21: mol_type = other RNA
tttgcctaagtctcaggatac

SEQ ID NO: 108711 - RNA, 21 nt, synthetic construct
  source 1..21: mol_type = other RNA
tttgcctattctggggctcaa

SEQ ID NO: 108712 - RNA, 21 nt, synthetic construct
  source 1..21: mol_type = other RNA
tttgcctcctgggttcaggtg

SEQ ID NO: 108713 - RNA, 21 nt, synthetic construct
  source 1..21: mol_type = other RNA
tttgcctctccagggaggaat

SEQ ID NO: 108714 - RNA, 21 nt, synthetic construct
  source 1..21: mol_type = other RNA
tttgcctctttgctaataagt

SEQ ID NO: 108715 - RNA, 21 nt, synthetic construct
  source 1..21: mol_type = other RNA
tttgcctgcgtccgtagaccg

SEQ ID NO: 108716 - RNA, 21 nt, synthetic construct
  source 1..21: mol_type = other RNA
tttgcctggatgaatgcagtg

SEQ ID NO: 108717 - RNA, 21 nt, synthetic construct
  source 1..21: mol_type = other RNA
tttgcctttcactttgatcat

SEQ ID NO: 108718 - RNA, 21 nt, synthetic construct
  source 1..21: mol_type = other RNA
tttgcctttcgcttttggagc

SEQ ID NO: 108719 - RNA, 21 nt, synthetic construct
  source 1..21: mol_type = other RNA
tttgccttttcactcttagtg

SEQ ID NO: 108720 - RNA, 21 nt, synthetic construct
  source 1..21: mol_type = other RNA
tttgcgaaacacactcgtgta

SEQ ID NO: 108721 - RNA, 21 nt, synthetic construct
  source 1..21: mol_type = other RNA
tttgcgaaatagtagttgctc

SEQ ID NO: 108722 - RNA, 21 nt, synthetic construct
  source 1..21: mol_type = other RNA
tttgcggcttgattagcttcc

SEQ ID NO: 108723 - RNA, 21 nt, synthetic construct
  source 1..21: mol_type = other RNA
tttgcgtctgtgattatcagg

SEQ ID NO: 108724 - RNA, 21 nt, synthetic construct
  source 1..21: mol_type = other RNA
tttgctaataagtgagtttga

SEQ ID NO: 108725 - RNA, 21 nt, synthetic construct
  source 1..21: mol_type = other RNA
tttgctagagctgctgtaaca

SEQ ID NO: 108726 - RNA, 21 nt, synthetic construct
  source 1..21: mol_type = other RNA
tttgctagtattttgttgaca

SEQ ID NO: 108727 - RNA, 21 nt, synthetic construct
  source 1..21: mol_type = other RNA
tttgctagtggtaactagatg

SEQ ID NO: 108728 - RNA, 21 nt, synthetic construct
  source 1..21: mol_type = other RNA
tttgctcacacttactaaatg

SEQ ID NO: 108729 - RNA, 21 nt, synthetic construct
  source 1..21: mol_type = other RNA
tttgctctgcaaatgaggttg

SEQ ID NO: 108730 - RNA, 21 nt, synthetic construct
  source 1..21: mol_type = other RNA
tttgctgagggaatttttctt

SEQ ID NO: 108731 - RNA, 21 nt, synthetic construct
  source 1..21: mol_type = other RNA
tttgctgcatcccaagggttt

SEQ ID NO: 108732 - RNA, 21 nt, synthetic construct
  source 1..21: mol_type = other RNA
tttgctgccaagtcagcactt

SEQ ID NO: 108733 - RNA, 21 nt, synthetic construct
  source 1..21: mol_type = other RNA
tttgctgccccagctaaaatg

SEQ ID NO: 108734 - RNA, 21 nt, synthetic construct
  source 1..21: mol_type = other RNA
tttgctggctcagtctgtttg

SEQ ID NO: 108735 - RNA, 21 nt, synthetic construct
  source 1..21: mol_type = other RNA
tttgctgtataacattttctc

SEQ ID NO: 108736 - RNA, 21 nt, synthetic construct
  source 1..21: mol_type = other RNA
tttgctgtatacccaggtgtg

SEQ ID NO: 108737 - RNA, 21 nt, synthetic construct
  source 1..21: mol_type = other RNA
tttgctgtcaggcaagggact

SEQ ID NO: 108738 - RNA, 21 nt, synthetic construct
  source 1..21: mol_type = other RNA
tttgcttaaagttggtcctgc

SEQ ID NO: 108739 - RNA, 21 nt, synthetic construct
  source 1..21: mol_type = other RNA
tttgcttactgtagcattgaa

SEQ ID NO: 108740 - RNA, 21 nt, synthetic construct
  source 1..21: mol_type = other RNA
tttgcttaggctgttattaga

SEQ ID NO: 108741 - RNA, 21 nt, synthetic construct
  source 1..21: mol_type = other RNA
tttgcttcccacttcgaaagt

SEQ ID NO: 108742 - RNA, 21 nt, synthetic construct
  source 1..21: mol_type = other RNA
tttgcttcgaagcttattaaa

SEQ ID NO: 108743 - RNA, 21 nt, synthetic construct
  source 1..21: mol_type = other RNA
tttgctttactactgcatttt

SEQ ID NO: 108744 - RNA, 21 nt, synthetic construct
  source 1..21: mol_type = other RNA
tttgctttggagtcacagtga

SEQ ID NO: 108745 - RNA, 21 nt, synthetic construct
  source 1..21: mol_type = other RNA
tttgctttggagtgagaggac

SEQ ID NO: 108746 - RNA, 21 nt, synthetic construct
  source 1..21: mol_type = other RNA
tttgctttgggtctatagttt

SEQ ID NO: 108747 - RNA, 21 nt, synthetic construct
  source 1..21: mol_type = other RNA
tttgcttttcctggaaaactt

SEQ ID NO: 108748 - RNA, 21 nt, synthetic construct
  source 1..21: mol_type = other RNA
tttgcttttgctttgggtcta

SEQ ID NO: 108749 - RNA, 21 nt, synthetic construct
  source 1..21: mol_type = other RNA
tttggaaaaatgtccgttgaa

SEQ ID NO: 108750 - RNA, 21 nt, synthetic construct
  source 1..21: mol_type = other RNA
tttggaaagggtagagcactt

SEQ ID NO: 108751 - RNA, 21 nt, synthetic construct
  source 1..21: mol_type = other RNA
tttggaaatatggtcactgct

SEQ ID NO: 108752 - RNA, 21 nt, synthetic construct
  source 1..21: mol_type = other RNA
tttggaaccagcctggccaat

SEQ ID NO: 108753 - RNA, 21 nt, synthetic construct
  source 1..21: mol_type = other RNA
tttggaagactatgagaagga

SEQ ID NO: 108754 - RNA, 21 nt, synthetic construct
  source 1..21: mol_type = other RNA
tttggaagagagaaggctgcc

SEQ ID NO: 108755 - RNA, 21 nt, synthetic construct
  source 1..21: mol_type = other RNA
tttggaagcatgtggccagga

SEQ ID NO: 108756 - RNA, 21 nt, synthetic construct
  source 1..21: mol_type = other RNA
tttggaaggtaggagggtgtg

SEQ ID NO: 108757 - RNA, 21 nt, synthetic construct
  source 1..21: mol_type = other RNA
tttggaatagagagcccagaa

SEQ ID NO: 108758 - RNA, 21 nt, synthetic construct
  source 1..21: mol_type = other RNA
tttggaattaaaatgttgcca

SEQ ID NO: 108759 - RNA, 21 nt, synthetic construct
  source 1..21: mol_type = other RNA
tttggaatttaaggggtaaat

SEQ ID NO: 108760 - RNA, 21 nt, synthetic construct
  source 1..21: mol_type = other RNA
tttggagctataatttatctg

SEQ ID NO: 108761 - RNA, 21 nt, synthetic construct
  source 1..21: mol_type = other RNA
tttggagctgtatttttgctc

SEQ ID NO: 108762 - RNA, 21 nt, synthetic construct
  source 1..21: mol_type = other RNA
tttggagtcacagtgaattct

SEQ ID NO: 108763 - RNA, 21 nt, synthetic construct
  source 1..21: mol_type = other RNA
tttggagtgagaggactgcct

SEQ ID NO: 108764 - RNA, 21 nt, synthetic construct
  source 1..21: mol_type = other RNA
tttggagtttgtagctcaaag

SEQ ID NO: 108765 - RNA, 21 nt, synthetic construct
  source 1..21: mol_type = other RNA
tttggatatccccatttttct

SEQ ID NO: 108766 - RNA, 21 nt, synthetic construct
  source 1..21: mol_type = other RNA
tttggatgaaaaagtactgga

SEQ ID NO: 108767 - RNA, 21 nt, synthetic construct
  source 1..21: mol_type = other RNA
tttggatgaacgctaaattaa

SEQ ID NO: 108768 - RNA, 21 nt, synthetic construct
  source 1..21: mol_type = other RNA
tttggatgcagatttcttttt

SEQ ID NO: 108769 - RNA, 21 nt, synthetic construct
  source 1..21: mol_type = other RNA
tttggattgcgattgtttcag

SEQ ID NO: 108770 - RNA, 21 nt, synthetic construct
  source 1..21: mol_type = other RNA
tttggatttgagtaactaaac

SEQ ID NO: 108771 - RNA, 21 nt, synthetic construct
  source 1..21: mol_type = other RNA
tttggcaaaaaatgcagtagt

SEQ ID NO: 108772 - RNA, 21 nt, synthetic construct
  source 1..21: mol_type = other RNA
tttggcaaattgtcagatttt

SEQ ID NO: 108773 - RNA, 21 nt, synthetic construct
  source 1..21: mol_type = other RNA
tttggcagcgtaactccatct

SEQ ID NO: 108774 - RNA, 21 nt, synthetic construct
  source 1..21: mol_type = other RNA
tttggcatacaactgctcata

SEQ ID NO: 108775 - RNA, 21 nt, synthetic construct
  source 1..21: mol_type = other RNA
tttggccagaatccctttcgc

SEQ ID NO: 108776 - RNA, 21 nt, synthetic construct
  source 1..21: mol_type = other RNA
tttggcccagccatcccatta

SEQ ID NO: 108777 - RNA, 21 nt, synthetic construct
  source 1..21: mol_type = other RNA
tttggcccatatccttttatg

SEQ ID NO: 108778 - RNA, 21 nt, synthetic construct
  source 1..21: mol_type = other RNA
tttggcccattttcgaattag

SEQ ID NO: 108779 - RNA, 21 nt, synthetic construct
  source 1..21: mol_type = other RNA
tttggcctctgcggcggctga

SEQ ID NO: 108780 - RNA, 21 nt, synthetic construct
  source 1..21: mol_type = other RNA
tttggctactgtaaacaatgc

SEQ ID NO: 108781 - RNA, 21 nt, synthetic construct
  source 1..21: mol_type = other RNA
tttggctagaagcatctgata

SEQ ID NO: 108782 - RNA, 21 nt, synthetic construct
  source 1..21: mol_type = other RNA
tttggctcaatggttaagact

SEQ ID NO: 108783 - RNA, 21 nt, synthetic construct
  source 1..21: mol_type = other RNA
tttggctcccatgattcaaaa

SEQ ID NO: 108784 - RNA, 21 nt, synthetic construct
  source 1..21: mol_type = other RNA
tttggctccttaccactataa

SEQ ID NO: 108785 - RNA, 21 nt, synthetic construct
  source 1..21: mol_type = other RNA
tttggctgaaatgctgtaact

SEQ ID NO: 108786 - RNA, 21 nt, synthetic construct
  source 1..21: mol_type = other RNA
tttggctgggagcttatcagg

SEQ ID NO: 108787 - RNA, 21 nt, synthetic construct
  source 1..21: mol_type = other RNA
tttggctgttaccatttgacc

SEQ ID NO: 108788 - RNA, 21 nt, synthetic construct
  source 1..21: mol_type = other RNA
tttggctgttagccttgccat

SEQ ID NO: 108789 - RNA, 21 nt, synthetic construct
  source 1..21: mol_type = other RNA
tttggcttggggaacagttta

SEQ ID NO: 108790 - RNA, 21 nt, synthetic construct
  source 1..21: mol_type = other RNA
tttgggaaaatctctgacttc

SEQ ID NO: 108791 - RNA, 21 nt, synthetic construct
  source 1..21: mol_type = other RNA
tttgggaaggatggccagtca

SEQ ID NO: 108792 - RNA, 21 nt, synthetic construct
  source 1..21: mol_type = other RNA
tttgggaaggccctgattgag

SEQ ID NO: 108793 - RNA, 21 nt, synthetic construct
  source 1..21: mol_type = other RNA
tttgggaatgtggtcacactt

SEQ ID NO: 108794 - RNA, 21 nt, synthetic construct
  source 1..21: mol_type = other RNA
tttgggactgagacagtattg

SEQ ID NO: 108795 - RNA, 21 nt, synthetic construct
  source 1..21: mol_type = other RNA
tttgggatatagctacaatga

SEQ ID NO: 108796 - RNA, 21 nt, synthetic construct
  source 1..21: mol_type = other RNA
tttgggatcacacttgatggt

SEQ ID NO: 108797 - RNA, 21 nt, synthetic construct
  source 1..21: mol_type = other RNA
tttgggatctgtcatgtttga

SEQ ID NO: 108798 - RNA, 21 nt, synthetic construct
  source 1..21: mol_type = other RNA
tttgggattagcttattcttt

SEQ ID NO: 108799 - RNA, 21 nt, synthetic construct
  source 1..21: mol_type = other RNA
tttgggcctttctgtttgttt

SEQ ID NO: 108800 - RNA, 21 nt, synthetic construct
  source 1..21: mol_type = other RNA
tttggggagataccttgaaag

SEQ ID NO: 108801 - RNA, 21 nt, synthetic construct
  source 1..21: mol_type = other RNA
tttggggattctgctactagc

SEQ ID NO: 108802 - RNA, 21 nt, synthetic construct
  source 1..21: mol_type = other RNA
tttggggccatctgaattcaa

SEQ ID NO: 108803 - RNA, 21 nt, synthetic construct
  source 1..21: mol_type = other RNA
tttggggctaggatttcagta

SEQ ID NO: 108804 - RNA, 21 nt, synthetic construct
  source 1..21: mol_type = other RNA
tttggggcttttgaacactct

SEQ ID NO: 108805 - RNA, 21 nt, synthetic construct
  source 1..21: mol_type = other RNA
tttgggggaagagagcattgc

SEQ ID NO: 108806 - RNA, 21 nt, synthetic construct
  source 1..21: mol_type = other RNA
tttgggggaagcaggaactca

SEQ ID NO: 108807 - RNA, 21 nt, synthetic construct
  source 1..21: mol_type = other RNA
tttgggtaatttatctccata

SEQ ID NO: 108808 - RNA, 21 nt, synthetic construct
  source 1..21: mol_type = other RNA
tttgggtctatagtttaattg

SEQ ID NO: 108809 - RNA, 21 nt, synthetic construct
  source 1..21: mol_type = other RNA
tttgggtgacagagagagacc

SEQ ID NO: 108810 - RNA, 21 nt, synthetic construct
  source 1..21: mol_type = other RNA
tttgggtttgagtttccagaa

SEQ ID NO: 108811 - RNA, 21 nt, synthetic construct
  source 1..21: mol_type = other RNA
tttggtaaaatgtggcaaatt

SEQ ID NO: 108812 - RNA, 21 nt, synthetic construct
  source 1..21: mol_type = other RNA
tttggtaatgggaaagacagg

SEQ ID NO: 108813 - RNA, 21 nt, synthetic construct
  source 1..21: mol_type = other RNA
tttggtagaggattccaggtt

SEQ ID NO: 108814 - RNA, 21 nt, synthetic construct
  source 1..21: mol_type = other RNA
tttggtagataccagaccctt

SEQ ID NO: 108815 - RNA, 21 nt, synthetic construct
  source 1..21: mol_type = other RNA
tttggtagatttctgcataga

SEQ ID NO: 108816 - RNA, 21 nt, synthetic construct
  source 1..21: mol_type = other RNA
tttggtatgttgtgttttcat

SEQ ID NO: 108817 - RNA, 21 nt, synthetic construct
  source 1..21: mol_type = other RNA
tttggtattcttatccctacc

SEQ ID NO: 108818 - RNA, 21 nt, synthetic construct
  source 1..21: mol_type = other RNA
tttggtattttttagagacag

SEQ ID NO: 108819 - RNA, 21 nt, synthetic construct
  source 1..21: mol_type = other RNA
tttggtcaaaactgtattttc

SEQ ID NO: 108820 - RNA, 21 nt, synthetic construct
  source 1..21: mol_type = other RNA
tttggtcaattgatctgccag

SEQ ID NO: 108821 - RNA, 21 nt, synthetic construct
  source 1..21: mol_type = other RNA
tttggtctcattcactagaca

SEQ ID NO: 108822 - RNA, 21 nt, synthetic construct
  source 1..21: mol_type = other RNA
tttggtcttaccctctagctc

SEQ ID NO: 108823 - RNA, 21 nt, synthetic construct
  source 1..21: mol_type = other RNA
tttggtgaaggttcatgaaca

SEQ ID NO: 108824 - RNA, 21 nt, synthetic construct
  source 1..21: mol_type = other RNA
tttggtgactgaattcccaca

SEQ ID NO: 108825 - RNA, 21 nt, synthetic construct
  source 1..21: mol_type = other RNA
tttggtgatcctaagccatct

SEQ ID NO: 108826 - RNA, 21 nt, synthetic construct
  source 1..21: mol_type = other RNA
tttggtgctgataaatggctt

SEQ ID NO: 108827 - RNA, 21 nt, synthetic construct
  source 1..21: mol_type = other RNA
tttggtgtgtgcaaaggatta

SEQ ID NO: 108828 - RNA, 21 nt, synthetic construct
  source 1..21: mol_type = other RNA
tttggtgtttttctaggtagt

SEQ ID NO: 108829 - RNA, 21 nt, synthetic construct
  source 1..21: mol_type = other RNA
tttggttatgcgaatttactt

SEQ ID NO: 108830 - RNA, 21 nt, synthetic construct
  source 1..21: mol_type = other RNA
tttggttcacttgaaacctgc

SEQ ID NO: 108831 - RNA, 21 nt, synthetic construct
  source 1..21: mol_type = other RNA
tttggtttgtatgtgttaaac

SEQ ID NO: 108832 - RNA, 21 nt, synthetic construct
  source 1..21: mol_type = other RNA
tttggttttactactgtactg

SEQ ID NO: 108833 - RNA, 21 nt, synthetic construct
  source 1..21: mol_type = other RNA
tttggttttgactcagtactt

SEQ ID NO: 108834 - RNA, 21 nt, synthetic construct
  source 1..21: mol_type = other RNA
tttgtaaatgaaacacttgtg

SEQ ID NO: 108835 - RNA, 21 nt, synthetic construct
  source 1..21: mol_type = other RNA
tttgtaacatgttagattagg

SEQ ID NO: 108836 - RNA, 21 nt, synthetic construct
  source 1..21: mol_type = other RNA
tttgtaacgtgtatagctttt

SEQ ID NO: 108837 - RNA, 21 nt, synthetic construct
  source 1..21: mol_type = other RNA
tttgtaataacttggagaact

SEQ ID NO: 108838 - RNA, 21 nt, synthetic construct
  source 1..21: mol_type = other RNA
tttgtaatctaaggattatgg

SEQ ID NO: 108839 - RNA, 21 nt, synthetic construct
  source 1..21: mol_type = other RNA
tttgtaattcatcctactagt

SEQ ID NO: 108840 - RNA, 21 nt, synthetic construct
  source 1..21: mol_type = other RNA
tttgtactacttgtcaggtgg

SEQ ID NO: 108841 - RNA, 21 nt, synthetic construct
  source 1..21: mol_type = other RNA
tttgtacttctaccttgaaaa

SEQ ID NO: 108842 - RNA, 21 nt, synthetic construct
  source 1..21: mol_type = other RNA
tttgtagaccctgttagtccc

SEQ ID NO: 108843 - RNA, 21 nt, synthetic construct
  source 1..21: mol_type = other RNA
tttgtagagacagaatcttac

SEQ ID NO: 108844 - RNA, 21 nt, synthetic construct
  source 1..21: mol_type = other RNA
tttgtagagcaagcaacacca

SEQ ID NO: 108845 - RNA, 21 nt, synthetic construct
  source 1..21: mol_type = other RNA
tttgtagagggaatttgtttt

SEQ ID NO: 108846 - RNA, 21 nt, synthetic construct
  source 1..21: mol_type = other RNA
tttgtagctaatatctttggg

SEQ ID NO: 108847 - RNA, 21 nt, synthetic construct
  source 1..21: mol_type = other RNA
tttgtagctcaaagcatatga

SEQ ID NO: 108848 - RNA, 21 nt, synthetic construct
  source 1..21: mol_type = other RNA
tttgtagtgtcttaatcctat

SEQ ID NO: 108849 - RNA, 21 nt, synthetic construct
  source 1..21: mol_type = other RNA
tttgtatcctgagacttaggc

SEQ ID NO: 108850 - RNA, 21 nt, synthetic construct
  source 1..21: mol_type = other RNA
tttgtatcctgtttgagaagt

SEQ ID NO: 108851 - RNA, 21 nt, synthetic construct
  source 1..21: mol_type = other RNA
tttgtatgtgttaaaccattc

SEQ ID NO: 108852 - RNA, 21 nt, synthetic construct
  source 1..21: mol_type = other RNA
tttgtattctgacctaaagtt

SEQ ID NO: 108853 - RNA, 21 nt, synthetic construct
  source 1..21: mol_type = other RNA
tttgtcaacttttagtaggtc

SEQ ID NO: 108854 - RNA, 21 nt, synthetic construct
  source 1..21: mol_type = other RNA
tttgtcaagctatcagaattt

SEQ ID NO: 108855 - RNA, 21 nt, synthetic construct
  source 1..21: mol_type = other RNA
tttgtcaagtgactccaagca

SEQ ID NO: 108856 - RNA, 21 nt, synthetic construct
  source 1..21: mol_type = other RNA
tttgtcacacggaaaacatta

SEQ ID NO: 108857 - RNA, 21 nt, synthetic construct
  source 1..21: mol_type = other RNA
tttgtcacatagaagcgctct

SEQ ID NO: 108858 - RNA, 21 nt, synthetic construct
  source 1..21: mol_type = other RNA
tttgtcaggcatgctaactgc

SEQ ID NO: 108859 - RNA, 21 nt, synthetic construct
  source 1..21: mol_type = other RNA
tttgtccaccagacaaaaata

SEQ ID NO: 108860 - RNA, 21 nt, synthetic construct
  source 1..21: mol_type = other RNA
tttgtccactgtcagtgggac

SEQ ID NO: 108861 - RNA, 21 nt, synthetic construct
  source 1..21: mol_type = other RNA
tttgtccatctggattatagt

SEQ ID NO: 108862 - RNA, 21 nt, synthetic construct
  source 1..21: mol_type = other RNA
tttgtctattccctacattgc

SEQ ID NO: 108863 - RNA, 21 nt, synthetic construct
  source 1..21: mol_type = other RNA
tttgtctctggaaggctaagc

SEQ ID NO: 108864 - RNA, 21 nt, synthetic construct
  source 1..21: mol_type = other RNA
tttgtctggaacacacattag

SEQ ID NO: 108865 - RNA, 21 nt, synthetic construct
  source 1..21: mol_type = other RNA
tttgtctggtggacaaaaaac

SEQ ID NO: 108866 - RNA, 21 nt, synthetic construct
  source 1..21: mol_type = other RNA
tttgtgaaccttgaagtactt

SEQ ID NO: 108867 - RNA, 21 nt, synthetic construct
  source 1..21: mol_type = other RNA
tttgtgaagggaggtaggctt

SEQ ID NO: 108868 - RNA, 21 nt, synthetic construct
  source 1..21: mol_type = other RNA
tttgtgacaagttcagcatct

SEQ ID NO: 108869 - RNA, 21 nt, synthetic construct
  source 1..21: mol_type = other RNA
tttgtgaccagatcaaacgtg

SEQ ID NO: 108870 - RNA, 21 nt, synthetic construct
  source 1..21: mol_type = other RNA
tttgtgactgtgagggtaaga

SEQ ID NO: 108871 - RNA, 21 nt, synthetic construct
  source 1..21: mol_type = other RNA
tttgtgagttttaactcttgc

SEQ ID NO: 108872 - RNA, 21 nt, synthetic construct
  source 1..21: mol_type = other RNA
tttgtgcaacataaatagggt

SEQ ID NO: 108873 - RNA, 21 nt, synthetic construct
  source 1..21: mol_type = other RNA
tttgtgcaggtctgggttttt

SEQ ID NO: 108874 - RNA, 21 nt, synthetic construct
  source 1..21: mol_type = other RNA
tttgtgcatactgtgatgatt

SEQ ID NO: 108875 - RNA, 21 nt, synthetic construct
  source 1..21: mol_type = other RNA
tttgtgcatcaaaggacacta

SEQ ID NO: 108876 - RNA, 21 nt, synthetic construct
  source 1..21: mol_type = other RNA
tttgtgcttggatattctaca

SEQ ID NO: 108877 - RNA, 21 nt, synthetic construct
  source 1..21: mol_type = other RNA
tttgtggagatggggacttgc

SEQ ID NO: 108878 - RNA, 21 nt, synthetic construct
  source 1..21: mol_type = other RNA
tttgtggagtggaggggcagg

SEQ ID NO: 108879 - RNA, 21 nt, synthetic construct
  source 1..21: mol_type = other RNA
tttgtggcatctttgttacag

SEQ ID NO: 108880 - RNA, 21 nt, synthetic construct
  source 1..21: mol_type = other RNA
tttgtggcctcttcccttgtg

SEQ ID NO: 108881 - RNA, 21 nt, synthetic construct
  source 1..21: mol_type = other RNA
tttgtgggaattcagtcacca

SEQ ID NO: 108882 - RNA, 21 nt, synthetic construct
  source 1..21: mol_type = other RNA
tttgtggttttaacctcttga

SEQ ID NO: 108883 - RNA, 21 nt, synthetic construct
  source 1..21: mol_type = other RNA
tttgtgtagaggtgaagttaa

SEQ ID NO: 108884 - RNA, 21 nt, synthetic construct
  source 1..21: mol_type = other RNA
tttgtgtcaagtacaactaat

SEQ ID NO: 108885 - RNA, 21 nt, synthetic construct
  source 1..21: mol_type = other RNA
tttgtgtcttctgtttttctt

SEQ ID NO: 108886 - RNA, 21 nt, synthetic construct
  source 1..21: mol_type = other RNA
tttgtgttggtgtttctgaca

SEQ ID NO: 108887 - RNA, 21 nt, synthetic construct
  source 1..21: mol_type = other RNA
tttgtgtttgtgaccagatca

SEQ ID NO: 108888 - RNA, 21 nt, synthetic construct
  source 1..21: mol_type = other RNA
tttgtgttttcactctcaata

SEQ ID NO: 108889 - RNA, 21 nt, synthetic construct
  source 1..21: mol_type = other RNA
tttgttacagcagctctagca

SEQ ID NO: 108890 - RNA, 21 nt, synthetic construct
  source 1..21: mol_type = other RNA
tttgttactgatctgctcaag

SEQ ID NO: 108891 - RNA, 21 nt, synthetic construct
  source 1..21: mol_type = other RNA
tttgttagatctgggataatg

SEQ ID NO: 108892 - RNA, 21 nt, synthetic construct
  source 1..21: mol_type = other RNA
tttgttagtgccttcagaagg

SEQ ID NO: 108893 - RNA, 21 nt, synthetic construct
  source 1..21: mol_type = other RNA
tttgttatctgaacgtcttta

SEQ ID NO: 108894 - RNA, 21 nt, synthetic construct
  source 1..21: mol_type = other RNA
tttgttatggtaggtgctttt

SEQ ID NO: 108895 - RNA, 21 nt, synthetic construct
  source 1..21: mol_type = other RNA
tttgttcaagcgctgaagtac

SEQ ID NO: 108896 - RNA, 21 nt, synthetic construct
  source 1..21: mol_type = other RNA
tttgttcagaaatagactccc

SEQ ID NO: 108897 - RNA, 21 nt, synthetic construct
  source 1..21: mol_type = other RNA
tttgttcaggagttttgcctc

SEQ ID NO: 108898 - RNA, 21 nt, synthetic construct
  source 1..21: mol_type = other RNA
tttgttcatcatcttttgcct

SEQ ID NO: 108899 - RNA, 21 nt, synthetic construct
  source 1..21: mol_type = other RNA
tttgttctaatttgtgaacct

SEQ ID NO: 108900 - RNA, 21 nt, synthetic construct
  source 1..21: mol_type = other RNA
tttgttctcgttcatgttcaa

SEQ ID NO: 108901 - RNA, 21 nt, synthetic construct
  source 1..21: mol_type = other RNA
tttgttctgctgttgatggac

SEQ ID NO: 108902 - RNA, 21 nt, synthetic construct
  source 1..21: mol_type = other RNA
tttgttctgtcacatttgaaa

SEQ ID NO: 108903 - RNA, 21 nt, synthetic construct
  source 1..21: mol_type = other RNA
tttgttctgtcacggtgccct

SEQ ID NO: 108904 - RNA, 21 nt, synthetic construct
  source 1..21: mol_type = other RNA
tttgttgaaaacgaggaaaag

SEQ ID NO: 108905 - RNA, 21 nt, synthetic construct
  source 1..21: mol_type = other RNA
tttgttgacatcctttgcgtc

SEQ ID NO: 108906 - RNA, 21 nt, synthetic construct
  source 1..21: mol_type = other RNA
tttgttgacccaatcatgttc

SEQ ID NO: 108907 - RNA, 21 nt, synthetic construct
  source 1..21: mol_type = other RNA
tttgttgcatccccattcaat

SEQ ID NO: 108908 - RNA, 21 nt, synthetic construct
  source 1..21: mol_type = other RNA
tttgttgccaggtggacgcgg

SEQ ID NO: 108909 - RNA, 21 nt, synthetic construct
  source 1..21: mol_type = other RNA
tttgttgcctgtagttttggt

SEQ ID NO: 108910 - RNA, 21 nt, synthetic construct
  source 1..21: mol_type = other RNA
tttgttgctattgttgaattg

SEQ ID NO: 108911 - RNA, 21 nt, synthetic construct
  source 1..21: mol_type = other RNA
tttgttgggtttaactgaggt

SEQ ID NO: 108912 - RNA, 21 nt, synthetic construct
  source 1..21: mol_type = other RNA
tttgttgttggtttgtgtgtt

SEQ ID NO: 108913 - RNA, 21 nt, synthetic construct
  source 1..21: mol_type = other RNA
tttgttgttgttgtttctgag

SEQ ID NO: 108914 - RNA, 21 nt, synthetic construct
  source 1..21: mol_type = other RNA
tttgtttaattagccgggtgt

SEQ ID NO: 108915 - RNA, 21 nt, synthetic construct
  source 1..21: mol_type = other RNA
tttgtttagtagctgtcttta

SEQ ID NO: 108916 - RNA, 21 nt, synthetic construct
  source 1..21: mol_type = other RNA
tttgtttatccttgcaccaac

SEQ ID NO: 108917 - RNA, 21 nt, synthetic construct
  source 1..21: mol_type = other RNA
tttgtttatttgctgtcaggc

SEQ ID NO: 108918 - RNA, 21 nt, synthetic construct
  source 1..21: mol_type = other RNA
tttgtttctgaggtggagttc

SEQ ID NO: 108919 - RNA, 21 nt, synthetic construct
  source 1..21: mol_type = other RNA
tttgtttgaattaagcaccac

SEQ ID NO: 108920 - RNA, 21 nt, synthetic construct
  source 1..21: mol_type = other RNA
tttgtttgctagagctgctgt

SEQ ID NO: 108921 - RNA, 21 nt, synthetic construct
  source 1..21: mol_type = other RNA
tttgtttgtttctgaggtgga

SEQ ID NO: 108922 - RNA, 21 nt, synthetic construct
  source 1..21: mol_type = other RNA
tttgttttaccatctaaagcc

SEQ ID NO: 108923 - RNA, 21 nt, synthetic construct
  source 1..21: mol_type = other RNA
tttgttttccaagccttaaaa

SEQ ID NO: 108924 - RNA, 21 nt, synthetic construct
  source 1..21: mol_type = other RNA
tttgttttctccttctggaag

SEQ ID NO: 108925 - RNA, 21 nt, synthetic construct
  source 1..21: mol_type = other RNA
tttgttttggtcaaaactgta

SEQ ID NO: 108926 - RNA, 21 nt, synthetic construct
  source 1..21: mol_type = other RNA
tttgttttgtgtttgtgacca

SEQ ID NO: 108927 - RNA, 21 nt, synthetic construct
  source 1..21: mol_type = other RNA
tttgttttgtttttctctcct

SEQ ID NO: 108928 - RNA, 21 nt, synthetic construct
  source 1..21: mol_type = other RNA
tttgtttttctctccttgcac

SEQ ID NO: 108929 - RNA, 21 nt, synthetic construct
  source 1..21: mol_type = other RNA
tttgttttttcacagaaacag

SEQ ID NO: 108930 - RNA, 21 nt, synthetic construct
  source 1..21: mol_type = other RNA
ttttaaaaactttttgggcct

SEQ ID NO: 108931 - RNA, 21 nt, synthetic construct
  source 1..21: mol_type = other RNA
ttttaaaaagcagctacctgt

SEQ ID NO: 108932 - RNA, 21 nt, synthetic construct
  source 1..21: mol_type = other RNA
ttttaaaagagcgaagaggga

SEQ ID NO: 108933 - RNA, 21 nt, synthetic construct
  source 1..21: mol_type = other RNA
ttttaaaagatgcattctgtc

SEQ ID NO: 108934 - RNA, 21 nt, synthetic construct
  source 1..21: mol_type = other RNA
ttttaaaagtcagctaggcgt

SEQ ID NO: 108935 - RNA, 21 nt, synthetic construct
  source 1..21: mol_type = other RNA
ttttaaacaggtgtaagagat

SEQ ID NO: 108936 - RNA, 21 nt, synthetic construct
  source 1..21: mol_type = other RNA
ttttaaacccatttcatgcca

SEQ ID NO: 108937 - RNA, 21 nt, synthetic construct
  source 1..21: mol_type = other RNA
ttttaaagaaaggtctctctc

SEQ ID NO: 108938 - RNA, 21 nt, synthetic construct
  source 1..21: mol_type = other RNA
ttttaaagacctcaggtttag

SEQ ID NO: 108939 - RNA, 21 nt, synthetic construct
  source 1..21: mol_type = other RNA
ttttaaagcagggaggggtcc

SEQ ID NO: 108940 - RNA, 21 nt, synthetic construct
  source 1..21: mol_type = other RNA
ttttaaagggataatgctatc

SEQ ID NO: 108941 - RNA, 21 nt, synthetic construct
  source 1..21: mol_type = other RNA
ttttaaatcagcaccatctaa

SEQ ID NO: 108942 - RNA, 21 nt, synthetic construct
  source 1..21: mol_type = other RNA
ttttaaatgccaatttgggat

SEQ ID NO: 108943 - RNA, 21 nt, synthetic construct
  source 1..21: mol_type = other RNA
ttttaacagatggtccttttt

SEQ ID NO: 108944 - RNA, 21 nt, synthetic construct
  source 1..21: mol_type = other RNA
ttttaacccacagataatttc

SEQ ID NO: 108945 - RNA, 21 nt, synthetic construct
  source 1..21: mol_type = other RNA
ttttaacctcttgaagtcagt

SEQ ID NO: 108946 - RNA, 21 nt, synthetic construct
  source 1..21: mol_type = other RNA
ttttaactcttgcattagagc

SEQ ID NO: 108947 - RNA, 21 nt, synthetic construct
  source 1..21: mol_type = other RNA
ttttaagaaaagaagttacgg

SEQ ID NO: 108948 - RNA, 21 nt, synthetic construct
  source 1..21: mol_type = other RNA
ttttaagagtgaagaaacctt

SEQ ID NO: 108949 - RNA, 21 nt, synthetic construct
  source 1..21: mol_type = other RNA
ttttaagattctctttaggga

SEQ ID NO: 108950 - RNA, 21 nt, synthetic construct
  source 1..21: mol_type = other RNA
ttttaagcctagagattaggc

SEQ ID NO: 108951 - RNA, 21 nt, synthetic construct
  source 1..21: mol_type = other RNA
ttttaaggcagggcttggtgg

SEQ ID NO: 108952 - RNA, 21 nt, synthetic construct
  source 1..21: mol_type = other RNA
ttttaaggctgaacaatattc

SEQ ID NO: 108953 - RNA, 21 nt, synthetic construct
  source 1..21: mol_type = other RNA
ttttaaggcttggaaaacaaa

SEQ ID NO: 108954 - RNA, 21 nt, synthetic construct
  source 1..21: mol_type = other RNA
ttttaagggaaacactcatac

SEQ ID NO: 108955 - RNA, 21 nt, synthetic construct
  source 1..21: mol_type = other RNA
ttttaagtggcgctgtttgcc

SEQ ID NO: 108956 - RNA, 21 nt, synthetic construct
  source 1..21: mol_type = other RNA
ttttaagttctagggaacatg

SEQ ID NO: 108957 - RNA, 21 nt, synthetic construct
  source 1..21: mol_type = other RNA
ttttaataagcttcgaagcaa

SEQ ID NO: 108958 - RNA, 21 nt, synthetic construct
  source 1..21: mol_type = other RNA
ttttaatcgaatcctcacaac

SEQ ID NO: 108959 - RNA, 21 nt, synthetic construct
  source 1..21: mol_type = other RNA
ttttaatctacaaaacagggt

SEQ ID NO: 108960 - RNA, 21 nt, synthetic construct
  source 1..21: mol_type = other RNA
ttttaatctgtcctgaatact

SEQ ID NO: 108961 - RNA, 21 nt, synthetic construct
  source 1..21: mol_type = other RNA
ttttaatgggcattagaagtt

SEQ ID NO: 108962 - RNA, 21 nt, synthetic construct
  source 1..21: mol_type = other RNA
ttttaatgtagatcctgagga

SEQ ID NO: 108963 - RNA, 21 nt, synthetic construct
  source 1..21: mol_type = other RNA
ttttacacatgtcagccacaa

SEQ ID NO: 108964 - RNA, 21 nt, synthetic construct
  source 1..21: mol_type = other RNA
ttttacaccatgcaggttcat

SEQ ID NO: 108965 - RNA, 21 nt, synthetic construct
  source 1..21: mol_type = other RNA
ttttacaccctaggtagggtt

SEQ ID NO: 108966 - RNA, 21 nt, synthetic construct
  source 1..21: mol_type = other RNA
ttttacacttggagttttccc

SEQ ID NO: 108967 - RNA, 21 nt, synthetic construct
  source 1..21: mol_type = other RNA
ttttacatgtagttttccctg

SEQ ID NO: 108968 - RNA, 21 nt, synthetic construct
  source 1..21: mol_type = other RNA
ttttacattaaagacagctac

SEQ ID NO: 108969 - RNA, 21 nt, synthetic construct
  source 1..21: mol_type = other RNA
ttttaccaaaacagcttcttg

SEQ ID NO: 108970 - RNA, 21 nt, synthetic construct
  source 1..21: mol_type = other RNA
ttttaccaaggctaagttgag

SEQ ID NO: 108971 - RNA, 21 nt, synthetic construct
  source 1..21: mol_type = other RNA
ttttaccaagttgaatttctg

SEQ ID NO: 108972 - RNA, 21 nt, synthetic construct
  source 1..21: mol_type = other RNA
ttttaccatctaaagccaggc

SEQ ID NO: 108973 - RNA, 21 nt, synthetic construct
  source 1..21: mol_type = other RNA
ttttacccaacatgagagaaa

SEQ ID NO: 108974 - RNA, 21 nt, synthetic construct
  source 1..21: mol_type = other RNA
ttttacccggagaggtgaact

SEQ ID NO: 108975 - RNA, 21 nt, synthetic construct
  source 1..21: mol_type = other RNA
ttttacccgtggaaatacttg

SEQ ID NO: 108976 - RNA, 21 nt, synthetic construct
  source 1..21: mol_type = other RNA
ttttaccctcattttataagg

SEQ ID NO: 108977 - RNA, 21 nt, synthetic construct
  source 1..21: mol_type = other RNA
ttttacgaggacagactgcag

SEQ ID NO: 108978 - RNA, 21 nt, synthetic construct
  source 1..21: mol_type = other RNA
ttttacgatgaaattgaccat

SEQ ID NO: 108979 - RNA, 21 nt, synthetic construct
  source 1..21: mol_type = other RNA
ttttactactgtactgtttag

SEQ ID NO: 108980 - RNA, 21 nt, synthetic construct
  source 1..21: mol_type = other RNA
ttttactcatgtctacctgtc

SEQ ID NO: 108981 - RNA, 21 nt, synthetic construct
  source 1..21: mol_type = other RNA
ttttactcgagggtagctttt

SEQ ID NO: 108982 - RNA, 21 nt, synthetic construct
  source 1..21: mol_type = other RNA
ttttactgatcttttctgaca

SEQ ID NO: 108983 - RNA, 21 nt, synthetic construct
  source 1..21: mol_type = other RNA
ttttactgctatacaaccgga

SEQ ID NO: 108984 - RNA, 21 nt, synthetic construct
  source 1..21: mol_type = other RNA
ttttactgtccaaacagtgac

SEQ ID NO: 108985 - RNA, 21 nt, synthetic construct
  source 1..21: mol_type = other RNA
ttttacttactagttgtgcta

SEQ ID NO: 108986 - RNA, 21 nt, synthetic construct
  source 1..21: mol_type = other RNA
ttttacttgcttggtttcaca

SEQ ID NO: 108987 - RNA, 21 nt, synthetic construct
  source 1..21: mol_type = other RNA
ttttacttggctcctcccggc

SEQ ID NO: 108988 - RNA, 21 nt, synthetic construct
  source 1..21: mol_type = other RNA
ttttactttgcgaaacacact

SEQ ID NO: 108989 - RNA, 21 nt, synthetic construct
  source 1..21: mol_type = other RNA
ttttagaaggtaagaatgtca

SEQ ID NO: 108990 - RNA, 21 nt, synthetic construct
  source 1..21: mol_type = other RNA
ttttagagagatgcctgtgct

SEQ ID NO: 108991 - RNA, 21 nt, synthetic construct
  source 1..21: mol_type = other RNA
ttttagagtaactgtcatcag

SEQ ID NO: 108992 - RNA, 21 nt, synthetic construct
  source 1..21: mol_type = other RNA
ttttagatcaagtcctttcca

SEQ ID NO: 108993 - RNA, 21 nt, synthetic construct
  source 1..21: mol_type = other RNA
ttttagccaacaaccataatg

SEQ ID NO: 108994 - RNA, 21 nt, synthetic construct
  source 1..21: mol_type = other RNA
ttttagctggggcagcaaagc

SEQ ID NO: 108995 - RNA, 21 nt, synthetic construct
  source 1..21: mol_type = other RNA
ttttagcttcatataagtgga

SEQ ID NO: 108996 - RNA, 21 nt, synthetic construct
  source 1..21: mol_type = other RNA
ttttaggaaaatagagttcca

SEQ ID NO: 108997 - RNA, 21 nt, synthetic construct
  source 1..21: mol_type = other RNA
ttttaggacaaggaaaggatg

SEQ ID NO: 108998 - RNA, 21 nt, synthetic construct
  source 1..21: mol_type = other RNA
ttttaggagtcaactaatcaa

SEQ ID NO: 108999 - RNA, 21 nt, synthetic construct
  source 1..21: mol_type = other RNA
ttttaggctctgtggtttctt

SEQ ID NO: 109000 - RNA, 21 nt, synthetic construct
  source 1..21: mol_type = other RNA
ttttaggggggaaaacaccct

SEQ ID NO: 109001 - RNA, 21 nt, synthetic construct
  source 1..21: mol_type = other RNA
ttttaggtagggataagaata

SEQ ID NO: 109002 - RNA, 21 nt, synthetic construct
  source 1..21: mol_type = other RNA
ttttaggtagtcttgtcataa

SEQ ID NO: 109003 - RNA, 21 nt, synthetic construct
  source 1..21: mol_type = other RNA
ttttaggtcatttttcacttc

SEQ ID NO: 109004 - RNA, 21 nt, synthetic construct
  source 1..21: mol_type = other RNA
ttttaggtgccccactccaca

SEQ ID NO: 109005 - RNA, 21 nt, synthetic construct
  source 1..21: mol_type = other RNA
ttttagtaagaggtatcacca

SEQ ID NO: 109006 - RNA, 21 nt, synthetic construct
  source 1..21: mol_type = other RNA
ttttagtaattctccactttc

SEQ ID NO: 109007 - RNA, 21 nt, synthetic construct
  source 1..21: mol_type = other RNA
ttttagtagagatgaggtttt

SEQ ID NO: 109008 - RNA, 21 nt, synthetic construct
  source 1..21: mol_type = other RNA
ttttagtaggtctccttgtat

SEQ ID NO: 109009 - RNA, 21 nt, synthetic construct
  source 1..21: mol_type = other RNA
ttttagtagtaagttgtgtca

SEQ ID NO: 109010 - RNA, 21 nt, synthetic construct
  source 1..21: mol_type = other RNA
ttttagtgactggcttaatgc

SEQ ID NO: 109011 - RNA, 21 nt, synthetic construct
  source 1..21: mol_type = other RNA
ttttagtggctcacagtgctc

SEQ ID NO: 109012 - RNA, 21 nt, synthetic construct
  source 1..21: mol_type = other RNA
ttttagtttacactatggctt

SEQ ID NO: 109013 - RNA, 21 nt, synthetic construct
  source 1..21: mol_type = other RNA
ttttataatgggcaatcagaa

SEQ ID NO: 109014 - RNA, 21 nt, synthetic construct
  source 1..21: mol_type = other RNA
ttttatatgcattaagccagt

SEQ ID NO: 109015 - RNA, 21 nt, synthetic construct
  source 1..21: mol_type = other RNA
ttttatatttccgatgatacc

SEQ ID NO: 109016 - RNA, 21 nt, synthetic construct
  source 1..21: mol_type = other RNA
ttttatcaaaatcaaggtgcg

SEQ ID NO: 109017 - RNA, 21 nt, synthetic construct
  source 1..21: mol_type = other RNA
ttttatcaattagttcctcct

SEQ ID NO: 109018 - RNA, 21 nt, synthetic construct
  source 1..21: mol_type = other RNA
ttttatctctctcaagcaatc

SEQ ID NO: 109019 - RNA, 21 nt, synthetic construct
  source 1..21: mol_type = other RNA
ttttatgcatttggtctcatt

SEQ ID NO: 109020 - RNA, 21 nt, synthetic construct
  source 1..21: mol_type = other RNA
ttttatgctttgtctctggaa

SEQ ID NO: 109021 - RNA, 21 nt, synthetic construct
  source 1..21: mol_type = other RNA
ttttatggtaactcctgttct

SEQ ID NO: 109022 - RNA, 21 nt, synthetic construct
  source 1..21: mol_type = other RNA
ttttatggttttttcccccct

SEQ ID NO: 109023 - RNA, 21 nt, synthetic construct
  source 1..21: mol_type = other RNA
ttttatgtacacgtcttgtca

SEQ ID NO: 109024 - RNA, 21 nt, synthetic construct
  source 1..21: mol_type = other RNA
ttttatgtgcagtctaaccat

SEQ ID NO: 109025 - RNA, 21 nt, synthetic construct
  source 1..21: mol_type = other RNA
ttttatgtgctttctcaacac

SEQ ID NO: 109026 - RNA, 21 nt, synthetic construct
  source 1..21: mol_type = other RNA
ttttattaatttggcttgggg

SEQ ID NO: 109027 - RNA, 21 nt, synthetic construct
  source 1..21: mol_type = other RNA
ttttattaggtgcacacaaca

SEQ ID NO: 109028 - RNA, 21 nt, synthetic construct
  source 1..21: mol_type = other RNA
ttttattctgttctagctcct

SEQ ID NO: 109029 - RNA, 21 nt, synthetic construct
  source 1..21: mol_type = other RNA
ttttattgataagcacatggt

SEQ ID NO: 109030 - RNA, 21 nt, synthetic construct
  source 1..21: mol_type = other RNA
ttttatttagcccatgtctaa

SEQ ID NO: 109031 - RNA, 21 nt, synthetic construct
  source 1..21: mol_type = other RNA
ttttatttaggccctctataa

SEQ ID NO: 109032 - RNA, 21 nt, synthetic construct
  source 1..21: mol_type = other RNA
ttttatttcttgacctcagtg

SEQ ID NO: 109033 - RNA, 21 nt, synthetic construct
  source 1..21: mol_type = other RNA
ttttatttggctgttaccatt

SEQ ID NO: 109034 - RNA, 21 nt, synthetic construct
  source 1..21: mol_type = other RNA
ttttcaaaaacccaactcttt

SEQ ID NO: 109035 - RNA, 21 nt, synthetic construct
  source 1..21: mol_type = other RNA
ttttcaaatacctagttttcc

SEQ ID NO: 109036 - RNA, 21 nt, synthetic construct
  source 1..21: mol_type = other RNA
ttttcaacaaaggttgaaaac

SEQ ID NO: 109037 - RNA, 21 nt, synthetic construct
  source 1..21: mol_type = other RNA
ttttcaacctttgttgaaaac

SEQ ID NO: 109038 - RNA, 21 nt, synthetic construct
  source 1..21: mol_type = other RNA
ttttcaactgaacaacgctgt

SEQ ID NO: 109039 - RNA, 21 nt, synthetic construct
  source 1..21: mol_type = other RNA
ttttcaaggcttgtgcatcag

SEQ ID NO: 109040 - RNA, 21 nt, synthetic construct
  source 1..21: mol_type = other RNA
ttttcaagggtgttttccccc

SEQ ID NO: 109041 - RNA, 21 nt, synthetic construct
  source 1..21: mol_type = other RNA
ttttcaaggtagaagtacaaa

SEQ ID NO: 109042 - RNA, 21 nt, synthetic construct
  source 1..21: mol_type = other RNA
ttttcacaaacacacaaacca

SEQ ID NO: 109043 - RNA, 21 nt, synthetic construct
  source 1..21: mol_type = other RNA
ttttcacactataacagatgg

SEQ ID NO: 109044 - RNA, 21 nt, synthetic construct
  source 1..21: mol_type = other RNA
ttttcacagggcagggagaga

SEQ ID NO: 109045 - RNA, 21 nt, synthetic construct
  source 1..21: mol_type = other RNA
ttttcacataaatttgccaca

SEQ ID NO: 109046 - RNA, 21 nt, synthetic construct
  source 1..21: mol_type = other RNA
ttttcacattcttcaccattc

SEQ ID NO: 109047 - RNA, 21 nt, synthetic construct
  source 1..21: mol_type = other RNA
ttttcacattgcacagtctcc

SEQ ID NO: 109048 - RNA, 21 nt, synthetic construct
  source 1..21: mol_type = other RNA
ttttcaccagcggcatacagg

SEQ ID NO: 109049 - RNA, 21 nt, synthetic construct
  source 1..21: mol_type = other RNA
ttttcactctaatatggttcc

SEQ ID NO: 109050 - RNA, 21 nt, synthetic construct
  source 1..21: mol_type = other RNA
ttttcactcttagtgatgtct

SEQ ID NO: 109051 - RNA, 21 nt, synthetic construct
  source 1..21: mol_type = other RNA
ttttcacttcgttcagtttag

SEQ ID NO: 109052 - RNA, 21 nt, synthetic construct
  source 1..21: mol_type = other RNA
ttttcacttttgtgcaacata

SEQ ID NO: 109053 - RNA, 21 nt, synthetic construct
  source 1..21: mol_type = other RNA
ttttcagattgaccttgtatc

SEQ ID NO: 109054 - RNA, 21 nt, synthetic construct
  source 1..21: mol_type = other RNA
ttttcagcagcagagaagtga

SEQ ID NO: 109055 - RNA, 21 nt, synthetic construct
  source 1..21: mol_type = other RNA
ttttcagccctgatagatatt

SEQ ID NO: 109056 - RNA, 21 nt, synthetic construct
  source 1..21: mol_type = other RNA
ttttcaggactcatgagagct

SEQ ID NO: 109057 - RNA, 21 nt, synthetic construct
  source 1..21: mol_type = other RNA
ttttcaggggggccactggaa

SEQ ID NO: 109058 - RNA, 21 nt, synthetic construct
  source 1..21: mol_type = other RNA
ttttcaggtattgagcctgtt

SEQ ID NO: 109059 - RNA, 21 nt, synthetic construct
  source 1..21: mol_type = other RNA
ttttcaggttcaagcgactct

SEQ ID NO: 109060 - RNA, 21 nt, synthetic construct
  source 1..21: mol_type = other RNA
ttttcagtccagatattatcc

SEQ ID NO: 109061 - RNA, 21 nt, synthetic construct
  source 1..21: mol_type = other RNA
ttttcagttgcatgaatttgt

SEQ ID NO: 109062 - RNA, 21 nt, synthetic construct
  source 1..21: mol_type = other RNA
ttttcataacaaagctctgat

SEQ ID NO: 109063 - RNA, 21 nt, synthetic construct
  source 1..21: mol_type = other RNA
ttttcatagcagcattgttta

SEQ ID NO: 109064 - RNA, 21 nt, synthetic construct
  source 1..21: mol_type = other RNA
ttttcatcactcactggcctg

SEQ ID NO: 109065 - RNA, 21 nt, synthetic construct
  source 1..21: mol_type = other RNA
ttttcatccaaacagaaaccc

SEQ ID NO: 109066 - RNA, 21 nt, synthetic construct
  source 1..21: mol_type = other RNA
ttttcatgcgacatatcaggg

SEQ ID NO: 109067 - RNA, 21 nt, synthetic construct
  source 1..21: mol_type = other RNA
ttttcatggttttaatgggca

SEQ ID NO: 109068 - RNA, 21 nt, synthetic construct
  source 1..21: mol_type = other RNA
ttttcattacatttgcttagg

SEQ ID NO: 109069 - RNA, 21 nt, synthetic construct
  source 1..21: mol_type = other RNA
ttttcattcgttcaaaacatc

SEQ ID NO: 109070 - RNA, 21 nt, synthetic construct
  source 1..21: mol_type = other RNA
ttttcattctacctggagcct

SEQ ID NO: 109071 - RNA, 21 nt, synthetic construct
  source 1..21: mol_type = other RNA
ttttccaacagtttacacgcc

SEQ ID NO: 109072 - RNA, 21 nt, synthetic construct
  source 1..21: mol_type = other RNA
ttttccaaccaagcccaactt

SEQ ID NO: 109073 - RNA, 21 nt, synthetic construct
  source 1..21: mol_type = other RNA
ttttccaaccactgaatcaga

SEQ ID NO: 109074 - RNA, 21 nt, synthetic construct
  source 1..21: mol_type = other RNA
ttttccaatccgggaacatga

SEQ ID NO: 109075 - RNA, 21 nt, synthetic construct
  source 1..21: mol_type = other RNA
ttttccacagtgactttactg

SEQ ID NO: 109076 - RNA, 21 nt, synthetic construct
  source 1..21: mol_type = other RNA
ttttccacataaagtcttgct

SEQ ID NO: 109077 - RNA, 21 nt, synthetic construct
  source 1..21: mol_type = other RNA
ttttccacataattgaaccca

SEQ ID NO: 109078 - RNA, 21 nt, synthetic construct
  source 1..21: mol_type = other RNA
ttttccaggaaaagcaaatgt

SEQ ID NO: 109079 - RNA, 21 nt, synthetic construct
  source 1..21: mol_type = other RNA
ttttccaggaccaatttacca

SEQ ID NO: 109080 - RNA, 21 nt, synthetic construct
  source 1..21: mol_type = other RNA
ttttccagtcttctcatacag

SEQ ID NO: 109081 - RNA, 21 nt, synthetic construct
  source 1..21: mol_type = other RNA
ttttccattcacacacccttt

SEQ ID NO: 109082 - RNA, 21 nt, synthetic construct
  source 1..21: mol_type = other RNA
ttttccattcatgtaatgcaa

SEQ ID NO: 109083 - RNA, 21 nt, synthetic construct
  source 1..21: mol_type = other RNA
ttttcccaaagatagactctt

SEQ ID NO: 109084 - RNA, 21 nt, synthetic construct
  source 1..21: mol_type = other RNA
ttttcccaatctctggtattc

SEQ ID NO: 109085 - RNA, 21 nt, synthetic construct
  source 1..21: mol_type = other RNA
ttttcccagatacgttaaagg

SEQ ID NO: 109086 - RNA, 21 nt, synthetic construct
  source 1..21: mol_type = other RNA
ttttcccaggagctagaacag

SEQ ID NO: 109087 - RNA, 21 nt, synthetic construct
  source 1..21: mol_type = other RNA
ttttcccccaattaaactata

SEQ ID NO: 109088 - RNA, 21 nt, synthetic construct
  source 1..21: mol_type = other RNA
ttttcccccctaaaacactgg

SEQ ID NO: 109089 - RNA, 21 nt, synthetic construct
  source 1..21: mol_type = other RNA
ttttcccccctggaacaatca

SEQ ID NO: 109090 - RNA, 21 nt, synthetic construct
  source 1..21: mol_type = other RNA
ttttccccctacacccagttc

SEQ ID NO: 109091 - RNA, 21 nt, synthetic construct
  source 1..21: mol_type = other RNA
ttttcccgctacacaagtatt

SEQ ID NO: 109092 - RNA, 21 nt, synthetic construct
  source 1..21: mol_type = other RNA
ttttccctcctttttatcacc

SEQ ID NO: 109093 - RNA, 21 nt, synthetic construct
  source 1..21: mol_type = other RNA
ttttccctgtgtatgtgtagt

SEQ ID NO: 109094 - RNA, 21 nt, synthetic construct
  source 1..21: mol_type = other RNA
ttttcccttttgtagctaata

SEQ ID NO: 109095 - RNA, 21 nt, synthetic construct
  source 1..21: mol_type = other RNA
ttttccggttgtatagcagta

SEQ ID NO: 109096 - RNA, 21 nt, synthetic construct
  source 1..21: mol_type = other RNA
ttttccgtctagccacttcct

SEQ ID NO: 109097 - RNA, 21 nt, synthetic construct
  source 1..21: mol_type = other RNA
ttttccgtgtgacaaaaagta

SEQ ID NO: 109098 - RNA, 21 nt, synthetic construct
  source 1..21: mol_type = other RNA
ttttcctaaaactccccatgc

SEQ ID NO: 109099 - RNA, 21 nt, synthetic construct
  source 1..21: mol_type = other RNA
ttttcctaaccactgttatct

SEQ ID NO: 109100 - RNA, 21 nt, synthetic construct
  source 1..21: mol_type = other RNA
ttttcctaccctgaggatata

SEQ ID NO: 109101 - RNA, 21 nt, synthetic construct
  source 1..21: mol_type = other RNA
ttttcctactaacaagaaagg

SEQ ID NO: 109102 - RNA, 21 nt, synthetic construct
  source 1..21: mol_type = other RNA
ttttcctagactgccaggtag

SEQ ID NO: 109103 - RNA, 21 nt, synthetic construct
  source 1..21: mol_type = other RNA
ttttcctcccttcagcctgtg

SEQ ID NO: 109104 - RNA, 21 nt, synthetic construct
  source 1..21: mol_type = other RNA
ttttcctccttctgctcactt

SEQ ID NO: 109105 - RNA, 21 nt, synthetic construct
  source 1..21: mol_type = other RNA
ttttcctcgttttcaacaaag

SEQ ID NO: 109106 - RNA, 21 nt, synthetic construct
  source 1..21: mol_type = other RNA
ttttcctgatggacattctgc

SEQ ID NO: 109107 - RNA, 21 nt, synthetic construct
  source 1..21: mol_type = other RNA
ttttcctgctgtcgtttatgc

SEQ ID NO: 109108 - RNA, 21 nt, synthetic construct
  source 1..21: mol_type = other RNA
ttttcctggaaaacttctctg

SEQ ID NO: 109109 - RNA, 21 nt, synthetic construct
  source 1..21: mol_type = other RNA
ttttcctgttccgggatcctg

SEQ ID NO: 109110 - RNA, 21 nt, synthetic construct
  source 1..21: mol_type = other RNA
ttttccttatccattcatctc

SEQ ID NO: 109111 - RNA, 21 nt, synthetic construct
  source 1..21: mol_type = other RNA
ttttccttatggatatctggc

SEQ ID NO: 109112 - RNA, 21 nt, synthetic construct
  source 1..21: mol_type = other RNA
ttttccttcttaagacatttg

SEQ ID NO: 109113 - RNA, 21 nt, synthetic construct
  source 1..21: mol_type = other RNA
ttttccttctttgggggaagc

SEQ ID NO: 109114 - RNA, 21 nt, synthetic construct
  source 1..21: mol_type = other RNA
ttttcctttaacgtatctggg

SEQ ID NO: 109115 - RNA, 21 nt, synthetic construct
  source 1..21: mol_type = other RNA
ttttcctttgcctaagtctca

SEQ ID NO: 109116 - RNA, 21 nt, synthetic construct
  source 1..21: mol_type = other RNA
ttttcctttgcctttcacttt

SEQ ID NO: 109117 - RNA, 21 nt, synthetic construct
  source 1..21: mol_type = other RNA
ttttcgaccaagttactagaa

SEQ ID NO: 109118 - RNA, 21 nt, synthetic construct
  source 1..21: mol_type = other RNA
ttttcgagactgagtaatatt

SEQ ID NO: 109119 - RNA, 21 nt, synthetic construct
  source 1..21: mol_type = other RNA
ttttcgtgtactgaaaccagt

SEQ ID NO: 109120 - RNA, 21 nt, synthetic construct
  source 1..21: mol_type = other RNA
ttttctaaactggttttcctg

SEQ ID NO: 109121 - RNA, 21 nt, synthetic construct
  source 1..21: mol_type = other RNA
ttttctaaattgaacagccta

SEQ ID NO: 109122 - RNA, 21 nt, synthetic construct
  source 1..21: mol_type = other RNA
ttttctaagagccaaagacat

SEQ ID NO: 109123 - RNA, 21 nt, synthetic construct
  source 1..21: mol_type = other RNA
ttttctaggaaccatattaga

SEQ ID NO: 109124 - RNA, 21 nt, synthetic construct
  source 1..21: mol_type = other RNA
ttttctaggtagtttctttga

SEQ ID NO: 109125 - RNA, 21 nt, synthetic construct
  source 1..21: mol_type = other RNA
ttttctagttagtttgttgac

SEQ ID NO: 109126 - RNA, 21 nt, synthetic construct
  source 1..21: mol_type = other RNA
ttttctagtttgaggtgtaca

SEQ ID NO: 109127 - RNA, 21 nt, synthetic construct
  source 1..21: mol_type = other RNA
ttttctatagtggctgcacca

SEQ ID NO: 109128 - RNA, 21 nt, synthetic construct
  source 1..21: mol_type = other RNA
ttttctattcattaccaggct

SEQ ID NO: 109129 - RNA, 21 nt, synthetic construct
  source 1..21: mol_type = other RNA
ttttctcccaaggttgcctgt

SEQ ID NO: 109130 - RNA, 21 nt, synthetic construct
  source 1..21: mol_type = other RNA
ttttctcctaagtcttcttct

SEQ ID NO: 109131 - RNA, 21 nt, synthetic construct
  source 1..21: mol_type = other RNA
ttttctccttctggaagattt

SEQ ID NO: 109132 - RNA, 21 nt, synthetic construct
  source 1..21: mol_type = other RNA
ttttctcgacacacaatccaa

SEQ ID NO: 109133 - RNA, 21 nt, synthetic construct
  source 1..21: mol_type = other RNA
ttttctcgtgcatgtctgcag

SEQ ID NO: 109134 - RNA, 21 nt, synthetic construct
  source 1..21: mol_type = other RNA
ttttctctcatgttgggtaaa

SEQ ID NO: 109135 - RNA, 21 nt, synthetic construct
  source 1..21: mol_type = other RNA
ttttctctccttgcacattag

SEQ ID NO: 109136 - RNA, 21 nt, synthetic construct
  source 1..21: mol_type = other RNA
ttttctgacaatttcagggag

SEQ ID NO: 109137 - RNA, 21 nt, synthetic construct
  source 1..21: mol_type = other RNA
ttttctgaccaactatttcac

SEQ ID NO: 109138 - RNA, 21 nt, synthetic construct
  source 1..21: mol_type = other RNA
ttttctgactctgtgcttgtg

SEQ ID NO: 109139 - RNA, 21 nt, synthetic construct
  source 1..21: mol_type = other RNA
ttttctgagcaactactattt

SEQ ID NO: 109140 - RNA, 21 nt, synthetic construct
  source 1..21: mol_type = other RNA
ttttctgagtatattctgtga

SEQ ID NO: 109141 - RNA, 21 nt, synthetic construct
  source 1..21: mol_type = other RNA
ttttctgattgcccattataa

SEQ ID NO: 109142 - RNA, 21 nt, synthetic construct
  source 1..21: mol_type = other RNA
ttttctgatttgctggctcag

SEQ ID NO: 109143 - RNA, 21 nt, synthetic construct
  source 1..21: mol_type = other RNA
ttttctgcaattggaagacta

SEQ ID NO: 109144 - RNA, 21 nt, synthetic construct
  source 1..21: mol_type = other RNA
ttttctgcatcttttgagggt

SEQ ID NO: 109145 - RNA, 21 nt, synthetic construct
  source 1..21: mol_type = other RNA
ttttctgcatttggtttgcaa

SEQ ID NO: 109146 - RNA, 21 nt, synthetic construct
  source 1..21: mol_type = other RNA
ttttctgcttctcaataagga

SEQ ID NO: 109147 - RNA, 21 nt, synthetic construct
  source 1..21: mol_type = other RNA
ttttctggaaactcaaaccca

SEQ ID NO: 109148 - RNA, 21 nt, synthetic construct
  source 1..21: mol_type = other RNA
ttttctggaccacaatcttac

SEQ ID NO: 109149 - RNA, 21 nt, synthetic construct
  source 1..21: mol_type = other RNA
ttttctggaggctagaagtcc

SEQ ID NO: 109150 - RNA, 21 nt, synthetic construct
  source 1..21: mol_type = other RNA
ttttctggttttctggaggct

SEQ ID NO: 109151 - RNA, 21 nt, synthetic construct
  source 1..21: mol_type = other RNA
ttttctgtagaatatccaagc

SEQ ID NO: 109152 - RNA, 21 nt, synthetic construct
  source 1..21: mol_type = other RNA
ttttctgtcattctgcagttt

SEQ ID NO: 109153 - RNA, 21 nt, synthetic construct
  source 1..21: mol_type = other RNA
ttttcttaccctttactcaga

SEQ ID NO: 109154 - RNA, 21 nt, synthetic construct
  source 1..21: mol_type = other RNA
ttttcttacctaagcatcgtg

SEQ ID NO: 109155 - RNA, 21 nt, synthetic construct
  source 1..21: mol_type = other RNA
ttttcttagttccattattcc

SEQ ID NO: 109156 - RNA, 21 nt, synthetic construct
  source 1..21: mol_type = other RNA
ttttcttatctaggcgaaata

SEQ ID NO: 109157 - RNA, 21 nt, synthetic construct
  source 1..21: mol_type = other RNA
ttttcttcatggactagactg

SEQ ID NO: 109158 - RNA, 21 nt, synthetic construct
  source 1..21: mol_type = other RNA
ttttcttcccatctcactcac

SEQ ID NO: 109159 - RNA, 21 nt, synthetic construct
  source 1..21: mol_type = other RNA
ttttcttcttgttttgttctc

SEQ ID NO: 109160 - RNA, 21 nt, synthetic construct
  source 1..21: mol_type = other RNA
ttttcttgctttgctgcccca

SEQ ID NO: 109161 - RNA, 21 nt, synthetic construct
  source 1..21: mol_type = other RNA
ttttcttggtggtaactgatg

SEQ ID NO: 109162 - RNA, 21 nt, synthetic construct
  source 1..21: mol_type = other RNA
ttttcttgtgggtattttgtt

SEQ ID NO: 109163 - RNA, 21 nt, synthetic construct
  source 1..21: mol_type = other RNA
ttttctttcgcatcattcaaa

SEQ ID NO: 109164 - RNA, 21 nt, synthetic construct
  source 1..21: mol_type = other RNA
ttttctttgagtagttcatgt

SEQ ID NO: 109165 - RNA, 21 nt, synthetic construct
  source 1..21: mol_type = other RNA
ttttgaaaaaacttcccttag

SEQ ID NO: 109166 - RNA, 21 nt, synthetic construct
  source 1..21: mol_type = other RNA
ttttgaaaaacagatcttggc

SEQ ID NO: 109167 - RNA, 21 nt, synthetic construct
  source 1..21: mol_type = other RNA
ttttgaaaagaacaacatggt

SEQ ID NO: 109168 - RNA, 21 nt, synthetic construct
  source 1..21: mol_type = other RNA
ttttgaaactgagcatcccag

SEQ ID NO: 109169 - RNA, 21 nt, synthetic construct
  source 1..21: mol_type = other RNA
ttttgaacaagagcgtcgtac

SEQ ID NO: 109170 - RNA, 21 nt, synthetic construct
  source 1..21: mol_type = other RNA
ttttgaacactctgcaatttt

SEQ ID NO: 109171 - RNA, 21 nt, synthetic construct
  source 1..21: mol_type = other RNA
ttttgaacgaatgaaaacaca

SEQ ID NO: 109172 - RNA, 21 nt, synthetic construct
  source 1..21: mol_type = other RNA
ttttgaagaaagttttgcagt

SEQ ID NO: 109173 - RNA, 21 nt, synthetic construct
  source 1..21: mol_type = other RNA
ttttgaatcatgggagccaaa

SEQ ID NO: 109174 - RNA, 21 nt, synthetic construct
  source 1..21: mol_type = other RNA
ttttgacagatgagactctta

SEQ ID NO: 109175 - RNA, 21 nt, synthetic construct
  source 1..21: mol_type = other RNA
ttttgacagccacgtgtattg

SEQ ID NO: 109176 - RNA, 21 nt, synthetic construct
  source 1..21: mol_type = other RNA
ttttgacgcgcaacaattcaa

SEQ ID NO: 109177 - RNA, 21 nt, synthetic construct
  source 1..21: mol_type = other RNA
ttttgactcagtacttccctc

SEQ ID NO: 109178 - RNA, 21 nt, synthetic construct
  source 1..21: mol_type = other RNA
ttttgagacacggtctcacac

SEQ ID NO: 109179 - RNA, 21 nt, synthetic construct
  source 1..21: mol_type = other RNA
ttttgagacagattctctgtc

SEQ ID NO: 109180 - RNA, 21 nt, synthetic construct
  source 1..21: mol_type = other RNA
ttttgagacagggtctcactc

SEQ ID NO: 109181 - RNA, 21 nt, synthetic construct
  source 1..21: mol_type = other RNA
ttttgagacctcaggcagtct

SEQ ID NO: 109182 - RNA, 21 nt, synthetic construct
  source 1..21: mol_type = other RNA
ttttgagacggaatcttaccc

SEQ ID NO: 109183 - RNA, 21 nt, synthetic construct
  source 1..21: mol_type = other RNA
ttttgagagtgcagtatgtag

SEQ ID NO: 109184 - RNA, 21 nt, synthetic construct
  source 1..21: mol_type = other RNA
ttttgagatttgagtcttgct

SEQ ID NO: 109185 - RNA, 21 nt, synthetic construct
  source 1..21: mol_type = other RNA
ttttgaggcagagagatggtg

SEQ ID NO: 109186 - RNA, 21 nt, synthetic construct
  source 1..21: mol_type = other RNA
ttttgaggcttttggattttc

SEQ ID NO: 109187 - RNA, 21 nt, synthetic construct
  source 1..21: mol_type = other RNA
ttttgagtggcatcatactgg

SEQ ID NO: 109188 - RNA, 21 nt, synthetic construct
  source 1..21: mol_type = other RNA
ttttgagtgtaaggtgtttgg

SEQ ID NO: 109189 - RNA, 21 nt, synthetic construct
  source 1..21: mol_type = other RNA
ttttgagttattgcataggga

SEQ ID NO: 109190 - RNA, 21 nt, synthetic construct
  source 1..21: mol_type = other RNA
ttttgagtttggtgtatttag

SEQ ID NO: 109191 - RNA, 21 nt, synthetic construct
  source 1..21: mol_type = other RNA
ttttgatagttgcagattcat

SEQ ID NO: 109192 - RNA, 21 nt, synthetic construct
  source 1..21: mol_type = other RNA
ttttgatcatcgcattacgag

SEQ ID NO: 109193 - RNA, 21 nt, synthetic construct
  source 1..21: mol_type = other RNA
ttttgattactgactcaatct

SEQ ID NO: 109194 - RNA, 21 nt, synthetic construct
  source 1..21: mol_type = other RNA
ttttgcaaaccaaatgcagaa

SEQ ID NO: 109195 - RNA, 21 nt, synthetic construct
  source 1..21: mol_type = other RNA
ttttgcaagatgcataagttc

SEQ ID NO: 109196 - RNA, 21 nt, synthetic construct
  source 1..21: mol_type = other RNA
ttttgcaagattaatcttgtg

SEQ ID NO: 109197 - RNA, 21 nt, synthetic construct
  source 1..21: mol_type = other RNA
ttttgcagagacggggtccca

SEQ ID NO: 109198 - RNA, 21 nt, synthetic construct
  source 1..21: mol_type = other RNA
ttttgcagagatgaggtctcg

SEQ ID NO: 109199 - RNA, 21 nt, synthetic construct
  source 1..21: mol_type = other RNA
ttttgcagttggggactctta

SEQ ID NO: 109200 - RNA, 21 nt, synthetic construct
  source 1..21: mol_type = other RNA
ttttgccaaattatttgagag

SEQ ID NO: 109201 - RNA, 21 nt, synthetic construct
  source 1..21: mol_type = other RNA
ttttgccaagtataagatgat

SEQ ID NO: 109202 - RNA, 21 nt, synthetic construct
  source 1..21: mol_type = other RNA
ttttgccagctaacttttaac

SEQ ID NO: 109203 - RNA, 21 nt, synthetic construct
  source 1..21: mol_type = other RNA
ttttgccagtgttttaaagca

SEQ ID NO: 109204 - RNA, 21 nt, synthetic construct
  source 1..21: mol_type = other RNA
ttttgcccactcttatatcct

SEQ ID NO: 109205 - RNA, 21 nt, synthetic construct
  source 1..21: mol_type = other RNA
ttttgcctctttgctaataag

SEQ ID NO: 109206 - RNA, 21 nt, synthetic construct
  source 1..21: mol_type = other RNA
ttttgcctggatgaatgcagt

SEQ ID NO: 109207 - RNA, 21 nt, synthetic construct
  source 1..21: mol_type = other RNA
ttttgcctttcgcttttggag

SEQ ID NO: 109208 - RNA, 21 nt, synthetic construct
  source 1..21: mol_type = other RNA
ttttgctcacacttactaaat

SEQ ID NO: 109209 - RNA, 21 nt, synthetic construct
  source 1..21: mol_type = other RNA
ttttgctgagggaatttttct

SEQ ID NO: 109210 - RNA, 21 nt, synthetic construct
  source 1..21: mol_type = other RNA
ttttgctgcatcccaagggtt

SEQ ID NO: 109211 - RNA, 21 nt, synthetic construct
  source 1..21: mol_type = other RNA
ttttgctgccaagtcagcact

SEQ ID NO: 109212 - RNA, 21 nt, synthetic construct
  source 1..21: mol_type = other RNA
ttttgctgtatacccaggtgt

SEQ ID NO: 109213 - RNA, 21 nt, synthetic construct
  source 1..21: mol_type = other RNA
ttttgcttaaagttggtcctg

SEQ ID NO: 109214 - RNA, 21 nt, synthetic construct
  source 1..21: mol_type = other RNA
ttttgcttactgtagcattga

SEQ ID NO: 109215 - RNA, 21 nt, synthetic construct
  source 1..21: mol_type = other RNA
ttttgcttcgaagcttattaa

SEQ ID NO: 109216 - RNA, 21 nt, synthetic construct
  source 1..21: mol_type = other RNA
ttttgctttgggtctatagtt

SEQ ID NO: 109217 - RNA, 21 nt, synthetic construct
  source 1..21: mol_type = other RNA
ttttgcttttgctttgggtct

SEQ ID NO: 109218 - RNA, 21 nt, synthetic construct
  source 1..21: mol_type = other RNA
ttttggaagactatgagaagg

SEQ ID NO: 109219 - RNA, 21 nt, synthetic construct
  source 1..21: mol_type = other RNA
ttttggaagcatgtggccagg

SEQ ID NO: 109220 - RNA, 21 nt, synthetic construct
  source 1..21: mol_type = other RNA
ttttggaatttaaggggtaaa

SEQ ID NO: 109221 - RNA, 21 nt, synthetic construct
  source 1..21: mol_type = other RNA
ttttggatgcagatttctttt

SEQ ID NO: 109222 - RNA, 21 nt, synthetic construct
  source 1..21: mol_type = other RNA
ttttggattgcgattgtttca

SEQ ID NO: 109223 - RNA, 21 nt, synthetic construct
  source 1..21: mol_type = other RNA
ttttggcaaattgtcagattt

SEQ ID NO: 109224 - RNA, 21 nt, synthetic construct
  source 1..21: mol_type = other RNA
ttttggcagcgtaactccatc

SEQ ID NO: 109225 - RNA, 21 nt, synthetic construct
  source 1..21: mol_type = other RNA
ttttggcatacaactgctcat

SEQ ID NO: 109226 - RNA, 21 nt, synthetic construct
  source 1..21: mol_type = other RNA
ttttgggatcacacttgatgg

SEQ ID NO: 109227 - RNA, 21 nt, synthetic construct
  source 1..21: mol_type = other RNA
ttttgggatctgtcatgtttg

SEQ ID NO: 109228 - RNA, 21 nt, synthetic construct
  source 1..21: mol_type = other RNA
ttttgggcctttctgtttgtt

SEQ ID NO: 109229 - RNA, 21 nt, synthetic construct
  source 1..21: mol_type = other RNA
ttttggggccatctgaattca

SEQ ID NO: 109230 - RNA, 21 nt, synthetic construct
  source 1..21: mol_type = other RNA
ttttgggggaagagagcattg

SEQ ID NO: 109231 - RNA, 21 nt, synthetic construct
  source 1..21: mol_type = other RNA
ttttggtaaaatgtggcaaat

SEQ ID NO: 109232 - RNA, 21 nt, synthetic construct
  source 1..21: mol_type = other RNA
ttttggtaatgggaaagacag

SEQ ID NO: 109233 - RNA, 21 nt, synthetic construct
  source 1..21: mol_type = other RNA
ttttggtagaggattccaggt

SEQ ID NO: 109234 - RNA, 21 nt, synthetic construct
  source 1..21: mol_type = other RNA
ttttggtagataccagaccct

SEQ ID NO: 109235 - RNA, 21 nt, synthetic construct
  source 1..21: mol_type = other RNA
ttttggtatgttgtgttttca

SEQ ID NO: 109236 - RNA, 21 nt, synthetic construct
  source 1..21: mol_type = other RNA
ttttggtcttaccctctagct

SEQ ID NO: 109237 - RNA, 21 nt, synthetic construct
  source 1..21: mol_type = other RNA
ttttggtgtttttctaggtag

SEQ ID NO: 109238 - RNA, 21 nt, synthetic construct
  source 1..21: mol_type = other RNA
ttttggttcacttgaaacctg

SEQ ID NO: 109239 - RNA, 21 nt, synthetic construct
  source 1..21: mol_type = other RNA
ttttgtaacgtgtatagcttt

SEQ ID NO: 109240 - RNA, 21 nt, synthetic construct
  source 1..21: mol_type = other RNA
ttttgtaataacttggagaac

SEQ ID NO: 109241 - RNA, 21 nt, synthetic construct
  source 1..21: mol_type = other RNA
ttttgtactacttgtcaggtg

SEQ ID NO: 109242 - RNA, 21 nt, synthetic construct
  source 1..21: mol_type = other RNA
ttttgtagaccctgttagtcc

SEQ ID NO: 109243 - RNA, 21 nt, synthetic construct
  source 1..21: mol_type = other RNA
ttttgtagagacagaatctta

SEQ ID NO: 109244 - RNA, 21 nt, synthetic construct
  source 1..21: mol_type = other RNA
ttttgtagagggaatttgttt

SEQ ID NO: 109245 - RNA, 21 nt, synthetic construct
  source 1..21: mol_type = other RNA
ttttgtagctaatatctttgg

SEQ ID NO: 109246 - RNA, 21 nt, synthetic construct
  source 1..21: mol_type = other RNA
ttttgtagtgtcttaatccta

SEQ ID NO: 109247 - RNA, 21 nt, synthetic construct
  source 1..21: mol_type = other RNA
ttttgtatcctgagacttagg

SEQ ID NO: 109248 - RNA, 21 nt, synthetic construct
  source 1..21: mol_type = other RNA
ttttgtatcctgtttgagaag

SEQ ID NO: 109249 - RNA, 21 nt, synthetic construct
  source 1..21: mol_type = other RNA
ttttgtattctgacctaaagt

SEQ ID NO: 109250 - RNA, 21 nt, synthetic construct
  source 1..21: mol_type = other RNA
ttttgtcaagctatcagaatt

SEQ ID NO: 109251 - RNA, 21 nt, synthetic construct
  source 1..21: mol_type = other RNA
ttttgtcaagtgactccaagc

SEQ ID NO: 109252 - RNA, 21 nt, synthetic construct
  source 1..21: mol_type = other RNA
ttttgtcacacggaaaacatt

SEQ ID NO: 109253 - RNA, 21 nt, synthetic construct
  source 1..21: mol_type = other RNA
ttttgtccaccagacaaaaat

SEQ ID NO: 109254 - RNA, 21 nt, synthetic construct
  source 1..21: mol_type = other RNA
ttttgtctggaacacacatta

SEQ ID NO: 109255 - RNA, 21 nt, synthetic construct
  source 1..21: mol_type = other RNA
ttttgtctggtggacaaaaaa

SEQ ID NO: 109256 - RNA, 21 nt, synthetic construct
  source 1..21: mol_type = other RNA
ttttgtgacaagttcagcatc

SEQ ID NO: 109257 - RNA, 21 nt, synthetic construct
  source 1..21: mol_type = other RNA
ttttgtgagttttaactcttg

SEQ ID NO: 109258 - RNA, 21 nt, synthetic construct
  source 1..21: mol_type = other RNA
ttttgtgcaacataaataggg

SEQ ID NO: 109259 - RNA, 21 nt, synthetic construct
  source 1..21: mol_type = other RNA
ttttgtgcatcaaaggacact

SEQ ID NO: 109260 - RNA, 21 nt, synthetic construct
  source 1..21: mol_type = other RNA
ttttgtggagatggggacttg

SEQ ID NO: 109261 - RNA, 21 nt, synthetic construct
  source 1..21: mol_type = other RNA
ttttgtgggaattcagtcacc

SEQ ID NO: 109262 - RNA, 21 nt, synthetic construct
  source 1..21: mol_type = other RNA
ttttgtgtagaggtgaagtta

SEQ ID NO: 109263 - RNA, 21 nt, synthetic construct
  source 1..21: mol_type = other RNA
ttttgtgtcttctgtttttct

SEQ ID NO: 109264 - RNA, 21 nt, synthetic construct
  source 1..21: mol_type = other RNA
ttttgtgtttgtgaccagatc

SEQ ID NO: 109265 - RNA, 21 nt, synthetic construct
  source 1..21: mol_type = other RNA
ttttgttatggtaggtgcttt

SEQ ID NO: 109266 - RNA, 21 nt, synthetic construct
  source 1..21: mol_type = other RNA
ttttgttattagggtaatgct

SEQ ID NO: 109267 - RNA, 21 nt, synthetic construct
  source 1..21: mol_type = other RNA
ttttgttcaggagttttgcct

SEQ ID NO: 109268 - RNA, 21 nt, synthetic construct
  source 1..21: mol_type = other RNA
ttttgttctcgttcatgttca

SEQ ID NO: 109269 - RNA, 21 nt, synthetic construct
  source 1..21: mol_type = other RNA
ttttgttgacatcctttgcgt

SEQ ID NO: 109270 - RNA, 21 nt, synthetic construct
  source 1..21: mol_type = other RNA
ttttgttgcctgtagttttgg

SEQ ID NO: 109271 - RNA, 21 nt, synthetic construct
  source 1..21: mol_type = other RNA
ttttgttgttggtttgtgtgt

SEQ ID NO: 109272 - RNA, 21 nt, synthetic construct
  source 1..21: mol_type = other RNA
ttttgttgttgttgtttctga

SEQ ID NO: 109273 - RNA, 21 nt, synthetic construct
  source 1..21: mol_type = other RNA
ttttgtttatttgctgtcagg

SEQ ID NO: 109274 - RNA, 21 nt, synthetic construct
  source 1..21: mol_type = other RNA
ttttgtttgtttctgaggtgg

SEQ ID NO: 109275 - RNA, 21 nt, synthetic construct
  source 1..21: mol_type = other RNA
ttttgttttctccttctggaa

SEQ ID NO: 109276 - RNA, 21 nt, synthetic construct
  source 1..21: mol_type = other RNA
ttttgttttggtcaaaactgt

SEQ ID NO: 109277 - RNA, 21 nt, synthetic construct
  source 1..21: mol_type = other RNA
ttttgtttttctctccttgca

SEQ ID NO: 109278 - RNA, 21 nt, synthetic construct
  source 1..21: mol_type = other RNA
tttttaaaaactttttgggcc

SEQ ID NO: 109279 - RNA, 21 nt, synthetic construct
  source 1..21: mol_type = other RNA
tttttaaaaagcagctacctg

SEQ ID NO: 109280 - RNA, 21 nt, synthetic construct
  source 1..21: mol_type = other RNA
tttttaaaagagcgaagaggg

SEQ ID NO: 109281 - RNA, 21 nt, synthetic construct
  source 1..21: mol_type = other RNA
tttttaaacaggtgtaagaga

SEQ ID NO: 109282 - RNA, 21 nt, synthetic construct
  source 1..21: mol_type = other RNA
tttttaagtggcgctgtttgc

SEQ ID NO: 109283 - RNA, 21 nt, synthetic construct
  source 1..21: mol_type = other RNA
tttttaatctacaaaacaggg

SEQ ID NO: 109284 - RNA, 21 nt, synthetic construct
  source 1..21: mol_type = other RNA
tttttaatgtagatcctgagg

SEQ ID NO: 109285 - RNA, 21 nt, synthetic construct
  source 1..21: mol_type = other RNA
tttttacacttggagttttcc

SEQ ID NO: 109286 - RNA, 21 nt, synthetic construct
  source 1..21: mol_type = other RNA
tttttacatgtagttttccct

SEQ ID NO: 109287 - RNA, 21 nt, synthetic construct
  source 1..21: mol_type = other RNA
tttttacccaacatgagagaa

SEQ ID NO: 109288 - RNA, 21 nt, synthetic construct
  source 1..21: mol_type = other RNA
tttttacccggagaggtgaac

SEQ ID NO: 109289 - RNA, 21 nt, synthetic construct
  source 1..21: mol_type = other RNA
tttttacccgtggaaatactt

SEQ ID NO: 109290 - RNA, 21 nt, synthetic construct
  source 1..21: mol_type = other RNA
tttttacgatgaaattgacca

SEQ ID NO: 109291 - RNA, 21 nt, synthetic construct
  source 1..21: mol_type = other RNA
tttttactcatgtctacctgt

SEQ ID NO: 109292 - RNA, 21 nt, synthetic construct
  source 1..21: mol_type = other RNA
tttttactcgagggtagcttt

SEQ ID NO: 109293 - RNA, 21 nt, synthetic construct
  source 1..21: mol_type = other RNA
tttttactgtccaaacagtga

SEQ ID NO: 109294 - RNA, 21 nt, synthetic construct
  source 1..21: mol_type = other RNA
tttttactttgcgaaacacac

SEQ ID NO: 109295 - RNA, 21 nt, synthetic construct
  source 1..21: mol_type = other RNA
tttttagagagatgcctgtgc

SEQ ID NO: 109296 - RNA, 21 nt, synthetic construct
  source 1..21: mol_type = other RNA
tttttagcttcatataagtgg

SEQ ID NO: 109297 - RNA, 21 nt, synthetic construct
  source 1..21: mol_type = other RNA
tttttaggtagggataagaat

SEQ ID NO: 109298 - RNA, 21 nt, synthetic construct
  source 1..21: mol_type = other RNA
tttttagtaagaggtatcacc

SEQ ID NO: 109299 - RNA, 21 nt, synthetic construct
  source 1..21: mol_type = other RNA
tttttagtagagatgaggttt

SEQ ID NO: 109300 - RNA, 21 nt, synthetic construct
  source 1..21: mol_type = other RNA
tttttagtagtaagttgtgtc

SEQ ID NO: 109301 - RNA, 21 nt, synthetic construct
  source 1..21: mol_type = other RNA
tttttagtgactggcttaatg

SEQ ID NO: 109302 - RNA, 21 nt, synthetic construct
  source 1..21: mol_type = other RNA
tttttatatgcattaagccag

SEQ ID NO: 109303 - RNA, 21 nt, synthetic construct
  source 1..21: mol_type = other RNA
tttttatcaaaatcaaggtgc

SEQ ID NO: 109304 - RNA, 21 nt, synthetic construct
  source 1..21: mol_type = other RNA
tttttatgcatttggtctcat

SEQ ID NO: 109305 - RNA, 21 nt, synthetic construct
  source 1..21: mol_type = other RNA
tttttatgtgctttctcaaca

SEQ ID NO: 109306 - RNA, 21 nt, synthetic construct
  source 1..21: mol_type = other RNA
tttttattctgttctagctcc

SEQ ID NO: 109307 - RNA, 21 nt, synthetic construct
  source 1..21: mol_type = other RNA
tttttcacaaacacacaaacc

SEQ ID NO: 109308 - RNA, 21 nt, synthetic construct
  source 1..21: mol_type = other RNA
tttttcacactataacagatg

SEQ ID NO: 109309 - RNA, 21 nt, synthetic construct
  source 1..21: mol_type = other RNA
tttttcacattcttcaccatt

SEQ ID NO: 109310 - RNA, 21 nt, synthetic construct
  source 1..21: mol_type = other RNA
tttttcacattgcacagtctc

SEQ ID NO: 109311 - RNA, 21 nt, synthetic construct
  source 1..21: mol_type = other RNA
tttttcaccagcggcatacag

SEQ ID NO: 109312 - RNA, 21 nt, synthetic construct
  source 1..21: mol_type = other RNA
tttttcacttcgttcagttta

SEQ ID NO: 109313 - RNA, 21 nt, synthetic construct
  source 1..21: mol_type = other RNA
tttttcagattgaccttgtat

SEQ ID NO: 109314 - RNA, 21 nt, synthetic construct
  source 1..21: mol_type = other RNA
tttttcagcagcagagaagtg

SEQ ID NO: 109315 - RNA, 21 nt, synthetic construct
  source 1..21: mol_type = other RNA
tttttcagccctgatagatat

SEQ ID NO: 109316 - RNA, 21 nt, synthetic construct
  source 1..21: mol_type = other RNA
tttttcaggggggccactgga

SEQ ID NO: 109317 - RNA, 21 nt, synthetic construct
  source 1..21: mol_type = other RNA
tttttcaggttcaagcgactc

SEQ ID NO: 109318 - RNA, 21 nt, synthetic construct
  source 1..21: mol_type = other RNA
tttttcatccaaacagaaacc

SEQ ID NO: 109319 - RNA, 21 nt, synthetic construct
  source 1..21: mol_type = other RNA
tttttccaacagtttacacgc

SEQ ID NO: 109320 - RNA, 21 nt, synthetic construct
  source 1..21: mol_type = other RNA
tttttccacataaagtcttgc

SEQ ID NO: 109321 - RNA, 21 nt, synthetic construct
  source 1..21: mol_type = other RNA
tttttccacataattgaaccc

SEQ ID NO: 109322 - RNA, 21 nt, synthetic construct
  source 1..21: mol_type = other RNA
tttttccaggaccaatttacc

SEQ ID NO: 109323 - RNA, 21 nt, synthetic construct
  source 1..21: mol_type = other RNA
tttttcccagatacgttaaag

SEQ ID NO: 109324 - RNA, 21 nt, synthetic construct
  source 1..21: mol_type = other RNA
tttttcccccctggaacaatc

SEQ ID NO: 109325 - RNA, 21 nt, synthetic construct
  source 1..21: mol_type = other RNA
tttttcccgctacacaagtat

SEQ ID NO: 109326 - RNA, 21 nt, synthetic construct
  source 1..21: mol_type = other RNA
tttttccgtctagccacttcc

SEQ ID NO: 109327 - RNA, 21 nt, synthetic construct
  source 1..21: mol_type = other RNA
tttttcctcccttcagcctgt

SEQ ID NO: 109328 - RNA, 21 nt, synthetic construct
  source 1..21: mol_type = other RNA
tttttccttatggatatctgg

SEQ ID NO: 109329 - RNA, 21 nt, synthetic construct
  source 1..21: mol_type = other RNA
tttttccttctttgggggaag

SEQ ID NO: 109330 - RNA, 21 nt, synthetic construct
  source 1..21: mol_type = other RNA
tttttcctttgcctaagtctc

SEQ ID NO: 109331 - RNA, 21 nt, synthetic construct
  source 1..21: mol_type = other RNA
tttttcctttgcctttcactt

SEQ ID NO: 109332 - RNA, 21 nt, synthetic construct
  source 1..21: mol_type = other RNA
tttttctaaactggttttcct

SEQ ID NO: 109333 - RNA, 21 nt, synthetic construct
  source 1..21: mol_type = other RNA
tttttctaggtagtttctttg

SEQ ID NO: 109334 - RNA, 21 nt, synthetic construct
  source 1..21: mol_type = other RNA
tttttctagtttgaggtgtac

SEQ ID NO: 109335 - RNA, 21 nt, synthetic construct
  source 1..21: mol_type = other RNA
tttttctcgacacacaatcca

SEQ ID NO: 109336 - RNA, 21 nt, synthetic construct
  source 1..21: mol_type = other RNA
tttttctctccttgcacatta

SEQ ID NO: 109337 - RNA, 21 nt, synthetic construct
  source 1..21: mol_type = other RNA
tttttctgaccaactatttca

SEQ ID NO: 109338 - RNA, 21 nt, synthetic construct
  source 1..21: mol_type = other RNA
tttttctgagtatattctgtg

SEQ ID NO: 109339 - RNA, 21 nt, synthetic construct
  source 1..21: mol_type = other RNA
tttttctgattgcccattata

SEQ ID NO: 109340 - RNA, 21 nt, synthetic construct
  source 1..21: mol_type = other RNA
tttttctgcaattggaagact

SEQ ID NO: 109341 - RNA, 21 nt, synthetic construct
  source 1..21: mol_type = other RNA
tttttctgcatcttttgaggg

SEQ ID NO: 109342 - RNA, 21 nt, synthetic construct
  source 1..21: mol_type = other RNA
tttttctggaccacaatctta

SEQ ID NO: 109343 - RNA, 21 nt, synthetic construct
  source 1..21: mol_type = other RNA
tttttcttacctaagcatcgt

SEQ ID NO: 109344 - RNA, 21 nt, synthetic construct
  source 1..21: mol_type = other RNA
tttttcttcccatctcactca

SEQ ID NO: 109345 - RNA, 21 nt, synthetic construct
  source 1..21: mol_type = other RNA
tttttcttgctttgctgcccc

SEQ ID NO: 109346 - RNA, 21 nt, synthetic construct
  source 1..21: mol_type = other RNA
tttttcttggtggtaactgat

SEQ ID NO: 109347 - RNA, 21 nt, synthetic construct
  source 1..21: mol_type = other RNA
tttttcttgtgggtattttgt

SEQ ID NO: 109348 - RNA, 21 nt, synthetic construct
  source 1..21: mol_type = other RNA
tttttctttcgcatcattcaa

SEQ ID NO: 109349 - RNA, 21 nt, synthetic construct
  source 1..21: mol_type = other RNA
tttttgaaaagaacaacatgg

SEQ ID NO: 109350 - RNA, 21 nt, synthetic construct
  source 1..21: mol_type = other RNA
tttttgaacaagagcgtcgta

SEQ ID NO: 109351 - RNA, 21 nt, synthetic construct
  source 1..21: mol_type = other RNA
tttttgacagatgagactctt

SEQ ID NO: 109352 - RNA, 21 nt, synthetic construct
  source 1..21: mol_type = other RNA
tttttgacagccacgtgtatt

SEQ ID NO: 109353 - RNA, 21 nt, synthetic construct
  source 1..21: mol_type = other RNA
tttttgagacacggtctcaca

SEQ ID NO: 109354 - RNA, 21 nt, synthetic construct
  source 1..21: mol_type = other RNA
tttttgagacagattctctgt

SEQ ID NO: 109355 - RNA, 21 nt, synthetic construct
  source 1..21: mol_type = other RNA
tttttgagacggaatcttacc

SEQ ID NO: 109356 - RNA, 21 nt, synthetic construct
  source 1..21: mol_type = other RNA
tttttgagatttgagtcttgc

SEQ ID NO: 109357 - RNA, 21 nt, synthetic construct
  source 1..21: mol_type = other RNA
tttttgattactgactcaatc

SEQ ID NO: 109358 - RNA, 21 nt, synthetic construct
  source 1..21: mol_type = other RNA
tttttgcaaaccaaatgcaga

SEQ ID NO: 109359 - RNA, 21 nt, synthetic construct
  source 1..21: mol_type = other RNA
tttttgcagagacggggtccc

SEQ ID NO: 109360 - RNA, 21 nt, synthetic construct
  source 1..21: mol_type = other RNA
tttttgccaagtataagatga

SEQ ID NO: 109361 - RNA, 21 nt, synthetic construct
  source 1..21: mol_type = other RNA
tttttgccagtgttttaaagc

SEQ ID NO: 109362 - RNA, 21 nt, synthetic construct
  source 1..21: mol_type = other RNA
tttttgcccactcttatatcc

SEQ ID NO: 109363 - RNA, 21 nt, synthetic construct
  source 1..21: mol_type = other RNA
tttttgcctttcgcttttgga

SEQ ID NO: 109364 - RNA, 21 nt, synthetic construct
  source 1..21: mol_type = other RNA
tttttgctcacacttactaaa

SEQ ID NO: 109365 - RNA, 21 nt, synthetic construct
  source 1..21: mol_type = other RNA
tttttggcatacaactgctca

SEQ ID NO: 109366 - RNA, 21 nt, synthetic construct
  source 1..21: mol_type = other RNA
tttttgggatcacacttgatg

SEQ ID NO: 109367 - RNA, 21 nt, synthetic construct
  source 1..21: mol_type = other RNA
tttttgggatctgtcatgttt

SEQ ID NO: 109368 - RNA, 21 nt, synthetic construct
  source 1..21: mol_type = other RNA
tttttgggcctttctgtttgt

SEQ ID NO: 109369 - RNA, 21 nt, synthetic construct
  source 1..21: mol_type = other RNA
tttttggtagaggattccagg

SEQ ID NO: 109370 - RNA, 21 nt, synthetic construct
  source 1..21: mol_type = other RNA
tttttggtagataccagaccc

SEQ ID NO: 109371 - RNA, 21 nt, synthetic construct
  source 1..21: mol_type = other RNA
tttttggtgtttttctaggta

SEQ ID NO: 109372 - RNA, 21 nt, synthetic construct
  source 1..21: mol_type = other RNA
tttttggttcacttgaaacct

SEQ ID NO: 109373 - RNA, 21 nt, synthetic construct
  source 1..21: mol_type = other RNA
tttttgtagagacagaatctt

SEQ ID NO: 109374 - RNA, 21 nt, synthetic construct
  source 1..21: mol_type = other RNA
tttttgtagtgtcttaatcct

SEQ ID NO: 109375 - RNA, 21 nt, synthetic construct
  source 1..21: mol_type = other RNA
tttttgtatcctgtttgagaa

SEQ ID NO: 109376 - RNA, 21 nt, synthetic construct
  source 1..21: mol_type = other RNA
tttttgtattctgacctaaag

SEQ ID NO: 109377 - RNA, 21 nt, synthetic construct
  source 1..21: mol_type = other RNA
tttttgtcaagtgactccaag

SEQ ID NO: 109378 - RNA, 21 nt, synthetic construct
  source 1..21: mol_type = other RNA
tttttgtcacacggaaaacat

SEQ ID NO: 109379 - RNA, 21 nt, synthetic construct
  source 1..21: mol_type = other RNA
tttttgtccaccagacaaaaa

SEQ ID NO: 109380 - RNA, 21 nt, synthetic construct
  source 1..21: mol_type = other RNA
tttttgtctggaacacacatt

SEQ ID NO: 109381 - RNA, 21 nt, synthetic construct
  source 1..21: mol_type = other RNA
tttttgtctggtggacaaaaa

SEQ ID NO: 109382 - RNA, 21 nt, synthetic construct
  source 1..21: mol_type = other RNA
tttttgtggagatggggactt

SEQ ID NO: 109383 - RNA, 21 nt, synthetic construct
  source 1..21: mol_type = other RNA
tttttgtgtagaggtgaagtt

SEQ ID NO: 109384 - RNA, 21 nt, synthetic construct
  source 1..21: mol_type = other RNA
tttttgttatggtaggtgctt

SEQ ID NO: 109385 - RNA, 21 nt, synthetic construct
  source 1..21: mol_type = other RNA
tttttgttgttggtttgtgtg

SEQ ID NO: 109386 - RNA, 21 nt, synthetic construct
  source 1..21: mol_type = other RNA
tttttgtttgtttctgaggtg

SEQ ID NO: 109387 - RNA, 21 nt, synthetic construct
  source 1..21: mol_type = other RNA
tttttgttttctccttctgga

SEQ ID NO: 109388 - RNA, 21 nt, synthetic construct
  source 1..21: mol_type = other RNA
tttttgttttggtcaaaactg

SEQ ID NO: 109389 - RNA, 21 nt, synthetic construct
  source 1..21: mol_type = other RNA
ttttttaagtggcgctgtttg

SEQ ID NO: 109390 - RNA, 21 nt, synthetic construct
  source 1..21: mol_type = other RNA
ttttttaatgtagatcctgag

SEQ ID NO: 109391 - RNA, 21 nt, synthetic construct
  source 1..21: mol_type = other RNA
ttttttactgtccaaacagtg

SEQ ID NO: 109392 - RNA, 21 nt, synthetic construct
  source 1..21: mol_type = other RNA
ttttttatgtgctttctcaac

SEQ ID NO: 109393 - RNA, 21 nt, synthetic construct
  source 1..21: mol_type = other RNA
ttttttcacattgcacagtct

SEQ ID NO: 109394 - RNA, 21 nt, synthetic construct
  source 1..21: mol_type = other RNA
ttttttcaccagcggcataca

SEQ ID NO: 109395 - RNA, 21 nt, synthetic construct
  source 1..21: mol_type = other RNA
ttttttcacttcgttcagttt

SEQ ID NO: 109396 - RNA, 21 nt, synthetic construct
  source 1..21: mol_type = other RNA
ttttttccacataattgaacc

SEQ ID NO: 109397 - RNA, 21 nt, synthetic construct
  source 1..21: mol_type = other RNA
ttttttcccagatacgttaaa

SEQ ID NO: 109398 - RNA, 21 nt, synthetic construct
  source 1..21: mol_type = other RNA
ttttttcccccctggaacaat

SEQ ID NO: 109399 - RNA, 21 nt, synthetic construct
  source 1..21: mol_type = other RNA
ttttttcccgctacacaagta

SEQ ID NO: 109400 - RNA, 21 nt, synthetic construct
  source 1..21: mol_type = other RNA
ttttttcctcccttcagcctg

SEQ ID NO: 109401 - RNA, 21 nt, synthetic construct
  source 1..21: mol_type = other RNA
ttttttccttatggatatctg

SEQ ID NO: 109402 - RNA, 21 nt, synthetic construct
  source 1..21: mol_type = other RNA
ttttttccttctttgggggaa

SEQ ID NO: 109403 - RNA, 21 nt, synthetic construct
  source 1..21: mol_type = other RNA
ttttttcctttgcctttcact

SEQ ID NO: 109404 - RNA, 21 nt, synthetic construct
  source 1..21: mol_type = other RNA
ttttttctgattgcccattat

SEQ ID NO: 109405 - RNA, 21 nt, synthetic construct
  source 1..21: mol_type = other RNA
ttttttctggaccacaatctt

SEQ ID NO: 109406 - RNA, 21 nt, synthetic construct
  source 1..21: mol_type = other RNA
ttttttcttcccatctcactc

SEQ ID NO: 109407 - RNA, 21 nt, synthetic construct
  source 1..21: mol_type = other RNA
ttttttctttcgcatcattca

SEQ ID NO: 109408 - RNA, 21 nt, synthetic construct
  source 1..21: mol_type = other RNA
ttttttgagacacggtctcac

SEQ ID NO: 109409 - RNA, 21 nt, synthetic construct
  source 1..21: mol_type = other RNA
ttttttgagacagattctctg

SEQ ID NO: 109410 - RNA, 21 nt, synthetic construct
  source 1..21: mol_type = other RNA
ttttttgagacggaatcttac

SEQ ID NO: 109411 - RNA, 21 nt, synthetic construct
  source 1..21: mol_type = other RNA
ttttttgagatttgagtcttg

SEQ ID NO: 109412 - RNA, 21 nt, synthetic construct
  source 1..21: mol_type = other RNA
ttttttgcagagacggggtcc

SEQ ID NO: 109413 - RNA, 21 nt, synthetic construct
  source 1..21: mol_type = other RNA
ttttttgccaagtataagatg

SEQ ID NO: 109414 - RNA, 21 nt, synthetic construct
  source 1..21: mol_type = other RNA
ttttttgcccactcttatatc

SEQ ID NO: 109415 - RNA, 21 nt, synthetic construct
  source 1..21: mol_type = other RNA
ttttttgcctttcgcttttgg

SEQ ID NO: 109416 - RNA, 21 nt, synthetic construct
  source 1..21: mol_type = other RNA
ttttttggcatacaactgctc

SEQ ID NO: 109417 - RNA, 21 nt, synthetic construct
  source 1..21: mol_type = other RNA
ttttttgggatcacacttgat

SEQ ID NO: 109418 - RNA, 21 nt, synthetic construct
  source 1..21: mol_type = other RNA
ttttttggtagaggattccag

SEQ ID NO: 109419 - RNA, 21 nt, synthetic construct
  source 1..21: mol_type = other RNA
ttttttggtagataccagacc

SEQ ID NO: 109420 - RNA, 21 nt, synthetic construct
  source 1..21: mol_type = other RNA
ttttttggtgtttttctaggt

SEQ ID NO: 109421 - RNA, 21 nt, synthetic construct
  source 1..21: mol_type = other RNA
ttttttgtagagacagaatct

SEQ ID NO: 109422 - RNA, 21 nt, synthetic construct
  source 1..21: mol_type = other RNA
ttttttgtagtgtcttaatcc

SEQ ID NO: 109423 - RNA, 21 nt, synthetic construct
  source 1..21: mol_type = other RNA
ttttttgtccaccagacaaaa

SEQ ID NO: 109424 - RNA, 21 nt, synthetic construct
  source 1..21: mol_type = other RNA
ttttttgtggagatggggact

SEQ ID NO: 109425 - RNA, 21 nt, synthetic construct
  source 1..21: mol_type = other RNA
ttttttgttatggtaggtgct

SEQ ID NO: 109426 - RNA, 21 nt, synthetic construct
  source 1..21: mol_type = other RNA
ttttttgttgttggtttgtgt

SEQ ID NO: 109427 - RNA, 21 nt, synthetic construct
  source 1..21: mol_type = other RNA
ttttttgtttgtttctgaggt

SEQ ID NO: 109428 - RNA, 22 nt, synthetic construct
  source 1..22: mol_type = other RNA
aaaaaacaaaaaaccactggat

SEQ ID NO: 109429 - RNA, 22 nt, synthetic construct
  source 1..22: mol_type = other RNA
aaaaaacaaaacaaaaccctgt

SEQ ID NO: 109430 - RNA, 22 nt, synthetic construct
  source 1..22: mol_type = other RNA
aaaaaacacagggactgatgaa

SEQ ID NO: 109431 - RNA, 22 nt, synthetic construct
  source 1..22: mol_type = other RNA
aaaaaacacctaaagatatgtg

SEQ ID NO: 109432 - RNA, 22 nt, synthetic construct
  source 1..22: mol_type = other RNA
aaaaaacagaaatgaaatggcc

SEQ ID NO: 109433 - RNA, 22 nt, synthetic construct
  source 1..22: mol_type = other RNA
aaaaaacagttgctattcaaca

SEQ ID NO: 109434 - RNA, 22 nt, synthetic construct
  source 1..22: mol_type = other RNA
aaaaaaccacgcagaacagtgt

SEQ ID NO: 109435 - RNA, 22 nt, synthetic construct
  source 1..22: mol_type = other RNA
aaaaaaccactggatacggaaa

SEQ ID NO: 109436 - RNA, 22 nt, synthetic construct
  source 1..22: mol_type = other RNA
aaaaaacccagacctgcacaaa

SEQ ID NO: 109437 - RNA, 22 nt, synthetic construct
  source 1..22: mol_type = other RNA
aaaaaacgcggcacttggtaag

SEQ ID NO: 109438 - RNA, 22 nt, synthetic construct
  source 1..22: mol_type = other RNA
aaaaaacgggttatacacacat

SEQ ID NO: 109439 - RNA, 22 nt, synthetic construct
  source 1..22: mol_type = other RNA
aaaaaactacttcgtgtgtgga

SEQ ID NO: 109440 - RNA, 22 nt, synthetic construct
  source 1..22: mol_type = other RNA
aaaaaacttatgcaagatggca

SEQ ID NO: 109441 - RNA, 22 nt, synthetic construct
  source 1..22: mol_type = other RNA
aaaaaacttcccttagctctca

SEQ ID NO: 109442 - RNA, 22 nt, synthetic construct
  source 1..22: mol_type = other RNA
aaaaaacttcgaactaaggaaa

SEQ ID NO: 109443 - RNA, 22 nt, synthetic construct
  source 1..22: mol_type = other RNA
aaaaaagaacactataagccaa

SEQ ID NO: 109444 - RNA, 22 nt, synthetic construct
  source 1..22: mol_type = other RNA
aaaaaagaaggccgtccctatt

SEQ ID NO: 109445 - RNA, 22 nt, synthetic construct
  source 1..22: mol_type = other RNA
aaaaaagacagagctagaacta

SEQ ID NO: 109446 - RNA, 22 nt, synthetic construct
  source 1..22: mol_type = other RNA
aaaaaagacgatattcctatca

SEQ ID NO: 109447 - RNA, 22 nt, synthetic construct
  source 1..22: mol_type = other RNA
aaaaaagagaacttgcacataa

SEQ ID NO: 109448 - RNA, 22 nt, synthetic construct
  source 1..22: mol_type = other RNA
aaaaaagatgtgtaccaaaagt

SEQ ID NO: 109449 - RNA, 22 nt, synthetic construct
  source 1..22: mol_type = other RNA
aaaaaagatgttttcagttgca

SEQ ID NO: 109450 - RNA, 22 nt, synthetic construct
  source 1..22: mol_type = other RNA
aaaaaagcaccagttatcacca

SEQ ID NO: 109451 - RNA, 22 nt, synthetic construct
  source 1..22: mol_type = other RNA
aaaaaagcagacagaaagacag

SEQ ID NO: 109452 - RNA, 22 nt, synthetic construct
  source 1..22: mol_type = other RNA
aaaaaagctatacacgttacaa

SEQ ID NO: 109453 - RNA, 22 nt, synthetic construct
  source 1..22: mol_type = other RNA
aaaaaagctcagtgtgtttttg

SEQ ID NO: 109454 - RNA, 22 nt, synthetic construct
  source 1..22: mol_type = other RNA
aaaaaaggaatctgacctaagc

SEQ ID NO: 109455 - RNA, 22 nt, synthetic construct
  source 1..22: mol_type = other RNA
aaaaaaggaatctgggccgggc

SEQ ID NO: 109456 - RNA, 22 nt, synthetic construct
  source 1..22: mol_type = other RNA
aaaaaaggacacaaattatgac

SEQ ID NO: 109457 - RNA, 22 nt, synthetic construct
  source 1..22: mol_type = other RNA
aaaaaaggaccatctgttaaaa

SEQ ID NO: 109458 - RNA, 22 nt, synthetic construct
  source 1..22: mol_type = other RNA
aaaaaagggtgggggcatcaaa

SEQ ID NO: 109459 - RNA, 22 nt, synthetic construct
  source 1..22: mol_type = other RNA
aaaaaaggtgctgttgtatttt

SEQ ID NO: 109460 - RNA, 22 nt, synthetic construct
  source 1..22: mol_type = other RNA
aaaaaaggtttttgaacaagag

SEQ ID NO: 109461 - RNA, 22 nt, synthetic construct
  source 1..22: mol_type = other RNA
aaaaaagtcatgacctgctttc

SEQ ID NO: 109462 - RNA, 22 nt, synthetic construct
  source 1..22: mol_type = other RNA
aaaaaagttttttcctttgcct

SEQ ID NO: 109463 - RNA, 22 nt, synthetic construct
  source 1..22: mol_type = other RNA
aaaaaataaaggctttcgtatg

SEQ ID NO: 109464 - RNA, 22 nt, synthetic construct
  source 1..22: mol_type = other RNA
aaaaaataaagttccccattga

SEQ ID NO: 109465 - RNA, 22 nt, synthetic construct
  source 1..22: mol_type = other RNA
aaaaaatacatgtcatgttccc

SEQ ID NO: 109466 - RNA, 22 nt, synthetic construct
  source 1..22: mol_type = other RNA
aaaaaataccaaaaaaggtgct

SEQ ID NO: 109467 - RNA, 22 nt, synthetic construct
  source 1..22: mol_type = other RNA
aaaaaatacggccgggagtggt

SEQ ID NO: 109468 - RNA, 22 nt, synthetic construct
  source 1..22: mol_type = other RNA
aaaaaatcaaagaaagagttgg

SEQ ID NO: 109469 - RNA, 22 nt, synthetic construct
  source 1..22: mol_type = other RNA
aaaaaatcctgctgggctattg

SEQ ID NO: 109470 - RNA, 22 nt, synthetic construct
  source 1..22: mol_type = other RNA
aaaaaatgcagtagtaaagcaa

SEQ ID NO: 109471 - RNA, 22 nt, synthetic construct
  source 1..22: mol_type = other RNA
aaaaaatgcgcgtccgcgaccc

SEQ ID NO: 109472 - RNA, 22 nt, synthetic construct
  source 1..22: mol_type = other RNA
aaaaaatgctttttctgcatct

SEQ ID NO: 109473 - RNA, 22 nt, synthetic construct
  source 1..22: mol_type = other RNA
aaaaaatggtgcagccactata

SEQ ID NO: 109474 - RNA, 22 nt, synthetic construct
  source 1..22: mol_type = other RNA
aaaaaatgtaaattctgccaca

SEQ ID NO: 109475 - RNA, 22 nt, synthetic construct
  source 1..22: mol_type = other RNA
aaaaaatgtggcatatcacatt

SEQ ID NO: 109476 - RNA, 22 nt, synthetic construct
  source 1..22: mol_type = other RNA
aaaaaatgtggcatttcttaca

SEQ ID NO: 109477 - RNA, 22 nt, synthetic construct
  source 1..22: mol_type = other RNA
aaaaaatgtttaattacccagg

SEQ ID NO: 109478 - RNA, 22 nt, synthetic construct
  source 1..22: mol_type = other RNA
aaaaaatgttttaaggcagggc

SEQ ID NO: 109479 - RNA, 22 nt, synthetic construct
  source 1..22: mol_type = other RNA
aaaaaattaatgccccatgtgt

SEQ ID NO: 109480 - RNA, 22 nt, synthetic construct
  source 1..22: mol_type = other RNA
aaaaaattagccaagcatggtg

SEQ ID NO: 109481 - RNA, 22 nt, synthetic construct
  source 1..22: mol_type = other RNA
aaaaaattagccttttacaccc

SEQ ID NO: 109482 - RNA, 22 nt, synthetic construct
  source 1..22: mol_type = other RNA
aaaaaattctgttctcagtatc

SEQ ID NO: 109483 - RNA, 22 nt, synthetic construct
  source 1..22: mol_type = other RNA
aaaaaattgcaggtttactcca

SEQ ID NO: 109484 - RNA, 22 nt, synthetic construct
  source 1..22: mol_type = other RNA
aaaaacaaaaaaccactggata

SEQ ID NO: 109485 - RNA, 22 nt, synthetic construct
  source 1..22: mol_type = other RNA
aaaaacaaaacaaaaccctgtt

SEQ ID NO: 109486 - RNA, 22 nt, synthetic construct
  source 1..22: mol_type = other RNA
aaaaacaaaacaaagtctttgg

SEQ ID NO: 109487 - RNA, 22 nt, synthetic construct
  source 1..22: mol_type = other RNA
aaaaacaaaagagtagattccc

SEQ ID NO: 109488 - RNA, 22 nt, synthetic construct
  source 1..22: mol_type = other RNA
aaaaacaacactaaccaacatt

SEQ ID NO: 109489 - RNA, 22 nt, synthetic construct
  source 1..22: mol_type = other RNA
aaaaacacagggactgatgaag

SEQ ID NO: 109490 - RNA, 22 nt, synthetic construct
  source 1..22: mol_type = other RNA
aaaaacaccaaaaaagcaccag

SEQ ID NO: 109491 - RNA, 22 nt, synthetic construct
  source 1..22: mol_type = other RNA
aaaaacacctaaagatatgtgt

SEQ ID NO: 109492 - RNA, 22 nt, synthetic construct
  source 1..22: mol_type = other RNA
aaaaacacctcagttaaaccca

SEQ ID NO: 109493 - RNA, 22 nt, synthetic construct
  source 1..22: mol_type = other RNA
aaaaacagaaatgaaatggccc

SEQ ID NO: 109494 - RNA, 22 nt, synthetic construct
  source 1..22: mol_type = other RNA
aaaaacagaagacacaaaatca

SEQ ID NO: 109495 - RNA, 22 nt, synthetic construct
  source 1..22: mol_type = other RNA
aaaaacagatcttggccgaatg

SEQ ID NO: 109496 - RNA, 22 nt, synthetic construct
  source 1..22: mol_type = other RNA
aaaaacagcatatacatgacat

SEQ ID NO: 109497 - RNA, 22 nt, synthetic construct
  source 1..22: mol_type = other RNA
aaaaacagttgctattcaacag

SEQ ID NO: 109498 - RNA, 22 nt, synthetic construct
  source 1..22: mol_type = other RNA
aaaaacagtttccctctgagag

SEQ ID NO: 109499 - RNA, 22 nt, synthetic construct
  source 1..22: mol_type = other RNA
aaaaacatatgcaggaccaact

SEQ ID NO: 109500 - RNA, 22 nt, synthetic construct
  source 1..22: mol_type = other RNA
aaaaacatccattactcgtggt

SEQ ID NO: 109501 - RNA, 22 nt, synthetic construct
  source 1..22: mol_type = other RNA
aaaaacattggaggataatatc

SEQ ID NO: 109502 - RNA, 22 nt, synthetic construct
  source 1..22: mol_type = other RNA
aaaaaccaaacactggaaatca

SEQ ID NO: 109503 - RNA, 22 nt, synthetic construct
  source 1..22: mol_type = other RNA
aaaaaccacatttcatagcaga

SEQ ID NO: 109504 - RNA, 22 nt, synthetic construct
  source 1..22: mol_type = other RNA
aaaaaccacgcagaacagtgtt

SEQ ID NO: 109505 - RNA, 22 nt, synthetic construct
  source 1..22: mol_type = other RNA
aaaaaccactggatacggaaat

SEQ ID NO: 109506 - RNA, 22 nt, synthetic construct
  source 1..22: mol_type = other RNA
aaaaacccaactctttctttga

SEQ ID NO: 109507 - RNA, 22 nt, synthetic construct
  source 1..22: mol_type = other RNA
aaaaacccagacctgcacaaag

SEQ ID NO: 109508 - RNA, 22 nt, synthetic construct
  source 1..22: mol_type = other RNA
aaaaacctaaacctgtgatttc

SEQ ID NO: 109509 - RNA, 22 nt, synthetic construct
  source 1..22: mol_type = other RNA
aaaaacctcccaacaggctgag

SEQ ID NO: 109510 - RNA, 22 nt, synthetic construct
  source 1..22: mol_type = other RNA
aaaaacctttttgggatctgtc

SEQ ID NO: 109511 - RNA, 22 nt, synthetic construct
  source 1..22: mol_type = other RNA
aaaaacgcggcacttggtaagc

SEQ ID NO: 109512 - RNA, 22 nt, synthetic construct
  source 1..22: mol_type = other RNA
aaaaacggaggttgcagtaagc

SEQ ID NO: 109513 - RNA, 22 nt, synthetic construct
  source 1..22: mol_type = other RNA
aaaaacgggttatacacacata

SEQ ID NO: 109514 - RNA, 22 nt, synthetic construct
  source 1..22: mol_type = other RNA
aaaaacgtgcaaactaccaaga

SEQ ID NO: 109515 - RNA, 22 nt, synthetic construct
  source 1..22: mol_type = other RNA
aaaaactacttcgtgtgtggag

SEQ ID NO: 109516 - RNA, 22 nt, synthetic construct
  source 1..22: mol_type = other RNA
aaaaactcaacattcattcatg

SEQ ID NO: 109517 - RNA, 22 nt, synthetic construct
  source 1..22: mol_type = other RNA
aaaaactgaactacagtgttta

SEQ ID NO: 109518 - RNA, 22 nt, synthetic construct
  source 1..22: mol_type = other RNA
aaaaactgagaccggatgaggt

SEQ ID NO: 109519 - RNA, 22 nt, synthetic construct
  source 1..22: mol_type = other RNA
aaaaactgcagcaattatttga

SEQ ID NO: 109520 - RNA, 22 nt, synthetic construct
  source 1..22: mol_type = other RNA
aaaaactgtttggctgggagct

SEQ ID NO: 109521 - RNA, 22 nt, synthetic construct
  source 1..22: mol_type = other RNA
aaaaacttaagtatctcagtca

SEQ ID NO: 109522 - RNA, 22 nt, synthetic construct
  source 1..22: mol_type = other RNA
aaaaacttaagtatctcggtca

SEQ ID NO: 109523 - RNA, 22 nt, synthetic construct
  source 1..22: mol_type = other RNA
aaaaacttatgcaagatggcaa

SEQ ID NO: 109524 - RNA, 22 nt, synthetic construct
  source 1..22: mol_type = other RNA
aaaaacttcccttagctctcat

SEQ ID NO: 109525 - RNA, 22 nt, synthetic construct
  source 1..22: mol_type = other RNA
aaaaacttcgaactaaggaaag

SEQ ID NO: 109526 - RNA, 22 nt, synthetic construct
  source 1..22: mol_type = other RNA
aaaaactttttgggcctttctg

SEQ ID NO: 109527 - RNA, 22 nt, synthetic construct
  source 1..22: mol_type = other RNA
aaaaagaaaaagctcacctctg

SEQ ID NO: 109528 - RNA, 22 nt, synthetic construct
  source 1..22: mol_type = other RNA
aaaaagaaaaagttgggcttgg

SEQ ID NO: 109529 - RNA, 22 nt, synthetic construct
  source 1..22: mol_type = other RNA
aaaaagaaatctgcatccaaaa

SEQ ID NO: 109530 - RNA, 22 nt, synthetic construct
  source 1..22: mol_type = other RNA
aaaaagaacactataagccaat

SEQ ID NO: 109531 - RNA, 22 nt, synthetic construct
  source 1..22: mol_type = other RNA
aaaaagaaggccgtccctattt

SEQ ID NO: 109532 - RNA, 22 nt, synthetic construct
  source 1..22: mol_type = other RNA
aaaaagaataagctaatcccaa

SEQ ID NO: 109533 - RNA, 22 nt, synthetic construct
  source 1..22: mol_type = other RNA
aaaaagacaagtactgcatgat

SEQ ID NO: 109534 - RNA, 22 nt, synthetic construct
  source 1..22: mol_type = other RNA
aaaaagacacaaaagagctggg

SEQ ID NO: 109535 - RNA, 22 nt, synthetic construct
  source 1..22: mol_type = other RNA
aaaaagacagagctagaactag

SEQ ID NO: 109536 - RNA, 22 nt, synthetic construct
  source 1..22: mol_type = other RNA
aaaaagacgatattcctatcag

SEQ ID NO: 109537 - RNA, 22 nt, synthetic construct
  source 1..22: mol_type = other RNA
aaaaagagaaaaattacaggtc

SEQ ID NO: 109538 - RNA, 22 nt, synthetic construct
  source 1..22: mol_type = other RNA
aaaaagagaacacacaatttga

SEQ ID NO: 109539 - RNA, 22 nt, synthetic construct
  source 1..22: mol_type = other RNA
aaaaagagaacttgcacataat

SEQ ID NO: 109540 - RNA, 22 nt, synthetic construct
  source 1..22: mol_type = other RNA
aaaaagatctgtggactttagg

SEQ ID NO: 109541 - RNA, 22 nt, synthetic construct
  source 1..22: mol_type = other RNA
aaaaagatgtgtaccaaaagtc

SEQ ID NO: 109542 - RNA, 22 nt, synthetic construct
  source 1..22: mol_type = other RNA
aaaaagatgttttcagttgcat

SEQ ID NO: 109543 - RNA, 22 nt, synthetic construct
  source 1..22: mol_type = other RNA
aaaaagcaacttgaaggcaatg

SEQ ID NO: 109544 - RNA, 22 nt, synthetic construct
  source 1..22: mol_type = other RNA
aaaaagcaccagttatcaccat

SEQ ID NO: 109545 - RNA, 22 nt, synthetic construct
  source 1..22: mol_type = other RNA
aaaaagcacctaccataacaaa

SEQ ID NO: 109546 - RNA, 22 nt, synthetic construct
  source 1..22: mol_type = other RNA
aaaaagcactatccacatttgg

SEQ ID NO: 109547 - RNA, 22 nt, synthetic construct
  source 1..22: mol_type = other RNA
aaaaagcagacagaaagacagg

SEQ ID NO: 109548 - RNA, 22 nt, synthetic construct
  source 1..22: mol_type = other RNA
aaaaagcagagaaactggaatc

SEQ ID NO: 109549 - RNA, 22 nt, synthetic construct
  source 1..22: mol_type = other RNA
aaaaagcagctacctgttgatt

SEQ ID NO: 109550 - RNA, 22 nt, synthetic construct
  source 1..22: mol_type = other RNA
aaaaagccatttatcagcacca

SEQ ID NO: 109551 - RNA, 22 nt, synthetic construct
  source 1..22: mol_type = other RNA
aaaaagcctctctgatggaacg

SEQ ID NO: 109552 - RNA, 22 nt, synthetic construct
  source 1..22: mol_type = other RNA
aaaaagcctctgtggaccatgt

SEQ ID NO: 109553 - RNA, 22 nt, synthetic construct
  source 1..22: mol_type = other RNA
aaaaagcctgcttcagcctaag

SEQ ID NO: 109554 - RNA, 22 nt, synthetic construct
  source 1..22: mol_type = other RNA
aaaaagcgttggagacagccta

SEQ ID NO: 109555 - RNA, 22 nt, synthetic construct
  source 1..22: mol_type = other RNA
aaaaagctatacacgttacaaa

SEQ ID NO: 109556 - RNA, 22 nt, synthetic construct
  source 1..22: mol_type = other RNA
aaaaagctcacctctggactca

SEQ ID NO: 109557 - RNA, 22 nt, synthetic construct
  source 1..22: mol_type = other RNA
aaaaagctcagtgtgtttttgt

SEQ ID NO: 109558 - RNA, 22 nt, synthetic construct
  source 1..22: mol_type = other RNA
aaaaaggaaagtaactgttggc

SEQ ID NO: 109559 - RNA, 22 nt, synthetic construct
  source 1..22: mol_type = other RNA
aaaaaggaatctgacctaagct

SEQ ID NO: 109560 - RNA, 22 nt, synthetic construct
  source 1..22: mol_type = other RNA
aaaaaggaatctgggccgggcg

SEQ ID NO: 109561 - RNA, 22 nt, synthetic construct
  source 1..22: mol_type = other RNA
aaaaaggacacaaattatgact

SEQ ID NO: 109562 - RNA, 22 nt, synthetic construct
  source 1..22: mol_type = other RNA
aaaaaggaccatctgttaaaag

SEQ ID NO: 109563 - RNA, 22 nt, synthetic construct
  source 1..22: mol_type = other RNA
aaaaaggagggaaaatgtttat

SEQ ID NO: 109564 - RNA, 22 nt, synthetic construct
  source 1..22: mol_type = other RNA
aaaaagggagtcagtagaggcc

SEQ ID NO: 109565 - RNA, 22 nt, synthetic construct
  source 1..22: mol_type = other RNA
aaaaagggtgggggcatcaaag

SEQ ID NO: 109566 - RNA, 22 nt, synthetic construct
  source 1..22: mol_type = other RNA
aaaaaggtgctgttgtatttta

SEQ ID NO: 109567 - RNA, 22 nt, synthetic construct
  source 1..22: mol_type = other RNA
aaaaaggttaagggaagagcta

SEQ ID NO: 109568 - RNA, 22 nt, synthetic construct
  source 1..22: mol_type = other RNA
aaaaaggtttttgaacaagagc

SEQ ID NO: 109569 - RNA, 22 nt, synthetic construct
  source 1..22: mol_type = other RNA
aaaaagtactggaaatggacag

SEQ ID NO: 109570 - RNA, 22 nt, synthetic construct
  source 1..22: mol_type = other RNA
aaaaagtaggggtaaatctttg

SEQ ID NO: 109571 - RNA, 22 nt, synthetic construct
  source 1..22: mol_type = other RNA
aaaaagtatcgtgagactatta

SEQ ID NO: 109572 - RNA, 22 nt, synthetic construct
  source 1..22: mol_type = other RNA
aaaaagtcatgacctgctttct

SEQ ID NO: 109573 - RNA, 22 nt, synthetic construct
  source 1..22: mol_type = other RNA
aaaaagtgacttctggatgtgt

SEQ ID NO: 109574 - RNA, 22 nt, synthetic construct
  source 1..22: mol_type = other RNA
aaaaagtgataccataaagtca

SEQ ID NO: 109575 - RNA, 22 nt, synthetic construct
  source 1..22: mol_type = other RNA
aaaaagtgcttctagtaacttg

SEQ ID NO: 109576 - RNA, 22 nt, synthetic construct
  source 1..22: mol_type = other RNA
aaaaagtgtgaccacattccca

SEQ ID NO: 109577 - RNA, 22 nt, synthetic construct
  source 1..22: mol_type = other RNA
aaaaagttgggcttggttggaa

SEQ ID NO: 109578 - RNA, 22 nt, synthetic construct
  source 1..22: mol_type = other RNA
aaaaagttttttcctttgcctt

SEQ ID NO: 109579 - RNA, 22 nt, synthetic construct
  source 1..22: mol_type = other RNA
aaaaataaagacttcacgatgc

SEQ ID NO: 109580 - RNA, 22 nt, synthetic construct
  source 1..22: mol_type = other RNA
aaaaataaaggctttcgtatgg

SEQ ID NO: 109581 - RNA, 22 nt, synthetic construct
  source 1..22: mol_type = other RNA
aaaaataaagttccccattgac

SEQ ID NO: 109582 - RNA, 22 nt, synthetic construct
  source 1..22: mol_type = other RNA
aaaaataacgggccgggcgctg

SEQ ID NO: 109583 - RNA, 22 nt, synthetic construct
  source 1..22: mol_type = other RNA
aaaaatacagctccaaagaaca

SEQ ID NO: 109584 - RNA, 22 nt, synthetic construct
  source 1..22: mol_type = other RNA
aaaaatacatgtcatgttcccg

SEQ ID NO: 109585 - RNA, 22 nt, synthetic construct
  source 1..22: mol_type = other RNA
aaaaataccaaaaaaggtgctg

SEQ ID NO: 109586 - RNA, 22 nt, synthetic construct
  source 1..22: mol_type = other RNA
aaaaatacgaaagtgctctacc

SEQ ID NO: 109587 - RNA, 22 nt, synthetic construct
  source 1..22: mol_type = other RNA
aaaaatacggccgggagtggtg

SEQ ID NO: 109588 - RNA, 22 nt, synthetic construct
  source 1..22: mol_type = other RNA
aaaaatactacaagagttcccc

SEQ ID NO: 109589 - RNA, 22 nt, synthetic construct
  source 1..22: mol_type = other RNA
aaaaatactcaagggctttcaa

SEQ ID NO: 109590 - RNA, 22 nt, synthetic construct
  source 1..22: mol_type = other RNA
aaaaatacttaagagcatgttg

SEQ ID NO: 109591 - RNA, 22 nt, synthetic construct
  source 1..22: mol_type = other RNA
aaaaatagaggatgggcattcc

SEQ ID NO: 109592 - RNA, 22 nt, synthetic construct
  source 1..22: mol_type = other RNA
aaaaatatagaaggccagaggg

SEQ ID NO: 109593 - RNA, 22 nt, synthetic construct
  source 1..22: mol_type = other RNA
aaaaatcaaagaaagagttggg

SEQ ID NO: 109594 - RNA, 22 nt, synthetic construct
  source 1..22: mol_type = other RNA
aaaaatcaacccatgaaaattg

SEQ ID NO: 109595 - RNA, 22 nt, synthetic construct
  source 1..22: mol_type = other RNA
aaaaatcaaccccatcaacaag

SEQ ID NO: 109596 - RNA, 22 nt, synthetic construct
  source 1..22: mol_type = other RNA
aaaaatcattgtagctatatcc

SEQ ID NO: 109597 - RNA, 22 nt, synthetic construct
  source 1..22: mol_type = other RNA
aaaaatcctgctgggctattgt

SEQ ID NO: 109598 - RNA, 22 nt, synthetic construct
  source 1..22: mol_type = other RNA
aaaaatcgtcctcttcgggtgt

SEQ ID NO: 109599 - RNA, 22 nt, synthetic construct
  source 1..22: mol_type = other RNA
aaaaatctaaccctcaatcccc

SEQ ID NO: 109600 - RNA, 22 nt, synthetic construct
  source 1..22: mol_type = other RNA
aaaaatctctacagggaaccgt

SEQ ID NO: 109601 - RNA, 22 nt, synthetic construct
  source 1..22: mol_type = other RNA
aaaaatgacacaacttactact

SEQ ID NO: 109602 - RNA, 22 nt, synthetic construct
  source 1..22: mol_type = other RNA
aaaaatgacaccaaaactacag

SEQ ID NO: 109603 - RNA, 22 nt, synthetic construct
  source 1..22: mol_type = other RNA
aaaaatgagaaacctaagaaag

SEQ ID NO: 109604 - RNA, 22 nt, synthetic construct
  source 1..22: mol_type = other RNA
aaaaatgagccaggcatggtgg

SEQ ID NO: 109605 - RNA, 22 nt, synthetic construct
  source 1..22: mol_type = other RNA
aaaaatgcagtagtaaagcaaa

SEQ ID NO: 109606 - RNA, 22 nt, synthetic construct
  source 1..22: mol_type = other RNA
aaaaatgcgcgtccgcgacccg

SEQ ID NO: 109607 - RNA, 22 nt, synthetic construct
  source 1..22: mol_type = other RNA
aaaaatgctttttctgcatctt

SEQ ID NO: 109608 - RNA, 22 nt, synthetic construct
  source 1..22: mol_type = other RNA
aaaaatggcacatactgcatat

SEQ ID NO: 109609 - RNA, 22 nt, synthetic construct
  source 1..22: mol_type = other RNA
aaaaatggggatatccaaagat

SEQ ID NO: 109610 - RNA, 22 nt, synthetic construct
  source 1..22: mol_type = other RNA
aaaaatggtcaacatgaaaaga

SEQ ID NO: 109611 - RNA, 22 nt, synthetic construct
  source 1..22: mol_type = other RNA
aaaaatggtgcagccactatag

SEQ ID NO: 109612 - RNA, 22 nt, synthetic construct
  source 1..22: mol_type = other RNA
aaaaatggttttatggtaactc

SEQ ID NO: 109613 - RNA, 22 nt, synthetic construct
  source 1..22: mol_type = other RNA
aaaaatgtaaattctgccacat

SEQ ID NO: 109614 - RNA, 22 nt, synthetic construct
  source 1..22: mol_type = other RNA
aaaaatgtcaattttcccccaa

SEQ ID NO: 109615 - RNA, 22 nt, synthetic construct
  source 1..22: mol_type = other RNA
aaaaatgtccgttgaagtcttt

SEQ ID NO: 109616 - RNA, 22 nt, synthetic construct
  source 1..22: mol_type = other RNA
aaaaatgtggcatatcacatta

SEQ ID NO: 109617 - RNA, 22 nt, synthetic construct
  source 1..22: mol_type = other RNA
aaaaatgtggcatttcttacac

SEQ ID NO: 109618 - RNA, 22 nt, synthetic construct
  source 1..22: mol_type = other RNA
aaaaatgtgtctagtgaatgag

SEQ ID NO: 109619 - RNA, 22 nt, synthetic construct
  source 1..22: mol_type = other RNA
aaaaatgtttaattacccaggc

SEQ ID NO: 109620 - RNA, 22 nt, synthetic construct
  source 1..22: mol_type = other RNA
aaaaatgttttaaggcagggct

SEQ ID NO: 109621 - RNA, 22 nt, synthetic construct
  source 1..22: mol_type = other RNA
aaaaattaatgccccatgtgtt

SEQ ID NO: 109622 - RNA, 22 nt, synthetic construct
  source 1..22: mol_type = other RNA
aaaaattacaactggtttctgc

SEQ ID NO: 109623 - RNA, 22 nt, synthetic construct
  source 1..22: mol_type = other RNA
aaaaattacaggtcaaactcac

SEQ ID NO: 109624 - RNA, 22 nt, synthetic construct
  source 1..22: mol_type = other RNA
aaaaattagccttttacaccct

SEQ ID NO: 109625 - RNA, 22 nt, synthetic construct
  source 1..22: mol_type = other RNA
aaaaattagctgggcgagatgg

SEQ ID NO: 109626 - RNA, 22 nt, synthetic construct
  source 1..22: mol_type = other RNA
aaaaattcactcctcattcaca

SEQ ID NO: 109627 - RNA, 22 nt, synthetic construct
  source 1..22: mol_type = other RNA
aaaaattccctcagcaaaagca

SEQ ID NO: 109628 - RNA, 22 nt, synthetic construct
  source 1..22: mol_type = other RNA
aaaaattccgctctggttttaa

SEQ ID NO: 109629 - RNA, 22 nt, synthetic construct
  source 1..22: mol_type = other RNA
aaaaattctgttctcagtatcc

SEQ ID NO: 109630 - RNA, 22 nt, synthetic construct
  source 1..22: mol_type = other RNA
aaaaattgcaggtttactccaa

SEQ ID NO: 109631 - RNA, 22 nt, synthetic construct
  source 1..22: mol_type = other RNA
aaaaattggataacctagaaga

SEQ ID NO: 109632 - RNA, 22 nt, synthetic construct
  source 1..22: mol_type = other RNA
aaaaatttgacatgacaggtga

SEQ ID NO: 109633 - RNA, 22 nt, synthetic construct
  source 1..22: mol_type = other RNA
aaaaattttcattctacctgga

SEQ ID NO: 109634 - RNA, 22 nt, synthetic construct
  source 1..22: mol_type = other RNA
aaaaattttctcccaaggttgc

SEQ ID NO: 109635 - RNA, 22 nt, synthetic construct
  source 1..22: mol_type = other RNA
aaaacaaaaaaccactggatac

SEQ ID NO: 109636 - RNA, 22 nt, synthetic construct
  source 1..22: mol_type = other RNA
aaaacaaaacaaaaccctgttg

SEQ ID NO: 109637 - RNA, 22 nt, synthetic construct
  source 1..22: mol_type = other RNA
aaaacaaaacaaagtctttggg

SEQ ID NO: 109638 - RNA, 22 nt, synthetic construct
  source 1..22: mol_type = other RNA
aaaacaaaacacatggcatcgg

SEQ ID NO: 109639 - RNA, 22 nt, synthetic construct
  source 1..22: mol_type = other RNA
aaaacaaaaccctgttgggcta

SEQ ID NO: 109640 - RNA, 22 nt, synthetic construct
  source 1..22: mol_type = other RNA
aaaacaaaagagtagattcccc

SEQ ID NO: 109641 - RNA, 22 nt, synthetic construct
  source 1..22: mol_type = other RNA
aaaacaaacaaacagaaaggcc

SEQ ID NO: 109642 - RNA, 22 nt, synthetic construct
  source 1..22: mol_type = other RNA
aaaacaaagtctttgggtaatt

SEQ ID NO: 109643 - RNA, 22 nt, synthetic construct
  source 1..22: mol_type = other RNA
aaaacaaatggaaccactgtag

SEQ ID NO: 109644 - RNA, 22 nt, synthetic construct
  source 1..22: mol_type = other RNA
aaaacaaattcatgcaactgaa

SEQ ID NO: 109645 - RNA, 22 nt, synthetic construct
  source 1..22: mol_type = other RNA
aaaacaaattccctctacaaaa

SEQ ID NO: 109646 - RNA, 22 nt, synthetic construct
  source 1..22: mol_type = other RNA
aaaacaaattgcatcaactgct

SEQ ID NO: 109647 - RNA, 22 nt, synthetic construct
  source 1..22: mol_type = other RNA
aaaacaacaacaacaacaaaac

SEQ ID NO: 109648 - RNA, 22 nt, synthetic construct
  source 1..22: mol_type = other RNA
aaaacaacactaaccaacattg

SEQ ID NO: 109649 - RNA, 22 nt, synthetic construct
  source 1..22: mol_type = other RNA
aaaacaagaagaaaaagcaact

SEQ ID NO: 109650 - RNA, 22 nt, synthetic construct
  source 1..22: mol_type = other RNA
aaaacaataagacaccgctcca

SEQ ID NO: 109651 - RNA, 22 nt, synthetic construct
  source 1..22: mol_type = other RNA
aaaacaatagcccagcaggatt

SEQ ID NO: 109652 - RNA, 22 nt, synthetic construct
  source 1..22: mol_type = other RNA
aaaacaatctacagattcaatg

SEQ ID NO: 109653 - RNA, 22 nt, synthetic construct
  source 1..22: mol_type = other RNA
aaaacaattacttgagagcaga

SEQ ID NO: 109654 - RNA, 22 nt, synthetic construct
  source 1..22: mol_type = other RNA
aaaacacaaactgcagaatgac

SEQ ID NO: 109655 - RNA, 22 nt, synthetic construct
  source 1..22: mol_type = other RNA
aaaacacaacataccaaaaccc

SEQ ID NO: 109656 - RNA, 22 nt, synthetic construct
  source 1..22: mol_type = other RNA
aaaacacaaggacaggtcacat

SEQ ID NO: 109657 - RNA, 22 nt, synthetic construct
  source 1..22: mol_type = other RNA
aaaacacacgggtacacatcct

SEQ ID NO: 109658 - RNA, 22 nt, synthetic construct
  source 1..22: mol_type = other RNA
aaaacacagggactgatgaaga

SEQ ID NO: 109659 - RNA, 22 nt, synthetic construct
  source 1..22: mol_type = other RNA
aaaacacatggcatcggggcct

SEQ ID NO: 109660 - RNA, 22 nt, synthetic construct
  source 1..22: mol_type = other RNA
aaaacacatgtcatgggccggg

SEQ ID NO: 109661 - RNA, 22 nt, synthetic construct
  source 1..22: mol_type = other RNA
aaaacaccaaaaaagcaccagt

SEQ ID NO: 109662 - RNA, 22 nt, synthetic construct
  source 1..22: mol_type = other RNA
aaaacacccttgaaaatttcca

SEQ ID NO: 109663 - RNA, 22 nt, synthetic construct
  source 1..22: mol_type = other RNA
aaaacacctaaagatatgtgta

SEQ ID NO: 109664 - RNA, 22 nt, synthetic construct
  source 1..22: mol_type = other RNA
aaaacacctcagttaaacccaa

SEQ ID NO: 109665 - RNA, 22 nt, synthetic construct
  source 1..22: mol_type = other RNA
aaaacactccagaatgaccgag

SEQ ID NO: 109666 - RNA, 22 nt, synthetic construct
  source 1..22: mol_type = other RNA
aaaacactggaagtaattggga

SEQ ID NO: 109667 - RNA, 22 nt, synthetic construct
  source 1..22: mol_type = other RNA
aaaacactggcaaaaatcatca

SEQ ID NO: 109668 - RNA, 22 nt, synthetic construct
  source 1..22: mol_type = other RNA
aaaacacttctgtgatcagaag

SEQ ID NO: 109669 - RNA, 22 nt, synthetic construct
  source 1..22: mol_type = other RNA
aaaacagaaatgaaatggccct

SEQ ID NO: 109670 - RNA, 22 nt, synthetic construct
  source 1..22: mol_type = other RNA
aaaacagaagacacaaaatcag

SEQ ID NO: 109671 - RNA, 22 nt, synthetic construct
  source 1..22: mol_type = other RNA
aaaacagacccttatgtccagc

SEQ ID NO: 109672 - RNA, 22 nt, synthetic construct
  source 1..22: mol_type = other RNA
aaaacagatcttggccgaatgt

SEQ ID NO: 109673 - RNA, 22 nt, synthetic construct
  source 1..22: mol_type = other RNA
aaaacagcatatacatgacatg

SEQ ID NO: 109674 - RNA, 22 nt, synthetic construct
  source 1..22: mol_type = other RNA
aaaacagctaggtgagtgagat

SEQ ID NO: 109675 - RNA, 22 nt, synthetic construct
  source 1..22: mol_type = other RNA
aaaacagcttcttgttagaatt

SEQ ID NO: 109676 - RNA, 22 nt, synthetic construct
  source 1..22: mol_type = other RNA
aaaacaggaagttgagaaagag

SEQ ID NO: 109677 - RNA, 22 nt, synthetic construct
  source 1..22: mol_type = other RNA
aaaacagggttattaacatacc

SEQ ID NO: 109678 - RNA, 22 nt, synthetic construct
  source 1..22: mol_type = other RNA
aaaacagttgctattcaacagg

SEQ ID NO: 109679 - RNA, 22 nt, synthetic construct
  source 1..22: mol_type = other RNA
aaaacagtttccctctgagaga

SEQ ID NO: 109680 - RNA, 22 nt, synthetic construct
  source 1..22: mol_type = other RNA
aaaacagtttggcaatttctca

SEQ ID NO: 109681 - RNA, 22 nt, synthetic construct
  source 1..22: mol_type = other RNA
aaaacatatccttctacatccc

SEQ ID NO: 109682 - RNA, 22 nt, synthetic construct
  source 1..22: mol_type = other RNA
aaaacatatgcaggaccaactt

SEQ ID NO: 109683 - RNA, 22 nt, synthetic construct
  source 1..22: mol_type = other RNA
aaaacatatgtcagatggtaaa

SEQ ID NO: 109684 - RNA, 22 nt, synthetic construct
  source 1..22: mol_type = other RNA
aaaacatcaaagtcccctgtaa

SEQ ID NO: 109685 - RNA, 22 nt, synthetic construct
  source 1..22: mol_type = other RNA
aaaacatcatctaatttcccat

SEQ ID NO: 109686 - RNA, 22 nt, synthetic construct
  source 1..22: mol_type = other RNA
aaaacatccattactcgtggtt

SEQ ID NO: 109687 - RNA, 22 nt, synthetic construct
  source 1..22: mol_type = other RNA
aaaacatctggaaggaaacact

SEQ ID NO: 109688 - RNA, 22 nt, synthetic construct
  source 1..22: mol_type = other RNA
aaaacatggatatttggccggg

SEQ ID NO: 109689 - RNA, 22 nt, synthetic construct
  source 1..22: mol_type = other RNA
aaaacatggccagtatctcctt

SEQ ID NO: 109690 - RNA, 22 nt, synthetic construct
  source 1..22: mol_type = other RNA
aaaacatggtccacagaggctt

SEQ ID NO: 109691 - RNA, 22 nt, synthetic construct
  source 1..22: mol_type = other RNA
aaaacatgttgtgtagaaatgt

SEQ ID NO: 109692 - RNA, 22 nt, synthetic construct
  source 1..22: mol_type = other RNA
aaaacatgttttgttgttgttg

SEQ ID NO: 109693 - RNA, 22 nt, synthetic construct
  source 1..22: mol_type = other RNA
aaaacattctacagtattacac

SEQ ID NO: 109694 - RNA, 22 nt, synthetic construct
  source 1..22: mol_type = other RNA
aaaacattggaggataatatct

SEQ ID NO: 109695 - RNA, 22 nt, synthetic construct
  source 1..22: mol_type = other RNA
aaaaccaaacactggaaatcac

SEQ ID NO: 109696 - RNA, 22 nt, synthetic construct
  source 1..22: mol_type = other RNA
aaaaccaaagaaaggggaagga

SEQ ID NO: 109697 - RNA, 22 nt, synthetic construct
  source 1..22: mol_type = other RNA
aaaaccaaatgtggatagtgct

SEQ ID NO: 109698 - RNA, 22 nt, synthetic construct
  source 1..22: mol_type = other RNA
aaaaccacaaacatgaataacc

SEQ ID NO: 109699 - RNA, 22 nt, synthetic construct
  source 1..22: mol_type = other RNA
aaaaccacatttcatagcagaa

SEQ ID NO: 109700 - RNA, 22 nt, synthetic construct
  source 1..22: mol_type = other RNA
aaaaccacgcagaacagtgttt

SEQ ID NO: 109701 - RNA, 22 nt, synthetic construct
  source 1..22: mol_type = other RNA
aaaaccactggatacggaaata

SEQ ID NO: 109702 - RNA, 22 nt, synthetic construct
  source 1..22: mol_type = other RNA
aaaaccagaaaagtgaaacaat

SEQ ID NO: 109703 - RNA, 22 nt, synthetic construct
  source 1..22: mol_type = other RNA
aaaaccagagcggaatttttat

SEQ ID NO: 109704 - RNA, 22 nt, synthetic construct
  source 1..22: mol_type = other RNA
aaaaccaggaggtttgcactgg

SEQ ID NO: 109705 - RNA, 22 nt, synthetic construct
  source 1..22: mol_type = other RNA
aaaaccatgtcatgtatatgct

SEQ ID NO: 109706 - RNA, 22 nt, synthetic construct
  source 1..22: mol_type = other RNA
aaaacccaactctttctttgat

SEQ ID NO: 109707 - RNA, 22 nt, synthetic construct
  source 1..22: mol_type = other RNA
aaaacccagacctgcacaaagg

SEQ ID NO: 109708 - RNA, 22 nt, synthetic construct
  source 1..22: mol_type = other RNA
aaaacccatgatctttggaaat

SEQ ID NO: 109709 - RNA, 22 nt, synthetic construct
  source 1..22: mol_type = other RNA
aaaaccccgtccctactaaaaa

SEQ ID NO: 109710 - RNA, 22 nt, synthetic construct
  source 1..22: mol_type = other RNA
aaaaccctgttgggctattaag

SEQ ID NO: 109711 - RNA, 22 nt, synthetic construct
  source 1..22: mol_type = other RNA
aaaacccttcatcatttgtatt

SEQ ID NO: 109712 - RNA, 22 nt, synthetic construct
  source 1..22: mol_type = other RNA
aaaacccttgggatgcagcaaa

SEQ ID NO: 109713 - RNA, 22 nt, synthetic construct
  source 1..22: mol_type = other RNA
aaaaccgacagcagataagatc

SEQ ID NO: 109714 - RNA, 22 nt, synthetic construct
  source 1..22: mol_type = other RNA
aaaacctaaacctgtgatttcc

SEQ ID NO: 109715 - RNA, 22 nt, synthetic construct
  source 1..22: mol_type = other RNA
aaaacctcccaacaggctgagt

SEQ ID NO: 109716 - RNA, 22 nt, synthetic construct
  source 1..22: mol_type = other RNA
aaaacctgaaatggcttaagga

SEQ ID NO: 109717 - RNA, 22 nt, synthetic construct
  source 1..22: mol_type = other RNA
aaaacctggaatgggttggagg

SEQ ID NO: 109718 - RNA, 22 nt, synthetic construct
  source 1..22: mol_type = other RNA
aaaacctggtaataatgaaagc

SEQ ID NO: 109719 - RNA, 22 nt, synthetic construct
  source 1..22: mol_type = other RNA
aaaacctggtatgagtgtttcc

SEQ ID NO: 109720 - RNA, 22 nt, synthetic construct
  source 1..22: mol_type = other RNA
aaaacctttttgggatctgtca

SEQ ID NO: 109721 - RNA, 22 nt, synthetic construct
  source 1..22: mol_type = other RNA
aaaacgaggaaaagagaacatt

SEQ ID NO: 109722 - RNA, 22 nt, synthetic construct
  source 1..22: mol_type = other RNA
aaaacgcggcacttggtaagct

SEQ ID NO: 109723 - RNA, 22 nt, synthetic construct
  source 1..22: mol_type = other RNA
aaaacggaaactttatacctgt

SEQ ID NO: 109724 - RNA, 22 nt, synthetic construct
  source 1..22: mol_type = other RNA
aaaacggaggttgcagtaagcc

SEQ ID NO: 109725 - RNA, 22 nt, synthetic construct
  source 1..22: mol_type = other RNA
aaaacgggttatacacacataa

SEQ ID NO: 109726 - RNA, 22 nt, synthetic construct
  source 1..22: mol_type = other RNA
aaaacgtgcaaactaccaagac

SEQ ID NO: 109727 - RNA, 22 nt, synthetic construct
  source 1..22: mol_type = other RNA
aaaactaaggtcaagagagatt

SEQ ID NO: 109728 - RNA, 22 nt, synthetic construct
  source 1..22: mol_type = other RNA
aaaactacaggcaacaaaagaa

SEQ ID NO: 109729 - RNA, 22 nt, synthetic construct
  source 1..22: mol_type = other RNA
aaaactacttcgtgtgtggagt

SEQ ID NO: 109730 - RNA, 22 nt, synthetic construct
  source 1..22: mol_type = other RNA
aaaactagagatgggaaagtat

SEQ ID NO: 109731 - RNA, 22 nt, synthetic construct
  source 1..22: mol_type = other RNA
aaaactaggctgtcccaaatgc

SEQ ID NO: 109732 - RNA, 22 nt, synthetic construct
  source 1..22: mol_type = other RNA
aaaactcaacattcattcatga

SEQ ID NO: 109733 - RNA, 22 nt, synthetic construct
  source 1..22: mol_type = other RNA
aaaactcaactgcctctacatc

SEQ ID NO: 109734 - RNA, 22 nt, synthetic construct
  source 1..22: mol_type = other RNA
aaaactcacaaaaagtgtgacc

SEQ ID NO: 109735 - RNA, 22 nt, synthetic construct
  source 1..22: mol_type = other RNA
aaaactccaagtgtaaaaagac

SEQ ID NO: 109736 - RNA, 22 nt, synthetic construct
  source 1..22: mol_type = other RNA
aaaactccccatgcaggagaaa

SEQ ID NO: 109737 - RNA, 22 nt, synthetic construct
  source 1..22: mol_type = other RNA
aaaactctgtttccttaccagt

SEQ ID NO: 109738 - RNA, 22 nt, synthetic construct
  source 1..22: mol_type = other RNA
aaaactcttagcttagaagaag

SEQ ID NO: 109739 - RNA, 22 nt, synthetic construct
  source 1..22: mol_type = other RNA
aaaactgaactacagtgtttag

SEQ ID NO: 109740 - RNA, 22 nt, synthetic construct
  source 1..22: mol_type = other RNA
aaaactgaactcaaaatggatc

SEQ ID NO: 109741 - RNA, 22 nt, synthetic construct
  source 1..22: mol_type = other RNA
aaaactgaagtaataaagcaag

SEQ ID NO: 109742 - RNA, 22 nt, synthetic construct
  source 1..22: mol_type = other RNA
aaaactgaagtttatcagtctc

SEQ ID NO: 109743 - RNA, 22 nt, synthetic construct
  source 1..22: mol_type = other RNA
aaaactgagaccggatgaggtg

SEQ ID NO: 109744 - RNA, 22 nt, synthetic construct
  source 1..22: mol_type = other RNA
aaaactgcagcaattatttgaa

SEQ ID NO: 109745 - RNA, 22 nt, synthetic construct
  source 1..22: mol_type = other RNA
aaaactgctgagtcttctactg

SEQ ID NO: 109746 - RNA, 22 nt, synthetic construct
  source 1..22: mol_type = other RNA
aaaactggcaatcaaatggcct

SEQ ID NO: 109747 - RNA, 22 nt, synthetic construct
  source 1..22: mol_type = other RNA
aaaactgggggctggacataag

SEQ ID NO: 109748 - RNA, 22 nt, synthetic construct
  source 1..22: mol_type = other RNA
aaaactgtttggctgggagctt

SEQ ID NO: 109749 - RNA, 22 nt, synthetic construct
  source 1..22: mol_type = other RNA
aaaacttaagtatctcagtcat

SEQ ID NO: 109750 - RNA, 22 nt, synthetic construct
  source 1..22: mol_type = other RNA
aaaacttaagtatctcggtcat

SEQ ID NO: 109751 - RNA, 22 nt, synthetic construct
  source 1..22: mol_type = other RNA
aaaacttaggaggctattaact

SEQ ID NO: 109752 - RNA, 22 nt, synthetic construct
  source 1..22: mol_type = other RNA
aaaacttatgcaagatggcaag

SEQ ID NO: 109753 - RNA, 22 nt, synthetic construct
  source 1..22: mol_type = other RNA
aaaacttcccttagctctcatg

SEQ ID NO: 109754 - RNA, 22 nt, synthetic construct
  source 1..22: mol_type = other RNA
aaaacttcgaactaaggaaagc

SEQ ID NO: 109755 - RNA, 22 nt, synthetic construct
  source 1..22: mol_type = other RNA
aaaacttctctggagcaagcat

SEQ ID NO: 109756 - RNA, 22 nt, synthetic construct
  source 1..22: mol_type = other RNA
aaaacttgagcagatcagtaac

SEQ ID NO: 109757 - RNA, 22 nt, synthetic construct
  source 1..22: mol_type = other RNA
aaaacttgtagaggaggagggt

SEQ ID NO: 109758 - RNA, 22 nt, synthetic construct
  source 1..22: mol_type = other RNA
aaaactttaggtcagaatacaa

SEQ ID NO: 109759 - RNA, 22 nt, synthetic construct
  source 1..22: mol_type = other RNA
aaaactttttgggcctttctgt

SEQ ID NO: 109760 - RNA, 22 nt, synthetic construct
  source 1..22: mol_type = other RNA
aaaagaaaaagctcacctctgg

SEQ ID NO: 109761 - RNA, 22 nt, synthetic construct
  source 1..22: mol_type = other RNA
aaaagaaaaaggttaagggaag

SEQ ID NO: 109762 - RNA, 22 nt, synthetic construct
  source 1..22: mol_type = other RNA
aaaagaaaaagttgggcttggt

SEQ ID NO: 109763 - RNA, 22 nt, synthetic construct
  source 1..22: mol_type = other RNA
aaaagaaaagtttcagtggtta

SEQ ID NO: 109764 - RNA, 22 nt, synthetic construct
  source 1..22: mol_type = other RNA
aaaagaaaatggccaagagttg

SEQ ID NO: 109765 - RNA, 22 nt, synthetic construct
  source 1..22: mol_type = other RNA
aaaagaaaattttctgagcaac

SEQ ID NO: 109766 - RNA, 22 nt, synthetic construct
  source 1..22: mol_type = other RNA
aaaagaaagctctcaattaatg

SEQ ID NO: 109767 - RNA, 22 nt, synthetic construct
  source 1..22: mol_type = other RNA
aaaagaaagctgtggatgttgg

SEQ ID NO: 109768 - RNA, 22 nt, synthetic construct
  source 1..22: mol_type = other RNA
aaaagaaatctgcatccaaaag

SEQ ID NO: 109769 - RNA, 22 nt, synthetic construct
  source 1..22: mol_type = other RNA
aaaagaacaacatggtagacca

SEQ ID NO: 109770 - RNA, 22 nt, synthetic construct
  source 1..22: mol_type = other RNA
aaaagaacacagtgttgagaaa

SEQ ID NO: 109771 - RNA, 22 nt, synthetic construct
  source 1..22: mol_type = other RNA
aaaagaacactataagccaata

SEQ ID NO: 109772 - RNA, 22 nt, synthetic construct
  source 1..22: mol_type = other RNA
aaaagaacaggacttttggtac

SEQ ID NO: 109773 - RNA, 22 nt, synthetic construct
  source 1..22: mol_type = other RNA
aaaagaacctctggaaaggact

SEQ ID NO: 109774 - RNA, 22 nt, synthetic construct
  source 1..22: mol_type = other RNA
aaaagaagatgcagttgcttac

SEQ ID NO: 109775 - RNA, 22 nt, synthetic construct
  source 1..22: mol_type = other RNA
aaaagaaggccgtccctatttt

SEQ ID NO: 109776 - RNA, 22 nt, synthetic construct
  source 1..22: mol_type = other RNA
aaaagaagttacggttccctgt

SEQ ID NO: 109777 - RNA, 22 nt, synthetic construct
  source 1..22: mol_type = other RNA
aaaagaataagctaatcccaaa

SEQ ID NO: 109778 - RNA, 22 nt, synthetic construct
  source 1..22: mol_type = other RNA
aaaagacaagtactgcatgatt

SEQ ID NO: 109779 - RNA, 22 nt, synthetic construct
  source 1..22: mol_type = other RNA
aaaagacaatagctagtgtctt

SEQ ID NO: 109780 - RNA, 22 nt, synthetic construct
  source 1..22: mol_type = other RNA
aaaagacacaaaagagctgggc

SEQ ID NO: 109781 - RNA, 22 nt, synthetic construct
  source 1..22: mol_type = other RNA
aaaagacagagctagaactaga

SEQ ID NO: 109782 - RNA, 22 nt, synthetic construct
  source 1..22: mol_type = other RNA
aaaagacatcactaagagtgaa

SEQ ID NO: 109783 - RNA, 22 nt, synthetic construct
  source 1..22: mol_type = other RNA
aaaagacatctttcctgtgatt

SEQ ID NO: 109784 - RNA, 22 nt, synthetic construct
  source 1..22: mol_type = other RNA
aaaagacattattcttacagtg

SEQ ID NO: 109785 - RNA, 22 nt, synthetic construct
  source 1..22: mol_type = other RNA
aaaagaccaagaattttccatt

SEQ ID NO: 109786 - RNA, 22 nt, synthetic construct
  source 1..22: mol_type = other RNA
aaaagaccgcaagagttccaac

SEQ ID NO: 109787 - RNA, 22 nt, synthetic construct
  source 1..22: mol_type = other RNA
aaaagacgatattcctatcaga

SEQ ID NO: 109788 - RNA, 22 nt, synthetic construct
  source 1..22: mol_type = other RNA
aaaagacttctcaaacaggata

SEQ ID NO: 109789 - RNA, 22 nt, synthetic construct
  source 1..22: mol_type = other RNA
aaaagacttgaggtttacttgg

SEQ ID NO: 109790 - RNA, 22 nt, synthetic construct
  source 1..22: mol_type = other RNA
aaaagagaaaaattacaggtca

SEQ ID NO: 109791 - RNA, 22 nt, synthetic construct
  source 1..22: mol_type = other RNA
aaaagagaacacacaatttgag

SEQ ID NO: 109792 - RNA, 22 nt, synthetic construct
  source 1..22: mol_type = other RNA
aaaagagaacattggtttgaaa

SEQ ID NO: 109793 - RNA, 22 nt, synthetic construct
  source 1..22: mol_type = other RNA
aaaagagaacttgcacataata

SEQ ID NO: 109794 - RNA, 22 nt, synthetic construct
  source 1..22: mol_type = other RNA
aaaagagatctagtgaagtcaa

SEQ ID NO: 109795 - RNA, 22 nt, synthetic construct
  source 1..22: mol_type = other RNA
aaaagagcacaccaagacatgt

SEQ ID NO: 109796 - RNA, 22 nt, synthetic construct
  source 1..22: mol_type = other RNA
aaaagagcgaagagggagaaga

SEQ ID NO: 109797 - RNA, 22 nt, synthetic construct
  source 1..22: mol_type = other RNA
aaaagagctgggcccgcagtgg

SEQ ID NO: 109798 - RNA, 22 nt, synthetic construct
  source 1..22: mol_type = other RNA
aaaagagtagattcccccttat

SEQ ID NO: 109799 - RNA, 22 nt, synthetic construct
  source 1..22: mol_type = other RNA
aaaagagtgaaatgatttcaag

SEQ ID NO: 109800 - RNA, 22 nt, synthetic construct
  source 1..22: mol_type = other RNA
aaaagagtgcacattccttctt

SEQ ID NO: 109801 - RNA, 22 nt, synthetic construct
  source 1..22: mol_type = other RNA
aaaagataagtagaaggtcaat

SEQ ID NO: 109802 - RNA, 22 nt, synthetic construct
  source 1..22: mol_type = other RNA
aaaagatacacaagatctctat

SEQ ID NO: 109803 - RNA, 22 nt, synthetic construct
  source 1..22: mol_type = other RNA
aaaagatactcaacatcactag

SEQ ID NO: 109804 - RNA, 22 nt, synthetic construct
  source 1..22: mol_type = other RNA
aaaagatatccacagtatgctg

SEQ ID NO: 109805 - RNA, 22 nt, synthetic construct
  source 1..22: mol_type = other RNA
aaaagatcagtaaaattccctt

SEQ ID NO: 109806 - RNA, 22 nt, synthetic construct
  source 1..22: mol_type = other RNA
aaaagatcatttcaaaccaatg

SEQ ID NO: 109807 - RNA, 22 nt, synthetic construct
  source 1..22: mol_type = other RNA
aaaagatctgtggactttaggc

SEQ ID NO: 109808 - RNA, 22 nt, synthetic construct
  source 1..22: mol_type = other RNA
aaaagatgatgaacaaaggcag

SEQ ID NO: 109809 - RNA, 22 nt, synthetic construct
  source 1..22: mol_type = other RNA
aaaagatgcagaaaaagcattt

SEQ ID NO: 109810 - RNA, 22 nt, synthetic construct
  source 1..22: mol_type = other RNA
aaaagatgcattctgtcacata

SEQ ID NO: 109811 - RNA, 22 nt, synthetic construct
  source 1..22: mol_type = other RNA
aaaagatgctggtggagtattc

SEQ ID NO: 109812 - RNA, 22 nt, synthetic construct
  source 1..22: mol_type = other RNA
aaaagatgtgtaccaaaagtcc

SEQ ID NO: 109813 - RNA, 22 nt, synthetic construct
  source 1..22: mol_type = other RNA
aaaagatgttttcagttgcatg

SEQ ID NO: 109814 - RNA, 22 nt, synthetic construct
  source 1..22: mol_type = other RNA
aaaagattaaatacagagcaca

SEQ ID NO: 109815 - RNA, 22 nt, synthetic construct
  source 1..22: mol_type = other RNA
aaaagcaaatgtcatcttctct

SEQ ID NO: 109816 - RNA, 22 nt, synthetic construct
  source 1..22: mol_type = other RNA
aaaagcaacctcatttgcagag

SEQ ID NO: 109817 - RNA, 22 nt, synthetic construct
  source 1..22: mol_type = other RNA
aaaagcaacttgaaggcaatgt

SEQ ID NO: 109818 - RNA, 22 nt, synthetic construct
  source 1..22: mol_type = other RNA
aaaagcacaagcacagagtcag

SEQ ID NO: 109819 - RNA, 22 nt, synthetic construct
  source 1..22: mol_type = other RNA
aaaagcacaggcatcggccggg

SEQ ID NO: 109820 - RNA, 22 nt, synthetic construct
  source 1..22: mol_type = other RNA
aaaagcaccactgagagggaag

SEQ ID NO: 109821 - RNA, 22 nt, synthetic construct
  source 1..22: mol_type = other RNA
aaaagcaccagttatcaccatg

SEQ ID NO: 109822 - RNA, 22 nt, synthetic construct
  source 1..22: mol_type = other RNA
aaaagcacctaccataacaaaa

SEQ ID NO: 109823 - RNA, 22 nt, synthetic construct
  source 1..22: mol_type = other RNA
aaaagcactatccacatttggt

SEQ ID NO: 109824 - RNA, 22 nt, synthetic construct
  source 1..22: mol_type = other RNA
aaaagcagacagaaagacaggg

SEQ ID NO: 109825 - RNA, 22 nt, synthetic construct
  source 1..22: mol_type = other RNA
aaaagcagagaaactggaatca

SEQ ID NO: 109826 - RNA, 22 nt, synthetic construct
  source 1..22: mol_type = other RNA
aaaagcagctacctgttgattg

SEQ ID NO: 109827 - RNA, 22 nt, synthetic construct
  source 1..22: mol_type = other RNA
aaaagcaggccctgagaagtca

SEQ ID NO: 109828 - RNA, 22 nt, synthetic construct
  source 1..22: mol_type = other RNA
aaaagccaagagcgaggcctgg

SEQ ID NO: 109829 - RNA, 22 nt, synthetic construct
  source 1..22: mol_type = other RNA
aaaagccatagtgtaaactaaa

SEQ ID NO: 109830 - RNA, 22 nt, synthetic construct
  source 1..22: mol_type = other RNA
aaaagccatttatcagcaccaa

SEQ ID NO: 109831 - RNA, 22 nt, synthetic construct
  source 1..22: mol_type = other RNA
aaaagcccaatctacaggtcgg

SEQ ID NO: 109832 - RNA, 22 nt, synthetic construct
  source 1..22: mol_type = other RNA
aaaagccccaaaccatcaagtg

SEQ ID NO: 109833 - RNA, 22 nt, synthetic construct
  source 1..22: mol_type = other RNA
aaaagcctcaaaatttagtaag

SEQ ID NO: 109834 - RNA, 22 nt, synthetic construct
  source 1..22: mol_type = other RNA
aaaagcctcaaacgaaccaatt

SEQ ID NO: 109835 - RNA, 22 nt, synthetic construct
  source 1..22: mol_type = other RNA
aaaagcctcatttgaactttcc

SEQ ID NO: 109836 - RNA, 22 nt, synthetic construct
  source 1..22: mol_type = other RNA
aaaagcctctctgatggaacgg

SEQ ID NO: 109837 - RNA, 22 nt, synthetic construct
  source 1..22: mol_type = other RNA
aaaagcctctgtggaccatgtt

SEQ ID NO: 109838 - RNA, 22 nt, synthetic construct
  source 1..22: mol_type = other RNA
aaaagcctgcttcagcctaagc

SEQ ID NO: 109839 - RNA, 22 nt, synthetic construct
  source 1..22: mol_type = other RNA
aaaagcgtactgtgattacaat

SEQ ID NO: 109840 - RNA, 22 nt, synthetic construct
  source 1..22: mol_type = other RNA
aaaagcgttggagacagcctaa

SEQ ID NO: 109841 - RNA, 22 nt, synthetic construct
  source 1..22: mol_type = other RNA
aaaagctaccctcgagtaaaaa

SEQ ID NO: 109842 - RNA, 22 nt, synthetic construct
  source 1..22: mol_type = other RNA
aaaagctatacacgttacaaaa

SEQ ID NO: 109843 - RNA, 22 nt, synthetic construct
  source 1..22: mol_type = other RNA
aaaagctcaaaaatactcaagg

SEQ ID NO: 109844 - RNA, 22 nt, synthetic construct
  source 1..22: mol_type = other RNA
aaaagctcacctctggactcag

SEQ ID NO: 109845 - RNA, 22 nt, synthetic construct
  source 1..22: mol_type = other RNA
aaaagctcagtgtgtttttgta

SEQ ID NO: 109846 - RNA, 22 nt, synthetic construct
  source 1..22: mol_type = other RNA
aaaagctccccggatgattcta

SEQ ID NO: 109847 - RNA, 22 nt, synthetic construct
  source 1..22: mol_type = other RNA
aaaagctctaatagttcacctc

SEQ ID NO: 109848 - RNA, 22 nt, synthetic construct
  source 1..22: mol_type = other RNA
aaaagctggagttatttgtata

SEQ ID NO: 109849 - RNA, 22 nt, synthetic construct
  source 1..22: mol_type = other RNA
aaaagcttatgatcttgggaat

SEQ ID NO: 109850 - RNA, 22 nt, synthetic construct
  source 1..22: mol_type = other RNA
aaaagcttcccccctctctctt

SEQ ID NO: 109851 - RNA, 22 nt, synthetic construct
  source 1..22: mol_type = other RNA
aaaaggaaagtaactgttggca

SEQ ID NO: 109852 - RNA, 22 nt, synthetic construct
  source 1..22: mol_type = other RNA
aaaaggaatataaacgtgtgtg

SEQ ID NO: 109853 - RNA, 22 nt, synthetic construct
  source 1..22: mol_type = other RNA
aaaaggaatctgacctaagctt

SEQ ID NO: 109854 - RNA, 22 nt, synthetic construct
  source 1..22: mol_type = other RNA
aaaaggaatctgggccgggcgc

SEQ ID NO: 109855 - RNA, 22 nt, synthetic construct
  source 1..22: mol_type = other RNA
aaaaggaatggaattctgatgc

SEQ ID NO: 109856 - RNA, 22 nt, synthetic construct
  source 1..22: mol_type = other RNA
aaaaggacacaaattatgactg

SEQ ID NO: 109857 - RNA, 22 nt, synthetic construct
  source 1..22: mol_type = other RNA
aaaaggacattagtggaaaaac

SEQ ID NO: 109858 - RNA, 22 nt, synthetic construct
  source 1..22: mol_type = other RNA
aaaaggaccatctgttaaaaga

SEQ ID NO: 109859 - RNA, 22 nt, synthetic construct
  source 1..22: mol_type = other RNA
aaaaggagatatacaggaagag

SEQ ID NO: 109860 - RNA, 22 nt, synthetic construct
  source 1..22: mol_type = other RNA
aaaaggaggaactaattgataa

SEQ ID NO: 109861 - RNA, 22 nt, synthetic construct
  source 1..22: mol_type = other RNA
aaaaggagggaaaatgtttatt

SEQ ID NO: 109862 - RNA, 22 nt, synthetic construct
  source 1..22: mol_type = other RNA
aaaaggatatgggccaaagaca

SEQ ID NO: 109863 - RNA, 22 nt, synthetic construct
  source 1..22: mol_type = other RNA
aaaaggatttgtttgtgaagat

SEQ ID NO: 109864 - RNA, 22 nt, synthetic construct
  source 1..22: mol_type = other RNA
aaaaggcaaaccacacagagaa

SEQ ID NO: 109865 - RNA, 22 nt, synthetic construct
  source 1..22: mol_type = other RNA
aaaaggccccttgaaagatcat

SEQ ID NO: 109866 - RNA, 22 nt, synthetic construct
  source 1..22: mol_type = other RNA
aaaaggctgagacctcatctta

SEQ ID NO: 109867 - RNA, 22 nt, synthetic construct
  source 1..22: mol_type = other RNA
aaaagggaaaacaattacttga

SEQ ID NO: 109868 - RNA, 22 nt, synthetic construct
  source 1..22: mol_type = other RNA
aaaagggaaatatgaaccacac

SEQ ID NO: 109869 - RNA, 22 nt, synthetic construct
  source 1..22: mol_type = other RNA
aaaagggagtcagtagaggccg

SEQ ID NO: 109870 - RNA, 22 nt, synthetic construct
  source 1..22: mol_type = other RNA
aaaagggtgggggcatcaaagc

SEQ ID NO: 109871 - RNA, 22 nt, synthetic construct
  source 1..22: mol_type = other RNA
aaaaggtagaagataatgttag

SEQ ID NO: 109872 - RNA, 22 nt, synthetic construct
  source 1..22: mol_type = other RNA
aaaaggtataaaggatgcacaa

SEQ ID NO: 109873 - RNA, 22 nt, synthetic construct
  source 1..22: mol_type = other RNA
aaaaggtgctgttgtattttac

SEQ ID NO: 109874 - RNA, 22 nt, synthetic construct
  source 1..22: mol_type = other RNA
aaaaggttaagggaagagctaa

SEQ ID NO: 109875 - RNA, 22 nt, synthetic construct
  source 1..22: mol_type = other RNA
aaaaggttgcttaattgagctg

SEQ ID NO: 109876 - RNA, 22 nt, synthetic construct
  source 1..22: mol_type = other RNA
aaaaggtttccagtggcccccc

SEQ ID NO: 109877 - RNA, 22 nt, synthetic construct
  source 1..22: mol_type = other RNA
aaaaggtttttgaacaagagcg

SEQ ID NO: 109878 - RNA, 22 nt, synthetic construct
  source 1..22: mol_type = other RNA
aaaagtaaattcgcataaccaa

SEQ ID NO: 109879 - RNA, 22 nt, synthetic construct
  source 1..22: mol_type = other RNA
aaaagtaatgaaaattagctgg

SEQ ID NO: 109880 - RNA, 22 nt, synthetic construct
  source 1..22: mol_type = other RNA
aaaagtacagataaccaataag

SEQ ID NO: 109881 - RNA, 22 nt, synthetic construct
  source 1..22: mol_type = other RNA
aaaagtactggaaatggacagc

SEQ ID NO: 109882 - RNA, 22 nt, synthetic construct
  source 1..22: mol_type = other RNA
aaaagtaggggtaaatctttgt

SEQ ID NO: 109883 - RNA, 22 nt, synthetic construct
  source 1..22: mol_type = other RNA
aaaagtatcgtgagactattat

SEQ ID NO: 109884 - RNA, 22 nt, synthetic construct
  source 1..22: mol_type = other RNA
aaaagtatggttgaagaaagta

SEQ ID NO: 109885 - RNA, 22 nt, synthetic construct
  source 1..22: mol_type = other RNA
aaaagtcagctaggcgtagtat

SEQ ID NO: 109886 - RNA, 22 nt, synthetic construct
  source 1..22: mol_type = other RNA
aaaagtcagtaaaaaaggacca

SEQ ID NO: 109887 - RNA, 22 nt, synthetic construct
  source 1..22: mol_type = other RNA
aaaagtcatgacctgctttctt

SEQ ID NO: 109888 - RNA, 22 nt, synthetic construct
  source 1..22: mol_type = other RNA
aaaagtcattgaaactcaatgt

SEQ ID NO: 109889 - RNA, 22 nt, synthetic construct
  source 1..22: mol_type = other RNA
aaaagtcctgttcttttgtaat

SEQ ID NO: 109890 - RNA, 22 nt, synthetic construct
  source 1..22: mol_type = other RNA
aaaagtgaaaactaaggtcaag

SEQ ID NO: 109891 - RNA, 22 nt, synthetic construct
  source 1..22: mol_type = other RNA
aaaagtgaatcactacagcata

SEQ ID NO: 109892 - RNA, 22 nt, synthetic construct
  source 1..22: mol_type = other RNA
aaaagtgacttctggatgtgta

SEQ ID NO: 109893 - RNA, 22 nt, synthetic construct
  source 1..22: mol_type = other RNA
aaaagtgataccataaagtcag

SEQ ID NO: 109894 - RNA, 22 nt, synthetic construct
  source 1..22: mol_type = other RNA
aaaagtgctgcagtatgcatag

SEQ ID NO: 109895 - RNA, 22 nt, synthetic construct
  source 1..22: mol_type = other RNA
aaaagtgctgttgaggctgggc

SEQ ID NO: 109896 - RNA, 22 nt, synthetic construct
  source 1..22: mol_type = other RNA
aaaagtgcttctagtaacttgg

SEQ ID NO: 109897 - RNA, 22 nt, synthetic construct
  source 1..22: mol_type = other RNA
aaaagtgtgaccacattcccaa

SEQ ID NO: 109898 - RNA, 22 nt, synthetic construct
  source 1..22: mol_type = other RNA
aaaagtgttgactaccatctct

SEQ ID NO: 109899 - RNA, 22 nt, synthetic construct
  source 1..22: mol_type = other RNA
aaaagtgtttgtcacatagaag

SEQ ID NO: 109900 - RNA, 22 nt, synthetic construct
  source 1..22: mol_type = other RNA
aaaagttaatattgtaggtgtc

SEQ ID NO: 109901 - RNA, 22 nt, synthetic construct
  source 1..22: mol_type = other RNA
aaaagttacaaggattgaatgg

SEQ ID NO: 109902 - RNA, 22 nt, synthetic construct
  source 1..22: mol_type = other RNA
aaaagttagctggcaaaatgga

SEQ ID NO: 109903 - RNA, 22 nt, synthetic construct
  source 1..22: mol_type = other RNA
aaaagttccaagattttcccaa

SEQ ID NO: 109904 - RNA, 22 nt, synthetic construct
  source 1..22: mol_type = other RNA
aaaagttgggcttggttggaaa

SEQ ID NO: 109905 - RNA, 22 nt, synthetic construct
  source 1..22: mol_type = other RNA
aaaagttttccaaccactgaat

SEQ ID NO: 109906 - RNA, 22 nt, synthetic construct
  source 1..22: mol_type = other RNA
aaaagttttttcctttgccttt

SEQ ID NO: 109907 - RNA, 22 nt, synthetic construct
  source 1..22: mol_type = other RNA
aaaataaaaagtatcgtgagac

SEQ ID NO: 109908 - RNA, 22 nt, synthetic construct
  source 1..22: mol_type = other RNA
aaaataaacattttccctcctt

SEQ ID NO: 109909 - RNA, 22 nt, synthetic construct
  source 1..22: mol_type = other RNA
aaaataaaccaagtttggttca

SEQ ID NO: 109910 - RNA, 22 nt, synthetic construct
  source 1..22: mol_type = other RNA
aaaataaagacttcacgatgct

SEQ ID NO: 109911 - RNA, 22 nt, synthetic construct
  source 1..22: mol_type = other RNA
aaaataaaggctttcgtatgga

SEQ ID NO: 109912 - RNA, 22 nt, synthetic construct
  source 1..22: mol_type = other RNA
aaaataaagttccccattgaca

SEQ ID NO: 109913 - RNA, 22 nt, synthetic construct
  source 1..22: mol_type = other RNA
aaaataacacgcagaaccactg

SEQ ID NO: 109914 - RNA, 22 nt, synthetic construct
  source 1..22: mol_type = other RNA
aaaataacgggccgggcgctgt

SEQ ID NO: 109915 - RNA, 22 nt, synthetic construct
  source 1..22: mol_type = other RNA
aaaataatacctaacagccggc

SEQ ID NO: 109916 - RNA, 22 nt, synthetic construct
  source 1..22: mol_type = other RNA
aaaataatgttttccgtgtgac

SEQ ID NO: 109917 - RNA, 22 nt, synthetic construct
  source 1..22: mol_type = other RNA
aaaatacaacagcacctttttt

SEQ ID NO: 109918 - RNA, 22 nt, synthetic construct
  source 1..22: mol_type = other RNA
aaaatacagctccaaagaacag

SEQ ID NO: 109919 - RNA, 22 nt, synthetic construct
  source 1..22: mol_type = other RNA
aaaatacagttttgaccaaaac

SEQ ID NO: 109920 - RNA, 22 nt, synthetic construct
  source 1..22: mol_type = other RNA
aaaatacatgaggcctctcccc

SEQ ID NO: 109921 - RNA, 22 nt, synthetic construct
  source 1..22: mol_type = other RNA
aaaatacatgtcatgttcccgg

SEQ ID NO: 109922 - RNA, 22 nt, synthetic construct
  source 1..22: mol_type = other RNA
aaaataccaaaaaaggtgctgt

SEQ ID NO: 109923 - RNA, 22 nt, synthetic construct
  source 1..22: mol_type = other RNA
aaaataccagaggttaaagcaa

SEQ ID NO: 109924 - RNA, 22 nt, synthetic construct
  source 1..22: mol_type = other RNA
aaaatacccacaagaaaaacct

SEQ ID NO: 109925 - RNA, 22 nt, synthetic construct
  source 1..22: mol_type = other RNA
aaaatacgaaagtgctctaccc

SEQ ID NO: 109926 - RNA, 22 nt, synthetic construct
  source 1..22: mol_type = other RNA
aaaatacggccgggagtggtgg

SEQ ID NO: 109927 - RNA, 22 nt, synthetic construct
  source 1..22: mol_type = other RNA
aaaatactaacgatccttacta

SEQ ID NO: 109928 - RNA, 22 nt, synthetic construct
  source 1..22: mol_type = other RNA
aaaatactacaagagttcccct

SEQ ID NO: 109929 - RNA, 22 nt, synthetic construct
  source 1..22: mol_type = other RNA
aaaatactagcaaactgaatca

SEQ ID NO: 109930 - RNA, 22 nt, synthetic construct
  source 1..22: mol_type = other RNA
aaaatactcaagggctttcaat

SEQ ID NO: 109931 - RNA, 22 nt, synthetic construct
  source 1..22: mol_type = other RNA
aaaatacttaagagcatgttgg

SEQ ID NO: 109932 - RNA, 22 nt, synthetic construct
  source 1..22: mol_type = other RNA
aaaatagaggatgggcattcca

SEQ ID NO: 109933 - RNA, 22 nt, synthetic construct
  source 1..22: mol_type = other RNA
aaaatagagttccatctgttat

SEQ ID NO: 109934 - RNA, 22 nt, synthetic construct
  source 1..22: mol_type = other RNA
aaaatagcaggattcttgttaa

SEQ ID NO: 109935 - RNA, 22 nt, synthetic construct
  source 1..22: mol_type = other RNA
aaaataggaagtccatgaaact

SEQ ID NO: 109936 - RNA, 22 nt, synthetic construct
  source 1..22: mol_type = other RNA
aaaataggattaagacactaca

SEQ ID NO: 109937 - RNA, 22 nt, synthetic construct
  source 1..22: mol_type = other RNA
aaaataggcagtcctctacttt

SEQ ID NO: 109938 - RNA, 22 nt, synthetic construct
  source 1..22: mol_type = other RNA
aaaataggcctaggtgtgataa

SEQ ID NO: 109939 - RNA, 22 nt, synthetic construct
  source 1..22: mol_type = other RNA
aaaatagggacggccttctttt

SEQ ID NO: 109940 - RNA, 22 nt, synthetic construct
  source 1..22: mol_type = other RNA
aaaatagtcaagtaacagttca

SEQ ID NO: 109941 - RNA, 22 nt, synthetic construct
  source 1..22: mol_type = other RNA
aaaatatagaaggccagaggga

SEQ ID NO: 109942 - RNA, 22 nt, synthetic construct
  source 1..22: mol_type = other RNA
aaaatatatacggaatgattcc

SEQ ID NO: 109943 - RNA, 22 nt, synthetic construct
  source 1..22: mol_type = other RNA
aaaatatccctggggtttcctt

SEQ ID NO: 109944 - RNA, 22 nt, synthetic construct
  source 1..22: mol_type = other RNA
aaaatatgtaatgacctggaaa

SEQ ID NO: 109945 - RNA, 22 nt, synthetic construct
  source 1..22: mol_type = other RNA
aaaatatgtccttttgagtttg

SEQ ID NO: 109946 - RNA, 22 nt, synthetic construct
  source 1..22: mol_type = other RNA
aaaatattccatttttctgacc

SEQ ID NO: 109947 - RNA, 22 nt, synthetic construct
  source 1..22: mol_type = other RNA
aaaatattgaagagggaacatt

SEQ ID NO: 109948 - RNA, 22 nt, synthetic construct
  source 1..22: mol_type = other RNA
aaaatcaaagaaagagttgggt

SEQ ID NO: 109949 - RNA, 22 nt, synthetic construct
  source 1..22: mol_type = other RNA
aaaatcaacattgcctccatat

SEQ ID NO: 109950 - RNA, 22 nt, synthetic construct
  source 1..22: mol_type = other RNA
aaaatcaacccatgaaaattga

SEQ ID NO: 109951 - RNA, 22 nt, synthetic construct
  source 1..22: mol_type = other RNA
aaaatcaaccccatcaacaagt

SEQ ID NO: 109952 - RNA, 22 nt, synthetic construct
  source 1..22: mol_type = other RNA
aaaatcaaggtgcgggattatt

SEQ ID NO: 109953 - RNA, 22 nt, synthetic construct
  source 1..22: mol_type = other RNA
aaaatcagatatgaaagaggag

SEQ ID NO: 109954 - RNA, 22 nt, synthetic construct
  source 1..22: mol_type = other RNA
aaaatcatcacagtatgcacaa

SEQ ID NO: 109955 - RNA, 22 nt, synthetic construct
  source 1..22: mol_type = other RNA
aaaatcattgtagctatatccc

SEQ ID NO: 109956 - RNA, 22 nt, synthetic construct
  source 1..22: mol_type = other RNA
aaaatcattgttcagggaaggc

SEQ ID NO: 109957 - RNA, 22 nt, synthetic construct
  source 1..22: mol_type = other RNA
aaaatcattttggcaaattgtc

SEQ ID NO: 109958 - RNA, 22 nt, synthetic construct
  source 1..22: mol_type = other RNA
aaaatccaaaagcctcaaaatt

SEQ ID NO: 109959 - RNA, 22 nt, synthetic construct
  source 1..22: mol_type = other RNA
aaaatccaagaagacatgataa

SEQ ID NO: 109960 - RNA, 22 nt, synthetic construct
  source 1..22: mol_type = other RNA
aaaatcccatttgtaacatgtt

SEQ ID NO: 109961 - RNA, 22 nt, synthetic construct
  source 1..22: mol_type = other RNA
aaaatcctctgtagataaacgt

SEQ ID NO: 109962 - RNA, 22 nt, synthetic construct
  source 1..22: mol_type = other RNA
aaaatcctgctgggctattgtt

SEQ ID NO: 109963 - RNA, 22 nt, synthetic construct
  source 1..22: mol_type = other RNA
aaaatccttacttccagctcac

SEQ ID NO: 109964 - RNA, 22 nt, synthetic construct
  source 1..22: mol_type = other RNA
aaaatcggaacaggctcaatac

SEQ ID NO: 109965 - RNA, 22 nt, synthetic construct
  source 1..22: mol_type = other RNA
aaaatcgtcctcttcgggtgtc

SEQ ID NO: 109966 - RNA, 22 nt, synthetic construct
  source 1..22: mol_type = other RNA
aaaatctaaccctcaatcccca

SEQ ID NO: 109967 - RNA, 22 nt, synthetic construct
  source 1..22: mol_type = other RNA
aaaatctaggttatctgttttc

SEQ ID NO: 109968 - RNA, 22 nt, synthetic construct
  source 1..22: mol_type = other RNA
aaaatctctacagggaaccgta

SEQ ID NO: 109969 - RNA, 22 nt, synthetic construct
  source 1..22: mol_type = other RNA
aaaatctctgacttcattcttg

SEQ ID NO: 109970 - RNA, 22 nt, synthetic construct
  source 1..22: mol_type = other RNA
aaaatctgacaatttgccaaaa

SEQ ID NO: 109971 - RNA, 22 nt, synthetic construct
  source 1..22: mol_type = other RNA
aaaatctgatgtgtatgttaca

SEQ ID NO: 109972 - RNA, 22 nt, synthetic construct
  source 1..22: mol_type = other RNA
aaaatctgattcagtggttgga

SEQ ID NO: 109973 - RNA, 22 nt, synthetic construct
  source 1..22: mol_type = other RNA
aaaatctgtatgagaagactgg

SEQ ID NO: 109974 - RNA, 22 nt, synthetic construct
  source 1..22: mol_type = other RNA
aaaatcttattccccagggaaa

SEQ ID NO: 109975 - RNA, 22 nt, synthetic construct
  source 1..22: mol_type = other RNA
aaaatgaaaaattcactcctca

SEQ ID NO: 109976 - RNA, 22 nt, synthetic construct
  source 1..22: mol_type = other RNA
aaaatgaaaatgttccctcttc

SEQ ID NO: 109977 - RNA, 22 nt, synthetic construct
  source 1..22: mol_type = other RNA
aaaatgaacctgctttctacta

SEQ ID NO: 109978 - RNA, 22 nt, synthetic construct
  source 1..22: mol_type = other RNA
aaaatgacacaacttactacta

SEQ ID NO: 109979 - RNA, 22 nt, synthetic construct
  source 1..22: mol_type = other RNA
aaaatgacaccaaaactacagg

SEQ ID NO: 109980 - RNA, 22 nt, synthetic construct
  source 1..22: mol_type = other RNA
aaaatgagaaacctaagaaagg

SEQ ID NO: 109981 - RNA, 22 nt, synthetic construct
  source 1..22: mol_type = other RNA
aaaatgagccaggcatggtggt

SEQ ID NO: 109982 - RNA, 22 nt, synthetic construct
  source 1..22: mol_type = other RNA
aaaatgagggtaaaatagtcaa

SEQ ID NO: 109983 - RNA, 22 nt, synthetic construct
  source 1..22: mol_type = other RNA
aaaatgatagcattatcccaga

SEQ ID NO: 109984 - RNA, 22 nt, synthetic construct
  source 1..22: mol_type = other RNA
aaaatgatggcaacaatcaaca

SEQ ID NO: 109985 - RNA, 22 nt, synthetic construct
  source 1..22: mol_type = other RNA
aaaatgattttcacagggcagg

SEQ ID NO: 109986 - RNA, 22 nt, synthetic construct
  source 1..22: mol_type = other RNA
aaaatgcagtagtaaagcaaat

SEQ ID NO: 109987 - RNA, 22 nt, synthetic construct
  source 1..22: mol_type = other RNA
aaaatgcccttatttaatgtgc

SEQ ID NO: 109988 - RNA, 22 nt, synthetic construct
  source 1..22: mol_type = other RNA
aaaatgcgcgtccgcgacccgg

SEQ ID NO: 109989 - RNA, 22 nt, synthetic construct
  source 1..22: mol_type = other RNA
aaaatgctggaaattttcaagg

SEQ ID NO: 109990 - RNA, 22 nt, synthetic construct
  source 1..22: mol_type = other RNA
aaaatgcttaacaagaatcctg

SEQ ID NO: 109991 - RNA, 22 nt, synthetic construct
  source 1..22: mol_type = other RNA
aaaatgcttatgtcttgtggct

SEQ ID NO: 109992 - RNA, 22 nt, synthetic construct
  source 1..22: mol_type = other RNA
aaaatgctttttctgcatcttt

SEQ ID NO: 109993 - RNA, 22 nt, synthetic construct
  source 1..22: mol_type = other RNA
aaaatggaagactttatggtaa

SEQ ID NO: 109994 - RNA, 22 nt, synthetic construct
  source 1..22: mol_type = other RNA
aaaatggaagtgctgggctagg

SEQ ID NO: 109995 - RNA, 22 nt, synthetic construct
  source 1..22: mol_type = other RNA
aaaatggaatattgttcagcct

SEQ ID NO: 109996 - RNA, 22 nt, synthetic construct
  source 1..22: mol_type = other RNA
aaaatggagacatctgagacat

SEQ ID NO: 109997 - RNA, 22 nt, synthetic construct
  source 1..22: mol_type = other RNA
aaaatggagacccatactcagc

SEQ ID NO: 109998 - RNA, 22 nt, synthetic construct
  source 1..22: mol_type = other RNA
aaaatggatcaaagacctaagc

SEQ ID NO: 109999 - RNA, 22 nt, synthetic construct
  source 1..22: mol_type = other RNA
aaaatggcacatactgcatatt

SEQ ID NO: 110000 - RNA, 22 nt, synthetic construct
  source 1..22: mol_type = other RNA
aaaatggccaagagttgctgac

SEQ ID NO: 110001 - RNA, 22 nt, synthetic construct
  source 1..22: mol_type = other RNA
aaaatgggccaaagacttcaac

SEQ ID NO: 110002 - RNA, 22 nt, synthetic construct
  source 1..22: mol_type = other RNA
aaaatggggatatccaaagata

SEQ ID NO: 110003 - RNA, 22 nt, synthetic construct
  source 1..22: mol_type = other RNA
aaaatggtcaacatgaaaagat

SEQ ID NO: 110004 - RNA, 22 nt, synthetic construct
  source 1..22: mol_type = other RNA
aaaatggtgcagccactataga

SEQ ID NO: 110005 - RNA, 22 nt, synthetic construct
  source 1..22: mol_type = other RNA
aaaatggtttaggctgtctcca

SEQ ID NO: 110006 - RNA, 22 nt, synthetic construct
  source 1..22: mol_type = other RNA
aaaatggttttatggtaactcc

SEQ ID NO: 110007 - RNA, 22 nt, synthetic construct
  source 1..22: mol_type = other RNA
aaaatgtaaaacatcaaagtcc

SEQ ID NO: 110008 - RNA, 22 nt, synthetic construct
  source 1..22: mol_type = other RNA
aaaatgtaaattctgccacatt

SEQ ID NO: 110009 - RNA, 22 nt, synthetic construct
  source 1..22: mol_type = other RNA
aaaatgtcaattttcccccaat

SEQ ID NO: 110010 - RNA, 22 nt, synthetic construct
  source 1..22: mol_type = other RNA
aaaatgtccgttgaagtctttg

SEQ ID NO: 110011 - RNA, 22 nt, synthetic construct
  source 1..22: mol_type = other RNA
aaaatgtgacattagtggtggt

SEQ ID NO: 110012 - RNA, 22 nt, synthetic construct
  source 1..22: mol_type = other RNA
aaaatgtgatggcatcattcat

SEQ ID NO: 110013 - RNA, 22 nt, synthetic construct
  source 1..22: mol_type = other RNA
aaaatgtggatgcatgaggcat

SEQ ID NO: 110014 - RNA, 22 nt, synthetic construct
  source 1..22: mol_type = other RNA
aaaatgtggcaaatttatgtga

SEQ ID NO: 110015 - RNA, 22 nt, synthetic construct
  source 1..22: mol_type = other RNA
aaaatgtggcatatcacattaa

SEQ ID NO: 110016 - RNA, 22 nt, synthetic construct
  source 1..22: mol_type = other RNA
aaaatgtggcatttcttacaca

SEQ ID NO: 110017 - RNA, 22 nt, synthetic construct
  source 1..22: mol_type = other RNA
aaaatgtgtctagtgaatgaga

SEQ ID NO: 110018 - RNA, 22 nt, synthetic construct
  source 1..22: mol_type = other RNA
aaaatgttatacagcaaatctc

SEQ ID NO: 110019 - RNA, 22 nt, synthetic construct
  source 1..22: mol_type = other RNA
aaaatgttcagatagaaaagac

SEQ ID NO: 110020 - RNA, 22 nt, synthetic construct
  source 1..22: mol_type = other RNA
aaaatgttccctcttcaatatt

SEQ ID NO: 110021 - RNA, 22 nt, synthetic construct
  source 1..22: mol_type = other RNA
aaaatgttgccaatatctatca

SEQ ID NO: 110022 - RNA, 22 nt, synthetic construct
  source 1..22: mol_type = other RNA
aaaatgtttaattacccaggca

SEQ ID NO: 110023 - RNA, 22 nt, synthetic construct
  source 1..22: mol_type = other RNA
aaaatgtttagcggaatgacta

SEQ ID NO: 110024 - RNA, 22 nt, synthetic construct
  source 1..22: mol_type = other RNA
aaaatgtttgtttaattagccg

SEQ ID NO: 110025 - RNA, 22 nt, synthetic construct
  source 1..22: mol_type = other RNA
aaaatgttttaaggcagggctt

SEQ ID NO: 110026 - RNA, 22 nt, synthetic construct
  source 1..22: mol_type = other RNA
aaaattaatgccccatgtgttg

SEQ ID NO: 110027 - RNA, 22 nt, synthetic construct
  source 1..22: mol_type = other RNA
aaaattacaactggtttctgca

SEQ ID NO: 110028 - RNA, 22 nt, synthetic construct
  source 1..22: mol_type = other RNA
aaaattacaggtcaaactcact

SEQ ID NO: 110029 - RNA, 22 nt, synthetic construct
  source 1..22: mol_type = other RNA
aaaattaccccattcactcagc

SEQ ID NO: 110030 - RNA, 22 nt, synthetic construct
  source 1..22: mol_type = other RNA
aaaattagccaagcatggtggt

SEQ ID NO: 110031 - RNA, 22 nt, synthetic construct
  source 1..22: mol_type = other RNA
aaaattagccttttacacccta

SEQ ID NO: 110032 - RNA, 22 nt, synthetic construct
  source 1..22: mol_type = other RNA
aaaattagctgactttcatttg

SEQ ID NO: 110033 - RNA, 22 nt, synthetic construct
  source 1..22: mol_type = other RNA
aaaattagctggatgtggtgtg

SEQ ID NO: 110034 - RNA, 22 nt, synthetic construct
  source 1..22: mol_type = other RNA
aaaattagctgggcgagatggc

SEQ ID NO: 110035 - RNA, 22 nt, synthetic construct
  source 1..22: mol_type = other RNA
aaaattaggccaggcactgtgg

SEQ ID NO: 110036 - RNA, 22 nt, synthetic construct
  source 1..22: mol_type = other RNA
aaaattcaaacatgacagatcc

SEQ ID NO: 110037 - RNA, 22 nt, synthetic construct
  source 1..22: mol_type = other RNA
aaaattcaccaaacaccttaca

SEQ ID NO: 110038 - RNA, 22 nt, synthetic construct
  source 1..22: mol_type = other RNA
aaaattcactcctcattcacac

SEQ ID NO: 110039 - RNA, 22 nt, synthetic construct
  source 1..22: mol_type = other RNA
aaaattccctcagcaaaagcaa

SEQ ID NO: 110040 - RNA, 22 nt, synthetic construct
  source 1..22: mol_type = other RNA
aaaattcccttcagtgtagtca

SEQ ID NO: 110041 - RNA, 22 nt, synthetic construct
  source 1..22: mol_type = other RNA
aaaattccgctctggttttaaa

SEQ ID NO: 110042 - RNA, 22 nt, synthetic construct
  source 1..22: mol_type = other RNA
aaaattccttcccctttctttg

SEQ ID NO: 110043 - RNA, 22 nt, synthetic construct
  source 1..22: mol_type = other RNA
aaaattccttcctttgatgact

SEQ ID NO: 110044 - RNA, 22 nt, synthetic construct
  source 1..22: mol_type = other RNA
aaaattctaacaagaagctgtt

SEQ ID NO: 110045 - RNA, 22 nt, synthetic construct
  source 1..22: mol_type = other RNA
aaaattctgaccctttattcaa

SEQ ID NO: 110046 - RNA, 22 nt, synthetic construct
  source 1..22: mol_type = other RNA
aaaattctgatagcttgacaaa

SEQ ID NO: 110047 - RNA, 22 nt, synthetic construct
  source 1..22: mol_type = other RNA
aaaattctgttctcagtatcct

SEQ ID NO: 110048 - RNA, 22 nt, synthetic construct
  source 1..22: mol_type = other RNA
aaaattcttccagcctggtaat

SEQ ID NO: 110049 - RNA, 22 nt, synthetic construct
  source 1..22: mol_type = other RNA
aaaattgcagagtgttcaaaag

SEQ ID NO: 110050 - RNA, 22 nt, synthetic construct
  source 1..22: mol_type = other RNA
aaaattgcaggtttactccaag

SEQ ID NO: 110051 - RNA, 22 nt, synthetic construct
  source 1..22: mol_type = other RNA
aaaattggataacctagaagaa

SEQ ID NO: 110052 - RNA, 22 nt, synthetic construct
  source 1..22: mol_type = other RNA
aaaattggcgtacatgtagata

SEQ ID NO: 110053 - RNA, 22 nt, synthetic construct
  source 1..22: mol_type = other RNA
aaaattgttcatgaaatcccct

SEQ ID NO: 110054 - RNA, 22 nt, synthetic construct
  source 1..22: mol_type = other RNA
aaaatttagcttctgaattgag

SEQ ID NO: 110055 - RNA, 22 nt, synthetic construct
  source 1..22: mol_type = other RNA
aaaatttagtaagggtaaacag

SEQ ID NO: 110056 - RNA, 22 nt, synthetic construct
  source 1..22: mol_type = other RNA
aaaatttccagcattttatagg

SEQ ID NO: 110057 - RNA, 22 nt, synthetic construct
  source 1..22: mol_type = other RNA
aaaatttgacatgacaggtgag

SEQ ID NO: 110058 - RNA, 22 nt, synthetic construct
  source 1..22: mol_type = other RNA
aaaattttaaatcagcaccatc

SEQ ID NO: 110059 - RNA, 22 nt, synthetic construct
  source 1..22: mol_type = other RNA
aaaattttatggttttttcccc

SEQ ID NO: 110060 - RNA, 22 nt, synthetic construct
  source 1..22: mol_type = other RNA
aaaattttcattctacctggag

SEQ ID NO: 110061 - RNA, 22 nt, synthetic construct
  source 1..22: mol_type = other RNA
aaaattttctcccaaggttgcc

SEQ ID NO: 110062 - RNA, 22 nt, synthetic construct
  source 1..22: mol_type = other RNA
aaaattttctgagcaactacta

SEQ ID NO: 110063 - RNA, 22 nt, synthetic construct
  source 1..22: mol_type = other RNA
aaaattttgcttaaagttggtc

SEQ ID NO: 110064 - RNA, 22 nt, synthetic construct
  source 1..22: mol_type = other RNA
aaaattttgttcaggagttttg

SEQ ID NO: 110065 - RNA, 22 nt, synthetic construct
  source 1..22: mol_type = other RNA
aaaatttttgcaaaccaaatgc

SEQ ID NO: 110066 - RNA, 22 nt, synthetic construct
  source 1..22: mol_type = other RNA
aaaatttttgtctggaacacac

SEQ ID NO: 110067 - RNA, 22 nt, synthetic construct
  source 1..22: mol_type = other RNA
aaacaaaaaaccactggatacg

SEQ ID NO: 110068 - RNA, 22 nt, synthetic construct
  source 1..22: mol_type = other RNA
aaacaaaacaaaaccctgttgg

SEQ ID NO: 110069 - RNA, 22 nt, synthetic construct
  source 1..22: mol_type = other RNA
aaacaaaacaaagtctttgggt

SEQ ID NO: 110070 - RNA, 22 nt, synthetic construct
  source 1..22: mol_type = other RNA
aaacaaaacacatggcatcggg

SEQ ID NO: 110071 - RNA, 22 nt, synthetic construct
  source 1..22: mol_type = other RNA
aaacaaaaccctgttgggctat

SEQ ID NO: 110072 - RNA, 22 nt, synthetic construct
  source 1..22: mol_type = other RNA
aaacaaaagagtagattccccc

SEQ ID NO: 110073 - RNA, 22 nt, synthetic construct
  source 1..22: mol_type = other RNA
aaacaaacaaacagaaaggccc

SEQ ID NO: 110074 - RNA, 22 nt, synthetic construct
  source 1..22: mol_type = other RNA
aaacaaacacactgggtaaaca

SEQ ID NO: 110075 - RNA, 22 nt, synthetic construct
  source 1..22: mol_type = other RNA
aaacaaacagaaaggcccaaaa

SEQ ID NO: 110076 - RNA, 22 nt, synthetic construct
  source 1..22: mol_type = other RNA
aaacaaacattttttgcagaga

SEQ ID NO: 110077 - RNA, 22 nt, synthetic construct
  source 1..22: mol_type = other RNA
aaacaaagagaacaatggaata

SEQ ID NO: 110078 - RNA, 22 nt, synthetic construct
  source 1..22: mol_type = other RNA
aaacaaagtctttgggtaattt

SEQ ID NO: 110079 - RNA, 22 nt, synthetic construct
  source 1..22: mol_type = other RNA
aaacaaatcagatttcaggtgg

SEQ ID NO: 110080 - RNA, 22 nt, synthetic construct
  source 1..22: mol_type = other RNA
aaacaaatccttttcccaggag

SEQ ID NO: 110081 - RNA, 22 nt, synthetic construct
  source 1..22: mol_type = other RNA
aaacaaatggaaccactgtagg

SEQ ID NO: 110082 - RNA, 22 nt, synthetic construct
  source 1..22: mol_type = other RNA
aaacaaattcatgcaactgaaa

SEQ ID NO: 110083 - RNA, 22 nt, synthetic construct
  source 1..22: mol_type = other RNA
aaacaaattccctctacaaaag

SEQ ID NO: 110084 - RNA, 22 nt, synthetic construct
  source 1..22: mol_type = other RNA
aaacaaattgcatcaactgctt

SEQ ID NO: 110085 - RNA, 22 nt, synthetic construct
  source 1..22: mol_type = other RNA
aaacaacaacaacaaaataccc

SEQ ID NO: 110086 - RNA, 22 nt, synthetic construct
  source 1..22: mol_type = other RNA
aaacaacaacaacaacaaaaca

SEQ ID NO: 110087 - RNA, 22 nt, synthetic construct
  source 1..22: mol_type = other RNA
aaacaacaacaacaacaacaaa

SEQ ID NO: 110088 - RNA, 22 nt, synthetic construct
  source 1..22: mol_type = other RNA
aaacaacactaaccaacattga

SEQ ID NO: 110089 - RNA, 22 nt, synthetic construct
  source 1..22: mol_type = other RNA
aaacaacctaaatgtccatcga

SEQ ID NO: 110090 - RNA, 22 nt, synthetic construct
  source 1..22: mol_type = other RNA
aaacaactcaaacgtccatcaa

SEQ ID NO: 110091 - RNA, 22 nt, synthetic construct
  source 1..22: mol_type = other RNA
aaacaactgactctaaagtcta

SEQ ID NO: 110092 - RNA, 22 nt, synthetic construct
  source 1..22: mol_type = other RNA
aaacaagaagaaaaagcaactt

SEQ ID NO: 110093 - RNA, 22 nt, synthetic construct
  source 1..22: mol_type = other RNA
aaacaagactcaacatgtgtat

SEQ ID NO: 110094 - RNA, 22 nt, synthetic construct
  source 1..22: mol_type = other RNA
aaacaagtcacaaaaagacaag

SEQ ID NO: 110095 - RNA, 22 nt, synthetic construct
  source 1..22: mol_type = other RNA
aaacaataagacaccgctccac

SEQ ID NO: 110096 - RNA, 22 nt, synthetic construct
  source 1..22: mol_type = other RNA
aaacaatactttagacatgggc

SEQ ID NO: 110097 - RNA, 22 nt, synthetic construct
  source 1..22: mol_type = other RNA
aaacaatagcccagcaggattt

SEQ ID NO: 110098 - RNA, 22 nt, synthetic construct
  source 1..22: mol_type = other RNA
aaacaataggaatagtattcag

SEQ ID NO: 110099 - RNA, 22 nt, synthetic construct
  source 1..22: mol_type = other RNA
aaacaatcgcaatccaaaatcc

SEQ ID NO: 110100 - RNA, 22 nt, synthetic construct
  source 1..22: mol_type = other RNA
aaacaatctaattcgaaaatgg

SEQ ID NO: 110101 - RNA, 22 nt, synthetic construct
  source 1..22: mol_type = other RNA
aaacaatctacagattcaatgc

SEQ ID NO: 110102 - RNA, 22 nt, synthetic construct
  source 1..22: mol_type = other RNA
aaacaatcttgaaaggggccag

SEQ ID NO: 110103 - RNA, 22 nt, synthetic construct
  source 1..22: mol_type = other RNA
aaacaatgctgctatgaaaatt

SEQ ID NO: 110104 - RNA, 22 nt, synthetic construct
  source 1..22: mol_type = other RNA
aaacaattacttgagagcagag

SEQ ID NO: 110105 - RNA, 22 nt, synthetic construct
  source 1..22: mol_type = other RNA
aaacacaaaacaaatggaacca

SEQ ID NO: 110106 - RNA, 22 nt, synthetic construct
  source 1..22: mol_type = other RNA
aaacacaaactgcagaatgaca

SEQ ID NO: 110107 - RNA, 22 nt, synthetic construct
  source 1..22: mol_type = other RNA
aaacacaacataccaaaaccct

SEQ ID NO: 110108 - RNA, 22 nt, synthetic construct
  source 1..22: mol_type = other RNA
aaacacaaggacaggtcacatt

SEQ ID NO: 110109 - RNA, 22 nt, synthetic construct
  source 1..22: mol_type = other RNA
aaacacacaaaccaacaacaaa

SEQ ID NO: 110110 - RNA, 22 nt, synthetic construct
  source 1..22: mol_type = other RNA
aaacacacccttggtaaacagc

SEQ ID NO: 110111 - RNA, 22 nt, synthetic construct
  source 1..22: mol_type = other RNA
aaacacacgggctgggcgcgat

SEQ ID NO: 110112 - RNA, 22 nt, synthetic construct
  source 1..22: mol_type = other RNA
aaacacacgggtacacatccta

SEQ ID NO: 110113 - RNA, 22 nt, synthetic construct
  source 1..22: mol_type = other RNA
aaacacactcgtgtatgatttc

SEQ ID NO: 110114 - RNA, 22 nt, synthetic construct
  source 1..22: mol_type = other RNA
aaacacactgggtaaacaagac

SEQ ID NO: 110115 - RNA, 22 nt, synthetic construct
  source 1..22: mol_type = other RNA
aaacacagaacactaaagggga

SEQ ID NO: 110116 - RNA, 22 nt, synthetic construct
  source 1..22: mol_type = other RNA
aaacacaggactgtgtgtgtcc

SEQ ID NO: 110117 - RNA, 22 nt, synthetic construct
  source 1..22: mol_type = other RNA
aaacacagggactgatgaagaa

SEQ ID NO: 110118 - RNA, 22 nt, synthetic construct
  source 1..22: mol_type = other RNA
aaacacatggcatcggggccta

SEQ ID NO: 110119 - RNA, 22 nt, synthetic construct
  source 1..22: mol_type = other RNA
aaacacatgtcatgggccgggc

SEQ ID NO: 110120 - RNA, 22 nt, synthetic construct
  source 1..22: mol_type = other RNA
aaacaccaaaaaagcaccagtt

SEQ ID NO: 110121 - RNA, 22 nt, synthetic construct
  source 1..22: mol_type = other RNA
aaacaccaacacaaagccttct

SEQ ID NO: 110122 - RNA, 22 nt, synthetic construct
  source 1..22: mol_type = other RNA
aaacacccttgaaaatttccag

SEQ ID NO: 110123 - RNA, 22 nt, synthetic construct
  source 1..22: mol_type = other RNA
aaacacctaaagatatgtgtag

SEQ ID NO: 110124 - RNA, 22 nt, synthetic construct
  source 1..22: mol_type = other RNA
aaacacctcagttaaacccaac

SEQ ID NO: 110125 - RNA, 22 nt, synthetic construct
  source 1..22: mol_type = other RNA
aaacaccttacactcaaaagcc

SEQ ID NO: 110126 - RNA, 22 nt, synthetic construct
  source 1..22: mol_type = other RNA
aaacactcataccaggttttgg

SEQ ID NO: 110127 - RNA, 22 nt, synthetic construct
  source 1..22: mol_type = other RNA
aaacactccagaatgaccgaga

SEQ ID NO: 110128 - RNA, 22 nt, synthetic construct
  source 1..22: mol_type = other RNA
aaacactgctcagaagctttca

SEQ ID NO: 110129 - RNA, 22 nt, synthetic construct
  source 1..22: mol_type = other RNA
aaacactggaaatcacaggttt

SEQ ID NO: 110130 - RNA, 22 nt, synthetic construct
  source 1..22: mol_type = other RNA
aaacactggaagtaattgggat

SEQ ID NO: 110131 - RNA, 22 nt, synthetic construct
  source 1..22: mol_type = other RNA
aaacactggcaaaaatcatcat

SEQ ID NO: 110132 - RNA, 22 nt, synthetic construct
  source 1..22: mol_type = other RNA
aaacactgtagttcagtttttc

SEQ ID NO: 110133 - RNA, 22 nt, synthetic construct
  source 1..22: mol_type = other RNA
aaacactgttctgcgtggtttt

SEQ ID NO: 110134 - RNA, 22 nt, synthetic construct
  source 1..22: mol_type = other RNA
aaacacttagcatgttgctttg

SEQ ID NO: 110135 - RNA, 22 nt, synthetic construct
  source 1..22: mol_type = other RNA
aaacacttctgtgatcagaaga

SEQ ID NO: 110136 - RNA, 22 nt, synthetic construct
  source 1..22: mol_type = other RNA
aaacacttgtgtaactaccact

SEQ ID NO: 110137 - RNA, 22 nt, synthetic construct
  source 1..22: mol_type = other RNA
aaacacttttcaaacacttaac

SEQ ID NO: 110138 - RNA, 22 nt, synthetic construct
  source 1..22: mol_type = other RNA
aaacagaaaccctgtacccatt

SEQ ID NO: 110139 - RNA, 22 nt, synthetic construct
  source 1..22: mol_type = other RNA
aaacagaaaggcccaaaaagtt

SEQ ID NO: 110140 - RNA, 22 nt, synthetic construct
  source 1..22: mol_type = other RNA
aaacagaaatgaaatggccctt

SEQ ID NO: 110141 - RNA, 22 nt, synthetic construct
  source 1..22: mol_type = other RNA
aaacagaagacacaaaatcaga

SEQ ID NO: 110142 - RNA, 22 nt, synthetic construct
  source 1..22: mol_type = other RNA
aaacagacccttatgtccagcc

SEQ ID NO: 110143 - RNA, 22 nt, synthetic construct
  source 1..22: mol_type = other RNA
aaacagactgagccagcaaatc

SEQ ID NO: 110144 - RNA, 22 nt, synthetic construct
  source 1..22: mol_type = other RNA
aaacagagttttccaataagtt

SEQ ID NO: 110145 - RNA, 22 nt, synthetic construct
  source 1..22: mol_type = other RNA
aaacagatcttggccgaatgtg

SEQ ID NO: 110146 - RNA, 22 nt, synthetic construct
  source 1..22: mol_type = other RNA
aaacagcagtcttaaccattga

SEQ ID NO: 110147 - RNA, 22 nt, synthetic construct
  source 1..22: mol_type = other RNA
aaacagcatactgtggatatct

SEQ ID NO: 110148 - RNA, 22 nt, synthetic construct
  source 1..22: mol_type = other RNA
aaacagcatatacatgacatgg

SEQ ID NO: 110149 - RNA, 22 nt, synthetic construct
  source 1..22: mol_type = other RNA
aaacagcctaattgtacacctc

SEQ ID NO: 110150 - RNA, 22 nt, synthetic construct
  source 1..22: mol_type = other RNA
aaacagcgccacttaaaaaatg

SEQ ID NO: 110151 - RNA, 22 nt, synthetic construct
  source 1..22: mol_type = other RNA
aaacagctaggtgagtgagatg

SEQ ID NO: 110152 - RNA, 22 nt, synthetic construct
  source 1..22: mol_type = other RNA
aaacagcttcttgttagaattt

SEQ ID NO: 110153 - RNA, 22 nt, synthetic construct
  source 1..22: mol_type = other RNA
aaacagcttgacattcttacct

SEQ ID NO: 110154 - RNA, 22 nt, synthetic construct
  source 1..22: mol_type = other RNA
aaacaggaagttgagaaagagg

SEQ ID NO: 110155 - RNA, 22 nt, synthetic construct
  source 1..22: mol_type = other RNA
aaacaggatacaaaaagcacct

SEQ ID NO: 110156 - RNA, 22 nt, synthetic construct
  source 1..22: mol_type = other RNA
aaacaggattacaatgtaaggt

SEQ ID NO: 110157 - RNA, 22 nt, synthetic construct
  source 1..22: mol_type = other RNA
aaacagggttacagtatagggg

SEQ ID NO: 110158 - RNA, 22 nt, synthetic construct
  source 1..22: mol_type = other RNA
aaacagggttattaacataccg

SEQ ID NO: 110159 - RNA, 22 nt, synthetic construct
  source 1..22: mol_type = other RNA
aaacaggtgtaagagattaatt

SEQ ID NO: 110160 - RNA, 22 nt, synthetic construct
  source 1..22: mol_type = other RNA
aaacagtaattagttacatgag

SEQ ID NO: 110161 - RNA, 22 nt, synthetic construct
  source 1..22: mol_type = other RNA
aaacagtacagtagtaaaacca

SEQ ID NO: 110162 - RNA, 22 nt, synthetic construct
  source 1..22: mol_type = other RNA
aaacagtgaccacagtttgaaa

SEQ ID NO: 110163 - RNA, 22 nt, synthetic construct
  source 1..22: mol_type = other RNA
aaacagttgctattcaacaggt

SEQ ID NO: 110164 - RNA, 22 nt, synthetic construct
  source 1..22: mol_type = other RNA
aaacagtttccctctgagagaa

SEQ ID NO: 110165 - RNA, 22 nt, synthetic construct
  source 1..22: mol_type = other RNA
aaacagtttggcaatttctcaa

SEQ ID NO: 110166 - RNA, 22 nt, synthetic construct
  source 1..22: mol_type = other RNA
aaacataccccaaccctaccta

SEQ ID NO: 110167 - RNA, 22 nt, synthetic construct
  source 1..22: mol_type = other RNA
aaacatatccttctacatcccc

SEQ ID NO: 110168 - RNA, 22 nt, synthetic construct
  source 1..22: mol_type = other RNA
aaacatatgcaggaccaacttt

SEQ ID NO: 110169 - RNA, 22 nt, synthetic construct
  source 1..22: mol_type = other RNA
aaacatatgcatgttatttggg

SEQ ID NO: 110170 - RNA, 22 nt, synthetic construct
  source 1..22: mol_type = other RNA
aaacatatgtcagatggtaaat

SEQ ID NO: 110171 - RNA, 22 nt, synthetic construct
  source 1..22: mol_type = other RNA
aaacatcaaagtcccctgtaat

SEQ ID NO: 110172 - RNA, 22 nt, synthetic construct
  source 1..22: mol_type = other RNA
aaacatcatctaatttcccatt

SEQ ID NO: 110173 - RNA, 22 nt, synthetic construct
  source 1..22: mol_type = other RNA
aaacatcatgatttaatagagg

SEQ ID NO: 110174 - RNA, 22 nt, synthetic construct
  source 1..22: mol_type = other RNA
aaacatccattactcgtggtta

SEQ ID NO: 110175 - RNA, 22 nt, synthetic construct
  source 1..22: mol_type = other RNA
aaacatcccaagtgcccattaa

SEQ ID NO: 110176 - RNA, 22 nt, synthetic construct
  source 1..22: mol_type = other RNA
aaacatctggaaggaaacacta

SEQ ID NO: 110177 - RNA, 22 nt, synthetic construct
  source 1..22: mol_type = other RNA
aaacatgaacaagttacaaaca

SEQ ID NO: 110178 - RNA, 22 nt, synthetic construct
  source 1..22: mol_type = other RNA
aaacatgaataaccaatgtcag

SEQ ID NO: 110179 - RNA, 22 nt, synthetic construct
  source 1..22: mol_type = other RNA
aaacatgacagatcccaaaaag

SEQ ID NO: 110180 - RNA, 22 nt, synthetic construct
  source 1..22: mol_type = other RNA
aaacatggatatttggccgggc

SEQ ID NO: 110181 - RNA, 22 nt, synthetic construct
  source 1..22: mol_type = other RNA
aaacatggccagtatctccttt

SEQ ID NO: 110182 - RNA, 22 nt, synthetic construct
  source 1..22: mol_type = other RNA
aaacatggcttagaaatgaaga

SEQ ID NO: 110183 - RNA, 22 nt, synthetic construct
  source 1..22: mol_type = other RNA
aaacatggtaatttgtccatct

SEQ ID NO: 110184 - RNA, 22 nt, synthetic construct
  source 1..22: mol_type = other RNA
aaacatggtccacagaggcttt

SEQ ID NO: 110185 - RNA, 22 nt, synthetic construct
  source 1..22: mol_type = other RNA
aaacatgtaaaacagaccctta

SEQ ID NO: 110186 - RNA, 22 nt, synthetic construct
  source 1..22: mol_type = other RNA
aaacatgtgaggatttatttct

SEQ ID NO: 110187 - RNA, 22 nt, synthetic construct
  source 1..22: mol_type = other RNA
aaacatgttgtgtagaaatgtg

SEQ ID NO: 110188 - RNA, 22 nt, synthetic construct
  source 1..22: mol_type = other RNA
aaacattctacagtattacaca

SEQ ID NO: 110189 - RNA, 22 nt, synthetic construct
  source 1..22: mol_type = other RNA
aaacattgaaggcagaattata

SEQ ID NO: 110190 - RNA, 22 nt, synthetic construct
  source 1..22: mol_type = other RNA
aaacattggaggataatatctg

SEQ ID NO: 110191 - RNA, 22 nt, synthetic construct
  source 1..22: mol_type = other RNA
aaacatttatggaattgccata

SEQ ID NO: 110192 - RNA, 22 nt, synthetic construct
  source 1..22: mol_type = other RNA
aaacattttattaggtgcacac

SEQ ID NO: 110193 - RNA, 22 nt, synthetic construct
  source 1..22: mol_type = other RNA
aaacattttccctcctttttat

SEQ ID NO: 110194 - RNA, 22 nt, synthetic construct
  source 1..22: mol_type = other RNA
aaacattttttgcagagacggg

SEQ ID NO: 110195 - RNA, 22 nt, synthetic construct
  source 1..22: mol_type = other RNA
aaaccaaaaaatgtggcatatc

SEQ ID NO: 110196 - RNA, 22 nt, synthetic construct
  source 1..22: mol_type = other RNA
aaaccaaacactggaaatcaca

SEQ ID NO: 110197 - RNA, 22 nt, synthetic construct
  source 1..22: mol_type = other RNA
aaaccaaagaaaggggaaggaa

SEQ ID NO: 110198 - RNA, 22 nt, synthetic construct
  source 1..22: mol_type = other RNA
aaaccaaatgcagaaaataaac

SEQ ID NO: 110199 - RNA, 22 nt, synthetic construct
  source 1..22: mol_type = other RNA
aaaccaaatgtggatagtgctt

SEQ ID NO: 110200 - RNA, 22 nt, synthetic construct
  source 1..22: mol_type = other RNA
aaaccaagagcatagactttag

SEQ ID NO: 110201 - RNA, 22 nt, synthetic construct
  source 1..22: mol_type = other RNA
aaaccaagcaagtaaaagaaga

SEQ ID NO: 110202 - RNA, 22 nt, synthetic construct
  source 1..22: mol_type = other RNA
aaaccaagtttggttcatttca

SEQ ID NO: 110203 - RNA, 22 nt, synthetic construct
  source 1..22: mol_type = other RNA
aaaccaatgttctcttttcctc

SEQ ID NO: 110204 - RNA, 22 nt, synthetic construct
  source 1..22: mol_type = other RNA
aaaccacaaacatgaataacca

SEQ ID NO: 110205 - RNA, 22 nt, synthetic construct
  source 1..22: mol_type = other RNA
aaaccacacagagaacagcatt

SEQ ID NO: 110206 - RNA, 22 nt, synthetic construct
  source 1..22: mol_type = other RNA
aaaccacagagcctaaaatagg

SEQ ID NO: 110207 - RNA, 22 nt, synthetic construct
  source 1..22: mol_type = other RNA
aaaccacatttcatagcagaat

SEQ ID NO: 110208 - RNA, 22 nt, synthetic construct
  source 1..22: mol_type = other RNA
aaaccacctaactactaataaa

SEQ ID NO: 110209 - RNA, 22 nt, synthetic construct
  source 1..22: mol_type = other RNA
aaaccacgcagaacagtgttta

SEQ ID NO: 110210 - RNA, 22 nt, synthetic construct
  source 1..22: mol_type = other RNA
aaaccacgcagtttgttctgct

SEQ ID NO: 110211 - RNA, 22 nt, synthetic construct
  source 1..22: mol_type = other RNA
aaaccactggatacggaaatat

SEQ ID NO: 110212 - RNA, 22 nt, synthetic construct
  source 1..22: mol_type = other RNA
aaaccagaaaagtgaaacaata

SEQ ID NO: 110213 - RNA, 22 nt, synthetic construct
  source 1..22: mol_type = other RNA
aaaccagacatttctcatactt

SEQ ID NO: 110214 - RNA, 22 nt, synthetic construct
  source 1..22: mol_type = other RNA
aaaccagagcggaatttttata

SEQ ID NO: 110215 - RNA, 22 nt, synthetic construct
  source 1..22: mol_type = other RNA
aaaccaggaggtttgcactggc

SEQ ID NO: 110216 - RNA, 22 nt, synthetic construct
  source 1..22: mol_type = other RNA
aaaccagtgctctcccccgaat

SEQ ID NO: 110217 - RNA, 22 nt, synthetic construct
  source 1..22: mol_type = other RNA
aaaccagtgggtcagctagtgt

SEQ ID NO: 110218 - RNA, 22 nt, synthetic construct
  source 1..22: mol_type = other RNA
aaaccatatacaaaactgaact

SEQ ID NO: 110219 - RNA, 22 nt, synthetic construct
  source 1..22: mol_type = other RNA
aaaccatatggttaatagtgac

SEQ ID NO: 110220 - RNA, 22 nt, synthetic construct
  source 1..22: mol_type = other RNA
aaaccatcaagtgtgatcccaa

SEQ ID NO: 110221 - RNA, 22 nt, synthetic construct
  source 1..22: mol_type = other RNA
aaaccatcctttccttgtccta

SEQ ID NO: 110222 - RNA, 22 nt, synthetic construct
  source 1..22: mol_type = other RNA
aaaccatcgttcacactcgcac

SEQ ID NO: 110223 - RNA, 22 nt, synthetic construct
  source 1..22: mol_type = other RNA
aaaccatgtcatgtatatgctg

SEQ ID NO: 110224 - RNA, 22 nt, synthetic construct
  source 1..22: mol_type = other RNA
aaaccatgttcatgggaagatg

SEQ ID NO: 110225 - RNA, 22 nt, synthetic construct
  source 1..22: mol_type = other RNA
aaaccatttaccccttaaattc

SEQ ID NO: 110226 - RNA, 22 nt, synthetic construct
  source 1..22: mol_type = other RNA
aaaccattttcaatcttggaaa

SEQ ID NO: 110227 - RNA, 22 nt, synthetic construct
  source 1..22: mol_type = other RNA
aaacccaaattaaaggatgtca

SEQ ID NO: 110228 - RNA, 22 nt, synthetic construct
  source 1..22: mol_type = other RNA
aaacccaacaaacaattagcac

SEQ ID NO: 110229 - RNA, 22 nt, synthetic construct
  source 1..22: mol_type = other RNA
aaacccaactctttctttgatt

SEQ ID NO: 110230 - RNA, 22 nt, synthetic construct
  source 1..22: mol_type = other RNA
aaacccagacctgcacaaagga

SEQ ID NO: 110231 - RNA, 22 nt, synthetic construct
  source 1..22: mol_type = other RNA
aaacccatgatctttggaaatg

SEQ ID NO: 110232 - RNA, 22 nt, synthetic construct
  source 1..22: mol_type = other RNA
aaacccatttcatgccatcctg

SEQ ID NO: 110233 - RNA, 22 nt, synthetic construct
  source 1..22: mol_type = other RNA
aaaccccagggatattttcgtg

SEQ ID NO: 110234 - RNA, 22 nt, synthetic construct
  source 1..22: mol_type = other RNA
aaaccccgcatactgtgcagtg

SEQ ID NO: 110235 - RNA, 22 nt, synthetic construct
  source 1..22: mol_type = other RNA
aaacccgctctgggtgcgttga

SEQ ID NO: 110236 - RNA, 22 nt, synthetic construct
  source 1..22: mol_type = other RNA
aaaccctacacccatccaccca

SEQ ID NO: 110237 - RNA, 22 nt, synthetic construct
  source 1..22: mol_type = other RNA
aaaccctcacgaaagcggtcaa

SEQ ID NO: 110238 - RNA, 22 nt, synthetic construct
  source 1..22: mol_type = other RNA
aaaccctgtacccattagacac

SEQ ID NO: 110239 - RNA, 22 nt, synthetic construct
  source 1..22: mol_type = other RNA
aaaccctgttgggctattaagt

SEQ ID NO: 110240 - RNA, 22 nt, synthetic construct
  source 1..22: mol_type = other RNA
aaacccttcatcatttgtatta

SEQ ID NO: 110241 - RNA, 22 nt, synthetic construct
  source 1..22: mol_type = other RNA
aaacccttggctagactaagaa

SEQ ID NO: 110242 - RNA, 22 nt, synthetic construct
  source 1..22: mol_type = other RNA
aaacccttgggatgcagcaaaa

SEQ ID NO: 110243 - RNA, 22 nt, synthetic construct
  source 1..22: mol_type = other RNA
aaaccgacagcagataagatcc

SEQ ID NO: 110244 - RNA, 22 nt, synthetic construct
  source 1..22: mol_type = other RNA
aaacctaaacctgtgatttcca

SEQ ID NO: 110245 - RNA, 22 nt, synthetic construct
  source 1..22: mol_type = other RNA
aaacctaagaaaggtctagtgt

SEQ ID NO: 110246 - RNA, 22 nt, synthetic construct
  source 1..22: mol_type = other RNA
aaacctattatttagagtttgc

SEQ ID NO: 110247 - RNA, 22 nt, synthetic construct
  source 1..22: mol_type = other RNA
aaacctcaagtcttttcctaga

SEQ ID NO: 110248 - RNA, 22 nt, synthetic construct
  source 1..22: mol_type = other RNA
aaacctcccaacaggctgagtg

SEQ ID NO: 110249 - RNA, 22 nt, synthetic construct
  source 1..22: mol_type = other RNA
aaacctcctggttttgatcatc

SEQ ID NO: 110250 - RNA, 22 nt, synthetic construct
  source 1..22: mol_type = other RNA
aaacctgaaatggcttaaggaa

SEQ ID NO: 110251 - RNA, 22 nt, synthetic construct
  source 1..22: mol_type = other RNA
aaacctgaggtctttaaaagaa

SEQ ID NO: 110252 - RNA, 22 nt, synthetic construct
  source 1..22: mol_type = other RNA
aaacctgccatggtgttaaata

SEQ ID NO: 110253 - RNA, 22 nt, synthetic construct
  source 1..22: mol_type = other RNA
aaacctgctacgaatgaactcc

SEQ ID NO: 110254 - RNA, 22 nt, synthetic construct
  source 1..22: mol_type = other RNA
aaacctggaatcctctaccaaa

SEQ ID NO: 110255 - RNA, 22 nt, synthetic construct
  source 1..22: mol_type = other RNA
aaacctggaatgggttggagga

SEQ ID NO: 110256 - RNA, 22 nt, synthetic construct
  source 1..22: mol_type = other RNA
aaacctggcaatactctcagaa

SEQ ID NO: 110257 - RNA, 22 nt, synthetic construct
  source 1..22: mol_type = other RNA
aaacctggtaataatgaaagct

SEQ ID NO: 110258 - RNA, 22 nt, synthetic construct
  source 1..22: mol_type = other RNA
aaacctggtatgagtgtttccc

SEQ ID NO: 110259 - RNA, 22 nt, synthetic construct
  source 1..22: mol_type = other RNA
aaacctgtgatttccagtgttt

SEQ ID NO: 110260 - RNA, 22 nt, synthetic construct
  source 1..22: mol_type = other RNA
aaacctgttacatggttctgtg

SEQ ID NO: 110261 - RNA, 22 nt, synthetic construct
  source 1..22: mol_type = other RNA
aaaccttaaaagagtgaaatga

SEQ ID NO: 110262 - RNA, 22 nt, synthetic construct
  source 1..22: mol_type = other RNA
aaaccttcttatttccttccag

SEQ ID NO: 110263 - RNA, 22 nt, synthetic construct
  source 1..22: mol_type = other RNA
aaaccttggtgtgcttctgata

SEQ ID NO: 110264 - RNA, 22 nt, synthetic construct
  source 1..22: mol_type = other RNA
aaacctttaagttctccaagtt

SEQ ID NO: 110265 - RNA, 22 nt, synthetic construct
  source 1..22: mol_type = other RNA
aaacctttctcaaagcccacca

SEQ ID NO: 110266 - RNA, 22 nt, synthetic construct
  source 1..22: mol_type = other RNA
aaaccttttgtagaccctgtta

SEQ ID NO: 110267 - RNA, 22 nt, synthetic construct
  source 1..22: mol_type = other RNA
aaacctttttgggatctgtcat

SEQ ID NO: 110268 - RNA, 22 nt, synthetic construct
  source 1..22: mol_type = other RNA
aaaccttttttaaggaaaagtc

SEQ ID NO: 110269 - RNA, 22 nt, synthetic construct
  source 1..22: mol_type = other RNA
aaacgaaccaattaccataaag

SEQ ID NO: 110270 - RNA, 22 nt, synthetic construct
  source 1..22: mol_type = other RNA
aaacgacaccagaactacacat

SEQ ID NO: 110271 - RNA, 22 nt, synthetic construct
  source 1..22: mol_type = other RNA
aaacgacagcaggaaaagctac

SEQ ID NO: 110272 - RNA, 22 nt, synthetic construct
  source 1..22: mol_type = other RNA
aaacgaccttgctcattcatct

SEQ ID NO: 110273 - RNA, 22 nt, synthetic construct
  source 1..22: mol_type = other RNA
aaacgaggaaaagagaacattg

SEQ ID NO: 110274 - RNA, 22 nt, synthetic construct
  source 1..22: mol_type = other RNA
aaacgatgcattccagattgaa

SEQ ID NO: 110275 - RNA, 22 nt, synthetic construct
  source 1..22: mol_type = other RNA
aaacgcattgtgatgtctcaga

SEQ ID NO: 110276 - RNA, 22 nt, synthetic construct
  source 1..22: mol_type = other RNA
aaacgcggaatgaagcaggcct

SEQ ID NO: 110277 - RNA, 22 nt, synthetic construct
  source 1..22: mol_type = other RNA
aaacgcggcacttggtaagctg

SEQ ID NO: 110278 - RNA, 22 nt, synthetic construct
  source 1..22: mol_type = other RNA
aaacggaaactttatacctgtt

SEQ ID NO: 110279 - RNA, 22 nt, synthetic construct
  source 1..22: mol_type = other RNA
aaacggaggttgcagtaagccg

SEQ ID NO: 110280 - RNA, 22 nt, synthetic construct
  source 1..22: mol_type = other RNA
aaacgggttatacacacataag

SEQ ID NO: 110281 - RNA, 22 nt, synthetic construct
  source 1..22: mol_type = other RNA
aaacgtcagagcagcactgatg

SEQ ID NO: 110282 - RNA, 22 nt, synthetic construct
  source 1..22: mol_type = other RNA
aaacgtccatcaacagcagaac

SEQ ID NO: 110283 - RNA, 22 nt, synthetic construct
  source 1..22: mol_type = other RNA
aaacgtgcaaactaccaagact

SEQ ID NO: 110284 - RNA, 22 nt, synthetic construct
  source 1..22: mol_type = other RNA
aaacgtgcacacccagttatct

SEQ ID NO: 110285 - RNA, 22 nt, synthetic construct
  source 1..22: mol_type = other RNA
aaacgtgctttccttattgaga

SEQ ID NO: 110286 - RNA, 22 nt, synthetic construct
  source 1..22: mol_type = other RNA
aaacgtgtgtgtaagcacacat

SEQ ID NO: 110287 - RNA, 22 nt, synthetic construct
  source 1..22: mol_type = other RNA
aaacgtttggtgactgaattcc

SEQ ID NO: 110288 - RNA, 22 nt, synthetic construct
  source 1..22: mol_type = other RNA
aaactaaatgtgagcatttagc

SEQ ID NO: 110289 - RNA, 22 nt, synthetic construct
  source 1..22: mol_type = other RNA
aaactaacaaagaacaggaagg

SEQ ID NO: 110290 - RNA, 22 nt, synthetic construct
  source 1..22: mol_type = other RNA
aaactaactagaaaaccgacag

SEQ ID NO: 110291 - RNA, 22 nt, synthetic construct
  source 1..22: mol_type = other RNA
aaactaaggtcaagagagatta

SEQ ID NO: 110292 - RNA, 22 nt, synthetic construct
  source 1..22: mol_type = other RNA
aaactaagtggtattctatcat

SEQ ID NO: 110293 - RNA, 22 nt, synthetic construct
  source 1..22: mol_type = other RNA
aaactacaattactgtacaaag

SEQ ID NO: 110294 - RNA, 22 nt, synthetic construct
  source 1..22: mol_type = other RNA
aaactacaggcaacaaaagaaa

SEQ ID NO: 110295 - RNA, 22 nt, synthetic construct
  source 1..22: mol_type = other RNA
aaactacctagaaaaacaccaa

SEQ ID NO: 110296 - RNA, 22 nt, synthetic construct
  source 1..22: mol_type = other RNA
aaactactgatagcgaaaggta

SEQ ID NO: 110297 - RNA, 22 nt, synthetic construct
  source 1..22: mol_type = other RNA
aaactacttcgtgtgtggagtg

SEQ ID NO: 110298 - RNA, 22 nt, synthetic construct
  source 1..22: mol_type = other RNA
aaactagagatgggaaagtatt

SEQ ID NO: 110299 - RNA, 22 nt, synthetic construct
  source 1..22: mol_type = other RNA
aaactagattaccttgaagttt

SEQ ID NO: 110300 - RNA, 22 nt, synthetic construct
  source 1..22: mol_type = other RNA
aaactaggctgtcccaaatgca

SEQ ID NO: 110301 - RNA, 22 nt, synthetic construct
  source 1..22: mol_type = other RNA
aaactagtatcaacctgcaggt

SEQ ID NO: 110302 - RNA, 22 nt, synthetic construct
  source 1..22: mol_type = other RNA
aaactatacttcaatgctacag

SEQ ID NO: 110303 - RNA, 22 nt, synthetic construct
  source 1..22: mol_type = other RNA
aaactatagacccaaagcaaaa

SEQ ID NO: 110304 - RNA, 22 nt, synthetic construct
  source 1..22: mol_type = other RNA
aaactatccaacatgccagctt

SEQ ID NO: 110305 - RNA, 22 nt, synthetic construct
  source 1..22: mol_type = other RNA
aaactcaaacccaaattaaagg

SEQ ID NO: 110306 - RNA, 22 nt, synthetic construct
  source 1..22: mol_type = other RNA
aaactcaacattcattcatgac

SEQ ID NO: 110307 - RNA, 22 nt, synthetic construct
  source 1..22: mol_type = other RNA
aaactcaactgcctctacatca

SEQ ID NO: 110308 - RNA, 22 nt, synthetic construct
  source 1..22: mol_type = other RNA
aaactcaagttccggttctcag

SEQ ID NO: 110309 - RNA, 22 nt, synthetic construct
  source 1..22: mol_type = other RNA
aaactcaatgttggttagtgtt

SEQ ID NO: 110310 - RNA, 22 nt, synthetic construct
  source 1..22: mol_type = other RNA
aaactcacaaaaagtgtgacca

SEQ ID NO: 110311 - RNA, 22 nt, synthetic construct
  source 1..22: mol_type = other RNA
aaactcacttattagcaaagag

SEQ ID NO: 110312 - RNA, 22 nt, synthetic construct
  source 1..22: mol_type = other RNA
aaactcagatctgagagataga

SEQ ID NO: 110313 - RNA, 22 nt, synthetic construct
  source 1..22: mol_type = other RNA
aaactcattatcccagacagat

SEQ ID NO: 110314 - RNA, 22 nt, synthetic construct
  source 1..22: mol_type = other RNA
aaactccaaacctttaagttct

SEQ ID NO: 110315 - RNA, 22 nt, synthetic construct
  source 1..22: mol_type = other RNA
aaactccaagtctcatgcaatt

SEQ ID NO: 110316 - RNA, 22 nt, synthetic construct
  source 1..22: mol_type = other RNA
aaactccaagtgtaaaaagaca

SEQ ID NO: 110317 - RNA, 22 nt, synthetic construct
  source 1..22: mol_type = other RNA
aaactccccatgcaggagaaac

SEQ ID NO: 110318 - RNA, 22 nt, synthetic construct
  source 1..22: mol_type = other RNA
aaactcctgaacaaaatttttg

SEQ ID NO: 110319 - RNA, 22 nt, synthetic construct
  source 1..22: mol_type = other RNA
aaactcctgcactcaagcaatc

SEQ ID NO: 110320 - RNA, 22 nt, synthetic construct
  source 1..22: mol_type = other RNA
aaactctggctcagaaacaaca

SEQ ID NO: 110321 - RNA, 22 nt, synthetic construct
  source 1..22: mol_type = other RNA
aaactctgtttccttaccagtg

SEQ ID NO: 110322 - RNA, 22 nt, synthetic construct
  source 1..22: mol_type = other RNA
aaactcttagcttagaagaaga

SEQ ID NO: 110323 - RNA, 22 nt, synthetic construct
  source 1..22: mol_type = other RNA
aaactcttccttatccgataaa

SEQ ID NO: 110324 - RNA, 22 nt, synthetic construct
  source 1..22: mol_type = other RNA
aaactgaacatttatacagttg

SEQ ID NO: 110325 - RNA, 22 nt, synthetic construct
  source 1..22: mol_type = other RNA
aaactgaactacagtgtttagg

SEQ ID NO: 110326 - RNA, 22 nt, synthetic construct
  source 1..22: mol_type = other RNA
aaactgaactcaaaatggatca

SEQ ID NO: 110327 - RNA, 22 nt, synthetic construct
  source 1..22: mol_type = other RNA
aaactgaagtaataaagcaagt

SEQ ID NO: 110328 - RNA, 22 nt, synthetic construct
  source 1..22: mol_type = other RNA
aaactgaagtttatcagtctcc

SEQ ID NO: 110329 - RNA, 22 nt, synthetic construct
  source 1..22: mol_type = other RNA
aaactgaatcagacaacacatt

SEQ ID NO: 110330 - RNA, 22 nt, synthetic construct
  source 1..22: mol_type = other RNA
aaactgacaggactccacagag

SEQ ID NO: 110331 - RNA, 22 nt, synthetic construct
  source 1..22: mol_type = other RNA
aaactgagaccggatgaggtgg

SEQ ID NO: 110332 - RNA, 22 nt, synthetic construct
  source 1..22: mol_type = other RNA
aaactgagcatcccagaggtac

SEQ ID NO: 110333 - RNA, 22 nt, synthetic construct
  source 1..22: mol_type = other RNA
aaactgcagaatgacagaaaat

SEQ ID NO: 110334 - RNA, 22 nt, synthetic construct
  source 1..22: mol_type = other RNA
aaactgcagcaattatttgaat

SEQ ID NO: 110335 - RNA, 22 nt, synthetic construct
  source 1..22: mol_type = other RNA
aaactgccaaaccctacaccca

SEQ ID NO: 110336 - RNA, 22 nt, synthetic construct
  source 1..22: mol_type = other RNA
aaactgcgtggtttattcatat

SEQ ID NO: 110337 - RNA, 22 nt, synthetic construct
  source 1..22: mol_type = other RNA
aaactgctgagtcttctactgt

SEQ ID NO: 110338 - RNA, 22 nt, synthetic construct
  source 1..22: mol_type = other RNA
aaactggaaggaaataagaagg

SEQ ID NO: 110339 - RNA, 22 nt, synthetic construct
  source 1..22: mol_type = other RNA
aaactggaatcaatccagacag

SEQ ID NO: 110340 - RNA, 22 nt, synthetic construct
  source 1..22: mol_type = other RNA
aaactggaattcatcaaagtta

SEQ ID NO: 110341 - RNA, 22 nt, synthetic construct
  source 1..22: mol_type = other RNA
aaactggagtgcagtggtgcaa

SEQ ID NO: 110342 - RNA, 22 nt, synthetic construct
  source 1..22: mol_type = other RNA
aaactggatgaatacaaaggtg

SEQ ID NO: 110343 - RNA, 22 nt, synthetic construct
  source 1..22: mol_type = other RNA
aaactggcaatcaaatggcctt

SEQ ID NO: 110344 - RNA, 22 nt, synthetic construct
  source 1..22: mol_type = other RNA
aaactgggggctggacataagg

SEQ ID NO: 110345 - RNA, 22 nt, synthetic construct
  source 1..22: mol_type = other RNA
aaactggtgaactgggtgtagg

SEQ ID NO: 110346 - RNA, 22 nt, synthetic construct
  source 1..22: mol_type = other RNA
aaactggttttcctgatggaca

SEQ ID NO: 110347 - RNA, 22 nt, synthetic construct
  source 1..22: mol_type = other RNA
aaactgtggtcactgtttggac

SEQ ID NO: 110348 - RNA, 22 nt, synthetic construct
  source 1..22: mol_type = other RNA
aaactgtgtgcttggagtcact

SEQ ID NO: 110349 - RNA, 22 nt, synthetic construct
  source 1..22: mol_type = other RNA
aaactgttccccaagccaaatt

SEQ ID NO: 110350 - RNA, 22 nt, synthetic construct
  source 1..22: mol_type = other RNA
aaactgttggaaaaatcgtcct

SEQ ID NO: 110351 - RNA, 22 nt, synthetic construct
  source 1..22: mol_type = other RNA
aaactgtttggctgggagctta

SEQ ID NO: 110352 - RNA, 22 nt, synthetic construct
  source 1..22: mol_type = other RNA
aaactgttttccacagtgactt

SEQ ID NO: 110353 - RNA, 22 nt, synthetic construct
  source 1..22: mol_type = other RNA
aaacttaagtatctcagtcata

SEQ ID NO: 110354 - RNA, 22 nt, synthetic construct
  source 1..22: mol_type = other RNA
aaacttaagtatctcggtcatt

SEQ ID NO: 110355 - RNA, 22 nt, synthetic construct
  source 1..22: mol_type = other RNA
aaacttaggaggctattaactt

SEQ ID NO: 110356 - RNA, 22 nt, synthetic construct
  source 1..22: mol_type = other RNA
aaacttatgcaagatggcaagt

SEQ ID NO: 110357 - RNA, 22 nt, synthetic construct
  source 1..22: mol_type = other RNA
aaacttatttccagggggtatg

SEQ ID NO: 110358 - RNA, 22 nt, synthetic construct
  source 1..22: mol_type = other RNA
aaacttcaaggtaatctagttt

SEQ ID NO: 110359 - RNA, 22 nt, synthetic construct
  source 1..22: mol_type = other RNA
aaacttcagttttgagtggcat

SEQ ID NO: 110360 - RNA, 22 nt, synthetic construct
  source 1..22: mol_type = other RNA
aaacttccaaccatcttcttag

SEQ ID NO: 110361 - RNA, 22 nt, synthetic construct
  source 1..22: mol_type = other RNA
aaacttccagaaacttccaacc

SEQ ID NO: 110362 - RNA, 22 nt, synthetic construct
  source 1..22: mol_type = other RNA
aaacttccctctcagtggtgct

SEQ ID NO: 110363 - RNA, 22 nt, synthetic construct
  source 1..22: mol_type = other RNA
aaacttcccttagctctcatgt

SEQ ID NO: 110364 - RNA, 22 nt, synthetic construct
  source 1..22: mol_type = other RNA
aaacttcgaactaaggaaagct

SEQ ID NO: 110365 - RNA, 22 nt, synthetic construct
  source 1..22: mol_type = other RNA
aaacttctctggagcaagcatg

SEQ ID NO: 110366 - RNA, 22 nt, synthetic construct
  source 1..22: mol_type = other RNA
aaacttcttctgttggagagat

SEQ ID NO: 110367 - RNA, 22 nt, synthetic construct
  source 1..22: mol_type = other RNA
aaacttgaaccttcctcttcct

SEQ ID NO: 110368 - RNA, 22 nt, synthetic construct
  source 1..22: mol_type = other RNA
aaacttgaatactcgtgtgtct

SEQ ID NO: 110369 - RNA, 22 nt, synthetic construct
  source 1..22: mol_type = other RNA
aaacttgagcagatcagtaaca

SEQ ID NO: 110370 - RNA, 22 nt, synthetic construct
  source 1..22: mol_type = other RNA
aaacttgccatcttgcataagt

SEQ ID NO: 110371 - RNA, 22 nt, synthetic construct
  source 1..22: mol_type = other RNA
aaacttggattgtgtgtcgaga

SEQ ID NO: 110372 - RNA, 22 nt, synthetic construct
  source 1..22: mol_type = other RNA
aaacttggtctgggtgatatct

SEQ ID NO: 110373 - RNA, 22 nt, synthetic construct
  source 1..22: mol_type = other RNA
aaacttggtttattttctgcat

SEQ ID NO: 110374 - RNA, 22 nt, synthetic construct
  source 1..22: mol_type = other RNA
aaacttgtagaggaggagggtt

SEQ ID NO: 110375 - RNA, 22 nt, synthetic construct
  source 1..22: mol_type = other RNA
aaactttaggtcagaatacaaa

SEQ ID NO: 110376 - RNA, 22 nt, synthetic construct
  source 1..22: mol_type = other RNA
aaactttatacctgttgaatag

SEQ ID NO: 110377 - RNA, 22 nt, synthetic construct
  source 1..22: mol_type = other RNA
aaactttgagtagcaccctatt

SEQ ID NO: 110378 - RNA, 22 nt, synthetic construct
  source 1..22: mol_type = other RNA
aaactttgcattcctgaaatga

SEQ ID NO: 110379 - RNA, 22 nt, synthetic construct
  source 1..22: mol_type = other RNA
aaactttttgggcctttctgtt

SEQ ID NO: 110380 - RNA, 22 nt, synthetic construct
  source 1..22: mol_type = other RNA
aaagaaaaactgaactacagtg

SEQ ID NO: 110381 - RNA, 22 nt, synthetic construct
  source 1..22: mol_type = other RNA
aaagaaaaagaaaagacaagac

SEQ ID NO: 110382 - RNA, 22 nt, synthetic construct
  source 1..22: mol_type = other RNA
aaagaaaaagctcacctctgga

SEQ ID NO: 110383 - RNA, 22 nt, synthetic construct
  source 1..22: mol_type = other RNA
aaagaaaaaggttaagggaaga

SEQ ID NO: 110384 - RNA, 22 nt, synthetic construct
  source 1..22: mol_type = other RNA
aaagaaaaagttgggcttggtt

SEQ ID NO: 110385 - RNA, 22 nt, synthetic construct
  source 1..22: mol_type = other RNA
aaagaaaagaaaagtttcagtg

SEQ ID NO: 110386 - RNA, 22 nt, synthetic construct
  source 1..22: mol_type = other RNA
aaagaaaagtttcagtggttaa

SEQ ID NO: 110387 - RNA, 22 nt, synthetic construct
  source 1..22: mol_type = other RNA
aaagaaaataatgttttccgtg

SEQ ID NO: 110388 - RNA, 22 nt, synthetic construct
  source 1..22: mol_type = other RNA
aaagaaaatccaaaagcctcaa

SEQ ID NO: 110389 - RNA, 22 nt, synthetic construct
  source 1..22: mol_type = other RNA
aaagaaaatggccaagagttgc

SEQ ID NO: 110390 - RNA, 22 nt, synthetic construct
  source 1..22: mol_type = other RNA
aaagaaaattttctgagcaact

SEQ ID NO: 110391 - RNA, 22 nt, synthetic construct
  source 1..22: mol_type = other RNA
aaagaaactacctagaaaaaca

SEQ ID NO: 110392 - RNA, 22 nt, synthetic construct
  source 1..22: mol_type = other RNA
aaagaaagaaaaactgaactac

SEQ ID NO: 110393 - RNA, 22 nt, synthetic construct
  source 1..22: mol_type = other RNA
aaagaaagaaggccatttgatt

SEQ ID NO: 110394 - RNA, 22 nt, synthetic construct
  source 1..22: mol_type = other RNA
aaagaaagagttgggtttttga

SEQ ID NO: 110395 - RNA, 22 nt, synthetic construct
  source 1..22: mol_type = other RNA
aaagaaagctctcaattaatgc

SEQ ID NO: 110396 - RNA, 22 nt, synthetic construct
  source 1..22: mol_type = other RNA
aaagaaagctgtggatgttggt

SEQ ID NO: 110397 - RNA, 22 nt, synthetic construct
  source 1..22: mol_type = other RNA
aaagaaaggggaaggaattttc

SEQ ID NO: 110398 - RNA, 22 nt, synthetic construct
  source 1..22: mol_type = other RNA
aaagaaaggtctctctctgtca

SEQ ID NO: 110399 - RNA, 22 nt, synthetic construct
  source 1..22: mol_type = other RNA
aaagaaatagaactgtcacaat

SEQ ID NO: 110400 - RNA, 22 nt, synthetic construct
  source 1..22: mol_type = other RNA
aaagaaatctgcatccaaaagg

SEQ ID NO: 110401 - RNA, 22 nt, synthetic construct
  source 1..22: mol_type = other RNA
aaagaaattagaacatctggca

SEQ ID NO: 110402 - RNA, 22 nt, synthetic construct
  source 1..22: mol_type = other RNA
aaagaaattggacgggtggtag

SEQ ID NO: 110403 - RNA, 22 nt, synthetic construct
  source 1..22: mol_type = other RNA
aaagaacaacatggtagaccat

SEQ ID NO: 110404 - RNA, 22 nt, synthetic construct
  source 1..22: mol_type = other RNA
aaagaacacagtgttgagaaag

SEQ ID NO: 110405 - RNA, 22 nt, synthetic construct
  source 1..22: mol_type = other RNA
aaagaacactataagccaatat

SEQ ID NO: 110406 - RNA, 22 nt, synthetic construct
  source 1..22: mol_type = other RNA
aaagaacaggaagggagagatg

SEQ ID NO: 110407 - RNA, 22 nt, synthetic construct
  source 1..22: mol_type = other RNA
aaagaacaggacttttggtaca

SEQ ID NO: 110408 - RNA, 22 nt, synthetic construct
  source 1..22: mol_type = other RNA
aaagaacaggagttaccataaa

SEQ ID NO: 110409 - RNA, 22 nt, synthetic construct
  source 1..22: mol_type = other RNA
aaagaacatgattgggtcaaca

SEQ ID NO: 110410 - RNA, 22 nt, synthetic construct
  source 1..22: mol_type = other RNA
aaagaacctctggaaaggactt

SEQ ID NO: 110411 - RNA, 22 nt, synthetic construct
  source 1..22: mol_type = other RNA
aaagaactccaacaattcaaca

SEQ ID NO: 110412 - RNA, 22 nt, synthetic construct
  source 1..22: mol_type = other RNA
aaagaactgaaagcagggactc

SEQ ID NO: 110413 - RNA, 22 nt, synthetic construct
  source 1..22: mol_type = other RNA
aaagaagaaatcaaatgggaaa

SEQ ID NO: 110414 - RNA, 22 nt, synthetic construct
  source 1..22: mol_type = other RNA
aaagaagatgcagttgcttact

SEQ ID NO: 110415 - RNA, 22 nt, synthetic construct
  source 1..22: mol_type = other RNA
aaagaaggaaaaaacacctaaa

SEQ ID NO: 110416 - RNA, 22 nt, synthetic construct
  source 1..22: mol_type = other RNA
aaagaaggccatttgattgcca

SEQ ID NO: 110417 - RNA, 22 nt, synthetic construct
  source 1..22: mol_type = other RNA
aaagaaggccgtccctattttc

SEQ ID NO: 110418 - RNA, 22 nt, synthetic construct
  source 1..22: mol_type = other RNA
aaagaagtaatttcttctgaag

SEQ ID NO: 110419 - RNA, 22 nt, synthetic construct
  source 1..22: mol_type = other RNA
aaagaagttacggttccctgta

SEQ ID NO: 110420 - RNA, 22 nt, synthetic construct
  source 1..22: mol_type = other RNA
aaagaataagctaatcccaaag

SEQ ID NO: 110421 - RNA, 22 nt, synthetic construct
  source 1..22: mol_type = other RNA
aaagaattaaactcattatccc

SEQ ID NO: 110422 - RNA, 22 nt, synthetic construct
  source 1..22: mol_type = other RNA
aaagaattcgttaatacttgtg

SEQ ID NO: 110423 - RNA, 22 nt, synthetic construct
  source 1..22: mol_type = other RNA
aaagacaagtactgcatgattc

SEQ ID NO: 110424 - RNA, 22 nt, synthetic construct
  source 1..22: mol_type = other RNA
aaagacaagttcttacctcaaa

SEQ ID NO: 110425 - RNA, 22 nt, synthetic construct
  source 1..22: mol_type = other RNA
aaagacaatagctagtgtctta

SEQ ID NO: 110426 - RNA, 22 nt, synthetic construct
  source 1..22: mol_type = other RNA
aaagacacaaaagagctgggcc

SEQ ID NO: 110427 - RNA, 22 nt, synthetic construct
  source 1..22: mol_type = other RNA
aaagacagacatttggaataga

SEQ ID NO: 110428 - RNA, 22 nt, synthetic construct
  source 1..22: mol_type = other RNA
aaagacagacctctattaaatc

SEQ ID NO: 110429 - RNA, 22 nt, synthetic construct
  source 1..22: mol_type = other RNA
aaagacagagctagaactagaa

SEQ ID NO: 110430 - RNA, 22 nt, synthetic construct
  source 1..22: mol_type = other RNA
aaagacagatcttatggaatag

SEQ ID NO: 110431 - RNA, 22 nt, synthetic construct
  source 1..22: mol_type = other RNA
aaagacagctactaaacaaatc

SEQ ID NO: 110432 - RNA, 22 nt, synthetic construct
  source 1..22: mol_type = other RNA
aaagacaggtagacatgagtaa

SEQ ID NO: 110433 - RNA, 22 nt, synthetic construct
  source 1..22: mol_type = other RNA
aaagacatcactaagagtgaaa

SEQ ID NO: 110434 - RNA, 22 nt, synthetic construct
  source 1..22: mol_type = other RNA
aaagacatcctgatttaggcca

SEQ ID NO: 110435 - RNA, 22 nt, synthetic construct
  source 1..22: mol_type = other RNA
aaagacatctttcctgtgattt

SEQ ID NO: 110436 - RNA, 22 nt, synthetic construct
  source 1..22: mol_type = other RNA
aaagacattattcttacagtga

SEQ ID NO: 110437 - RNA, 22 nt, synthetic construct
  source 1..22: mol_type = other RNA
aaagacattgtcttacataggc

SEQ ID NO: 110438 - RNA, 22 nt, synthetic construct
  source 1..22: mol_type = other RNA
aaagaccaagaattttccattc

SEQ ID NO: 110439 - RNA, 22 nt, synthetic construct
  source 1..22: mol_type = other RNA
aaagaccaagagtgtggcttta

SEQ ID NO: 110440 - RNA, 22 nt, synthetic construct
  source 1..22: mol_type = other RNA
aaagaccgcaagagttccaact

SEQ ID NO: 110441 - RNA, 22 nt, synthetic construct
  source 1..22: mol_type = other RNA
aaagaccggggactgcaacaga

SEQ ID NO: 110442 - RNA, 22 nt, synthetic construct
  source 1..22: mol_type = other RNA
aaagacctaagcttaagagcta

SEQ ID NO: 110443 - RNA, 22 nt, synthetic construct
  source 1..22: mol_type = other RNA
aaagacctcaggtttagaatat

SEQ ID NO: 110444 - RNA, 22 nt, synthetic construct
  source 1..22: mol_type = other RNA
aaagacgatattcctatcagaa

SEQ ID NO: 110445 - RNA, 22 nt, synthetic construct
  source 1..22: mol_type = other RNA
aaagacgttcagataacaaagg

SEQ ID NO: 110446 - RNA, 22 nt, synthetic construct
  source 1..22: mol_type = other RNA
aaagacttcaacggacattttt

SEQ ID NO: 110447 - RNA, 22 nt, synthetic construct
  source 1..22: mol_type = other RNA
aaagacttcacgatgcttaggt

SEQ ID NO: 110448 - RNA, 22 nt, synthetic construct
  source 1..22: mol_type = other RNA
aaagacttcaggaacaccttga

SEQ ID NO: 110449 - RNA, 22 nt, synthetic construct
  source 1..22: mol_type = other RNA
aaagacttctcaaacaggatac

SEQ ID NO: 110450 - RNA, 22 nt, synthetic construct
  source 1..22: mol_type = other RNA
aaagacttgaggtttacttggg

SEQ ID NO: 110451 - RNA, 22 nt, synthetic construct
  source 1..22: mol_type = other RNA
aaagagaaaaattacaggtcaa

SEQ ID NO: 110452 - RNA, 22 nt, synthetic construct
  source 1..22: mol_type = other RNA
aaagagaacaaaatacctggga

SEQ ID NO: 110453 - RNA, 22 nt, synthetic construct
  source 1..22: mol_type = other RNA
aaagagaacaatggaatagaag

SEQ ID NO: 110454 - RNA, 22 nt, synthetic construct
  source 1..22: mol_type = other RNA
aaagagaacacacaatttgagg

SEQ ID NO: 110455 - RNA, 22 nt, synthetic construct
  source 1..22: mol_type = other RNA
aaagagaacattggtttgaaat

SEQ ID NO: 110456 - RNA, 22 nt, synthetic construct
  source 1..22: mol_type = other RNA
aaagagaacttgcacataatat

SEQ ID NO: 110457 - RNA, 22 nt, synthetic construct
  source 1..22: mol_type = other RNA
aaagagaatagcagaaacacag

SEQ ID NO: 110458 - RNA, 22 nt, synthetic construct
  source 1..22: mol_type = other RNA
aaagagaatcttaaaataccag

SEQ ID NO: 110459 - RNA, 22 nt, synthetic construct
  source 1..22: mol_type = other RNA
aaagagacctgattcttccact

SEQ ID NO: 110460 - RNA, 22 nt, synthetic construct
  source 1..22: mol_type = other RNA
aaagagagagacaagcacaggc

SEQ ID NO: 110461 - RNA, 22 nt, synthetic construct
  source 1..22: mol_type = other RNA
aaagagagaggggggaagcttt

SEQ ID NO: 110462 - RNA, 22 nt, synthetic construct
  source 1..22: mol_type = other RNA
aaagagagtaaaataaaagctc

SEQ ID NO: 110463 - RNA, 22 nt, synthetic construct
  source 1..22: mol_type = other RNA
aaagagagtgacagctgagtag

SEQ ID NO: 110464 - RNA, 22 nt, synthetic construct
  source 1..22: mol_type = other RNA
aaagagatctagtgaagtcaat

SEQ ID NO: 110465 - RNA, 22 nt, synthetic construct
  source 1..22: mol_type = other RNA
aaagagcacaccaagacatgtt

SEQ ID NO: 110466 - RNA, 22 nt, synthetic construct
  source 1..22: mol_type = other RNA
aaagagcaggtggaaggcctga

SEQ ID NO: 110467 - RNA, 22 nt, synthetic construct
  source 1..22: mol_type = other RNA
aaagagccagcctgatgatgat

SEQ ID NO: 110468 - RNA, 22 nt, synthetic construct
  source 1..22: mol_type = other RNA
aaagagcgaagagggagaagaa

SEQ ID NO: 110469 - RNA, 22 nt, synthetic construct
  source 1..22: mol_type = other RNA
aaagagctgggactacaggtgt

SEQ ID NO: 110470 - RNA, 22 nt, synthetic construct
  source 1..22: mol_type = other RNA
aaagagctgggcccgcagtggc

SEQ ID NO: 110471 - RNA, 22 nt, synthetic construct
  source 1..22: mol_type = other RNA
aaagaggagacattacaattga

SEQ ID NO: 110472 - RNA, 22 nt, synthetic construct
  source 1..22: mol_type = other RNA
aaagaggcaaaactcctgaaca

SEQ ID NO: 110473 - RNA, 22 nt, synthetic construct
  source 1..22: mol_type = other RNA
aaagagggaagtactgagtcaa

SEQ ID NO: 110474 - RNA, 22 nt, synthetic construct
  source 1..22: mol_type = other RNA
aaagagtagattcccccttatg

SEQ ID NO: 110475 - RNA, 22 nt, synthetic construct
  source 1..22: mol_type = other RNA
aaagagtgaaatgatttcaagt

SEQ ID NO: 110476 - RNA, 22 nt, synthetic construct
  source 1..22: mol_type = other RNA
aaagagtgcacattccttcttc

SEQ ID NO: 110477 - RNA, 22 nt, synthetic construct
  source 1..22: mol_type = other RNA
aaagagttgggtttttgaaaag

SEQ ID NO: 110478 - RNA, 22 nt, synthetic construct
  source 1..22: mol_type = other RNA
aaagataaaggtaaggaaaccc

SEQ ID NO: 110479 - RNA, 22 nt, synthetic construct
  source 1..22: mol_type = other RNA
aaagataaatcagaaactgaca

SEQ ID NO: 110480 - RNA, 22 nt, synthetic construct
  source 1..22: mol_type = other RNA
aaagataaatccaacgaccgga

SEQ ID NO: 110481 - RNA, 22 nt, synthetic construct
  source 1..22: mol_type = other RNA
aaagataagtagaaggtcaatc

SEQ ID NO: 110482 - RNA, 22 nt, synthetic construct
  source 1..22: mol_type = other RNA
aaagatacacaagatctctatg

SEQ ID NO: 110483 - RNA, 22 nt, synthetic construct
  source 1..22: mol_type = other RNA
aaagatactcaacatcactagc

SEQ ID NO: 110484 - RNA, 22 nt, synthetic construct
  source 1..22: mol_type = other RNA
aaagatagactcttcagaggtc

SEQ ID NO: 110485 - RNA, 22 nt, synthetic construct
  source 1..22: mol_type = other RNA
aaagatagccccttatcaggaa

SEQ ID NO: 110486 - RNA, 22 nt, synthetic construct
  source 1..22: mol_type = other RNA
aaagatatccacagtatgctgt

SEQ ID NO: 110487 - RNA, 22 nt, synthetic construct
  source 1..22: mol_type = other RNA
aaagatatgggttattcaccca

SEQ ID NO: 110488 - RNA, 22 nt, synthetic construct
  source 1..22: mol_type = other RNA
aaagatatgtgtaggaaggaac

SEQ ID NO: 110489 - RNA, 22 nt, synthetic construct
  source 1..22: mol_type = other RNA
aaagatattagctacaaaaggg

SEQ ID NO: 110490 - RNA, 22 nt, synthetic construct
  source 1..22: mol_type = other RNA
aaagatcaagctcgccgtctcc

SEQ ID NO: 110491 - RNA, 22 nt, synthetic construct
  source 1..22: mol_type = other RNA
aaagatcagtaaaattcccttc

SEQ ID NO: 110492 - RNA, 22 nt, synthetic construct
  source 1..22: mol_type = other RNA
aaagatcatttagtaagtgtga

SEQ ID NO: 110493 - RNA, 22 nt, synthetic construct
  source 1..22: mol_type = other RNA
aaagatcatttcaaaccaatgt

SEQ ID NO: 110494 - RNA, 22 nt, synthetic construct
  source 1..22: mol_type = other RNA
aaagatcatttcacttgattac

SEQ ID NO: 110495 - RNA, 22 nt, synthetic construct
  source 1..22: mol_type = other RNA
aaagatctcaaacagcctaatt

SEQ ID NO: 110496 - RNA, 22 nt, synthetic construct
  source 1..22: mol_type = other RNA
aaagatctgtggactttaggct

SEQ ID NO: 110497 - RNA, 22 nt, synthetic construct
  source 1..22: mol_type = other RNA
aaagatgaagtatagaaaggag

SEQ ID NO: 110498 - RNA, 22 nt, synthetic construct
  source 1..22: mol_type = other RNA
aaagatgatgaacaaaggcagg

SEQ ID NO: 110499 - RNA, 22 nt, synthetic construct
  source 1..22: mol_type = other RNA
aaagatgcagaaaaagcatttt

SEQ ID NO: 110500 - RNA, 22 nt, synthetic construct
  source 1..22: mol_type = other RNA
aaagatgcattctgtcacatag

SEQ ID NO: 110501 - RNA, 22 nt, synthetic construct
  source 1..22: mol_type = other RNA
aaagatgccacaaatggagtga

SEQ ID NO: 110502 - RNA, 22 nt, synthetic construct
  source 1..22: mol_type = other RNA
aaagatgccatttataatagca

SEQ ID NO: 110503 - RNA, 22 nt, synthetic construct
  source 1..22: mol_type = other RNA
aaagatgctggtggagtattct

SEQ ID NO: 110504 - RNA, 22 nt, synthetic construct
  source 1..22: mol_type = other RNA
aaagatgtcttttaacttgctt

SEQ ID NO: 110505 - RNA, 22 nt, synthetic construct
  source 1..22: mol_type = other RNA
aaagatgtgtaccaaaagtcct

SEQ ID NO: 110506 - RNA, 22 nt, synthetic construct
  source 1..22: mol_type = other RNA
aaagatgttttcagttgcatga

SEQ ID NO: 110507 - RNA, 22 nt, synthetic construct
  source 1..22: mol_type = other RNA
aaagattaaatacagagcacag

SEQ ID NO: 110508 - RNA, 22 nt, synthetic construct
  source 1..22: mol_type = other RNA
aaagattaatccttgtggtctt

SEQ ID NO: 110509 - RNA, 22 nt, synthetic construct
  source 1..22: mol_type = other RNA
aaagattatgttccacatgtta

SEQ ID NO: 110510 - RNA, 22 nt, synthetic construct
  source 1..22: mol_type = other RNA
aaagattcttgtcatgaatgaa

SEQ ID NO: 110511 - RNA, 22 nt, synthetic construct
  source 1..22: mol_type = other RNA
aaagatttacccctactttttg

SEQ ID NO: 110512 - RNA, 22 nt, synthetic construct
  source 1..22: mol_type = other RNA
aaagatttactaaactgaacga

SEQ ID NO: 110513 - RNA, 22 nt, synthetic construct
  source 1..22: mol_type = other RNA
aaagcaaaagcaaaattctaac

SEQ ID NO: 110514 - RNA, 22 nt, synthetic construct
  source 1..22: mol_type = other RNA
aaagcaaaattctaacaagaag

SEQ ID NO: 110515 - RNA, 22 nt, synthetic construct
  source 1..22: mol_type = other RNA
aaagcaaaccagacatttctca

SEQ ID NO: 110516 - RNA, 22 nt, synthetic construct
  source 1..22: mol_type = other RNA
aaagcaaacgtgcacacccagt

SEQ ID NO: 110517 - RNA, 22 nt, synthetic construct
  source 1..22: mol_type = other RNA
aaagcaaatgtcatcttctctc

SEQ ID NO: 110518 - RNA, 22 nt, synthetic construct
  source 1..22: mol_type = other RNA
aaagcaaatgtgactagaagaa

SEQ ID NO: 110519 - RNA, 22 nt, synthetic construct
  source 1..22: mol_type = other RNA
aaagcaacaggaagaggcagct

SEQ ID NO: 110520 - RNA, 22 nt, synthetic construct
  source 1..22: mol_type = other RNA
aaagcaacatgctaagtgttta

SEQ ID NO: 110521 - RNA, 22 nt, synthetic construct
  source 1..22: mol_type = other RNA
aaagcaacctcatttgcagagc

SEQ ID NO: 110522 - RNA, 22 nt, synthetic construct
  source 1..22: mol_type = other RNA
aaagcaacttgaaggcaatgta

SEQ ID NO: 110523 - RNA, 22 nt, synthetic construct
  source 1..22: mol_type = other RNA
aaagcaagccttggcaagggga

SEQ ID NO: 110524 - RNA, 22 nt, synthetic construct
  source 1..22: mol_type = other RNA
aaagcaagtatgagccactagt

SEQ ID NO: 110525 - RNA, 22 nt, synthetic construct
  source 1..22: mol_type = other RNA
aaagcaagttaaaagacatctt

SEQ ID NO: 110526 - RNA, 22 nt, synthetic construct
  source 1..22: mol_type = other RNA
aaagcacaagcacagagtcaga

SEQ ID NO: 110527 - RNA, 22 nt, synthetic construct
  source 1..22: mol_type = other RNA
aaagcacaggcatcggccgggc

SEQ ID NO: 110528 - RNA, 22 nt, synthetic construct
  source 1..22: mol_type = other RNA
aaagcacataaaaaaggaatct

SEQ ID NO: 110529 - RNA, 22 nt, synthetic construct
  source 1..22: mol_type = other RNA
aaagcaccactgagagggaagt

SEQ ID NO: 110530 - RNA, 22 nt, synthetic construct
  source 1..22: mol_type = other RNA
aaagcaccagggcctctgaaga

SEQ ID NO: 110531 - RNA, 22 nt, synthetic construct
  source 1..22: mol_type = other RNA
aaagcaccagttatcaccatgt

SEQ ID NO: 110532 - RNA, 22 nt, synthetic construct
  source 1..22: mol_type = other RNA
aaagcacctaccataacaaaaa

SEQ ID NO: 110533 - RNA, 22 nt, synthetic construct
  source 1..22: mol_type = other RNA
aaagcacgtttgatctggtcac

SEQ ID NO: 110534 - RNA, 22 nt, synthetic construct
  source 1..22: mol_type = other RNA
aaagcactatccacatttggtt

SEQ ID NO: 110535 - RNA, 22 nt, synthetic construct
  source 1..22: mol_type = other RNA
aaagcagaaatacagaccgatg

SEQ ID NO: 110536 - RNA, 22 nt, synthetic construct
  source 1..22: mol_type = other RNA
aaagcagacagaaagacaggga

SEQ ID NO: 110537 - RNA, 22 nt, synthetic construct
  source 1..22: mol_type = other RNA
aaagcagagaaactggaatcaa

SEQ ID NO: 110538 - RNA, 22 nt, synthetic construct
  source 1..22: mol_type = other RNA
aaagcagctacctgttgattgt

SEQ ID NO: 110539 - RNA, 22 nt, synthetic construct
  source 1..22: mol_type = other RNA
aaagcaggccctgagaagtcaa

SEQ ID NO: 110540 - RNA, 22 nt, synthetic construct
  source 1..22: mol_type = other RNA
aaagcagggactcccatatcta

SEQ ID NO: 110541 - RNA, 22 nt, synthetic construct
  source 1..22: mol_type = other RNA
aaagcagggaggggtccccagc

SEQ ID NO: 110542 - RNA, 22 nt, synthetic construct
  source 1..22: mol_type = other RNA
aaagcaggtcatgacttttttg

SEQ ID NO: 110543 - RNA, 22 nt, synthetic construct
  source 1..22: mol_type = other RNA
aaagcaggttcattttaataag

SEQ ID NO: 110544 - RNA, 22 nt, synthetic construct
  source 1..22: mol_type = other RNA
aaagcaggttgcattaatgctt

SEQ ID NO: 110545 - RNA, 22 nt, synthetic construct
  source 1..22: mol_type = other RNA
aaagcatatgaatctagaaaga

SEQ ID NO: 110546 - RNA, 22 nt, synthetic construct
  source 1..22: mol_type = other RNA
aaagcatcagagctttgttatg

SEQ ID NO: 110547 - RNA, 22 nt, synthetic construct
  source 1..22: mol_type = other RNA
aaagccaagagcgaggcctgga

SEQ ID NO: 110548 - RNA, 22 nt, synthetic construct
  source 1..22: mol_type = other RNA
aaagccaatcttcccaatcctt

SEQ ID NO: 110549 - RNA, 22 nt, synthetic construct
  source 1..22: mol_type = other RNA
aaagccacactcttggtctttc

SEQ ID NO: 110550 - RNA, 22 nt, synthetic construct
  source 1..22: mol_type = other RNA
aaagccaggctttcccagggtg

SEQ ID NO: 110551 - RNA, 22 nt, synthetic construct
  source 1..22: mol_type = other RNA
aaagccatagtgtaaactaaaa

SEQ ID NO: 110552 - RNA, 22 nt, synthetic construct
  source 1..22: mol_type = other RNA
aaagccatttatcagcaccaaa

SEQ ID NO: 110553 - RNA, 22 nt, synthetic construct
  source 1..22: mol_type = other RNA
aaagcccaatctacaggtcgga

SEQ ID NO: 110554 - RNA, 22 nt, synthetic construct
  source 1..22: mol_type = other RNA
aaagcccaccagcataagaccc

SEQ ID NO: 110555 - RNA, 22 nt, synthetic construct
  source 1..22: mol_type = other RNA
aaagcccagccgcggactccgg

SEQ ID NO: 110556 - RNA, 22 nt, synthetic construct
  source 1..22: mol_type = other RNA
aaagccccaaaccatcaagtgt

SEQ ID NO: 110557 - RNA, 22 nt, synthetic construct
  source 1..22: mol_type = other RNA
aaagccccattgtacacatatt

SEQ ID NO: 110558 - RNA, 22 nt, synthetic construct
  source 1..22: mol_type = other RNA
aaagccctcaggaccaggcagt

SEQ ID NO: 110559 - RNA, 22 nt, synthetic construct
  source 1..22: mol_type = other RNA
aaagcccttgagtatttttgag

SEQ ID NO: 110560 - RNA, 22 nt, synthetic construct
  source 1..22: mol_type = other RNA
aaagccggattcctttcaaaga

SEQ ID NO: 110561 - RNA, 22 nt, synthetic construct
  source 1..22: mol_type = other RNA
aaagcctcaaaatttagtaagg

SEQ ID NO: 110562 - RNA, 22 nt, synthetic construct
  source 1..22: mol_type = other RNA
aaagcctcaaacgaaccaatta

SEQ ID NO: 110563 - RNA, 22 nt, synthetic construct
  source 1..22: mol_type = other RNA
aaagcctcatttgaactttcca

SEQ ID NO: 110564 - RNA, 22 nt, synthetic construct
  source 1..22: mol_type = other RNA
aaagcctctcaacacttcagtg

SEQ ID NO: 110565 - RNA, 22 nt, synthetic construct
  source 1..22: mol_type = other RNA
aaagcctctctgatggaacggc

SEQ ID NO: 110566 - RNA, 22 nt, synthetic construct
  source 1..22: mol_type = other RNA
aaagcctctgtggaccatgttt

SEQ ID NO: 110567 - RNA, 22 nt, synthetic construct
  source 1..22: mol_type = other RNA
aaagcctcttcagaagaggata

SEQ ID NO: 110568 - RNA, 22 nt, synthetic construct
  source 1..22: mol_type = other RNA
aaagcctgcttcagcctaagca

SEQ ID NO: 110569 - RNA, 22 nt, synthetic construct
  source 1..22: mol_type = other RNA
aaagcctggctttagatggtaa

SEQ ID NO: 110570 - RNA, 22 nt, synthetic construct
  source 1..22: mol_type = other RNA
aaagcctgtgacagtatgtcag

SEQ ID NO: 110571 - RNA, 22 nt, synthetic construct
  source 1..22: mol_type = other RNA
aaagcctgtggaggcagtacca

SEQ ID NO: 110572 - RNA, 22 nt, synthetic construct
  source 1..22: mol_type = other RNA
aaagccttctctactctgcctc

SEQ ID NO: 110573 - RNA, 22 nt, synthetic construct
  source 1..22: mol_type = other RNA
aaagcctttattttttcttccc

SEQ ID NO: 110574 - RNA, 22 nt, synthetic construct
  source 1..22: mol_type = other RNA
aaagcgctactcagctgtcact

SEQ ID NO: 110575 - RNA, 22 nt, synthetic construct
  source 1..22: mol_type = other RNA
aaagcggtcaacgcacccagag

SEQ ID NO: 110576 - RNA, 22 nt, synthetic construct
  source 1..22: mol_type = other RNA
aaagcgtactgtgattacaatt

SEQ ID NO: 110577 - RNA, 22 nt, synthetic construct
  source 1..22: mol_type = other RNA
aaagcgttggagacagcctaaa

SEQ ID NO: 110578 - RNA, 22 nt, synthetic construct
  source 1..22: mol_type = other RNA
aaagctaatctactttctaatc

SEQ ID NO: 110579 - RNA, 22 nt, synthetic construct
  source 1..22: mol_type = other RNA
aaagctaccctcgagtaaaaag

SEQ ID NO: 110580 - RNA, 22 nt, synthetic construct
  source 1..22: mol_type = other RNA
aaagctaccctttcttgttagt

SEQ ID NO: 110581 - RNA, 22 nt, synthetic construct
  source 1..22: mol_type = other RNA
aaagctagaagacctcaaattc

SEQ ID NO: 110582 - RNA, 22 nt, synthetic construct
  source 1..22: mol_type = other RNA
aaagctatacacgttacaaaat

SEQ ID NO: 110583 - RNA, 22 nt, synthetic construct
  source 1..22: mol_type = other RNA
aaagctcaaaaatactcaaggg

SEQ ID NO: 110584 - RNA, 22 nt, synthetic construct
  source 1..22: mol_type = other RNA
aaagctcacctctggactcagg

SEQ ID NO: 110585 - RNA, 22 nt, synthetic construct
  source 1..22: mol_type = other RNA
aaagctcaggaccagatgactt

SEQ ID NO: 110586 - RNA, 22 nt, synthetic construct
  source 1..22: mol_type = other RNA
aaagctcagtgtgtttttgtaa

SEQ ID NO: 110587 - RNA, 22 nt, synthetic construct
  source 1..22: mol_type = other RNA
aaagctcccaatgcttgaagag

SEQ ID NO: 110588 - RNA, 22 nt, synthetic construct
  source 1..22: mol_type = other RNA
aaagctccccggatgattctaa

SEQ ID NO: 110589 - RNA, 22 nt, synthetic construct
  source 1..22: mol_type = other RNA
aaagctctaataaaagctggag

SEQ ID NO: 110590 - RNA, 22 nt, synthetic construct
  source 1..22: mol_type = other RNA
aaagctctaatagttcacctct

SEQ ID NO: 110591 - RNA, 22 nt, synthetic construct
  source 1..22: mol_type = other RNA
aaagctctatggcatttgaggg

SEQ ID NO: 110592 - RNA, 22 nt, synthetic construct
  source 1..22: mol_type = other RNA
aaagctctcaattaatgcccaa

SEQ ID NO: 110593 - RNA, 22 nt, synthetic construct
  source 1..22: mol_type = other RNA
aaagctctgatgctttctctag

SEQ ID NO: 110594 - RNA, 22 nt, synthetic construct
  source 1..22: mol_type = other RNA
aaagctgaactcctttcttacc

SEQ ID NO: 110595 - RNA, 22 nt, synthetic construct
  source 1..22: mol_type = other RNA
aaagctggactcattccaatcc

SEQ ID NO: 110596 - RNA, 22 nt, synthetic construct
  source 1..22: mol_type = other RNA
aaagctggagttatttgtataa

SEQ ID NO: 110597 - RNA, 22 nt, synthetic construct
  source 1..22: mol_type = other RNA
aaagctggcatgttggatagtt

SEQ ID NO: 110598 - RNA, 22 nt, synthetic construct
  source 1..22: mol_type = other RNA
aaagctgtggatgttggtgaga

SEQ ID NO: 110599 - RNA, 22 nt, synthetic construct
  source 1..22: mol_type = other RNA
aaagcttatgatcttgggaata

SEQ ID NO: 110600 - RNA, 22 nt, synthetic construct
  source 1..22: mol_type = other RNA
aaagcttcccccctctctcttt

SEQ ID NO: 110601 - RNA, 22 nt, synthetic construct
  source 1..22: mol_type = other RNA
aaagcttctgagcagtgtttcc

SEQ ID NO: 110602 - RNA, 22 nt, synthetic construct
  source 1..22: mol_type = other RNA
aaagctttaaactggatgaata

SEQ ID NO: 110603 - RNA, 22 nt, synthetic construct
  source 1..22: mol_type = other RNA
aaagctttgtgactgtgagggt

SEQ ID NO: 110604 - RNA, 22 nt, synthetic construct
  source 1..22: mol_type = other RNA
aaaggaaaaatctaaccctcaa

SEQ ID NO: 110605 - RNA, 22 nt, synthetic construct
  source 1..22: mol_type = other RNA
aaaggaaaagagatctagtgaa

SEQ ID NO: 110606 - RNA, 22 nt, synthetic construct
  source 1..22: mol_type = other RNA
aaaggaaagtaactgttggcaa

SEQ ID NO: 110607 - RNA, 22 nt, synthetic construct
  source 1..22: mol_type = other RNA
aaaggaaatgagtgtatgcagg

SEQ ID NO: 110608 - RNA, 22 nt, synthetic construct
  source 1..22: mol_type = other RNA
aaaggaactaatttcatacaag

SEQ ID NO: 110609 - RNA, 22 nt, synthetic construct
  source 1..22: mol_type = other RNA
aaaggaaggaattttaggacaa

SEQ ID NO: 110610 - RNA, 22 nt, synthetic construct
  source 1..22: mol_type = other RNA
aaaggaatataaacgtgtgtgt

SEQ ID NO: 110611 - RNA, 22 nt, synthetic construct
  source 1..22: mol_type = other RNA
aaaggaatccggctttatgaga

SEQ ID NO: 110612 - RNA, 22 nt, synthetic construct
  source 1..22: mol_type = other RNA
aaaggaatctgacctaagcttg

SEQ ID NO: 110613 - RNA, 22 nt, synthetic construct
  source 1..22: mol_type = other RNA
aaaggaatctgggccgggcgcg

SEQ ID NO: 110614 - RNA, 22 nt, synthetic construct
  source 1..22: mol_type = other RNA
aaaggaatggaattctgatgca

SEQ ID NO: 110615 - RNA, 22 nt, synthetic construct
  source 1..22: mol_type = other RNA
aaaggaattgtaatcacagtac

SEQ ID NO: 110616 - RNA, 22 nt, synthetic construct
  source 1..22: mol_type = other RNA
aaaggacacaaattatgactga

SEQ ID NO: 110617 - RNA, 22 nt, synthetic construct
  source 1..22: mol_type = other RNA
aaaggacactattgagagtgaa

SEQ ID NO: 110618 - RNA, 22 nt, synthetic construct
  source 1..22: mol_type = other RNA
aaaggacattagtggaaaaact

SEQ ID NO: 110619 - RNA, 22 nt, synthetic construct
  source 1..22: mol_type = other RNA
aaaggaccatctgttaaaagat

SEQ ID NO: 110620 - RNA, 22 nt, synthetic construct
  source 1..22: mol_type = other RNA
aaaggactggaactcatttctg

SEQ ID NO: 110621 - RNA, 22 nt, synthetic construct
  source 1..22: mol_type = other RNA
aaaggactgggatcctaagcat

SEQ ID NO: 110622 - RNA, 22 nt, synthetic construct
  source 1..22: mol_type = other RNA
aaaggacttcagtccttaccac

SEQ ID NO: 110623 - RNA, 22 nt, synthetic construct
  source 1..22: mol_type = other RNA
aaaggacttgatctaaaatgga

SEQ ID NO: 110624 - RNA, 22 nt, synthetic construct
  source 1..22: mol_type = other RNA
aaaggagaccagttaggaagcc

SEQ ID NO: 110625 - RNA, 22 nt, synthetic construct
  source 1..22: mol_type = other RNA
aaaggagagaagagggggcata

SEQ ID NO: 110626 - RNA, 22 nt, synthetic construct
  source 1..22: mol_type = other RNA
aaaggagatactggccatgttt

SEQ ID NO: 110627 - RNA, 22 nt, synthetic construct
  source 1..22: mol_type = other RNA
aaaggagatatacaggaagaga

SEQ ID NO: 110628 - RNA, 22 nt, synthetic construct
  source 1..22: mol_type = other RNA
aaaggaggaactaattgataaa

SEQ ID NO: 110629 - RNA, 22 nt, synthetic construct
  source 1..22: mol_type = other RNA
aaaggagggaaaatgtttattt

SEQ ID NO: 110630 - RNA, 22 nt, synthetic construct
  source 1..22: mol_type = other RNA
aaaggagggactgaaaccagtg

SEQ ID NO: 110631 - RNA, 22 nt, synthetic construct
  source 1..22: mol_type = other RNA
aaaggagttcagctttaaagag

SEQ ID NO: 110632 - RNA, 22 nt, synthetic construct
  source 1..22: mol_type = other RNA
aaaggatactgagaacagaatt

SEQ ID NO: 110633 - RNA, 22 nt, synthetic construct
  source 1..22: mol_type = other RNA
aaaggatatgggccaaagacag

SEQ ID NO: 110634 - RNA, 22 nt, synthetic construct
  source 1..22: mol_type = other RNA
aaaggatgaccttgacaataaa

SEQ ID NO: 110635 - RNA, 22 nt, synthetic construct
  source 1..22: mol_type = other RNA
aaaggatgcacaagacagatgt

SEQ ID NO: 110636 - RNA, 22 nt, synthetic construct
  source 1..22: mol_type = other RNA
aaaggatggtttgattgttcca

SEQ ID NO: 110637 - RNA, 22 nt, synthetic construct
  source 1..22: mol_type = other RNA
aaaggatgtcaacaaaatacta

SEQ ID NO: 110638 - RNA, 22 nt, synthetic construct
  source 1..22: mol_type = other RNA
aaaggatgtcaactgaggcaga

SEQ ID NO: 110639 - RNA, 22 nt, synthetic construct
  source 1..22: mol_type = other RNA
aaaggattagaaagtagattag

SEQ ID NO: 110640 - RNA, 22 nt, synthetic construct
  source 1..22: mol_type = other RNA
aaaggattcgggggagagcact

SEQ ID NO: 110641 - RNA, 22 nt, synthetic construct
  source 1..22: mol_type = other RNA
aaaggattgggaagattggctt

SEQ ID NO: 110642 - RNA, 22 nt, synthetic construct
  source 1..22: mol_type = other RNA
aaaggatttgtttgtgaagata

SEQ ID NO: 110643 - RNA, 22 nt, synthetic construct
  source 1..22: mol_type = other RNA
aaaggcaaaccacacagagaac

SEQ ID NO: 110644 - RNA, 22 nt, synthetic construct
  source 1..22: mol_type = other RNA
aaaggcaaaggaaaaaactttt

SEQ ID NO: 110645 - RNA, 22 nt, synthetic construct
  source 1..22: mol_type = other RNA
aaaggcaatgctctcttccccc

SEQ ID NO: 110646 - RNA, 22 nt, synthetic construct
  source 1..22: mol_type = other RNA
aaaggcaggagcagtgtgaata

SEQ ID NO: 110647 - RNA, 22 nt, synthetic construct
  source 1..22: mol_type = other RNA
aaaggcatgaaattcttgggtg

SEQ ID NO: 110648 - RNA, 22 nt, synthetic construct
  source 1..22: mol_type = other RNA
aaaggcccaaaaagtttttaaa

SEQ ID NO: 110649 - RNA, 22 nt, synthetic construct
  source 1..22: mol_type = other RNA
aaaggccccttgaaagatcatt

SEQ ID NO: 110650 - RNA, 22 nt, synthetic construct
  source 1..22: mol_type = other RNA
aaaggccctgatttaaagtagg

SEQ ID NO: 110651 - RNA, 22 nt, synthetic construct
  source 1..22: mol_type = other RNA
aaaggccgctcttgaccttgtg

SEQ ID NO: 110652 - RNA, 22 nt, synthetic construct
  source 1..22: mol_type = other RNA
aaaggcgaagcccgccgctcgc

SEQ ID NO: 110653 - RNA, 22 nt, synthetic construct
  source 1..22: mol_type = other RNA
aaaggcgaagcggcagggccgg

SEQ ID NO: 110654 - RNA, 22 nt, synthetic construct
  source 1..22: mol_type = other RNA
aaaggcgtcggggctgctgggg

SEQ ID NO: 110655 - RNA, 22 nt, synthetic construct
  source 1..22: mol_type = other RNA
aaaggctgagacctcatcttag

SEQ ID NO: 110656 - RNA, 22 nt, synthetic construct
  source 1..22: mol_type = other RNA
aaaggctggaaataatttccct

SEQ ID NO: 110657 - RNA, 22 nt, synthetic construct
  source 1..22: mol_type = other RNA
aaaggctttcgtatggaagatg

SEQ ID NO: 110658 - RNA, 22 nt, synthetic construct
  source 1..22: mol_type = other RNA
aaagggaaaacaattacttgag

SEQ ID NO: 110659 - RNA, 22 nt, synthetic construct
  source 1..22: mol_type = other RNA
aaagggaaatatgaaccacact

SEQ ID NO: 110660 - RNA, 22 nt, synthetic construct
  source 1..22: mol_type = other RNA
aaagggagtcagtagaggccga

SEQ ID NO: 110661 - RNA, 22 nt, synthetic construct
  source 1..22: mol_type = other RNA
aaagggataatgctatccagaa

SEQ ID NO: 110662 - RNA, 22 nt, synthetic construct
  source 1..22: mol_type = other RNA
aaagggattctggccaaatccc

SEQ ID NO: 110663 - RNA, 22 nt, synthetic construct
  source 1..22: mol_type = other RNA
aaagggcctgttccaggcctcg

SEQ ID NO: 110664 - RNA, 22 nt, synthetic construct
  source 1..22: mol_type = other RNA
aaaggggaaggaattttcagga

SEQ ID NO: 110665 - RNA, 22 nt, synthetic construct
  source 1..22: mol_type = other RNA
aaaggggatgggggacgacgta

SEQ ID NO: 110666 - RNA, 22 nt, synthetic construct
  source 1..22: mol_type = other RNA
aaaggggatttcatgaacaatt

SEQ ID NO: 110667 - RNA, 22 nt, synthetic construct
  source 1..22: mol_type = other RNA
aaaggggcattccgtggaaggc

SEQ ID NO: 110668 - RNA, 22 nt, synthetic construct
  source 1..22: mol_type = other RNA
aaaggggccaggtgtggaggct

SEQ ID NO: 110669 - RNA, 22 nt, synthetic construct
  source 1..22: mol_type = other RNA
aaagggtaagaaaattgtacaa

SEQ ID NO: 110670 - RNA, 22 nt, synthetic construct
  source 1..22: mol_type = other RNA
aaagggtagagcactttcgtat

SEQ ID NO: 110671 - RNA, 22 nt, synthetic construct
  source 1..22: mol_type = other RNA
aaagggtagctttgatgccccc

SEQ ID NO: 110672 - RNA, 22 nt, synthetic construct
  source 1..22: mol_type = other RNA
aaagggtcactattaaccatat

SEQ ID NO: 110673 - RNA, 22 nt, synthetic construct
  source 1..22: mol_type = other RNA
aaagggtcagaattttattttc

SEQ ID NO: 110674 - RNA, 22 nt, synthetic construct
  source 1..22: mol_type = other RNA
aaagggtctggtatctaccaaa

SEQ ID NO: 110675 - RNA, 22 nt, synthetic construct
  source 1..22: mol_type = other RNA
aaagggtgggggcatcaaagct

SEQ ID NO: 110676 - RNA, 22 nt, synthetic construct
  source 1..22: mol_type = other RNA
aaagggtgtgtgaatggaaaat

SEQ ID NO: 110677 - RNA, 22 nt, synthetic construct
  source 1..22: mol_type = other RNA
aaagggttcttggaaattagaa

SEQ ID NO: 110678 - RNA, 22 nt, synthetic construct
  source 1..22: mol_type = other RNA
aaaggtaaggaaaccccaggga

SEQ ID NO: 110679 - RNA, 22 nt, synthetic construct
  source 1..22: mol_type = other RNA
aaaggtacgacgctcttgttca

SEQ ID NO: 110680 - RNA, 22 nt, synthetic construct
  source 1..22: mol_type = other RNA
aaaggtagaaacatcccaagtg

SEQ ID NO: 110681 - RNA, 22 nt, synthetic construct
  source 1..22: mol_type = other RNA
aaaggtagaagataatgttaga

SEQ ID NO: 110682 - RNA, 22 nt, synthetic construct
  source 1..22: mol_type = other RNA
aaaggtataaaggatgcacaag

SEQ ID NO: 110683 - RNA, 22 nt, synthetic construct
  source 1..22: mol_type = other RNA
aaaggtctagtgtgcatgtgtt

SEQ ID NO: 110684 - RNA, 22 nt, synthetic construct
  source 1..22: mol_type = other RNA
aaaggtctctctctgtcaccca

SEQ ID NO: 110685 - RNA, 22 nt, synthetic construct
  source 1..22: mol_type = other RNA
aaaggtgctaattgtttgttgg

SEQ ID NO: 110686 - RNA, 22 nt, synthetic construct
  source 1..22: mol_type = other RNA
aaaggtgctgttgtattttaca

SEQ ID NO: 110687 - RNA, 22 nt, synthetic construct
  source 1..22: mol_type = other RNA
aaaggtgttaagccgttccatc

SEQ ID NO: 110688 - RNA, 22 nt, synthetic construct
  source 1..22: mol_type = other RNA
aaaggttaagggaagagctaag

SEQ ID NO: 110689 - RNA, 22 nt, synthetic construct
  source 1..22: mol_type = other RNA
aaaggttgaaaactcaactgcc

SEQ ID NO: 110690 - RNA, 22 nt, synthetic construct
  source 1..22: mol_type = other RNA
aaaggttgagacaagaccacac

SEQ ID NO: 110691 - RNA, 22 nt, synthetic construct
  source 1..22: mol_type = other RNA
aaaggttgcttaattgagctgt

SEQ ID NO: 110692 - RNA, 22 nt, synthetic construct
  source 1..22: mol_type = other RNA
aaaggtttccagtggcccccct

SEQ ID NO: 110693 - RNA, 22 nt, synthetic construct
  source 1..22: mol_type = other RNA
aaaggtttcttcactcttaaaa

SEQ ID NO: 110694 - RNA, 22 nt, synthetic construct
  source 1..22: mol_type = other RNA
aaaggtttggagtttgtagctc

SEQ ID NO: 110695 - RNA, 22 nt, synthetic construct
  source 1..22: mol_type = other RNA
aaaggtttttgaacaagagcgt

SEQ ID NO: 110696 - RNA, 22 nt, synthetic construct
  source 1..22: mol_type = other RNA
aaagtaaaaagcactatccaca

SEQ ID NO: 110697 - RNA, 22 nt, synthetic construct
  source 1..22: mol_type = other RNA
aaagtaaagatagccccttatc

SEQ ID NO: 110698 - RNA, 22 nt, synthetic construct
  source 1..22: mol_type = other RNA
aaagtaaatcagactgtattac

SEQ ID NO: 110699 - RNA, 22 nt, synthetic construct
  source 1..22: mol_type = other RNA
aaagtaaattcgcataaccaaa

SEQ ID NO: 110700 - RNA, 22 nt, synthetic construct
  source 1..22: mol_type = other RNA
aaagtaactgttggcaaggatg

SEQ ID NO: 110701 - RNA, 22 nt, synthetic construct
  source 1..22: mol_type = other RNA
aaagtaatcaagtgaaatgatc

SEQ ID NO: 110702 - RNA, 22 nt, synthetic construct
  source 1..22: mol_type = other RNA
aaagtaatgaaaattagctgga

SEQ ID NO: 110703 - RNA, 22 nt, synthetic construct
  source 1..22: mol_type = other RNA
aaagtacagataaccaataaga

SEQ ID NO: 110704 - RNA, 22 nt, synthetic construct
  source 1..22: mol_type = other RNA
aaagtactggaaatggacagcg

SEQ ID NO: 110705 - RNA, 22 nt, synthetic construct
  source 1..22: mol_type = other RNA
aaagtagaaggccctatgcctt

SEQ ID NO: 110706 - RNA, 22 nt, synthetic construct
  source 1..22: mol_type = other RNA
aaagtagaggactgcctatttt

SEQ ID NO: 110707 - RNA, 22 nt, synthetic construct
  source 1..22: mol_type = other RNA
aaagtagattagcttttacgag

SEQ ID NO: 110708 - RNA, 22 nt, synthetic construct
  source 1..22: mol_type = other RNA
aaagtaggggtaaatctttgta

SEQ ID NO: 110709 - RNA, 22 nt, synthetic construct
  source 1..22: mol_type = other RNA
aaagtaggttgagacttagatt

SEQ ID NO: 110710 - RNA, 22 nt, synthetic construct
  source 1..22: mol_type = other RNA
aaagtatatatcatagagtacc

SEQ ID NO: 110711 - RNA, 22 nt, synthetic construct
  source 1..22: mol_type = other RNA
aaagtatcgtgagactattatg

SEQ ID NO: 110712 - RNA, 22 nt, synthetic construct
  source 1..22: mol_type = other RNA
aaagtatgagaaatgtctggtt

SEQ ID NO: 110713 - RNA, 22 nt, synthetic construct
  source 1..22: mol_type = other RNA
aaagtatgcatagcagggtcat

SEQ ID NO: 110714 - RNA, 22 nt, synthetic construct
  source 1..22: mol_type = other RNA
aaagtatggttgaagaaagtag

SEQ ID NO: 110715 - RNA, 22 nt, synthetic construct
  source 1..22: mol_type = other RNA
aaagtattaaaagcacaagcac

SEQ ID NO: 110716 - RNA, 22 nt, synthetic construct
  source 1..22: mol_type = other RNA
aaagtattcccaagatcataag

SEQ ID NO: 110717 - RNA, 22 nt, synthetic construct
  source 1..22: mol_type = other RNA
aaagtcactgtggaaaacagtt

SEQ ID NO: 110718 - RNA, 22 nt, synthetic construct
  source 1..22: mol_type = other RNA
aaagtcagaggagcagttactc

SEQ ID NO: 110719 - RNA, 22 nt, synthetic construct
  source 1..22: mol_type = other RNA
aaagtcagctaattttctaatc

SEQ ID NO: 110720 - RNA, 22 nt, synthetic construct
  source 1..22: mol_type = other RNA
aaagtcagctaggcgtagtatc

SEQ ID NO: 110721 - RNA, 22 nt, synthetic construct
  source 1..22: mol_type = other RNA
aaagtcagtaaaaaaggaccat

SEQ ID NO: 110722 - RNA, 22 nt, synthetic construct
  source 1..22: mol_type = other RNA
aaagtcatgacctgctttcttg

SEQ ID NO: 110723 - RNA, 22 nt, synthetic construct
  source 1..22: mol_type = other RNA
aaagtcattgaaactcaatgtt

SEQ ID NO: 110724 - RNA, 22 nt, synthetic construct
  source 1..22: mol_type = other RNA
aaagtccacagatctttttgtg

SEQ ID NO: 110725 - RNA, 22 nt, synthetic construct
  source 1..22: mol_type = other RNA
aaagtccccacatgactggcca

SEQ ID NO: 110726 - RNA, 22 nt, synthetic construct
  source 1..22: mol_type = other RNA
aaagtcccctgtaattacatac

SEQ ID NO: 110727 - RNA, 22 nt, synthetic construct
  source 1..22: mol_type = other RNA
aaagtcctgttcttttgtaatc

SEQ ID NO: 110728 - RNA, 22 nt, synthetic construct
  source 1..22: mol_type = other RNA
aaagtctatgctcttggtttct

SEQ ID NO: 110729 - RNA, 22 nt, synthetic construct
  source 1..22: mol_type = other RNA
aaagtctccctaaccaggcccg

SEQ ID NO: 110730 - RNA, 22 nt, synthetic construct
  source 1..22: mol_type = other RNA
aaagtcttccattttagatcaa

SEQ ID NO: 110731 - RNA, 22 nt, synthetic construct
  source 1..22: mol_type = other RNA
aaagtcttgctggaagttggcc

SEQ ID NO: 110732 - RNA, 22 nt, synthetic construct
  source 1..22: mol_type = other RNA
aaagtctttgggtaatttatct

SEQ ID NO: 110733 - RNA, 22 nt, synthetic construct
  source 1..22: mol_type = other RNA
aaagtgaaaactaaggtcaaga

SEQ ID NO: 110734 - RNA, 22 nt, synthetic construct
  source 1..22: mol_type = other RNA
aaagtgaaaggcaaaggaaaaa

SEQ ID NO: 110735 - RNA, 22 nt, synthetic construct
  source 1..22: mol_type = other RNA
aaagtgaagcccagagaggcta

SEQ ID NO: 110736 - RNA, 22 nt, synthetic construct
  source 1..22: mol_type = other RNA
aaagtgaatatagctaagaaac

SEQ ID NO: 110737 - RNA, 22 nt, synthetic construct
  source 1..22: mol_type = other RNA
aaagtgaatcactacagcatat

SEQ ID NO: 110738 - RNA, 22 nt, synthetic construct
  source 1..22: mol_type = other RNA
aaagtgacagatgagaaatact

SEQ ID NO: 110739 - RNA, 22 nt, synthetic construct
  source 1..22: mol_type = other RNA
aaagtgacttctggatgtgtat

SEQ ID NO: 110740 - RNA, 22 nt, synthetic construct
  source 1..22: mol_type = other RNA
aaagtgagcagaaggaggaaaa

SEQ ID NO: 110741 - RNA, 22 nt, synthetic construct
  source 1..22: mol_type = other RNA
aaagtgataccataaagtcaga

SEQ ID NO: 110742 - RNA, 22 nt, synthetic construct
  source 1..22: mol_type = other RNA
aaagtgccagccacccttgctg

SEQ ID NO: 110743 - RNA, 22 nt, synthetic construct
  source 1..22: mol_type = other RNA
aaagtgctctaccctttccaaa

SEQ ID NO: 110744 - RNA, 22 nt, synthetic construct
  source 1..22: mol_type = other RNA
aaagtgctgcagtatgcataga

SEQ ID NO: 110745 - RNA, 22 nt, synthetic construct
  source 1..22: mol_type = other RNA
aaagtgctgttgaggctgggcc

SEQ ID NO: 110746 - RNA, 22 nt, synthetic construct
  source 1..22: mol_type = other RNA
aaagtgcttctagtaacttggt

SEQ ID NO: 110747 - RNA, 22 nt, synthetic construct
  source 1..22: mol_type = other RNA
aaagtggactatgtaggcacat

SEQ ID NO: 110748 - RNA, 22 nt, synthetic construct
  source 1..22: mol_type = other RNA
aaagtgtaaagtttctctctcc

SEQ ID NO: 110749 - RNA, 22 nt, synthetic construct
  source 1..22: mol_type = other RNA
aaagtgtgaccacattcccaaa

SEQ ID NO: 110750 - RNA, 22 nt, synthetic construct
  source 1..22: mol_type = other RNA
aaagtgtgcttgggctcccttc

SEQ ID NO: 110751 - RNA, 22 nt, synthetic construct
  source 1..22: mol_type = other RNA
aaagtgttagaattacaggcat

SEQ ID NO: 110752 - RNA, 22 nt, synthetic construct
  source 1..22: mol_type = other RNA
aaagtgttgactaccatctctc

SEQ ID NO: 110753 - RNA, 22 nt, synthetic construct
  source 1..22: mol_type = other RNA
aaagtgtttgtcacatagaagc

SEQ ID NO: 110754 - RNA, 22 nt, synthetic construct
  source 1..22: mol_type = other RNA
aaagttaaacttttgtgcatca

SEQ ID NO: 110755 - RNA, 22 nt, synthetic construct
  source 1..22: mol_type = other RNA
aaagttaatagcctcctaagtt

SEQ ID NO: 110756 - RNA, 22 nt, synthetic construct
  source 1..22: mol_type = other RNA
aaagttaatattgtaggtgtct

SEQ ID NO: 110757 - RNA, 22 nt, synthetic construct
  source 1..22: mol_type = other RNA
aaagttacaaggattgaatgga

SEQ ID NO: 110758 - RNA, 22 nt, synthetic construct
  source 1..22: mol_type = other RNA
aaagttagaagtatcccagatg

SEQ ID NO: 110759 - RNA, 22 nt, synthetic construct
  source 1..22: mol_type = other RNA
aaagttagctggcaaaatggag

SEQ ID NO: 110760 - RNA, 22 nt, synthetic construct
  source 1..22: mol_type = other RNA
aaagttagtgaagcagagagag

SEQ ID NO: 110761 - RNA, 22 nt, synthetic construct
  source 1..22: mol_type = other RNA
aaagttagtgtctaatgggtac

SEQ ID NO: 110762 - RNA, 22 nt, synthetic construct
  source 1..22: mol_type = other RNA
aaagttcaaatgaggcttttat

SEQ ID NO: 110763 - RNA, 22 nt, synthetic construct
  source 1..22: mol_type = other RNA
aaagttcagaataccagagatt

SEQ ID NO: 110764 - RNA, 22 nt, synthetic construct
  source 1..22: mol_type = other RNA
aaagttccaagattttcccaat

SEQ ID NO: 110765 - RNA, 22 nt, synthetic construct
  source 1..22: mol_type = other RNA
aaagttccccattgacaatata

SEQ ID NO: 110766 - RNA, 22 nt, synthetic construct
  source 1..22: mol_type = other RNA
aaagttgaggttgaagacctgc

SEQ ID NO: 110767 - RNA, 22 nt, synthetic construct
  source 1..22: mol_type = other RNA
aaagttgcaaaaatactacaag

SEQ ID NO: 110768 - RNA, 22 nt, synthetic construct
  source 1..22: mol_type = other RNA
aaagttgggcttggttggaaaa

SEQ ID NO: 110769 - RNA, 22 nt, synthetic construct
  source 1..22: mol_type = other RNA
aaagttggtcctgcatatgttt

SEQ ID NO: 110770 - RNA, 22 nt, synthetic construct
  source 1..22: mol_type = other RNA
aaagtttcaaactgtggtcact

SEQ ID NO: 110771 - RNA, 22 nt, synthetic construct
  source 1..22: mol_type = other RNA
aaagtttccgttttgcaagatg

SEQ ID NO: 110772 - RNA, 22 nt, synthetic construct
  source 1..22: mol_type = other RNA
aaagtttcctacatactgcact

SEQ ID NO: 110773 - RNA, 22 nt, synthetic construct
  source 1..22: mol_type = other RNA
aaagtttcctagaaaatcatac

SEQ ID NO: 110774 - RNA, 22 nt, synthetic construct
  source 1..22: mol_type = other RNA
aaagtttctctctccctgccct

SEQ ID NO: 110775 - RNA, 22 nt, synthetic construct
  source 1..22: mol_type = other RNA
aaagttttccaaccactgaatc

SEQ ID NO: 110776 - RNA, 22 nt, synthetic construct
  source 1..22: mol_type = other RNA
aaagttttgcagttggggactc

SEQ ID NO: 110777 - RNA, 22 nt, synthetic construct
  source 1..22: mol_type = other RNA
aaagttttttcctttgcctttc

SEQ ID NO: 110778 - RNA, 22 nt, synthetic construct
  source 1..22: mol_type = other RNA
aaataaaaacctttttgggatc

SEQ ID NO: 110779 - RNA, 22 nt, synthetic construct
  source 1..22: mol_type = other RNA
aaataaaaagtatcgtgagact

SEQ ID NO: 110780 - RNA, 22 nt, synthetic construct
  source 1..22: mol_type = other RNA
aaataaaacacaaggacaggtc

SEQ ID NO: 110781 - RNA, 22 nt, synthetic construct
  source 1..22: mol_type = other RNA
aaataaaacacatgtcatgggc

SEQ ID NO: 110782 - RNA, 22 nt, synthetic construct
  source 1..22: mol_type = other RNA
aaataaaacatggccagtatct

SEQ ID NO: 110783 - RNA, 22 nt, synthetic construct
  source 1..22: mol_type = other RNA
aaataaaagcttatgatcttgg

SEQ ID NO: 110784 - RNA, 22 nt, synthetic construct
  source 1..22: mol_type = other RNA
aaataaaatgtctggccgggca

SEQ ID NO: 110785 - RNA, 22 nt, synthetic construct
  source 1..22: mol_type = other RNA
aaataaacattttccctccttt

SEQ ID NO: 110786 - RNA, 22 nt, synthetic construct
  source 1..22: mol_type = other RNA
aaataaaccaagtttggttcat

SEQ ID NO: 110787 - RNA, 22 nt, synthetic construct
  source 1..22: mol_type = other RNA
aaataaacgacaccagaactac

SEQ ID NO: 110788 - RNA, 22 nt, synthetic construct
  source 1..22: mol_type = other RNA
aaataaagacttcacgatgctt

SEQ ID NO: 110789 - RNA, 22 nt, synthetic construct
  source 1..22: mol_type = other RNA
aaataaaggctttcgtatggaa

SEQ ID NO: 110790 - RNA, 22 nt, synthetic construct
  source 1..22: mol_type = other RNA
aaataaagttccccattgacaa

SEQ ID NO: 110791 - RNA, 22 nt, synthetic construct
  source 1..22: mol_type = other RNA
aaataaatcctcacatgtttgg

SEQ ID NO: 110792 - RNA, 22 nt, synthetic construct
  source 1..22: mol_type = other RNA
aaataaatctaagtctcaacct

SEQ ID NO: 110793 - RNA, 22 nt, synthetic construct
  source 1..22: mol_type = other RNA
aaataacaccatagctgaaggc

SEQ ID NO: 110794 - RNA, 22 nt, synthetic construct
  source 1..22: mol_type = other RNA
aaataacacgcagaaccactga

SEQ ID NO: 110795 - RNA, 22 nt, synthetic construct
  source 1..22: mol_type = other RNA
aaataacgggccgggcgctgtg

SEQ ID NO: 110796 - RNA, 22 nt, synthetic construct
  source 1..22: mol_type = other RNA
aaataactccagcttttattag

SEQ ID NO: 110797 - RNA, 22 nt, synthetic construct
  source 1..22: mol_type = other RNA
aaataacttccatgagattaca

SEQ ID NO: 110798 - RNA, 22 nt, synthetic construct
  source 1..22: mol_type = other RNA
aaataactttaatcaccaggcg

SEQ ID NO: 110799 - RNA, 22 nt, synthetic construct
  source 1..22: mol_type = other RNA
aaataagaaagatctcaaacag

SEQ ID NO: 110800 - RNA, 22 nt, synthetic construct
  source 1..22: mol_type = other RNA
aaataagaagattgagtcagta

SEQ ID NO: 110801 - RNA, 22 nt, synthetic construct
  source 1..22: mol_type = other RNA
aaataagaaggtttgtagagca

SEQ ID NO: 110802 - RNA, 22 nt, synthetic construct
  source 1..22: mol_type = other RNA
aaataagggcattttcaaggta

SEQ ID NO: 110803 - RNA, 22 nt, synthetic construct
  source 1..22: mol_type = other RNA
aaataaggtcacattcagaggt

SEQ ID NO: 110804 - RNA, 22 nt, synthetic construct
  source 1..22: mol_type = other RNA
aaataagtttcatggacttcct

SEQ ID NO: 110805 - RNA, 22 nt, synthetic construct
  source 1..22: mol_type = other RNA
aaataatacaaatgatgaaggg

SEQ ID NO: 110806 - RNA, 22 nt, synthetic construct
  source 1..22: mol_type = other RNA
aaataatacctaacagccggca

SEQ ID NO: 110807 - RNA, 22 nt, synthetic construct
  source 1..22: mol_type = other RNA
aaataatagctatcctaatggg

SEQ ID NO: 110808 - RNA, 22 nt, synthetic construct
  source 1..22: mol_type = other RNA
aaataatcattgttaggtgctg

SEQ ID NO: 110809 - RNA, 22 nt, synthetic construct
  source 1..22: mol_type = other RNA
aaataatcccgcaccttgattt

SEQ ID NO: 110810 - RNA, 22 nt, synthetic construct
  source 1..22: mol_type = other RNA
aaataatgttttccgtgtgaca

SEQ ID NO: 110811 - RNA, 22 nt, synthetic construct
  source 1..22: mol_type = other RNA
aaataattgctgcagtttttcc

SEQ ID NO: 110812 - RNA, 22 nt, synthetic construct
  source 1..22: mol_type = other RNA
aaataatttccctcagaatttg

SEQ ID NO: 110813 - RNA, 22 nt, synthetic construct
  source 1..22: mol_type = other RNA
aaatacaacagcaccttttttg

SEQ ID NO: 110814 - RNA, 22 nt, synthetic construct
  source 1..22: mol_type = other RNA
aaatacaatgtgagccacatac

SEQ ID NO: 110815 - RNA, 22 nt, synthetic construct
  source 1..22: mol_type = other RNA
aaatacacatgttgagtcttgt

SEQ ID NO: 110816 - RNA, 22 nt, synthetic construct
  source 1..22: mol_type = other RNA
aaatacaccaaactcaaaagga

SEQ ID NO: 110817 - RNA, 22 nt, synthetic construct
  source 1..22: mol_type = other RNA
aaatacagaccgatggaacaga

SEQ ID NO: 110818 - RNA, 22 nt, synthetic construct
  source 1..22: mol_type = other RNA
aaatacagagcacagactcaag

SEQ ID NO: 110819 - RNA, 22 nt, synthetic construct
  source 1..22: mol_type = other RNA
aaatacagctccaaagaacagg

SEQ ID NO: 110820 - RNA, 22 nt, synthetic construct
  source 1..22: mol_type = other RNA
aaatacagttttgaccaaaaca

SEQ ID NO: 110821 - RNA, 22 nt, synthetic construct
  source 1..22: mol_type = other RNA
aaatacatgaggcctctcccct

SEQ ID NO: 110822 - RNA, 22 nt, synthetic construct
  source 1..22: mol_type = other RNA
aaatacatgtcatgttcccgga

SEQ ID NO: 110823 - RNA, 22 nt, synthetic construct
  source 1..22: mol_type = other RNA
aaataccaaaaaaggtgctgtt

SEQ ID NO: 110824 - RNA, 22 nt, synthetic construct
  source 1..22: mol_type = other RNA
aaataccacctgaaatctgatt

SEQ ID NO: 110825 - RNA, 22 nt, synthetic construct
  source 1..22: mol_type = other RNA
aaataccagaggttaaagcaac

SEQ ID NO: 110826 - RNA, 22 nt, synthetic construct
  source 1..22: mol_type = other RNA
aaatacccacaagaaaaaccta

SEQ ID NO: 110827 - RNA, 22 nt, synthetic construct
  source 1..22: mol_type = other RNA
aaatacctagttttccaatccg

SEQ ID NO: 110828 - RNA, 22 nt, synthetic construct
  source 1..22: mol_type = other RNA
aaatacctctgaatgtgacctt

SEQ ID NO: 110829 - RNA, 22 nt, synthetic construct
  source 1..22: mol_type = other RNA
aaatacctgcaggttgatacta

SEQ ID NO: 110830 - RNA, 22 nt, synthetic construct
  source 1..22: mol_type = other RNA
aaatacgaaagtgctctaccct

SEQ ID NO: 110831 - RNA, 22 nt, synthetic construct
  source 1..22: mol_type = other RNA
aaatacggccgggagtggtggc

SEQ ID NO: 110832 - RNA, 22 nt, synthetic construct
  source 1..22: mol_type = other RNA
aaatacgtatatgaaaagccca

SEQ ID NO: 110833 - RNA, 22 nt, synthetic construct
  source 1..22: mol_type = other RNA
aaatacgtgtatactgggtgtg

SEQ ID NO: 110834 - RNA, 22 nt, synthetic construct
  source 1..22: mol_type = other RNA
aaatactaacgatccttactac

SEQ ID NO: 110835 - RNA, 22 nt, synthetic construct
  source 1..22: mol_type = other RNA
aaatactacaagagttccccta

SEQ ID NO: 110836 - RNA, 22 nt, synthetic construct
  source 1..22: mol_type = other RNA
aaatactagcaaactgaatcag

SEQ ID NO: 110837 - RNA, 22 nt, synthetic construct
  source 1..22: mol_type = other RNA
aaatactagtaggatgaattac

SEQ ID NO: 110838 - RNA, 22 nt, synthetic construct
  source 1..22: mol_type = other RNA
aaatactcaagggctttcaata

SEQ ID NO: 110839 - RNA, 22 nt, synthetic construct
  source 1..22: mol_type = other RNA
aaatacttaagagcatgttggg

SEQ ID NO: 110840 - RNA, 22 nt, synthetic construct
  source 1..22: mol_type = other RNA
aaatacttgaacattctgtaga

SEQ ID NO: 110841 - RNA, 22 nt, synthetic construct
  source 1..22: mol_type = other RNA
aaatacttggacaggggacatg

SEQ ID NO: 110842 - RNA, 22 nt, synthetic construct
  source 1..22: mol_type = other RNA
aaatagaaaacttgagcagatc

SEQ ID NO: 110843 - RNA, 22 nt, synthetic construct
  source 1..22: mol_type = other RNA
aaatagaactgtcacaattcac

SEQ ID NO: 110844 - RNA, 22 nt, synthetic construct
  source 1..22: mol_type = other RNA
aaatagactcccaacttataat

SEQ ID NO: 110845 - RNA, 22 nt, synthetic construct
  source 1..22: mol_type = other RNA
aaatagaggatgggcattccag

SEQ ID NO: 110846 - RNA, 22 nt, synthetic construct
  source 1..22: mol_type = other RNA
aaatagagttccatctgttata

SEQ ID NO: 110847 - RNA, 22 nt, synthetic construct
  source 1..22: mol_type = other RNA
aaatagataaggttgttcttgg

SEQ ID NO: 110848 - RNA, 22 nt, synthetic construct
  source 1..22: mol_type = other RNA
aaatagatgcctagaaaggaat

SEQ ID NO: 110849 - RNA, 22 nt, synthetic construct
  source 1..22: mol_type = other RNA
aaatagcaggattcttgttaag

SEQ ID NO: 110850 - RNA, 22 nt, synthetic construct
  source 1..22: mol_type = other RNA
aaataggaagtccatgaaactt

SEQ ID NO: 110851 - RNA, 22 nt, synthetic construct
  source 1..22: mol_type = other RNA
aaataggattaagacactacaa

SEQ ID NO: 110852 - RNA, 22 nt, synthetic construct
  source 1..22: mol_type = other RNA
aaataggcagtcctctactttc

SEQ ID NO: 110853 - RNA, 22 nt, synthetic construct
  source 1..22: mol_type = other RNA
aaataggcctaggtgtgataac

SEQ ID NO: 110854 - RNA, 22 nt, synthetic construct
  source 1..22: mol_type = other RNA
aaatagggacggccttcttttt

SEQ ID NO: 110855 - RNA, 22 nt, synthetic construct
  source 1..22: mol_type = other RNA
aaatagggtgctactcaaagtt

SEQ ID NO: 110856 - RNA, 22 nt, synthetic construct
  source 1..22: mol_type = other RNA
aaataggtattcatgctgtgaa

SEQ ID NO: 110857 - RNA, 22 nt, synthetic construct
  source 1..22: mol_type = other RNA
aaatagtagttgctcagaaaat

SEQ ID NO: 110858 - RNA, 22 nt, synthetic construct
  source 1..22: mol_type = other RNA
aaatagtcaagtaacagttcaa

SEQ ID NO: 110859 - RNA, 22 nt, synthetic construct
  source 1..22: mol_type = other RNA
aaatagttggtcagaaaaatgg

SEQ ID NO: 110860 - RNA, 22 nt, synthetic construct
  source 1..22: mol_type = other RNA
aaatataaaaagcctctgtgga

SEQ ID NO: 110861 - RNA, 22 nt, synthetic construct
  source 1..22: mol_type = other RNA
aaatatactgactagtggctca

SEQ ID NO: 110862 - RNA, 22 nt, synthetic construct
  source 1..22: mol_type = other RNA
aaatatagaaggccagagggaa

SEQ ID NO: 110863 - RNA, 22 nt, synthetic construct
  source 1..22: mol_type = other RNA
aaatatatacggaatgattcca

SEQ ID NO: 110864 - RNA, 22 nt, synthetic construct
  source 1..22: mol_type = other RNA
aaatatatactgaagttctcag

SEQ ID NO: 110865 - RNA, 22 nt, synthetic construct
  source 1..22: mol_type = other RNA
aaatatattctaaacctgaggt

SEQ ID NO: 110866 - RNA, 22 nt, synthetic construct
  source 1..22: mol_type = other RNA
aaatatccaatcactggctagt

SEQ ID NO: 110867 - RNA, 22 nt, synthetic construct
  source 1..22: mol_type = other RNA
aaatatccctggggtttcctta

SEQ ID NO: 110868 - RNA, 22 nt, synthetic construct
  source 1..22: mol_type = other RNA
aaatatccgaaagaactgaaag

SEQ ID NO: 110869 - RNA, 22 nt, synthetic construct
  source 1..22: mol_type = other RNA
aaatatctccctcacagtccac

SEQ ID NO: 110870 - RNA, 22 nt, synthetic construct
  source 1..22: mol_type = other RNA
aaatatgaaccacactgacagg

SEQ ID NO: 110871 - RNA, 22 nt, synthetic construct
  source 1..22: mol_type = other RNA
aaatatgaagcattaatgcaac

SEQ ID NO: 110872 - RNA, 22 nt, synthetic construct
  source 1..22: mol_type = other RNA
aaatatggtcactgctgatgta

SEQ ID NO: 110873 - RNA, 22 nt, synthetic construct
  source 1..22: mol_type = other RNA
aaatatgtaatgacctggaaat

SEQ ID NO: 110874 - RNA, 22 nt, synthetic construct
  source 1..22: mol_type = other RNA
aaatatgtccttttgagtttgg

SEQ ID NO: 110875 - RNA, 22 nt, synthetic construct
  source 1..22: mol_type = other RNA
aaatattccatttttctgacca

SEQ ID NO: 110876 - RNA, 22 nt, synthetic construct
  source 1..22: mol_type = other RNA
aaatattgaagagggaacattt

SEQ ID NO: 110877 - RNA, 22 nt, synthetic construct
  source 1..22: mol_type = other RNA
aaatatttaacaccatggcagg

SEQ ID NO: 110878 - RNA, 22 nt, synthetic construct
  source 1..22: mol_type = other RNA
aaatcaaaacaataagacaccg

SEQ ID NO: 110879 - RNA, 22 nt, synthetic construct
  source 1..22: mol_type = other RNA
aaatcaaagaaagagttgggtt

SEQ ID NO: 110880 - RNA, 22 nt, synthetic construct
  source 1..22: mol_type = other RNA
aaatcaaatgggaaattagatg

SEQ ID NO: 110881 - RNA, 22 nt, synthetic construct
  source 1..22: mol_type = other RNA
aaatcaacagtgtactagtctc

SEQ ID NO: 110882 - RNA, 22 nt, synthetic construct
  source 1..22: mol_type = other RNA
aaatcaacattgcctccatatg

SEQ ID NO: 110883 - RNA, 22 nt, synthetic construct
  source 1..22: mol_type = other RNA
aaatcaacccatgaaaattgaa

SEQ ID NO: 110884 - RNA, 22 nt, synthetic construct
  source 1..22: mol_type = other RNA
aaatcaaccccatcaacaagtg

SEQ ID NO: 110885 - RNA, 22 nt, synthetic construct
  source 1..22: mol_type = other RNA
aaatcaaggtacaatacactaa

SEQ ID NO: 110886 - RNA, 22 nt, synthetic construct
  source 1..22: mol_type = other RNA
aaatcaaggtgcgggattattt

SEQ ID NO: 110887 - RNA, 22 nt, synthetic construct
  source 1..22: mol_type = other RNA
aaatcaatctgtttcctaatct

SEQ ID NO: 110888 - RNA, 22 nt, synthetic construct
  source 1..22: mol_type = other RNA
aaatcacacaatcttgagacgg

SEQ ID NO: 110889 - RNA, 22 nt, synthetic construct
  source 1..22: mol_type = other RNA
aaatcacaggaaagatgtcttt

SEQ ID NO: 110890 - RNA, 22 nt, synthetic construct
  source 1..22: mol_type = other RNA
aaatcacaggtttaggtttttc

SEQ ID NO: 110891 - RNA, 22 nt, synthetic construct
  source 1..22: mol_type = other RNA
aaatcagaaaaggctgagacct

SEQ ID NO: 110892 - RNA, 22 nt, synthetic construct
  source 1..22: mol_type = other RNA
aaatcagaaactgacaggactc

SEQ ID NO: 110893 - RNA, 22 nt, synthetic construct
  source 1..22: mol_type = other RNA
aaatcagaacttgacaagtata

SEQ ID NO: 110894 - RNA, 22 nt, synthetic construct
  source 1..22: mol_type = other RNA
aaatcagactgtattaccagct

SEQ ID NO: 110895 - RNA, 22 nt, synthetic construct
  source 1..22: mol_type = other RNA
aaatcagatatgaaagaggaga

SEQ ID NO: 110896 - RNA, 22 nt, synthetic construct
  source 1..22: mol_type = other RNA
aaatcagattaagcatagtttg

SEQ ID NO: 110897 - RNA, 22 nt, synthetic construct
  source 1..22: mol_type = other RNA
aaatcagatttcaggtggtatt

SEQ ID NO: 110898 - RNA, 22 nt, synthetic construct
  source 1..22: mol_type = other RNA
aaatcagcaccatctaacagaa

SEQ ID NO: 110899 - RNA, 22 nt, synthetic construct
  source 1..22: mol_type = other RNA
aaatcaggaagtatgagtcttc

SEQ ID NO: 110900 - RNA, 22 nt, synthetic construct
  source 1..22: mol_type = other RNA
aaatcaggatgtctttgggaag

SEQ ID NO: 110901 - RNA, 22 nt, synthetic construct
  source 1..22: mol_type = other RNA
aaatcagggcctttaatcacct

SEQ ID NO: 110902 - RNA, 22 nt, synthetic construct
  source 1..22: mol_type = other RNA
aaatcatacacgagtgtgtttc

SEQ ID NO: 110903 - RNA, 22 nt, synthetic construct
  source 1..22: mol_type = other RNA
aaatcatcacagtatgcacaaa

SEQ ID NO: 110904 - RNA, 22 nt, synthetic construct
  source 1..22: mol_type = other RNA
aaatcatgaaagtggagaatta

SEQ ID NO: 110905 - RNA, 22 nt, synthetic construct
  source 1..22: mol_type = other RNA
aaatcatgatgtttggctcctt

SEQ ID NO: 110906 - RNA, 22 nt, synthetic construct
  source 1..22: mol_type = other RNA
aaatcattcaggacactggagg

SEQ ID NO: 110907 - RNA, 22 nt, synthetic construct
  source 1..22: mol_type = other RNA
aaatcattcatctaaacgtttg

SEQ ID NO: 110908 - RNA, 22 nt, synthetic construct
  source 1..22: mol_type = other RNA
aaatcattgtagctatatccca

SEQ ID NO: 110909 - RNA, 22 nt, synthetic construct
  source 1..22: mol_type = other RNA
aaatcattgttcagggaaggct

SEQ ID NO: 110910 - RNA, 22 nt, synthetic construct
  source 1..22: mol_type = other RNA
aaatcatttcactcttttaagg

SEQ ID NO: 110911 - RNA, 22 nt, synthetic construct
  source 1..22: mol_type = other RNA
aaatcattttggcaaattgtca

SEQ ID NO: 110912 - RNA, 22 nt, synthetic construct
  source 1..22: mol_type = other RNA
aaatccaaaagcctcaaaattt

SEQ ID NO: 110913 - RNA, 22 nt, synthetic construct
  source 1..22: mol_type = other RNA
aaatccaaattcacagcatgaa

SEQ ID NO: 110914 - RNA, 22 nt, synthetic construct
  source 1..22: mol_type = other RNA
aaatccaacgaccggacgtggt

SEQ ID NO: 110915 - RNA, 22 nt, synthetic construct
  source 1..22: mol_type = other RNA
aaatccaagaagacatgataaa

SEQ ID NO: 110916 - RNA, 22 nt, synthetic construct
  source 1..22: mol_type = other RNA
aaatccagataaattatagctc

SEQ ID NO: 110917 - RNA, 22 nt, synthetic construct
  source 1..22: mol_type = other RNA
aaatccaggatggcatgaaatg

SEQ ID NO: 110918 - RNA, 22 nt, synthetic construct
  source 1..22: mol_type = other RNA
aaatccagtcttcaggtctctc

SEQ ID NO: 110919 - RNA, 22 nt, synthetic construct
  source 1..22: mol_type = other RNA
aaatcccacttgatccaggtgt

SEQ ID NO: 110920 - RNA, 22 nt, synthetic construct
  source 1..22: mol_type = other RNA
aaatcccatttgtaacatgtta

SEQ ID NO: 110921 - RNA, 22 nt, synthetic construct
  source 1..22: mol_type = other RNA
aaatcccctttagtgttctgtg

SEQ ID NO: 110922 - RNA, 22 nt, synthetic construct
  source 1..22: mol_type = other RNA
aaatccctgatcaagttgcttg

SEQ ID NO: 110923 - RNA, 22 nt, synthetic construct
  source 1..22: mol_type = other RNA
aaatccgagacaagttctcctg

SEQ ID NO: 110924 - RNA, 22 nt, synthetic construct
  source 1..22: mol_type = other RNA
aaatcctagccccaaatacctc

SEQ ID NO: 110925 - RNA, 22 nt, synthetic construct
  source 1..22: mol_type = other RNA
aaatcctcacatgtttggtcaa

SEQ ID NO: 110926 - RNA, 22 nt, synthetic construct
  source 1..22: mol_type = other RNA
aaatcctctgtagataaacgtt

SEQ ID NO: 110927 - RNA, 22 nt, synthetic construct
  source 1..22: mol_type = other RNA
aaatcctgctgggctattgttt

SEQ ID NO: 110928 - RNA, 22 nt, synthetic construct
  source 1..22: mol_type = other RNA
aaatccttacttccagctcacg

SEQ ID NO: 110929 - RNA, 22 nt, synthetic construct
  source 1..22: mol_type = other RNA
aaatccttttcccaggagctag

SEQ ID NO: 110930 - RNA, 22 nt, synthetic construct
  source 1..22: mol_type = other RNA
aaatcggaacaggctcaatacc

SEQ ID NO: 110931 - RNA, 22 nt, synthetic construct
  source 1..22: mol_type = other RNA
aaatcggaactcctgtatgccg

SEQ ID NO: 110932 - RNA, 22 nt, synthetic construct
  source 1..22: mol_type = other RNA
aaatcgggagtaacagacctct

SEQ ID NO: 110933 - RNA, 22 nt, synthetic construct
  source 1..22: mol_type = other RNA
aaatcgtcctcttcgggtgtca

SEQ ID NO: 110934 - RNA, 22 nt, synthetic construct
  source 1..22: mol_type = other RNA
aaatctaaagccaatcttccca

SEQ ID NO: 110935 - RNA, 22 nt, synthetic construct
  source 1..22: mol_type = other RNA
aaatctaaccctcaatccccat

SEQ ID NO: 110936 - RNA, 22 nt, synthetic construct
  source 1..22: mol_type = other RNA
aaatctaagtctcaacctactt

SEQ ID NO: 110937 - RNA, 22 nt, synthetic construct
  source 1..22: mol_type = other RNA
aaatctaataaaaagcctctct

SEQ ID NO: 110938 - RNA, 22 nt, synthetic construct
  source 1..22: mol_type = other RNA
aaatctaccaaacattgaaggc

SEQ ID NO: 110939 - RNA, 22 nt, synthetic construct
  source 1..22: mol_type = other RNA
aaatctaggcatataataagca

SEQ ID NO: 110940 - RNA, 22 nt, synthetic construct
  source 1..22: mol_type = other RNA
aaatctaggttatctgttttct

SEQ ID NO: 110941 - RNA, 22 nt, synthetic construct
  source 1..22: mol_type = other RNA
aaatctctacagggaaccgtaa

SEQ ID NO: 110942 - RNA, 22 nt, synthetic construct
  source 1..22: mol_type = other RNA
aaatctctagaacttatgcatc

SEQ ID NO: 110943 - RNA, 22 nt, synthetic construct
  source 1..22: mol_type = other RNA
aaatctctgacttcattcttga

SEQ ID NO: 110944 - RNA, 22 nt, synthetic construct
  source 1..22: mol_type = other RNA
aaatctgacaatttgccaaaat

SEQ ID NO: 110945 - RNA, 22 nt, synthetic construct
  source 1..22: mol_type = other RNA
aaatctgatgtgtatgttacac

SEQ ID NO: 110946 - RNA, 22 nt, synthetic construct
  source 1..22: mol_type = other RNA
aaatctgattcagtggttggaa

SEQ ID NO: 110947 - RNA, 22 nt, synthetic construct
  source 1..22: mol_type = other RNA
aaatctgatttgtttagtagct

SEQ ID NO: 110948 - RNA, 22 nt, synthetic construct
  source 1..22: mol_type = other RNA
aaatctgcatccaaaagggaaa

SEQ ID NO: 110949 - RNA, 22 nt, synthetic construct
  source 1..22: mol_type = other RNA
aaatctggctgcagggcttctg

SEQ ID NO: 110950 - RNA, 22 nt, synthetic construct
  source 1..22: mol_type = other RNA
aaatctgtatatgaaaagcttc

SEQ ID NO: 110951 - RNA, 22 nt, synthetic construct
  source 1..22: mol_type = other RNA
aaatctgtatgagaagactgga

SEQ ID NO: 110952 - RNA, 22 nt, synthetic construct
  source 1..22: mol_type = other RNA
aaatcttattccccagggaaac

SEQ ID NO: 110953 - RNA, 22 nt, synthetic construct
  source 1..22: mol_type = other RNA
aaatcttcaaaatctgatgtgt

SEQ ID NO: 110954 - RNA, 22 nt, synthetic construct
  source 1..22: mol_type = other RNA
aaatcttccagaaggagaaaac

SEQ ID NO: 110955 - RNA, 22 nt, synthetic construct
  source 1..22: mol_type = other RNA
aaatcttgaagatggcaaacag

SEQ ID NO: 110956 - RNA, 22 nt, synthetic construct
  source 1..22: mol_type = other RNA
aaatctttagtgttgcttggtg

SEQ ID NO: 110957 - RNA, 22 nt, synthetic construct
  source 1..22: mol_type = other RNA
aaatctttggtgaaggttcatg

SEQ ID NO: 110958 - RNA, 22 nt, synthetic construct
  source 1..22: mol_type = other RNA
aaatgaaaaattcactcctcat

SEQ ID NO: 110959 - RNA, 22 nt, synthetic construct
  source 1..22: mol_type = other RNA
aaatgaaaatgttccctcttca

SEQ ID NO: 110960 - RNA, 22 nt, synthetic construct
  source 1..22: mol_type = other RNA
aaatgaaacacttgtgtaacta

SEQ ID NO: 110961 - RNA, 22 nt, synthetic construct
  source 1..22: mol_type = other RNA
aaatgaaaggcgtcggggctgc

SEQ ID NO: 110962 - RNA, 22 nt, synthetic construct
  source 1..22: mol_type = other RNA
aaatgaaagtcagctaattttc

SEQ ID NO: 110963 - RNA, 22 nt, synthetic construct
  source 1..22: mol_type = other RNA
aaatgaaatggcccttaacttc

SEQ ID NO: 110964 - RNA, 22 nt, synthetic construct
  source 1..22: mol_type = other RNA
aaatgaaatttgaggccctatt

SEQ ID NO: 110965 - RNA, 22 nt, synthetic construct
  source 1..22: mol_type = other RNA
aaatgaacaggttcttcatcag

SEQ ID NO: 110966 - RNA, 22 nt, synthetic construct
  source 1..22: mol_type = other RNA
aaatgaaccaaacttggtttat

SEQ ID NO: 110967 - RNA, 22 nt, synthetic construct
  source 1..22: mol_type = other RNA
aaatgaacctgctttctactag

SEQ ID NO: 110968 - RNA, 22 nt, synthetic construct
  source 1..22: mol_type = other RNA
aaatgaagaaaatccaagaaga

SEQ ID NO: 110969 - RNA, 22 nt, synthetic construct
  source 1..22: mol_type = other RNA
aaatgaagatggcctccctcac

SEQ ID NO: 110970 - RNA, 22 nt, synthetic construct
  source 1..22: mol_type = other RNA
aaatgaaggaaaaaacgggtta

SEQ ID NO: 110971 - RNA, 22 nt, synthetic construct
  source 1..22: mol_type = other RNA
aaatgaagtattgatttgacca

SEQ ID NO: 110972 - RNA, 22 nt, synthetic construct
  source 1..22: mol_type = other RNA
aaatgaatattcgttccagcag

SEQ ID NO: 110973 - RNA, 22 nt, synthetic construct
  source 1..22: mol_type = other RNA
aaatgacaagtaaatgcaatgc

SEQ ID NO: 110974 - RNA, 22 nt, synthetic construct
  source 1..22: mol_type = other RNA
aaatgacacaacttactactaa

SEQ ID NO: 110975 - RNA, 22 nt, synthetic construct
  source 1..22: mol_type = other RNA
aaatgacaccaaaactacaggc

SEQ ID NO: 110976 - RNA, 22 nt, synthetic construct
  source 1..22: mol_type = other RNA
aaatgacctaaaatcttattcc

SEQ ID NO: 110977 - RNA, 22 nt, synthetic construct
  source 1..22: mol_type = other RNA
aaatgagaaacctaagaaaggt

SEQ ID NO: 110978 - RNA, 22 nt, synthetic construct
  source 1..22: mol_type = other RNA
aaatgagacacctacaatatta

SEQ ID NO: 110979 - RNA, 22 nt, synthetic construct
  source 1..22: mol_type = other RNA
aaatgagccaggcatggtggtg

SEQ ID NO: 110980 - RNA, 22 nt, synthetic construct
  source 1..22: mol_type = other RNA
aaatgaggcttttattggtaat

SEQ ID NO: 110981 - RNA, 22 nt, synthetic construct
  source 1..22: mol_type = other RNA
aaatgagggtaaaatagtcaag

SEQ ID NO: 110982 - RNA, 22 nt, synthetic construct
  source 1..22: mol_type = other RNA
aaatgaggtatcatttccaaga

SEQ ID NO: 110983 - RNA, 22 nt, synthetic construct
  source 1..22: mol_type = other RNA
aaatgaggttgcttttacttgg

SEQ ID NO: 110984 - RNA, 22 nt, synthetic construct
  source 1..22: mol_type = other RNA
aaatgagtgagccacagctaca

SEQ ID NO: 110985 - RNA, 22 nt, synthetic construct
  source 1..22: mol_type = other RNA
aaatgagtgtatgcagggaaat

SEQ ID NO: 110986 - RNA, 22 nt, synthetic construct
  source 1..22: mol_type = other RNA
aaatgagttccagtcctttgtg

SEQ ID NO: 110987 - RNA, 22 nt, synthetic construct
  source 1..22: mol_type = other RNA
aaatgatagcattatcccagat

SEQ ID NO: 110988 - RNA, 22 nt, synthetic construct
  source 1..22: mol_type = other RNA
aaatgatctttcaaggggcctt

SEQ ID NO: 110989 - RNA, 22 nt, synthetic construct
  source 1..22: mol_type = other RNA
aaatgatctttgaataaagggt

SEQ ID NO: 110990 - RNA, 22 nt, synthetic construct
  source 1..22: mol_type = other RNA
aaatgatgaagggttttctgta

SEQ ID NO: 110991 - RNA, 22 nt, synthetic construct
  source 1..22: mol_type = other RNA
aaatgatgagctactgcatgct

SEQ ID NO: 110992 - RNA, 22 nt, synthetic construct
  source 1..22: mol_type = other RNA
aaatgatggcaacaatcaacag

SEQ ID NO: 110993 - RNA, 22 nt, synthetic construct
  source 1..22: mol_type = other RNA
aaatgatttcaagtaacactca

SEQ ID NO: 110994 - RNA, 22 nt, synthetic construct
  source 1..22: mol_type = other RNA
aaatgattttcacagggcaggg

SEQ ID NO: 110995 - RNA, 22 nt, synthetic construct
  source 1..22: mol_type = other RNA
aaatgcaatgcaggcgcctgga

SEQ ID NO: 110996 - RNA, 22 nt, synthetic construct
  source 1..22: mol_type = other RNA
aaatgcaccaacacctgcagtg

SEQ ID NO: 110997 - RNA, 22 nt, synthetic construct
  source 1..22: mol_type = other RNA
aaatgcacttagcgctgatgtg

SEQ ID NO: 110998 - RNA, 22 nt, synthetic construct
  source 1..22: mol_type = other RNA
aaatgcagaaaataaaccaagt

SEQ ID NO: 110999 - RNA, 22 nt, synthetic construct
  source 1..22: mol_type = other RNA
aaatgcagtagtaaagcaaatg

SEQ ID NO: 111000 - RNA, 22 nt, synthetic construct
  source 1..22: mol_type = other RNA
aaatgcataaacgacagcagga

SEQ ID NO: 111001 - RNA, 22 nt, synthetic construct
  source 1..22: mol_type = other RNA
aaatgccaatttgggatatagc

SEQ ID NO: 111002 - RNA, 22 nt, synthetic construct
  source 1..22: mol_type = other RNA
aaatgccacataaatcacagga

SEQ ID NO: 111003 - RNA, 22 nt, synthetic construct
  source 1..22: mol_type = other RNA
aaatgccatagagctttaaagt

SEQ ID NO: 111004 - RNA, 22 nt, synthetic construct
  source 1..22: mol_type = other RNA
aaatgcccttatttaatgtgct

SEQ ID NO: 111005 - RNA, 22 nt, synthetic construct
  source 1..22: mol_type = other RNA
aaatgcgcgtccgcgacccggc

SEQ ID NO: 111006 - RNA, 22 nt, synthetic construct
  source 1..22: mol_type = other RNA
aaatgctcacatttagtttcat

SEQ ID NO: 111007 - RNA, 22 nt, synthetic construct
  source 1..22: mol_type = other RNA
aaatgctcagtgggttcaatta

SEQ ID NO: 111008 - RNA, 22 nt, synthetic construct
  source 1..22: mol_type = other RNA
aaatgctggaaattttcaaggg

SEQ ID NO: 111009 - RNA, 22 nt, synthetic construct
  source 1..22: mol_type = other RNA
aaatgctgtaactgacttcaag

SEQ ID NO: 111010 - RNA, 22 nt, synthetic construct
  source 1..22: mol_type = other RNA
aaatgcttaacaagaatcctgc

SEQ ID NO: 111011 - RNA, 22 nt, synthetic construct
  source 1..22: mol_type = other RNA
aaatgcttatgtcttgtggctg

SEQ ID NO: 111012 - RNA, 22 nt, synthetic construct
  source 1..22: mol_type = other RNA
aaatgctttttctgcatctttt

SEQ ID NO: 111013 - RNA, 22 nt, synthetic construct
  source 1..22: mol_type = other RNA
aaatggaaccactgtaggcccc

SEQ ID NO: 111014 - RNA, 22 nt, synthetic construct
  source 1..22: mol_type = other RNA
aaatggaagactttatggtaat

SEQ ID NO: 111015 - RNA, 22 nt, synthetic construct
  source 1..22: mol_type = other RNA
aaatggaagtgctgggctaggg

SEQ ID NO: 111016 - RNA, 22 nt, synthetic construct
  source 1..22: mol_type = other RNA
aaatggaatattgttcagcctt

SEQ ID NO: 111017 - RNA, 22 nt, synthetic construct
  source 1..22: mol_type = other RNA
aaatggacagcacattaaataa

SEQ ID NO: 111018 - RNA, 22 nt, synthetic construct
  source 1..22: mol_type = other RNA
aaatggacagcggggatggttg

SEQ ID NO: 111019 - RNA, 22 nt, synthetic construct
  source 1..22: mol_type = other RNA
aaatggagacatctgagacatc

SEQ ID NO: 111020 - RNA, 22 nt, synthetic construct
  source 1..22: mol_type = other RNA
aaatggagacccatactcagcc

SEQ ID NO: 111021 - RNA, 22 nt, synthetic construct
  source 1..22: mol_type = other RNA
aaatggagggccagaggaggga

SEQ ID NO: 111022 - RNA, 22 nt, synthetic construct
  source 1..22: mol_type = other RNA
aaatggagtgacttaagcaaca

SEQ ID NO: 111023 - RNA, 22 nt, synthetic construct
  source 1..22: mol_type = other RNA
aaatggatcaaagacctaagct

SEQ ID NO: 111024 - RNA, 22 nt, synthetic construct
  source 1..22: mol_type = other RNA
aaatggcacatactgcatattg

SEQ ID NO: 111025 - RNA, 22 nt, synthetic construct
  source 1..22: mol_type = other RNA
aaatggccaagagttgctgact

SEQ ID NO: 111026 - RNA, 22 nt, synthetic construct
  source 1..22: mol_type = other RNA
aaatggcccttaacttcacctc

SEQ ID NO: 111027 - RNA, 22 nt, synthetic construct
  source 1..22: mol_type = other RNA
aaatggccttctttctttcaaa

SEQ ID NO: 111028 - RNA, 22 nt, synthetic construct
  source 1..22: mol_type = other RNA
aaatggctttttacgatgaaat

SEQ ID NO: 111029 - RNA, 22 nt, synthetic construct
  source 1..22: mol_type = other RNA
aaatgggaaattagatgatgtt

SEQ ID NO: 111030 - RNA, 22 nt, synthetic construct
  source 1..22: mol_type = other RNA
aaatgggagcatgcacacagga

SEQ ID NO: 111031 - RNA, 22 nt, synthetic construct
  source 1..22: mol_type = other RNA
aaatgggccaaagacttcaacg

SEQ ID NO: 111032 - RNA, 22 nt, synthetic construct
  source 1..22: mol_type = other RNA
aaatggggatatccaaagataa

SEQ ID NO: 111033 - RNA, 22 nt, synthetic construct
  source 1..22: mol_type = other RNA
aaatgggtttaaaagagtgcac

SEQ ID NO: 111034 - RNA, 22 nt, synthetic construct
  source 1..22: mol_type = other RNA
aaatggtaacagccaaataaaa

SEQ ID NO: 111035 - RNA, 22 nt, synthetic construct
  source 1..22: mol_type = other RNA
aaatggtagcttgggctaaggt

SEQ ID NO: 111036 - RNA, 22 nt, synthetic construct
  source 1..22: mol_type = other RNA
aaatggtcaacatgaaaagata

SEQ ID NO: 111037 - RNA, 22 nt, synthetic construct
  source 1..22: mol_type = other RNA
aaatggtgcagccactatagaa

SEQ ID NO: 111038 - RNA, 22 nt, synthetic construct
  source 1..22: mol_type = other RNA
aaatggtgcaggccagatatcc

SEQ ID NO: 111039 - RNA, 22 nt, synthetic construct
  source 1..22: mol_type = other RNA
aaatggtgtgaagttgggctta

SEQ ID NO: 111040 - RNA, 22 nt, synthetic construct
  source 1..22: mol_type = other RNA
aaatggtttaggctgtctccaa

SEQ ID NO: 111041 - RNA, 22 nt, synthetic construct
  source 1..22: mol_type = other RNA
aaatggtttcataaaatgatgg

SEQ ID NO: 111042 - RNA, 22 nt, synthetic construct
  source 1..22: mol_type = other RNA
aaatggtttctccttctgcagg

SEQ ID NO: 111043 - RNA, 22 nt, synthetic construct
  source 1..22: mol_type = other RNA
aaatggttttatggtaactcct

SEQ ID NO: 111044 - RNA, 22 nt, synthetic construct
  source 1..22: mol_type = other RNA
aaatgtaaaacatcaaagtccc

SEQ ID NO: 111045 - RNA, 22 nt, synthetic construct
  source 1..22: mol_type = other RNA
aaatgtaaattcctaactcaag

SEQ ID NO: 111046 - RNA, 22 nt, synthetic construct
  source 1..22: mol_type = other RNA
aaatgtaaattctgccacattc

SEQ ID NO: 111047 - RNA, 22 nt, synthetic construct
  source 1..22: mol_type = other RNA
aaatgtacaacattcatccctc

SEQ ID NO: 111048 - RNA, 22 nt, synthetic construct
  source 1..22: mol_type = other RNA
aaatgtagatcaagtatttcct

SEQ ID NO: 111049 - RNA, 22 nt, synthetic construct
  source 1..22: mol_type = other RNA
aaatgtcaattttcccccaatt

SEQ ID NO: 111050 - RNA, 22 nt, synthetic construct
  source 1..22: mol_type = other RNA
aaatgtcatcttctctctctgc

SEQ ID NO: 111051 - RNA, 22 nt, synthetic construct
  source 1..22: mol_type = other RNA
aaatgtccatcgagagatgaat

SEQ ID NO: 111052 - RNA, 22 nt, synthetic construct
  source 1..22: mol_type = other RNA
aaatgtccgttgaagtctttgg

SEQ ID NO: 111053 - RNA, 22 nt, synthetic construct
  source 1..22: mol_type = other RNA
aaatgtctcattgtggatgaga

SEQ ID NO: 111054 - RNA, 22 nt, synthetic construct
  source 1..22: mol_type = other RNA
aaatgtctggccgggcacggtg

SEQ ID NO: 111055 - RNA, 22 nt, synthetic construct
  source 1..22: mol_type = other RNA
aaatgtctggtttgctttggag

SEQ ID NO: 111056 - RNA, 22 nt, synthetic construct
  source 1..22: mol_type = other RNA
aaatgtctgtctttatgccaat

SEQ ID NO: 111057 - RNA, 22 nt, synthetic construct
  source 1..22: mol_type = other RNA
aaatgtcttaagaaggaaaaga

SEQ ID NO: 111058 - RNA, 22 nt, synthetic construct
  source 1..22: mol_type = other RNA
aaatgtgaacagacagacatgc

SEQ ID NO: 111059 - RNA, 22 nt, synthetic construct
  source 1..22: mol_type = other RNA
aaatgtgaattagatggcttag

SEQ ID NO: 111060 - RNA, 22 nt, synthetic construct
  source 1..22: mol_type = other RNA
aaatgtgacagaacaaactcaa

SEQ ID NO: 111061 - RNA, 22 nt, synthetic construct
  source 1..22: mol_type = other RNA
aaatgtgacattagtggtggta

SEQ ID NO: 111062 - RNA, 22 nt, synthetic construct
  source 1..22: mol_type = other RNA
aaatgtgactagaagaaatgtt

SEQ ID NO: 111063 - RNA, 22 nt, synthetic construct
  source 1..22: mol_type = other RNA
aaatgtgagcatttagccccct

SEQ ID NO: 111064 - RNA, 22 nt, synthetic construct
  source 1..22: mol_type = other RNA
aaatgtgatggcatcattcata

SEQ ID NO: 111065 - RNA, 22 nt, synthetic construct
  source 1..22: mol_type = other RNA
aaatgtggaagcagaactaaga

SEQ ID NO: 111066 - RNA, 22 nt, synthetic construct
  source 1..22: mol_type = other RNA
aaatgtggagataaagagcagg

SEQ ID NO: 111067 - RNA, 22 nt, synthetic construct
  source 1..22: mol_type = other RNA
aaatgtggatagtgctttttac

SEQ ID NO: 111068 - RNA, 22 nt, synthetic construct
  source 1..22: mol_type = other RNA
aaatgtggatgcatgaggcata

SEQ ID NO: 111069 - RNA, 22 nt, synthetic construct
  source 1..22: mol_type = other RNA
aaatgtggcaaatttatgtgaa

SEQ ID NO: 111070 - RNA, 22 nt, synthetic construct
  source 1..22: mol_type = other RNA
aaatgtggcatatcacattaac

SEQ ID NO: 111071 - RNA, 22 nt, synthetic construct
  source 1..22: mol_type = other RNA
aaatgtggcatttcttacacat

SEQ ID NO: 111072 - RNA, 22 nt, synthetic construct
  source 1..22: mol_type = other RNA
aaatgtggtttttggttcactt

SEQ ID NO: 111073 - RNA, 22 nt, synthetic construct
  source 1..22: mol_type = other RNA
aaatgtgtctagtgaatgagac

SEQ ID NO: 111074 - RNA, 22 nt, synthetic construct
  source 1..22: mol_type = other RNA
aaatgttaacaattggtgaatc

SEQ ID NO: 111075 - RNA, 22 nt, synthetic construct
  source 1..22: mol_type = other RNA
aaatgttaagcccaacttcaca

SEQ ID NO: 111076 - RNA, 22 nt, synthetic construct
  source 1..22: mol_type = other RNA
aaatgttatacagcaaatctct

SEQ ID NO: 111077 - RNA, 22 nt, synthetic construct
  source 1..22: mol_type = other RNA
aaatgttcagatagaaaagaca

SEQ ID NO: 111078 - RNA, 22 nt, synthetic construct
  source 1..22: mol_type = other RNA
aaatgttcagtttatgggtcaa

SEQ ID NO: 111079 - RNA, 22 nt, synthetic construct
  source 1..22: mol_type = other RNA
aaatgttccctcttcaatattt

SEQ ID NO: 111080 - RNA, 22 nt, synthetic construct
  source 1..22: mol_type = other RNA
aaatgttgcagagactggatag

SEQ ID NO: 111081 - RNA, 22 nt, synthetic construct
  source 1..22: mol_type = other RNA
aaatgttgccaatatctatcag

SEQ ID NO: 111082 - RNA, 22 nt, synthetic construct
  source 1..22: mol_type = other RNA
aaatgtttaattacccaggcat

SEQ ID NO: 111083 - RNA, 22 nt, synthetic construct
  source 1..22: mol_type = other RNA
aaatgtttagcggaatgactat

SEQ ID NO: 111084 - RNA, 22 nt, synthetic construct
  source 1..22: mol_type = other RNA
aaatgtttgtttaattagccgg

SEQ ID NO: 111085 - RNA, 22 nt, synthetic construct
  source 1..22: mol_type = other RNA
aaatgttttaaggcagggcttg

SEQ ID NO: 111086 - RNA, 22 nt, synthetic construct
  source 1..22: mol_type = other RNA
aaatgttttgcagagatgaggt

SEQ ID NO: 111087 - RNA, 22 nt, synthetic construct
  source 1..22: mol_type = other RNA
aaattaaaaactgagaccggat

SEQ ID NO: 111088 - RNA, 22 nt, synthetic construct
  source 1..22: mol_type = other RNA
aaattaaacacacccttggtaa

SEQ ID NO: 111089 - RNA, 22 nt, synthetic construct
  source 1..22: mol_type = other RNA
aaattaaaggatgtcaactgag

SEQ ID NO: 111090 - RNA, 22 nt, synthetic construct
  source 1..22: mol_type = other RNA
aaattaagagaatggaaacttg

SEQ ID NO: 111091 - RNA, 22 nt, synthetic construct
  source 1..22: mol_type = other RNA
aaattaagcttcgacagtccct

SEQ ID NO: 111092 - RNA, 22 nt, synthetic construct
  source 1..22: mol_type = other RNA
aaattaatcagtctgtaagcac

SEQ ID NO: 111093 - RNA, 22 nt, synthetic construct
  source 1..22: mol_type = other RNA
aaattaatgccccatgtgttgg

SEQ ID NO: 111094 - RNA, 22 nt, synthetic construct
  source 1..22: mol_type = other RNA
aaattacaaaataggcagtcct

SEQ ID NO: 111095 - RNA, 22 nt, synthetic construct
  source 1..22: mol_type = other RNA
aaattacaactggtttctgcat

SEQ ID NO: 111096 - RNA, 22 nt, synthetic construct
  source 1..22: mol_type = other RNA
aaattacaggtcaaactcactt

SEQ ID NO: 111097 - RNA, 22 nt, synthetic construct
  source 1..22: mol_type = other RNA
aaattacccaaagactttgttt

SEQ ID NO: 111098 - RNA, 22 nt, synthetic construct
  source 1..22: mol_type = other RNA
aaattaccccattcactcagca

SEQ ID NO: 111099 - RNA, 22 nt, synthetic construct
  source 1..22: mol_type = other RNA
aaattacttctttctctttcag

SEQ ID NO: 111100 - RNA, 22 nt, synthetic construct
  source 1..22: mol_type = other RNA
aaattagaaatgtggaagcaga

SEQ ID NO: 111101 - RNA, 22 nt, synthetic construct
  source 1..22: mol_type = other RNA
aaattagaacatctggcagcag

SEQ ID NO: 111102 - RNA, 22 nt, synthetic construct
  source 1..22: mol_type = other RNA
aaattagatgatgttttgaacg

SEQ ID NO: 111103 - RNA, 22 nt, synthetic construct
  source 1..22: mol_type = other RNA
aaattagccaagcatggtggta

SEQ ID NO: 111104 - RNA, 22 nt, synthetic construct
  source 1..22: mol_type = other RNA
aaattagccttttacaccctag

SEQ ID NO: 111105 - RNA, 22 nt, synthetic construct
  source 1..22: mol_type = other RNA
aaattagctaagtatgcagaaa

SEQ ID NO: 111106 - RNA, 22 nt, synthetic construct
  source 1..22: mol_type = other RNA
aaattagctgactttcatttgt

SEQ ID NO: 111107 - RNA, 22 nt, synthetic construct
  source 1..22: mol_type = other RNA
aaattagctggatgtggtgtgg

SEQ ID NO: 111108 - RNA, 22 nt, synthetic construct
  source 1..22: mol_type = other RNA
aaattagctgggcgagatggcg

SEQ ID NO: 111109 - RNA, 22 nt, synthetic construct
  source 1..22: mol_type = other RNA
aaattagctttctcccagctgt

SEQ ID NO: 111110 - RNA, 22 nt, synthetic construct
  source 1..22: mol_type = other RNA
aaattaggccaggcactgtggc

SEQ ID NO: 111111 - RNA, 22 nt, synthetic construct
  source 1..22: mol_type = other RNA
aaattagtcatagcagtgggaa

SEQ ID NO: 111112 - RNA, 22 nt, synthetic construct
  source 1..22: mol_type = other RNA
aaattagttccttttaagggaa

SEQ ID NO: 111113 - RNA, 22 nt, synthetic construct
  source 1..22: mol_type = other RNA
aaattataagcttcctctggct

SEQ ID NO: 111114 - RNA, 22 nt, synthetic construct
  source 1..22: mol_type = other RNA
aaattatagctccaaaagcgaa

SEQ ID NO: 111115 - RNA, 22 nt, synthetic construct
  source 1..22: mol_type = other RNA
aaattatctgtgggttaaaagt

SEQ ID NO: 111116 - RNA, 22 nt, synthetic construct
  source 1..22: mol_type = other RNA
aaattattagcttgctagtagc

SEQ ID NO: 111117 - RNA, 22 nt, synthetic construct
  source 1..22: mol_type = other RNA
aaattattgacaagacgtgtac

SEQ ID NO: 111118 - RNA, 22 nt, synthetic construct
  source 1..22: mol_type = other RNA
aaattatttgagagtaagttgc

SEQ ID NO: 111119 - RNA, 22 nt, synthetic construct
  source 1..22: mol_type = other RNA
aaattattttcctccttctgct

SEQ ID NO: 111120 - RNA, 22 nt, synthetic construct
  source 1..22: mol_type = other RNA
aaattcaaacatgacagatccc

SEQ ID NO: 111121 - RNA, 22 nt, synthetic construct
  source 1..22: mol_type = other RNA
aaattcaacttggtaaaaagtg

SEQ ID NO: 111122 - RNA, 22 nt, synthetic construct
  source 1..22: mol_type = other RNA
aaattcacagaactgtcactga

SEQ ID NO: 111123 - RNA, 22 nt, synthetic construct
  source 1..22: mol_type = other RNA
aaattcacagcatgaataccta

SEQ ID NO: 111124 - RNA, 22 nt, synthetic construct
  source 1..22: mol_type = other RNA
aaattcaccaaacaccttacac

SEQ ID NO: 111125 - RNA, 22 nt, synthetic construct
  source 1..22: mol_type = other RNA
aaattcacgagactgttaggga

SEQ ID NO: 111126 - RNA, 22 nt, synthetic construct
  source 1..22: mol_type = other RNA
aaattcactcctcattcacact

SEQ ID NO: 111127 - RNA, 22 nt, synthetic construct
  source 1..22: mol_type = other RNA
aaattcatagatcaccaggggc

SEQ ID NO: 111128 - RNA, 22 nt, synthetic construct
  source 1..22: mol_type = other RNA
aaattcatgcaactgaaaacat

SEQ ID NO: 111129 - RNA, 22 nt, synthetic construct
  source 1..22: mol_type = other RNA
aaattccaaaagtgaatatagc

SEQ ID NO: 111130 - RNA, 22 nt, synthetic construct
  source 1..22: mol_type = other RNA
aaattccctcagcaaaagcaat

SEQ ID NO: 111131 - RNA, 22 nt, synthetic construct
  source 1..22: mol_type = other RNA
aaattccctctacaaaaggagg

SEQ ID NO: 111132 - RNA, 22 nt, synthetic construct
  source 1..22: mol_type = other RNA
aaattcccttcagtgtagtcag

SEQ ID NO: 111133 - RNA, 22 nt, synthetic construct
  source 1..22: mol_type = other RNA
aaattccgctctggttttaaag

SEQ ID NO: 111134 - RNA, 22 nt, synthetic construct
  source 1..22: mol_type = other RNA
aaattcctaactcaagagttac

SEQ ID NO: 111135 - RNA, 22 nt, synthetic construct
  source 1..22: mol_type = other RNA
aaattccttcccctttctttgg

SEQ ID NO: 111136 - RNA, 22 nt, synthetic construct
  source 1..22: mol_type = other RNA
aaattccttcctttgatgactt

SEQ ID NO: 111137 - RNA, 22 nt, synthetic construct
  source 1..22: mol_type = other RNA
aaattctaacaagaagctgttt

SEQ ID NO: 111138 - RNA, 22 nt, synthetic construct
  source 1..22: mol_type = other RNA
aaattctcaaatgaacaggttc

SEQ ID NO: 111139 - RNA, 22 nt, synthetic construct
  source 1..22: mol_type = other RNA
aaattctgaccctttattcaaa

SEQ ID NO: 111140 - RNA, 22 nt, synthetic construct
  source 1..22: mol_type = other RNA
aaattctgagggaaattatttc

SEQ ID NO: 111141 - RNA, 22 nt, synthetic construct
  source 1..22: mol_type = other RNA
aaattctgatagcttgacaaaa

SEQ ID NO: 111142 - RNA, 22 nt, synthetic construct
  source 1..22: mol_type = other RNA
aaattctgccacattcaacaac

SEQ ID NO: 111143 - RNA, 22 nt, synthetic construct
  source 1..22: mol_type = other RNA
aaattctgttctcagtatcctt

SEQ ID NO: 111144 - RNA, 22 nt, synthetic construct
  source 1..22: mol_type = other RNA
aaattcttccagcctggtaatg

SEQ ID NO: 111145 - RNA, 22 nt, synthetic construct
  source 1..22: mol_type = other RNA
aaattcttgggtgaataaccca

SEQ ID NO: 111146 - RNA, 22 nt, synthetic construct
  source 1..22: mol_type = other RNA
aaattgaacagcctaaagtcca

SEQ ID NO: 111147 - RNA, 22 nt, synthetic construct
  source 1..22: mol_type = other RNA
aaattgaccattccacgctgtg

SEQ ID NO: 111148 - RNA, 22 nt, synthetic construct
  source 1..22: mol_type = other RNA
aaattgacttcactagatctct

SEQ ID NO: 111149 - RNA, 22 nt, synthetic construct
  source 1..22: mol_type = other RNA
aaattgcaaaaacagtttccct

SEQ ID NO: 111150 - RNA, 22 nt, synthetic construct
  source 1..22: mol_type = other RNA
aaattgcagagtgttcaaaagc

SEQ ID NO: 111151 - RNA, 22 nt, synthetic construct
  source 1..22: mol_type = other RNA
aaattgcaggtttactccaaga

SEQ ID NO: 111152 - RNA, 22 nt, synthetic construct
  source 1..22: mol_type = other RNA
aaattgcatcaactgcttccct

SEQ ID NO: 111153 - RNA, 22 nt, synthetic construct
  source 1..22: mol_type = other RNA
aaattgccaaactgttttccac

SEQ ID NO: 111154 - RNA, 22 nt, synthetic construct
  source 1..22: mol_type = other RNA
aaattggaacctttgtccactg

SEQ ID NO: 111155 - RNA, 22 nt, synthetic construct
  source 1..22: mol_type = other RNA
aaattggacgggtggtagggag

SEQ ID NO: 111156 - RNA, 22 nt, synthetic construct
  source 1..22: mol_type = other RNA
aaattggataacctagaagaaa

SEQ ID NO: 111157 - RNA, 22 nt, synthetic construct
  source 1..22: mol_type = other RNA
aaattggcatttaaaagaacct

SEQ ID NO: 111158 - RNA, 22 nt, synthetic construct
  source 1..22: mol_type = other RNA
aaattggcgtacatgtagatat

SEQ ID NO: 111159 - RNA, 22 nt, synthetic construct
  source 1..22: mol_type = other RNA
aaattggtcctggaaaaagacc

SEQ ID NO: 111160 - RNA, 22 nt, synthetic construct
  source 1..22: mol_type = other RNA
aaattgtacaattttcttaccc

SEQ ID NO: 111161 - RNA, 22 nt, synthetic construct
  source 1..22: mol_type = other RNA
aaattgtcagaaaagatcagta

SEQ ID NO: 111162 - RNA, 22 nt, synthetic construct
  source 1..22: mol_type = other RNA
aaattgtgtgttctctttttga

SEQ ID NO: 111163 - RNA, 22 nt, synthetic construct
  source 1..22: mol_type = other RNA
aaattgttcatgaaatcccctt

SEQ ID NO: 111164 - RNA, 22 nt, synthetic construct
  source 1..22: mol_type = other RNA
aaatttaaagttagtgaagcag

SEQ ID NO: 111165 - RNA, 22 nt, synthetic construct
  source 1..22: mol_type = other RNA
aaatttaaggaccaggtatggc

SEQ ID NO: 111166 - RNA, 22 nt, synthetic construct
  source 1..22: mol_type = other RNA
aaatttacccatttcttctagg

SEQ ID NO: 111167 - RNA, 22 nt, synthetic construct
  source 1..22: mol_type = other RNA
aaatttagcttctgaattgaga

SEQ ID NO: 111168 - RNA, 22 nt, synthetic construct
  source 1..22: mol_type = other RNA
aaatttagtaagggtaaacaga

SEQ ID NO: 111169 - RNA, 22 nt, synthetic construct
  source 1..22: mol_type = other RNA
aaatttagtgtattgtaccttg

SEQ ID NO: 111170 - RNA, 22 nt, synthetic construct
  source 1..22: mol_type = other RNA
aaatttatgtacatgacctatc

SEQ ID NO: 111171 - RNA, 22 nt, synthetic construct
  source 1..22: mol_type = other RNA
aaatttatgttcatgaaccttc

SEQ ID NO: 111172 - RNA, 22 nt, synthetic construct
  source 1..22: mol_type = other RNA
aaatttcattaggttgatggct

SEQ ID NO: 111173 - RNA, 22 nt, synthetic construct
  source 1..22: mol_type = other RNA
aaatttccagcattttataggc

SEQ ID NO: 111174 - RNA, 22 nt, synthetic construct
  source 1..22: mol_type = other RNA
aaatttctaaaaacgtgcaaac

SEQ ID NO: 111175 - RNA, 22 nt, synthetic construct
  source 1..22: mol_type = other RNA
aaatttctaaggttctgctatg

SEQ ID NO: 111176 - RNA, 22 nt, synthetic construct
  source 1..22: mol_type = other RNA
aaatttctatagtcattccgct

SEQ ID NO: 111177 - RNA, 22 nt, synthetic construct
  source 1..22: mol_type = other RNA
aaatttctgttgcttaagtcac

SEQ ID NO: 111178 - RNA, 22 nt, synthetic construct
  source 1..22: mol_type = other RNA
aaatttgacatgacaggtgagt

SEQ ID NO: 111179 - RNA, 22 nt, synthetic construct
  source 1..22: mol_type = other RNA
aaatttgaggccctattcaacc

SEQ ID NO: 111180 - RNA, 22 nt, synthetic construct
  source 1..22: mol_type = other RNA
aaatttgattgttagccacagc

SEQ ID NO: 111181 - RNA, 22 nt, synthetic construct
  source 1..22: mol_type = other RNA
aaatttgccacattttaccaaa

SEQ ID NO: 111182 - RNA, 22 nt, synthetic construct
  source 1..22: mol_type = other RNA
aaattttaaatcagcaccatct

SEQ ID NO: 111183 - RNA, 22 nt, synthetic construct
  source 1..22: mol_type = other RNA
aaattttaagtgcacaatgcag

SEQ ID NO: 111184 - RNA, 22 nt, synthetic construct
  source 1..22: mol_type = other RNA
aaattttatggttttttccccc

SEQ ID NO: 111185 - RNA, 22 nt, synthetic construct
  source 1..22: mol_type = other RNA
aaattttcaagggtgttttccc

SEQ ID NO: 111186 - RNA, 22 nt, synthetic construct
  source 1..22: mol_type = other RNA
aaattttcattctacctggagc

SEQ ID NO: 111187 - RNA, 22 nt, synthetic construct
  source 1..22: mol_type = other RNA
aaattttctcccaaggttgcct

SEQ ID NO: 111188 - RNA, 22 nt, synthetic construct
  source 1..22: mol_type = other RNA
aaattttctgagcaactactat

SEQ ID NO: 111189 - RNA, 22 nt, synthetic construct
  source 1..22: mol_type = other RNA
aaattttgagacctcaggcagt

SEQ ID NO: 111190 - RNA, 22 nt, synthetic construct
  source 1..22: mol_type = other RNA
aaattttgaggcttttggattt

SEQ ID NO: 111191 - RNA, 22 nt, synthetic construct
  source 1..22: mol_type = other RNA
aaattttgcttaaagttggtcc

SEQ ID NO: 111192 - RNA, 22 nt, synthetic construct
  source 1..22: mol_type = other RNA
aaattttgttcaggagttttgc

SEQ ID NO: 111193 - RNA, 22 nt, synthetic construct
  source 1..22: mol_type = other RNA
aaatttttcacattcttcacca

SEQ ID NO: 111194 - RNA, 22 nt, synthetic construct
  source 1..22: mol_type = other RNA
aaatttttgcaaaccaaatgca

SEQ ID NO: 111195 - RNA, 22 nt, synthetic construct
  source 1..22: mol_type = other RNA
aaatttttgtctggaacacaca

SEQ ID NO: 111196 - RNA, 22 nt, synthetic construct
  source 1..22: mol_type = other RNA
aacaaaaaaccactggatacgg

SEQ ID NO: 111197 - RNA, 22 nt, synthetic construct
  source 1..22: mol_type = other RNA
aacaaaaaatcttaaagatgcc

SEQ ID NO: 111198 - RNA, 22 nt, synthetic construct
  source 1..22: mol_type = other RNA
aacaaaaatacgaaagtgctct

SEQ ID NO: 111199 - RNA, 22 nt, synthetic construct
  source 1..22: mol_type = other RNA
aacaaaaatacttaagagcatg

SEQ ID NO: 111200 - RNA, 22 nt, synthetic construct
  source 1..22: mol_type = other RNA
aacaaaacaaaaccctgttggg

SEQ ID NO: 111201 - RNA, 22 nt, synthetic construct
  source 1..22: mol_type = other RNA
aacaaaacaaagtctttgggta

SEQ ID NO: 111202 - RNA, 22 nt, synthetic construct
  source 1..22: mol_type = other RNA
aacaaaacaagaagaaaaagca

SEQ ID NO: 111203 - RNA, 22 nt, synthetic construct
  source 1..22: mol_type = other RNA
aacaaaacacacgggtacacat

SEQ ID NO: 111204 - RNA, 22 nt, synthetic construct
  source 1..22: mol_type = other RNA
aacaaaacacatggcatcgggg

SEQ ID NO: 111205 - RNA, 22 nt, synthetic construct
  source 1..22: mol_type = other RNA
aacaaaacatgttttcaaatgc

SEQ ID NO: 111206 - RNA, 22 nt, synthetic construct
  source 1..22: mol_type = other RNA
aacaaaaccctgttgggctatt

SEQ ID NO: 111207 - RNA, 22 nt, synthetic construct
  source 1..22: mol_type = other RNA
aacaaaactaggctgtcccaaa

SEQ ID NO: 111208 - RNA, 22 nt, synthetic construct
  source 1..22: mol_type = other RNA
aacaaaactgggggctggacat

SEQ ID NO: 111209 - RNA, 22 nt, synthetic construct
  source 1..22: mol_type = other RNA
aacaaaagagtagattccccct

SEQ ID NO: 111210 - RNA, 22 nt, synthetic construct
  source 1..22: mol_type = other RNA
aacaaaagatacacaagatctc

SEQ ID NO: 111211 - RNA, 22 nt, synthetic construct
  source 1..22: mol_type = other RNA
aacaaaaggtagaagataatgt

SEQ ID NO: 111212 - RNA, 22 nt, synthetic construct
  source 1..22: mol_type = other RNA
aacaaaatacccacaagaaaaa

SEQ ID NO: 111213 - RNA, 22 nt, synthetic construct
  source 1..22: mol_type = other RNA
aacaaaatacctgggaatccaa

SEQ ID NO: 111214 - RNA, 22 nt, synthetic construct
  source 1..22: mol_type = other RNA
aacaaaataggattaagacact

SEQ ID NO: 111215 - RNA, 22 nt, synthetic construct
  source 1..22: mol_type = other RNA
aacaaacaaacagaaaggccca

SEQ ID NO: 111216 - RNA, 22 nt, synthetic construct
  source 1..22: mol_type = other RNA
aacaaacaattagcacctttat

SEQ ID NO: 111217 - RNA, 22 nt, synthetic construct
  source 1..22: mol_type = other RNA
aacaaacacactgggtaaacaa

SEQ ID NO: 111218 - RNA, 22 nt, synthetic construct
  source 1..22: mol_type = other RNA
aacaaacagaaaggcccaaaaa

SEQ ID NO: 111219 - RNA, 22 nt, synthetic construct
  source 1..22: mol_type = other RNA
aacaaacattttttgcagagac

SEQ ID NO: 111220 - RNA, 22 nt, synthetic construct
  source 1..22: mol_type = other RNA
aacaaacgcattgtgatgtctc

SEQ ID NO: 111221 - RNA, 22 nt, synthetic construct
  source 1..22: mol_type = other RNA
aacaaactaactagaaaaccga

SEQ ID NO: 111222 - RNA, 22 nt, synthetic construct
  source 1..22: mol_type = other RNA
aacaaactcaagttccggttct

SEQ ID NO: 111223 - RNA, 22 nt, synthetic construct
  source 1..22: mol_type = other RNA
aacaaactgcgtggtttattca

SEQ ID NO: 111224 - RNA, 22 nt, synthetic construct
  source 1..22: mol_type = other RNA
aacaaagaacaggaagggagag

SEQ ID NO: 111225 - RNA, 22 nt, synthetic construct
  source 1..22: mol_type = other RNA
aacaaagagaacaatggaatag

SEQ ID NO: 111226 - RNA, 22 nt, synthetic construct
  source 1..22: mol_type = other RNA
aacaaagatgccacaaatggag

SEQ ID NO: 111227 - RNA, 22 nt, synthetic construct
  source 1..22: mol_type = other RNA
aacaaagctctgatgctttctc

SEQ ID NO: 111228 - RNA, 22 nt, synthetic construct
  source 1..22: mol_type = other RNA
aacaaaggcaggagcagtgtga

SEQ ID NO: 111229 - RNA, 22 nt, synthetic construct
  source 1..22: mol_type = other RNA
aacaaaggcgaagcccgccgct

SEQ ID NO: 111230 - RNA, 22 nt, synthetic construct
  source 1..22: mol_type = other RNA
aacaaagggcctgttccaggcc

SEQ ID NO: 111231 - RNA, 22 nt, synthetic construct
  source 1..22: mol_type = other RNA
aacaaagggttcttggaaatta

SEQ ID NO: 111232 - RNA, 22 nt, synthetic construct
  source 1..22: mol_type = other RNA
aacaaaggttgaaaactcaact

SEQ ID NO: 111233 - RNA, 22 nt, synthetic construct
  source 1..22: mol_type = other RNA
aacaaagtctttgggtaattta

SEQ ID NO: 111234 - RNA, 22 nt, synthetic construct
  source 1..22: mol_type = other RNA
aacaaataacaccatagctgaa

SEQ ID NO: 111235 - RNA, 22 nt, synthetic construct
  source 1..22: mol_type = other RNA
aacaaataagaagattgagtca

SEQ ID NO: 111236 - RNA, 22 nt, synthetic construct
  source 1..22: mol_type = other RNA
aacaaatcagatttcaggtggt

SEQ ID NO: 111237 - RNA, 22 nt, synthetic construct
  source 1..22: mol_type = other RNA
aacaaatccttttcccaggagc

SEQ ID NO: 111238 - RNA, 22 nt, synthetic construct
  source 1..22: mol_type = other RNA
aacaaatggaaccactgtaggc

SEQ ID NO: 111239 - RNA, 22 nt, synthetic construct
  source 1..22: mol_type = other RNA
aacaaatgttgcagagactgga

SEQ ID NO: 111240 - RNA, 22 nt, synthetic construct
  source 1..22: mol_type = other RNA
aacaaattcatgcaactgaaaa

SEQ ID NO: 111241 - RNA, 22 nt, synthetic construct
  source 1..22: mol_type = other RNA
aacaaattccctctacaaaagg

SEQ ID NO: 111242 - RNA, 22 nt, synthetic construct
  source 1..22: mol_type = other RNA
aacaaattgcatcaactgcttc

SEQ ID NO: 111243 - RNA, 22 nt, synthetic construct
  source 1..22: mol_type = other RNA
aacaaatttatgttcatgaacc

SEQ ID NO: 111244 - RNA, 22 nt, synthetic construct
  source 1..22: mol_type = other RNA
aacaacaaaacacacgggtaca

SEQ ID NO: 111245 - RNA, 22 nt, synthetic construct
  source 1..22: mol_type = other RNA
aacaacaaaatacccacaagaa

SEQ ID NO: 111246 - RNA, 22 nt, synthetic construct
  source 1..22: mol_type = other RNA
aacaacaacaaaacacacgggt

SEQ ID NO: 111247 - RNA, 22 nt, synthetic construct
  source 1..22: mol_type = other RNA
aacaacaacaaaacatgttttc

SEQ ID NO: 111248 - RNA, 22 nt, synthetic construct
  source 1..22: mol_type = other RNA
aacaacaacaaaatacccacaa

SEQ ID NO: 111249 - RNA, 22 nt, synthetic construct
  source 1..22: mol_type = other RNA
aacaacaacaacaaaacacacg

SEQ ID NO: 111250 - RNA, 22 nt, synthetic construct
  source 1..22: mol_type = other RNA
aacaacaacaacaaaacatgtt

SEQ ID NO: 111251 - RNA, 22 nt, synthetic construct
  source 1..22: mol_type = other RNA
aacaacaacaacaaaataccca

SEQ ID NO: 111252 - RNA, 22 nt, synthetic construct
  source 1..22: mol_type = other RNA
aacaacaacaacaacaaaacac

SEQ ID NO: 111253 - RNA, 22 nt, synthetic construct
  source 1..22: mol_type = other RNA
aacaacaacaacaacaaaacat

SEQ ID NO: 111254 - RNA, 22 nt, synthetic construct
  source 1..22: mol_type = other RNA
aacaacactaaccaacattgag

SEQ ID NO: 111255 - RNA, 22 nt, synthetic construct
  source 1..22: mol_type = other RNA
aacaacatggtagaccatataa

SEQ ID NO: 111256 - RNA, 22 nt, synthetic construct
  source 1..22: mol_type = other RNA
aacaaccataatgagtaacatg

SEQ ID NO: 111257 - RNA, 22 nt, synthetic construct
  source 1..22: mol_type = other RNA
aacaacctaaatgtccatcgag

SEQ ID NO: 111258 - RNA, 22 nt, synthetic construct
  source 1..22: mol_type = other RNA
aacaacctgtctcaaaaataaa

SEQ ID NO: 111259 - RNA, 22 nt, synthetic construct
  source 1..22: mol_type = other RNA
aacaacgctgtggctaacaatc

SEQ ID NO: 111260 - RNA, 22 nt, synthetic construct
  source 1..22: mol_type = other RNA
aacaactcaaacgtccatcaac

SEQ ID NO: 111261 - RNA, 22 nt, synthetic construct
  source 1..22: mol_type = other RNA
aacaactgactctaaagtctat

SEQ ID NO: 111262 - RNA, 22 nt, synthetic construct
  source 1..22: mol_type = other RNA
aacaagaaaatctgacaatttg

SEQ ID NO: 111263 - RNA, 22 nt, synthetic construct
  source 1..22: mol_type = other RNA
aacaagaaagggtagctttgat

SEQ ID NO: 111264 - RNA, 22 nt, synthetic construct
  source 1..22: mol_type = other RNA
aacaagaagaaaaagcaacttg

SEQ ID NO: 111265 - RNA, 22 nt, synthetic construct
  source 1..22: mol_type = other RNA
aacaagaagctgttttggtaaa

SEQ ID NO: 111266 - RNA, 22 nt, synthetic construct
  source 1..22: mol_type = other RNA
aacaagaatcctgctattttat

SEQ ID NO: 111267 - RNA, 22 nt, synthetic construct
  source 1..22: mol_type = other RNA
aacaagactcaacatgtgtatt

SEQ ID NO: 111268 - RNA, 22 nt, synthetic construct
  source 1..22: mol_type = other RNA
aacaagagaggacagttggcct

SEQ ID NO: 111269 - RNA, 22 nt, synthetic construct
  source 1..22: mol_type = other RNA
aacaagagcgtcgtacctttcg

SEQ ID NO: 111270 - RNA, 22 nt, synthetic construct
  source 1..22: mol_type = other RNA
aacaagggttggtgcttccttc

SEQ ID NO: 111271 - RNA, 22 nt, synthetic construct
  source 1..22: mol_type = other RNA
aacaagtcacaaaaagacaagt

SEQ ID NO: 111272 - RNA, 22 nt, synthetic construct
  source 1..22: mol_type = other RNA
aacaagttacaaacatatgcat

SEQ ID NO: 111273 - RNA, 22 nt, synthetic construct
  source 1..22: mol_type = other RNA
aacaataagacaccgctccacg

SEQ ID NO: 111274 - RNA, 22 nt, synthetic construct
  source 1..22: mol_type = other RNA
aacaatactgcattgtgcactt

SEQ ID NO: 111275 - RNA, 22 nt, synthetic construct
  source 1..22: mol_type = other RNA
aacaatactttagacatgggct

SEQ ID NO: 111276 - RNA, 22 nt, synthetic construct
  source 1..22: mol_type = other RNA
aacaatagcaacaaaacaatct

SEQ ID NO: 111277 - RNA, 22 nt, synthetic construct
  source 1..22: mol_type = other RNA
aacaatagcccagcaggatttt

SEQ ID NO: 111278 - RNA, 22 nt, synthetic construct
  source 1..22: mol_type = other RNA
aacaataggaatagtattcagg

SEQ ID NO: 111279 - RNA, 22 nt, synthetic construct
  source 1..22: mol_type = other RNA
aacaatcaaaccatcctttcct

SEQ ID NO: 111280 - RNA, 22 nt, synthetic construct
  source 1..22: mol_type = other RNA
aacaatcaacaggtagctgctt

SEQ ID NO: 111281 - RNA, 22 nt, synthetic construct
  source 1..22: mol_type = other RNA
aacaatccttctaatcagtaac

SEQ ID NO: 111282 - RNA, 22 nt, synthetic construct
  source 1..22: mol_type = other RNA
aacaatcgcaatccaaaatcct

SEQ ID NO: 111283 - RNA, 22 nt, synthetic construct
  source 1..22: mol_type = other RNA
aacaatctaattcgaaaatggg

SEQ ID NO: 111284 - RNA, 22 nt, synthetic construct
  source 1..22: mol_type = other RNA
aacaatctacagattcaatgca

SEQ ID NO: 111285 - RNA, 22 nt, synthetic construct
  source 1..22: mol_type = other RNA
aacaatcttgaaaggggccagg

SEQ ID NO: 111286 - RNA, 22 nt, synthetic construct
  source 1..22: mol_type = other RNA
aacaatgctgctatgaaaattg

SEQ ID NO: 111287 - RNA, 22 nt, synthetic construct
  source 1..22: mol_type = other RNA
aacaatggaatagaagggagaa

SEQ ID NO: 111288 - RNA, 22 nt, synthetic construct
  source 1..22: mol_type = other RNA
aacaattacttgagagcagaga

SEQ ID NO: 111289 - RNA, 22 nt, synthetic construct
  source 1..22: mol_type = other RNA
aacaattagcacctttattaac

SEQ ID NO: 111290 - RNA, 22 nt, synthetic construct
  source 1..22: mol_type = other RNA
aacaattcaacaatagcaacaa

SEQ ID NO: 111291 - RNA, 22 nt, synthetic construct
  source 1..22: mol_type = other RNA
aacaattcaacagctactatga

SEQ ID NO: 111292 - RNA, 22 nt, synthetic construct
  source 1..22: mol_type = other RNA
aacaattggtgaatctgagtaa

SEQ ID NO: 111293 - RNA, 22 nt, synthetic construct
  source 1..22: mol_type = other RNA
aacaattttctctcatgttggg

SEQ ID NO: 111294 - RNA, 22 nt, synthetic construct
  source 1..22: mol_type = other RNA
aacacaaaacaaatggaaccac

SEQ ID NO: 111295 - RNA, 22 nt, synthetic construct
  source 1..22: mol_type = other RNA
aacacaaactgcagaatgacag

SEQ ID NO: 111296 - RNA, 22 nt, synthetic construct
  source 1..22: mol_type = other RNA
aacacaaagccttctctactct

SEQ ID NO: 111297 - RNA, 22 nt, synthetic construct
  source 1..22: mol_type = other RNA
aacacaacataccaaaaccctt

SEQ ID NO: 111298 - RNA, 22 nt, synthetic construct
  source 1..22: mol_type = other RNA
aacacaaggacaggtcacattc

SEQ ID NO: 111299 - RNA, 22 nt, synthetic construct
  source 1..22: mol_type = other RNA
aacacacaaaccaacaacaaaa

SEQ ID NO: 111300 - RNA, 22 nt, synthetic construct
  source 1..22: mol_type = other RNA
aacacacaacaatgaattctca

SEQ ID NO: 111301 - RNA, 22 nt, synthetic construct
  source 1..22: mol_type = other RNA
aacacacaatttgaggtagcac

SEQ ID NO: 111302 - RNA, 22 nt, synthetic construct
  source 1..22: mol_type = other RNA
aacacacacctattcataggta

SEQ ID NO: 111303 - RNA, 22 nt, synthetic construct
  source 1..22: mol_type = other RNA
aacacacattagcctagacctc

SEQ ID NO: 111304 - RNA, 22 nt, synthetic construct
  source 1..22: mol_type = other RNA
aacacacccttggtaaacagca

SEQ ID NO: 111305 - RNA, 22 nt, synthetic construct
  source 1..22: mol_type = other RNA
aacacacgggctgggcgcgatg

SEQ ID NO: 111306 - RNA, 22 nt, synthetic construct
  source 1..22: mol_type = other RNA
aacacacgggtacacatcctaa

SEQ ID NO: 111307 - RNA, 22 nt, synthetic construct
  source 1..22: mol_type = other RNA
aacacactagccactgggtctt

SEQ ID NO: 111308 - RNA, 22 nt, synthetic construct
  source 1..22: mol_type = other RNA
aacacactcgtgtatgatttct

SEQ ID NO: 111309 - RNA, 22 nt, synthetic construct
  source 1..22: mol_type = other RNA
aacacactgctcttctattcca

SEQ ID NO: 111310 - RNA, 22 nt, synthetic construct
  source 1..22: mol_type = other RNA
aacacactgggtaaacaagact

SEQ ID NO: 111311 - RNA, 22 nt, synthetic construct
  source 1..22: mol_type = other RNA
aacacagaacactaaaggggat

SEQ ID NO: 111312 - RNA, 22 nt, synthetic construct
  source 1..22: mol_type = other RNA
aacacaggactgtgtgtgtcca

SEQ ID NO: 111313 - RNA, 22 nt, synthetic construct
  source 1..22: mol_type = other RNA
aacacagggactgatgaagaac

SEQ ID NO: 111314 - RNA, 22 nt, synthetic construct
  source 1..22: mol_type = other RNA
aacacagtgttgagaaagcaca

SEQ ID NO: 111315 - RNA, 22 nt, synthetic construct
  source 1..22: mol_type = other RNA
aacacagttctagttctaataa

SEQ ID NO: 111316 - RNA, 22 nt, synthetic construct
  source 1..22: mol_type = other RNA
aacacatacaaaccaaaaaatg

SEQ ID NO: 111317 - RNA, 22 nt, synthetic construct
  source 1..22: mol_type = other RNA
aacacatcagcgctaagtgcat

SEQ ID NO: 111318 - RNA, 22 nt, synthetic construct
  source 1..22: mol_type = other RNA
aacacatgcacactagaccttt

SEQ ID NO: 111319 - RNA, 22 nt, synthetic construct
  source 1..22: mol_type = other RNA
aacacatggcatcggggcctac

SEQ ID NO: 111320 - RNA, 22 nt, synthetic construct
  source 1..22: mol_type = other RNA
aacacatggggcattaattttt

SEQ ID NO: 111321 - RNA, 22 nt, synthetic construct
  source 1..22: mol_type = other RNA
aacacatgtcatgggccgggcg

SEQ ID NO: 111322 - RNA, 22 nt, synthetic construct
  source 1..22: mol_type = other RNA
aacaccaaaaaagcaccagtta

SEQ ID NO: 111323 - RNA, 22 nt, synthetic construct
  source 1..22: mol_type = other RNA
aacaccaacacaaagccttctc

SEQ ID NO: 111324 - RNA, 22 nt, synthetic construct
  source 1..22: mol_type = other RNA
aacaccaagcaacactaaagat

SEQ ID NO: 111325 - RNA, 22 nt, synthetic construct
  source 1..22: mol_type = other RNA
aacaccagatactcatgcttgc

SEQ ID NO: 111326 - RNA, 22 nt, synthetic construct
  source 1..22: mol_type = other RNA
aacaccagtaagattctgtctc

SEQ ID NO: 111327 - RNA, 22 nt, synthetic construct
  source 1..22: mol_type = other RNA
aacaccatagctgaaggcactg

SEQ ID NO: 111328 - RNA, 22 nt, synthetic construct
  source 1..22: mol_type = other RNA
aacaccatggcaggtttcaagt

SEQ ID NO: 111329 - RNA, 22 nt, synthetic construct
  source 1..22: mol_type = other RNA
aacacccttgaaaatttccagc

SEQ ID NO: 111330 - RNA, 22 nt, synthetic construct
  source 1..22: mol_type = other RNA
aacacctaaagatatgtgtagg

SEQ ID NO: 111331 - RNA, 22 nt, synthetic construct
  source 1..22: mol_type = other RNA
aacacctcagttaaacccaaca

SEQ ID NO: 111332 - RNA, 22 nt, synthetic construct
  source 1..22: mol_type = other RNA
aacacctgcagtggcgtgtgcc

SEQ ID NO: 111333 - RNA, 22 nt, synthetic construct
  source 1..22: mol_type = other RNA
aacaccttacactcaaaagcca

SEQ ID NO: 111334 - RNA, 22 nt, synthetic construct
  source 1..22: mol_type = other RNA
aacaccttgaacatgaacgaga

SEQ ID NO: 111335 - RNA, 22 nt, synthetic construct
  source 1..22: mol_type = other RNA
aacaccttgaactgggacttct

SEQ ID NO: 111336 - RNA, 22 nt, synthetic construct
  source 1..22: mol_type = other RNA
aacaccttgggaggctgaggct

SEQ ID NO: 111337 - RNA, 22 nt, synthetic construct
  source 1..22: mol_type = other RNA
aacacctttgtattcatccagt

SEQ ID NO: 111338 - RNA, 22 nt, synthetic construct
  source 1..22: mol_type = other RNA
aacacgcagaaccactgagcac

SEQ ID NO: 111339 - RNA, 22 nt, synthetic construct
  source 1..22: mol_type = other RNA
aacactaaagatttgccaatca

SEQ ID NO: 111340 - RNA, 22 nt, synthetic construct
  source 1..22: mol_type = other RNA
aacactaaaggggatttcatga

SEQ ID NO: 111341 - RNA, 22 nt, synthetic construct
  source 1..22: mol_type = other RNA
aacactaaccaacattgagttt

SEQ ID NO: 111342 - RNA, 22 nt, synthetic construct
  source 1..22: mol_type = other RNA
aacactaagaagatggttggaa

SEQ ID NO: 111343 - RNA, 22 nt, synthetic construct
  source 1..22: mol_type = other RNA
aacactaatccttctcatagtc

SEQ ID NO: 111344 - RNA, 22 nt, synthetic construct
  source 1..22: mol_type = other RNA
aacactataagccaatatccct

SEQ ID NO: 111345 - RNA, 22 nt, synthetic construct
  source 1..22: mol_type = other RNA
aacactcagaagtactactcat

SEQ ID NO: 111346 - RNA, 22 nt, synthetic construct
  source 1..22: mol_type = other RNA
aacactcagatatcaatctgga

SEQ ID NO: 111347 - RNA, 22 nt, synthetic construct
  source 1..22: mol_type = other RNA
aacactcataccaggttttggt

SEQ ID NO: 111348 - RNA, 22 nt, synthetic construct
  source 1..22: mol_type = other RNA
aacactccagaatgaccgagat

SEQ ID NO: 111349 - RNA, 22 nt, synthetic construct
  source 1..22: mol_type = other RNA
aacactctgcaattttaaatgt

SEQ ID NO: 111350 - RNA, 22 nt, synthetic construct
  source 1..22: mol_type = other RNA
aacactgctcagaagctttcag

SEQ ID NO: 111351 - RNA, 22 nt, synthetic construct
  source 1..22: mol_type = other RNA
aacactggaaatcacaggttta

SEQ ID NO: 111352 - RNA, 22 nt, synthetic construct
  source 1..22: mol_type = other RNA
aacactggaagtaattgggatc

SEQ ID NO: 111353 - RNA, 22 nt, synthetic construct
  source 1..22: mol_type = other RNA
aacactggcaaaaatcatcata

SEQ ID NO: 111354 - RNA, 22 nt, synthetic construct
  source 1..22: mol_type = other RNA
aacactgtagttcagtttttct

SEQ ID NO: 111355 - RNA, 22 nt, synthetic construct
  source 1..22: mol_type = other RNA
aacactgtgttcttttccttct

SEQ ID NO: 111356 - RNA, 22 nt, synthetic construct
  source 1..22: mol_type = other RNA
aacactgttctgcgtggttttt

SEQ ID NO: 111357 - RNA, 22 nt, synthetic construct
  source 1..22: mol_type = other RNA
aacacttaacatgagatctaaa

SEQ ID NO: 111358 - RNA, 22 nt, synthetic construct
  source 1..22: mol_type = other RNA
aacacttagcatgttgctttgc

SEQ ID NO: 111359 - RNA, 22 nt, synthetic construct
  source 1..22: mol_type = other RNA
aacacttcagtggtaaggactg

SEQ ID NO: 111360 - RNA, 22 nt, synthetic construct
  source 1..22: mol_type = other RNA
aacacttctgtgatcagaagag

SEQ ID NO: 111361 - RNA, 22 nt, synthetic construct
  source 1..22: mol_type = other RNA
aacacttgtgtaactaccactg

SEQ ID NO: 111362 - RNA, 22 nt, synthetic construct
  source 1..22: mol_type = other RNA
aacacttttcaaacacttaaca

SEQ ID NO: 111363 - RNA, 22 nt, synthetic construct
  source 1..22: mol_type = other RNA
aacacttttccagtcttctcat

SEQ ID NO: 111364 - RNA, 22 nt, synthetic construct
  source 1..22: mol_type = other RNA
aacagaaaccctgtacccatta

SEQ ID NO: 111365 - RNA, 22 nt, synthetic construct
  source 1..22: mol_type = other RNA
aacagaaaggcccaaaaagttt

SEQ ID NO: 111366 - RNA, 22 nt, synthetic construct
  source 1..22: mol_type = other RNA
aacagaaatacaatgtgagcca

SEQ ID NO: 111367 - RNA, 22 nt, synthetic construct
  source 1..22: mol_type = other RNA
aacagaaatgaaatggccctta

SEQ ID NO: 111368 - RNA, 22 nt, synthetic construct
  source 1..22: mol_type = other RNA
aacagaagaagaattctatagg

SEQ ID NO: 111369 - RNA, 22 nt, synthetic construct
  source 1..22: mol_type = other RNA
aacagaagaagtttctagttat

SEQ ID NO: 111370 - RNA, 22 nt, synthetic construct
  source 1..22: mol_type = other RNA
aacagaagacacaaaatcagat

SEQ ID NO: 111371 - RNA, 22 nt, synthetic construct
  source 1..22: mol_type = other RNA
aacagaagggtatatacaatat

SEQ ID NO: 111372 - RNA, 22 nt, synthetic construct
  source 1..22: mol_type = other RNA
aacagaataaaaagtgacttct

SEQ ID NO: 111373 - RNA, 22 nt, synthetic construct
  source 1..22: mol_type = other RNA
aacagacagacatgcatgcaca

SEQ ID NO: 111374 - RNA, 22 nt, synthetic construct
  source 1..22: mol_type = other RNA
aacagacccttatgtccagccc

SEQ ID NO: 111375 - RNA, 22 nt, synthetic construct
  source 1..22: mol_type = other RNA
aacagacctctgaagagtctat

SEQ ID NO: 111376 - RNA, 22 nt, synthetic construct
  source 1..22: mol_type = other RNA
aacagactgagccagcaaatca

SEQ ID NO: 111377 - RNA, 22 nt, synthetic construct
  source 1..22: mol_type = other RNA
aacagagacagagaatctgtct

SEQ ID NO: 111378 - RNA, 22 nt, synthetic construct
  source 1..22: mol_type = other RNA
aacagaggcatgcacggacttg

SEQ ID NO: 111379 - RNA, 22 nt, synthetic construct
  source 1..22: mol_type = other RNA
aacagagttttccaataagtta

SEQ ID NO: 111380 - RNA, 22 nt, synthetic construct
  source 1..22: mol_type = other RNA
aacagatcctcacatcagttac

SEQ ID NO: 111381 - RNA, 22 nt, synthetic construct
  source 1..22: mol_type = other RNA
aacagatctgagaagactaagc

SEQ ID NO: 111382 - RNA, 22 nt, synthetic construct
  source 1..22: mol_type = other RNA
aacagatcttggccgaatgtgg

SEQ ID NO: 111383 - RNA, 22 nt, synthetic construct
  source 1..22: mol_type = other RNA
aacagatggaactctattttcc

SEQ ID NO: 111384 - RNA, 22 nt, synthetic construct
  source 1..22: mol_type = other RNA
aacagatggtccttttttactg

SEQ ID NO: 111385 - RNA, 22 nt, synthetic construct
  source 1..22: mol_type = other RNA
aacagattcacgcacagggaga

SEQ ID NO: 111386 - RNA, 22 nt, synthetic construct
  source 1..22: mol_type = other RNA
aacagcaaggctcctgcagaca

SEQ ID NO: 111387 - RNA, 22 nt, synthetic construct
  source 1..22: mol_type = other RNA
aacagcaccttttttggtattt

SEQ ID NO: 111388 - RNA, 22 nt, synthetic construct
  source 1..22: mol_type = other RNA
aacagcacttttgtactacttg

SEQ ID NO: 111389 - RNA, 22 nt, synthetic construct
  source 1..22: mol_type = other RNA
aacagcagaacaaactgcgtgg

SEQ ID NO: 111390 - RNA, 22 nt, synthetic construct
  source 1..22: mol_type = other RNA
aacagcaggggaaggcttcgag

SEQ ID NO: 111391 - RNA, 22 nt, synthetic construct
  source 1..22: mol_type = other RNA
aacagcagtcttaaccattgag

SEQ ID NO: 111392 - RNA, 22 nt, synthetic construct
  source 1..22: mol_type = other RNA
aacagcatactgtggatatctt

SEQ ID NO: 111393 - RNA, 22 nt, synthetic construct
  source 1..22: mol_type = other RNA
aacagcatatacatgacatggt

SEQ ID NO: 111394 - RNA, 22 nt, synthetic construct
  source 1..22: mol_type = other RNA
aacagcattatcttaataacct

SEQ ID NO: 111395 - RNA, 22 nt, synthetic construct
  source 1..22: mol_type = other RNA
aacagccaaagaaattggacgg

SEQ ID NO: 111396 - RNA, 22 nt, synthetic construct
  source 1..22: mol_type = other RNA
aacagccaaataaaacacaagg

SEQ ID NO: 111397 - RNA, 22 nt, synthetic construct
  source 1..22: mol_type = other RNA
aacagcccctagcatgcagtag

SEQ ID NO: 111398 - RNA, 22 nt, synthetic construct
  source 1..22: mol_type = other RNA
aacagccggcatatgtcactgt

SEQ ID NO: 111399 - RNA, 22 nt, synthetic construct
  source 1..22: mol_type = other RNA
aacagcctaaagtccacagatc

SEQ ID NO: 111400 - RNA, 22 nt, synthetic construct
  source 1..22: mol_type = other RNA
aacagcctaagcaaatgtaatg

SEQ ID NO: 111401 - RNA, 22 nt, synthetic construct
  source 1..22: mol_type = other RNA
aacagcctaattgtacacctca

SEQ ID NO: 111402 - RNA, 22 nt, synthetic construct
  source 1..22: mol_type = other RNA
aacagcgccacttaaaaaatgc

SEQ ID NO: 111403 - RNA, 22 nt, synthetic construct
  source 1..22: mol_type = other RNA
aacagctactatgaatatactg

SEQ ID NO: 111404 - RNA, 22 nt, synthetic construct
  source 1..22: mol_type = other RNA
aacagctaggtgagtgagatgg

SEQ ID NO: 111405 - RNA, 22 nt, synthetic construct
  source 1..22: mol_type = other RNA
aacagctcagaagctatagctg

SEQ ID NO: 111406 - RNA, 22 nt, synthetic construct
  source 1..22: mol_type = other RNA
aacagcttcttgttagaatttt

SEQ ID NO: 111407 - RNA, 22 nt, synthetic construct
  source 1..22: mol_type = other RNA
aacagcttgacattcttacctt

SEQ ID NO: 111408 - RNA, 22 nt, synthetic construct
  source 1..22: mol_type = other RNA
aacaggaagaggcagctaagca

SEQ ID NO: 111409 - RNA, 22 nt, synthetic construct
  source 1..22: mol_type = other RNA
aacaggaagggagagatgccta

SEQ ID NO: 111410 - RNA, 22 nt, synthetic construct
  source 1..22: mol_type = other RNA
aacaggaagttgagaaagaggg

SEQ ID NO: 111411 - RNA, 22 nt, synthetic construct
  source 1..22: mol_type = other RNA
aacaggacttttggtacacatc

SEQ ID NO: 111412 - RNA, 22 nt, synthetic construct
  source 1..22: mol_type = other RNA
aacaggagttaccataaaacca

SEQ ID NO: 111413 - RNA, 22 nt, synthetic construct
  source 1..22: mol_type = other RNA
aacaggatacaaaaagcaccta

SEQ ID NO: 111414 - RNA, 22 nt, synthetic construct
  source 1..22: mol_type = other RNA
aacaggattacaatgtaaggtg

SEQ ID NO: 111415 - RNA, 22 nt, synthetic construct
  source 1..22: mol_type = other RNA
aacaggcaaccttgggagaaaa

SEQ ID NO: 111416 - RNA, 22 nt, synthetic construct
  source 1..22: mol_type = other RNA
aacaggccctttgttagtgcct

SEQ ID NO: 111417 - RNA, 22 nt, synthetic construct
  source 1..22: mol_type = other RNA
aacaggcctgagccgtcggtat

SEQ ID NO: 111418 - RNA, 22 nt, synthetic construct
  source 1..22: mol_type = other RNA
aacaggctcaatacctgaaaag

SEQ ID NO: 111419 - RNA, 22 nt, synthetic construct
  source 1..22: mol_type = other RNA
aacaggctgagtgcggtggctt

SEQ ID NO: 111420 - RNA, 22 nt, synthetic construct
  source 1..22: mol_type = other RNA
aacagggccactgagagctcag

SEQ ID NO: 111421 - RNA, 22 nt, synthetic construct
  source 1..22: mol_type = other RNA
aacagggtaagattccgtctca

SEQ ID NO: 111422 - RNA, 22 nt, synthetic construct
  source 1..22: mol_type = other RNA
aacagggtctacaaaaggtttc

SEQ ID NO: 111423 - RNA, 22 nt, synthetic construct
  source 1..22: mol_type = other RNA
aacagggttacagtatagggga

SEQ ID NO: 111424 - RNA, 22 nt, synthetic construct
  source 1..22: mol_type = other RNA
aacagggttattaacataccga

SEQ ID NO: 111425 - RNA, 22 nt, synthetic construct
  source 1..22: mol_type = other RNA
aacagggttttgttttgttttt

SEQ ID NO: 111426 - RNA, 22 nt, synthetic construct
  source 1..22: mol_type = other RNA
aacaggtagctgctttttaaaa

SEQ ID NO: 111427 - RNA, 22 nt, synthetic construct
  source 1..22: mol_type = other RNA
aacaggtataaagtttccgttt

SEQ ID NO: 111428 - RNA, 22 nt, synthetic construct
  source 1..22: mol_type = other RNA
aacaggtgtaagagattaattc

SEQ ID NO: 111429 - RNA, 22 nt, synthetic construct
  source 1..22: mol_type = other RNA
aacaggttcttcatcagtccct

SEQ ID NO: 111430 - RNA, 22 nt, synthetic construct
  source 1..22: mol_type = other RNA
aacagtaaagtcactgtggaaa

SEQ ID NO: 111431 - RNA, 22 nt, synthetic construct
  source 1..22: mol_type = other RNA
aacagtaattagttacatgagg

SEQ ID NO: 111432 - RNA, 22 nt, synthetic construct
  source 1..22: mol_type = other RNA
aacagtacagtagtaaaaccaa

SEQ ID NO: 111433 - RNA, 22 nt, synthetic construct
  source 1..22: mol_type = other RNA
aacagtattgtcttctaaccct

SEQ ID NO: 111434 - RNA, 22 nt, synthetic construct
  source 1..22: mol_type = other RNA
aacagtcattcaggtctatgtg

SEQ ID NO: 111435 - RNA, 22 nt, synthetic construct
  source 1..22: mol_type = other RNA
aacagtctcgtgaatttggtat

SEQ ID NO: 111436 - RNA, 22 nt, synthetic construct
  source 1..22: mol_type = other RNA
aacagtgaccacagtttgaaac

SEQ ID NO: 111437 - RNA, 22 nt, synthetic construct
  source 1..22: mol_type = other RNA
aacagtgctgtgccagtgcaaa

SEQ ID NO: 111438 - RNA, 22 nt, synthetic construct
  source 1..22: mol_type = other RNA
aacagtggttaggaaaatacat

SEQ ID NO: 111439 - RNA, 22 nt, synthetic construct
  source 1..22: mol_type = other RNA
aacagtgtactagtctccatac

SEQ ID NO: 111440 - RNA, 22 nt, synthetic construct
  source 1..22: mol_type = other RNA
aacagtgtgagaccgtgtctca

SEQ ID NO: 111441 - RNA, 22 nt, synthetic construct
  source 1..22: mol_type = other RNA
aacagtgtttacacacctgaaa

SEQ ID NO: 111442 - RNA, 22 nt, synthetic construct
  source 1..22: mol_type = other RNA
aacagttactttcctttttcaa

SEQ ID NO: 111443 - RNA, 22 nt, synthetic construct
  source 1..22: mol_type = other RNA
aacagttcaatactactgcaaa

SEQ ID NO: 111444 - RNA, 22 nt, synthetic construct
  source 1..22: mol_type = other RNA
aacagttgctattcaacaggta

SEQ ID NO: 111445 - RNA, 22 nt, synthetic construct
  source 1..22: mol_type = other RNA
aacagtttacacgccttcgcgg

SEQ ID NO: 111446 - RNA, 22 nt, synthetic construct
  source 1..22: mol_type = other RNA
aacagtttagcaatccaaggac

SEQ ID NO: 111447 - RNA, 22 nt, synthetic construct
  source 1..22: mol_type = other RNA
aacagtttccctctgagagaag

SEQ ID NO: 111448 - RNA, 22 nt, synthetic construct
  source 1..22: mol_type = other RNA
aacagtttggcaatttctcaaa

SEQ ID NO: 111449 - RNA, 22 nt, synthetic construct
  source 1..22: mol_type = other RNA
aacataaaagcgtactgtgatt

SEQ ID NO: 111450 - RNA, 22 nt, synthetic construct
  source 1..22: mol_type = other RNA
aacataaatagggtgctactca

SEQ ID NO: 111451 - RNA, 22 nt, synthetic construct
  source 1..22: mol_type = other RNA
aacataatcaaattcacagaac

SEQ ID NO: 111452 - RNA, 22 nt, synthetic construct
  source 1..22: mol_type = other RNA
aacataatctttggtgctgata

SEQ ID NO: 111453 - RNA, 22 nt, synthetic construct
  source 1..22: mol_type = other RNA
aacatacacatcagattttgaa

SEQ ID NO: 111454 - RNA, 22 nt, synthetic construct
  source 1..22: mol_type = other RNA
aacatacatgagaaatgttaag

SEQ ID NO: 111455 - RNA, 22 nt, synthetic construct
  source 1..22: mol_type = other RNA
aacataccaaaacccttgggat

SEQ ID NO: 111456 - RNA, 22 nt, synthetic construct
  source 1..22: mol_type = other RNA
aacataccccaaccctacctag

SEQ ID NO: 111457 - RNA, 22 nt, synthetic construct
  source 1..22: mol_type = other RNA
aacataccgacggctcaggcct

SEQ ID NO: 111458 - RNA, 22 nt, synthetic construct
  source 1..22: mol_type = other RNA
aacatataatccaactgcagtc

SEQ ID NO: 111459 - RNA, 22 nt, synthetic construct
  source 1..22: mol_type = other RNA
aacatatccttctacatccccc

SEQ ID NO: 111460 - RNA, 22 nt, synthetic construct
  source 1..22: mol_type = other RNA
aacatatgcaggaccaacttta

SEQ ID NO: 111461 - RNA, 22 nt, synthetic construct
  source 1..22: mol_type = other RNA
aacatatgcatgttatttgggg

SEQ ID NO: 111462 - RNA, 22 nt, synthetic construct
  source 1..22: mol_type = other RNA
aacatatgtcagatggtaaatt

SEQ ID NO: 111463 - RNA, 22 nt, synthetic construct
  source 1..22: mol_type = other RNA
aacatattgaataatttccagg

SEQ ID NO: 111464 - RNA, 22 nt, synthetic construct
  source 1..22: mol_type = other RNA
aacatcaaagtcccctgtaatt

SEQ ID NO: 111465 - RNA, 22 nt, synthetic construct
  source 1..22: mol_type = other RNA
aacatcacccagctcgaccagg

SEQ ID NO: 111466 - RNA, 22 nt, synthetic construct
  source 1..22: mol_type = other RNA
aacatcactagctattagagaa

SEQ ID NO: 111467 - RNA, 22 nt, synthetic construct
  source 1..22: mol_type = other RNA
aacatcatctaatttcccattt

SEQ ID NO: 111468 - RNA, 22 nt, synthetic construct
  source 1..22: mol_type = other RNA
aacatcatgatttaatagaggt

SEQ ID NO: 111469 - RNA, 22 nt, synthetic construct
  source 1..22: mol_type = other RNA
aacatccacagctttcttttcc

SEQ ID NO: 111470 - RNA, 22 nt, synthetic construct
  source 1..22: mol_type = other RNA
aacatccattactcgtggttat

SEQ ID NO: 111471 - RNA, 22 nt, synthetic construct
  source 1..22: mol_type = other RNA
aacatcccaagtgcccattaac

SEQ ID NO: 111472 - RNA, 22 nt, synthetic construct
  source 1..22: mol_type = other RNA
aacatccctatgcaataactca

SEQ ID NO: 111473 - RNA, 22 nt, synthetic construct
  source 1..22: mol_type = other RNA
aacatcgtaaaacctcatctct

SEQ ID NO: 111474 - RNA, 22 nt, synthetic construct
  source 1..22: mol_type = other RNA
aacatctgcctcccgggtccag

SEQ ID NO: 111475 - RNA, 22 nt, synthetic construct
  source 1..22: mol_type = other RNA
aacatctggaaggaaacactat

SEQ ID NO: 111476 - RNA, 22 nt, synthetic construct
  source 1..22: mol_type = other RNA
aacatctggcagcaggggctaa

SEQ ID NO: 111477 - RNA, 22 nt, synthetic construct
  source 1..22: mol_type = other RNA
aacatgaaaagatactcaacat

SEQ ID NO: 111478 - RNA, 22 nt, synthetic construct
  source 1..22: mol_type = other RNA
aacatgaacaagttacaaacat

SEQ ID NO: 111479 - RNA, 22 nt, synthetic construct
  source 1..22: mol_type = other RNA
aacatgaacgagaacaaaacaa

SEQ ID NO: 111480 - RNA, 22 nt, synthetic construct
  source 1..22: mol_type = other RNA
aacatgaactactcaaagaaaa

SEQ ID NO: 111481 - RNA, 22 nt, synthetic construct
  source 1..22: mol_type = other RNA
aacatgaataaccaatgtcaga

SEQ ID NO: 111482 - RNA, 22 nt, synthetic construct
  source 1..22: mol_type = other RNA
aacatgacagatcccaaaaagg

SEQ ID NO: 111483 - RNA, 22 nt, synthetic construct
  source 1..22: mol_type = other RNA
aacatgagagaaaattgttcat

SEQ ID NO: 111484 - RNA, 22 nt, synthetic construct
  source 1..22: mol_type = other RNA
aacatgattgggtcaacaaact

SEQ ID NO: 111485 - RNA, 22 nt, synthetic construct
  source 1..22: mol_type = other RNA
aacatgcatatgtttgtaactt

SEQ ID NO: 111486 - RNA, 22 nt, synthetic construct
  source 1..22: mol_type = other RNA
aacatgccagctttggctgaaa

SEQ ID NO: 111487 - RNA, 22 nt, synthetic construct
  source 1..22: mol_type = other RNA
aacatgctaagtgtttaggata

SEQ ID NO: 111488 - RNA, 22 nt, synthetic construct
  source 1..22: mol_type = other RNA
aacatgctcttaagtatttttg

SEQ ID NO: 111489 - RNA, 22 nt, synthetic construct
  source 1..22: mol_type = other RNA
aacatggatatttggccgggcg

SEQ ID NO: 111490 - RNA, 22 nt, synthetic construct
  source 1..22: mol_type = other RNA
aacatggcacatgtctacctgt

SEQ ID NO: 111491 - RNA, 22 nt, synthetic construct
  source 1..22: mol_type = other RNA
aacatggccagtatctcctttc

SEQ ID NO: 111492 - RNA, 22 nt, synthetic construct
  source 1..22: mol_type = other RNA
aacatggcttagaaatgaagat

SEQ ID NO: 111493 - RNA, 22 nt, synthetic construct
  source 1..22: mol_type = other RNA
aacatgggaatgcatatatctg

SEQ ID NO: 111494 - RNA, 22 nt, synthetic construct
  source 1..22: mol_type = other RNA
aacatggtaatttgtccatctg

SEQ ID NO: 111495 - RNA, 22 nt, synthetic construct
  source 1..22: mol_type = other RNA
aacatggtagaccatataatct

SEQ ID NO: 111496 - RNA, 22 nt, synthetic construct
  source 1..22: mol_type = other RNA
aacatggtccacagaggctttt

SEQ ID NO: 111497 - RNA, 22 nt, synthetic construct
  source 1..22: mol_type = other RNA
aacatggtttgatcccactagt

SEQ ID NO: 111498 - RNA, 22 nt, synthetic construct
  source 1..22: mol_type = other RNA
aacatgtaaaacagacccttat

SEQ ID NO: 111499 - RNA, 22 nt, synthetic construct
  source 1..22: mol_type = other RNA
aacatgtatgtttctcattctt

SEQ ID NO: 111500 - RNA, 22 nt, synthetic construct
  source 1..22: mol_type = other RNA
aacatgtcttggtgtgctcttt

SEQ ID NO: 111501 - RNA, 22 nt, synthetic construct
  source 1..22: mol_type = other RNA
aacatgtgaggatttatttctg

SEQ ID NO: 111502 - RNA, 22 nt, synthetic construct
  source 1..22: mol_type = other RNA
aacatgtggaacataatctttg

SEQ ID NO: 111503 - RNA, 22 nt, synthetic construct
  source 1..22: mol_type = other RNA
aacatgtgtatttagggagcat

SEQ ID NO: 111504 - RNA, 22 nt, synthetic construct
  source 1..22: mol_type = other RNA
aacatgttagattaggaaacag

SEQ ID NO: 111505 - RNA, 22 nt, synthetic construct
  source 1..22: mol_type = other RNA
aacatgttgtgtagaaatgtgg

SEQ ID NO: 111506 - RNA, 22 nt, synthetic construct
  source 1..22: mol_type = other RNA
aacattaaggaagaattaacac

SEQ ID NO: 111507 - RNA, 22 nt, synthetic construct
  source 1..22: mol_type = other RNA
aacattaagggaaacagggtta

SEQ ID NO: 111508 - RNA, 22 nt, synthetic construct
  source 1..22: mol_type = other RNA
aacattacaacagcaaggctcc

SEQ ID NO: 111509 - RNA, 22 nt, synthetic construct
  source 1..22: mol_type = other RNA
aacattacagaaaaaattagcc

SEQ ID NO: 111510 - RNA, 22 nt, synthetic construct
  source 1..22: mol_type = other RNA
aacattaccaataaaagcctca

SEQ ID NO: 111511 - RNA, 22 nt, synthetic construct
  source 1..22: mol_type = other RNA
aacattatcttctaccttttgt

SEQ ID NO: 111512 - RNA, 22 nt, synthetic construct
  source 1..22: mol_type = other RNA
aacattcatccctctaaatagg

SEQ ID NO: 111513 - RNA, 22 nt, synthetic construct
  source 1..22: mol_type = other RNA
aacattcattcatgacaagaat

SEQ ID NO: 111514 - RNA, 22 nt, synthetic construct
  source 1..22: mol_type = other RNA
aacattctacagtattacacag

SEQ ID NO: 111515 - RNA, 22 nt, synthetic construct
  source 1..22: mol_type = other RNA
aacattgaaggcagaattatag

SEQ ID NO: 111516 - RNA, 22 nt, synthetic construct
  source 1..22: mol_type = other RNA
aacattgagtttcaatgacttt

SEQ ID NO: 111517 - RNA, 22 nt, synthetic construct
  source 1..22: mol_type = other RNA
aacattgatacaatacttggat

SEQ ID NO: 111518 - RNA, 22 nt, synthetic construct
  source 1..22: mol_type = other RNA
aacattgcctccatatgggatg

SEQ ID NO: 111519 - RNA, 22 nt, synthetic construct
  source 1..22: mol_type = other RNA
aacattggaggataatatctgg

SEQ ID NO: 111520 - RNA, 22 nt, synthetic construct
  source 1..22: mol_type = other RNA
aacattggtttgaaatgatctt

SEQ ID NO: 111521 - RNA, 22 nt, synthetic construct
  source 1..22: mol_type = other RNA
aacattgtgcaaccatccccgc

SEQ ID NO: 111522 - RNA, 22 nt, synthetic construct
  source 1..22: mol_type = other RNA
aacatttatacagttggaactc

SEQ ID NO: 111523 - RNA, 22 nt, synthetic construct
  source 1..22: mol_type = other RNA
aacatttatggaattgccatat

SEQ ID NO: 111524 - RNA, 22 nt, synthetic construct
  source 1..22: mol_type = other RNA
aacatttcttctagtcacattt

SEQ ID NO: 111525 - RNA, 22 nt, synthetic construct
  source 1..22: mol_type = other RNA
aacatttgaactcactggccag

SEQ ID NO: 111526 - RNA, 22 nt, synthetic construct
  source 1..22: mol_type = other RNA
aacatttgttgcatccccattc

SEQ ID NO: 111527 - RNA, 22 nt, synthetic construct
  source 1..22: mol_type = other RNA
aacattttagctggggcagcaa

SEQ ID NO: 111528 - RNA, 22 nt, synthetic construct
  source 1..22: mol_type = other RNA
aacattttattaggtgcacaca

SEQ ID NO: 111529 - RNA, 22 nt, synthetic construct
  source 1..22: mol_type = other RNA
aacattttccctcctttttatc

SEQ ID NO: 111530 - RNA, 22 nt, synthetic construct
  source 1..22: mol_type = other RNA
aacattttctctacagttaaca

SEQ ID NO: 111531 - RNA, 22 nt, synthetic construct
  source 1..22: mol_type = other RNA
aacattttgagttattgcatag

SEQ ID NO: 111532 - RNA, 22 nt, synthetic construct
  source 1..22: mol_type = other RNA
aacattttttgcagagacgggg

SEQ ID NO: 111533 - RNA, 22 nt, synthetic construct
  source 1..22: mol_type = other RNA
aaccaaaaaatgtggcatatca

SEQ ID NO: 111534 - RNA, 22 nt, synthetic construct
  source 1..22: mol_type = other RNA
aaccaaaaaccacatttcatag

SEQ ID NO: 111535 - RNA, 22 nt, synthetic construct
  source 1..22: mol_type = other RNA
aaccaaacactggaaatcacag

SEQ ID NO: 111536 - RNA, 22 nt, synthetic construct
  source 1..22: mol_type = other RNA
aaccaaacttggtttattttct

SEQ ID NO: 111537 - RNA, 22 nt, synthetic construct
  source 1..22: mol_type = other RNA
aaccaaagaaaggggaaggaat

SEQ ID NO: 111538 - RNA, 22 nt, synthetic construct
  source 1..22: mol_type = other RNA
aaccaaatgcagaaaataaacc

SEQ ID NO: 111539 - RNA, 22 nt, synthetic construct
  source 1..22: mol_type = other RNA
aaccaaatgtggatagtgcttt

SEQ ID NO: 111540 - RNA, 22 nt, synthetic construct
  source 1..22: mol_type = other RNA
aaccaacattgagtttcaatga

SEQ ID NO: 111541 - RNA, 22 nt, synthetic construct
  source 1..22: mol_type = other RNA
aaccaagaacaaccttatctat

SEQ ID NO: 111542 - RNA, 22 nt, synthetic construct
  source 1..22: mol_type = other RNA
aaccaagagcatagactttaga

SEQ ID NO: 111543 - RNA, 22 nt, synthetic construct
  source 1..22: mol_type = other RNA
aaccaagcaagtaaaagaagat

SEQ ID NO: 111544 - RNA, 22 nt, synthetic construct
  source 1..22: mol_type = other RNA
aaccaagcccaactttttcttt

SEQ ID NO: 111545 - RNA, 22 nt, synthetic construct
  source 1..22: mol_type = other RNA
aaccaagtttggttcatttcag

SEQ ID NO: 111546 - RNA, 22 nt, synthetic construct
  source 1..22: mol_type = other RNA
aaccaataagaagtgaaaaatg

SEQ ID NO: 111547 - RNA, 22 nt, synthetic construct
  source 1..22: mol_type = other RNA
aaccaatcgcagggccattctg

SEQ ID NO: 111548 - RNA, 22 nt, synthetic construct
  source 1..22: mol_type = other RNA
aaccaatgtcagagatctgaaa

SEQ ID NO: 111549 - RNA, 22 nt, synthetic construct
  source 1..22: mol_type = other RNA
aaccaatgttctcttttcctcg

SEQ ID NO: 111550 - RNA, 22 nt, synthetic construct
  source 1..22: mol_type = other RNA
aaccaattaccataaagtcttc

SEQ ID NO: 111551 - RNA, 22 nt, synthetic construct
  source 1..22: mol_type = other RNA
aaccaattatgctgagtgaatg

SEQ ID NO: 111552 - RNA, 22 nt, synthetic construct
  source 1..22: mol_type = other RNA
aaccacaaacatgaataaccaa

SEQ ID NO: 111553 - RNA, 22 nt, synthetic construct
  source 1..22: mol_type = other RNA
aaccacacagagaacagcatta

SEQ ID NO: 111554 - RNA, 22 nt, synthetic construct
  source 1..22: mol_type = other RNA
aaccacactgacaggacagagc

SEQ ID NO: 111555 - RNA, 22 nt, synthetic construct
  source 1..22: mol_type = other RNA
aaccacagagcctaaaataggc

SEQ ID NO: 111556 - RNA, 22 nt, synthetic construct
  source 1..22: mol_type = other RNA
aaccacatgtggcttgtggcta

SEQ ID NO: 111557 - RNA, 22 nt, synthetic construct
  source 1..22: mol_type = other RNA
aaccacatttcatagcagaatg

SEQ ID NO: 111558 - RNA, 22 nt, synthetic construct
  source 1..22: mol_type = other RNA
aaccacctaactactaataaat

SEQ ID NO: 111559 - RNA, 22 nt, synthetic construct
  source 1..22: mol_type = other RNA
aaccacctgggggagactgtgc

SEQ ID NO: 111560 - RNA, 22 nt, synthetic construct
  source 1..22: mol_type = other RNA
aaccacgagtaatggatgtttt

SEQ ID NO: 111561 - RNA, 22 nt, synthetic construct
  source 1..22: mol_type = other RNA
aaccacgcagaacagtgtttac

SEQ ID NO: 111562 - RNA, 22 nt, synthetic construct
  source 1..22: mol_type = other RNA
aaccacgcagtttgttctgctg

SEQ ID NO: 111563 - RNA, 22 nt, synthetic construct
  source 1..22: mol_type = other RNA
aaccacgcatctggtctatctc

SEQ ID NO: 111564 - RNA, 22 nt, synthetic construct
  source 1..22: mol_type = other RNA
aaccactaaggtcaacacatca

SEQ ID NO: 111565 - RNA, 22 nt, synthetic construct
  source 1..22: mol_type = other RNA
aaccactatctaataaaatagc

SEQ ID NO: 111566 - RNA, 22 nt, synthetic construct
  source 1..22: mol_type = other RNA
aaccactgaaacttttcttttc

SEQ ID NO: 111567 - RNA, 22 nt, synthetic construct
  source 1..22: mol_type = other RNA
aaccactgaatcagattttaaa

SEQ ID NO: 111568 - RNA, 22 nt, synthetic construct
  source 1..22: mol_type = other RNA
aaccactgagcacaatgcctgc

SEQ ID NO: 111569 - RNA, 22 nt, synthetic construct
  source 1..22: mol_type = other RNA
aaccactgatggaattctgaca

SEQ ID NO: 111570 - RNA, 22 nt, synthetic construct
  source 1..22: mol_type = other RNA
aaccactggatacggaaatata

SEQ ID NO: 111571 - RNA, 22 nt, synthetic construct
  source 1..22: mol_type = other RNA
aaccactggggagtgtgcccaa

SEQ ID NO: 111572 - RNA, 22 nt, synthetic construct
  source 1..22: mol_type = other RNA
aaccactgtaggccccgatgcc

SEQ ID NO: 111573 - RNA, 22 nt, synthetic construct
  source 1..22: mol_type = other RNA
aaccactgttatctgggaacag

SEQ ID NO: 111574 - RNA, 22 nt, synthetic construct
  source 1..22: mol_type = other RNA
aaccagaaaagtgaaacaataa

SEQ ID NO: 111575 - RNA, 22 nt, synthetic construct
  source 1..22: mol_type = other RNA
aaccagacatttctcatacttt

SEQ ID NO: 111576 - RNA, 22 nt, synthetic construct
  source 1..22: mol_type = other RNA
aaccagagcggaatttttatat

SEQ ID NO: 111577 - RNA, 22 nt, synthetic construct
  source 1..22: mol_type = other RNA
aaccaggaggtttgcactggca

SEQ ID NO: 111578 - RNA, 22 nt, synthetic construct
  source 1..22: mol_type = other RNA
aaccaggcccggggcagagaac

SEQ ID NO: 111579 - RNA, 22 nt, synthetic construct
  source 1..22: mol_type = other RNA
aaccagggaggcggaggttgcg

SEQ ID NO: 111580 - RNA, 22 nt, synthetic construct
  source 1..22: mol_type = other RNA
aaccagtgctctcccccgaatc

SEQ ID NO: 111581 - RNA, 22 nt, synthetic construct
  source 1..22: mol_type = other RNA
aaccagtgggtcagctagtgtg

SEQ ID NO: 111582 - RNA, 22 nt, synthetic construct
  source 1..22: mol_type = other RNA
aaccataatgagtaacatgtgg

SEQ ID NO: 111583 - RNA, 22 nt, synthetic construct
  source 1..22: mol_type = other RNA
aaccatacagtgccttcagcta

SEQ ID NO: 111584 - RNA, 22 nt, synthetic construct
  source 1..22: mol_type = other RNA
aaccatacttttcaactgaaca

SEQ ID NO: 111585 - RNA, 22 nt, synthetic construct
  source 1..22: mol_type = other RNA
aaccatatacaaaactgaactc

SEQ ID NO: 111586 - RNA, 22 nt, synthetic construct
  source 1..22: mol_type = other RNA
aaccatatggttaatagtgacc

SEQ ID NO: 111587 - RNA, 22 nt, synthetic construct
  source 1..22: mol_type = other RNA
aaccatatggtttacaatggtt

SEQ ID NO: 111588 - RNA, 22 nt, synthetic construct
  source 1..22: mol_type = other RNA
aaccatattagagtgaaaagaa

SEQ ID NO: 111589 - RNA, 22 nt, synthetic construct
  source 1..22: mol_type = other RNA
aaccatcaagtgtgatcccaaa

SEQ ID NO: 111590 - RNA, 22 nt, synthetic construct
  source 1..22: mol_type = other RNA
aaccatccccgctgtccatttc

SEQ ID NO: 111591 - RNA, 22 nt, synthetic construct
  source 1..22: mol_type = other RNA
aaccatcctttccttgtcctaa

SEQ ID NO: 111592 - RNA, 22 nt, synthetic construct
  source 1..22: mol_type = other RNA
aaccatcgttcacactcgcact

SEQ ID NO: 111593 - RNA, 22 nt, synthetic construct
  source 1..22: mol_type = other RNA
aaccatcttcttagtgttccct

SEQ ID NO: 111594 - RNA, 22 nt, synthetic construct
  source 1..22: mol_type = other RNA
aaccatgtaacaggtttaataa

SEQ ID NO: 111595 - RNA, 22 nt, synthetic construct
  source 1..22: mol_type = other RNA
aaccatgtcatgtatatgctgt

SEQ ID NO: 111596 - RNA, 22 nt, synthetic construct
  source 1..22: mol_type = other RNA
aaccatgttcatgggaagatgc

SEQ ID NO: 111597 - RNA, 22 nt, synthetic construct
  source 1..22: mol_type = other RNA
aaccattaacagctcagaagct

SEQ ID NO: 111598 - RNA, 22 nt, synthetic construct
  source 1..22: mol_type = other RNA
aaccattactcttctactcact

SEQ ID NO: 111599 - RNA, 22 nt, synthetic construct
  source 1..22: mol_type = other RNA
aaccattgagccaaagaagaaa

SEQ ID NO: 111600 - RNA, 22 nt, synthetic construct
  source 1..22: mol_type = other RNA
aaccattgtaaaccatatggtt

SEQ ID NO: 111601 - RNA, 22 nt, synthetic construct
  source 1..22: mol_type = other RNA
aaccatttaccccttaaattcc

SEQ ID NO: 111602 - RNA, 22 nt, synthetic construct
  source 1..22: mol_type = other RNA
aaccattttcaatcttggaaat

SEQ ID NO: 111603 - RNA, 22 nt, synthetic construct
  source 1..22: mol_type = other RNA
aacccaaattaaaggatgtcaa

SEQ ID NO: 111604 - RNA, 22 nt, synthetic construct
  source 1..22: mol_type = other RNA
aacccaacaaacaattagcacc

SEQ ID NO: 111605 - RNA, 22 nt, synthetic construct
  source 1..22: mol_type = other RNA
aacccaactctttctttgattt

SEQ ID NO: 111606 - RNA, 22 nt, synthetic construct
  source 1..22: mol_type = other RNA
aacccacagataatttcttcag

SEQ ID NO: 111607 - RNA, 22 nt, synthetic construct
  source 1..22: mol_type = other RNA
aacccaccaggaggcggagctt

SEQ ID NO: 111608 - RNA, 22 nt, synthetic construct
  source 1..22: mol_type = other RNA
aacccactgagcatttatataa

SEQ ID NO: 111609 - RNA, 22 nt, synthetic construct
  source 1..22: mol_type = other RNA
aacccagacctgcacaaaggat

SEQ ID NO: 111610 - RNA, 22 nt, synthetic construct
  source 1..22: mol_type = other RNA
aacccaggaacagattcacgca

SEQ ID NO: 111611 - RNA, 22 nt, synthetic construct
  source 1..22: mol_type = other RNA
aacccaggaggcaaaggttgag

SEQ ID NO: 111612 - RNA, 22 nt, synthetic construct
  source 1..22: mol_type = other RNA
aacccagtgtctgctacagggg

SEQ ID NO: 111613 - RNA, 22 nt, synthetic construct
  source 1..22: mol_type = other RNA
aacccatatctttgcttataac

SEQ ID NO: 111614 - RNA, 22 nt, synthetic construct
  source 1..22: mol_type = other RNA
aacccatgatctttggaaatga

SEQ ID NO: 111615 - RNA, 22 nt, synthetic construct
  source 1..22: mol_type = other RNA
aacccattccaggttttatctc

SEQ ID NO: 111616 - RNA, 22 nt, synthetic construct
  source 1..22: mol_type = other RNA
aacccatttcatgccatcctgg

SEQ ID NO: 111617 - RNA, 22 nt, synthetic construct
  source 1..22: mol_type = other RNA
aaccccagaaggttaactaata

SEQ ID NO: 111618 - RNA, 22 nt, synthetic construct
  source 1..22: mol_type = other RNA
aaccccagagattgtcgttgag

SEQ ID NO: 111619 - RNA, 22 nt, synthetic construct
  source 1..22: mol_type = other RNA
aaccccagggatattttcgtgt

SEQ ID NO: 111620 - RNA, 22 nt, synthetic construct
  source 1..22: mol_type = other RNA
aacccccggccctgccgcttcg

SEQ ID NO: 111621 - RNA, 22 nt, synthetic construct
  source 1..22: mol_type = other RNA
aaccccgcatactgtgcagtgg

SEQ ID NO: 111622 - RNA, 22 nt, synthetic construct
  source 1..22: mol_type = other RNA
aacccgaggtgcacaagggaag

SEQ ID NO: 111623 - RNA, 22 nt, synthetic construct
  source 1..22: mol_type = other RNA
aacccgctctgggtgcgttgac

SEQ ID NO: 111624 - RNA, 22 nt, synthetic construct
  source 1..22: mol_type = other RNA
aacccgttttttccttcattta

SEQ ID NO: 111625 - RNA, 22 nt, synthetic construct
  source 1..22: mol_type = other RNA
aaccctacacccatccacccac

SEQ ID NO: 111626 - RNA, 22 nt, synthetic construct
  source 1..22: mol_type = other RNA
aaccctacctagggtgtaaaag

SEQ ID NO: 111627 - RNA, 22 nt, synthetic construct
  source 1..22: mol_type = other RNA
aaccctcaaatgccatagagct

SEQ ID NO: 111628 - RNA, 22 nt, synthetic construct
  source 1..22: mol_type = other RNA
aaccctcaatccccatctggga

SEQ ID NO: 111629 - RNA, 22 nt, synthetic construct
  source 1..22: mol_type = other RNA
aaccctcacgaaagcggtcaac

SEQ ID NO: 111630 - RNA, 22 nt, synthetic construct
  source 1..22: mol_type = other RNA
aaccctcctcctctacaagttt

SEQ ID NO: 111631 - RNA, 22 nt, synthetic construct
  source 1..22: mol_type = other RNA
aaccctcggcctctactgactc

SEQ ID NO: 111632 - RNA, 22 nt, synthetic construct
  source 1..22: mol_type = other RNA
aaccctgtacccattagacact

SEQ ID NO: 111633 - RNA, 22 nt, synthetic construct
  source 1..22: mol_type = other RNA
aaccctgttgggctattaagta

SEQ ID NO: 111634 - RNA, 22 nt, synthetic construct
  source 1..22: mol_type = other RNA
aaccctgtttcccttaatgttg

SEQ ID NO: 111635 - RNA, 22 nt, synthetic construct
  source 1..22: mol_type = other RNA
aaccctgttttgtagattaaaa

SEQ ID NO: 111636 - RNA, 22 nt, synthetic construct
  source 1..22: mol_type = other RNA
aacccttcatcatttgtattat

SEQ ID NO: 111637 - RNA, 22 nt, synthetic construct
  source 1..22: mol_type = other RNA
aacccttggctagactaagaaa

SEQ ID NO: 111638 - RNA, 22 nt, synthetic construct
  source 1..22: mol_type = other RNA
aacccttgggatgcagcaaaag

SEQ ID NO: 111639 - RNA, 22 nt, synthetic construct
  source 1..22: mol_type = other RNA
aacccttgttggacagctggga

SEQ ID NO: 111640 - RNA, 22 nt, synthetic construct
  source 1..22: mol_type = other RNA
aaccctttgttatctgaacgtc

SEQ ID NO: 111641 - RNA, 22 nt, synthetic construct
  source 1..22: mol_type = other RNA
aaccgacagcagataagatcca

SEQ ID NO: 111642 - RNA, 22 nt, synthetic construct
  source 1..22: mol_type = other RNA
aaccgactgaaaggaaatgagt

SEQ ID NO: 111643 - RNA, 22 nt, synthetic construct
  source 1..22: mol_type = other RNA
aaccggaaaatgcttaacaaga

SEQ ID NO: 111644 - RNA, 22 nt, synthetic construct
  source 1..22: mol_type = other RNA
aaccggaacttgagtttgttct

SEQ ID NO: 111645 - RNA, 22 nt, synthetic construct
  source 1..22: mol_type = other RNA
aaccgtaacttcttttcttaaa

SEQ ID NO: 111646 - RNA, 22 nt, synthetic construct
  source 1..22: mol_type = other RNA
aacctaaacctgtgatttccag

SEQ ID NO: 111647 - RNA, 22 nt, synthetic construct
  source 1..22: mol_type = other RNA
aacctaaagttgaggttgaaga

SEQ ID NO: 111648 - RNA, 22 nt, synthetic construct
  source 1..22: mol_type = other RNA
aacctaaatgtccatcgagaga

SEQ ID NO: 111649 - RNA, 22 nt, synthetic construct
  source 1..22: mol_type = other RNA
aacctaacatgtcttggtgtgc

SEQ ID NO: 111650 - RNA, 22 nt, synthetic construct
  source 1..22: mol_type = other RNA
aacctaagaaaggtctagtgtg

SEQ ID NO: 111651 - RNA, 22 nt, synthetic construct
  source 1..22: mol_type = other RNA
aacctactttaaatcagggcct

SEQ ID NO: 111652 - RNA, 22 nt, synthetic construct
  source 1..22: mol_type = other RNA
aacctagaagaaatgggtaaat

SEQ ID NO: 111653 - RNA, 22 nt, synthetic construct
  source 1..22: mol_type = other RNA
aacctataagacccagtggcta

SEQ ID NO: 111654 - RNA, 22 nt, synthetic construct
  source 1..22: mol_type = other RNA
aacctattatttagagtttgca

SEQ ID NO: 111655 - RNA, 22 nt, synthetic construct
  source 1..22: mol_type = other RNA
aacctcaaagtggaaacaactc

SEQ ID NO: 111656 - RNA, 22 nt, synthetic construct
  source 1..22: mol_type = other RNA
aacctcaactttaggttacgta

SEQ ID NO: 111657 - RNA, 22 nt, synthetic construct
  source 1..22: mol_type = other RNA
aacctcaagtcttttcctagac

SEQ ID NO: 111658 - RNA, 22 nt, synthetic construct
  source 1..22: mol_type = other RNA
aacctcataagaactcctggtc

SEQ ID NO: 111659 - RNA, 22 nt, synthetic construct
  source 1..22: mol_type = other RNA
aacctcatttgcagagcaaact

SEQ ID NO: 111660 - RNA, 22 nt, synthetic construct
  source 1..22: mol_type = other RNA
aacctcccaacaggctgagtgc

SEQ ID NO: 111661 - RNA, 22 nt, synthetic construct
  source 1..22: mol_type = other RNA
aacctccgcctccctggttcaa

SEQ ID NO: 111662 - RNA, 22 nt, synthetic construct
  source 1..22: mol_type = other RNA
aacctccgtttttcaggttcaa

SEQ ID NO: 111663 - RNA, 22 nt, synthetic construct
  source 1..22: mol_type = other RNA
aacctcctggttttgatcatcg

SEQ ID NO: 111664 - RNA, 22 nt, synthetic construct
  source 1..22: mol_type = other RNA
aacctctggaaaggacttgatc

SEQ ID NO: 111665 - RNA, 22 nt, synthetic construct
  source 1..22: mol_type = other RNA
aacctctggtattttaagattc

SEQ ID NO: 111666 - RNA, 22 nt, synthetic construct
  source 1..22: mol_type = other RNA
aacctcttgaagtcagttacag

SEQ ID NO: 111667 - RNA, 22 nt, synthetic construct
  source 1..22: mol_type = other RNA
aacctgaaaaacggaggttgca

SEQ ID NO: 111668 - RNA, 22 nt, synthetic construct
  source 1..22: mol_type = other RNA
aacctgaaatggcttaaggaaa

SEQ ID NO: 111669 - RNA, 22 nt, synthetic construct
  source 1..22: mol_type = other RNA
aacctgaggtctttaaaagaaa

SEQ ID NO: 111670 - RNA, 22 nt, synthetic construct
  source 1..22: mol_type = other RNA
aacctgattagaggctgcaccc

SEQ ID NO: 111671 - RNA, 22 nt, synthetic construct
  source 1..22: mol_type = other RNA
aacctgcaggtatttctaaatc

SEQ ID NO: 111672 - RNA, 22 nt, synthetic construct
  source 1..22: mol_type = other RNA
aacctgcatggtgtaaaataca

SEQ ID NO: 111673 - RNA, 22 nt, synthetic construct
  source 1..22: mol_type = other RNA
aacctgccatggtgttaaatat

SEQ ID NO: 111674 - RNA, 22 nt, synthetic construct
  source 1..22: mol_type = other RNA
aacctgctacgaatgaactcct

SEQ ID NO: 111675 - RNA, 22 nt, synthetic construct
  source 1..22: mol_type = other RNA
aacctgctttcctcatgtccat

SEQ ID NO: 111676 - RNA, 22 nt, synthetic construct
  source 1..22: mol_type = other RNA
aacctgctttctactagtataa

SEQ ID NO: 111677 - RNA, 22 nt, synthetic construct
  source 1..22: mol_type = other RNA
aacctggaatcctctaccaaaa

SEQ ID NO: 111678 - RNA, 22 nt, synthetic construct
  source 1..22: mol_type = other RNA
aacctggaatgggttggaggag

SEQ ID NO: 111679 - RNA, 22 nt, synthetic construct
  source 1..22: mol_type = other RNA
aacctggcaatactctcagaaa

SEQ ID NO: 111680 - RNA, 22 nt, synthetic construct
  source 1..22: mol_type = other RNA
aacctggtaataatgaaagctc

SEQ ID NO: 111681 - RNA, 22 nt, synthetic construct
  source 1..22: mol_type = other RNA
aacctggtatgagtgtttccct

SEQ ID NO: 111682 - RNA, 22 nt, synthetic construct
  source 1..22: mol_type = other RNA
aacctgtgatttccagtgtttg

SEQ ID NO: 111683 - RNA, 22 nt, synthetic construct
  source 1..22: mol_type = other RNA
aacctgttacatggttctgtgc

SEQ ID NO: 111684 - RNA, 22 nt, synthetic construct
  source 1..22: mol_type = other RNA
aacctgttcatttgagaatttc

SEQ ID NO: 111685 - RNA, 22 nt, synthetic construct
  source 1..22: mol_type = other RNA
aaccttaaaagagtgaaatgat

SEQ ID NO: 111686 - RNA, 22 nt, synthetic construct
  source 1..22: mol_type = other RNA
aaccttagaaatttaaggacca

SEQ ID NO: 111687 - RNA, 22 nt, synthetic construct
  source 1..22: mol_type = other RNA
aaccttcaccaaagatttacta

SEQ ID NO: 111688 - RNA, 22 nt, synthetic construct
  source 1..22: mol_type = other RNA
aaccttcctcttcctcatccct

SEQ ID NO: 111689 - RNA, 22 nt, synthetic construct
  source 1..22: mol_type = other RNA
aaccttctggggttcaaaccac

SEQ ID NO: 111690 - RNA, 22 nt, synthetic construct
  source 1..22: mol_type = other RNA
aaccttcttatttccttccagt

SEQ ID NO: 111691 - RNA, 22 nt, synthetic construct
  source 1..22: mol_type = other RNA
aaccttgaagtacttcagcgct

SEQ ID NO: 111692 - RNA, 22 nt, synthetic construct
  source 1..22: mol_type = other RNA
aaccttgggagaaaatttttac

SEQ ID NO: 111693 - RNA, 22 nt, synthetic construct
  source 1..22: mol_type = other RNA
aaccttggtgtgcttctgatag

SEQ ID NO: 111694 - RNA, 22 nt, synthetic construct
  source 1..22: mol_type = other RNA
aacctttaagttctccaagtta

SEQ ID NO: 111695 - RNA, 22 nt, synthetic construct
  source 1..22: mol_type = other RNA
aacctttctcaaagcccaccag

SEQ ID NO: 111696 - RNA, 22 nt, synthetic construct
  source 1..22: mol_type = other RNA
aacctttgcctcctgggttcag

SEQ ID NO: 111697 - RNA, 22 nt, synthetic construct
  source 1..22: mol_type = other RNA
aacctttgtccactgtcagtgg

SEQ ID NO: 111698 - RNA, 22 nt, synthetic construct
  source 1..22: mol_type = other RNA
aacctttgttgaaaacgaggaa

SEQ ID NO: 111699 - RNA, 22 nt, synthetic construct
  source 1..22: mol_type = other RNA
aaccttttaggtgccccactcc

SEQ ID NO: 111700 - RNA, 22 nt, synthetic construct
  source 1..22: mol_type = other RNA
aaccttttgtagaccctgttag

SEQ ID NO: 111701 - RNA, 22 nt, synthetic construct
  source 1..22: mol_type = other RNA
aacctttttgggatctgtcatg

SEQ ID NO: 111702 - RNA, 22 nt, synthetic construct
  source 1..22: mol_type = other RNA
aaccttttttaaggaaaagtca

SEQ ID NO: 111703 - RNA, 22 nt, synthetic construct
  source 1..22: mol_type = other RNA
aacgaaccaattaccataaagt

SEQ ID NO: 111704 - RNA, 22 nt, synthetic construct
  source 1..22: mol_type = other RNA
aacgaatgaaaacacaacatac

SEQ ID NO: 111705 - RNA, 22 nt, synthetic construct
  source 1..22: mol_type = other RNA
aacgaattctttaaaactgctg

SEQ ID NO: 111706 - RNA, 22 nt, synthetic construct
  source 1..22: mol_type = other RNA
aacgacaatctctggggttagg

SEQ ID NO: 111707 - RNA, 22 nt, synthetic construct
  source 1..22: mol_type = other RNA
aacgacaccagaactacacatt

SEQ ID NO: 111708 - RNA, 22 nt, synthetic construct
  source 1..22: mol_type = other RNA
aacgacagcaggaaaagctacc

SEQ ID NO: 111709 - RNA, 22 nt, synthetic construct
  source 1..22: mol_type = other RNA
aacgaccggacgtggtggctca

SEQ ID NO: 111710 - RNA, 22 nt, synthetic construct
  source 1..22: mol_type = other RNA
aacgaccttgctcattcatctg

SEQ ID NO: 111711 - RNA, 22 nt, synthetic construct
  source 1..22: mol_type = other RNA
aacgagaacaaaacaagaagaa

SEQ ID NO: 111712 - RNA, 22 nt, synthetic construct
  source 1..22: mol_type = other RNA
aacgaggaaaagagaacattgg

SEQ ID NO: 111713 - RNA, 22 nt, synthetic construct
  source 1..22: mol_type = other RNA
aacgatagtctcctatattgtc

SEQ ID NO: 111714 - RNA, 22 nt, synthetic construct
  source 1..22: mol_type = other RNA
aacgatccttactaccaccact

SEQ ID NO: 111715 - RNA, 22 nt, synthetic construct
  source 1..22: mol_type = other RNA
aacgatgcattccagattgaaa

SEQ ID NO: 111716 - RNA, 22 nt, synthetic construct
  source 1..22: mol_type = other RNA
aacgatggtttctgacacccga

SEQ ID NO: 111717 - RNA, 22 nt, synthetic construct
  source 1..22: mol_type = other RNA
aacgatttcttaaaaatgacac

SEQ ID NO: 111718 - RNA, 22 nt, synthetic construct
  source 1..22: mol_type = other RNA
aacgcacccagagcgggtttcc

SEQ ID NO: 111719 - RNA, 22 nt, synthetic construct
  source 1..22: mol_type = other RNA
aacgcattgtgatgtctcagat

SEQ ID NO: 111720 - RNA, 22 nt, synthetic construct
  source 1..22: mol_type = other RNA
aacgcggaatgaagcaggcctt

SEQ ID NO: 111721 - RNA, 22 nt, synthetic construct
  source 1..22: mol_type = other RNA
aacgcggcacttggtaagctgt

SEQ ID NO: 111722 - RNA, 22 nt, synthetic construct
  source 1..22: mol_type = other RNA
aacgctaaattaaaggctggaa

SEQ ID NO: 111723 - RNA, 22 nt, synthetic construct
  source 1..22: mol_type = other RNA
aacgctgtggctaacaatcaaa

SEQ ID NO: 111724 - RNA, 22 nt, synthetic construct
  source 1..22: mol_type = other RNA
aacgctttttatggaaacatgg

SEQ ID NO: 111725 - RNA, 22 nt, synthetic construct
  source 1..22: mol_type = other RNA
aacggaaactttatacctgttg

SEQ ID NO: 111726 - RNA, 22 nt, synthetic construct
  source 1..22: mol_type = other RNA
aacggaaatgagtgagccacag

SEQ ID NO: 111727 - RNA, 22 nt, synthetic construct
  source 1..22: mol_type = other RNA
aacggacatttttccaaagata

SEQ ID NO: 111728 - RNA, 22 nt, synthetic construct
  source 1..22: mol_type = other RNA
aacggaggttgcagtaagccga

SEQ ID NO: 111729 - RNA, 22 nt, synthetic construct
  source 1..22: mol_type = other RNA
aacggcttaacacctttgtatt

SEQ ID NO: 111730 - RNA, 22 nt, synthetic construct
  source 1..22: mol_type = other RNA
aacgggttatacacacataagg

SEQ ID NO: 111731 - RNA, 22 nt, synthetic construct
  source 1..22: mol_type = other RNA
aacgtatctgggaaaaaataag

SEQ ID NO: 111732 - RNA, 22 nt, synthetic construct
  source 1..22: mol_type = other RNA
aacgtcagagcagcactgatgt

SEQ ID NO: 111733 - RNA, 22 nt, synthetic construct
  source 1..22: mol_type = other RNA
aacgtccatcaacagcagaaca

SEQ ID NO: 111734 - RNA, 22 nt, synthetic construct
  source 1..22: mol_type = other RNA
aacgtgagctggaagtaaggat

SEQ ID NO: 111735 - RNA, 22 nt, synthetic construct
  source 1..22: mol_type = other RNA
aacgtgcaaactaccaagactg

SEQ ID NO: 111736 - RNA, 22 nt, synthetic construct
  source 1..22: mol_type = other RNA
aacgtgcacacccagttatctc

SEQ ID NO: 111737 - RNA, 22 nt, synthetic construct
  source 1..22: mol_type = other RNA
aacgtgcttgctctgcggcagg

SEQ ID NO: 111738 - RNA, 22 nt, synthetic construct
  source 1..22: mol_type = other RNA
aacgtgctttccttattgagaa

SEQ ID NO: 111739 - RNA, 22 nt, synthetic construct
  source 1..22: mol_type = other RNA
aacgtgtgtgtaagcacacatg

SEQ ID NO: 111740 - RNA, 22 nt, synthetic construct
  source 1..22: mol_type = other RNA
aacgtttatctacagaggattt

SEQ ID NO: 111741 - RNA, 22 nt, synthetic construct
  source 1..22: mol_type = other RNA
aacgtttggtgactgaattccc

SEQ ID NO: 111742 - RNA, 22 nt, synthetic construct
  source 1..22: mol_type = other RNA
aactaaactttgagtagcaccc

SEQ ID NO: 111743 - RNA, 22 nt, synthetic construct
  source 1..22: mol_type = other RNA
aactaaatgtgagcatttagcc

SEQ ID NO: 111744 - RNA, 22 nt, synthetic construct
  source 1..22: mol_type = other RNA
aactaacaaagaacaggaaggg

SEQ ID NO: 111745 - RNA, 22 nt, synthetic construct
  source 1..22: mol_type = other RNA
aactaactagaaaaccgacagc

SEQ ID NO: 111746 - RNA, 22 nt, synthetic construct
  source 1..22: mol_type = other RNA
aactaagaccccagtagaaatc

SEQ ID NO: 111747 - RNA, 22 nt, synthetic construct
  source 1..22: mol_type = other RNA
aactaaggaaagctcaggacca

SEQ ID NO: 111748 - RNA, 22 nt, synthetic construct
  source 1..22: mol_type = other RNA
aactaaggtcaagagagattaa

SEQ ID NO: 111749 - RNA, 22 nt, synthetic construct
  source 1..22: mol_type = other RNA
aactaagtggtattctatcatc

SEQ ID NO: 111750 - RNA, 22 nt, synthetic construct
  source 1..22: mol_type = other RNA
aactaagtgtgaagattaagca

SEQ ID NO: 111751 - RNA, 22 nt, synthetic construct
  source 1..22: mol_type = other RNA
aactaataattgcttttgctga

SEQ ID NO: 111752 - RNA, 22 nt, synthetic construct
  source 1..22: mol_type = other RNA
aactaatagccagtgcagcaag

SEQ ID NO: 111753 - RNA, 22 nt, synthetic construct
  source 1..22: mol_type = other RNA
aactaatcaaacataccccaac

SEQ ID NO: 111754 - RNA, 22 nt, synthetic construct
  source 1..22: mol_type = other RNA
aactaatgagaatttcagaaag

SEQ ID NO: 111755 - RNA, 22 nt, synthetic construct
  source 1..22: mol_type = other RNA
aactaattactgtttcttagct

SEQ ID NO: 111756 - RNA, 22 nt, synthetic construct
  source 1..22: mol_type = other RNA
aactaatttcatacaagttgtg

SEQ ID NO: 111757 - RNA, 22 nt, synthetic construct
  source 1..22: mol_type = other RNA
aactacaattactgtacaaaga

SEQ ID NO: 111758 - RNA, 22 nt, synthetic construct
  source 1..22: mol_type = other RNA
aactacacagacatgaacaatc

SEQ ID NO: 111759 - RNA, 22 nt, synthetic construct
  source 1..22: mol_type = other RNA
aactacacatcagtgctgctct

SEQ ID NO: 111760 - RNA, 22 nt, synthetic construct
  source 1..22: mol_type = other RNA
aactacacattccagaccagca

SEQ ID NO: 111761 - RNA, 22 nt, synthetic construct
  source 1..22: mol_type = other RNA
aactacagacatgccacaccac

SEQ ID NO: 111762 - RNA, 22 nt, synthetic construct
  source 1..22: mol_type = other RNA
aactacaggcaacaaaagaaaa

SEQ ID NO: 111763 - RNA, 22 nt, synthetic construct
  source 1..22: mol_type = other RNA
aactacagtgtttagggacgaa

SEQ ID NO: 111764 - RNA, 22 nt, synthetic construct
  source 1..22: mol_type = other RNA
aactacatgtaaaaactgtttg

SEQ ID NO: 111765 - RNA, 22 nt, synthetic construct
  source 1..22: mol_type = other RNA
aactaccactgaggtcaagaaa

SEQ ID NO: 111766 - RNA, 22 nt, synthetic construct
  source 1..22: mol_type = other RNA
aactacctagaaaaacaccaaa

SEQ ID NO: 111767 - RNA, 22 nt, synthetic construct
  source 1..22: mol_type = other RNA
aactactatttcgcaaagcaac

SEQ ID NO: 111768 - RNA, 22 nt, synthetic construct
  source 1..22: mol_type = other RNA
aactactgatagcgaaaggtac

SEQ ID NO: 111769 - RNA, 22 nt, synthetic construct
  source 1..22: mol_type = other RNA
aactacttcgtgtgtggagtgg

SEQ ID NO: 111770 - RNA, 22 nt, synthetic construct
  source 1..22: mol_type = other RNA
aactagaaaaccgacagcagat

SEQ ID NO: 111771 - RNA, 22 nt, synthetic construct
  source 1..22: mol_type = other RNA
aactagaaaagataagtagaag

SEQ ID NO: 111772 - RNA, 22 nt, synthetic construct
  source 1..22: mol_type = other RNA
aactagaaacttcttctgttgg

SEQ ID NO: 111773 - RNA, 22 nt, synthetic construct
  source 1..22: mol_type = other RNA
aactagaactgtgttacattgc

SEQ ID NO: 111774 - RNA, 22 nt, synthetic construct
  source 1..22: mol_type = other RNA
aactagaatactccaccagcat

SEQ ID NO: 111775 - RNA, 22 nt, synthetic construct
  source 1..22: mol_type = other RNA
aactagaattgactttaccctg

SEQ ID NO: 111776 - RNA, 22 nt, synthetic construct
  source 1..22: mol_type = other RNA
aactagagaaagcatcagagct

SEQ ID NO: 111777 - RNA, 22 nt, synthetic construct
  source 1..22: mol_type = other RNA
aactagagatgggaaagtattc

SEQ ID NO: 111778 - RNA, 22 nt, synthetic construct
  source 1..22: mol_type = other RNA
aactagatgcctcgaaggcctg

SEQ ID NO: 111779 - RNA, 22 nt, synthetic construct
  source 1..22: mol_type = other RNA
aactagattaccttgaagttta

SEQ ID NO: 111780 - RNA, 22 nt, synthetic construct
  source 1..22: mol_type = other RNA
aactaggctgtcccaaatgcac

SEQ ID NO: 111781 - RNA, 22 nt, synthetic construct
  source 1..22: mol_type = other RNA
aactaggtatttgaaaaatgtc

SEQ ID NO: 111782 - RNA, 22 nt, synthetic construct
  source 1..22: mol_type = other RNA
aactagtaagtaaaatcggaac

SEQ ID NO: 111783 - RNA, 22 nt, synthetic construct
  source 1..22: mol_type = other RNA
aactagtatcaacctgcaggta

SEQ ID NO: 111784 - RNA, 22 nt, synthetic construct
  source 1..22: mol_type = other RNA
aactatacttcaatgctacagt

SEQ ID NO: 111785 - RNA, 22 nt, synthetic construct
  source 1..22: mol_type = other RNA
aactatagacccaaagcaaaag

SEQ ID NO: 111786 - RNA, 22 nt, synthetic construct
  source 1..22: mol_type = other RNA
aactataggagttcattcgtag

SEQ ID NO: 111787 - RNA, 22 nt, synthetic construct
  source 1..22: mol_type = other RNA
aactatcaaaacacttctgtga

SEQ ID NO: 111788 - RNA, 22 nt, synthetic construct
  source 1..22: mol_type = other RNA
aactatccaacatgccagcttt

SEQ ID NO: 111789 - RNA, 22 nt, synthetic construct
  source 1..22: mol_type = other RNA
aactatcctatgtggggaatgc

SEQ ID NO: 111790 - RNA, 22 nt, synthetic construct
  source 1..22: mol_type = other RNA
aactatggacatgaggaaagca

SEQ ID NO: 111791 - RNA, 22 nt, synthetic construct
  source 1..22: mol_type = other RNA
aactattccataagatctgtct

SEQ ID NO: 111792 - RNA, 22 nt, synthetic construct
  source 1..22: mol_type = other RNA
aactatttctctttaaagctga

SEQ ID NO: 111793 - RNA, 22 nt, synthetic construct
  source 1..22: mol_type = other RNA
aactcaaaagtgaatcactaca

SEQ ID NO: 111794 - RNA, 22 nt, synthetic construct
  source 1..22: mol_type = other RNA
aactcaaaatggatcaaagacc

SEQ ID NO: 111795 - RNA, 22 nt, synthetic construct
  source 1..22: mol_type = other RNA
aactcaaacccaaattaaagga

SEQ ID NO: 111796 - RNA, 22 nt, synthetic construct
  source 1..22: mol_type = other RNA
aactcaaacgtccatcaacagc

SEQ ID NO: 111797 - RNA, 22 nt, synthetic construct
  source 1..22: mol_type = other RNA
aactcaacattcattcatgaca

SEQ ID NO: 111798 - RNA, 22 nt, synthetic construct
  source 1..22: mol_type = other RNA
aactcaactgcctctacatcac

SEQ ID NO: 111799 - RNA, 22 nt, synthetic construct
  source 1..22: mol_type = other RNA
aactcaagagttacttctggaa

SEQ ID NO: 111800 - RNA, 22 nt, synthetic construct
  source 1..22: mol_type = other RNA
aactcaagttccggttctcagg

SEQ ID NO: 111801 - RNA, 22 nt, synthetic construct
  source 1..22: mol_type = other RNA
aactcaatgttggttagtgttg

SEQ ID NO: 111802 - RNA, 22 nt, synthetic construct
  source 1..22: mol_type = other RNA
aactcacaaaaagtgtgaccac

SEQ ID NO: 111803 - RNA, 22 nt, synthetic construct
  source 1..22: mol_type = other RNA
aactcactggccagcattactt

SEQ ID NO: 111804 - RNA, 22 nt, synthetic construct
  source 1..22: mol_type = other RNA
aactcacttattagcaaagagg

SEQ ID NO: 111805 - RNA, 22 nt, synthetic construct
  source 1..22: mol_type = other RNA
aactcagatctgagagatagaa

SEQ ID NO: 111806 - RNA, 22 nt, synthetic construct
  source 1..22: mol_type = other RNA
aactcatattagtctgtagctt

SEQ ID NO: 111807 - RNA, 22 nt, synthetic construct
  source 1..22: mol_type = other RNA
aactcattatcccagacagata

SEQ ID NO: 111808 - RNA, 22 nt, synthetic construct
  source 1..22: mol_type = other RNA
aactcatttaaacgtcagagca

SEQ ID NO: 111809 - RNA, 22 nt, synthetic construct
  source 1..22: mol_type = other RNA
aactcatttctgcttgaatgtg

SEQ ID NO: 111810 - RNA, 22 nt, synthetic construct
  source 1..22: mol_type = other RNA
aactccaaacctttaagttctc

SEQ ID NO: 111811 - RNA, 22 nt, synthetic construct
  source 1..22: mol_type = other RNA
aactccaacaattcaacaatag

SEQ ID NO: 111812 - RNA, 22 nt, synthetic construct
  source 1..22: mol_type = other RNA
aactccaagtctcatgcaattc

SEQ ID NO: 111813 - RNA, 22 nt, synthetic construct
  source 1..22: mol_type = other RNA
aactccaagtgtaaaaagacat

SEQ ID NO: 111814 - RNA, 22 nt, synthetic construct
  source 1..22: mol_type = other RNA
aactccacattgtcttaattat

SEQ ID NO: 111815 - RNA, 22 nt, synthetic construct
  source 1..22: mol_type = other RNA
aactccacctcagaaacaaaca

SEQ ID NO: 111816 - RNA, 22 nt, synthetic construct
  source 1..22: mol_type = other RNA
aactccagcttttattagagct

SEQ ID NO: 111817 - RNA, 22 nt, synthetic construct
  source 1..22: mol_type = other RNA
aactccaggggacatgctctga

SEQ ID NO: 111818 - RNA, 22 nt, synthetic construct
  source 1..22: mol_type = other RNA
aactccatcttcacgtggcgct

SEQ ID NO: 111819 - RNA, 22 nt, synthetic construct
  source 1..22: mol_type = other RNA
aactcccagaactcgaagcctt

SEQ ID NO: 111820 - RNA, 22 nt, synthetic construct
  source 1..22: mol_type = other RNA
aactccccatgcaggagaaaca

SEQ ID NO: 111821 - RNA, 22 nt, synthetic construct
  source 1..22: mol_type = other RNA
aactcctatagttaagtctgaa

SEQ ID NO: 111822 - RNA, 22 nt, synthetic construct
  source 1..22: mol_type = other RNA
aactcctgaacaaaatttttgc

SEQ ID NO: 111823 - RNA, 22 nt, synthetic construct
  source 1..22: mol_type = other RNA
aactcctgacctcaagcgatcc

SEQ ID NO: 111824 - RNA, 22 nt, synthetic construct
  source 1..22: mol_type = other RNA
aactcctgcactcaagcaatcc

SEQ ID NO: 111825 - RNA, 22 nt, synthetic construct
  source 1..22: mol_type = other RNA
aactcctgggctcatctaagcc

SEQ ID NO: 111826 - RNA, 22 nt, synthetic construct
  source 1..22: mol_type = other RNA
aactcctggtctcccagcatga

SEQ ID NO: 111827 - RNA, 22 nt, synthetic construct
  source 1..22: mol_type = other RNA
aactcctgtatgccgctggtga

SEQ ID NO: 111828 - RNA, 22 nt, synthetic construct
  source 1..22: mol_type = other RNA
aactcctgttctttggagctgt

SEQ ID NO: 111829 - RNA, 22 nt, synthetic construct
  source 1..22: mol_type = other RNA
aactcctttcttaccctcacag

SEQ ID NO: 111830 - RNA, 22 nt, synthetic construct
  source 1..22: mol_type = other RNA
aactcgaagccttcccctgctg

SEQ ID NO: 111831 - RNA, 22 nt, synthetic construct
  source 1..22: mol_type = other RNA
aactcgtaatgcgatgatcaaa

SEQ ID NO: 111832 - RNA, 22 nt, synthetic construct
  source 1..22: mol_type = other RNA
aactcgtggcctcaagcagtcc

SEQ ID NO: 111833 - RNA, 22 nt, synthetic construct
  source 1..22: mol_type = other RNA
aactctaataacagcctaagca

SEQ ID NO: 111834 - RNA, 22 nt, synthetic construct
  source 1..22: mol_type = other RNA
aactctattttcctaaaactcc

SEQ ID NO: 111835 - RNA, 22 nt, synthetic construct
  source 1..22: mol_type = other RNA
aactctcgacctcgtgatctgc

SEQ ID NO: 111836 - RNA, 22 nt, synthetic construct
  source 1..22: mol_type = other RNA
aactctgaccattgtgtggaca

SEQ ID NO: 111837 - RNA, 22 nt, synthetic construct
  source 1..22: mol_type = other RNA
aactctggcaggtcacctagcc

SEQ ID NO: 111838 - RNA, 22 nt, synthetic construct
  source 1..22: mol_type = other RNA
aactctggctcagaaacaacaa

SEQ ID NO: 111839 - RNA, 22 nt, synthetic construct
  source 1..22: mol_type = other RNA
aactctgtcatggtgtgtctgc

SEQ ID NO: 111840 - RNA, 22 nt, synthetic construct
  source 1..22: mol_type = other RNA
aactctgtggagtcctgtcagt

SEQ ID NO: 111841 - RNA, 22 nt, synthetic construct
  source 1..22: mol_type = other RNA
aactctgtttccttaccagtgc

SEQ ID NO: 111842 - RNA, 22 nt, synthetic construct
  source 1..22: mol_type = other RNA
aactcttagcttagaagaagac

SEQ ID NO: 111843 - RNA, 22 nt, synthetic construct
  source 1..22: mol_type = other RNA
aactcttccttatccgataaag

SEQ ID NO: 111844 - RNA, 22 nt, synthetic construct
  source 1..22: mol_type = other RNA
aactcttctccaaggaaagtgt

SEQ ID NO: 111845 - RNA, 22 nt, synthetic construct
  source 1..22: mol_type = other RNA
aactcttgagttaggaatttac

SEQ ID NO: 111846 - RNA, 22 nt, synthetic construct
  source 1..22: mol_type = other RNA
aactcttgcattagagccccaa

SEQ ID NO: 111847 - RNA, 22 nt, synthetic construct
  source 1..22: mol_type = other RNA
aactcttgcggtcttttagcca

SEQ ID NO: 111848 - RNA, 22 nt, synthetic construct
  source 1..22: mol_type = other RNA
aactcttggccattttctttta

SEQ ID NO: 111849 - RNA, 22 nt, synthetic construct
  source 1..22: mol_type = other RNA
aactcttgtagtatttttgcaa

SEQ ID NO: 111850 - RNA, 22 nt, synthetic construct
  source 1..22: mol_type = other RNA
aactgaaagcagggactcccat

SEQ ID NO: 111851 - RNA, 22 nt, synthetic construct
  source 1..22: mol_type = other RNA
aactgaaataatttggttatgc

SEQ ID NO: 111852 - RNA, 22 nt, synthetic construct
  source 1..22: mol_type = other RNA
aactgaaatcgggagtaacaga

SEQ ID NO: 111853 - RNA, 22 nt, synthetic construct
  source 1..22: mol_type = other RNA
aactgaacaacgctgtggctaa

SEQ ID NO: 111854 - RNA, 22 nt, synthetic construct
  source 1..22: mol_type = other RNA
aactgaacatgtatgtttctca

SEQ ID NO: 111855 - RNA, 22 nt, synthetic construct
  source 1..22: mol_type = other RNA
aactgaacatttatacagttgg

SEQ ID NO: 111856 - RNA, 22 nt, synthetic construct
  source 1..22: mol_type = other RNA
aactgaactacagtgtttaggg

SEQ ID NO: 111857 - RNA, 22 nt, synthetic construct
  source 1..22: mol_type = other RNA
aactgaactcaaaatggatcaa

SEQ ID NO: 111858 - RNA, 22 nt, synthetic construct
  source 1..22: mol_type = other RNA
aactgaagcggggctgccacta

SEQ ID NO: 111859 - RNA, 22 nt, synthetic construct
  source 1..22: mol_type = other RNA
aactgaagtaataaagcaagta

SEQ ID NO: 111860 - RNA, 22 nt, synthetic construct
  source 1..22: mol_type = other RNA
aactgaagtttatcagtctcca

SEQ ID NO: 111861 - RNA, 22 nt, synthetic construct
  source 1..22: mol_type = other RNA
aactgaatcagacaacacatta

SEQ ID NO: 111862 - RNA, 22 nt, synthetic construct
  source 1..22: mol_type = other RNA
aactgacaggactccacagagt

SEQ ID NO: 111863 - RNA, 22 nt, synthetic construct
  source 1..22: mol_type = other RNA
aactgactctaaagtctatgct

SEQ ID NO: 111864 - RNA, 22 nt, synthetic construct
  source 1..22: mol_type = other RNA
aactgactgaaggattcctccc

SEQ ID NO: 111865 - RNA, 22 nt, synthetic construct
  source 1..22: mol_type = other RNA
aactgacttacagaccttattc

SEQ ID NO: 111866 - RNA, 22 nt, synthetic construct
  source 1..22: mol_type = other RNA
aactgacttcaagaggttaaaa

SEQ ID NO: 111867 - RNA, 22 nt, synthetic construct
  source 1..22: mol_type = other RNA
aactgagaagagctgtaacaga

SEQ ID NO: 111868 - RNA, 22 nt, synthetic construct
  source 1..22: mol_type = other RNA
aactgagaccggatgaggtggc

SEQ ID NO: 111869 - RNA, 22 nt, synthetic construct
  source 1..22: mol_type = other RNA
aactgagcatcccagaggtact

SEQ ID NO: 111870 - RNA, 22 nt, synthetic construct
  source 1..22: mol_type = other RNA
aactgaggcagagtagagaagg

SEQ ID NO: 111871 - RNA, 22 nt, synthetic construct
  source 1..22: mol_type = other RNA
aactgaggtgtttttcagccct

SEQ ID NO: 111872 - RNA, 22 nt, synthetic construct
  source 1..22: mol_type = other RNA
aactgatatgagggatgaggaa

SEQ ID NO: 111873 - RNA, 22 nt, synthetic construct
  source 1..22: mol_type = other RNA
aactgatgtgaggatctgttgg

SEQ ID NO: 111874 - RNA, 22 nt, synthetic construct
  source 1..22: mol_type = other RNA
aactgcaaaactttcttcaaaa

SEQ ID NO: 111875 - RNA, 22 nt, synthetic construct
  source 1..22: mol_type = other RNA
aactgcagaatgacagaaaata

SEQ ID NO: 111876 - RNA, 22 nt, synthetic construct
  source 1..22: mol_type = other RNA
aactgcagaggtcaggaaggca

SEQ ID NO: 111877 - RNA, 22 nt, synthetic construct
  source 1..22: mol_type = other RNA
aactgcagcaattatttgaata

SEQ ID NO: 111878 - RNA, 22 nt, synthetic construct
  source 1..22: mol_type = other RNA
aactgcagtctgtcctcgtaaa

SEQ ID NO: 111879 - RNA, 22 nt, synthetic construct
  source 1..22: mol_type = other RNA
aactgcatcttcttttacttgc

SEQ ID NO: 111880 - RNA, 22 nt, synthetic construct
  source 1..22: mol_type = other RNA
aactgccaaaccctacacccat

SEQ ID NO: 111881 - RNA, 22 nt, synthetic construct
  source 1..22: mol_type = other RNA
aactgcctaagtaatgctggcc

SEQ ID NO: 111882 - RNA, 22 nt, synthetic construct
  source 1..22: mol_type = other RNA
aactgcctctacatcacagaca

SEQ ID NO: 111883 - RNA, 22 nt, synthetic construct
  source 1..22: mol_type = other RNA
aactgcctggacccgggaggca

SEQ ID NO: 111884 - RNA, 22 nt, synthetic construct
  source 1..22: mol_type = other RNA
aactgcgtggtttattcatata

SEQ ID NO: 111885 - RNA, 22 nt, synthetic construct
  source 1..22: mol_type = other RNA
aactgctaatggtccttgctga

SEQ ID NO: 111886 - RNA, 22 nt, synthetic construct
  source 1..22: mol_type = other RNA
aactgctcataatagtctcacg

SEQ ID NO: 111887 - RNA, 22 nt, synthetic construct
  source 1..22: mol_type = other RNA
aactgctcctctgactttatgg

SEQ ID NO: 111888 - RNA, 22 nt, synthetic construct
  source 1..22: mol_type = other RNA
aactgctgacagattaaatacc

SEQ ID NO: 111889 - RNA, 22 nt, synthetic construct
  source 1..22: mol_type = other RNA
aactgctgagtcttctactgtg

SEQ ID NO: 111890 - RNA, 22 nt, synthetic construct
  source 1..22: mol_type = other RNA
aactgctggatcatatagtaat

SEQ ID NO: 111891 - RNA, 22 nt, synthetic construct
  source 1..22: mol_type = other RNA
aactgctggtctggaatgtgta

SEQ ID NO: 111892 - RNA, 22 nt, synthetic construct
  source 1..22: mol_type = other RNA
aactgcttccctagcccagcac

SEQ ID NO: 111893 - RNA, 22 nt, synthetic construct
  source 1..22: mol_type = other RNA
aactggaaggaaataagaaggt

SEQ ID NO: 111894 - RNA, 22 nt, synthetic construct
  source 1..22: mol_type = other RNA
aactggaatcaatccagacagc

SEQ ID NO: 111895 - RNA, 22 nt, synthetic construct
  source 1..22: mol_type = other RNA
aactggaattcatcaaagttaa

SEQ ID NO: 111896 - RNA, 22 nt, synthetic construct
  source 1..22: mol_type = other RNA
aactggagtgcagtggtgcaat

SEQ ID NO: 111897 - RNA, 22 nt, synthetic construct
  source 1..22: mol_type = other RNA
aactggatgaatacaaaggtgt

SEQ ID NO: 111898 - RNA, 22 nt, synthetic construct
  source 1..22: mol_type = other RNA
aactggcaatcaaatggccttc

SEQ ID NO: 111899 - RNA, 22 nt, synthetic construct
  source 1..22: mol_type = other RNA
aactggcccctccatggaaact

SEQ ID NO: 111900 - RNA, 22 nt, synthetic construct
  source 1..22: mol_type = other RNA
aactgggacttctagcctccag

SEQ ID NO: 111901 - RNA, 22 nt, synthetic construct
  source 1..22: mol_type = other RNA
aactgggagaatggcaaggcta

SEQ ID NO: 111902 - RNA, 22 nt, synthetic construct
  source 1..22: mol_type = other RNA
aactggggcttgaacccgaggt

SEQ ID NO: 111903 - RNA, 22 nt, synthetic construct
  source 1..22: mol_type = other RNA
aactgggggctggacataaggg

SEQ ID NO: 111904 - RNA, 22 nt, synthetic construct
  source 1..22: mol_type = other RNA
aactgggtgtagggggaaaact

SEQ ID NO: 111905 - RNA, 22 nt, synthetic construct
  source 1..22: mol_type = other RNA
aactgggtgtgcacgtttgctt

SEQ ID NO: 111906 - RNA, 22 nt, synthetic construct
  source 1..22: mol_type = other RNA
aactggtccagatgaagcaggg

SEQ ID NO: 111907 - RNA, 22 nt, synthetic construct
  source 1..22: mol_type = other RNA
aactggtctcctttctatactt

SEQ ID NO: 111908 - RNA, 22 nt, synthetic construct
  source 1..22: mol_type = other RNA
aactggtgaactgggtgtaggg

SEQ ID NO: 111909 - RNA, 22 nt, synthetic construct
  source 1..22: mol_type = other RNA
aactggtgcttttttggtgttt

SEQ ID NO: 111910 - RNA, 22 nt, synthetic construct
  source 1..22: mol_type = other RNA
aactggtttctgcatacttagc

SEQ ID NO: 111911 - RNA, 22 nt, synthetic construct
  source 1..22: mol_type = other RNA
aactggttttcctgatggacat

SEQ ID NO: 111912 - RNA, 22 nt, synthetic construct
  source 1..22: mol_type = other RNA
aactgtaaagtaatcaagtgaa

SEQ ID NO: 111913 - RNA, 22 nt, synthetic construct
  source 1..22: mol_type = other RNA
aactgtagagaaaatgttatac

SEQ ID NO: 111914 - RNA, 22 nt, synthetic construct
  source 1..22: mol_type = other RNA
aactgtattgcaaactaagtgg

SEQ ID NO: 111915 - RNA, 22 nt, synthetic construct
  source 1..22: mol_type = other RNA
aactgtcacaattcacagaata

SEQ ID NO: 111916 - RNA, 22 nt, synthetic construct
  source 1..22: mol_type = other RNA
aactgtcactgacacaggctga

SEQ ID NO: 111917 - RNA, 22 nt, synthetic construct
  source 1..22: mol_type = other RNA
aactgtcatcagcgtcctcact

SEQ ID NO: 111918 - RNA, 22 nt, synthetic construct
  source 1..22: mol_type = other RNA
aactgtcctctcttgttgagga

SEQ ID NO: 111919 - RNA, 22 nt, synthetic construct
  source 1..22: mol_type = other RNA
aactgtcctgaattctaacatt

SEQ ID NO: 111920 - RNA, 22 nt, synthetic construct
  source 1..22: mol_type = other RNA
aactgtggtcactgtttggaca

SEQ ID NO: 111921 - RNA, 22 nt, synthetic construct
  source 1..22: mol_type = other RNA
aactgtgtgcttggagtcactt

SEQ ID NO: 111922 - RNA, 22 nt, synthetic construct
  source 1..22: mol_type = other RNA
aactgtgttacattgccttcgc

SEQ ID NO: 111923 - RNA, 22 nt, synthetic construct
  source 1..22: mol_type = other RNA
aactgttacttgactattttac

SEQ ID NO: 111924 - RNA, 22 nt, synthetic construct
  source 1..22: mol_type = other RNA
aactgttccccaagccaaatta

SEQ ID NO: 111925 - RNA, 22 nt, synthetic construct
  source 1..22: mol_type = other RNA
aactgttggaaaaatcgtcctc

SEQ ID NO: 111926 - RNA, 22 nt, synthetic construct
  source 1..22: mol_type = other RNA
aactgtttggctgggagcttat

SEQ ID NO: 111927 - RNA, 22 nt, synthetic construct
  source 1..22: mol_type = other RNA
aactgttttccacagtgacttt

SEQ ID NO: 111928 - RNA, 22 nt, synthetic construct
  source 1..22: mol_type = other RNA
aactgttttttcctcccttcag

SEQ ID NO: 111929 - RNA, 22 nt, synthetic construct
  source 1..22: mol_type = other RNA
aacttaaaggtttggagtttgt

SEQ ID NO: 111930 - RNA, 22 nt, synthetic construct
  source 1..22: mol_type = other RNA
aacttaagtatctcagtcataa

SEQ ID NO: 111931 - RNA, 22 nt, synthetic construct
  source 1..22: mol_type = other RNA
aacttaagtatctcggtcattc

SEQ ID NO: 111932 - RNA, 22 nt, synthetic construct
  source 1..22: mol_type = other RNA
aacttacagtaagatcctggat

SEQ ID NO: 111933 - RNA, 22 nt, synthetic construct
  source 1..22: mol_type = other RNA
aacttactctcaaataatttgg

SEQ ID NO: 111934 - RNA, 22 nt, synthetic construct
  source 1..22: mol_type = other RNA
aacttagaatataaactcttcc

SEQ ID NO: 111935 - RNA, 22 nt, synthetic construct
  source 1..22: mol_type = other RNA
aacttagccttggtaaaatcac

SEQ ID NO: 111936 - RNA, 22 nt, synthetic construct
  source 1..22: mol_type = other RNA
aacttaggaggctattaacttt

SEQ ID NO: 111937 - RNA, 22 nt, synthetic construct
  source 1..22: mol_type = other RNA
aacttatataaatgctcagtgg

SEQ ID NO: 111938 - RNA, 22 nt, synthetic construct
  source 1..22: mol_type = other RNA
aacttatgcaagatggcaagtt

SEQ ID NO: 111939 - RNA, 22 nt, synthetic construct
  source 1..22: mol_type = other RNA
aacttatgcatcttgcaaaacg

SEQ ID NO: 111940 - RNA, 22 nt, synthetic construct
  source 1..22: mol_type = other RNA
aacttattggaaaactctgttt

SEQ ID NO: 111941 - RNA, 22 nt, synthetic construct
  source 1..22: mol_type = other RNA
aacttatttccagggggtatgg

SEQ ID NO: 111942 - RNA, 22 nt, synthetic construct
  source 1..22: mol_type = other RNA
aacttcaaggtaatctagttta

SEQ ID NO: 111943 - RNA, 22 nt, synthetic construct
  source 1..22: mol_type = other RNA
aacttcacaccatttagatcat

SEQ ID NO: 111944 - RNA, 22 nt, synthetic construct
  source 1..22: mol_type = other RNA
aacttcacctctacacaaaaat

SEQ ID NO: 111945 - RNA, 22 nt, synthetic construct
  source 1..22: mol_type = other RNA
aacttcagttttgagtggcatc

SEQ ID NO: 111946 - RNA, 22 nt, synthetic construct
  source 1..22: mol_type = other RNA
aacttccaaccatcttcttagt

SEQ ID NO: 111947 - RNA, 22 nt, synthetic construct
  source 1..22: mol_type = other RNA
aacttccagaaacttccaacca

SEQ ID NO: 111948 - RNA, 22 nt, synthetic construct
  source 1..22: mol_type = other RNA
aacttccagcaagactttatgt

SEQ ID NO: 111949 - RNA, 22 nt, synthetic construct
  source 1..22: mol_type = other RNA
aacttccatgagattacatagc

SEQ ID NO: 111950 - RNA, 22 nt, synthetic construct
  source 1..22: mol_type = other RNA
aacttcccagacagggaatgcc

SEQ ID NO: 111951 - RNA, 22 nt, synthetic construct
  source 1..22: mol_type = other RNA
aacttccctctcagtggtgctt

SEQ ID NO: 111952 - RNA, 22 nt, synthetic construct
  source 1..22: mol_type = other RNA
aacttcccttagctctcatgtc

SEQ ID NO: 111953 - RNA, 22 nt, synthetic construct
  source 1..22: mol_type = other RNA
aacttcctgttttagtggctca

SEQ ID NO: 111954 - RNA, 22 nt, synthetic construct
  source 1..22: mol_type = other RNA
aacttcgaactaaggaaagctc

SEQ ID NO: 111955 - RNA, 22 nt, synthetic construct
  source 1..22: mol_type = other RNA
aacttctaatgcccattaaaac

SEQ ID NO: 111956 - RNA, 22 nt, synthetic construct
  source 1..22: mol_type = other RNA
aacttctctggagcaagcatga

SEQ ID NO: 111957 - RNA, 22 nt, synthetic construct
  source 1..22: mol_type = other RNA
aacttcttcaaaagacatcact

SEQ ID NO: 111958 - RNA, 22 nt, synthetic construct
  source 1..22: mol_type = other RNA
aacttcttctgttggagagatg

SEQ ID NO: 111959 - RNA, 22 nt, synthetic construct
  source 1..22: mol_type = other RNA
aacttgaaccttcctcttcctc

SEQ ID NO: 111960 - RNA, 22 nt, synthetic construct
  source 1..22: mol_type = other RNA
aacttgaaggcaatgtagggaa

SEQ ID NO: 111961 - RNA, 22 nt, synthetic construct
  source 1..22: mol_type = other RNA
aacttgaatactcgtgtgtctc

SEQ ID NO: 111962 - RNA, 22 nt, synthetic construct
  source 1..22: mol_type = other RNA
aacttgaattcagatggcccca

SEQ ID NO: 111963 - RNA, 22 nt, synthetic construct
  source 1..22: mol_type = other RNA
aacttgagcagatcagtaacaa

SEQ ID NO: 111964 - RNA, 22 nt, synthetic construct
  source 1..22: mol_type = other RNA
aacttgagtttgttctgtcaca

SEQ ID NO: 111965 - RNA, 22 nt, synthetic construct
  source 1..22: mol_type = other RNA
aacttgatcagggatttggcca

SEQ ID NO: 111966 - RNA, 22 nt, synthetic construct
  source 1..22: mol_type = other RNA
aacttgcagaagagtgaagctg

SEQ ID NO: 111967 - RNA, 22 nt, synthetic construct
  source 1..22: mol_type = other RNA
aacttgccatcttgcataagtt

SEQ ID NO: 111968 - RNA, 22 nt, synthetic construct
  source 1..22: mol_type = other RNA
aacttgcttaggctgaagcagg

SEQ ID NO: 111969 - RNA, 22 nt, synthetic construct
  source 1..22: mol_type = other RNA
aacttgctttgaatttggaaag

SEQ ID NO: 111970 - RNA, 22 nt, synthetic construct
  source 1..22: mol_type = other RNA
aacttggagaacttaaaggttt

SEQ ID NO: 111971 - RNA, 22 nt, synthetic construct
  source 1..22: mol_type = other RNA
aacttggattgtgtgtcgagaa

SEQ ID NO: 111972 - RNA, 22 nt, synthetic construct
  source 1..22: mol_type = other RNA
aacttggtaaaaagtgcttcta

SEQ ID NO: 111973 - RNA, 22 nt, synthetic construct
  source 1..22: mol_type = other RNA
aacttggtcgaaaacctgaaat

SEQ ID NO: 111974 - RNA, 22 nt, synthetic construct
  source 1..22: mol_type = other RNA
aacttggtctgggtgatatctg

SEQ ID NO: 111975 - RNA, 22 nt, synthetic construct
  source 1..22: mol_type = other RNA
aacttggtttattttctgcatt

SEQ ID NO: 111976 - RNA, 22 nt, synthetic construct
  source 1..22: mol_type = other RNA
aacttgtagaggaggagggtta

SEQ ID NO: 111977 - RNA, 22 nt, synthetic construct
  source 1..22: mol_type = other RNA
aacttgtatgaaattagttcct

SEQ ID NO: 111978 - RNA, 22 nt, synthetic construct
  source 1..22: mol_type = other RNA
aacttgtcacaaaatgtggatg

SEQ ID NO: 111979 - RNA, 22 nt, synthetic construct
  source 1..22: mol_type = other RNA
aacttgtctcggatttaagaga

SEQ ID NO: 111980 - RNA, 22 nt, synthetic construct
  source 1..22: mol_type = other RNA
aacttgtctttgtctattccct

SEQ ID NO: 111981 - RNA, 22 nt, synthetic construct
  source 1..22: mol_type = other RNA
aacttgttcatgtttacagaaa

SEQ ID NO: 111982 - RNA, 22 nt, synthetic construct
  source 1..22: mol_type = other RNA
aactttaaagctctatggcatt

SEQ ID NO: 111983 - RNA, 22 nt, synthetic construct
  source 1..22: mol_type = other RNA
aactttaaattttgagacctca

SEQ ID NO: 111984 - RNA, 22 nt, synthetic construct
  source 1..22: mol_type = other RNA
aactttaatcaccaggcgcggt

SEQ ID NO: 111985 - RNA, 22 nt, synthetic construct
  source 1..22: mol_type = other RNA
aactttaggtcagaatacaaaa

SEQ ID NO: 111986 - RNA, 22 nt, synthetic construct
  source 1..22: mol_type = other RNA
aactttaggttacgtactaggt

SEQ ID NO: 111987 - RNA, 22 nt, synthetic construct
  source 1..22: mol_type = other RNA
aactttatacctgttgaatagc

SEQ ID NO: 111988 - RNA, 22 nt, synthetic construct
  source 1..22: mol_type = other RNA
aactttcaacctaacatgtctt

SEQ ID NO: 111989 - RNA, 22 nt, synthetic construct
  source 1..22: mol_type = other RNA
aactttccagaagtaactcttg

SEQ ID NO: 111990 - RNA, 22 nt, synthetic construct
  source 1..22: mol_type = other RNA
aactttcgaagtgggaagcaaa

SEQ ID NO: 111991 - RNA, 22 nt, synthetic construct
  source 1..22: mol_type = other RNA
aactttctattcccctggatcc

SEQ ID NO: 111992 - RNA, 22 nt, synthetic construct
  source 1..22: mol_type = other RNA
aactttctgcttaaagcctctc

SEQ ID NO: 111993 - RNA, 22 nt, synthetic construct
  source 1..22: mol_type = other RNA
aactttgaaatcagaacttgac

SEQ ID NO: 111994 - RNA, 22 nt, synthetic construct
  source 1..22: mol_type = other RNA
aactttgagtagcaccctattt

SEQ ID NO: 111995 - RNA, 22 nt, synthetic construct
  source 1..22: mol_type = other RNA
aactttgatgaattccagttta

SEQ ID NO: 111996 - RNA, 22 nt, synthetic construct
  source 1..22: mol_type = other RNA
aactttgcattcctgaaatgaa

SEQ ID NO: 111997 - RNA, 22 nt, synthetic construct
  source 1..22: mol_type = other RNA
aacttttaacccacagataatt

SEQ ID NO: 111998 - RNA, 22 nt, synthetic construct
  source 1..22: mol_type = other RNA
aacttttagtaggtctccttgt

SEQ ID NO: 111999 - RNA, 22 nt, synthetic construct
  source 1..22: mol_type = other RNA
aactttttgggcctttctgttt

SEQ ID NO: 112000 - RNA, 22 nt, synthetic construct
  source 1..22: mol_type = other RNA
aagaaaaaataaaggctttcgt

SEQ ID NO: 112001 - RNA, 22 nt, synthetic construct
  source 1..22: mol_type = other RNA
aagaaaaacagaagacacaaaa

SEQ ID NO: 112002 - RNA, 22 nt, synthetic construct
  source 1..22: mol_type = other RNA
aagaaaaacctaaacctgtgat

SEQ ID NO: 112003 - RNA, 22 nt, synthetic construct
  source 1..22: mol_type = other RNA
aagaaaaactgaactacagtgt

SEQ ID NO: 112004 - RNA, 22 nt, synthetic construct
  source 1..22: mol_type = other RNA
aagaaaaagaaaagacaagact

SEQ ID NO: 112005 - RNA, 22 nt, synthetic construct
  source 1..22: mol_type = other RNA
aagaaaaagcaacttgaaggca

SEQ ID NO: 112006 - RNA, 22 nt, synthetic construct
  source 1..22: mol_type = other RNA
aagaaaaagcagagaaactgga

SEQ ID NO: 112007 - RNA, 22 nt, synthetic construct
  source 1..22: mol_type = other RNA
aagaaaaagctcacctctggac

SEQ ID NO: 112008 - RNA, 22 nt, synthetic construct
  source 1..22: mol_type = other RNA
aagaaaaaggttaagggaagag

SEQ ID NO: 112009 - RNA, 22 nt, synthetic construct
  source 1..22: mol_type = other RNA
aagaaaaagttgggcttggttg

SEQ ID NO: 112010 - RNA, 22 nt, synthetic construct
  source 1..22: mol_type = other RNA
aagaaaaattccctcagcaaaa

SEQ ID NO: 112011 - RNA, 22 nt, synthetic construct
  source 1..22: mol_type = other RNA
aagaaaacaaattcatgcaact

SEQ ID NO: 112012 - RNA, 22 nt, synthetic construct
  source 1..22: mol_type = other RNA
aagaaaacactccagaatgacc

SEQ ID NO: 112013 - RNA, 22 nt, synthetic construct
  source 1..22: mol_type = other RNA
aagaaaacagataacctagatt

SEQ ID NO: 112014 - RNA, 22 nt, synthetic construct
  source 1..22: mol_type = other RNA
aagaaaagaaaagtttcagtgg

SEQ ID NO: 112015 - RNA, 22 nt, synthetic construct
  source 1..22: mol_type = other RNA
aagaaaagaagttacggttccc

SEQ ID NO: 112016 - RNA, 22 nt, synthetic construct
  source 1..22: mol_type = other RNA
aagaaaagtttcagtggttaat

SEQ ID NO: 112017 - RNA, 22 nt, synthetic construct
  source 1..22: mol_type = other RNA
aagaaaataaaattctgaccct

SEQ ID NO: 112018 - RNA, 22 nt, synthetic construct
  source 1..22: mol_type = other RNA
aagaaaataatgttttccgtgt

SEQ ID NO: 112019 - RNA, 22 nt, synthetic construct
  source 1..22: mol_type = other RNA
aagaaaatcattgttcagggaa

SEQ ID NO: 112020 - RNA, 22 nt, synthetic construct
  source 1..22: mol_type = other RNA
aagaaaatccaaaagcctcaaa

SEQ ID NO: 112021 - RNA, 22 nt, synthetic construct
  source 1..22: mol_type = other RNA
aagaaaatccaagaagacatga

SEQ ID NO: 112022 - RNA, 22 nt, synthetic construct
  source 1..22: mol_type = other RNA
aagaaaatctgacaatttgcca

SEQ ID NO: 112023 - RNA, 22 nt, synthetic construct
  source 1..22: mol_type = other RNA
aagaaaatggccaagagttgct

SEQ ID NO: 112024 - RNA, 22 nt, synthetic construct
  source 1..22: mol_type = other RNA
aagaaaatgtgacattagtggt

SEQ ID NO: 112025 - RNA, 22 nt, synthetic construct
  source 1..22: mol_type = other RNA
aagaaaattttctgagcaacta

SEQ ID NO: 112026 - RNA, 22 nt, synthetic construct
  source 1..22: mol_type = other RNA
aagaaaccaagagcatagactt

SEQ ID NO: 112027 - RNA, 22 nt, synthetic construct
  source 1..22: mol_type = other RNA
aagaaaccacagagcctaaaat

SEQ ID NO: 112028 - RNA, 22 nt, synthetic construct
  source 1..22: mol_type = other RNA
aagaaacctttctcaaagccca

SEQ ID NO: 112029 - RNA, 22 nt, synthetic construct
  source 1..22: mol_type = other RNA
aagaaactacctagaaaaacac

SEQ ID NO: 112030 - RNA, 22 nt, synthetic construct
  source 1..22: mol_type = other RNA
aagaaagaaaaactgaactaca

SEQ ID NO: 112031 - RNA, 22 nt, synthetic construct
  source 1..22: mol_type = other RNA
aagaaagaaggccatttgattg

SEQ ID NO: 112032 - RNA, 22 nt, synthetic construct
  source 1..22: mol_type = other RNA
aagaaagagttgggtttttgaa

SEQ ID NO: 112033 - RNA, 22 nt, synthetic construct
  source 1..22: mol_type = other RNA
aagaaagataaatcagaaactg

SEQ ID NO: 112034 - RNA, 22 nt, synthetic construct
  source 1..22: mol_type = other RNA
aagaaagatctcaaacagccta

SEQ ID NO: 112035 - RNA, 22 nt, synthetic construct
  source 1..22: mol_type = other RNA
aagaaagcaggtcatgactttt

SEQ ID NO: 112036 - RNA, 22 nt, synthetic construct
  source 1..22: mol_type = other RNA
aagaaagctctcaattaatgcc

SEQ ID NO: 112037 - RNA, 22 nt, synthetic construct
  source 1..22: mol_type = other RNA
aagaaagctgtggatgttggtg

SEQ ID NO: 112038 - RNA, 22 nt, synthetic construct
  source 1..22: mol_type = other RNA
aagaaaggacttcagtccttac

SEQ ID NO: 112039 - RNA, 22 nt, synthetic construct
  source 1..22: mol_type = other RNA
aagaaaggagttcagctttaaa

SEQ ID NO: 112040 - RNA, 22 nt, synthetic construct
  source 1..22: mol_type = other RNA
aagaaaggggaaggaattttca

SEQ ID NO: 112041 - RNA, 22 nt, synthetic construct
  source 1..22: mol_type = other RNA
aagaaagggtagctttgatgcc

SEQ ID NO: 112042 - RNA, 22 nt, synthetic construct
  source 1..22: mol_type = other RNA
aagaaagggtgtgtgaatggaa

SEQ ID NO: 112043 - RNA, 22 nt, synthetic construct
  source 1..22: mol_type = other RNA
aagaaaggtctagtgtgcatgt

SEQ ID NO: 112044 - RNA, 22 nt, synthetic construct
  source 1..22: mol_type = other RNA
aagaaaggtctctctctgtcac

SEQ ID NO: 112045 - RNA, 22 nt, synthetic construct
  source 1..22: mol_type = other RNA
aagaaagttttgcagttgggga

SEQ ID NO: 112046 - RNA, 22 nt, synthetic construct
  source 1..22: mol_type = other RNA
aagaaataaaacatggccagta

SEQ ID NO: 112047 - RNA, 22 nt, synthetic construct
  source 1..22: mol_type = other RNA
aagaaataaacgacaccagaac

SEQ ID NO: 112048 - RNA, 22 nt, synthetic construct
  source 1..22: mol_type = other RNA
aagaaatagaaaacttgagcag

SEQ ID NO: 112049 - RNA, 22 nt, synthetic construct
  source 1..22: mol_type = other RNA
aagaaatagaactgtcacaatt

SEQ ID NO: 112050 - RNA, 22 nt, synthetic construct
  source 1..22: mol_type = other RNA
aagaaatcaaatgggaaattag

SEQ ID NO: 112051 - RNA, 22 nt, synthetic construct
  source 1..22: mol_type = other RNA
aagaaatctgcatccaaaaggg

SEQ ID NO: 112052 - RNA, 22 nt, synthetic construct
  source 1..22: mol_type = other RNA
aagaaatgttaacaattggtga

SEQ ID NO: 112053 - RNA, 22 nt, synthetic construct
  source 1..22: mol_type = other RNA
aagaaattagaacatctggcag

SEQ ID NO: 112054 - RNA, 22 nt, synthetic construct
  source 1..22: mol_type = other RNA
aagaaattatctgtgggttaaa

SEQ ID NO: 112055 - RNA, 22 nt, synthetic construct
  source 1..22: mol_type = other RNA
aagaaattggacgggtggtagg

SEQ ID NO: 112056 - RNA, 22 nt, synthetic construct
  source 1..22: mol_type = other RNA
aagaacaacatggtagaccata

SEQ ID NO: 112057 - RNA, 22 nt, synthetic construct
  source 1..22: mol_type = other RNA
aagaacacagtgttgagaaagc

SEQ ID NO: 112058 - RNA, 22 nt, synthetic construct
  source 1..22: mol_type = other RNA
aagaacactataagccaatatc

SEQ ID NO: 112059 - RNA, 22 nt, synthetic construct
  source 1..22: mol_type = other RNA
aagaacacttaacatgagatct

SEQ ID NO: 112060 - RNA, 22 nt, synthetic construct
  source 1..22: mol_type = other RNA
aagaacaggaagggagagatgc

SEQ ID NO: 112061 - RNA, 22 nt, synthetic construct
  source 1..22: mol_type = other RNA
aagaacaggacttttggtacac

SEQ ID NO: 112062 - RNA, 22 nt, synthetic construct
  source 1..22: mol_type = other RNA
aagaacaggagttaccataaaa

SEQ ID NO: 112063 - RNA, 22 nt, synthetic construct
  source 1..22: mol_type = other RNA
aagaacatgattgggtcaacaa

SEQ ID NO: 112064 - RNA, 22 nt, synthetic construct
  source 1..22: mol_type = other RNA
aagaaccatacagtgccttcag

SEQ ID NO: 112065 - RNA, 22 nt, synthetic construct
  source 1..22: mol_type = other RNA
aagaaccctttgttatctgaac

SEQ ID NO: 112066 - RNA, 22 nt, synthetic construct
  source 1..22: mol_type = other RNA
aagaaccgactgaaaggaaatg

SEQ ID NO: 112067 - RNA, 22 nt, synthetic construct
  source 1..22: mol_type = other RNA
aagaacctctggaaaggacttg

SEQ ID NO: 112068 - RNA, 22 nt, synthetic construct
  source 1..22: mol_type = other RNA
aagaacctgttcatttgagaat

SEQ ID NO: 112069 - RNA, 22 nt, synthetic construct
  source 1..22: mol_type = other RNA
aagaaccttcatactattttct

SEQ ID NO: 112070 - RNA, 22 nt, synthetic construct
  source 1..22: mol_type = other RNA
aagaactccaacaattcaacaa

SEQ ID NO: 112071 - RNA, 22 nt, synthetic construct
  source 1..22: mol_type = other RNA
aagaactcctggtctcccagca

SEQ ID NO: 112072 - RNA, 22 nt, synthetic construct
  source 1..22: mol_type = other RNA
aagaactgaaagcagggactcc

SEQ ID NO: 112073 - RNA, 22 nt, synthetic construct
  source 1..22: mol_type = other RNA
aagaacttcttcaaaagacatc

SEQ ID NO: 112074 - RNA, 22 nt, synthetic construct
  source 1..22: mol_type = other RNA
aagaacttgtctttgtctattc

SEQ ID NO: 112075 - RNA, 22 nt, synthetic construct
  source 1..22: mol_type = other RNA
aagaagaaaaagcaacttgaag

SEQ ID NO: 112076 - RNA, 22 nt, synthetic construct
  source 1..22: mol_type = other RNA
aagaagaaatcaaatgggaaat

SEQ ID NO: 112077 - RNA, 22 nt, synthetic construct
  source 1..22: mol_type = other RNA
aagaagaattctataggtagta

SEQ ID NO: 112078 - RNA, 22 nt, synthetic construct
  source 1..22: mol_type = other RNA
aagaagacatgataaatacgta

SEQ ID NO: 112079 - RNA, 22 nt, synthetic construct
  source 1..22: mol_type = other RNA
aagaagacttaggagaaaagct

SEQ ID NO: 112080 - RNA, 22 nt, synthetic construct
  source 1..22: mol_type = other RNA
aagaagatgcagttgcttactc

SEQ ID NO: 112081 - RNA, 22 nt, synthetic construct
  source 1..22: mol_type = other RNA
aagaagatggttggaagtttct

SEQ ID NO: 112082 - RNA, 22 nt, synthetic construct
  source 1..22: mol_type = other RNA
aagaagattgagtcagtaatca

SEQ ID NO: 112083 - RNA, 22 nt, synthetic construct
  source 1..22: mol_type = other RNA
aagaagctgttttggtaaaatg

SEQ ID NO: 112084 - RNA, 22 nt, synthetic construct
  source 1..22: mol_type = other RNA
aagaaggaaaaaacacctaaag

SEQ ID NO: 112085 - RNA, 22 nt, synthetic construct
  source 1..22: mol_type = other RNA
aagaaggaaaagaacacagtgt

SEQ ID NO: 112086 - RNA, 22 nt, synthetic construct
  source 1..22: mol_type = other RNA
aagaaggaatgtgcactctttt

SEQ ID NO: 112087 - RNA, 22 nt, synthetic construct
  source 1..22: mol_type = other RNA
aagaaggccatttgattgccag

SEQ ID NO: 112088 - RNA, 22 nt, synthetic construct
  source 1..22: mol_type = other RNA
aagaaggccgtccctattttct

SEQ ID NO: 112089 - RNA, 22 nt, synthetic construct
  source 1..22: mol_type = other RNA
aagaaggctagcacagaggcaa

SEQ ID NO: 112090 - RNA, 22 nt, synthetic construct
  source 1..22: mol_type = other RNA
aagaagggaacactaagaagat

SEQ ID NO: 112091 - RNA, 22 nt, synthetic construct
  source 1..22: mol_type = other RNA
aagaaggtatcatcggaaatat

SEQ ID NO: 112092 - RNA, 22 nt, synthetic construct
  source 1..22: mol_type = other RNA
aagaaggtttgtagagcaagca

SEQ ID NO: 112093 - RNA, 22 nt, synthetic construct
  source 1..22: mol_type = other RNA
aagaagtaatttcttctgaaga

SEQ ID NO: 112094 - RNA, 22 nt, synthetic construct
  source 1..22: mol_type = other RNA
aagaagtgaaaaatgacctaaa

SEQ ID NO: 112095 - RNA, 22 nt, synthetic construct
  source 1..22: mol_type = other RNA
aagaagtgaaactgctggatca

SEQ ID NO: 112096 - RNA, 22 nt, synthetic construct
  source 1..22: mol_type = other RNA
aagaagttacggttccctgtag

SEQ ID NO: 112097 - RNA, 22 nt, synthetic construct
  source 1..22: mol_type = other RNA
aagaataaaattcaccaaacac

SEQ ID NO: 112098 - RNA, 22 nt, synthetic construct
  source 1..22: mol_type = other RNA
aagaataactgtcctgaattct

SEQ ID NO: 112099 - RNA, 22 nt, synthetic construct
  source 1..22: mol_type = other RNA
aagaataagctaatcccaaagt

SEQ ID NO: 112100 - RNA, 22 nt, synthetic construct
  source 1..22: mol_type = other RNA
aagaataccaaattcacgagac

SEQ ID NO: 112101 - RNA, 22 nt, synthetic construct
  source 1..22: mol_type = other RNA
aagaatcaggtctctttgaaag

SEQ ID NO: 112102 - RNA, 22 nt, synthetic construct
  source 1..22: mol_type = other RNA
aagaatcctgctattttattag

SEQ ID NO: 112103 - RNA, 22 nt, synthetic construct
  source 1..22: mol_type = other RNA
aagaatctttggcaaacttaga

SEQ ID NO: 112104 - RNA, 22 nt, synthetic construct
  source 1..22: mol_type = other RNA
aagaatgaagtcagagattttc

SEQ ID NO: 112105 - RNA, 22 nt, synthetic construct
  source 1..22: mol_type = other RNA
aagaatgagaaacatacatgtt

SEQ ID NO: 112106 - RNA, 22 nt, synthetic construct
  source 1..22: mol_type = other RNA
aagaatgattatttgcggcttg

SEQ ID NO: 112107 - RNA, 22 nt, synthetic construct
  source 1..22: mol_type = other RNA
aagaatggtttaacacatacaa

SEQ ID NO: 112108 - RNA, 22 nt, synthetic construct
  source 1..22: mol_type = other RNA
aagaatgtcaagctgtttgagc

SEQ ID NO: 112109 - RNA, 22 nt, synthetic construct
  source 1..22: mol_type = other RNA
aagaattaaaaacattggagga

SEQ ID NO: 112110 - RNA, 22 nt, synthetic construct
  source 1..22: mol_type = other RNA
aagaattaaactcattatccca

SEQ ID NO: 112111 - RNA, 22 nt, synthetic construct
  source 1..22: mol_type = other RNA
aagaattaacactaatccttct

SEQ ID NO: 112112 - RNA, 22 nt, synthetic construct
  source 1..22: mol_type = other RNA
aagaattattgtctgcaagcag

SEQ ID NO: 112113 - RNA, 22 nt, synthetic construct
  source 1..22: mol_type = other RNA
aagaattcgttaatacttgtgt

SEQ ID NO: 112114 - RNA, 22 nt, synthetic construct
  source 1..22: mol_type = other RNA
aagaattctataggtagtacat

SEQ ID NO: 112115 - RNA, 22 nt, synthetic construct
  source 1..22: mol_type = other RNA
aagaatttcatgcctttcagca

SEQ ID NO: 112116 - RNA, 22 nt, synthetic construct
  source 1..22: mol_type = other RNA
aagaattttaagcctagagatt

SEQ ID NO: 112117 - RNA, 22 nt, synthetic construct
  source 1..22: mol_type = other RNA
aagacaagcaaggaagggcttg

SEQ ID NO: 112118 - RNA, 22 nt, synthetic construct
  source 1..22: mol_type = other RNA
aagacaagtactgcatgattcc

SEQ ID NO: 112119 - RNA, 22 nt, synthetic construct
  source 1..22: mol_type = other RNA
aagacaagttcttacctcaaag

SEQ ID NO: 112120 - RNA, 22 nt, synthetic construct
  source 1..22: mol_type = other RNA
aagacaatactgttatgacaag

SEQ ID NO: 112121 - RNA, 22 nt, synthetic construct
  source 1..22: mol_type = other RNA
aagacaatagctagtgtcttag

SEQ ID NO: 112122 - RNA, 22 nt, synthetic construct
  source 1..22: mol_type = other RNA
aagacaatgtctttggctctta

SEQ ID NO: 112123 - RNA, 22 nt, synthetic construct
  source 1..22: mol_type = other RNA
aagacaatgtggagttggtgca

SEQ ID NO: 112124 - RNA, 22 nt, synthetic construct
  source 1..22: mol_type = other RNA
aagacacaaaagagctgggccc

SEQ ID NO: 112125 - RNA, 22 nt, synthetic construct
  source 1..22: mol_type = other RNA
aagacacaaaatcagatatgaa

SEQ ID NO: 112126 - RNA, 22 nt, synthetic construct
  source 1..22: mol_type = other RNA
aagacacaaggaaggtcaaatg

SEQ ID NO: 112127 - RNA, 22 nt, synthetic construct
  source 1..22: mol_type = other RNA
aagacaccgctccacgcccatt

SEQ ID NO: 112128 - RNA, 22 nt, synthetic construct
  source 1..22: mol_type = other RNA
aagacactagctattgtctttt

SEQ ID NO: 112129 - RNA, 22 nt, synthetic construct
  source 1..22: mol_type = other RNA
aagacagacatttggaatagag

SEQ ID NO: 112130 - RNA, 22 nt, synthetic construct
  source 1..22: mol_type = other RNA
aagacagacctctattaaatca

SEQ ID NO: 112131 - RNA, 22 nt, synthetic construct
  source 1..22: mol_type = other RNA
aagacagagctagaactagaat

SEQ ID NO: 112132 - RNA, 22 nt, synthetic construct
  source 1..22: mol_type = other RNA
aagacagagctccctctccctc

SEQ ID NO: 112133 - RNA, 22 nt, synthetic construct
  source 1..22: mol_type = other RNA
aagacagatcttatggaatagt

SEQ ID NO: 112134 - RNA, 22 nt, synthetic construct
  source 1..22: mol_type = other RNA
aagacagatgtgcttaatcttc

SEQ ID NO: 112135 - RNA, 22 nt, synthetic construct
  source 1..22: mol_type = other RNA
aagacagctactaaacaaatca

SEQ ID NO: 112136 - RNA, 22 nt, synthetic construct
  source 1..22: mol_type = other RNA
aagacaggaagaattattgtct

SEQ ID NO: 112137 - RNA, 22 nt, synthetic construct
  source 1..22: mol_type = other RNA
aagacaggtagacatgagtaaa

SEQ ID NO: 112138 - RNA, 22 nt, synthetic construct
  source 1..22: mol_type = other RNA
aagacatcactaagagtgaaaa

SEQ ID NO: 112139 - RNA, 22 nt, synthetic construct
  source 1..22: mol_type = other RNA
aagacatcctgatttaggccac

SEQ ID NO: 112140 - RNA, 22 nt, synthetic construct
  source 1..22: mol_type = other RNA
aagacatctttcctgtgattta

SEQ ID NO: 112141 - RNA, 22 nt, synthetic construct
  source 1..22: mol_type = other RNA
aagacatgctgaggccccaggg

SEQ ID NO: 112142 - RNA, 22 nt, synthetic construct
  source 1..22: mol_type = other RNA
aagacatgttaggttgaaagtt

SEQ ID NO: 112143 - RNA, 22 nt, synthetic construct
  source 1..22: mol_type = other RNA
aagacattattcttacagtgac

SEQ ID NO: 112144 - RNA, 22 nt, synthetic construct
  source 1..22: mol_type = other RNA
aagacattgtcttacataggct

SEQ ID NO: 112145 - RNA, 22 nt, synthetic construct
  source 1..22: mol_type = other RNA
aagacatttgggaatgtggtca

SEQ ID NO: 112146 - RNA, 22 nt, synthetic construct
  source 1..22: mol_type = other RNA
aagaccaaaatggagacccata

SEQ ID NO: 112147 - RNA, 22 nt, synthetic construct
  source 1..22: mol_type = other RNA
aagaccaagaattttccattca

SEQ ID NO: 112148 - RNA, 22 nt, synthetic construct
  source 1..22: mol_type = other RNA
aagaccaagagtgtggctttaa

SEQ ID NO: 112149 - RNA, 22 nt, synthetic construct
  source 1..22: mol_type = other RNA
aagaccacaaggattaatcttt

SEQ ID NO: 112150 - RNA, 22 nt, synthetic construct
  source 1..22: mol_type = other RNA
aagacccagtggctagtgtgtt

SEQ ID NO: 112151 - RNA, 22 nt, synthetic construct
  source 1..22: mol_type = other RNA
aagaccccagtagaaatcttcc

SEQ ID NO: 112152 - RNA, 22 nt, synthetic construct
  source 1..22: mol_type = other RNA
aagacccctcaggtgtcactgg

SEQ ID NO: 112153 - RNA, 22 nt, synthetic construct
  source 1..22: mol_type = other RNA
aagaccctgtctctaaaaaata

SEQ ID NO: 112154 - RNA, 22 nt, synthetic construct
  source 1..22: mol_type = other RNA
aagaccgcaagagttccaactg

SEQ ID NO: 112155 - RNA, 22 nt, synthetic construct
  source 1..22: mol_type = other RNA
aagaccggggactgcaacagat

SEQ ID NO: 112156 - RNA, 22 nt, synthetic construct
  source 1..22: mol_type = other RNA
aagacctaagcttaagagctaa

SEQ ID NO: 112157 - RNA, 22 nt, synthetic construct
  source 1..22: mol_type = other RNA
aagacctcaaattctgagggaa

SEQ ID NO: 112158 - RNA, 22 nt, synthetic construct
  source 1..22: mol_type = other RNA
aagacctcaggtttagaatata

SEQ ID NO: 112159 - RNA, 22 nt, synthetic construct
  source 1..22: mol_type = other RNA
aagacctgcagtctgcaggcag

SEQ ID NO: 112160 - RNA, 22 nt, synthetic construct
  source 1..22: mol_type = other RNA
aagacgatattcctatcagaag

SEQ ID NO: 112161 - RNA, 22 nt, synthetic construct
  source 1..22: mol_type = other RNA
aagacgttcagataacaaaggg

SEQ ID NO: 112162 - RNA, 22 nt, synthetic construct
  source 1..22: mol_type = other RNA
aagactaagcagaaatgacaag

SEQ ID NO: 112163 - RNA, 22 nt, synthetic construct
  source 1..22: mol_type = other RNA
aagactacctaaaacaatctac

SEQ ID NO: 112164 - RNA, 22 nt, synthetic construct
  source 1..22: mol_type = other RNA
aagactataaaactcttagctt

SEQ ID NO: 112165 - RNA, 22 nt, synthetic construct
  source 1..22: mol_type = other RNA
aagactatcacgattctgaccc

SEQ ID NO: 112166 - RNA, 22 nt, synthetic construct
  source 1..22: mol_type = other RNA
aagactatgagaaggattagtg

SEQ ID NO: 112167 - RNA, 22 nt, synthetic construct
  source 1..22: mol_type = other RNA
aagactcaacatgtgtatttag

SEQ ID NO: 112168 - RNA, 22 nt, synthetic construct
  source 1..22: mol_type = other RNA
aagactcagcagttttaaagaa

SEQ ID NO: 112169 - RNA, 22 nt, synthetic construct
  source 1..22: mol_type = other RNA
aagactgctgtttaccaagggt

SEQ ID NO: 112170 - RNA, 22 nt, synthetic construct
  source 1..22: mol_type = other RNA
aagactggaaaagtgttgacta

SEQ ID NO: 112171 - RNA, 22 nt, synthetic construct
  source 1..22: mol_type = other RNA
aagactggatttgattgggcat

SEQ ID NO: 112172 - RNA, 22 nt, synthetic construct
  source 1..22: mol_type = other RNA
aagacttaggagaaaagcttca

SEQ ID NO: 112173 - RNA, 22 nt, synthetic construct
  source 1..22: mol_type = other RNA
aagacttcaacggacatttttc

SEQ ID NO: 112174 - RNA, 22 nt, synthetic construct
  source 1..22: mol_type = other RNA
aagacttcacgatgcttaggta

SEQ ID NO: 112175 - RNA, 22 nt, synthetic construct
  source 1..22: mol_type = other RNA
aagacttcaggaacaccttgaa

SEQ ID NO: 112176 - RNA, 22 nt, synthetic construct
  source 1..22: mol_type = other RNA
aagacttctcaaacaggataca

SEQ ID NO: 112177 - RNA, 22 nt, synthetic construct
  source 1..22: mol_type = other RNA
aagacttgaggtttacttgggg

SEQ ID NO: 112178 - RNA, 22 nt, synthetic construct
  source 1..22: mol_type = other RNA
aagactttatggtaattggttc

SEQ ID NO: 112179 - RNA, 22 nt, synthetic construct
  source 1..22: mol_type = other RNA
aagactttgttttgtttttctc

SEQ ID NO: 112180 - RNA, 22 nt, synthetic construct
  source 1..22: mol_type = other RNA
aagagaaaaattacaggtcaaa

SEQ ID NO: 112181 - RNA, 22 nt, synthetic construct
  source 1..22: mol_type = other RNA
aagagaaagaagtaatttcttc

SEQ ID NO: 112182 - RNA, 22 nt, synthetic construct
  source 1..22: mol_type = other RNA
aagagaacaaaatacctgggaa

SEQ ID NO: 112183 - RNA, 22 nt, synthetic construct
  source 1..22: mol_type = other RNA
aagagaacaatggaatagaagg

SEQ ID NO: 112184 - RNA, 22 nt, synthetic construct
  source 1..22: mol_type = other RNA
aagagaacacacaatttgaggt

SEQ ID NO: 112185 - RNA, 22 nt, synthetic construct
  source 1..22: mol_type = other RNA
aagagaacattggtttgaaatg

SEQ ID NO: 112186 - RNA, 22 nt, synthetic construct
  source 1..22: mol_type = other RNA
aagagaacttgcacataatata

SEQ ID NO: 112187 - RNA, 22 nt, synthetic construct
  source 1..22: mol_type = other RNA
aagagaaggaagcaccaaccct

SEQ ID NO: 112188 - RNA, 22 nt, synthetic construct
  source 1..22: mol_type = other RNA
aagagaatagcagaaacacagg

SEQ ID NO: 112189 - RNA, 22 nt, synthetic construct
  source 1..22: mol_type = other RNA
aagagaatcttaaaataccaga

SEQ ID NO: 112190 - RNA, 22 nt, synthetic construct
  source 1..22: mol_type = other RNA
aagagaatggaaacttgccatc

SEQ ID NO: 112191 - RNA, 22 nt, synthetic construct
  source 1..22: mol_type = other RNA
aagagaatggctggaatggtga

SEQ ID NO: 112192 - RNA, 22 nt, synthetic construct
  source 1..22: mol_type = other RNA
aagagaccacaggctctcttca

SEQ ID NO: 112193 - RNA, 22 nt, synthetic construct
  source 1..22: mol_type = other RNA
aagagacctgattcttccacta

SEQ ID NO: 112194 - RNA, 22 nt, synthetic construct
  source 1..22: mol_type = other RNA
aagagactatctcttcctcctc

SEQ ID NO: 112195 - RNA, 22 nt, synthetic construct
  source 1..22: mol_type = other RNA
aagagactctcaagaaggtatc

SEQ ID NO: 112196 - RNA, 22 nt, synthetic construct
  source 1..22: mol_type = other RNA
aagagagaaggctgccagcacc

SEQ ID NO: 112197 - RNA, 22 nt, synthetic construct
  source 1..22: mol_type = other RNA
aagagagagacaagcacaggca

SEQ ID NO: 112198 - RNA, 22 nt, synthetic construct
  source 1..22: mol_type = other RNA
aagagagaggggggaagctttt

SEQ ID NO: 112199 - RNA, 22 nt, synthetic construct
  source 1..22: mol_type = other RNA
aagagagattaaataacttcca

SEQ ID NO: 112200 - RNA, 22 nt, synthetic construct
  source 1..22: mol_type = other RNA
aagagagcaagactcaaatctc

SEQ ID NO: 112201 - RNA, 22 nt, synthetic construct
  source 1..22: mol_type = other RNA
aagagagcaagtccccatctcc

SEQ ID NO: 112202 - RNA, 22 nt, synthetic construct
  source 1..22: mol_type = other RNA
aagagagcattgcctttattac

SEQ ID NO: 112203 - RNA, 22 nt, synthetic construct
  source 1..22: mol_type = other RNA
aagagagcctgtggtctcttcg

SEQ ID NO: 112204 - RNA, 22 nt, synthetic construct
  source 1..22: mol_type = other RNA
aagagaggaagtgaccctgagt

SEQ ID NO: 112205 - RNA, 22 nt, synthetic construct
  source 1..22: mol_type = other RNA
aagagaggaataaatggtagct

SEQ ID NO: 112206 - RNA, 22 nt, synthetic construct
  source 1..22: mol_type = other RNA
aagagaggacagttggccttga

SEQ ID NO: 112207 - RNA, 22 nt, synthetic construct
  source 1..22: mol_type = other RNA
aagagagtaaaataaaagctct

SEQ ID NO: 112208 - RNA, 22 nt, synthetic construct
  source 1..22: mol_type = other RNA
aagagagtgacagctgagtagc

SEQ ID NO: 112209 - RNA, 22 nt, synthetic construct
  source 1..22: mol_type = other RNA
aagagatagtctcttcctgtat

SEQ ID NO: 112210 - RNA, 22 nt, synthetic construct
  source 1..22: mol_type = other RNA
aagagatctagtgaagtcaatt

SEQ ID NO: 112211 - RNA, 22 nt, synthetic construct
  source 1..22: mol_type = other RNA
aagagattaattcagtcaacac

SEQ ID NO: 112212 - RNA, 22 nt, synthetic construct
  source 1..22: mol_type = other RNA
aagagcacaccaagacatgtta

SEQ ID NO: 112213 - RNA, 22 nt, synthetic construct
  source 1..22: mol_type = other RNA
aagagcagaactccacctcaga

SEQ ID NO: 112214 - RNA, 22 nt, synthetic construct
  source 1..22: mol_type = other RNA
aagagcaggtggaaggcctgat

SEQ ID NO: 112215 - RNA, 22 nt, synthetic construct
  source 1..22: mol_type = other RNA
aagagcagtgtgttctgccttg

SEQ ID NO: 112216 - RNA, 22 nt, synthetic construct
  source 1..22: mol_type = other RNA
aagagcatagactttagagtca

SEQ ID NO: 112217 - RNA, 22 nt, synthetic construct
  source 1..22: mol_type = other RNA
aagagcatgttgggccaacttc

SEQ ID NO: 112218 - RNA, 22 nt, synthetic construct
  source 1..22: mol_type = other RNA
aagagccaaagacattgtctta

SEQ ID NO: 112219 - RNA, 22 nt, synthetic construct
  source 1..22: mol_type = other RNA
aagagccagcctgatgatgatg

SEQ ID NO: 112220 - RNA, 22 nt, synthetic construct
  source 1..22: mol_type = other RNA
aagagcgaagagggagaagaaa

SEQ ID NO: 112221 - RNA, 22 nt, synthetic construct
  source 1..22: mol_type = other RNA
aagagcgaggcctggaacaggc

SEQ ID NO: 112222 - RNA, 22 nt, synthetic construct
  source 1..22: mol_type = other RNA
aagagcgcttctatgtgacaaa

SEQ ID NO: 112223 - RNA, 22 nt, synthetic construct
  source 1..22: mol_type = other RNA
aagagcggcctttgcctctcca

SEQ ID NO: 112224 - RNA, 22 nt, synthetic construct
  source 1..22: mol_type = other RNA
aagagcgtcgtacctttcgcta

SEQ ID NO: 112225 - RNA, 22 nt, synthetic construct
  source 1..22: mol_type = other RNA
aagagctaagactataaaactc

SEQ ID NO: 112226 - RNA, 22 nt, synthetic construct
  source 1..22: mol_type = other RNA
aagagctaagatgctattcaag

SEQ ID NO: 112227 - RNA, 22 nt, synthetic construct
  source 1..22: mol_type = other RNA
aagagctgggactacaggtgtg

SEQ ID NO: 112228 - RNA, 22 nt, synthetic construct
  source 1..22: mol_type = other RNA
aagagctgggcccgcagtggct

SEQ ID NO: 112229 - RNA, 22 nt, synthetic construct
  source 1..22: mol_type = other RNA
aagagctgtaacagaggcatgc

SEQ ID NO: 112230 - RNA, 22 nt, synthetic construct
  source 1..22: mol_type = other RNA
aagaggaaggttcaagtttggc

SEQ ID NO: 112231 - RNA, 22 nt, synthetic construct
  source 1..22: mol_type = other RNA
aagaggacgatttttccaacag

SEQ ID NO: 112232 - RNA, 22 nt, synthetic construct
  source 1..22: mol_type = other RNA
aagaggagacattacaattgat

SEQ ID NO: 112233 - RNA, 22 nt, synthetic construct
  source 1..22: mol_type = other RNA
aagaggataaggggcagggtgg

SEQ ID NO: 112234 - RNA, 22 nt, synthetic construct
  source 1..22: mol_type = other RNA
aagaggcaaaactcctgaacaa

SEQ ID NO: 112235 - RNA, 22 nt, synthetic construct
  source 1..22: mol_type = other RNA
aagaggcagctaagcaccaaca

SEQ ID NO: 112236 - RNA, 22 nt, synthetic construct
  source 1..22: mol_type = other RNA
aagaggccacaaagtccccaca

SEQ ID NO: 112237 - RNA, 22 nt, synthetic construct
  source 1..22: mol_type = other RNA
aagaggctttctgtgtaatact

SEQ ID NO: 112238 - RNA, 22 nt, synthetic construct
  source 1..22: mol_type = other RNA
aagagggaacattttcatttta

SEQ ID NO: 112239 - RNA, 22 nt, synthetic construct
  source 1..22: mol_type = other RNA
aagagggaagtactgagtcaaa

SEQ ID NO: 112240 - RNA, 22 nt, synthetic construct
  source 1..22: mol_type = other RNA
aagagggagaagaaataaacga

SEQ ID NO: 112241 - RNA, 22 nt, synthetic construct
  source 1..22: mol_type = other RNA
aagagggggcataacatctatg

SEQ ID NO: 112242 - RNA, 22 nt, synthetic construct
  source 1..22: mol_type = other RNA
aagaggtatcaccatctgataa

SEQ ID NO: 112243 - RNA, 22 nt, synthetic construct
  source 1..22: mol_type = other RNA
aagaggttaaaaccacaaacat

SEQ ID NO: 112244 - RNA, 22 nt, synthetic construct
  source 1..22: mol_type = other RNA
aagagtaatggttggccgaggc

SEQ ID NO: 112245 - RNA, 22 nt, synthetic construct
  source 1..22: mol_type = other RNA
aagagtagattcccccttatgt

SEQ ID NO: 112246 - RNA, 22 nt, synthetic construct
  source 1..22: mol_type = other RNA
aagagtatctttttcagcagca

SEQ ID NO: 112247 - RNA, 22 nt, synthetic construct
  source 1..22: mol_type = other RNA
aagagtccccaactgcaaaact

SEQ ID NO: 112248 - RNA, 22 nt, synthetic construct
  source 1..22: mol_type = other RNA
aagagtctatctttgggaaaat

SEQ ID NO: 112249 - RNA, 22 nt, synthetic construct
  source 1..22: mol_type = other RNA
aagagtctcatctgtcaaaaag

SEQ ID NO: 112250 - RNA, 22 nt, synthetic construct
  source 1..22: mol_type = other RNA
aagagtctgcagaccaagaaag

SEQ ID NO: 112251 - RNA, 22 nt, synthetic construct
  source 1..22: mol_type = other RNA
aagagtgaaaaggcaaaccaca

SEQ ID NO: 112252 - RNA, 22 nt, synthetic construct
  source 1..22: mol_type = other RNA
aagagtgaaatgatttcaagta

SEQ ID NO: 112253 - RNA, 22 nt, synthetic construct
  source 1..22: mol_type = other RNA
aagagtgaagaaacctttctca

SEQ ID NO: 112254 - RNA, 22 nt, synthetic construct
  source 1..22: mol_type = other RNA
aagagtgaagctggacccttac

SEQ ID NO: 112255 - RNA, 22 nt, synthetic construct
  source 1..22: mol_type = other RNA
aagagtgcacattccttcttca

SEQ ID NO: 112256 - RNA, 22 nt, synthetic construct
  source 1..22: mol_type = other RNA
aagagtgggcaaaaaagtcatg

SEQ ID NO: 112257 - RNA, 22 nt, synthetic construct
  source 1..22: mol_type = other RNA
aagagtgtgctgactagtacgt

SEQ ID NO: 112258 - RNA, 22 nt, synthetic construct
  source 1..22: mol_type = other RNA
aagagtgtggctttaaggcgca

SEQ ID NO: 112259 - RNA, 22 nt, synthetic construct
  source 1..22: mol_type = other RNA
aagagttaaaactcacaaaaag

SEQ ID NO: 112260 - RNA, 22 nt, synthetic construct
  source 1..22: mol_type = other RNA
aagagttacttctggaaagttc

SEQ ID NO: 112261 - RNA, 22 nt, synthetic construct
  source 1..22: mol_type = other RNA
aagagttccaactgtataaatg

SEQ ID NO: 112262 - RNA, 22 nt, synthetic construct
  source 1..22: mol_type = other RNA
aagagttcccctatactgtaac

SEQ ID NO: 112263 - RNA, 22 nt, synthetic construct
  source 1..22: mol_type = other RNA
aagagttctgaaggctcagccc

SEQ ID NO: 112264 - RNA, 22 nt, synthetic construct
  source 1..22: mol_type = other RNA
aagagttgctgacttcctggct

SEQ ID NO: 112265 - RNA, 22 nt, synthetic construct
  source 1..22: mol_type = other RNA
aagagtttgagaccagcgtggg

SEQ ID NO: 112266 - RNA, 22 nt, synthetic construct
  source 1..22: mol_type = other RNA
aagagttttatagtcttagctc

SEQ ID NO: 112267 - RNA, 22 nt, synthetic construct
  source 1..22: mol_type = other RNA
aagataaaggtaaggaaacccc

SEQ ID NO: 112268 - RNA, 22 nt, synthetic construct
  source 1..22: mol_type = other RNA
aagataaatcagaaactgacag

SEQ ID NO: 112269 - RNA, 22 nt, synthetic construct
  source 1..22: mol_type = other RNA
aagataaatccaacgaccggac

SEQ ID NO: 112270 - RNA, 22 nt, synthetic construct
  source 1..22: mol_type = other RNA
aagataagcaaaattgacaaac

SEQ ID NO: 112271 - RNA, 22 nt, synthetic construct
  source 1..22: mol_type = other RNA
aagataagtagaaggtcaatct

SEQ ID NO: 112272 - RNA, 22 nt, synthetic construct
  source 1..22: mol_type = other RNA
aagataatgctgttctctgtgt

SEQ ID NO: 112273 - RNA, 22 nt, synthetic construct
  source 1..22: mol_type = other RNA
aagataatgttagaattcagga

SEQ ID NO: 112274 - RNA, 22 nt, synthetic construct
  source 1..22: mol_type = other RNA
aagatacacaagatctctatgc

SEQ ID NO: 112275 - RNA, 22 nt, synthetic construct
  source 1..22: mol_type = other RNA
aagatactcaacatcactagct

SEQ ID NO: 112276 - RNA, 22 nt, synthetic construct
  source 1..22: mol_type = other RNA
aagatactgcactaaactagta

SEQ ID NO: 112277 - RNA, 22 nt, synthetic construct
  source 1..22: mol_type = other RNA
aagatagactcttcagaggtct

SEQ ID NO: 112278 - RNA, 22 nt, synthetic construct
  source 1..22: mol_type = other RNA
aagatagccccttatcaggaaa

SEQ ID NO: 112279 - RNA, 22 nt, synthetic construct
  source 1..22: mol_type = other RNA
aagatagtactgaccatctcag

SEQ ID NO: 112280 - RNA, 22 nt, synthetic construct
  source 1..22: mol_type = other RNA
aagatatccacagtatgctgtt

SEQ ID NO: 112281 - RNA, 22 nt, synthetic construct
  source 1..22: mol_type = other RNA
aagatatgggttattcacccaa

SEQ ID NO: 112282 - RNA, 22 nt, synthetic construct
  source 1..22: mol_type = other RNA
aagatatgtgtaggaaggaaca

SEQ ID NO: 112283 - RNA, 22 nt, synthetic construct
  source 1..22: mol_type = other RNA
aagatattagctacaaaaggga

SEQ ID NO: 112284 - RNA, 22 nt, synthetic construct
  source 1..22: mol_type = other RNA
aagatcaagctcgccgtctccc

SEQ ID NO: 112285 - RNA, 22 nt, synthetic construct
  source 1..22: mol_type = other RNA
aagatcagtaaaattcccttca

SEQ ID NO: 112286 - RNA, 22 nt, synthetic construct
  source 1..22: mol_type = other RNA
aagatcatacacctggatcaag

SEQ ID NO: 112287 - RNA, 22 nt, synthetic construct
  source 1..22: mol_type = other RNA
aagatcatttagtaagtgtgag

SEQ ID NO: 112288 - RNA, 22 nt, synthetic construct
  source 1..22: mol_type = other RNA
aagatcatttcaaaccaatgtt

SEQ ID NO: 112289 - RNA, 22 nt, synthetic construct
  source 1..22: mol_type = other RNA
aagatcatttcacttgattact

SEQ ID NO: 112290 - RNA, 22 nt, synthetic construct
  source 1..22: mol_type = other RNA
aagatccaagtattgtatcaat

SEQ ID NO: 112291 - RNA, 22 nt, synthetic construct
  source 1..22: mol_type = other RNA
aagatcctggattgctagtgtc

SEQ ID NO: 112292 - RNA, 22 nt, synthetic construct
  source 1..22: mol_type = other RNA
aagatctcaaacagcctaattg

SEQ ID NO: 112293 - RNA, 22 nt, synthetic construct
  source 1..22: mol_type = other RNA
aagatctcattttgaaaaacag

SEQ ID NO: 112294 - RNA, 22 nt, synthetic construct
  source 1..22: mol_type = other RNA
aagatctctatgcagaaatcta

SEQ ID NO: 112295 - RNA, 22 nt, synthetic construct
  source 1..22: mol_type = other RNA
aagatctgtctttggcccatat

SEQ ID NO: 112296 - RNA, 22 nt, synthetic construct
  source 1..22: mol_type = other RNA
aagatctgtggactttaggctg

SEQ ID NO: 112297 - RNA, 22 nt, synthetic construct
  source 1..22: mol_type = other RNA
aagatctgtttttcaaaatgag

SEQ ID NO: 112298 - RNA, 22 nt, synthetic construct
  source 1..22: mol_type = other RNA
aagatgaagtatagaaaggaga

SEQ ID NO: 112299 - RNA, 22 nt, synthetic construct
  source 1..22: mol_type = other RNA
aagatgaatctgcaactatcaa

SEQ ID NO: 112300 - RNA, 22 nt, synthetic construct
  source 1..22: mol_type = other RNA
aagatgacatttgcttttcctg

SEQ ID NO: 112301 - RNA, 22 nt, synthetic construct
  source 1..22: mol_type = other RNA
aagatgaggtctcagccttttc

SEQ ID NO: 112302 - RNA, 22 nt, synthetic construct
  source 1..22: mol_type = other RNA
aagatgatctaaatggtgtgaa

SEQ ID NO: 112303 - RNA, 22 nt, synthetic construct
  source 1..22: mol_type = other RNA
aagatgatgaacaaaggcagga

SEQ ID NO: 112304 - RNA, 22 nt, synthetic construct
  source 1..22: mol_type = other RNA
aagatgcagaaaaagcattttt

SEQ ID NO: 112305 - RNA, 22 nt, synthetic construct
  source 1..22: mol_type = other RNA
aagatgcagttgcttactctaa

SEQ ID NO: 112306 - RNA, 22 nt, synthetic construct
  source 1..22: mol_type = other RNA
aagatgcataagttctagagat

SEQ ID NO: 112307 - RNA, 22 nt, synthetic construct
  source 1..22: mol_type = other RNA
aagatgcataccaagcccggca

SEQ ID NO: 112308 - RNA, 22 nt, synthetic construct
  source 1..22: mol_type = other RNA
aagatgcattctgtcacataga

SEQ ID NO: 112309 - RNA, 22 nt, synthetic construct
  source 1..22: mol_type = other RNA
aagatgccacaaatggagtgac

SEQ ID NO: 112310 - RNA, 22 nt, synthetic construct
  source 1..22: mol_type = other RNA
aagatgccatttataatagcat

SEQ ID NO: 112311 - RNA, 22 nt, synthetic construct
  source 1..22: mol_type = other RNA
aagatgctattcaagacaagca

SEQ ID NO: 112312 - RNA, 22 nt, synthetic construct
  source 1..22: mol_type = other RNA
aagatgctccctctatggcagg

SEQ ID NO: 112313 - RNA, 22 nt, synthetic construct
  source 1..22: mol_type = other RNA
aagatgctgaacttgtcacaaa

SEQ ID NO: 112314 - RNA, 22 nt, synthetic construct
  source 1..22: mol_type = other RNA
aagatgctggtggagtattcta

SEQ ID NO: 112315 - RNA, 22 nt, synthetic construct
  source 1..22: mol_type = other RNA
aagatggaaagtggactatgta

SEQ ID NO: 112316 - RNA, 22 nt, synthetic construct
  source 1..22: mol_type = other RNA
aagatggagttacgctgccaaa

SEQ ID NO: 112317 - RNA, 22 nt, synthetic construct
  source 1..22: mol_type = other RNA
aagatggatttttctgtttctg

SEQ ID NO: 112318 - RNA, 22 nt, synthetic construct
  source 1..22: mol_type = other RNA
aagatggcaaacagactgagcc

SEQ ID NO: 112319 - RNA, 22 nt, synthetic construct
  source 1..22: mol_type = other RNA
aagatggcaagtttccattctc

SEQ ID NO: 112320 - RNA, 22 nt, synthetic construct
  source 1..22: mol_type = other RNA
aagatggcctccctcactaagt

SEQ ID NO: 112321 - RNA, 22 nt, synthetic construct
  source 1..22: mol_type = other RNA
aagatgggacttcactagtggg

SEQ ID NO: 112322 - RNA, 22 nt, synthetic construct
  source 1..22: mol_type = other RNA
aagatggttggaagtttctgga

SEQ ID NO: 112323 - RNA, 22 nt, synthetic construct
  source 1..22: mol_type = other RNA
aagatgtcaacattaagggaaa

SEQ ID NO: 112324 - RNA, 22 nt, synthetic construct
  source 1..22: mol_type = other RNA
aagatgtcttttaacttgcttt

SEQ ID NO: 112325 - RNA, 22 nt, synthetic construct
  source 1..22: mol_type = other RNA
aagatgtgtaccaaaagtcctg

SEQ ID NO: 112326 - RNA, 22 nt, synthetic construct
  source 1..22: mol_type = other RNA
aagatgttttcagttgcatgaa

SEQ ID NO: 112327 - RNA, 22 nt, synthetic construct
  source 1..22: mol_type = other RNA
aagattaaatacagagcacaga

SEQ ID NO: 112328 - RNA, 22 nt, synthetic construct
  source 1..22: mol_type = other RNA
aagattaagcacatctgtcttg

SEQ ID NO: 112329 - RNA, 22 nt, synthetic construct
  source 1..22: mol_type = other RNA
aagattaatccttgtggtctta

SEQ ID NO: 112330 - RNA, 22 nt, synthetic construct
  source 1..22: mol_type = other RNA
aagattactggatacaaggtca

SEQ ID NO: 112331 - RNA, 22 nt, synthetic construct
  source 1..22: mol_type = other RNA
aagattagaaaattagctgact

SEQ ID NO: 112332 - RNA, 22 nt, synthetic construct
  source 1..22: mol_type = other RNA
aagattatgttccacatgttac

SEQ ID NO: 112333 - RNA, 22 nt, synthetic construct
  source 1..22: mol_type = other RNA
aagattcaacaaaactgggggc

SEQ ID NO: 112334 - RNA, 22 nt, synthetic construct
  source 1..22: mol_type = other RNA
aagattccgtctcaaaaaatta

SEQ ID NO: 112335 - RNA, 22 nt, synthetic construct
  source 1..22: mol_type = other RNA
aagattctctttagggaagata

SEQ ID NO: 112336 - RNA, 22 nt, synthetic construct
  source 1..22: mol_type = other RNA
aagattctgtctctacaaaaaa

SEQ ID NO: 112337 - RNA, 22 nt, synthetic construct
  source 1..22: mol_type = other RNA
aagattcttgtcatgaatgaat

SEQ ID NO: 112338 - RNA, 22 nt, synthetic construct
  source 1..22: mol_type = other RNA
aagattgaaaatggtttaggct

SEQ ID NO: 112339 - RNA, 22 nt, synthetic construct
  source 1..22: mol_type = other RNA
aagattgagtcagtaatcaaaa

SEQ ID NO: 112340 - RNA, 22 nt, synthetic construct
  source 1..22: mol_type = other RNA
aagattggctttagatttatca

SEQ ID NO: 112341 - RNA, 22 nt, synthetic construct
  source 1..22: mol_type = other RNA
aagattgtgtgatttcatatga

SEQ ID NO: 112342 - RNA, 22 nt, synthetic construct
  source 1..22: mol_type = other RNA
aagatttacccctactttttgt

SEQ ID NO: 112343 - RNA, 22 nt, synthetic construct
  source 1..22: mol_type = other RNA
aagatttactaaactgaacgaa

SEQ ID NO: 112344 - RNA, 22 nt, synthetic construct
  source 1..22: mol_type = other RNA
aagatttcataggcatctctcc

SEQ ID NO: 112345 - RNA, 22 nt, synthetic construct
  source 1..22: mol_type = other RNA
aagatttctactggggtcttag

SEQ ID NO: 112346 - RNA, 22 nt, synthetic construct
  source 1..22: mol_type = other RNA
aagatttgccaatcaataattc

SEQ ID NO: 112347 - RNA, 22 nt, synthetic construct
  source 1..22: mol_type = other RNA
aagattttaggtcatttttcac

SEQ ID NO: 112348 - RNA, 22 nt, synthetic construct
  source 1..22: mol_type = other RNA
aagattttcccaatctctggta

SEQ ID NO: 112349 - RNA, 22 nt, synthetic construct
  source 1..22: mol_type = other RNA
aagattttttgttgttggtttg

SEQ ID NO: 112350 - RNA, 22 nt, synthetic construct
  source 1..22: mol_type = other RNA
aagcaaaacatatgtcagatgg

SEQ ID NO: 112351 - RNA, 22 nt, synthetic construct
  source 1..22: mol_type = other RNA
aagcaaaagcaaaattctaaca

SEQ ID NO: 112352 - RNA, 22 nt, synthetic construct
  source 1..22: mol_type = other RNA
aagcaaaatggaagtgctgggc

SEQ ID NO: 112353 - RNA, 22 nt, synthetic construct
  source 1..22: mol_type = other RNA
aagcaaaattctaacaagaagc

SEQ ID NO: 112354 - RNA, 22 nt, synthetic construct
  source 1..22: mol_type = other RNA
aagcaaaattgacaaacccttg

SEQ ID NO: 112355 - RNA, 22 nt, synthetic construct
  source 1..22: mol_type = other RNA
aagcaaaattttaaatcagcac

SEQ ID NO: 112356 - RNA, 22 nt, synthetic construct
  source 1..22: mol_type = other RNA
aagcaaaccagacatttctcat

SEQ ID NO: 112357 - RNA, 22 nt, synthetic construct
  source 1..22: mol_type = other RNA
aagcaaacgtgcacacccagtt

SEQ ID NO: 112358 - RNA, 22 nt, synthetic construct
  source 1..22: mol_type = other RNA
aagcaaagatatgggttattca

SEQ ID NO: 112359 - RNA, 22 nt, synthetic construct
  source 1..22: mol_type = other RNA
aagcaaaggattcgggggagag

SEQ ID NO: 112360 - RNA, 22 nt, synthetic construct
  source 1..22: mol_type = other RNA
aagcaaatgtcatcttctctct

SEQ ID NO: 112361 - RNA, 22 nt, synthetic construct
  source 1..22: mol_type = other RNA
aagcaaatgtgactagaagaaa

SEQ ID NO: 112362 - RNA, 22 nt, synthetic construct
  source 1..22: mol_type = other RNA
aagcaacaccagatactcatgc

SEQ ID NO: 112363 - RNA, 22 nt, synthetic construct
  source 1..22: mol_type = other RNA
aagcaacactaaagatttgcca

SEQ ID NO: 112364 - RNA, 22 nt, synthetic construct
  source 1..22: mol_type = other RNA
aagcaacaggaagaggcagcta

SEQ ID NO: 112365 - RNA, 22 nt, synthetic construct
  source 1..22: mol_type = other RNA
aagcaacatgctaagtgtttag

SEQ ID NO: 112366 - RNA, 22 nt, synthetic construct
  source 1..22: mol_type = other RNA
aagcaacctcatttgcagagca

SEQ ID NO: 112367 - RNA, 22 nt, synthetic construct
  source 1..22: mol_type = other RNA
aagcaaccttttaggtgcccca

SEQ ID NO: 112368 - RNA, 22 nt, synthetic construct
  source 1..22: mol_type = other RNA
aagcaactgcatcttcttttac

SEQ ID NO: 112369 - RNA, 22 nt, synthetic construct
  source 1..22: mol_type = other RNA
aagcaacttgaaggcaatgtag

SEQ ID NO: 112370 - RNA, 22 nt, synthetic construct
  source 1..22: mol_type = other RNA
aagcaacttgatcagggatttg

SEQ ID NO: 112371 - RNA, 22 nt, synthetic construct
  source 1..22: mol_type = other RNA
aagcaagccttggcaaggggaa

SEQ ID NO: 112372 - RNA, 22 nt, synthetic construct
  source 1..22: mol_type = other RNA
aagcaaggaagggcttgatcta

SEQ ID NO: 112373 - RNA, 22 nt, synthetic construct
  source 1..22: mol_type = other RNA
aagcaagtaaaagaagatgcag

SEQ ID NO: 112374 - RNA, 22 nt, synthetic construct
  source 1..22: mol_type = other RNA
aagcaagtatgagccactagtc

SEQ ID NO: 112375 - RNA, 22 nt, synthetic construct
  source 1..22: mol_type = other RNA
aagcaagtgtggtggtctcacc

SEQ ID NO: 112376 - RNA, 22 nt, synthetic construct
  source 1..22: mol_type = other RNA
aagcaagttaaaagacatcttt

SEQ ID NO: 112377 - RNA, 22 nt, synthetic construct
  source 1..22: mol_type = other RNA
aagcaagttacatgcttagcct

SEQ ID NO: 112378 - RNA, 22 nt, synthetic construct
  source 1..22: mol_type = other RNA
aagcaatctgaaacgaccttgc

SEQ ID NO: 112379 - RNA, 22 nt, synthetic construct
  source 1..22: mol_type = other RNA
aagcaattattagttgtacttg

SEQ ID NO: 112380 - RNA, 22 nt, synthetic construct
  source 1..22: mol_type = other RNA
aagcacaaacctggcaatactc

SEQ ID NO: 112381 - RNA, 22 nt, synthetic construct
  source 1..22: mol_type = other RNA
aagcacaaccactgatggaatt

SEQ ID NO: 112382 - RNA, 22 nt, synthetic construct
  source 1..22: mol_type = other RNA
aagcacaagcacagagtcagaa

SEQ ID NO: 112383 - RNA, 22 nt, synthetic construct
  source 1..22: mol_type = other RNA
aagcacacagtttgagaagcca

SEQ ID NO: 112384 - RNA, 22 nt, synthetic construct
  source 1..22: mol_type = other RNA
aagcacacatgaacctgcatgg

SEQ ID NO: 112385 - RNA, 22 nt, synthetic construct
  source 1..22: mol_type = other RNA
aagcacaccaaggtttctctcc

SEQ ID NO: 112386 - RNA, 22 nt, synthetic construct
  source 1..22: mol_type = other RNA
aagcacactttccttggagaag

SEQ ID NO: 112387 - RNA, 22 nt, synthetic construct
  source 1..22: mol_type = other RNA
aagcacagaattactatatgat

SEQ ID NO: 112388 - RNA, 22 nt, synthetic construct
  source 1..22: mol_type = other RNA
aagcacagactgtgccttgatc

SEQ ID NO: 112389 - RNA, 22 nt, synthetic construct
  source 1..22: mol_type = other RNA
aagcacagagtcagaaaattaa

SEQ ID NO: 112390 - RNA, 22 nt, synthetic construct
  source 1..22: mol_type = other RNA
aagcacaggcatcggccgggcg

SEQ ID NO: 112391 - RNA, 22 nt, synthetic construct
  source 1..22: mol_type = other RNA
aagcacaggcatctctctaaaa

SEQ ID NO: 112392 - RNA, 22 nt, synthetic construct
  source 1..22: mol_type = other RNA
aagcacagtctctgcagagcag

SEQ ID NO: 112393 - RNA, 22 nt, synthetic construct
  source 1..22: mol_type = other RNA
aagcacataaaaaaggaatctg

SEQ ID NO: 112394 - RNA, 22 nt, synthetic construct
  source 1..22: mol_type = other RNA
aagcacatctgtcttgtgcatc

SEQ ID NO: 112395 - RNA, 22 nt, synthetic construct
  source 1..22: mol_type = other RNA
aagcacatggtgataactggtg

SEQ ID NO: 112396 - RNA, 22 nt, synthetic construct
  source 1..22: mol_type = other RNA
aagcacattccttccgacctgt

SEQ ID NO: 112397 - RNA, 22 nt, synthetic construct
  source 1..22: mol_type = other RNA
aagcaccaacagatcctcacat

SEQ ID NO: 112398 - RNA, 22 nt, synthetic construct
  source 1..22: mol_type = other RNA
aagcaccaacccttgttggaca

SEQ ID NO: 112399 - RNA, 22 nt, synthetic construct
  source 1..22: mol_type = other RNA
aagcaccactagagtattacct

SEQ ID NO: 112400 - RNA, 22 nt, synthetic construct
  source 1..22: mol_type = other RNA
aagcaccactgagagggaagtt

SEQ ID NO: 112401 - RNA, 22 nt, synthetic construct
  source 1..22: mol_type = other RNA
aagcaccacttcgagaagggaa

SEQ ID NO: 112402 - RNA, 22 nt, synthetic construct
  source 1..22: mol_type = other RNA
aagcaccagggcctctgaagac

SEQ ID NO: 112403 - RNA, 22 nt, synthetic construct
  source 1..22: mol_type = other RNA
aagcaccagttatcaccatgtg

SEQ ID NO: 112404 - RNA, 22 nt, synthetic construct
  source 1..22: mol_type = other RNA
aagcacctaccataacaaaaaa

SEQ ID NO: 112405 - RNA, 22 nt, synthetic construct
  source 1..22: mol_type = other RNA
aagcacctgtataaataaaatg

SEQ ID NO: 112406 - RNA, 22 nt, synthetic construct
  source 1..22: mol_type = other RNA
aagcacgttagcatcaccatca

SEQ ID NO: 112407 - RNA, 22 nt, synthetic construct
  source 1..22: mol_type = other RNA
aagcacgtttgatctggtcaca

SEQ ID NO: 112408 - RNA, 22 nt, synthetic construct
  source 1..22: mol_type = other RNA
aagcactatccacatttggttt

SEQ ID NO: 112409 - RNA, 22 nt, synthetic construct
  source 1..22: mol_type = other RNA
aagcactgcgccaagcagggac

SEQ ID NO: 112410 - RNA, 22 nt, synthetic construct
  source 1..22: mol_type = other RNA
aagcactggtaaggaaacagag

SEQ ID NO: 112411 - RNA, 22 nt, synthetic construct
  source 1..22: mol_type = other RNA
aagcactttttaccaagttgaa

SEQ ID NO: 112412 - RNA, 22 nt, synthetic construct
  source 1..22: mol_type = other RNA
aagcagaaaatcagtgtgaaag

SEQ ID NO: 112413 - RNA, 22 nt, synthetic construct
  source 1..22: mol_type = other RNA
aagcagaaagttactattttca

SEQ ID NO: 112414 - RNA, 22 nt, synthetic construct
  source 1..22: mol_type = other RNA
aagcagaaatacagaccgatgg

SEQ ID NO: 112415 - RNA, 22 nt, synthetic construct
  source 1..22: mol_type = other RNA
aagcagaaatgacaagtaaatg

SEQ ID NO: 112416 - RNA, 22 nt, synthetic construct
  source 1..22: mol_type = other RNA
aagcagaaatgagttccagtcc

SEQ ID NO: 112417 - RNA, 22 nt, synthetic construct
  source 1..22: mol_type = other RNA
aagcagaactaagaccccagta

SEQ ID NO: 112418 - RNA, 22 nt, synthetic construct
  source 1..22: mol_type = other RNA
aagcagaatgtccatcaggaaa

SEQ ID NO: 112419 - RNA, 22 nt, synthetic construct
  source 1..22: mol_type = other RNA
aagcagaattcaaaaacactgt

SEQ ID NO: 112420 - RNA, 22 nt, synthetic construct
  source 1..22: mol_type = other RNA
aagcagacagaaagacagggag

SEQ ID NO: 112421 - RNA, 22 nt, synthetic construct
  source 1..22: mol_type = other RNA
aagcagagaaactggaatcaat

SEQ ID NO: 112422 - RNA, 22 nt, synthetic construct
  source 1..22: mol_type = other RNA
aagcagagagagaagatgacat

SEQ ID NO: 112423 - RNA, 22 nt, synthetic construct
  source 1..22: mol_type = other RNA
aagcagatctgctgtaagctgg

SEQ ID NO: 112424 - RNA, 22 nt, synthetic construct
  source 1..22: mol_type = other RNA
aagcagcaagggtggctggcac

SEQ ID NO: 112425 - RNA, 22 nt, synthetic construct
  source 1..22: mol_type = other RNA
aagcagctacctgttgattgtt

SEQ ID NO: 112426 - RNA, 22 nt, synthetic construct
  source 1..22: mol_type = other RNA
aagcaggaactcatattagtct

SEQ ID NO: 112427 - RNA, 22 nt, synthetic construct
  source 1..22: mol_type = other RNA
aagcaggccctgagaagtcaaa

SEQ ID NO: 112428 - RNA, 22 nt, synthetic construct
  source 1..22: mol_type = other RNA
aagcaggccttcgaggcatcta

SEQ ID NO: 112429 - RNA, 22 nt, synthetic construct
  source 1..22: mol_type = other RNA
aagcaggctttttacccggaga

SEQ ID NO: 112430 - RNA, 22 nt, synthetic construct
  source 1..22: mol_type = other RNA
aagcagggaaatggagggccag

SEQ ID NO: 112431 - RNA, 22 nt, synthetic construct
  source 1..22: mol_type = other RNA
aagcagggacgggcgggggagg

SEQ ID NO: 112432 - RNA, 22 nt, synthetic construct
  source 1..22: mol_type = other RNA
aagcagggactcccatatctac

SEQ ID NO: 112433 - RNA, 22 nt, synthetic construct
  source 1..22: mol_type = other RNA
aagcagggaggggtccccagca

SEQ ID NO: 112434 - RNA, 22 nt, synthetic construct
  source 1..22: mol_type = other RNA
aagcaggtcatgacttttttgc

SEQ ID NO: 112435 - RNA, 22 nt, synthetic construct
  source 1..22: mol_type = other RNA
aagcaggttcattttaataagc

SEQ ID NO: 112436 - RNA, 22 nt, synthetic construct
  source 1..22: mol_type = other RNA
aagcaggttgcattaatgcttc

SEQ ID NO: 112437 - RNA, 22 nt, synthetic construct
  source 1..22: mol_type = other RNA
aagcagtaaatatactgactag

SEQ ID NO: 112438 - RNA, 22 nt, synthetic construct
  source 1..22: mol_type = other RNA
aagcagtcctgccttggcctcc

SEQ ID NO: 112439 - RNA, 22 nt, synthetic construct
  source 1..22: mol_type = other RNA
aagcagttgatgcaatttgttt

SEQ ID NO: 112440 - RNA, 22 nt, synthetic construct
  source 1..22: mol_type = other RNA
aagcatagtttgagtatttcat

SEQ ID NO: 112441 - RNA, 22 nt, synthetic construct
  source 1..22: mol_type = other RNA
aagcatatgaatctagaaagat

SEQ ID NO: 112442 - RNA, 22 nt, synthetic construct
  source 1..22: mol_type = other RNA
aagcatcagagctttgttatga

SEQ ID NO: 112443 - RNA, 22 nt, synthetic construct
  source 1..22: mol_type = other RNA
aagcatcccatatggaggcaat

SEQ ID NO: 112444 - RNA, 22 nt, synthetic construct
  source 1..22: mol_type = other RNA
aagcatcgtgaagtctttattt

SEQ ID NO: 112445 - RNA, 22 nt, synthetic construct
  source 1..22: mol_type = other RNA
aagcatctgatacacttctatc

SEQ ID NO: 112446 - RNA, 22 nt, synthetic construct
  source 1..22: mol_type = other RNA
aagcatgagatactacgcctag

SEQ ID NO: 112447 - RNA, 22 nt, synthetic construct
  source 1..22: mol_type = other RNA
aagcatgagtatctggtgttgc

SEQ ID NO: 112448 - RNA, 22 nt, synthetic construct
  source 1..22: mol_type = other RNA
aagcatggtggtaggtgtgtgt

SEQ ID NO: 112449 - RNA, 22 nt, synthetic construct
  source 1..22: mol_type = other RNA
aagcatgtaacttgcttaggct

SEQ ID NO: 112450 - RNA, 22 nt, synthetic construct
  source 1..22: mol_type = other RNA
aagcatgtggccaggaggagga

SEQ ID NO: 112451 - RNA, 22 nt, synthetic construct
  source 1..22: mol_type = other RNA
aagcattaatgcaacctgcttt

SEQ ID NO: 112452 - RNA, 22 nt, synthetic construct
  source 1..22: mol_type = other RNA
aagcattgggagctttcattat

SEQ ID NO: 112453 - RNA, 22 nt, synthetic construct
  source 1..22: mol_type = other RNA
aagcattttccggttgtatagc

SEQ ID NO: 112454 - RNA, 22 nt, synthetic construct
  source 1..22: mol_type = other RNA
aagcattttctaaattgaacag

SEQ ID NO: 112455 - RNA, 22 nt, synthetic construct
  source 1..22: mol_type = other RNA
aagccaagagcgaggcctggaa

SEQ ID NO: 112456 - RNA, 22 nt, synthetic construct
  source 1..22: mol_type = other RNA
aagccaatatccctgataatca

SEQ ID NO: 112457 - RNA, 22 nt, synthetic construct
  source 1..22: mol_type = other RNA
aagccaatcttcccaatccttt

SEQ ID NO: 112458 - RNA, 22 nt, synthetic construct
  source 1..22: mol_type = other RNA
aagccacacagtacaaggctag

SEQ ID NO: 112459 - RNA, 22 nt, synthetic construct
  source 1..22: mol_type = other RNA
aagccacactcttggtctttct

SEQ ID NO: 112460 - RNA, 22 nt, synthetic construct
  source 1..22: mol_type = other RNA
aagccacagcgtggaatggtca

SEQ ID NO: 112461 - RNA, 22 nt, synthetic construct
  source 1..22: mol_type = other RNA
aagccacatgtggttattgagt

SEQ ID NO: 112462 - RNA, 22 nt, synthetic construct
  source 1..22: mol_type = other RNA
aagccacattagccactctgaa

SEQ ID NO: 112463 - RNA, 22 nt, synthetic construct
  source 1..22: mol_type = other RNA
aagccaccgcactcagcctgtt

SEQ ID NO: 112464 - RNA, 22 nt, synthetic construct
  source 1..22: mol_type = other RNA
aagccactgcattcatccaggc

SEQ ID NO: 112465 - RNA, 22 nt, synthetic construct
  source 1..22: mol_type = other RNA
aagccagcacctaacaatgatt

SEQ ID NO: 112466 - RNA, 22 nt, synthetic construct
  source 1..22: mol_type = other RNA
aagccagcattaccctaataac

SEQ ID NO: 112467 - RNA, 22 nt, synthetic construct
  source 1..22: mol_type = other RNA
aagccaggctttcccagggtgt

SEQ ID NO: 112468 - RNA, 22 nt, synthetic construct
  source 1..22: mol_type = other RNA
aagccagggtctgtctcacctc

SEQ ID NO: 112469 - RNA, 22 nt, synthetic construct
  source 1..22: mol_type = other RNA
aagccagtcactaaaaatcaga

SEQ ID NO: 112470 - RNA, 22 nt, synthetic construct
  source 1..22: mol_type = other RNA
aagccagtccttgtgatctatg

SEQ ID NO: 112471 - RNA, 22 nt, synthetic construct
  source 1..22: mol_type = other RNA
aagccatagtgtaaactaaaag

SEQ ID NO: 112472 - RNA, 22 nt, synthetic construct
  source 1..22: mol_type = other RNA
aagccatcctccagccttaatc

SEQ ID NO: 112473 - RNA, 22 nt, synthetic construct
  source 1..22: mol_type = other RNA
aagccatctaattcacatttaa

SEQ ID NO: 112474 - RNA, 22 nt, synthetic construct
  source 1..22: mol_type = other RNA
aagccatgtttctcctgcatgg

SEQ ID NO: 112475 - RNA, 22 nt, synthetic construct
  source 1..22: mol_type = other RNA
aagccatttatcagcaccaaag

SEQ ID NO: 112476 - RNA, 22 nt, synthetic construct
  source 1..22: mol_type = other RNA
aagccatttcaggttttcgacc

SEQ ID NO: 112477 - RNA, 22 nt, synthetic construct
  source 1..22: mol_type = other RNA
aagcccaacctgattagaggct

SEQ ID NO: 112478 - RNA, 22 nt, synthetic construct
  source 1..22: mol_type = other RNA
aagcccaacttcacaccattta

SEQ ID NO: 112479 - RNA, 22 nt, synthetic construct
  source 1..22: mol_type = other RNA
aagcccaactttttctttttag

SEQ ID NO: 112480 - RNA, 22 nt, synthetic construct
  source 1..22: mol_type = other RNA
aagcccaatctacaggtcggaa

SEQ ID NO: 112481 - RNA, 22 nt, synthetic construct
  source 1..22: mol_type = other RNA
aagcccaccagcataagacccc

SEQ ID NO: 112482 - RNA, 22 nt, synthetic construct
  source 1..22: mol_type = other RNA
aagcccagagaggctaggtgac

SEQ ID NO: 112483 - RNA, 22 nt, synthetic construct
  source 1..22: mol_type = other RNA
aagcccagccgcggactccggc

SEQ ID NO: 112484 - RNA, 22 nt, synthetic construct
  source 1..22: mol_type = other RNA
aagccccaaaccatcaagtgtg

SEQ ID NO: 112485 - RNA, 22 nt, synthetic construct
  source 1..22: mol_type = other RNA
aagccccagttctgcgcaattg

SEQ ID NO: 112486 - RNA, 22 nt, synthetic construct
  source 1..22: mol_type = other RNA
aagccccattgtacacatatta

SEQ ID NO: 112487 - RNA, 22 nt, synthetic construct
  source 1..22: mol_type = other RNA
aagcccgccgctcgcaggtggg

SEQ ID NO: 112488 - RNA, 22 nt, synthetic construct
  source 1..22: mol_type = other RNA
aagccctcaggaccaggcagtc

SEQ ID NO: 112489 - RNA, 22 nt, synthetic construct
  source 1..22: mol_type = other RNA
aagccctctaagtcagcctggg

SEQ ID NO: 112490 - RNA, 22 nt, synthetic construct
  source 1..22: mol_type = other RNA
aagccctgcagccagatttgat

SEQ ID NO: 112491 - RNA, 22 nt, synthetic construct
  source 1..22: mol_type = other RNA
aagccctgccttaaaacatttt

SEQ ID NO: 112492 - RNA, 22 nt, synthetic construct
  source 1..22: mol_type = other RNA
aagcccttccttgcttgtcttg

SEQ ID NO: 112493 - RNA, 22 nt, synthetic construct
  source 1..22: mol_type = other RNA
aagcccttgagtatttttgagc

SEQ ID NO: 112494 - RNA, 22 nt, synthetic construct
  source 1..22: mol_type = other RNA
aagccgcaaataatcattcttc

SEQ ID NO: 112495 - RNA, 22 nt, synthetic construct
  source 1..22: mol_type = other RNA
aagccggattcctttcaaagag

SEQ ID NO: 112496 - RNA, 22 nt, synthetic construct
  source 1..22: mol_type = other RNA
aagccgttccatcagagaggct

SEQ ID NO: 112497 - RNA, 22 nt, synthetic construct
  source 1..22: mol_type = other RNA
aagcctacctcccttcacaaag

SEQ ID NO: 112498 - RNA, 22 nt, synthetic construct
  source 1..22: mol_type = other RNA
aagcctactgctctgtcctgtc

SEQ ID NO: 112499 - RNA, 22 nt, synthetic construct
  source 1..22: mol_type = other RNA
aagcctagagattaggcagaac

SEQ ID NO: 112500 - RNA, 22 nt, synthetic construct
  source 1..22: mol_type = other RNA
aagcctatgtaagacaatgtct

SEQ ID NO: 112501 - RNA, 22 nt, synthetic construct
  source 1..22: mol_type = other RNA
aagcctcaaaatttagtaaggg

SEQ ID NO: 112502 - RNA, 22 nt, synthetic construct
  source 1..22: mol_type = other RNA
aagcctcaaacgaaccaattac

SEQ ID NO: 112503 - RNA, 22 nt, synthetic construct
  source 1..22: mol_type = other RNA
aagcctcatttgaactttccag

SEQ ID NO: 112504 - RNA, 22 nt, synthetic construct
  source 1..22: mol_type = other RNA
aagcctctcaacacttcagtgg

SEQ ID NO: 112505 - RNA, 22 nt, synthetic construct
  source 1..22: mol_type = other RNA
aagcctctctgatggaacggct

SEQ ID NO: 112506 - RNA, 22 nt, synthetic construct
  source 1..22: mol_type = other RNA
aagcctctgtggaccatgtttt

SEQ ID NO: 112507 - RNA, 22 nt, synthetic construct
  source 1..22: mol_type = other RNA
aagcctcttcagaagaggataa

SEQ ID NO: 112508 - RNA, 22 nt, synthetic construct
  source 1..22: mol_type = other RNA
aagcctgataagctcccagcca

SEQ ID NO: 112509 - RNA, 22 nt, synthetic construct
  source 1..22: mol_type = other RNA
aagcctgcttcagcctaagcaa

SEQ ID NO: 112510 - RNA, 22 nt, synthetic construct
  source 1..22: mol_type = other RNA
aagcctggctttagatggtaaa

SEQ ID NO: 112511 - RNA, 22 nt, synthetic construct
  source 1..22: mol_type = other RNA
aagcctgtgacagtatgtcaga

SEQ ID NO: 112512 - RNA, 22 nt, synthetic construct
  source 1..22: mol_type = other RNA
aagcctgtggaggcagtaccat

SEQ ID NO: 112513 - RNA, 22 nt, synthetic construct
  source 1..22: mol_type = other RNA
aagccttaaaagtgctgcagta

SEQ ID NO: 112514 - RNA, 22 nt, synthetic construct
  source 1..22: mol_type = other RNA
aagccttcccctgctgttccca

SEQ ID NO: 112515 - RNA, 22 nt, synthetic construct
  source 1..22: mol_type = other RNA
aagccttctctactctgcctca

SEQ ID NO: 112516 - RNA, 22 nt, synthetic construct
  source 1..22: mol_type = other RNA
aagccttggcaaggggaatggt

SEQ ID NO: 112517 - RNA, 22 nt, synthetic construct
  source 1..22: mol_type = other RNA
aagcctttattttttcttccca

SEQ ID NO: 112518 - RNA, 22 nt, synthetic construct
  source 1..22: mol_type = other RNA
aagcgctactcagctgtcactc

SEQ ID NO: 112519 - RNA, 22 nt, synthetic construct
  source 1..22: mol_type = other RNA
aagcgctcttcaagcattggga

SEQ ID NO: 112520 - RNA, 22 nt, synthetic construct
  source 1..22: mol_type = other RNA
aagcgctgaagtacttcaaggt

SEQ ID NO: 112521 - RNA, 22 nt, synthetic construct
  source 1..22: mol_type = other RNA
aagcggcagggccgggggttgg

SEQ ID NO: 112522 - RNA, 22 nt, synthetic construct
  source 1..22: mol_type = other RNA
aagcggggctgccactacttag

SEQ ID NO: 112523 - RNA, 22 nt, synthetic construct
  source 1..22: mol_type = other RNA
aagcggtcaacgcacccagagc

SEQ ID NO: 112524 - RNA, 22 nt, synthetic construct
  source 1..22: mol_type = other RNA
aagcgtactgtgattacaattc

SEQ ID NO: 112525 - RNA, 22 nt, synthetic construct
  source 1..22: mol_type = other RNA
aagcgttggagacagcctaaac

SEQ ID NO: 112526 - RNA, 22 nt, synthetic construct
  source 1..22: mol_type = other RNA
aagctaagagttttatagtctt

SEQ ID NO: 112527 - RNA, 22 nt, synthetic construct
  source 1..22: mol_type = other RNA
aagctaataatttatcagatcc

SEQ ID NO: 112528 - RNA, 22 nt, synthetic construct
  source 1..22: mol_type = other RNA
aagctaatcaagccgcaaataa

SEQ ID NO: 112529 - RNA, 22 nt, synthetic construct
  source 1..22: mol_type = other RNA
aagctaatcccaaagtgagcag

SEQ ID NO: 112530 - RNA, 22 nt, synthetic construct
  source 1..22: mol_type = other RNA
aagctaatctactttctaatcc

SEQ ID NO: 112531 - RNA, 22 nt, synthetic construct
  source 1..22: mol_type = other RNA
aagctacagactaatatgagtt

SEQ ID NO: 112532 - RNA, 22 nt, synthetic construct
  source 1..22: mol_type = other RNA
aagctacagtaatcaaacagtg

SEQ ID NO: 112533 - RNA, 22 nt, synthetic construct
  source 1..22: mol_type = other RNA
aagctaccatttattcctctct

SEQ ID NO: 112534 - RNA, 22 nt, synthetic construct
  source 1..22: mol_type = other RNA
aagctaccctcgagtaaaaaga

SEQ ID NO: 112535 - RNA, 22 nt, synthetic construct
  source 1..22: mol_type = other RNA
aagctaccctttcttgttagta

SEQ ID NO: 112536 - RNA, 22 nt, synthetic construct
  source 1..22: mol_type = other RNA
aagctactattccaggatcaaa

SEQ ID NO: 112537 - RNA, 22 nt, synthetic construct
  source 1..22: mol_type = other RNA
aagctagaagacctcaaattct

SEQ ID NO: 112538 - RNA, 22 nt, synthetic construct
  source 1..22: mol_type = other RNA
aagctatacacgttacaaaata

SEQ ID NO: 112539 - RNA, 22 nt, synthetic construct
  source 1..22: mol_type = other RNA
aagctatagctgagaagtaaca

SEQ ID NO: 112540 - RNA, 22 nt, synthetic construct
  source 1..22: mol_type = other RNA
aagctatgctcctgcctcagcc

SEQ ID NO: 112541 - RNA, 22 nt, synthetic construct
  source 1..22: mol_type = other RNA
aagctatggagcactgtgagcc

SEQ ID NO: 112542 - RNA, 22 nt, synthetic construct
  source 1..22: mol_type = other RNA
aagctcaaaaatactcaagggc

SEQ ID NO: 112543 - RNA, 22 nt, synthetic construct
  source 1..22: mol_type = other RNA
aagctcacctctggactcaggg

SEQ ID NO: 112544 - RNA, 22 nt, synthetic construct
  source 1..22: mol_type = other RNA
aagctcaggaccagatgacttc

SEQ ID NO: 112545 - RNA, 22 nt, synthetic construct
  source 1..22: mol_type = other RNA
aagctcagtgtgtttttgtaaa

SEQ ID NO: 112546 - RNA, 22 nt, synthetic construct
  source 1..22: mol_type = other RNA
aagctcccaatgcttgaagagc

SEQ ID NO: 112547 - RNA, 22 nt, synthetic construct
  source 1..22: mol_type = other RNA
aagctcccagccaaacagtttt

SEQ ID NO: 112548 - RNA, 22 nt, synthetic construct
  source 1..22: mol_type = other RNA
aagctccccggatgattctaat

SEQ ID NO: 112549 - RNA, 22 nt, synthetic construct
  source 1..22: mol_type = other RNA
aagctccgcctcctggtgggtt

SEQ ID NO: 112550 - RNA, 22 nt, synthetic construct
  source 1..22: mol_type = other RNA
aagctcgccgtctccctcggcc

SEQ ID NO: 112551 - RNA, 22 nt, synthetic construct
  source 1..22: mol_type = other RNA
aagctctaataaaagctggagt

SEQ ID NO: 112552 - RNA, 22 nt, synthetic construct
  source 1..22: mol_type = other RNA
aagctctaatagttcacctctc

SEQ ID NO: 112553 - RNA, 22 nt, synthetic construct
  source 1..22: mol_type = other RNA
aagctctagtgagctatgattg

SEQ ID NO: 112554 - RNA, 22 nt, synthetic construct
  source 1..22: mol_type = other RNA
aagctctatggcatttgagggt

SEQ ID NO: 112555 - RNA, 22 nt, synthetic construct
  source 1..22: mol_type = other RNA
aagctctcaattaatgcccaat

SEQ ID NO: 112556 - RNA, 22 nt, synthetic construct
  source 1..22: mol_type = other RNA
aagctctgatgctttctctagt

SEQ ID NO: 112557 - RNA, 22 nt, synthetic construct
  source 1..22: mol_type = other RNA
aagctgaactcctttcttaccc

SEQ ID NO: 112558 - RNA, 22 nt, synthetic construct
  source 1..22: mol_type = other RNA
aagctgaactctgtggagtcct

SEQ ID NO: 112559 - RNA, 22 nt, synthetic construct
  source 1..22: mol_type = other RNA
aagctgatcaaggaagcttcct

SEQ ID NO: 112560 - RNA, 22 nt, synthetic construct
  source 1..22: mol_type = other RNA
aagctggacccttaccttaaac

SEQ ID NO: 112561 - RNA, 22 nt, synthetic construct
  source 1..22: mol_type = other RNA
aagctggactcattccaatcct

SEQ ID NO: 112562 - RNA, 22 nt, synthetic construct
  source 1..22: mol_type = other RNA
aagctggagttatttgtataaa

SEQ ID NO: 112563 - RNA, 22 nt, synthetic construct
  source 1..22: mol_type = other RNA
aagctggcatgttggatagttt

SEQ ID NO: 112564 - RNA, 22 nt, synthetic construct
  source 1..22: mol_type = other RNA
aagctgggctagagccaggaag

SEQ ID NO: 112565 - RNA, 22 nt, synthetic construct
  source 1..22: mol_type = other RNA
aagctggtaatacagtctgatt

SEQ ID NO: 112566 - RNA, 22 nt, synthetic construct
  source 1..22: mol_type = other RNA
aagctgtccttctcgtgtgagc

SEQ ID NO: 112567 - RNA, 22 nt, synthetic construct
  source 1..22: mol_type = other RNA
aagctgtgagtccttccagtat

SEQ ID NO: 112568 - RNA, 22 nt, synthetic construct
  source 1..22: mol_type = other RNA
aagctgtggatgttggtgagaa

SEQ ID NO: 112569 - RNA, 22 nt, synthetic construct
  source 1..22: mol_type = other RNA
aagctgtttgagctgaaagtaa

SEQ ID NO: 112570 - RNA, 22 nt, synthetic construct
  source 1..22: mol_type = other RNA
aagctgttttggtaaaatgtgg

SEQ ID NO: 112571 - RNA, 22 nt, synthetic construct
  source 1..22: mol_type = other RNA
aagcttaagagctaagactata

SEQ ID NO: 112572 - RNA, 22 nt, synthetic construct
  source 1..22: mol_type = other RNA
aagcttaatttagatgagagtg

SEQ ID NO: 112573 - RNA, 22 nt, synthetic construct
  source 1..22: mol_type = other RNA
aagcttaggtcagattcctttt

SEQ ID NO: 112574 - RNA, 22 nt, synthetic construct
  source 1..22: mol_type = other RNA
aagcttaggtctttgatccatt

SEQ ID NO: 112575 - RNA, 22 nt, synthetic construct
  source 1..22: mol_type = other RNA
aagcttataatttctgagagta

SEQ ID NO: 112576 - RNA, 22 nt, synthetic construct
  source 1..22: mol_type = other RNA
aagcttatgatcttgggaatac

SEQ ID NO: 112577 - RNA, 22 nt, synthetic construct
  source 1..22: mol_type = other RNA
aagcttattaaaatgaacctgc

SEQ ID NO: 112578 - RNA, 22 nt, synthetic construct
  source 1..22: mol_type = other RNA
aagcttcaaaccactatctaat

SEQ ID NO: 112579 - RNA, 22 nt, synthetic construct
  source 1..22: mol_type = other RNA
aagcttcacttctctgctgctg

SEQ ID NO: 112580 - RNA, 22 nt, synthetic construct
  source 1..22: mol_type = other RNA
aagcttcccccctctctctttc

SEQ ID NO: 112581 - RNA, 22 nt, synthetic construct
  source 1..22: mol_type = other RNA
aagcttcctaaagagagtgaca

SEQ ID NO: 112582 - RNA, 22 nt, synthetic construct
  source 1..22: mol_type = other RNA
aagcttcctctggctgacctgg

SEQ ID NO: 112583 - RNA, 22 nt, synthetic construct
  source 1..22: mol_type = other RNA
aagcttccttgatcagcttcct

SEQ ID NO: 112584 - RNA, 22 nt, synthetic construct
  source 1..22: mol_type = other RNA
aagcttcgaagcaaaacatatg

SEQ ID NO: 112585 - RNA, 22 nt, synthetic construct
  source 1..22: mol_type = other RNA
aagcttcgacagtcccttgcct

SEQ ID NO: 112586 - RNA, 22 nt, synthetic construct
  source 1..22: mol_type = other RNA
aagcttctgagcagtgtttcct

SEQ ID NO: 112587 - RNA, 22 nt, synthetic construct
  source 1..22: mol_type = other RNA
aagcttgggtaggaagctgatc

SEQ ID NO: 112588 - RNA, 22 nt, synthetic construct
  source 1..22: mol_type = other RNA
aagctttaaactggatgaatac

SEQ ID NO: 112589 - RNA, 22 nt, synthetic construct
  source 1..22: mol_type = other RNA
aagctttcagacttaactatag

SEQ ID NO: 112590 - RNA, 22 nt, synthetic construct
  source 1..22: mol_type = other RNA
aagctttgtgactgtgagggta

SEQ ID NO: 112591 - RNA, 22 nt, synthetic construct
  source 1..22: mol_type = other RNA
aagcttttctcctaagtcttct

SEQ ID NO: 112592 - RNA, 22 nt, synthetic construct
  source 1..22: mol_type = other RNA
aaggaaaaaacacctaaagata

SEQ ID NO: 112593 - RNA, 22 nt, synthetic construct
  source 1..22: mol_type = other RNA
aaggaaaaaacgggttatacac

SEQ ID NO: 112594 - RNA, 22 nt, synthetic construct
  source 1..22: mol_type = other RNA
aaggaaaaatctaaccctcaat

SEQ ID NO: 112595 - RNA, 22 nt, synthetic construct
  source 1..22: mol_type = other RNA
aaggaaaagaacacagtgttga

SEQ ID NO: 112596 - RNA, 22 nt, synthetic construct
  source 1..22: mol_type = other RNA
aaggaaaagagatctagtgaag

SEQ ID NO: 112597 - RNA, 22 nt, synthetic construct
  source 1..22: mol_type = other RNA
aaggaaaagtcagtaaaaaagg

SEQ ID NO: 112598 - RNA, 22 nt, synthetic construct
  source 1..22: mol_type = other RNA
aaggaaacactataaatcagta

SEQ ID NO: 112599 - RNA, 22 nt, synthetic construct
  source 1..22: mol_type = other RNA
aaggaaacagagttttccaata

SEQ ID NO: 112600 - RNA, 22 nt, synthetic construct
  source 1..22: mol_type = other RNA
aaggaaaccccagggatatttt

SEQ ID NO: 112601 - RNA, 22 nt, synthetic construct
  source 1..22: mol_type = other RNA
aaggaaagcacgtttgatctgg

SEQ ID NO: 112602 - RNA, 22 nt, synthetic construct
  source 1..22: mol_type = other RNA
aaggaaagctcaggaccagatg

SEQ ID NO: 112603 - RNA, 22 nt, synthetic construct
  source 1..22: mol_type = other RNA
aaggaaaggagatactggccat

SEQ ID NO: 112604 - RNA, 22 nt, synthetic construct
  source 1..22: mol_type = other RNA
aaggaaaggatggtttgattgt

SEQ ID NO: 112605 - RNA, 22 nt, synthetic construct
  source 1..22: mol_type = other RNA
aaggaaagtaactgttggcaag

SEQ ID NO: 112606 - RNA, 22 nt, synthetic construct
  source 1..22: mol_type = other RNA
aaggaaagtgtgcttgggctcc

SEQ ID NO: 112607 - RNA, 22 nt, synthetic construct
  source 1..22: mol_type = other RNA
aaggaaataagaaggtttgtag

SEQ ID NO: 112608 - RNA, 22 nt, synthetic construct
  source 1..22: mol_type = other RNA
aaggaaatacaaaaagtgatac

SEQ ID NO: 112609 - RNA, 22 nt, synthetic construct
  source 1..22: mol_type = other RNA
aaggaaatgagtgtatgcaggg

SEQ ID NO: 112610 - RNA, 22 nt, synthetic construct
  source 1..22: mol_type = other RNA
aaggaaatggacagcacattaa

SEQ ID NO: 112611 - RNA, 22 nt, synthetic construct
  source 1..22: mol_type = other RNA
aaggaacacacacctattcata

SEQ ID NO: 112612 - RNA, 22 nt, synthetic construct
  source 1..22: mol_type = other RNA
aaggaactaatttcatacaagt

SEQ ID NO: 112613 - RNA, 22 nt, synthetic construct
  source 1..22: mol_type = other RNA
aaggaagagtttatattctaag

SEQ ID NO: 112614 - RNA, 22 nt, synthetic construct
  source 1..22: mol_type = other RNA
aaggaagcaccaacccttgttg

SEQ ID NO: 112615 - RNA, 22 nt, synthetic construct
  source 1..22: mol_type = other RNA
aaggaagcagaatgtccatcag

SEQ ID NO: 112616 - RNA, 22 nt, synthetic construct
  source 1..22: mol_type = other RNA
aaggaagcttcctaaagagagt

SEQ ID NO: 112617 - RNA, 22 nt, synthetic construct
  source 1..22: mol_type = other RNA
aaggaaggaaaggagatactgg

SEQ ID NO: 112618 - RNA, 22 nt, synthetic construct
  source 1..22: mol_type = other RNA
aaggaaggaattttaggacaag

SEQ ID NO: 112619 - RNA, 22 nt, synthetic construct
  source 1..22: mol_type = other RNA
aaggaaggattggaatgagtcc

SEQ ID NO: 112620 - RNA, 22 nt, synthetic construct
  source 1..22: mol_type = other RNA
aaggaaggcagggtaggaaggc

SEQ ID NO: 112621 - RNA, 22 nt, synthetic construct
  source 1..22: mol_type = other RNA
aaggaagggcttgatctagtaa

SEQ ID NO: 112622 - RNA, 22 nt, synthetic construct
  source 1..22: mol_type = other RNA
aaggaaggtcaaatggtaacag

SEQ ID NO: 112623 - RNA, 22 nt, synthetic construct
  source 1..22: mol_type = other RNA
aaggaatataaacgtgtgtgta

SEQ ID NO: 112624 - RNA, 22 nt, synthetic construct
  source 1..22: mol_type = other RNA
aaggaatccggctttatgagac

SEQ ID NO: 112625 - RNA, 22 nt, synthetic construct
  source 1..22: mol_type = other RNA
aaggaatctgacctaagcttgg

SEQ ID NO: 112626 - RNA, 22 nt, synthetic construct
  source 1..22: mol_type = other RNA
aaggaatctgggccgggcgcgg

SEQ ID NO: 112627 - RNA, 22 nt, synthetic construct
  source 1..22: mol_type = other RNA
aaggaatgcctataaaatgctg

SEQ ID NO: 112628 - RNA, 22 nt, synthetic construct
  source 1..22: mol_type = other RNA
aaggaatggaattctgatgcac

SEQ ID NO: 112629 - RNA, 22 nt, synthetic construct
  source 1..22: mol_type = other RNA
aaggaatgtgcactcttttaaa

SEQ ID NO: 112630 - RNA, 22 nt, synthetic construct
  source 1..22: mol_type = other RNA
aaggaatgtgcttcctaaacct

SEQ ID NO: 112631 - RNA, 22 nt, synthetic construct
  source 1..22: mol_type = other RNA
aaggaattgtaatcacagtacg

SEQ ID NO: 112632 - RNA, 22 nt, synthetic construct
  source 1..22: mol_type = other RNA
aaggaattttaggacaaggaaa

SEQ ID NO: 112633 - RNA, 22 nt, synthetic construct
  source 1..22: mol_type = other RNA
aaggaattttcaggactcatga

SEQ ID NO: 112634 - RNA, 22 nt, synthetic construct
  source 1..22: mol_type = other RNA
aaggacacaaattatgactgag

SEQ ID NO: 112635 - RNA, 22 nt, synthetic construct
  source 1..22: mol_type = other RNA
aaggacactattgagagtgaaa

SEQ ID NO: 112636 - RNA, 22 nt, synthetic construct
  source 1..22: mol_type = other RNA
aaggacagaaattcaacttggt

SEQ ID NO: 112637 - RNA, 22 nt, synthetic construct
  source 1..22: mol_type = other RNA
aaggacagcttccacccaagtg

SEQ ID NO: 112638 - RNA, 22 nt, synthetic construct
  source 1..22: mol_type = other RNA
aaggacaggtcacattctgcct

SEQ ID NO: 112639 - RNA, 22 nt, synthetic construct
  source 1..22: mol_type = other RNA
aaggacatccacaacattgtgc

SEQ ID NO: 112640 - RNA, 22 nt, synthetic construct
  source 1..22: mol_type = other RNA
aaggacattagtggaaaaactg

SEQ ID NO: 112641 - RNA, 22 nt, synthetic construct
  source 1..22: mol_type = other RNA
aaggaccaggtatggcgactca

SEQ ID NO: 112642 - RNA, 22 nt, synthetic construct
  source 1..22: mol_type = other RNA
aaggaccatctgttaaaagata

SEQ ID NO: 112643 - RNA, 22 nt, synthetic construct
  source 1..22: mol_type = other RNA
aaggaccattagcagttctgta

SEQ ID NO: 112644 - RNA, 22 nt, synthetic construct
  source 1..22: mol_type = other RNA
aaggactcacagcttaccaagt

SEQ ID NO: 112645 - RNA, 22 nt, synthetic construct
  source 1..22: mol_type = other RNA
aaggactgaagtcctttcttgg

SEQ ID NO: 112646 - RNA, 22 nt, synthetic construct
  source 1..22: mol_type = other RNA
aaggactggaactcatttctgc

SEQ ID NO: 112647 - RNA, 22 nt, synthetic construct
  source 1..22: mol_type = other RNA
aaggactggcttcagtgccaac

SEQ ID NO: 112648 - RNA, 22 nt, synthetic construct
  source 1..22: mol_type = other RNA
aaggactgggatcctaagcatg

SEQ ID NO: 112649 - RNA, 22 nt, synthetic construct
  source 1..22: mol_type = other RNA
aaggacttcagtccttaccact

SEQ ID NO: 112650 - RNA, 22 nt, synthetic construct
  source 1..22: mol_type = other RNA
aaggacttgatctaaaatggaa

SEQ ID NO: 112651 - RNA, 22 nt, synthetic construct
  source 1..22: mol_type = other RNA
aaggagaaaacaaaaagaaact

SEQ ID NO: 112652 - RNA, 22 nt, synthetic construct
  source 1..22: mol_type = other RNA
aaggagaaaccatttacccctt

SEQ ID NO: 112653 - RNA, 22 nt, synthetic construct
  source 1..22: mol_type = other RNA
aaggagaatcgcttaaacccgg

SEQ ID NO: 112654 - RNA, 22 nt, synthetic construct
  source 1..22: mol_type = other RNA
aaggagaccagttaggaagcca

SEQ ID NO: 112655 - RNA, 22 nt, synthetic construct
  source 1..22: mol_type = other RNA
aaggagacctactaaaagttga

SEQ ID NO: 112656 - RNA, 22 nt, synthetic construct
  source 1..22: mol_type = other RNA
aaggagagaaaaacaaaacaaa

SEQ ID NO: 112657 - RNA, 22 nt, synthetic construct
  source 1..22: mol_type = other RNA
aaggagagaagagggggcataa

SEQ ID NO: 112658 - RNA, 22 nt, synthetic construct
  source 1..22: mol_type = other RNA
aaggagatactggccatgtttt

SEQ ID NO: 112659 - RNA, 22 nt, synthetic construct
  source 1..22: mol_type = other RNA
aaggagatatacaggaagagac

SEQ ID NO: 112660 - RNA, 22 nt, synthetic construct
  source 1..22: mol_type = other RNA
aaggagatggcacataccatgg

SEQ ID NO: 112661 - RNA, 22 nt, synthetic construct
  source 1..22: mol_type = other RNA
aaggagccaaacatcatgattt

SEQ ID NO: 112662 - RNA, 22 nt, synthetic construct
  source 1..22: mol_type = other RNA
aaggaggaaaataatttgcaac

SEQ ID NO: 112663 - RNA, 22 nt, synthetic construct
  source 1..22: mol_type = other RNA
aaggaggaactaattgataaaa

SEQ ID NO: 112664 - RNA, 22 nt, synthetic construct
  source 1..22: mol_type = other RNA
aaggagggaaaatgtttatttt

SEQ ID NO: 112665 - RNA, 22 nt, synthetic construct
  source 1..22: mol_type = other RNA
aaggagggactgaaaccagtgg

SEQ ID NO: 112666 - RNA, 22 nt, synthetic construct
  source 1..22: mol_type = other RNA
aaggagggaggattgtttgagg

SEQ ID NO: 112667 - RNA, 22 nt, synthetic construct
  source 1..22: mol_type = other RNA
aaggagtccagtcctgctaaca

SEQ ID NO: 112668 - RNA, 22 nt, synthetic construct
  source 1..22: mol_type = other RNA
aaggagtctgcccatcctatct

SEQ ID NO: 112669 - RNA, 22 nt, synthetic construct
  source 1..22: mol_type = other RNA
aaggagttcagctttaaagaga

SEQ ID NO: 112670 - RNA, 22 nt, synthetic construct
  source 1..22: mol_type = other RNA
aaggataaacaaagagaacaat

SEQ ID NO: 112671 - RNA, 22 nt, synthetic construct
  source 1..22: mol_type = other RNA
aaggatactgagaacagaattt

SEQ ID NO: 112672 - RNA, 22 nt, synthetic construct
  source 1..22: mol_type = other RNA
aaggatatgggccaaagacaga

SEQ ID NO: 112673 - RNA, 22 nt, synthetic construct
  source 1..22: mol_type = other RNA
aaggatatgttttctaaacctt

SEQ ID NO: 112674 - RNA, 22 nt, synthetic construct
  source 1..22: mol_type = other RNA
aaggatcgttagtattttcaca

SEQ ID NO: 112675 - RNA, 22 nt, synthetic construct
  source 1..22: mol_type = other RNA
aaggatgaccttgacaataaat

SEQ ID NO: 112676 - RNA, 22 nt, synthetic construct
  source 1..22: mol_type = other RNA
aaggatgcacaagacagatgtg

SEQ ID NO: 112677 - RNA, 22 nt, synthetic construct
  source 1..22: mol_type = other RNA
aaggatggccagtcatgtgggg

SEQ ID NO: 112678 - RNA, 22 nt, synthetic construct
  source 1..22: mol_type = other RNA
aaggatggtttgattgttccag

SEQ ID NO: 112679 - RNA, 22 nt, synthetic construct
  source 1..22: mol_type = other RNA
aaggatgtcaacaaaatactag

SEQ ID NO: 112680 - RNA, 22 nt, synthetic construct
  source 1..22: mol_type = other RNA
aaggatgtcaactgaggcagag

SEQ ID NO: 112681 - RNA, 22 nt, synthetic construct
  source 1..22: mol_type = other RNA
aaggattaatctttctgaactc

SEQ ID NO: 112682 - RNA, 22 nt, synthetic construct
  source 1..22: mol_type = other RNA
aaggattagaaagtagattagc

SEQ ID NO: 112683 - RNA, 22 nt, synthetic construct
  source 1..22: mol_type = other RNA
aaggattagtgttaattcttcc

SEQ ID NO: 112684 - RNA, 22 nt, synthetic construct
  source 1..22: mol_type = other RNA
aaggattatggctagaaacttg

SEQ ID NO: 112685 - RNA, 22 nt, synthetic construct
  source 1..22: mol_type = other RNA
aaggattcctccctggagaggc

SEQ ID NO: 112686 - RNA, 22 nt, synthetic construct
  source 1..22: mol_type = other RNA
aaggattcgggggagagcactg

SEQ ID NO: 112687 - RNA, 22 nt, synthetic construct
  source 1..22: mol_type = other RNA
aaggattgaatggaaagaaata

SEQ ID NO: 112688 - RNA, 22 nt, synthetic construct
  source 1..22: mol_type = other RNA
aaggattgcctaacaccagtaa

SEQ ID NO: 112689 - RNA, 22 nt, synthetic construct
  source 1..22: mol_type = other RNA
aaggattggaatgagtccagct

SEQ ID NO: 112690 - RNA, 22 nt, synthetic construct
  source 1..22: mol_type = other RNA
aaggattgggaagattggcttt

SEQ ID NO: 112691 - RNA, 22 nt, synthetic construct
  source 1..22: mol_type = other RNA
aaggattgttcatgtctgtgta

SEQ ID NO: 112692 - RNA, 22 nt, synthetic construct
  source 1..22: mol_type = other RNA
aaggatttgtttgtgaagatac

SEQ ID NO: 112693 - RNA, 22 nt, synthetic construct
  source 1..22: mol_type = other RNA
aaggattttctattcattacca

SEQ ID NO: 112694 - RNA, 22 nt, synthetic construct
  source 1..22: mol_type = other RNA
aaggcaaaccacacagagaaca

SEQ ID NO: 112695 - RNA, 22 nt, synthetic construct
  source 1..22: mol_type = other RNA
aaggcaaaggaaaaaacttttt

SEQ ID NO: 112696 - RNA, 22 nt, synthetic construct
  source 1..22: mol_type = other RNA
aaggcaatgctctcttccccca

SEQ ID NO: 112697 - RNA, 22 nt, synthetic construct
  source 1..22: mol_type = other RNA
aaggcaatgtaacacagttcta

SEQ ID NO: 112698 - RNA, 22 nt, synthetic construct
  source 1..22: mol_type = other RNA
aaggcaatgtagggaatagaca

SEQ ID NO: 112699 - RNA, 22 nt, synthetic construct
  source 1..22: mol_type = other RNA
aaggcacagtctgtgcttaagg

SEQ ID NO: 112700 - RNA, 22 nt, synthetic construct
  source 1..22: mol_type = other RNA
aaggcactaacaaagggcctgt

SEQ ID NO: 112701 - RNA, 22 nt, synthetic construct
  source 1..22: mol_type = other RNA
aaggcactgtatggttcttaag

SEQ ID NO: 112702 - RNA, 22 nt, synthetic construct
  source 1..22: mol_type = other RNA
aaggcagaacacactgctcttc

SEQ ID NO: 112703 - RNA, 22 nt, synthetic construct
  source 1..22: mol_type = other RNA
aaggcagaattatagagggcct

SEQ ID NO: 112704 - RNA, 22 nt, synthetic construct
  source 1..22: mol_type = other RNA
aaggcaggactgcttgaggcca

SEQ ID NO: 112705 - RNA, 22 nt, synthetic construct
  source 1..22: mol_type = other RNA
aaggcaggagcagtgtgaatag

SEQ ID NO: 112706 - RNA, 22 nt, synthetic construct
  source 1..22: mol_type = other RNA
aaggcaggaggcctcagaatta

SEQ ID NO: 112707 - RNA, 22 nt, synthetic construct
  source 1..22: mol_type = other RNA
aaggcaggcagatcacgaggtc

SEQ ID NO: 112708 - RNA, 22 nt, synthetic construct
  source 1..22: mol_type = other RNA
aaggcagggcttggtggcccac

SEQ ID NO: 112709 - RNA, 22 nt, synthetic construct
  source 1..22: mol_type = other RNA
aaggcagggtaggaaggcggtg

SEQ ID NO: 112710 - RNA, 22 nt, synthetic construct
  source 1..22: mol_type = other RNA
aaggcatagggccttctacttt

SEQ ID NO: 112711 - RNA, 22 nt, synthetic construct
  source 1..22: mol_type = other RNA
aaggcatgaaattcttgggtga

SEQ ID NO: 112712 - RNA, 22 nt, synthetic construct
  source 1..22: mol_type = other RNA
aaggccaactgtcctctcttgt

SEQ ID NO: 112713 - RNA, 22 nt, synthetic construct
  source 1..22: mol_type = other RNA
aaggccagagggaatctaggaa

SEQ ID NO: 112714 - RNA, 22 nt, synthetic construct
  source 1..22: mol_type = other RNA
aaggccatttgattgccagttt

SEQ ID NO: 112715 - RNA, 22 nt, synthetic construct
  source 1..22: mol_type = other RNA
aaggcccaaaaagtttttaaaa

SEQ ID NO: 112716 - RNA, 22 nt, synthetic construct
  source 1..22: mol_type = other RNA
aaggcccaccatgatgcagccc

SEQ ID NO: 112717 - RNA, 22 nt, synthetic construct
  source 1..22: mol_type = other RNA
aaggccccttgaaagatcattt

SEQ ID NO: 112718 - RNA, 22 nt, synthetic construct
  source 1..22: mol_type = other RNA
aaggccctatgccttcagtatg

SEQ ID NO: 112719 - RNA, 22 nt, synthetic construct
  source 1..22: mol_type = other RNA
aaggccctgattgagattagcg

SEQ ID NO: 112720 - RNA, 22 nt, synthetic construct
  source 1..22: mol_type = other RNA
aaggccctgatttaaagtaggt

SEQ ID NO: 112721 - RNA, 22 nt, synthetic construct
  source 1..22: mol_type = other RNA
aaggccgctcttgaccttgtgc

SEQ ID NO: 112722 - RNA, 22 nt, synthetic construct
  source 1..22: mol_type = other RNA
aaggccggggccgcgtccacct

SEQ ID NO: 112723 - RNA, 22 nt, synthetic construct
  source 1..22: mol_type = other RNA
aaggccgtccctattttctaca

SEQ ID NO: 112724 - RNA, 22 nt, synthetic construct
  source 1..22: mol_type = other RNA
aaggcctgatagctgtggaagc

SEQ ID NO: 112725 - RNA, 22 nt, synthetic construct
  source 1..22: mol_type = other RNA
aaggcctgcttcattccgcgtt

SEQ ID NO: 112726 - RNA, 22 nt, synthetic construct
  source 1..22: mol_type = other RNA
aaggccttccacggaatgcccc

SEQ ID NO: 112727 - RNA, 22 nt, synthetic construct
  source 1..22: mol_type = other RNA
aaggccttctcctccaacccat

SEQ ID NO: 112728 - RNA, 22 nt, synthetic construct
  source 1..22: mol_type = other RNA
aaggcgaaatgtgaacagacag

SEQ ID NO: 112729 - RNA, 22 nt, synthetic construct
  source 1..22: mol_type = other RNA
aaggcgaagcccgccgctcgca

SEQ ID NO: 112730 - RNA, 22 nt, synthetic construct
  source 1..22: mol_type = other RNA
aaggcgaagcggcagggccggg

SEQ ID NO: 112731 - RNA, 22 nt, synthetic construct
  source 1..22: mol_type = other RNA
aaggcgcagacacaccatgaca

SEQ ID NO: 112732 - RNA, 22 nt, synthetic construct
  source 1..22: mol_type = other RNA
aaggcggaagttgcagtgagcc

SEQ ID NO: 112733 - RNA, 22 nt, synthetic construct
  source 1..22: mol_type = other RNA
aaggcggtggggacagctcaat

SEQ ID NO: 112734 - RNA, 22 nt, synthetic construct
  source 1..22: mol_type = other RNA
aaggcgtcggggctgctggggg

SEQ ID NO: 112735 - RNA, 22 nt, synthetic construct
  source 1..22: mol_type = other RNA
aaggcgtgtaaactgttggaaa

SEQ ID NO: 112736 - RNA, 22 nt, synthetic construct
  source 1..22: mol_type = other RNA
aaggctaaaacatacatgagaa

SEQ ID NO: 112737 - RNA, 22 nt, synthetic construct
  source 1..22: mol_type = other RNA
aaggctaacagccaaagaaatt

SEQ ID NO: 112738 - RNA, 22 nt, synthetic construct
  source 1..22: mol_type = other RNA
aaggctaagcatgtaacttgct

SEQ ID NO: 112739 - RNA, 22 nt, synthetic construct
  source 1..22: mol_type = other RNA
aaggctaagttgagaaactatc

SEQ ID NO: 112740 - RNA, 22 nt, synthetic construct
  source 1..22: mol_type = other RNA
aaggctaattttttctgtaatg

SEQ ID NO: 112741 - RNA, 22 nt, synthetic construct
  source 1..22: mol_type = other RNA
aaggctagagctcacacgagaa

SEQ ID NO: 112742 - RNA, 22 nt, synthetic construct
  source 1..22: mol_type = other RNA
aaggctagcacagaggcaacag

SEQ ID NO: 112743 - RNA, 22 nt, synthetic construct
  source 1..22: mol_type = other RNA
aaggctcagcccctcatcctcc

SEQ ID NO: 112744 - RNA, 22 nt, synthetic construct
  source 1..22: mol_type = other RNA
aaggctcctgcagacatgcacg

SEQ ID NO: 112745 - RNA, 22 nt, synthetic construct
  source 1..22: mol_type = other RNA
aaggctgagacctcatcttagc

SEQ ID NO: 112746 - RNA, 22 nt, synthetic construct
  source 1..22: mol_type = other RNA
aaggctgcaagcactggtaagg

SEQ ID NO: 112747 - RNA, 22 nt, synthetic construct
  source 1..22: mol_type = other RNA
aaggctgccagcaccagatact

SEQ ID NO: 112748 - RNA, 22 nt, synthetic construct
  source 1..22: mol_type = other RNA
aaggctggaaataatttccctc

SEQ ID NO: 112749 - RNA, 22 nt, synthetic construct
  source 1..22: mol_type = other RNA
aaggctggaggatggcttgagc

SEQ ID NO: 112750 - RNA, 22 nt, synthetic construct
  source 1..22: mol_type = other RNA
aaggctggagtgcagtggcgca

SEQ ID NO: 112751 - RNA, 22 nt, synthetic construct
  source 1..22: mol_type = other RNA
aaggcttcgagttctgggagtt

SEQ ID NO: 112752 - RNA, 22 nt, synthetic construct
  source 1..22: mol_type = other RNA
aaggcttgctttggctagaagc

SEQ ID NO: 112753 - RNA, 22 nt, synthetic construct
  source 1..22: mol_type = other RNA
aaggcttggaaaacaaattgca

SEQ ID NO: 112754 - RNA, 22 nt, synthetic construct
  source 1..22: mol_type = other RNA
aaggcttgtgcatcagaattcc

SEQ ID NO: 112755 - RNA, 22 nt, synthetic construct
  source 1..22: mol_type = other RNA
aaggctttcgtatggaagatgg

SEQ ID NO: 112756 - RNA, 22 nt, synthetic construct
  source 1..22: mol_type = other RNA
aaggctttgtgttggtgtttct

SEQ ID NO: 112757 - RNA, 22 nt, synthetic construct
  source 1..22: mol_type = other RNA
aagggaaaacaattacttgaga

SEQ ID NO: 112758 - RNA, 22 nt, synthetic construct
  source 1..22: mol_type = other RNA
aagggaaacactcataccaggt

SEQ ID NO: 112759 - RNA, 22 nt, synthetic construct
  source 1..22: mol_type = other RNA
aagggaaacagggttacagtat

SEQ ID NO: 112760 - RNA, 22 nt, synthetic construct
  source 1..22: mol_type = other RNA
aagggaaaggatgaccttgaca

SEQ ID NO: 112761 - RNA, 22 nt, synthetic construct
  source 1..22: mol_type = other RNA
aagggaaatatgaaccacactg

SEQ ID NO: 112762 - RNA, 22 nt, synthetic construct
  source 1..22: mol_type = other RNA
aagggaacactaagaagatggt

SEQ ID NO: 112763 - RNA, 22 nt, synthetic construct
  source 1..22: mol_type = other RNA
aagggaagagctaagatgctat

SEQ ID NO: 112764 - RNA, 22 nt, synthetic construct
  source 1..22: mol_type = other RNA
aagggaagaggccacaaagtcc

SEQ ID NO: 112765 - RNA, 22 nt, synthetic construct
  source 1..22: mol_type = other RNA
aagggaagtaaagatcaagctc

SEQ ID NO: 112766 - RNA, 22 nt, synthetic construct
  source 1..22: mol_type = other RNA
aagggaattttactgatctttt

SEQ ID NO: 112767 - RNA, 22 nt, synthetic construct
  source 1..22: mol_type = other RNA
aagggactgtcgaagcttaatt

SEQ ID NO: 112768 - RNA, 22 nt, synthetic construct
  source 1..22: mol_type = other RNA
aagggagaacccaggaacagat

SEQ ID NO: 112769 - RNA, 22 nt, synthetic construct
  source 1..22: mol_type = other RNA
aagggagagatgcctatgaaat

SEQ ID NO: 112770 - RNA, 22 nt, synthetic construct
  source 1..22: mol_type = other RNA
aagggagcccaagcacactttc

SEQ ID NO: 112771 - RNA, 22 nt, synthetic construct
  source 1..22: mol_type = other RNA
aagggaggaaaaaacagttgct

SEQ ID NO: 112772 - RNA, 22 nt, synthetic construct
  source 1..22: mol_type = other RNA
aagggaggtaggcttagatgag

SEQ ID NO: 112773 - RNA, 22 nt, synthetic construct
  source 1..22: mol_type = other RNA
aagggagtcagtagaggccgag

SEQ ID NO: 112774 - RNA, 22 nt, synthetic construct
  source 1..22: mol_type = other RNA
aagggataatgctatccagaag

SEQ ID NO: 112775 - RNA, 22 nt, synthetic construct
  source 1..22: mol_type = other RNA
aagggattctggccaaatccct

SEQ ID NO: 112776 - RNA, 22 nt, synthetic construct
  source 1..22: mol_type = other RNA
aagggcattttcaaggtagaag

SEQ ID NO: 112777 - RNA, 22 nt, synthetic construct
  source 1..22: mol_type = other RNA
aagggccatttcatttctgttt

SEQ ID NO: 112778 - RNA, 22 nt, synthetic construct
  source 1..22: mol_type = other RNA
aagggcctgttccaggcctcgc

SEQ ID NO: 112779 - RNA, 22 nt, synthetic construct
  source 1..22: mol_type = other RNA
aagggcttgatctagtaaatat

SEQ ID NO: 112780 - RNA, 22 nt, synthetic construct
  source 1..22: mol_type = other RNA
aagggctttcaatagtgggtag

SEQ ID NO: 112781 - RNA, 22 nt, synthetic construct
  source 1..22: mol_type = other RNA
aaggggaaggaattttcaggac

SEQ ID NO: 112782 - RNA, 22 nt, synthetic construct
  source 1..22: mol_type = other RNA
aaggggaatcatgcagtacttg

SEQ ID NO: 112783 - RNA, 22 nt, synthetic construct
  source 1..22: mol_type = other RNA
aaggggaatggtactgcctcca

SEQ ID NO: 112784 - RNA, 22 nt, synthetic construct
  source 1..22: mol_type = other RNA
aaggggagaggcctcatgtatt

SEQ ID NO: 112785 - RNA, 22 nt, synthetic construct
  source 1..22: mol_type = other RNA
aaggggatgggggacgacgtat

SEQ ID NO: 112786 - RNA, 22 nt, synthetic construct
  source 1..22: mol_type = other RNA
aaggggatttcatgaacaattt

SEQ ID NO: 112787 - RNA, 22 nt, synthetic construct
  source 1..22: mol_type = other RNA
aaggggcagggtggagtccaac

SEQ ID NO: 112788 - RNA, 22 nt, synthetic construct
  source 1..22: mol_type = other RNA
aaggggcattccgtggaaggcc

SEQ ID NO: 112789 - RNA, 22 nt, synthetic construct
  source 1..22: mol_type = other RNA
aaggggccaggtgtggaggctc

SEQ ID NO: 112790 - RNA, 22 nt, synthetic construct
  source 1..22: mol_type = other RNA
aaggggccttttgtcaagctat

SEQ ID NO: 112791 - RNA, 22 nt, synthetic construct
  source 1..22: mol_type = other RNA
aaggggctatctttactttcag

SEQ ID NO: 112792 - RNA, 22 nt, synthetic construct
  source 1..22: mol_type = other RNA
aagggggaatctactcttttgt

SEQ ID NO: 112793 - RNA, 22 nt, synthetic construct
  source 1..22: mol_type = other RNA
aaggggtaaatggtttctcctt

SEQ ID NO: 112794 - RNA, 22 nt, synthetic construct
  source 1..22: mol_type = other RNA
aagggtaaacagaattaaacaa

SEQ ID NO: 112795 - RNA, 22 nt, synthetic construct
  source 1..22: mol_type = other RNA
aagggtaagaaaattgtacaat

SEQ ID NO: 112796 - RNA, 22 nt, synthetic construct
  source 1..22: mol_type = other RNA
aagggtacagaactgctaatgg

SEQ ID NO: 112797 - RNA, 22 nt, synthetic construct
  source 1..22: mol_type = other RNA
aagggtagagcactttcgtatt

SEQ ID NO: 112798 - RNA, 22 nt, synthetic construct
  source 1..22: mol_type = other RNA
aagggtagctttgatgccccca

SEQ ID NO: 112799 - RNA, 22 nt, synthetic construct
  source 1..22: mol_type = other RNA
aagggtatatacaatattacag

SEQ ID NO: 112800 - RNA, 22 nt, synthetic construct
  source 1..22: mol_type = other RNA
aagggtcactattaaccatatg

SEQ ID NO: 112801 - RNA, 22 nt, synthetic construct
  source 1..22: mol_type = other RNA
aagggtcagaattttattttct

SEQ ID NO: 112802 - RNA, 22 nt, synthetic construct
  source 1..22: mol_type = other RNA
aagggtccagcttcactcttct

SEQ ID NO: 112803 - RNA, 22 nt, synthetic construct
  source 1..22: mol_type = other RNA
aagggtctggtatctaccaaaa

SEQ ID NO: 112804 - RNA, 22 nt, synthetic construct
  source 1..22: mol_type = other RNA
aagggtctgttttacatgttta

SEQ ID NO: 112805 - RNA, 22 nt, synthetic construct
  source 1..22: mol_type = other RNA
aagggtgacagagccgagcaga

SEQ ID NO: 112806 - RNA, 22 nt, synthetic construct
  source 1..22: mol_type = other RNA
aagggtgataaaaaggagggaa

SEQ ID NO: 112807 - RNA, 22 nt, synthetic construct
  source 1..22: mol_type = other RNA
aagggtggctggcactttcctg

SEQ ID NO: 112808 - RNA, 22 nt, synthetic construct
  source 1..22: mol_type = other RNA
aagggtgggggcatcaaagcta

SEQ ID NO: 112809 - RNA, 22 nt, synthetic construct
  source 1..22: mol_type = other RNA
aagggtggtgctggactggagg

SEQ ID NO: 112810 - RNA, 22 nt, synthetic construct
  source 1..22: mol_type = other RNA
aagggtgtgtgaatggaaaatt

SEQ ID NO: 112811 - RNA, 22 nt, synthetic construct
  source 1..22: mol_type = other RNA
aagggtgtgtttaatttccacc

SEQ ID NO: 112812 - RNA, 22 nt, synthetic construct
  source 1..22: mol_type = other RNA
aagggtgttttcccccctaaaa

SEQ ID NO: 112813 - RNA, 22 nt, synthetic construct
  source 1..22: mol_type = other RNA
aagggttcttggaaattagaaa

SEQ ID NO: 112814 - RNA, 22 nt, synthetic construct
  source 1..22: mol_type = other RNA
aagggttggtgcttccttctct

SEQ ID NO: 112815 - RNA, 22 nt, synthetic construct
  source 1..22: mol_type = other RNA
aagggttttctgtagaatatcc

SEQ ID NO: 112816 - RNA, 22 nt, synthetic construct
  source 1..22: mol_type = other RNA
aagggttttggtatgttgtgtt

SEQ ID NO: 112817 - RNA, 22 nt, synthetic construct
  source 1..22: mol_type = other RNA
aaggtaagaatgtcaagctgtt

SEQ ID NO: 112818 - RNA, 22 nt, synthetic construct
  source 1..22: mol_type = other RNA
aaggtaaggaaaccccagggat

SEQ ID NO: 112819 - RNA, 22 nt, synthetic construct
  source 1..22: mol_type = other RNA
aaggtaagggtccagcttcact

SEQ ID NO: 112820 - RNA, 22 nt, synthetic construct
  source 1..22: mol_type = other RNA
aaggtaatctagtttatctcat

SEQ ID NO: 112821 - RNA, 22 nt, synthetic construct
  source 1..22: mol_type = other RNA
aaggtacaattacacatctccc

SEQ ID NO: 112822 - RNA, 22 nt, synthetic construct
  source 1..22: mol_type = other RNA
aaggtacgacgctcttgttcaa

SEQ ID NO: 112823 - RNA, 22 nt, synthetic construct
  source 1..22: mol_type = other RNA
aaggtagaaacatcccaagtgc

SEQ ID NO: 112824 - RNA, 22 nt, synthetic construct
  source 1..22: mol_type = other RNA
aaggtagaagataatgttagaa

SEQ ID NO: 112825 - RNA, 22 nt, synthetic construct
  source 1..22: mol_type = other RNA
aaggtagaagtacaaacattac

SEQ ID NO: 112826 - RNA, 22 nt, synthetic construct
  source 1..22: mol_type = other RNA
aaggtaggagggtgtgatcagg

SEQ ID NO: 112827 - RNA, 22 nt, synthetic construct
  source 1..22: mol_type = other RNA
aaggtataaaggatgcacaaga

SEQ ID NO: 112828 - RNA, 22 nt, synthetic construct
  source 1..22: mol_type = other RNA
aaggtatatttctgtaaacatg

SEQ ID NO: 112829 - RNA, 22 nt, synthetic construct
  source 1..22: mol_type = other RNA
aaggtatcatcggaaatataaa

SEQ ID NO: 112830 - RNA, 22 nt, synthetic construct
  source 1..22: mol_type = other RNA
aaggtatctccccaaagatatt

SEQ ID NO: 112831 - RNA, 22 nt, synthetic construct
  source 1..22: mol_type = other RNA
aaggtcaaatggtaacagccaa

SEQ ID NO: 112832 - RNA, 22 nt, synthetic construct
  source 1..22: mol_type = other RNA
aaggtcaacacatcagcgctaa

SEQ ID NO: 112833 - RNA, 22 nt, synthetic construct
  source 1..22: mol_type = other RNA
aaggtcaagagagattaaataa

SEQ ID NO: 112834 - RNA, 22 nt, synthetic construct
  source 1..22: mol_type = other RNA
aaggtcaagagcggcctttgcc

SEQ ID NO: 112835 - RNA, 22 nt, synthetic construct
  source 1..22: mol_type = other RNA
aaggtcaatctaggaggtctaa

SEQ ID NO: 112836 - RNA, 22 nt, synthetic construct
  source 1..22: mol_type = other RNA
aaggtcaatctgaaaaatatca

SEQ ID NO: 112837 - RNA, 22 nt, synthetic construct
  source 1..22: mol_type = other RNA
aaggtcacattcagaggtattt

SEQ ID NO: 112838 - RNA, 22 nt, synthetic construct
  source 1..22: mol_type = other RNA
aaggtcagaagtttggaaccag

SEQ ID NO: 112839 - RNA, 22 nt, synthetic construct
  source 1..22: mol_type = other RNA
aaggtcatcctttcccttctgc

SEQ ID NO: 112840 - RNA, 22 nt, synthetic construct
  source 1..22: mol_type = other RNA
aaggtcgtttcagattgcttga

SEQ ID NO: 112841 - RNA, 22 nt, synthetic construct
  source 1..22: mol_type = other RNA
aaggtctagtgtgcatgtgttg

SEQ ID NO: 112842 - RNA, 22 nt, synthetic construct
  source 1..22: mol_type = other RNA
aaggtctctctctgtcacccaa

SEQ ID NO: 112843 - RNA, 22 nt, synthetic construct
  source 1..22: mol_type = other RNA
aaggtctgtaagtcagttaaca

SEQ ID NO: 112844 - RNA, 22 nt, synthetic construct
  source 1..22: mol_type = other RNA
aaggtgagggactgagcagtga

SEQ ID NO: 112845 - RNA, 22 nt, synthetic construct
  source 1..22: mol_type = other RNA
aaggtgcacgctgtgaatgtga

SEQ ID NO: 112846 - RNA, 22 nt, synthetic construct
  source 1..22: mol_type = other RNA
aaggtgcccgcgaaggcgtgta

SEQ ID NO: 112847 - RNA, 22 nt, synthetic construct
  source 1..22: mol_type = other RNA
aaggtgcctgccatagagggag

SEQ ID NO: 112848 - RNA, 22 nt, synthetic construct
  source 1..22: mol_type = other RNA
aaggtgcgggattatttggaag

SEQ ID NO: 112849 - RNA, 22 nt, synthetic construct
  source 1..22: mol_type = other RNA
aaggtgctaattgtttgttggg

SEQ ID NO: 112850 - RNA, 22 nt, synthetic construct
  source 1..22: mol_type = other RNA
aaggtgctgttgtattttacac

SEQ ID NO: 112851 - RNA, 22 nt, synthetic construct
  source 1..22: mol_type = other RNA
aaggtggagtggtggatagaga

SEQ ID NO: 112852 - RNA, 22 nt, synthetic construct
  source 1..22: mol_type = other RNA
aaggtgttaagccgttccatca

SEQ ID NO: 112853 - RNA, 22 nt, synthetic construct
  source 1..22: mol_type = other RNA
aaggtgttagcaggactggact

SEQ ID NO: 112854 - RNA, 22 nt, synthetic construct
  source 1..22: mol_type = other RNA
aaggtgttcctgaagtctttgg

SEQ ID NO: 112855 - RNA, 22 nt, synthetic construct
  source 1..22: mol_type = other RNA
aaggtgtttggtgaattttatt

SEQ ID NO: 112856 - RNA, 22 nt, synthetic construct
  source 1..22: mol_type = other RNA
aaggttaactaatagccagtgc

SEQ ID NO: 112857 - RNA, 22 nt, synthetic construct
  source 1..22: mol_type = other RNA
aaggttaagggaagagctaaga

SEQ ID NO: 112858 - RNA, 22 nt, synthetic construct
  source 1..22: mol_type = other RNA
aaggttataatcagccgtgatt

SEQ ID NO: 112859 - RNA, 22 nt, synthetic construct
  source 1..22: mol_type = other RNA
aaggttcaagtttggctcccat

SEQ ID NO: 112860 - RNA, 22 nt, synthetic construct
  source 1..22: mol_type = other RNA
aaggttcacaaattagaacaaa

SEQ ID NO: 112861 - RNA, 22 nt, synthetic construct
  source 1..22: mol_type = other RNA
aaggttcatgaacataaatttg

SEQ ID NO: 112862 - RNA, 22 nt, synthetic construct
  source 1..22: mol_type = other RNA
aaggttctgctatgctgaaagg

SEQ ID NO: 112863 - RNA, 22 nt, synthetic construct
  source 1..22: mol_type = other RNA
aaggttgaaaactcaactgcct

SEQ ID NO: 112864 - RNA, 22 nt, synthetic construct
  source 1..22: mol_type = other RNA
aaggttgagacaagaccacacc

SEQ ID NO: 112865 - RNA, 22 nt, synthetic construct
  source 1..22: mol_type = other RNA
aaggttgcttaattgagctgtc

SEQ ID NO: 112866 - RNA, 22 nt, synthetic construct
  source 1..22: mol_type = other RNA
aaggttgttcttggttaatatt

SEQ ID NO: 112867 - RNA, 22 nt, synthetic construct
  source 1..22: mol_type = other RNA
aaggtttagaaaacatatcctt

SEQ ID NO: 112868 - RNA, 22 nt, synthetic construct
  source 1..22: mol_type = other RNA
aaggtttccagtggcccccctg

SEQ ID NO: 112869 - RNA, 22 nt, synthetic construct
  source 1..22: mol_type = other RNA
aaggtttccctggggaataaga

SEQ ID NO: 112870 - RNA, 22 nt, synthetic construct
  source 1..22: mol_type = other RNA
aaggtttctctccaaggtacaa

SEQ ID NO: 112871 - RNA, 22 nt, synthetic construct
  source 1..22: mol_type = other RNA
aaggtttcttcactcttaaaag

SEQ ID NO: 112872 - RNA, 22 nt, synthetic construct
  source 1..22: mol_type = other RNA
aaggtttggagtttgtagctca

SEQ ID NO: 112873 - RNA, 22 nt, synthetic construct
  source 1..22: mol_type = other RNA
aaggtttgtagagcaagcaaca

SEQ ID NO: 112874 - RNA, 22 nt, synthetic construct
  source 1..22: mol_type = other RNA
aaggtttttaaaagatgcattc

SEQ ID NO: 112875 - RNA, 22 nt, synthetic construct
  source 1..22: mol_type = other RNA
aaggtttttgaacaagagcgtc

SEQ ID NO: 112876 - RNA, 22 nt, synthetic construct
  source 1..22: mol_type = other RNA
aagtaaaaagcactatccacat

SEQ ID NO: 112877 - RNA, 22 nt, synthetic construct
  source 1..22: mol_type = other RNA
aagtaaaagaagatgcagttgc

SEQ ID NO: 112878 - RNA, 22 nt, synthetic construct
  source 1..22: mol_type = other RNA
aagtaaaagcaacctcatttgc

SEQ ID NO: 112879 - RNA, 22 nt, synthetic construct
  source 1..22: mol_type = other RNA
aagtaaaatcggaacaggctca

SEQ ID NO: 112880 - RNA, 22 nt, synthetic construct
  source 1..22: mol_type = other RNA
aagtaaacaactgactctaaag

SEQ ID NO: 112881 - RNA, 22 nt, synthetic construct
  source 1..22: mol_type = other RNA
aagtaaacctcaagtcttttcc

SEQ ID NO: 112882 - RNA, 22 nt, synthetic construct
  source 1..22: mol_type = other RNA
aagtaaagatagccccttatca

SEQ ID NO: 112883 - RNA, 22 nt, synthetic construct
  source 1..22: mol_type = other RNA
aagtaaagatcaagctcgccgt

SEQ ID NO: 112884 - RNA, 22 nt, synthetic construct
  source 1..22: mol_type = other RNA
aagtaaatcagactgtattacc

SEQ ID NO: 112885 - RNA, 22 nt, synthetic construct
  source 1..22: mol_type = other RNA
aagtaaatcccggccaggtgcg

SEQ ID NO: 112886 - RNA, 22 nt, synthetic construct
  source 1..22: mol_type = other RNA
aagtaaatgcaatgcaggcgcc

SEQ ID NO: 112887 - RNA, 22 nt, synthetic construct
  source 1..22: mol_type = other RNA
aagtaaattcgcataaccaaat

SEQ ID NO: 112888 - RNA, 22 nt, synthetic construct
  source 1..22: mol_type = other RNA
aagtaacactcagaagtactac

SEQ ID NO: 112889 - RNA, 22 nt, synthetic construct
  source 1..22: mol_type = other RNA
aagtaacagttcaatactactg

SEQ ID NO: 112890 - RNA, 22 nt, synthetic construct
  source 1..22: mol_type = other RNA
aagtaacattacaacagcaagg

SEQ ID NO: 112891 - RNA, 22 nt, synthetic construct
  source 1..22: mol_type = other RNA
aagtaactcttgagttaggaat

SEQ ID NO: 112892 - RNA, 22 nt, synthetic construct
  source 1..22: mol_type = other RNA
aagtaactgttggcaaggatgt

SEQ ID NO: 112893 - RNA, 22 nt, synthetic construct
  source 1..22: mol_type = other RNA
aagtaataaagcaagtatgagc

SEQ ID NO: 112894 - RNA, 22 nt, synthetic construct
  source 1..22: mol_type = other RNA
aagtaatcaagtgaaatgatct

SEQ ID NO: 112895 - RNA, 22 nt, synthetic construct
  source 1..22: mol_type = other RNA
aagtaatgaaaattagctggat

SEQ ID NO: 112896 - RNA, 22 nt, synthetic construct
  source 1..22: mol_type = other RNA
aagtaatgctggccagtgagtt

SEQ ID NO: 112897 - RNA, 22 nt, synthetic construct
  source 1..22: mol_type = other RNA
aagtaattgggatctgataaat

SEQ ID NO: 112898 - RNA, 22 nt, synthetic construct
  source 1..22: mol_type = other RNA
aagtaattgttttcccttttgt

SEQ ID NO: 112899 - RNA, 22 nt, synthetic construct
  source 1..22: mol_type = other RNA
aagtacagataaccaataagaa

SEQ ID NO: 112900 - RNA, 22 nt, synthetic construct
  source 1..22: mol_type = other RNA
aagtacatgaaatactcaaact

SEQ ID NO: 112901 - RNA, 22 nt, synthetic construct
  source 1..22: mol_type = other RNA
aagtactgagtcaaaaccaaag

SEQ ID NO: 112902 - RNA, 22 nt, synthetic construct
  source 1..22: mol_type = other RNA
aagtactgcatgattcccctta

SEQ ID NO: 112903 - RNA, 22 nt, synthetic construct
  source 1..22: mol_type = other RNA
aagtactggaaatggacagcgg

SEQ ID NO: 112904 - RNA, 22 nt, synthetic construct
  source 1..22: mol_type = other RNA
aagtacttcaaggttcacaaat

SEQ ID NO: 112905 - RNA, 22 nt, synthetic construct
  source 1..22: mol_type = other RNA
aagtacttcagcgcttgaacaa

SEQ ID NO: 112906 - RNA, 22 nt, synthetic construct
  source 1..22: mol_type = other RNA
aagtagaaggccctatgccttc

SEQ ID NO: 112907 - RNA, 22 nt, synthetic construct
  source 1..22: mol_type = other RNA
aagtagaaggtcaatctaggag

SEQ ID NO: 112908 - RNA, 22 nt, synthetic construct
  source 1..22: mol_type = other RNA
aagtagaggactgcctattttg

SEQ ID NO: 112909 - RNA, 22 nt, synthetic construct
  source 1..22: mol_type = other RNA
aagtagattagcttttacgagg

SEQ ID NO: 112910 - RNA, 22 nt, synthetic construct
  source 1..22: mol_type = other RNA
aagtagcagggactacagtcac

SEQ ID NO: 112911 - RNA, 22 nt, synthetic construct
  source 1..22: mol_type = other RNA
aagtagctaggaccataggcac

SEQ ID NO: 112912 - RNA, 22 nt, synthetic construct
  source 1..22: mol_type = other RNA
aagtagctgggatcacaggcgt

SEQ ID NO: 112913 - RNA, 22 nt, synthetic construct
  source 1..22: mol_type = other RNA
aagtaggaattaaacatttctg

SEQ ID NO: 112914 - RNA, 22 nt, synthetic construct
  source 1..22: mol_type = other RNA
aagtaggggtaaatctttgtac

SEQ ID NO: 112915 - RNA, 22 nt, synthetic construct
  source 1..22: mol_type = other RNA
aagtaggttgagacttagattt

SEQ ID NO: 112916 - RNA, 22 nt, synthetic construct
  source 1..22: mol_type = other RNA
aagtagtacaaaagtgctgttg

SEQ ID NO: 112917 - RNA, 22 nt, synthetic construct
  source 1..22: mol_type = other RNA
aagtagtggcagccccgcttca

SEQ ID NO: 112918 - RNA, 22 nt, synthetic construct
  source 1..22: mol_type = other RNA
aagtatagaaaggagaccagtt

SEQ ID NO: 112919 - RNA, 22 nt, synthetic construct
  source 1..22: mol_type = other RNA
aagtatatatcatagagtacca

SEQ ID NO: 112920 - RNA, 22 nt, synthetic construct
  source 1..22: mol_type = other RNA
aagtatcccagatggggattga

SEQ ID NO: 112921 - RNA, 22 nt, synthetic construct
  source 1..22: mol_type = other RNA
aagtatcgtgagactattatga

SEQ ID NO: 112922 - RNA, 22 nt, synthetic construct
  source 1..22: mol_type = other RNA
aagtatctcagtcataatttgt

SEQ ID NO: 112923 - RNA, 22 nt, synthetic construct
  source 1..22: mol_type = other RNA
aagtatctccctgtgcgtgaat

SEQ ID NO: 112924 - RNA, 22 nt, synthetic construct
  source 1..22: mol_type = other RNA
aagtatctcggtcattctggag

SEQ ID NO: 112925 - RNA, 22 nt, synthetic construct
  source 1..22: mol_type = other RNA
aagtatgagaaatgtctggttt

SEQ ID NO: 112926 - RNA, 22 nt, synthetic construct
  source 1..22: mol_type = other RNA
aagtatgagccactagtcagta

SEQ ID NO: 112927 - RNA, 22 nt, synthetic construct
  source 1..22: mol_type = other RNA
aagtatgagtcttccgtctcaa

SEQ ID NO: 112928 - RNA, 22 nt, synthetic construct
  source 1..22: mol_type = other RNA
aagtatgcagaaaccagttgta

SEQ ID NO: 112929 - RNA, 22 nt, synthetic construct
  source 1..22: mol_type = other RNA
aagtatgcatagcagggtcatg

SEQ ID NO: 112930 - RNA, 22 nt, synthetic construct
  source 1..22: mol_type = other RNA
aagtatggttgaagaaagtagg

SEQ ID NO: 112931 - RNA, 22 nt, synthetic construct
  source 1..22: mol_type = other RNA
aagtatgtaattacaggggact

SEQ ID NO: 112932 - RNA, 22 nt, synthetic construct
  source 1..22: mol_type = other RNA
aagtattaaaagcacaagcaca

SEQ ID NO: 112933 - RNA, 22 nt, synthetic construct
  source 1..22: mol_type = other RNA
aagtattcccaagatcataagc

SEQ ID NO: 112934 - RNA, 22 nt, synthetic construct
  source 1..22: mol_type = other RNA
aagtattgatttgaccatggga

SEQ ID NO: 112935 - RNA, 22 nt, synthetic construct
  source 1..22: mol_type = other RNA
aagtattgcattgaatctgtag

SEQ ID NO: 112936 - RNA, 22 nt, synthetic construct
  source 1..22: mol_type = other RNA
aagtatttccacgggtaaaaat

SEQ ID NO: 112937 - RNA, 22 nt, synthetic construct
  source 1..22: mol_type = other RNA
aagtatttctcatctgtcactt

SEQ ID NO: 112938 - RNA, 22 nt, synthetic construct
  source 1..22: mol_type = other RNA
aagtcaaagcctgtggaggcag

SEQ ID NO: 112939 - RNA, 22 nt, synthetic construct
  source 1..22: mol_type = other RNA
aagtcaagatgaatctgcaact

SEQ ID NO: 112940 - RNA, 22 nt, synthetic construct
  source 1..22: mol_type = other RNA
aagtcaatttcagatctctgac

SEQ ID NO: 112941 - RNA, 22 nt, synthetic construct
  source 1..22: mol_type = other RNA
aagtcacaaaaagacaagtact

SEQ ID NO: 112942 - RNA, 22 nt, synthetic construct
  source 1..22: mol_type = other RNA
aagtcacattctagtgatggga

SEQ ID NO: 112943 - RNA, 22 nt, synthetic construct
  source 1..22: mol_type = other RNA
aagtcactccatttgtggcatc

SEQ ID NO: 112944 - RNA, 22 nt, synthetic construct
  source 1..22: mol_type = other RNA
aagtcactgtggaaaacagttt

SEQ ID NO: 112945 - RNA, 22 nt, synthetic construct
  source 1..22: mol_type = other RNA
aagtcactttttattctgttct

SEQ ID NO: 112946 - RNA, 22 nt, synthetic construct
  source 1..22: mol_type = other RNA
aagtcagaattcactgtgactc

SEQ ID NO: 112947 - RNA, 22 nt, synthetic construct
  source 1..22: mol_type = other RNA
aagtcagactaagacactagct

SEQ ID NO: 112948 - RNA, 22 nt, synthetic construct
  source 1..22: mol_type = other RNA
aagtcagagattttcccaaaga

SEQ ID NO: 112949 - RNA, 22 nt, synthetic construct
  source 1..22: mol_type = other RNA
aagtcagaggagcagttactcc

SEQ ID NO: 112950 - RNA, 22 nt, synthetic construct
  source 1..22: mol_type = other RNA
aagtcagcaactcttggccatt

SEQ ID NO: 112951 - RNA, 22 nt, synthetic construct
  source 1..22: mol_type = other RNA
aagtcagcacttctgatatcct

SEQ ID NO: 112952 - RNA, 22 nt, synthetic construct
  source 1..22: mol_type = other RNA
aagtcagcctgggcacacgcca

SEQ ID NO: 112953 - RNA, 22 nt, synthetic construct
  source 1..22: mol_type = other RNA
aagtcagctaattttctaatct

SEQ ID NO: 112954 - RNA, 22 nt, synthetic construct
  source 1..22: mol_type = other RNA
aagtcagctaggcgtagtatct

SEQ ID NO: 112955 - RNA, 22 nt, synthetic construct
  source 1..22: mol_type = other RNA
aagtcagtaaaaaaggaccatc

SEQ ID NO: 112956 - RNA, 22 nt, synthetic construct
  source 1..22: mol_type = other RNA
aagtcagttaacagtgctgtgc

SEQ ID NO: 112957 - RNA, 22 nt, synthetic construct
  source 1..22: mol_type = other RNA
aagtcagttacagcatttcagc

SEQ ID NO: 112958 - RNA, 22 nt, synthetic construct
  source 1..22: mol_type = other RNA
aagtcatcaaaggaaggaattt

SEQ ID NO: 112959 - RNA, 22 nt, synthetic construct
  source 1..22: mol_type = other RNA
aagtcatctggtcctgagcttt

SEQ ID NO: 112960 - RNA, 22 nt, synthetic construct
  source 1..22: mol_type = other RNA
aagtcatgacctgctttcttgg

SEQ ID NO: 112961 - RNA, 22 nt, synthetic construct
  source 1..22: mol_type = other RNA
aagtcattgaaactcaatgttg

SEQ ID NO: 112962 - RNA, 22 nt, synthetic construct
  source 1..22: mol_type = other RNA
aagtccacagatctttttgtgt

SEQ ID NO: 112963 - RNA, 22 nt, synthetic construct
  source 1..22: mol_type = other RNA
aagtccatgaaacttatttcca

SEQ ID NO: 112964 - RNA, 22 nt, synthetic construct
  source 1..22: mol_type = other RNA
aagtcccagttcaaggtgttag

SEQ ID NO: 112965 - RNA, 22 nt, synthetic construct
  source 1..22: mol_type = other RNA
aagtcccatcttccatacgaaa

SEQ ID NO: 112966 - RNA, 22 nt, synthetic construct
  source 1..22: mol_type = other RNA
aagtccccacatgactggccat

SEQ ID NO: 112967 - RNA, 22 nt, synthetic construct
  source 1..22: mol_type = other RNA
aagtccccatctccacaaaaaa

SEQ ID NO: 112968 - RNA, 22 nt, synthetic construct
  source 1..22: mol_type = other RNA
aagtcccctgtaattacatact

SEQ ID NO: 112969 - RNA, 22 nt, synthetic construct
  source 1..22: mol_type = other RNA
aagtcccggaagctgggctaga

SEQ ID NO: 112970 - RNA, 22 nt, synthetic construct
  source 1..22: mol_type = other RNA
aagtccctaacagtctcgtgaa

SEQ ID NO: 112971 - RNA, 22 nt, synthetic construct
  source 1..22: mol_type = other RNA
aagtccgtgcatgcctctgtta

SEQ ID NO: 112972 - RNA, 22 nt, synthetic construct
  source 1..22: mol_type = other RNA
aagtcctcaatcatgtcaagaa

SEQ ID NO: 112973 - RNA, 22 nt, synthetic construct
  source 1..22: mol_type = other RNA
aagtcctgttcttttgtaatct

SEQ ID NO: 112974 - RNA, 22 nt, synthetic construct
  source 1..22: mol_type = other RNA
aagtcctttccagaggttcttt

SEQ ID NO: 112975 - RNA, 22 nt, synthetic construct
  source 1..22: mol_type = other RNA
aagtcctttcttggtctgcaga

SEQ ID NO: 112976 - RNA, 22 nt, synthetic construct
  source 1..22: mol_type = other RNA
aagtctatgctcttggtttctt

SEQ ID NO: 112977 - RNA, 22 nt, synthetic construct
  source 1..22: mol_type = other RNA
aagtctcaacctactttaaatc

SEQ ID NO: 112978 - RNA, 22 nt, synthetic construct
  source 1..22: mol_type = other RNA
aagtctcatgcaattccccagc

SEQ ID NO: 112979 - RNA, 22 nt, synthetic construct
  source 1..22: mol_type = other RNA
aagtctccctaaccaggcccgg

SEQ ID NO: 112980 - RNA, 22 nt, synthetic construct
  source 1..22: mol_type = other RNA
aagtctgaaagcttctgagcag

SEQ ID NO: 112981 - RNA, 22 nt, synthetic construct
  source 1..22: mol_type = other RNA
aagtcttccattttagatcaag

SEQ ID NO: 112982 - RNA, 22 nt, synthetic construct
  source 1..22: mol_type = other RNA
aagtcttcttctaagctaagag

SEQ ID NO: 112983 - RNA, 22 nt, synthetic construct
  source 1..22: mol_type = other RNA
aagtcttgctggaagttggccc

SEQ ID NO: 112984 - RNA, 22 nt, synthetic construct
  source 1..22: mol_type = other RNA
aagtctttggcccattttcgaa

SEQ ID NO: 112985 - RNA, 22 nt, synthetic construct
  source 1..22: mol_type = other RNA
aagtctttgggtaatttatctc

SEQ ID NO: 112986 - RNA, 22 nt, synthetic construct
  source 1..22: mol_type = other RNA
aagtctttggtgatcctaagcc

SEQ ID NO: 112987 - RNA, 22 nt, synthetic construct
  source 1..22: mol_type = other RNA
aagtcttttcctaccctgagga

SEQ ID NO: 112988 - RNA, 22 nt, synthetic construct
  source 1..22: mol_type = other RNA
aagtcttttcctagactgccag

SEQ ID NO: 112989 - RNA, 22 nt, synthetic construct
  source 1..22: mol_type = other RNA
aagtgaaaaatgacctaaaatc

SEQ ID NO: 112990 - RNA, 22 nt, synthetic construct
  source 1..22: mol_type = other RNA
aagtgaaaactaaggtcaagag

SEQ ID NO: 112991 - RNA, 22 nt, synthetic construct
  source 1..22: mol_type = other RNA
aagtgaaactgctggatcatat

SEQ ID NO: 112992 - RNA, 22 nt, synthetic construct
  source 1..22: mol_type = other RNA
aagtgaaaggcaaaggaaaaaa

SEQ ID NO: 112993 - RNA, 22 nt, synthetic construct
  source 1..22: mol_type = other RNA
aagtgaaccaaaaaccacattt

SEQ ID NO: 112994 - RNA, 22 nt, synthetic construct
  source 1..22: mol_type = other RNA
aagtgaagcccagagaggctag

SEQ ID NO: 112995 - RNA, 22 nt, synthetic construct
  source 1..22: mol_type = other RNA
aagtgaagcttcaaaccactat

SEQ ID NO: 112996 - RNA, 22 nt, synthetic construct
  source 1..22: mol_type = other RNA
aagtgaagtcaagatgaatctg

SEQ ID NO: 112997 - RNA, 22 nt, synthetic construct
  source 1..22: mol_type = other RNA
aagtgaatatagctaagaaaca

SEQ ID NO: 112998 - RNA, 22 nt, synthetic construct
  source 1..22: mol_type = other RNA
aagtgaatcactacagcatatt

SEQ ID NO: 112999 - RNA, 22 nt, synthetic construct
  source 1..22: mol_type = other RNA
aagtgacagatgagaaatactt

SEQ ID NO: 113000 - RNA, 22 nt, synthetic construct
  source 1..22: mol_type = other RNA
aagtgaccctgagtccagaggt

SEQ ID NO: 113001 - RNA, 22 nt, synthetic construct
  source 1..22: mol_type = other RNA
aagtgactccaagcacacagtt

SEQ ID NO: 113002 - RNA, 22 nt, synthetic construct
  source 1..22: mol_type = other RNA
aagtgacttctggatgtgtatg

SEQ ID NO: 113003 - RNA, 22 nt, synthetic construct
  source 1..22: mol_type = other RNA
aagtgagcagaaggaggaaaat

SEQ ID NO: 113004 - RNA, 22 nt, synthetic construct
  source 1..22: mol_type = other RNA
aagtgagtttgacctgtaattt

SEQ ID NO: 113005 - RNA, 22 nt, synthetic construct
  source 1..22: mol_type = other RNA
aagtgataccataaagtcagag

SEQ ID NO: 113006 - RNA, 22 nt, synthetic construct
  source 1..22: mol_type = other RNA
aagtgatgcaactcctgggctc

SEQ ID NO: 113007 - RNA, 22 nt, synthetic construct
  source 1..22: mol_type = other RNA
aagtgcacaatgcagtattgtt

SEQ ID NO: 113008 - RNA, 22 nt, synthetic construct
  source 1..22: mol_type = other RNA
aagtgcatttcggctctgtgct

SEQ ID NO: 113009 - RNA, 22 nt, synthetic construct
  source 1..22: mol_type = other RNA
aagtgccagccacccttgctgc

SEQ ID NO: 113010 - RNA, 22 nt, synthetic construct
  source 1..22: mol_type = other RNA
aagtgcccattaacagatgaat

SEQ ID NO: 113011 - RNA, 22 nt, synthetic construct
  source 1..22: mol_type = other RNA
aagtgccgcgttttttgtccac

SEQ ID NO: 113012 - RNA, 22 nt, synthetic construct
  source 1..22: mol_type = other RNA
aagtgctctaccctttccaaat

SEQ ID NO: 113013 - RNA, 22 nt, synthetic construct
  source 1..22: mol_type = other RNA
aagtgctgcagtatgcatagat

SEQ ID NO: 113014 - RNA, 22 nt, synthetic construct
  source 1..22: mol_type = other RNA
aagtgctgggctagggaagcag

SEQ ID NO: 113015 - RNA, 22 nt, synthetic construct
  source 1..22: mol_type = other RNA
aagtgctgtgattgcaggtgtg

SEQ ID NO: 113016 - RNA, 22 nt, synthetic construct
  source 1..22: mol_type = other RNA
aagtgctgttgaggctgggccc

SEQ ID NO: 113017 - RNA, 22 nt, synthetic construct
  source 1..22: mol_type = other RNA
aagtgcttctagtaacttggtc

SEQ ID NO: 113018 - RNA, 22 nt, synthetic construct
  source 1..22: mol_type = other RNA
aagtggaaacaactcaaacgtc

SEQ ID NO: 113019 - RNA, 22 nt, synthetic construct
  source 1..22: mol_type = other RNA
aagtggaatcattccgtatata

SEQ ID NO: 113020 - RNA, 22 nt, synthetic construct
  source 1..22: mol_type = other RNA
aagtggactatgtaggcacatt

SEQ ID NO: 113021 - RNA, 22 nt, synthetic construct
  source 1..22: mol_type = other RNA
aagtggagaattactaaaattc

SEQ ID NO: 113022 - RNA, 22 nt, synthetic construct
  source 1..22: mol_type = other RNA
aagtggagcctgctctgcagag

SEQ ID NO: 113023 - RNA, 22 nt, synthetic construct
  source 1..22: mol_type = other RNA
aagtggagtgcgagtgtgaacg

SEQ ID NO: 113024 - RNA, 22 nt, synthetic construct
  source 1..22: mol_type = other RNA
aagtggcgctgtttgcctgcgt

SEQ ID NO: 113025 - RNA, 22 nt, synthetic construct
  source 1..22: mol_type = other RNA
aagtggctagacggaaaaacat

SEQ ID NO: 113026 - RNA, 22 nt, synthetic construct
  source 1..22: mol_type = other RNA
aagtgggaagcaaaggattcgg

SEQ ID NO: 113027 - RNA, 22 nt, synthetic construct
  source 1..22: mol_type = other RNA
aagtgggaggaggtcatactgg

SEQ ID NO: 113028 - RNA, 22 nt, synthetic construct
  source 1..22: mol_type = other RNA
aagtgggtggatgggtgtaggg

SEQ ID NO: 113029 - RNA, 22 nt, synthetic construct
  source 1..22: mol_type = other RNA
aagtggtattctatcatcaaga

SEQ ID NO: 113030 - RNA, 22 nt, synthetic construct
  source 1..22: mol_type = other RNA
aagtggtgcttgaactgctggt

SEQ ID NO: 113031 - RNA, 22 nt, synthetic construct
  source 1..22: mol_type = other RNA
aagtgtaaagtttctctctccc

SEQ ID NO: 113032 - RNA, 22 nt, synthetic construct
  source 1..22: mol_type = other RNA
aagtgtaacatacacatcagat

SEQ ID NO: 113033 - RNA, 22 nt, synthetic construct
  source 1..22: mol_type = other RNA
aagtgtacaattcggtggcatt

SEQ ID NO: 113034 - RNA, 22 nt, synthetic construct
  source 1..22: mol_type = other RNA
aagtgtatcagatgcttctagc

SEQ ID NO: 113035 - RNA, 22 nt, synthetic construct
  source 1..22: mol_type = other RNA
aagtgtattattctaaacacac

SEQ ID NO: 113036 - RNA, 22 nt, synthetic construct
  source 1..22: mol_type = other RNA
aagtgtgaagattaagcacatc

SEQ ID NO: 113037 - RNA, 22 nt, synthetic construct
  source 1..22: mol_type = other RNA
aagtgtgaccacattcccaaat

SEQ ID NO: 113038 - RNA, 22 nt, synthetic construct
  source 1..22: mol_type = other RNA
aagtgtgagcaaaaatacagct

SEQ ID NO: 113039 - RNA, 22 nt, synthetic construct
  source 1..22: mol_type = other RNA
aagtgtgcttgggctcccttcc

SEQ ID NO: 113040 - RNA, 22 nt, synthetic construct
  source 1..22: mol_type = other RNA
aagtgtggtggtctcaccctca

SEQ ID NO: 113041 - RNA, 22 nt, synthetic construct
  source 1..22: mol_type = other RNA
aagtgttagaattacaggcatg

SEQ ID NO: 113042 - RNA, 22 nt, synthetic construct
  source 1..22: mol_type = other RNA
aagtgttgactaccatctctcc

SEQ ID NO: 113043 - RNA, 22 nt, synthetic construct
  source 1..22: mol_type = other RNA
aagtgttgagaggctttaagca

SEQ ID NO: 113044 - RNA, 22 nt, synthetic construct
  source 1..22: mol_type = other RNA
aagtgtttaggatataagagtg

SEQ ID NO: 113045 - RNA, 22 nt, synthetic construct
  source 1..22: mol_type = other RNA
aagtgtttgaaaagtgtttgtc

SEQ ID NO: 113046 - RNA, 22 nt, synthetic construct
  source 1..22: mol_type = other RNA
aagtgtttgtcacatagaagcg

SEQ ID NO: 113047 - RNA, 22 nt, synthetic construct
  source 1..22: mol_type = other RNA
aagtgttttgatagttgcagat

SEQ ID NO: 113048 - RNA, 22 nt, synthetic construct
  source 1..22: mol_type = other RNA
aagttaaaacttgtagaggagg

SEQ ID NO: 113049 - RNA, 22 nt, synthetic construct
  source 1..22: mol_type = other RNA
aagttaaaagacatctttcctg

SEQ ID NO: 113050 - RNA, 22 nt, synthetic construct
  source 1..22: mol_type = other RNA
aagttaaacttttgtgcatcaa

SEQ ID NO: 113051 - RNA, 22 nt, synthetic construct
  source 1..22: mol_type = other RNA
aagttaactgaaatcgggagta

SEQ ID NO: 113052 - RNA, 22 nt, synthetic construct
  source 1..22: mol_type = other RNA
aagttaagggccatttcatttc

SEQ ID NO: 113053 - RNA, 22 nt, synthetic construct
  source 1..22: mol_type = other RNA
aagttaatagcctcctaagttt

SEQ ID NO: 113054 - RNA, 22 nt, synthetic construct
  source 1..22: mol_type = other RNA
aagttaatattgtaggtgtctc

SEQ ID NO: 113055 - RNA, 22 nt, synthetic construct
  source 1..22: mol_type = other RNA
aagttacaaacatatgcatgtt

SEQ ID NO: 113056 - RNA, 22 nt, synthetic construct
  source 1..22: mol_type = other RNA
aagttacaaggattgaatggaa

SEQ ID NO: 113057 - RNA, 22 nt, synthetic construct
  source 1..22: mol_type = other RNA
aagttacaataatatgcctcat

SEQ ID NO: 113058 - RNA, 22 nt, synthetic construct
  source 1..22: mol_type = other RNA
aagttacatgcttagccttcca

SEQ ID NO: 113059 - RNA, 22 nt, synthetic construct
  source 1..22: mol_type = other RNA
aagttacggttccctgtagaga

SEQ ID NO: 113060 - RNA, 22 nt, synthetic construct
  source 1..22: mol_type = other RNA
aagttactagaagcacttttta

SEQ ID NO: 113061 - RNA, 22 nt, synthetic construct
  source 1..22: mol_type = other RNA
aagttactgattagaaggattg

SEQ ID NO: 113062 - RNA, 22 nt, synthetic construct
  source 1..22: mol_type = other RNA
aagttagaagtatcccagatgg

SEQ ID NO: 113063 - RNA, 22 nt, synthetic construct
  source 1..22: mol_type = other RNA
aagttagctggcaaaatggaga

SEQ ID NO: 113064 - RNA, 22 nt, synthetic construct
  source 1..22: mol_type = other RNA
aagttagtgaagcagagagaga

SEQ ID NO: 113065 - RNA, 22 nt, synthetic construct
  source 1..22: mol_type = other RNA
aagttagtgtctaatgggtaca

SEQ ID NO: 113066 - RNA, 22 nt, synthetic construct
  source 1..22: mol_type = other RNA
aagttatgtagctgggatggct

SEQ ID NO: 113067 - RNA, 22 nt, synthetic construct
  source 1..22: mol_type = other RNA
aagttatttaatctctcttgac

SEQ ID NO: 113068 - RNA, 22 nt, synthetic construct
  source 1..22: mol_type = other RNA
aagttcaaagaaactacctaga

SEQ ID NO: 113069 - RNA, 22 nt, synthetic construct
  source 1..22: mol_type = other RNA
aagttcaaatgaggcttttatt

SEQ ID NO: 113070 - RNA, 22 nt, synthetic construct
  source 1..22: mol_type = other RNA
aagttcaaggttataatcagcc

SEQ ID NO: 113071 - RNA, 22 nt, synthetic construct
  source 1..22: mol_type = other RNA
aagttcagaataccagagattg

SEQ ID NO: 113072 - RNA, 22 nt, synthetic construct
  source 1..22: mol_type = other RNA
aagttcagcatcttcactgact

SEQ ID NO: 113073 - RNA, 22 nt, synthetic construct
  source 1..22: mol_type = other RNA
aagttccaagattttcccaatc

SEQ ID NO: 113074 - RNA, 22 nt, synthetic construct
  source 1..22: mol_type = other RNA
aagttccccattgacaatatag

SEQ ID NO: 113075 - RNA, 22 nt, synthetic construct
  source 1..22: mol_type = other RNA
aagttccggttctcaggagcct

SEQ ID NO: 113076 - RNA, 22 nt, synthetic construct
  source 1..22: mol_type = other RNA
aagttcctggactgtgatgact

SEQ ID NO: 113077 - RNA, 22 nt, synthetic construct
  source 1..22: mol_type = other RNA
aagttctcaggggtaaagggga

SEQ ID NO: 113078 - RNA, 22 nt, synthetic construct
  source 1..22: mol_type = other RNA
aagttctccaagttattacaaa

SEQ ID NO: 113079 - RNA, 22 nt, synthetic construct
  source 1..22: mol_type = other RNA
aagttctcctgtgtgcatgctc

SEQ ID NO: 113080 - RNA, 22 nt, synthetic construct
  source 1..22: mol_type = other RNA
aagttcttacctcaaaggagag

SEQ ID NO: 113081 - RNA, 22 nt, synthetic construct
  source 1..22: mol_type = other RNA
aagttgaatttctgtccttgga

SEQ ID NO: 113082 - RNA, 22 nt, synthetic construct
  source 1..22: mol_type = other RNA
aagttgagaaactatccaacat

SEQ ID NO: 113083 - RNA, 22 nt, synthetic construct
  source 1..22: mol_type = other RNA
aagttgagaaagagggaagtac

SEQ ID NO: 113084 - RNA, 22 nt, synthetic construct
  source 1..22: mol_type = other RNA
aagttgaggttgaagacctgca

SEQ ID NO: 113085 - RNA, 22 nt, synthetic construct
  source 1..22: mol_type = other RNA
aagttgcaaaaatactacaaga

SEQ ID NO: 113086 - RNA, 22 nt, synthetic construct
  source 1..22: mol_type = other RNA
aagttgcagtgagcccagagat

SEQ ID NO: 113087 - RNA, 22 nt, synthetic construct
  source 1..22: mol_type = other RNA
aagttgcatacgtcgtccccca

SEQ ID NO: 113088 - RNA, 22 nt, synthetic construct
  source 1..22: mol_type = other RNA
aagttgctatccagtctctgca

SEQ ID NO: 113089 - RNA, 22 nt, synthetic construct
  source 1..22: mol_type = other RNA
aagttgcttggcacagaattat

SEQ ID NO: 113090 - RNA, 22 nt, synthetic construct
  source 1..22: mol_type = other RNA
aagttgctttttcttcttgttt

SEQ ID NO: 113091 - RNA, 22 nt, synthetic construct
  source 1..22: mol_type = other RNA
aagttggattcccaggtatttt

SEQ ID NO: 113092 - RNA, 22 nt, synthetic construct
  source 1..22: mol_type = other RNA
aagttggcccaacatgctctta

SEQ ID NO: 113093 - RNA, 22 nt, synthetic construct
  source 1..22: mol_type = other RNA
aagttgggagtctatttctgaa

SEQ ID NO: 113094 - RNA, 22 nt, synthetic construct
  source 1..22: mol_type = other RNA
aagttgggcttaacatttgaac

SEQ ID NO: 113095 - RNA, 22 nt, synthetic construct
  source 1..22: mol_type = other RNA
aagttgggcttggttggaaaag

SEQ ID NO: 113096 - RNA, 22 nt, synthetic construct
  source 1..22: mol_type = other RNA
aagttggtcctgcatatgtttt

SEQ ID NO: 113097 - RNA, 22 nt, synthetic construct
  source 1..22: mol_type = other RNA
aagttgtgatatattatgaacc

SEQ ID NO: 113098 - RNA, 22 nt, synthetic construct
  source 1..22: mol_type = other RNA
aagttgtggtgagccaagatcg

SEQ ID NO: 113099 - RNA, 22 nt, synthetic construct
  source 1..22: mol_type = other RNA
aagttgtgtcatttttgtattc

SEQ ID NO: 113100 - RNA, 22 nt, synthetic construct
  source 1..22: mol_type = other RNA
aagtttaaccaattatgctgag

SEQ ID NO: 113101 - RNA, 22 nt, synthetic construct
  source 1..22: mol_type = other RNA
aagtttaactttgatgaattcc

SEQ ID NO: 113102 - RNA, 22 nt, synthetic construct
  source 1..22: mol_type = other RNA
aagtttatcagtctccaatcct

SEQ ID NO: 113103 - RNA, 22 nt, synthetic construct
  source 1..22: mol_type = other RNA
aagtttcaaactgtggtcactg

SEQ ID NO: 113104 - RNA, 22 nt, synthetic construct
  source 1..22: mol_type = other RNA
aagtttcaccctgcgaaggcaa

SEQ ID NO: 113105 - RNA, 22 nt, synthetic construct
  source 1..22: mol_type = other RNA
aagtttcatggacttcctattt

SEQ ID NO: 113106 - RNA, 22 nt, synthetic construct
  source 1..22: mol_type = other RNA
aagtttccgttttgcaagatgc

SEQ ID NO: 113107 - RNA, 22 nt, synthetic construct
  source 1..22: mol_type = other RNA
aagtttcctacatactgcactc

SEQ ID NO: 113108 - RNA, 22 nt, synthetic construct
  source 1..22: mol_type = other RNA
aagtttcctagaaaatcataca

SEQ ID NO: 113109 - RNA, 22 nt, synthetic construct
  source 1..22: mol_type = other RNA
aagtttcctgcacatgcacaag

SEQ ID NO: 113110 - RNA, 22 nt, synthetic construct
  source 1..22: mol_type = other RNA
aagtttctagccataatcctta

SEQ ID NO: 113111 - RNA, 22 nt, synthetic construct
  source 1..22: mol_type = other RNA
aagtttctctctccctgccctg

SEQ ID NO: 113112 - RNA, 22 nt, synthetic construct
  source 1..22: mol_type = other RNA
aagtttctggaagtttcctgca

SEQ ID NO: 113113 - RNA, 22 nt, synthetic construct
  source 1..22: mol_type = other RNA
aagtttgccaaagattcttgtc

SEQ ID NO: 113114 - RNA, 22 nt, synthetic construct
  source 1..22: mol_type = other RNA
aagtttggaaccagcctggcca

SEQ ID NO: 113115 - RNA, 22 nt, synthetic construct
  source 1..22: mol_type = other RNA
aagtttggctcccatgattcaa

SEQ ID NO: 113116 - RNA, 22 nt, synthetic construct
  source 1..22: mol_type = other RNA
aagtttggttcatttcaggaat

SEQ ID NO: 113117 - RNA, 22 nt, synthetic construct
  source 1..22: mol_type = other RNA
aagttttccaaccactgaatca

SEQ ID NO: 113118 - RNA, 22 nt, synthetic construct
  source 1..22: mol_type = other RNA
aagttttccaggaaaagcaaat

SEQ ID NO: 113119 - RNA, 22 nt, synthetic construct
  source 1..22: mol_type = other RNA
aagttttgcagttggggactct

SEQ ID NO: 113120 - RNA, 22 nt, synthetic construct
  source 1..22: mol_type = other RNA
aagttttgggggaagagagcat

SEQ ID NO: 113121 - RNA, 22 nt, synthetic construct
  source 1..22: mol_type = other RNA
aagttttttcctttgcctttca

SEQ ID NO: 113122 - RNA, 22 nt, synthetic construct
  source 1..22: mol_type = other RNA
aataaaaacatatgcaggacca

SEQ ID NO: 113123 - RNA, 22 nt, synthetic construct
  source 1..22: mol_type = other RNA
aataaaaacctttttgggatct

SEQ ID NO: 113124 - RNA, 22 nt, synthetic construct
  source 1..22: mol_type = other RNA
aataaaaagcctctctgatgga

SEQ ID NO: 113125 - RNA, 22 nt, synthetic construct
  source 1..22: mol_type = other RNA
aataaaaagtatcgtgagacta

SEQ ID NO: 113126 - RNA, 22 nt, synthetic construct
  source 1..22: mol_type = other RNA
aataaaaagtgacttctggatg

SEQ ID NO: 113127 - RNA, 22 nt, synthetic construct
  source 1..22: mol_type = other RNA
aataaaacacaaggacaggtca

SEQ ID NO: 113128 - RNA, 22 nt, synthetic construct
  source 1..22: mol_type = other RNA
aataaaacacatgtcatgggcc

SEQ ID NO: 113129 - RNA, 22 nt, synthetic construct
  source 1..22: mol_type = other RNA
aataaaacatggccagtatctc

SEQ ID NO: 113130 - RNA, 22 nt, synthetic construct
  source 1..22: mol_type = other RNA
aataaaagcctcatttgaactt

SEQ ID NO: 113131 - RNA, 22 nt, synthetic construct
  source 1..22: mol_type = other RNA
aataaaagctctaatagttcac

SEQ ID NO: 113132 - RNA, 22 nt, synthetic construct
  source 1..22: mol_type = other RNA
aataaaagctggagttatttgt

SEQ ID NO: 113133 - RNA, 22 nt, synthetic construct
  source 1..22: mol_type = other RNA
aataaaagcttatgatcttggg

SEQ ID NO: 113134 - RNA, 22 nt, synthetic construct
  source 1..22: mol_type = other RNA
aataaaagttccaagattttcc

SEQ ID NO: 113135 - RNA, 22 nt, synthetic construct
  source 1..22: mol_type = other RNA
aataaaatagcaggattcttgt

SEQ ID NO: 113136 - RNA, 22 nt, synthetic construct
  source 1..22: mol_type = other RNA
aataaaatctgtatgagaagac

SEQ ID NO: 113137 - RNA, 22 nt, synthetic construct
  source 1..22: mol_type = other RNA
aataaaatgtctggccgggcac

SEQ ID NO: 113138 - RNA, 22 nt, synthetic construct
  source 1..22: mol_type = other RNA
aataaaatgtttagcggaatga

SEQ ID NO: 113139 - RNA, 22 nt, synthetic construct
  source 1..22: mol_type = other RNA
aataaaattcaccaaacacctt

SEQ ID NO: 113140 - RNA, 22 nt, synthetic construct
  source 1..22: mol_type = other RNA
aataaaattctgatagcttgac

SEQ ID NO: 113141 - RNA, 22 nt, synthetic construct
  source 1..22: mol_type = other RNA
aataaacaagtcacaaaaagac

SEQ ID NO: 113142 - RNA, 22 nt, synthetic construct
  source 1..22: mol_type = other RNA
aataaacattttccctcctttt

SEQ ID NO: 113143 - RNA, 22 nt, synthetic construct
  source 1..22: mol_type = other RNA
aataaaccaagtttggttcatt

SEQ ID NO: 113144 - RNA, 22 nt, synthetic construct
  source 1..22: mol_type = other RNA
aataaaccacgcagtttgttct

SEQ ID NO: 113145 - RNA, 22 nt, synthetic construct
  source 1..22: mol_type = other RNA
aataaacgacaccagaactaca

SEQ ID NO: 113146 - RNA, 22 nt, synthetic construct
  source 1..22: mol_type = other RNA
aataaacgcggaatgaagcagg

SEQ ID NO: 113147 - RNA, 22 nt, synthetic construct
  source 1..22: mol_type = other RNA
aataaactaacaaagaacagga

SEQ ID NO: 113148 - RNA, 22 nt, synthetic construct
  source 1..22: mol_type = other RNA
aataaagacttcacgatgctta

SEQ ID NO: 113149 - RNA, 22 nt, synthetic construct
  source 1..22: mol_type = other RNA
aataaagcaagtatgagccact

SEQ ID NO: 113150 - RNA, 22 nt, synthetic construct
  source 1..22: mol_type = other RNA
aataaaggcaatgctctcttcc

SEQ ID NO: 113151 - RNA, 22 nt, synthetic construct
  source 1..22: mol_type = other RNA
aataaaggctttcgtatggaag

SEQ ID NO: 113152 - RNA, 22 nt, synthetic construct
  source 1..22: mol_type = other RNA
aataaaggtgctaattgtttgt

SEQ ID NO: 113153 - RNA, 22 nt, synthetic construct
  source 1..22: mol_type = other RNA
aataaagttccccattgacaat

SEQ ID NO: 113154 - RNA, 22 nt, synthetic construct
  source 1..22: mol_type = other RNA
aataaatcctcacatgtttggt

SEQ ID NO: 113155 - RNA, 22 nt, synthetic construct
  source 1..22: mol_type = other RNA
aataaatctaagtctcaaccta

SEQ ID NO: 113156 - RNA, 22 nt, synthetic construct
  source 1..22: mol_type = other RNA
aataaatgaatattcgttccag

SEQ ID NO: 113157 - RNA, 22 nt, synthetic construct
  source 1..22: mol_type = other RNA
aataaatgcataaacgacagca

SEQ ID NO: 113158 - RNA, 22 nt, synthetic construct
  source 1..22: mol_type = other RNA
aataaatggtagcttgggctaa

SEQ ID NO: 113159 - RNA, 22 nt, synthetic construct
  source 1..22: mol_type = other RNA
aataaatggtgcaggccagata

SEQ ID NO: 113160 - RNA, 22 nt, synthetic construct
  source 1..22: mol_type = other RNA
aataacaaaaatacgaaagtgc

SEQ ID NO: 113161 - RNA, 22 nt, synthetic construct
  source 1..22: mol_type = other RNA
aataacaccatagctgaaggca

SEQ ID NO: 113162 - RNA, 22 nt, synthetic construct
  source 1..22: mol_type = other RNA
aataacacgcagaaccactgag

SEQ ID NO: 113163 - RNA, 22 nt, synthetic construct
  source 1..22: mol_type = other RNA
aataacagcctaagcaaatgta

SEQ ID NO: 113164 - RNA, 22 nt, synthetic construct
  source 1..22: mol_type = other RNA
aataaccaatgtcagagatctg

SEQ ID NO: 113165 - RNA, 22 nt, synthetic construct
  source 1..22: mol_type = other RNA
aataaccacatgtggcttgtgg

SEQ ID NO: 113166 - RNA, 22 nt, synthetic construct
  source 1..22: mol_type = other RNA
aataacccatatctttgcttat

SEQ ID NO: 113167 - RNA, 22 nt, synthetic construct
  source 1..22: mol_type = other RNA
aataaccctgttttgtagatta

SEQ ID NO: 113168 - RNA, 22 nt, synthetic construct
  source 1..22: mol_type = other RNA
aataacctcaaagtggaaacaa

SEQ ID NO: 113169 - RNA, 22 nt, synthetic construct
  source 1..22: mol_type = other RNA
aataacctcataagaactcctg

SEQ ID NO: 113170 - RNA, 22 nt, synthetic construct
  source 1..22: mol_type = other RNA
aataacgggccgggcgctgtgg

SEQ ID NO: 113171 - RNA, 22 nt, synthetic construct
  source 1..22: mol_type = other RNA
aataactaaactttgagtagca

SEQ ID NO: 113172 - RNA, 22 nt, synthetic construct
  source 1..22: mol_type = other RNA
aataactacacatcagtgctgc

SEQ ID NO: 113173 - RNA, 22 nt, synthetic construct
  source 1..22: mol_type = other RNA
aataactagaaacttcttctgt

SEQ ID NO: 113174 - RNA, 22 nt, synthetic construct
  source 1..22: mol_type = other RNA
aataactccagcttttattaga

SEQ ID NO: 113175 - RNA, 22 nt, synthetic construct
  source 1..22: mol_type = other RNA
aataactgcctaagtaatgctg

SEQ ID NO: 113176 - RNA, 22 nt, synthetic construct
  source 1..22: mol_type = other RNA
aataactgtcctgaattctaac

SEQ ID NO: 113177 - RNA, 22 nt, synthetic construct
  source 1..22: mol_type = other RNA
aataacttccatgagattacat

SEQ ID NO: 113178 - RNA, 22 nt, synthetic construct
  source 1..22: mol_type = other RNA
aataacttggagaacttaaagg

SEQ ID NO: 113179 - RNA, 22 nt, synthetic construct
  source 1..22: mol_type = other RNA
aataactttaatcaccaggcgc

SEQ ID NO: 113180 - RNA, 22 nt, synthetic construct
  source 1..22: mol_type = other RNA
aataagaaagatctcaaacagc

SEQ ID NO: 113181 - RNA, 22 nt, synthetic construct
  source 1..22: mol_type = other RNA
aataagaagattgagtcagtaa

SEQ ID NO: 113182 - RNA, 22 nt, synthetic construct
  source 1..22: mol_type = other RNA
aataagaaggtttgtagagcaa

SEQ ID NO: 113183 - RNA, 22 nt, synthetic construct
  source 1..22: mol_type = other RNA
aataagaagtgaaaaatgacct

SEQ ID NO: 113184 - RNA, 22 nt, synthetic construct
  source 1..22: mol_type = other RNA
aataagacaccgctccacgccc

SEQ ID NO: 113185 - RNA, 22 nt, synthetic construct
  source 1..22: mol_type = other RNA
aataagatcatacacctggatc

SEQ ID NO: 113186 - RNA, 22 nt, synthetic construct
  source 1..22: mol_type = other RNA
aataagcagaattcaaaaacac

SEQ ID NO: 113187 - RNA, 22 nt, synthetic construct
  source 1..22: mol_type = other RNA
aataagctaatcccaaagtgag

SEQ ID NO: 113188 - RNA, 22 nt, synthetic construct
  source 1..22: mol_type = other RNA
aataagcttcgaagcaaaacat

SEQ ID NO: 113189 - RNA, 22 nt, synthetic construct
  source 1..22: mol_type = other RNA
aataaggaaagcacgtttgatc

SEQ ID NO: 113190 - RNA, 22 nt, synthetic construct
  source 1..22: mol_type = other RNA
aataagggcattttcaaggtag

SEQ ID NO: 113191 - RNA, 22 nt, synthetic construct
  source 1..22: mol_type = other RNA
aataaggtcacattcagaggta

SEQ ID NO: 113192 - RNA, 22 nt, synthetic construct
  source 1..22: mol_type = other RNA
aataaggtctgtaagtcagtta

SEQ ID NO: 113193 - RNA, 22 nt, synthetic construct
  source 1..22: mol_type = other RNA
aataagtgagtttgacctgtaa

SEQ ID NO: 113194 - RNA, 22 nt, synthetic construct
  source 1..22: mol_type = other RNA
aataagttaactgaaatcggga

SEQ ID NO: 113195 - RNA, 22 nt, synthetic construct
  source 1..22: mol_type = other RNA
aataagtttcatggacttccta

SEQ ID NO: 113196 - RNA, 22 nt, synthetic construct
  source 1..22: mol_type = other RNA
aataataactacacatcagtgc

SEQ ID NO: 113197 - RNA, 22 nt, synthetic construct
  source 1..22: mol_type = other RNA
aataatacaaatgatgaagggt

SEQ ID NO: 113198 - RNA, 22 nt, synthetic construct
  source 1..22: mol_type = other RNA
aataatacctaacagccggcat

SEQ ID NO: 113199 - RNA, 22 nt, synthetic construct
  source 1..22: mol_type = other RNA
aataatagctatcctaatgggc

SEQ ID NO: 113200 - RNA, 22 nt, synthetic construct
  source 1..22: mol_type = other RNA
aataatatgataccctcaaaag

SEQ ID NO: 113201 - RNA, 22 nt, synthetic construct
  source 1..22: mol_type = other RNA
aataatatgcctcatgcatcca

SEQ ID NO: 113202 - RNA, 22 nt, synthetic construct
  source 1..22: mol_type = other RNA
aataatcattgttaggtgctgg

SEQ ID NO: 113203 - RNA, 22 nt, synthetic construct
  source 1..22: mol_type = other RNA
aataatcccgcaccttgatttt

SEQ ID NO: 113204 - RNA, 22 nt, synthetic construct
  source 1..22: mol_type = other RNA
aataatgaaagctcccaatgct

SEQ ID NO: 113205 - RNA, 22 nt, synthetic construct
  source 1..22: mol_type = other RNA
aataatgatgactatgaaaagc

SEQ ID NO: 113206 - RNA, 22 nt, synthetic construct
  source 1..22: mol_type = other RNA
aataatgcacatgggcatgggt

SEQ ID NO: 113207 - RNA, 22 nt, synthetic construct
  source 1..22: mol_type = other RNA
aataatgtctttttacacttgg

SEQ ID NO: 113208 - RNA, 22 nt, synthetic construct
  source 1..22: mol_type = other RNA
aataatgttttccgtgtgacaa

SEQ ID NO: 113209 - RNA, 22 nt, synthetic construct
  source 1..22: mol_type = other RNA
aataattaagacaatgtggagt

SEQ ID NO: 113210 - RNA, 22 nt, synthetic construct
  source 1..22: mol_type = other RNA
aataattctgtgccaagcaact

SEQ ID NO: 113211 - RNA, 22 nt, synthetic construct
  source 1..22: mol_type = other RNA
aataattcttcctgtcttggac

SEQ ID NO: 113212 - RNA, 22 nt, synthetic construct
  source 1..22: mol_type = other RNA
aataattgctgcagtttttcca

SEQ ID NO: 113213 - RNA, 22 nt, synthetic construct
  source 1..22: mol_type = other RNA
aataattgcttttgctgaggga

SEQ ID NO: 113214 - RNA, 22 nt, synthetic construct
  source 1..22: mol_type = other RNA
aataatttacatagtgctcttc

SEQ ID NO: 113215 - RNA, 22 nt, synthetic construct
  source 1..22: mol_type = other RNA
aataatttccaggtcattacat

SEQ ID NO: 113216 - RNA, 22 nt, synthetic construct
  source 1..22: mol_type = other RNA
aataatttccctcagaatttga

SEQ ID NO: 113217 - RNA, 22 nt, synthetic construct
  source 1..22: mol_type = other RNA
aataatttggatgaacgctaaa

SEQ ID NO: 113218 - RNA, 22 nt, synthetic construct
  source 1..22: mol_type = other RNA
aataatttggcaaaaaatgcag

SEQ ID NO: 113219 - RNA, 22 nt, synthetic construct
  source 1..22: mol_type = other RNA
aatacaaaggtgttaagccgtt

SEQ ID NO: 113220 - RNA, 22 nt, synthetic construct
  source 1..22: mol_type = other RNA
aatacaaatgatgaagggtttt

SEQ ID NO: 113221 - RNA, 22 nt, synthetic construct
  source 1..22: mol_type = other RNA
aatacaacagcaccttttttgg

SEQ ID NO: 113222 - RNA, 22 nt, synthetic construct
  source 1..22: mol_type = other RNA
aatacaatgtgagccacataca

SEQ ID NO: 113223 - RNA, 22 nt, synthetic construct
  source 1..22: mol_type = other RNA
aatacacatgttgagtcttgtt

SEQ ID NO: 113224 - RNA, 22 nt, synthetic construct
  source 1..22: mol_type = other RNA
aatacaccaaactcaaaaggac

SEQ ID NO: 113225 - RNA, 22 nt, synthetic construct
  source 1..22: mol_type = other RNA
aatacacgtggctgtcaaaaat

SEQ ID NO: 113226 - RNA, 22 nt, synthetic construct
  source 1..22: mol_type = other RNA
aatacacttttcaggtattgag

SEQ ID NO: 113227 - RNA, 22 nt, synthetic construct
  source 1..22: mol_type = other RNA
aatacagaccgatggaacagaa

SEQ ID NO: 113228 - RNA, 22 nt, synthetic construct
  source 1..22: mol_type = other RNA
aatacagagcacagactcaagc

SEQ ID NO: 113229 - RNA, 22 nt, synthetic construct
  source 1..22: mol_type = other RNA
aatacagctccaaagaacagga

SEQ ID NO: 113230 - RNA, 22 nt, synthetic construct
  source 1..22: mol_type = other RNA
aatacagtaaagccccattgta

SEQ ID NO: 113231 - RNA, 22 nt, synthetic construct
  source 1..22: mol_type = other RNA
aatacagtgtttttgaattctg

SEQ ID NO: 113232 - RNA, 22 nt, synthetic construct
  source 1..22: mol_type = other RNA
aatacagttttgaccaaaacaa

SEQ ID NO: 113233 - RNA, 22 nt, synthetic construct
  source 1..22: mol_type = other RNA
aatacatgaggcctctcccctt

SEQ ID NO: 113234 - RNA, 22 nt, synthetic construct
  source 1..22: mol_type = other RNA
aatacatgtcatgttcccggat

SEQ ID NO: 113235 - RNA, 22 nt, synthetic construct
  source 1..22: mol_type = other RNA
aataccaaaaaaggtgctgttg

SEQ ID NO: 113236 - RNA, 22 nt, synthetic construct
  source 1..22: mol_type = other RNA
aataccaaattcacgagactgt

SEQ ID NO: 113237 - RNA, 22 nt, synthetic construct
  source 1..22: mol_type = other RNA
aataccacctgaaatctgattt

SEQ ID NO: 113238 - RNA, 22 nt, synthetic construct
  source 1..22: mol_type = other RNA
aataccacttagtttgcaatac

SEQ ID NO: 113239 - RNA, 22 nt, synthetic construct
  source 1..22: mol_type = other RNA
aataccagagattgggaaaatc

SEQ ID NO: 113240 - RNA, 22 nt, synthetic construct
  source 1..22: mol_type = other RNA
aataccagaggttaaagcaaca

SEQ ID NO: 113241 - RNA, 22 nt, synthetic construct
  source 1..22: mol_type = other RNA
aatacccacaagaaaaacctaa

SEQ ID NO: 113242 - RNA, 22 nt, synthetic construct
  source 1..22: mol_type = other RNA
aatacccctccctacctggcag

SEQ ID NO: 113243 - RNA, 22 nt, synthetic construct
  source 1..22: mol_type = other RNA
aatacctaacagccggcatatg

SEQ ID NO: 113244 - RNA, 22 nt, synthetic construct
  source 1..22: mol_type = other RNA
aatacctagttttccaatccgg

SEQ ID NO: 113245 - RNA, 22 nt, synthetic construct
  source 1..22: mol_type = other RNA
aatacctatttagagggatgaa

SEQ ID NO: 113246 - RNA, 22 nt, synthetic construct
  source 1..22: mol_type = other RNA
aatacctgcaggttgatactag

SEQ ID NO: 113247 - RNA, 22 nt, synthetic construct
  source 1..22: mol_type = other RNA
aatacgaaagtgctctaccctt

SEQ ID NO: 113248 - RNA, 22 nt, synthetic construct
  source 1..22: mol_type = other RNA
aatacggccgggagtggtggct

SEQ ID NO: 113249 - RNA, 22 nt, synthetic construct
  source 1..22: mol_type = other RNA
aatacgtatatgaaaagcccaa

SEQ ID NO: 113250 - RNA, 22 nt, synthetic construct
  source 1..22: mol_type = other RNA
aatacgtgtatactgggtgtga

SEQ ID NO: 113251 - RNA, 22 nt, synthetic construct
  source 1..22: mol_type = other RNA
aatactaacgatccttactacc

SEQ ID NO: 113252 - RNA, 22 nt, synthetic construct
  source 1..22: mol_type = other RNA
aatactacaagagttcccctat

SEQ ID NO: 113253 - RNA, 22 nt, synthetic construct
  source 1..22: mol_type = other RNA
aatactactgcaaatatccaat

SEQ ID NO: 113254 - RNA, 22 nt, synthetic construct
  source 1..22: mol_type = other RNA
aatactagcaaactgaatcaga

SEQ ID NO: 113255 - RNA, 22 nt, synthetic construct
  source 1..22: mol_type = other RNA
aatactagtaggatgaattaca

SEQ ID NO: 113256 - RNA, 22 nt, synthetic construct
  source 1..22: mol_type = other RNA
aatactatgtatgtggctcaca

SEQ ID NO: 113257 - RNA, 22 nt, synthetic construct
  source 1..22: mol_type = other RNA
aatactcaaactatgcttaatc

SEQ ID NO: 113258 - RNA, 22 nt, synthetic construct
  source 1..22: mol_type = other RNA
aatactcaagggctttcaatag

SEQ ID NO: 113259 - RNA, 22 nt, synthetic construct
  source 1..22: mol_type = other RNA
aatactccaccagcatcttttg

SEQ ID NO: 113260 - RNA, 22 nt, synthetic construct
  source 1..22: mol_type = other RNA
aatactcgtgtgtctcataaag

SEQ ID NO: 113261 - RNA, 22 nt, synthetic construct
  source 1..22: mol_type = other RNA
aatactctagtggtgcttaatt

SEQ ID NO: 113262 - RNA, 22 nt, synthetic construct
  source 1..22: mol_type = other RNA
aatactctcagaaattataagc

SEQ ID NO: 113263 - RNA, 22 nt, synthetic construct
  source 1..22: mol_type = other RNA
aatactgcattgtgcacttaaa

SEQ ID NO: 113264 - RNA, 22 nt, synthetic construct
  source 1..22: mol_type = other RNA
aatactgtagaatgtttttccg

SEQ ID NO: 113265 - RNA, 22 nt, synthetic construct
  source 1..22: mol_type = other RNA
aatactgtctcagtcccaaatg

SEQ ID NO: 113266 - RNA, 22 nt, synthetic construct
  source 1..22: mol_type = other RNA
aatactgttatgacaagactac

SEQ ID NO: 113267 - RNA, 22 nt, synthetic construct
  source 1..22: mol_type = other RNA
aatacttaagagcatgttgggc

SEQ ID NO: 113268 - RNA, 22 nt, synthetic construct
  source 1..22: mol_type = other RNA
aatacttaatagcccaacaggg

SEQ ID NO: 113269 - RNA, 22 nt, synthetic construct
  source 1..22: mol_type = other RNA
aatacttgaacattctgtagaa

SEQ ID NO: 113270 - RNA, 22 nt, synthetic construct
  source 1..22: mol_type = other RNA
aatacttggacaggggacatga

SEQ ID NO: 113271 - RNA, 22 nt, synthetic construct
  source 1..22: mol_type = other RNA
aatacttggatcttatctgctg

SEQ ID NO: 113272 - RNA, 22 nt, synthetic construct
  source 1..22: mol_type = other RNA
aatacttgtgtagcgggaaaaa

SEQ ID NO: 113273 - RNA, 22 nt, synthetic construct
  source 1..22: mol_type = other RNA
aatactttagacatgggctaaa

SEQ ID NO: 113274 - RNA, 22 nt, synthetic construct
  source 1..22: mol_type = other RNA
aatactttcacactgattttct

SEQ ID NO: 113275 - RNA, 22 nt, synthetic construct
  source 1..22: mol_type = other RNA
aatactttcccatctctagttt

SEQ ID NO: 113276 - RNA, 22 nt, synthetic construct
  source 1..22: mol_type = other RNA
aatagaaaacttgagcagatca

SEQ ID NO: 113277 - RNA, 22 nt, synthetic construct
  source 1..22: mol_type = other RNA
aatagaaaatccttacttccag

SEQ ID NO: 113278 - RNA, 22 nt, synthetic construct
  source 1..22: mol_type = other RNA
aatagaaagttagtgtctaatg

SEQ ID NO: 113279 - RNA, 22 nt, synthetic construct
  source 1..22: mol_type = other RNA
aatagaactgtcacaattcaca

SEQ ID NO: 113280 - RNA, 22 nt, synthetic construct
  source 1..22: mol_type = other RNA
aatagaagagcagtgtgttctg

SEQ ID NO: 113281 - RNA, 22 nt, synthetic construct
  source 1..22: mol_type = other RNA
aatagaagggagaacccaggaa

SEQ ID NO: 113282 - RNA, 22 nt, synthetic construct
  source 1..22: mol_type = other RNA
aatagacaaagacaagttctta

SEQ ID NO: 113283 - RNA, 22 nt, synthetic construct
  source 1..22: mol_type = other RNA
aatagactcccaacttataata

SEQ ID NO: 113284 - RNA, 22 nt, synthetic construct
  source 1..22: mol_type = other RNA
aatagaggatgggcattccaga

SEQ ID NO: 113285 - RNA, 22 nt, synthetic construct
  source 1..22: mol_type = other RNA
aatagaggtctgtctttcagta

SEQ ID NO: 113286 - RNA, 22 nt, synthetic construct
  source 1..22: mol_type = other RNA
aatagagttccatctgttatag

SEQ ID NO: 113287 - RNA, 22 nt, synthetic construct
  source 1..22: mol_type = other RNA
aatagataaactggaattcatc

SEQ ID NO: 113288 - RNA, 22 nt, synthetic construct
  source 1..22: mol_type = other RNA
aatagataaggttgttcttggt

SEQ ID NO: 113289 - RNA, 22 nt, synthetic construct
  source 1..22: mol_type = other RNA
aatagataggtcatgtacataa

SEQ ID NO: 113290 - RNA, 22 nt, synthetic construct
  source 1..22: mol_type = other RNA
aatagatgcctagaaaggaatt

SEQ ID NO: 113291 - RNA, 22 nt, synthetic construct
  source 1..22: mol_type = other RNA
aatagcaactgttttttcctcc

SEQ ID NO: 113292 - RNA, 22 nt, synthetic construct
  source 1..22: mol_type = other RNA
aatagcagaaacacaggactgt

SEQ ID NO: 113293 - RNA, 22 nt, synthetic construct
  source 1..22: mol_type = other RNA
aatagcaggattcttgttaagc

SEQ ID NO: 113294 - RNA, 22 nt, synthetic construct
  source 1..22: mol_type = other RNA
aatagcagtgctgaaagctaga

SEQ ID NO: 113295 - RNA, 22 nt, synthetic construct
  source 1..22: mol_type = other RNA
aatagcatcttagctcttccct

SEQ ID NO: 113296 - RNA, 22 nt, synthetic construct
  source 1..22: mol_type = other RNA
aatagccagtgcagcaagcagt

SEQ ID NO: 113297 - RNA, 22 nt, synthetic construct
  source 1..22: mol_type = other RNA
aatagcccaacagggttttgtt

SEQ ID NO: 113298 - RNA, 22 nt, synthetic construct
  source 1..22: mol_type = other RNA
aatagcctcctaagttttgggg

SEQ ID NO: 113299 - RNA, 22 nt, synthetic construct
  source 1..22: mol_type = other RNA
aatagctagtgatgttgagtat

SEQ ID NO: 113300 - RNA, 22 nt, synthetic construct
  source 1..22: mol_type = other RNA
aatagctagtgtcttagtctga

SEQ ID NO: 113301 - RNA, 22 nt, synthetic construct
  source 1..22: mol_type = other RNA
aatagctatcctaatgggcgtg

SEQ ID NO: 113302 - RNA, 22 nt, synthetic construct
  source 1..22: mol_type = other RNA
aataggaaagtgacagatgaga

SEQ ID NO: 113303 - RNA, 22 nt, synthetic construct
  source 1..22: mol_type = other RNA
aataggaagtccatgaaactta

SEQ ID NO: 113304 - RNA, 22 nt, synthetic construct
  source 1..22: mol_type = other RNA
aataggaagtggctagacggaa

SEQ ID NO: 113305 - RNA, 22 nt, synthetic construct
  source 1..22: mol_type = other RNA
aataggaatagtattcaggaca

SEQ ID NO: 113306 - RNA, 22 nt, synthetic construct
  source 1..22: mol_type = other RNA
aataggattaagacactacaaa

SEQ ID NO: 113307 - RNA, 22 nt, synthetic construct
  source 1..22: mol_type = other RNA
aataggcaaattcatagatcac

SEQ ID NO: 113308 - RNA, 22 nt, synthetic construct
  source 1..22: mol_type = other RNA
aataggcagtcctctactttca

SEQ ID NO: 113309 - RNA, 22 nt, synthetic construct
  source 1..22: mol_type = other RNA
aataggcctaggtgtgataact

SEQ ID NO: 113310 - RNA, 22 nt, synthetic construct
  source 1..22: mol_type = other RNA
aatagggacggccttctttttt

SEQ ID NO: 113311 - RNA, 22 nt, synthetic construct
  source 1..22: mol_type = other RNA
aatagggcctcaaatttcattt

SEQ ID NO: 113312 - RNA, 22 nt, synthetic construct
  source 1..22: mol_type = other RNA
aatagggtgctactcaaagttt

SEQ ID NO: 113313 - RNA, 22 nt, synthetic construct
  source 1..22: mol_type = other RNA
aataggtattcatgctgtgaat

SEQ ID NO: 113314 - RNA, 22 nt, synthetic construct
  source 1..22: mol_type = other RNA
aataggtgtgtgttccttccta

SEQ ID NO: 113315 - RNA, 22 nt, synthetic construct
  source 1..22: mol_type = other RNA
aatagtaactttctgcttaaag

SEQ ID NO: 113316 - RNA, 22 nt, synthetic construct
  source 1..22: mol_type = other RNA
aatagtaataaaggcaatgctc

SEQ ID NO: 113317 - RNA, 22 nt, synthetic construct
  source 1..22: mol_type = other RNA
aatagtagcttcaatgagggca

SEQ ID NO: 113318 - RNA, 22 nt, synthetic construct
  source 1..22: mol_type = other RNA
aatagtagttgctcagaaaatt

SEQ ID NO: 113319 - RNA, 22 nt, synthetic construct
  source 1..22: mol_type = other RNA
aatagtattcaggacagattaa

SEQ ID NO: 113320 - RNA, 22 nt, synthetic construct
  source 1..22: mol_type = other RNA
aatagtcaagtaacagttcaat

SEQ ID NO: 113321 - RNA, 22 nt, synthetic construct
  source 1..22: mol_type = other RNA
aatagtctcacgatacttttta

SEQ ID NO: 113322 - RNA, 22 nt, synthetic construct
  source 1..22: mol_type = other RNA
aatagtgaccctttgaagtatg

SEQ ID NO: 113323 - RNA, 22 nt, synthetic construct
  source 1..22: mol_type = other RNA
aatagtgggtagaagcagcaag

SEQ ID NO: 113324 - RNA, 22 nt, synthetic construct
  source 1..22: mol_type = other RNA
aatagttaacgtttatctacag

SEQ ID NO: 113325 - RNA, 22 nt, synthetic construct
  source 1..22: mol_type = other RNA
aatagttcacctctccgggtaa

SEQ ID NO: 113326 - RNA, 22 nt, synthetic construct
  source 1..22: mol_type = other RNA
aatagttggtcagaaaaatgga

SEQ ID NO: 113327 - RNA, 22 nt, synthetic construct
  source 1..22: mol_type = other RNA
aatagtttagttactcaaatcc

SEQ ID NO: 113328 - RNA, 22 nt, synthetic construct
  source 1..22: mol_type = other RNA
aatataaaaagcctctgtggac

SEQ ID NO: 113329 - RNA, 22 nt, synthetic construct
  source 1..22: mol_type = other RNA
aatataaaaattccgctctggt

SEQ ID NO: 113330 - RNA, 22 nt, synthetic construct
  source 1..22: mol_type = other RNA
aatataaacgtgtgtgtaagca

SEQ ID NO: 113331 - RNA, 22 nt, synthetic construct
  source 1..22: mol_type = other RNA
aatataaactcttccttatccg

SEQ ID NO: 113332 - RNA, 22 nt, synthetic construct
  source 1..22: mol_type = other RNA
aatataaatacgtgtatactgg

SEQ ID NO: 113333 - RNA, 22 nt, synthetic construct
  source 1..22: mol_type = other RNA
aatatacctgtagaaaataggg

SEQ ID NO: 113334 - RNA, 22 nt, synthetic construct
  source 1..22: mol_type = other RNA
aatataccttatgtgaaagtag

SEQ ID NO: 113335 - RNA, 22 nt, synthetic construct
  source 1..22: mol_type = other RNA
aatatactgactagtggctcat

SEQ ID NO: 113336 - RNA, 22 nt, synthetic construct
  source 1..22: mol_type = other RNA
aatatactggaaaactagagat

SEQ ID NO: 113337 - RNA, 22 nt, synthetic construct
  source 1..22: mol_type = other RNA
aatatacttgtcaagttctgat

SEQ ID NO: 113338 - RNA, 22 nt, synthetic construct
  source 1..22: mol_type = other RNA
aatatagaaggccagagggaat

SEQ ID NO: 113339 - RNA, 22 nt, synthetic construct
  source 1..22: mol_type = other RNA
aatatagcgagacctcatctct

SEQ ID NO: 113340 - RNA, 22 nt, synthetic construct
  source 1..22: mol_type = other RNA
aatataggagactatcgttata

SEQ ID NO: 113341 - RNA, 22 nt, synthetic construct
  source 1..22: mol_type = other RNA
aatatagtgggaccccgtctct

SEQ ID NO: 113342 - RNA, 22 nt, synthetic construct
  source 1..22: mol_type = other RNA
aatatatacggaatgattccac

SEQ ID NO: 113343 - RNA, 22 nt, synthetic construct
  source 1..22: mol_type = other RNA
aatatatactgaagttctcagg

SEQ ID NO: 113344 - RNA, 22 nt, synthetic construct
  source 1..22: mol_type = other RNA
aatatattctaaacctgaggtc

SEQ ID NO: 113345 - RNA, 22 nt, synthetic construct
  source 1..22: mol_type = other RNA
aatatcacactgtttgattact

SEQ ID NO: 113346 - RNA, 22 nt, synthetic construct
  source 1..22: mol_type = other RNA
aatatcatttgaatgatgcgaa

SEQ ID NO: 113347 - RNA, 22 nt, synthetic construct
  source 1..22: mol_type = other RNA
aatatccaagcacaaacctggc

SEQ ID NO: 113348 - RNA, 22 nt, synthetic construct
  source 1..22: mol_type = other RNA
aatatccaatcactggctagta

SEQ ID NO: 113349 - RNA, 22 nt, synthetic construct
  source 1..22: mol_type = other RNA
aatatccctgataatcacagac

SEQ ID NO: 113350 - RNA, 22 nt, synthetic construct
  source 1..22: mol_type = other RNA
aatatccctggggtttccttac

SEQ ID NO: 113351 - RNA, 22 nt, synthetic construct
  source 1..22: mol_type = other RNA
aatatccgaaagaactgaaagc

SEQ ID NO: 113352 - RNA, 22 nt, synthetic construct
  source 1..22: mol_type = other RNA
aatatctatcagggctgaaaaa

SEQ ID NO: 113353 - RNA, 22 nt, synthetic construct
  source 1..22: mol_type = other RNA
aatatctccctcacagtccact

SEQ ID NO: 113354 - RNA, 22 nt, synthetic construct
  source 1..22: mol_type = other RNA
aatatctggactgaaaagatac

SEQ ID NO: 113355 - RNA, 22 nt, synthetic construct
  source 1..22: mol_type = other RNA
aatatctttggggagatacctt

SEQ ID NO: 113356 - RNA, 22 nt, synthetic construct
  source 1..22: mol_type = other RNA
aatatgaaccacactgacagga

SEQ ID NO: 113357 - RNA, 22 nt, synthetic construct
  source 1..22: mol_type = other RNA
aatatgaagcattaatgcaacc

SEQ ID NO: 113358 - RNA, 22 nt, synthetic construct
  source 1..22: mol_type = other RNA
aatatgactggtgtccttctga

SEQ ID NO: 113359 - RNA, 22 nt, synthetic construct
  source 1..22: mol_type = other RNA
aatatgagaattcattgttgtg

SEQ ID NO: 113360 - RNA, 22 nt, synthetic construct
  source 1..22: mol_type = other RNA
aatatgagttcctgcttccccc

SEQ ID NO: 113361 - RNA, 22 nt, synthetic construct
  source 1..22: mol_type = other RNA
aatatgataccctcaaaagatg

SEQ ID NO: 113362 - RNA, 22 nt, synthetic construct
  source 1..22: mol_type = other RNA
aatatgcagtatgtgccatttt

SEQ ID NO: 113363 - RNA, 22 nt, synthetic construct
  source 1..22: mol_type = other RNA
aatatgcctcatgcatccacat

SEQ ID NO: 113364 - RNA, 22 nt, synthetic construct
  source 1..22: mol_type = other RNA
aatatgctgtagtgattcactt

SEQ ID NO: 113365 - RNA, 22 nt, synthetic construct
  source 1..22: mol_type = other RNA
aatatggtcactgctgatgtaa

SEQ ID NO: 113366 - RNA, 22 nt, synthetic construct
  source 1..22: mol_type = other RNA
aatatgtaatgacctggaaatt

SEQ ID NO: 113367 - RNA, 22 nt, synthetic construct
  source 1..22: mol_type = other RNA
aatatgtccttttgagtttggt

SEQ ID NO: 113368 - RNA, 22 nt, synthetic construct
  source 1..22: mol_type = other RNA
aatatgtgtacaatggggcttt

SEQ ID NO: 113369 - RNA, 22 nt, synthetic construct
  source 1..22: mol_type = other RNA
aatattaaccaagaacaacctt

SEQ ID NO: 113370 - RNA, 22 nt, synthetic construct
  source 1..22: mol_type = other RNA
aatattaagagtctcatctgtc

SEQ ID NO: 113371 - RNA, 22 nt, synthetic construct
  source 1..22: mol_type = other RNA
aatattacagtaaggtttccct

SEQ ID NO: 113372 - RNA, 22 nt, synthetic construct
  source 1..22: mol_type = other RNA
aatattactcagtctcgaaaag

SEQ ID NO: 113373 - RNA, 22 nt, synthetic construct
  source 1..22: mol_type = other RNA
aatattataagttgggagtcta

SEQ ID NO: 113374 - RNA, 22 nt, synthetic construct
  source 1..22: mol_type = other RNA
aatattccatttttctgaccaa

SEQ ID NO: 113375 - RNA, 22 nt, synthetic construct
  source 1..22: mol_type = other RNA
aatattcgttccagcagggtaa

SEQ ID NO: 113376 - RNA, 22 nt, synthetic construct
  source 1..22: mol_type = other RNA
aatattgaaacgatgcattcca

SEQ ID NO: 113377 - RNA, 22 nt, synthetic construct
  source 1..22: mol_type = other RNA
aatattgaagagggaacatttt

SEQ ID NO: 113378 - RNA, 22 nt, synthetic construct
  source 1..22: mol_type = other RNA
aatattgtaggtgtctcattta

SEQ ID NO: 113379 - RNA, 22 nt, synthetic construct
  source 1..22: mol_type = other RNA
aatattgtatatacccttctgt

SEQ ID NO: 113380 - RNA, 22 nt, synthetic construct
  source 1..22: mol_type = other RNA
aatatttaacaccatggcaggt

SEQ ID NO: 113381 - RNA, 22 nt, synthetic construct
  source 1..22: mol_type = other RNA
aatattttggaagactatgaga

SEQ ID NO: 113382 - RNA, 22 nt, synthetic construct
  source 1..22: mol_type = other RNA
aatcaaaaacctcccaacaggc

SEQ ID NO: 113383 - RNA, 22 nt, synthetic construct
  source 1..22: mol_type = other RNA
aatcaaaacaataagacaccgc

SEQ ID NO: 113384 - RNA, 22 nt, synthetic construct
  source 1..22: mol_type = other RNA
aatcaaaagaccaagaattttc

SEQ ID NO: 113385 - RNA, 22 nt, synthetic construct
  source 1..22: mol_type = other RNA
aatcaaacagtgtgatattggc

SEQ ID NO: 113386 - RNA, 22 nt, synthetic construct
  source 1..22: mol_type = other RNA
aatcaaacataccccaacccta

SEQ ID NO: 113387 - RNA, 22 nt, synthetic construct
  source 1..22: mol_type = other RNA
aatcaaaccatcctttccttgt

SEQ ID NO: 113388 - RNA, 22 nt, synthetic construct
  source 1..22: mol_type = other RNA
aatcaaagaaagagttgggttt

SEQ ID NO: 113389 - RNA, 22 nt, synthetic construct
  source 1..22: mol_type = other RNA
aatcaaatccagtcttcaggtc

SEQ ID NO: 113390 - RNA, 22 nt, synthetic construct
  source 1..22: mol_type = other RNA
aatcaaatggccttctttcttt

SEQ ID NO: 113391 - RNA, 22 nt, synthetic construct
  source 1..22: mol_type = other RNA
aatcaaatgggaaattagatga

SEQ ID NO: 113392 - RNA, 22 nt, synthetic construct
  source 1..22: mol_type = other RNA
aatcaaattcacagaactgtca

SEQ ID NO: 113393 - RNA, 22 nt, synthetic construct
  source 1..22: mol_type = other RNA
aatcaacaggtagctgcttttt

SEQ ID NO: 113394 - RNA, 22 nt, synthetic construct
  source 1..22: mol_type = other RNA
aatcaacagtgtactagtctcc

SEQ ID NO: 113395 - RNA, 22 nt, synthetic construct
  source 1..22: mol_type = other RNA
aatcaacattgcctccatatgg

SEQ ID NO: 113396 - RNA, 22 nt, synthetic construct
  source 1..22: mol_type = other RNA
aatcaacccatgaaaattgaat

SEQ ID NO: 113397 - RNA, 22 nt, synthetic construct
  source 1..22: mol_type = other RNA
aatcaaccccatcaacaagtgg

SEQ ID NO: 113398 - RNA, 22 nt, synthetic construct
  source 1..22: mol_type = other RNA
aatcaactattccataagatct

SEQ ID NO: 113399 - RNA, 22 nt, synthetic construct
  source 1..22: mol_type = other RNA
aatcaagccgcaaataatcatt

SEQ ID NO: 113400 - RNA, 22 nt, synthetic construct
  source 1..22: mol_type = other RNA
aatcaaggtacaatacactaaa

SEQ ID NO: 113401 - RNA, 22 nt, synthetic construct
  source 1..22: mol_type = other RNA
aatcaaggtgcgggattatttg

SEQ ID NO: 113402 - RNA, 22 nt, synthetic construct
  source 1..22: mol_type = other RNA
aatcaagtatctccctgtgcgt

SEQ ID NO: 113403 - RNA, 22 nt, synthetic construct
  source 1..22: mol_type = other RNA
aatcaagtgaaatgatctttga

SEQ ID NO: 113404 - RNA, 22 nt, synthetic construct
  source 1..22: mol_type = other RNA
aatcaataattctgtgccaagc

SEQ ID NO: 113405 - RNA, 22 nt, synthetic construct
  source 1..22: mol_type = other RNA
aatcaatacttcatttccattg

SEQ ID NO: 113406 - RNA, 22 nt, synthetic construct
  source 1..22: mol_type = other RNA
aatcaatccagacagctaatat

SEQ ID NO: 113407 - RNA, 22 nt, synthetic construct
  source 1..22: mol_type = other RNA
aatcaatctgtttcctaatcta

SEQ ID NO: 113408 - RNA, 22 nt, synthetic construct
  source 1..22: mol_type = other RNA
aatcaatttaacttctaatgcc

SEQ ID NO: 113409 - RNA, 22 nt, synthetic construct
  source 1..22: mol_type = other RNA
aatcacacaatcttgagacgga

SEQ ID NO: 113410 - RNA, 22 nt, synthetic construct
  source 1..22: mol_type = other RNA
aatcacagacgcaaaggatgtc

SEQ ID NO: 113411 - RNA, 22 nt, synthetic construct
  source 1..22: mol_type = other RNA
aatcacaggaaagatgtctttt

SEQ ID NO: 113412 - RNA, 22 nt, synthetic construct
  source 1..22: mol_type = other RNA
aatcacaggtttaggtttttct

SEQ ID NO: 113413 - RNA, 22 nt, synthetic construct
  source 1..22: mol_type = other RNA
aatcacagtacgcttttatgtt

SEQ ID NO: 113414 - RNA, 22 nt, synthetic construct
  source 1..22: mol_type = other RNA
aatcaccaggcgcggtggctca

SEQ ID NO: 113415 - RNA, 22 nt, synthetic construct
  source 1..22: mol_type = other RNA
aatcacctcaaggcagaacaca

SEQ ID NO: 113416 - RNA, 22 nt, synthetic construct
  source 1..22: mol_type = other RNA
aatcacctcaagtgatgcaact

SEQ ID NO: 113417 - RNA, 22 nt, synthetic construct
  source 1..22: mol_type = other RNA
aatcacggctgattataacctt

SEQ ID NO: 113418 - RNA, 22 nt, synthetic construct
  source 1..22: mol_type = other RNA
aatcactacagcatattagctg

SEQ ID NO: 113419 - RNA, 22 nt, synthetic construct
  source 1..22: mol_type = other RNA
aatcactggctagtaggcaaca

SEQ ID NO: 113420 - RNA, 22 nt, synthetic construct
  source 1..22: mol_type = other RNA
aatcagaaaaggctgagacctc

SEQ ID NO: 113421 - RNA, 22 nt, synthetic construct
  source 1..22: mol_type = other RNA
aatcagaaactgacaggactcc

SEQ ID NO: 113422 - RNA, 22 nt, synthetic construct
  source 1..22: mol_type = other RNA
aatcagaacttgacaagtatat

SEQ ID NO: 113423 - RNA, 22 nt, synthetic construct
  source 1..22: mol_type = other RNA
aatcagacaacacattaataag

SEQ ID NO: 113424 - RNA, 22 nt, synthetic construct
  source 1..22: mol_type = other RNA
aatcagactgtattaccagctt

SEQ ID NO: 113425 - RNA, 22 nt, synthetic construct
  source 1..22: mol_type = other RNA
aatcagatatgaaagaggagac

SEQ ID NO: 113426 - RNA, 22 nt, synthetic construct
  source 1..22: mol_type = other RNA
aatcagattaagcatagtttga

SEQ ID NO: 113427 - RNA, 22 nt, synthetic construct
  source 1..22: mol_type = other RNA
aatcagatttcaggtggtattt

SEQ ID NO: 113428 - RNA, 22 nt, synthetic construct
  source 1..22: mol_type = other RNA
aatcagcaccatctaacagaaa

SEQ ID NO: 113429 - RNA, 22 nt, synthetic construct
  source 1..22: mol_type = other RNA
aatcagccgtgattgcaccact

SEQ ID NO: 113430 - RNA, 22 nt, synthetic construct
  source 1..22: mol_type = other RNA
aatcaggaagtatgagtcttcc

SEQ ID NO: 113431 - RNA, 22 nt, synthetic construct
  source 1..22: mol_type = other RNA
aatcaggatgtctttgggaagg

SEQ ID NO: 113432 - RNA, 22 nt, synthetic construct
  source 1..22: mol_type = other RNA
aatcagggccttcccaaagaca

SEQ ID NO: 113433 - RNA, 22 nt, synthetic construct
  source 1..22: mol_type = other RNA
aatcagggcctttaatcacctc

SEQ ID NO: 113434 - RNA, 22 nt, synthetic construct
  source 1..22: mol_type = other RNA
aatcaggtctctttgaaaggaa

SEQ ID NO: 113435 - RNA, 22 nt, synthetic construct
  source 1..22: mol_type = other RNA
aatcaggttgggcttatcagat

SEQ ID NO: 113436 - RNA, 22 nt, synthetic construct
  source 1..22: mol_type = other RNA
aatcagtaagaaaacagataac

SEQ ID NO: 113437 - RNA, 22 nt, synthetic construct
  source 1..22: mol_type = other RNA
aatcagtctgtaagcacctgta

SEQ ID NO: 113438 - RNA, 22 nt, synthetic construct
  source 1..22: mol_type = other RNA
aatcagtggccagtgaccagtg

SEQ ID NO: 113439 - RNA, 22 nt, synthetic construct
  source 1..22: mol_type = other RNA
aatcatacacgagtgtgtttcg

SEQ ID NO: 113440 - RNA, 22 nt, synthetic construct
  source 1..22: mol_type = other RNA
aatcatagctcactagagcttc

SEQ ID NO: 113441 - RNA, 22 nt, synthetic construct
  source 1..22: mol_type = other RNA
aatcatcacagtatgcacaaat

SEQ ID NO: 113442 - RNA, 22 nt, synthetic construct
  source 1..22: mol_type = other RNA
aatcatccggggagcttttgaa

SEQ ID NO: 113443 - RNA, 22 nt, synthetic construct
  source 1..22: mol_type = other RNA
aatcatctaggcatataaactg

SEQ ID NO: 113444 - RNA, 22 nt, synthetic construct
  source 1..22: mol_type = other RNA
aatcatgaaagtggagaattac

SEQ ID NO: 113445 - RNA, 22 nt, synthetic construct
  source 1..22: mol_type = other RNA
aatcatgatgtttggctcctta

SEQ ID NO: 113446 - RNA, 22 nt, synthetic construct
  source 1..22: mol_type = other RNA
aatcatgcagtacttgtctttt

SEQ ID NO: 113447 - RNA, 22 nt, synthetic construct
  source 1..22: mol_type = other RNA
aatcatgggagccaaacttgaa

SEQ ID NO: 113448 - RNA, 22 nt, synthetic construct
  source 1..22: mol_type = other RNA
aatcatgtcaagaatgaagtca

SEQ ID NO: 113449 - RNA, 22 nt, synthetic construct
  source 1..22: mol_type = other RNA
aatcattcaggacactggaggt

SEQ ID NO: 113450 - RNA, 22 nt, synthetic construct
  source 1..22: mol_type = other RNA
aatcattcatctaaacgtttgg

SEQ ID NO: 113451 - RNA, 22 nt, synthetic construct
  source 1..22: mol_type = other RNA
aatcattcttctaataggaagt

SEQ ID NO: 113452 - RNA, 22 nt, synthetic construct
  source 1..22: mol_type = other RNA
aatcattgtagctatatcccaa

SEQ ID NO: 113453 - RNA, 22 nt, synthetic construct
  source 1..22: mol_type = other RNA
aatcattgttaggtgctggctt

SEQ ID NO: 113454 - RNA, 22 nt, synthetic construct
  source 1..22: mol_type = other RNA
aatcattgttcagggaaggctg

SEQ ID NO: 113455 - RNA, 22 nt, synthetic construct
  source 1..22: mol_type = other RNA
aatcatttcactcttttaaggt

SEQ ID NO: 113456 - RNA, 22 nt, synthetic construct
  source 1..22: mol_type = other RNA
aatcattttggcaaattgtcag

SEQ ID NO: 113457 - RNA, 22 nt, synthetic construct
  source 1..22: mol_type = other RNA
aatccaaaagcctcaaaattta

SEQ ID NO: 113458 - RNA, 22 nt, synthetic construct
  source 1..22: mol_type = other RNA
aatccaaaatcctctgtagata

SEQ ID NO: 113459 - RNA, 22 nt, synthetic construct
  source 1..22: mol_type = other RNA
aatccaaattcacagcatgaat

SEQ ID NO: 113460 - RNA, 22 nt, synthetic construct
  source 1..22: mol_type = other RNA
aatccaacgaccggacgtggtg

SEQ ID NO: 113461 - RNA, 22 nt, synthetic construct
  source 1..22: mol_type = other RNA
aatccaactgcagtctgtcctc

SEQ ID NO: 113462 - RNA, 22 nt, synthetic construct
  source 1..22: mol_type = other RNA
aatccaagaagacatgataaat

SEQ ID NO: 113463 - RNA, 22 nt, synthetic construct
  source 1..22: mol_type = other RNA
aatccaaggacagaaattcaac

SEQ ID NO: 113464 - RNA, 22 nt, synthetic construct
  source 1..22: mol_type = other RNA
aatccaagtttctagccataat

SEQ ID NO: 113465 - RNA, 22 nt, synthetic construct
  source 1..22: mol_type = other RNA
aatccagacagctaatatgctg

SEQ ID NO: 113466 - RNA, 22 nt, synthetic construct
  source 1..22: mol_type = other RNA
aatccagataaattatagctcc

SEQ ID NO: 113467 - RNA, 22 nt, synthetic construct
  source 1..22: mol_type = other RNA
aatccagatggacaaattacca

SEQ ID NO: 113468 - RNA, 22 nt, synthetic construct
  source 1..22: mol_type = other RNA
aatccaggatcttactgtaagt

SEQ ID NO: 113469 - RNA, 22 nt, synthetic construct
  source 1..22: mol_type = other RNA
aatccaggatggcatgaaatgg

SEQ ID NO: 113470 - RNA, 22 nt, synthetic construct
  source 1..22: mol_type = other RNA
aatccagtcttcaggtctctct

SEQ ID NO: 113471 - RNA, 22 nt, synthetic construct
  source 1..22: mol_type = other RNA
aatccattgggtacataccgag

SEQ ID NO: 113472 - RNA, 22 nt, synthetic construct
  source 1..22: mol_type = other RNA
aatcccaaagtgagcagaagga

SEQ ID NO: 113473 - RNA, 22 nt, synthetic construct
  source 1..22: mol_type = other RNA
aatcccacttgatccaggtgta

SEQ ID NO: 113474 - RNA, 22 nt, synthetic construct
  source 1..22: mol_type = other RNA
aatcccatttgtaacatgttag

SEQ ID NO: 113475 - RNA, 22 nt, synthetic construct
  source 1..22: mol_type = other RNA
aatccccaaataacatgcatat

SEQ ID NO: 113476 - RNA, 22 nt, synthetic construct
  source 1..22: mol_type = other RNA
aatccccatctgggatacttct

SEQ ID NO: 113477 - RNA, 22 nt, synthetic construct
  source 1..22: mol_type = other RNA
aatcccctttagtgttctgtgt

SEQ ID NO: 113478 - RNA, 22 nt, synthetic construct
  source 1..22: mol_type = other RNA
aatcccgcaccttgattttgat

SEQ ID NO: 113479 - RNA, 22 nt, synthetic construct
  source 1..22: mol_type = other RNA
aatcccggccaggtgcggtggc

SEQ ID NO: 113480 - RNA, 22 nt, synthetic construct
  source 1..22: mol_type = other RNA
aatccctgatcaagttgcttgg

SEQ ID NO: 113481 - RNA, 22 nt, synthetic construct
  source 1..22: mol_type = other RNA
aatcccttccccacctttcctg

SEQ ID NO: 113482 - RNA, 22 nt, synthetic construct
  source 1..22: mol_type = other RNA
aatccctttcgctaatctcaat

SEQ ID NO: 113483 - RNA, 22 nt, synthetic construct
  source 1..22: mol_type = other RNA
aatccgagacaagttctcctgt

SEQ ID NO: 113484 - RNA, 22 nt, synthetic construct
  source 1..22: mol_type = other RNA
aatccggctttatgagacacac

SEQ ID NO: 113485 - RNA, 22 nt, synthetic construct
  source 1..22: mol_type = other RNA
aatccgggaacatgacatgtat

SEQ ID NO: 113486 - RNA, 22 nt, synthetic construct
  source 1..22: mol_type = other RNA
aatcctagccccaaatacctct

SEQ ID NO: 113487 - RNA, 22 nt, synthetic construct
  source 1..22: mol_type = other RNA
aatcctattttgttattagggt

SEQ ID NO: 113488 - RNA, 22 nt, synthetic construct
  source 1..22: mol_type = other RNA
aatcctcacaacaggcctgagc

SEQ ID NO: 113489 - RNA, 22 nt, synthetic construct
  source 1..22: mol_type = other RNA
aatcctcacatgtttggtcaat

SEQ ID NO: 113490 - RNA, 22 nt, synthetic construct
  source 1..22: mol_type = other RNA
aatcctcagccccctccctacc

SEQ ID NO: 113491 - RNA, 22 nt, synthetic construct
  source 1..22: mol_type = other RNA
aatcctctgtagataaacgtta

SEQ ID NO: 113492 - RNA, 22 nt, synthetic construct
  source 1..22: mol_type = other RNA
aatcctgctgggctattgtttt

SEQ ID NO: 113493 - RNA, 22 nt, synthetic construct
  source 1..22: mol_type = other RNA
aatcctgtttctctacatctgg

SEQ ID NO: 113494 - RNA, 22 nt, synthetic construct
  source 1..22: mol_type = other RNA
aatccttacttccagctcacgt

SEQ ID NO: 113495 - RNA, 22 nt, synthetic construct
  source 1..22: mol_type = other RNA
aatccttagattacaaaagaac

SEQ ID NO: 113496 - RNA, 22 nt, synthetic construct
  source 1..22: mol_type = other RNA
aatccttcagtcagttctctgc

SEQ ID NO: 113497 - RNA, 22 nt, synthetic construct
  source 1..22: mol_type = other RNA
aatccttccgcctcagcctccc

SEQ ID NO: 113498 - RNA, 22 nt, synthetic construct
  source 1..22: mol_type = other RNA
aatccttccttcatgtcccctg

SEQ ID NO: 113499 - RNA, 22 nt, synthetic construct
  source 1..22: mol_type = other RNA
aatccttctaatcagtaactta

SEQ ID NO: 113500 - RNA, 22 nt, synthetic construct
  source 1..22: mol_type = other RNA
aatccttctcatagtcttccaa

SEQ ID NO: 113501 - RNA, 22 nt, synthetic construct
  source 1..22: mol_type = other RNA
aatccttgtggtcttaagagac

SEQ ID NO: 113502 - RNA, 22 nt, synthetic construct
  source 1..22: mol_type = other RNA
aatcctttgcacacaccaaatc

SEQ ID NO: 113503 - RNA, 22 nt, synthetic construct
  source 1..22: mol_type = other RNA
aatcctttgcttcccacttcga

SEQ ID NO: 113504 - RNA, 22 nt, synthetic construct
  source 1..22: mol_type = other RNA
aatcctttgtgcaggtctgggt

SEQ ID NO: 113505 - RNA, 22 nt, synthetic construct
  source 1..22: mol_type = other RNA
aatccttttcccaggagctaga

SEQ ID NO: 113506 - RNA, 22 nt, synthetic construct
  source 1..22: mol_type = other RNA
aatcgaatcctcacaacaggcc

SEQ ID NO: 113507 - RNA, 22 nt, synthetic construct
  source 1..22: mol_type = other RNA
aatcgcaatccaaaatcctctg

SEQ ID NO: 113508 - RNA, 22 nt, synthetic construct
  source 1..22: mol_type = other RNA
aatcgcagggccattctgctat

SEQ ID NO: 113509 - RNA, 22 nt, synthetic construct
  source 1..22: mol_type = other RNA
aatcggaacaggctcaatacct

SEQ ID NO: 113510 - RNA, 22 nt, synthetic construct
  source 1..22: mol_type = other RNA
aatcggaactcctgtatgccgc

SEQ ID NO: 113511 - RNA, 22 nt, synthetic construct
  source 1..22: mol_type = other RNA
aatcgggagtaacagacctctg

SEQ ID NO: 113512 - RNA, 22 nt, synthetic construct
  source 1..22: mol_type = other RNA
aatcgtcctcttcgggtgtcag

SEQ ID NO: 113513 - RNA, 22 nt, synthetic construct
  source 1..22: mol_type = other RNA
aatcgtgatagtcttccaattg

SEQ ID NO: 113514 - RNA, 22 nt, synthetic construct
  source 1..22: mol_type = other RNA
aatctaaagccaatcttcccaa

SEQ ID NO: 113515 - RNA, 22 nt, synthetic construct
  source 1..22: mol_type = other RNA
aatctaacaaaagatacacaag

SEQ ID NO: 113516 - RNA, 22 nt, synthetic construct
  source 1..22: mol_type = other RNA
aatctaacatgttacaaatggg

SEQ ID NO: 113517 - RNA, 22 nt, synthetic construct
  source 1..22: mol_type = other RNA
aatctaaccctcaatccccatc

SEQ ID NO: 113518 - RNA, 22 nt, synthetic construct
  source 1..22: mol_type = other RNA
aatctaaccctcctcctctaca

SEQ ID NO: 113519 - RNA, 22 nt, synthetic construct
  source 1..22: mol_type = other RNA
aatctaaggattatggctagaa

SEQ ID NO: 113520 - RNA, 22 nt, synthetic construct
  source 1..22: mol_type = other RNA
aatctaagtctcaacctacttt

SEQ ID NO: 113521 - RNA, 22 nt, synthetic construct
  source 1..22: mol_type = other RNA
aatctaataaaaagcctctctg

SEQ ID NO: 113522 - RNA, 22 nt, synthetic construct
  source 1..22: mol_type = other RNA
aatctaattcgaaaatgggcca

SEQ ID NO: 113523 - RNA, 22 nt, synthetic construct
  source 1..22: mol_type = other RNA
aatctacaaaacagggttatta

SEQ ID NO: 113524 - RNA, 22 nt, synthetic construct
  source 1..22: mol_type = other RNA
aatctacagattcaatgcaata

SEQ ID NO: 113525 - RNA, 22 nt, synthetic construct
  source 1..22: mol_type = other RNA
aatctacaggtcggaaggaatg

SEQ ID NO: 113526 - RNA, 22 nt, synthetic construct
  source 1..22: mol_type = other RNA
aatctaccaaacattgaaggca

SEQ ID NO: 113527 - RNA, 22 nt, synthetic construct
  source 1..22: mol_type = other RNA
aatctactcttttgtttttggg

SEQ ID NO: 113528 - RNA, 22 nt, synthetic construct
  source 1..22: mol_type = other RNA
aatctactttctaatcctttgc

SEQ ID NO: 113529 - RNA, 22 nt, synthetic construct
  source 1..22: mol_type = other RNA
aatctagaaagataaatccaac

SEQ ID NO: 113530 - RNA, 22 nt, synthetic construct
  source 1..22: mol_type = other RNA
aatctaggaaacactgctcaga

SEQ ID NO: 113531 - RNA, 22 nt, synthetic construct
  source 1..22: mol_type = other RNA
aatctaggaggtctaagagata

SEQ ID NO: 113532 - RNA, 22 nt, synthetic construct
  source 1..22: mol_type = other RNA
aatctaggcatataataagcag

SEQ ID NO: 113533 - RNA, 22 nt, synthetic construct
  source 1..22: mol_type = other RNA
aatctaggttatctgttttctt

SEQ ID NO: 113534 - RNA, 22 nt, synthetic construct
  source 1..22: mol_type = other RNA
aatctcaatcagggccttccca

SEQ ID NO: 113535 - RNA, 22 nt, synthetic construct
  source 1..22: mol_type = other RNA
aatctcacacctgggtatacag

SEQ ID NO: 113536 - RNA, 22 nt, synthetic construct
  source 1..22: mol_type = other RNA
aatctcagctcattacagtctc

SEQ ID NO: 113537 - RNA, 22 nt, synthetic construct
  source 1..22: mol_type = other RNA
aatctcatccacaatgagacat

SEQ ID NO: 113538 - RNA, 22 nt, synthetic construct
  source 1..22: mol_type = other RNA
aatctcctgagtagcagggacc

SEQ ID NO: 113539 - RNA, 22 nt, synthetic construct
  source 1..22: mol_type = other RNA
aatctcctgatccacctgcctc

SEQ ID NO: 113540 - RNA, 22 nt, synthetic construct
  source 1..22: mol_type = other RNA
aatctctacagggaaccgtaac

SEQ ID NO: 113541 - RNA, 22 nt, synthetic construct
  source 1..22: mol_type = other RNA
aatctctagaacttatgcatct

SEQ ID NO: 113542 - RNA, 22 nt, synthetic construct
  source 1..22: mol_type = other RNA
aatctctaggcttaaaattctt

SEQ ID NO: 113543 - RNA, 22 nt, synthetic construct
  source 1..22: mol_type = other RNA
aatctctctatccaccactcca

SEQ ID NO: 113544 - RNA, 22 nt, synthetic construct
  source 1..22: mol_type = other RNA
aatctctcttgaccttagtttt

SEQ ID NO: 113545 - RNA, 22 nt, synthetic construct
  source 1..22: mol_type = other RNA
aatctctgacttcattcttgac

SEQ ID NO: 113546 - RNA, 22 nt, synthetic construct
  source 1..22: mol_type = other RNA
aatctctggggttagggcctag

SEQ ID NO: 113547 - RNA, 22 nt, synthetic construct
  source 1..22: mol_type = other RNA
aatctctggtattctgaacttt

SEQ ID NO: 113548 - RNA, 22 nt, synthetic construct
  source 1..22: mol_type = other RNA
aatctcttacacctgtttaaaa

SEQ ID NO: 113549 - RNA, 22 nt, synthetic construct
  source 1..22: mol_type = other RNA
aatctgaaacgaccttgctcat

SEQ ID NO: 113550 - RNA, 22 nt, synthetic construct
  source 1..22: mol_type = other RNA
aatctgacaatttgccaaaatg

SEQ ID NO: 113551 - RNA, 22 nt, synthetic construct
  source 1..22: mol_type = other RNA
aatctgacctaagcttgggtag

SEQ ID NO: 113552 - RNA, 22 nt, synthetic construct
  source 1..22: mol_type = other RNA
aatctgagtaaagggtaagaaa

SEQ ID NO: 113553 - RNA, 22 nt, synthetic construct
  source 1..22: mol_type = other RNA
aatctgatgtgtatgttacact

SEQ ID NO: 113554 - RNA, 22 nt, synthetic construct
  source 1..22: mol_type = other RNA
aatctgattcagtggttggaaa

SEQ ID NO: 113555 - RNA, 22 nt, synthetic construct
  source 1..22: mol_type = other RNA
aatctgatttgtttagtagctg

SEQ ID NO: 113556 - RNA, 22 nt, synthetic construct
  source 1..22: mol_type = other RNA
aatctgattttaatctgtcctg

SEQ ID NO: 113557 - RNA, 22 nt, synthetic construct
  source 1..22: mol_type = other RNA
aatctgatttttagtgactggc

SEQ ID NO: 113558 - RNA, 22 nt, synthetic construct
  source 1..22: mol_type = other RNA
aatctgcaactatcaaaacact

SEQ ID NO: 113559 - RNA, 22 nt, synthetic construct
  source 1..22: mol_type = other RNA
aatctgcatccaaaagggaaat

SEQ ID NO: 113560 - RNA, 22 nt, synthetic construct
  source 1..22: mol_type = other RNA
aatctggaatgcatcgtttcaa

SEQ ID NO: 113561 - RNA, 22 nt, synthetic construct
  source 1..22: mol_type = other RNA
aatctggctgcagggcttctga

SEQ ID NO: 113562 - RNA, 22 nt, synthetic construct
  source 1..22: mol_type = other RNA
aatctgtagattgttttaggta

SEQ ID NO: 113563 - RNA, 22 nt, synthetic construct
  source 1..22: mol_type = other RNA
aatctgtatatgaaaagcttcc

SEQ ID NO: 113564 - RNA, 22 nt, synthetic construct
  source 1..22: mol_type = other RNA
aatctgtatgagaagactggaa

SEQ ID NO: 113565 - RNA, 22 nt, synthetic construct
  source 1..22: mol_type = other RNA
aatctgtcagcagttcagcctg

SEQ ID NO: 113566 - RNA, 22 nt, synthetic construct
  source 1..22: mol_type = other RNA
aatctgtcctgaatactattcc

SEQ ID NO: 113567 - RNA, 22 nt, synthetic construct
  source 1..22: mol_type = other RNA
aatctgttcctgggttctccct

SEQ ID NO: 113568 - RNA, 22 nt, synthetic construct
  source 1..22: mol_type = other RNA
aatctgtttcctaatctaacat

SEQ ID NO: 113569 - RNA, 22 nt, synthetic construct
  source 1..22: mol_type = other RNA
aatcttaaaataccagaggtta

SEQ ID NO: 113570 - RNA, 22 nt, synthetic construct
  source 1..22: mol_type = other RNA
aatcttacccccatcacactgg

SEQ ID NO: 113571 - RNA, 22 nt, synthetic construct
  source 1..22: mol_type = other RNA
aatcttaccctgttgaccaggc

SEQ ID NO: 113572 - RNA, 22 nt, synthetic construct
  source 1..22: mol_type = other RNA
aatcttactggtgttaggcaat

SEQ ID NO: 113573 - RNA, 22 nt, synthetic construct
  source 1..22: mol_type = other RNA
aatcttattccccagggaaacc

SEQ ID NO: 113574 - RNA, 22 nt, synthetic construct
  source 1..22: mol_type = other RNA
aatcttcaaaatctgatgtgta

SEQ ID NO: 113575 - RNA, 22 nt, synthetic construct
  source 1..22: mol_type = other RNA
aatcttcacacttagttcaaga

SEQ ID NO: 113576 - RNA, 22 nt, synthetic construct
  source 1..22: mol_type = other RNA
aatcttccagaaggagaaaaca

SEQ ID NO: 113577 - RNA, 22 nt, synthetic construct
  source 1..22: mol_type = other RNA
aatcttcccaatcctttgtgca

SEQ ID NO: 113578 - RNA, 22 nt, synthetic construct
  source 1..22: mol_type = other RNA
aatcttgaaaggggccaggtgt

SEQ ID NO: 113579 - RNA, 22 nt, synthetic construct
  source 1..22: mol_type = other RNA
aatcttgaagatggcaaacaga

SEQ ID NO: 113580 - RNA, 22 nt, synthetic construct
  source 1..22: mol_type = other RNA
aatcttgagacggaagactcat

SEQ ID NO: 113581 - RNA, 22 nt, synthetic construct
  source 1..22: mol_type = other RNA
aatcttgcaaaacaatagccca

SEQ ID NO: 113582 - RNA, 22 nt, synthetic construct
  source 1..22: mol_type = other RNA
aatcttgctaaacatgtatact

SEQ ID NO: 113583 - RNA, 22 nt, synthetic construct
  source 1..22: mol_type = other RNA
aatcttggaaatgatacctcat

SEQ ID NO: 113584 - RNA, 22 nt, synthetic construct
  source 1..22: mol_type = other RNA
aatctttagtgttgcttggtgt

SEQ ID NO: 113585 - RNA, 22 nt, synthetic construct
  source 1..22: mol_type = other RNA
aatctttctgaactcaaaagtg

SEQ ID NO: 113586 - RNA, 22 nt, synthetic construct
  source 1..22: mol_type = other RNA
aatctttggcaaacttagaata

SEQ ID NO: 113587 - RNA, 22 nt, synthetic construct
  source 1..22: mol_type = other RNA
aatctttggtgaaggttcatga

SEQ ID NO: 113588 - RNA, 22 nt, synthetic construct
  source 1..22: mol_type = other RNA
aatctttggtgctgataaatgg

SEQ ID NO: 113589 - RNA, 22 nt, synthetic construct
  source 1..22: mol_type = other RNA
aatctttgtacagtaattgtag

SEQ ID NO: 113590 - RNA, 22 nt, synthetic construct
  source 1..22: mol_type = other RNA
aatgaaaaattcactcctcatt

SEQ ID NO: 113591 - RNA, 22 nt, synthetic construct
  source 1..22: mol_type = other RNA
aatgaaaacacaacataccaaa

SEQ ID NO: 113592 - RNA, 22 nt, synthetic construct
  source 1..22: mol_type = other RNA
aatgaaaatgttccctcttcaa

SEQ ID NO: 113593 - RNA, 22 nt, synthetic construct
  source 1..22: mol_type = other RNA
aatgaaaattagctggatgtgg

SEQ ID NO: 113594 - RNA, 22 nt, synthetic construct
  source 1..22: mol_type = other RNA
aatgaaaatttttgtctggaac

SEQ ID NO: 113595 - RNA, 22 nt, synthetic construct
  source 1..22: mol_type = other RNA
aatgaaacacttgtgtaactac

SEQ ID NO: 113596 - RNA, 22 nt, synthetic construct
  source 1..22: mol_type = other RNA
aatgaaagctcccaatgcttga

SEQ ID NO: 113597 - RNA, 22 nt, synthetic construct
  source 1..22: mol_type = other RNA
aatgaaaggcgtcggggctgct

SEQ ID NO: 113598 - RNA, 22 nt, synthetic construct
  source 1..22: mol_type = other RNA
aatgaaagtcagctaattttct

SEQ ID NO: 113599 - RNA, 22 nt, synthetic construct
  source 1..22: mol_type = other RNA
aatgaaatggcccttaacttca

SEQ ID NO: 113600 - RNA, 22 nt, synthetic construct
  source 1..22: mol_type = other RNA
aatgaaatttgaggccctattc

SEQ ID NO: 113601 - RNA, 22 nt, synthetic construct
  source 1..22: mol_type = other RNA
aatgaacaggttcttcatcagt

SEQ ID NO: 113602 - RNA, 22 nt, synthetic construct
  source 1..22: mol_type = other RNA
aatgaaccaaacttggtttatt

SEQ ID NO: 113603 - RNA, 22 nt, synthetic construct
  source 1..22: mol_type = other RNA
aatgaacctgctttctactagt

SEQ ID NO: 113604 - RNA, 22 nt, synthetic construct
  source 1..22: mol_type = other RNA
aatgaactcccagaactcgaag

SEQ ID NO: 113605 - RNA, 22 nt, synthetic construct
  source 1..22: mol_type = other RNA
aatgaactcctatagttaagtc

SEQ ID NO: 113606 - RNA, 22 nt, synthetic construct
  source 1..22: mol_type = other RNA
aatgaagaaaatccaagaagac

SEQ ID NO: 113607 - RNA, 22 nt, synthetic construct
  source 1..22: mol_type = other RNA
aatgaagatggcctccctcact

SEQ ID NO: 113608 - RNA, 22 nt, synthetic construct
  source 1..22: mol_type = other RNA
aatgaagcaggccttcgaggca

SEQ ID NO: 113609 - RNA, 22 nt, synthetic construct
  source 1..22: mol_type = other RNA
aatgaaggaaaaaacgggttat

SEQ ID NO: 113610 - RNA, 22 nt, synthetic construct
  source 1..22: mol_type = other RNA
aatgaagtattgatttgaccat

SEQ ID NO: 113611 - RNA, 22 nt, synthetic construct
  source 1..22: mol_type = other RNA
aatgaagtcagagattttccca

SEQ ID NO: 113612 - RNA, 22 nt, synthetic construct
  source 1..22: mol_type = other RNA
aatgaatatgtactacctatag

SEQ ID NO: 113613 - RNA, 22 nt, synthetic construct
  source 1..22: mol_type = other RNA
aatgaatattcgttccagcagg

SEQ ID NO: 113614 - RNA, 22 nt, synthetic construct
  source 1..22: mol_type = other RNA
aatgaattagcaatgcgaatca

SEQ ID NO: 113615 - RNA, 22 nt, synthetic construct
  source 1..22: mol_type = other RNA
aatgacaagtaaatgcaatgca

SEQ ID NO: 113616 - RNA, 22 nt, synthetic construct
  source 1..22: mol_type = other RNA
aatgacacaacttactactaaa

SEQ ID NO: 113617 - RNA, 22 nt, synthetic construct
  source 1..22: mol_type = other RNA
aatgacaccaaaactacaggca

SEQ ID NO: 113618 - RNA, 22 nt, synthetic construct
  source 1..22: mol_type = other RNA
aatgaccgagatacttaagttt

SEQ ID NO: 113619 - RNA, 22 nt, synthetic construct
  source 1..22: mol_type = other RNA
aatgacctaaaatcttattccc

SEQ ID NO: 113620 - RNA, 22 nt, synthetic construct
  source 1..22: mol_type = other RNA
aatgacctggaaattattcaat

SEQ ID NO: 113621 - RNA, 22 nt, synthetic construct
  source 1..22: mol_type = other RNA
aatgactgttgcctctgtgcta

SEQ ID NO: 113622 - RNA, 22 nt, synthetic construct
  source 1..22: mol_type = other RNA
aatgagaaacatacatgttcag

SEQ ID NO: 113623 - RNA, 22 nt, synthetic construct
  source 1..22: mol_type = other RNA
aatgagaaacctaagaaaggtc

SEQ ID NO: 113624 - RNA, 22 nt, synthetic construct
  source 1..22: mol_type = other RNA
aatgagaatttcagaaagagaa

SEQ ID NO: 113625 - RNA, 22 nt, synthetic construct
  source 1..22: mol_type = other RNA
aatgagacacctacaatattaa

SEQ ID NO: 113626 - RNA, 22 nt, synthetic construct
  source 1..22: mol_type = other RNA
aatgagacatttgagggtgctg

SEQ ID NO: 113627 - RNA, 22 nt, synthetic construct
  source 1..22: mol_type = other RNA
aatgagaccaaatgcataaaaa

SEQ ID NO: 113628 - RNA, 22 nt, synthetic construct
  source 1..22: mol_type = other RNA
aatgagaccccatctctaccaa

SEQ ID NO: 113629 - RNA, 22 nt, synthetic construct
  source 1..22: mol_type = other RNA
aatgagataaactagattacct

SEQ ID NO: 113630 - RNA, 22 nt, synthetic construct
  source 1..22: mol_type = other RNA
aatgagatagaccagatgcgtg

SEQ ID NO: 113631 - RNA, 22 nt, synthetic construct
  source 1..22: mol_type = other RNA
aatgagcaaggtcgtttcagat

SEQ ID NO: 113632 - RNA, 22 nt, synthetic construct
  source 1..22: mol_type = other RNA
aatgagccaggcatggtggtgg

SEQ ID NO: 113633 - RNA, 22 nt, synthetic construct
  source 1..22: mol_type = other RNA
aatgaggagtgaatttttcatt

SEQ ID NO: 113634 - RNA, 22 nt, synthetic construct
  source 1..22: mol_type = other RNA
aatgaggcttttattggtaatg

SEQ ID NO: 113635 - RNA, 22 nt, synthetic construct
  source 1..22: mol_type = other RNA
aatgagggcagagataactggg

SEQ ID NO: 113636 - RNA, 22 nt, synthetic construct
  source 1..22: mol_type = other RNA
aatgagggtaaaatagtcaagt

SEQ ID NO: 113637 - RNA, 22 nt, synthetic construct
  source 1..22: mol_type = other RNA
aatgaggtatcatttccaagat

SEQ ID NO: 113638 - RNA, 22 nt, synthetic construct
  source 1..22: mol_type = other RNA
aatgaggttgcttttacttggc

SEQ ID NO: 113639 - RNA, 22 nt, synthetic construct
  source 1..22: mol_type = other RNA
aatgagtaacatgtggaacata

SEQ ID NO: 113640 - RNA, 22 nt, synthetic construct
  source 1..22: mol_type = other RNA
aatgagtagtacttctgagtgt

SEQ ID NO: 113641 - RNA, 22 nt, synthetic construct
  source 1..22: mol_type = other RNA
aatgagtccagctttctaattc

SEQ ID NO: 113642 - RNA, 22 nt, synthetic construct
  source 1..22: mol_type = other RNA
aatgagtctgacatactgtcac

SEQ ID NO: 113643 - RNA, 22 nt, synthetic construct
  source 1..22: mol_type = other RNA
aatgagtgagccacagctacac

SEQ ID NO: 113644 - RNA, 22 nt, synthetic construct
  source 1..22: mol_type = other RNA
aatgagtgtatgcagggaaatc

SEQ ID NO: 113645 - RNA, 22 nt, synthetic construct
  source 1..22: mol_type = other RNA
aatgagttccagtcctttgtgt

SEQ ID NO: 113646 - RNA, 22 nt, synthetic construct
  source 1..22: mol_type = other RNA
aatgagtttaattcttttgctg

SEQ ID NO: 113647 - RNA, 22 nt, synthetic construct
  source 1..22: mol_type = other RNA
aatgatagactggattaaggag

SEQ ID NO: 113648 - RNA, 22 nt, synthetic construct
  source 1..22: mol_type = other RNA
aatgatagcattatcccagatc

SEQ ID NO: 113649 - RNA, 22 nt, synthetic construct
  source 1..22: mol_type = other RNA
aatgataggtcactgcagtctc

SEQ ID NO: 113650 - RNA, 22 nt, synthetic construct
  source 1..22: mol_type = other RNA
aatgatctttcaaggggccttt

SEQ ID NO: 113651 - RNA, 22 nt, synthetic construct
  source 1..22: mol_type = other RNA
aatgatctttgaataaagggtc

SEQ ID NO: 113652 - RNA, 22 nt, synthetic construct
  source 1..22: mol_type = other RNA
aatgatgaagggttttctgtag

SEQ ID NO: 113653 - RNA, 22 nt, synthetic construct
  source 1..22: mol_type = other RNA
aatgatgactatgaaaagcctc

SEQ ID NO: 113654 - RNA, 22 nt, synthetic construct
  source 1..22: mol_type = other RNA
aatgatgagctactgcatgcta

SEQ ID NO: 113655 - RNA, 22 nt, synthetic construct
  source 1..22: mol_type = other RNA
aatgatgccatcacattttgaa

SEQ ID NO: 113656 - RNA, 22 nt, synthetic construct
  source 1..22: mol_type = other RNA
aatgatggcaacaatcaacagg

SEQ ID NO: 113657 - RNA, 22 nt, synthetic construct
  source 1..22: mol_type = other RNA
aatgattatttgcggcttgatt

SEQ ID NO: 113658 - RNA, 22 nt, synthetic construct
  source 1..22: mol_type = other RNA
aatgattccacttatatgaagc

SEQ ID NO: 113659 - RNA, 22 nt, synthetic construct
  source 1..22: mol_type = other RNA
aatgatttcaagtaacactcag

SEQ ID NO: 113660 - RNA, 22 nt, synthetic construct
  source 1..22: mol_type = other RNA
aatgatttccctgcatacactc

SEQ ID NO: 113661 - RNA, 22 nt, synthetic construct
  source 1..22: mol_type = other RNA
aatgattttcacagggcaggga

SEQ ID NO: 113662 - RNA, 22 nt, synthetic construct
  source 1..22: mol_type = other RNA
aatgcaaactctaaataatagg

SEQ ID NO: 113663 - RNA, 22 nt, synthetic construct
  source 1..22: mol_type = other RNA
aatgcaaagtttcctacatact

SEQ ID NO: 113664 - RNA, 22 nt, synthetic construct
  source 1..22: mol_type = other RNA
aatgcaacctgctttcctcatg

SEQ ID NO: 113665 - RNA, 22 nt, synthetic construct
  source 1..22: mol_type = other RNA
aatgcaagagttaaaactcaca

SEQ ID NO: 113666 - RNA, 22 nt, synthetic construct
  source 1..22: mol_type = other RNA
aatgcaatacttaatagcccaa

SEQ ID NO: 113667 - RNA, 22 nt, synthetic construct
  source 1..22: mol_type = other RNA
aatgcaatgcaggcgcctggac

SEQ ID NO: 113668 - RNA, 22 nt, synthetic construct
  source 1..22: mol_type = other RNA
aatgcaatgcgtgtgaaaccaa

SEQ ID NO: 113669 - RNA, 22 nt, synthetic construct
  source 1..22: mol_type = other RNA
aatgcacatgggcatgggtcca

SEQ ID NO: 113670 - RNA, 22 nt, synthetic construct
  source 1..22: mol_type = other RNA
aatgcaccaacacctgcagtgg

SEQ ID NO: 113671 - RNA, 22 nt, synthetic construct
  source 1..22: mol_type = other RNA
aatgcacgtgaagctacagact

SEQ ID NO: 113672 - RNA, 22 nt, synthetic construct
  source 1..22: mol_type = other RNA
aatgcacttagcgctgatgtgt

SEQ ID NO: 113673 - RNA, 22 nt, synthetic construct
  source 1..22: mol_type = other RNA
aatgcagaaaataaaccaagtt

SEQ ID NO: 113674 - RNA, 22 nt, synthetic construct
  source 1..22: mol_type = other RNA
aatgcaggcgcctggacaggat

SEQ ID NO: 113675 - RNA, 22 nt, synthetic construct
  source 1..22: mol_type = other RNA
aatgcagtagtaaagcaaatgt

SEQ ID NO: 113676 - RNA, 22 nt, synthetic construct
  source 1..22: mol_type = other RNA
aatgcagtattgttaactgtag

SEQ ID NO: 113677 - RNA, 22 nt, synthetic construct
  source 1..22: mol_type = other RNA
aatgcagtggcttcctaactgg

SEQ ID NO: 113678 - RNA, 22 nt, synthetic construct
  source 1..22: mol_type = other RNA
aatgcataaacgacagcaggaa

SEQ ID NO: 113679 - RNA, 22 nt, synthetic construct
  source 1..22: mol_type = other RNA
aatgcatatatctgtctgggat

SEQ ID NO: 113680 - RNA, 22 nt, synthetic construct
  source 1..22: mol_type = other RNA
aatgcatccctcctctggccct

SEQ ID NO: 113681 - RNA, 22 nt, synthetic construct
  source 1..22: mol_type = other RNA
aatgcatcgtttcaatattaag

SEQ ID NO: 113682 - RNA, 22 nt, synthetic construct
  source 1..22: mol_type = other RNA
aatgcatgggaggtaatactat

SEQ ID NO: 113683 - RNA, 22 nt, synthetic construct
  source 1..22: mol_type = other RNA
aatgccaatttgggatatagct

SEQ ID NO: 113684 - RNA, 22 nt, synthetic construct
  source 1..22: mol_type = other RNA
aatgccacataaatcacaggaa

SEQ ID NO: 113685 - RNA, 22 nt, synthetic construct
  source 1..22: mol_type = other RNA
aatgccagggcgctcctctccc

SEQ ID NO: 113686 - RNA, 22 nt, synthetic construct
  source 1..22: mol_type = other RNA
aatgccatagagctttaaagtt

SEQ ID NO: 113687 - RNA, 22 nt, synthetic construct
  source 1..22: mol_type = other RNA
aatgcccaatcaaatccagtct

SEQ ID NO: 113688 - RNA, 22 nt, synthetic construct
  source 1..22: mol_type = other RNA
aatgcccatcctctatttttgt

SEQ ID NO: 113689 - RNA, 22 nt, synthetic construct
  source 1..22: mol_type = other RNA
aatgcccattaaaaccatgaaa

SEQ ID NO: 113690 - RNA, 22 nt, synthetic construct
  source 1..22: mol_type = other RNA
aatgccccatgtgttggcactg

SEQ ID NO: 113691 - RNA, 22 nt, synthetic construct
  source 1..22: mol_type = other RNA
aatgcccctgtagcagacactg

SEQ ID NO: 113692 - RNA, 22 nt, synthetic construct
  source 1..22: mol_type = other RNA
aatgcccctttgagcagagtcc

SEQ ID NO: 113693 - RNA, 22 nt, synthetic construct
  source 1..22: mol_type = other RNA
aatgcccttatttaatgtgctg

SEQ ID NO: 113694 - RNA, 22 nt, synthetic construct
  source 1..22: mol_type = other RNA
aatgcctataaaatgctggaaa

SEQ ID NO: 113695 - RNA, 22 nt, synthetic construct
  source 1..22: mol_type = other RNA
aatgcctcaaattagtcatagc

SEQ ID NO: 113696 - RNA, 22 nt, synthetic construct
  source 1..22: mol_type = other RNA
aatgcctgccgcagagcaagca

SEQ ID NO: 113697 - RNA, 22 nt, synthetic construct
  source 1..22: mol_type = other RNA
aatgcgaatcatctaggcatat

SEQ ID NO: 113698 - RNA, 22 nt, synthetic construct
  source 1..22: mol_type = other RNA
aatgcgatgatcaaaaccagga

SEQ ID NO: 113699 - RNA, 22 nt, synthetic construct
  source 1..22: mol_type = other RNA
aatgcgcgtccgcgacccggcc

SEQ ID NO: 113700 - RNA, 22 nt, synthetic construct
  source 1..22: mol_type = other RNA
aatgcgtgtgaaaccaagcaag

SEQ ID NO: 113701 - RNA, 22 nt, synthetic construct
  source 1..22: mol_type = other RNA
aatgcgtttgttagatctggga

SEQ ID NO: 113702 - RNA, 22 nt, synthetic construct
  source 1..22: mol_type = other RNA
aatgctataaagaacatgattg

SEQ ID NO: 113703 - RNA, 22 nt, synthetic construct
  source 1..22: mol_type = other RNA
aatgctatcattttaaagggat

SEQ ID NO: 113704 - RNA, 22 nt, synthetic construct
  source 1..22: mol_type = other RNA
aatgctatccagaagagaatgg

SEQ ID NO: 113705 - RNA, 22 nt, synthetic construct
  source 1..22: mol_type = other RNA
aatgctcacatttagtttcatc

SEQ ID NO: 113706 - RNA, 22 nt, synthetic construct
  source 1..22: mol_type = other RNA
aatgctcagtgggttcaattat

SEQ ID NO: 113707 - RNA, 22 nt, synthetic construct
  source 1..22: mol_type = other RNA
aatgctcataattaaagagagt

SEQ ID NO: 113708 - RNA, 22 nt, synthetic construct
  source 1..22: mol_type = other RNA
aatgctctcttcccccaaaact

SEQ ID NO: 113709 - RNA, 22 nt, synthetic construct
  source 1..22: mol_type = other RNA
aatgctgctatgaaaattggcg

SEQ ID NO: 113710 - RNA, 22 nt, synthetic construct
  source 1..22: mol_type = other RNA
aatgctggaaattttcaagggt

SEQ ID NO: 113711 - RNA, 22 nt, synthetic construct
  source 1..22: mol_type = other RNA
aatgctggccagtgagttcaaa

SEQ ID NO: 113712 - RNA, 22 nt, synthetic construct
  source 1..22: mol_type = other RNA
aatgctggcttcatgggtggaa

SEQ ID NO: 113713 - RNA, 22 nt, synthetic construct
  source 1..22: mol_type = other RNA
aatgctgtaactgacttcaaga

SEQ ID NO: 113714 - RNA, 22 nt, synthetic construct
  source 1..22: mol_type = other RNA
aatgctgttctctgtgtggttt

SEQ ID NO: 113715 - RNA, 22 nt, synthetic construct
  source 1..22: mol_type = other RNA
aatgcttaacaagaatcctgct

SEQ ID NO: 113716 - RNA, 22 nt, synthetic construct
  source 1..22: mol_type = other RNA
aatgcttatgtcttgtggctga

SEQ ID NO: 113717 - RNA, 22 nt, synthetic construct
  source 1..22: mol_type = other RNA
aatgcttcatattttgtgggaa

SEQ ID NO: 113718 - RNA, 22 nt, synthetic construct
  source 1..22: mol_type = other RNA
aatgcttgaagagcgcttctat

SEQ ID NO: 113719 - RNA, 22 nt, synthetic construct
  source 1..22: mol_type = other RNA
aatgctttttctgcatcttttg

SEQ ID NO: 113720 - RNA, 22 nt, synthetic construct
  source 1..22: mol_type = other RNA
aatggaaaattcaaacatgaca

SEQ ID NO: 113721 - RNA, 22 nt, synthetic construct
  source 1..22: mol_type = other RNA
aatggaaaattcttggtctttt

SEQ ID NO: 113722 - RNA, 22 nt, synthetic construct
  source 1..22: mol_type = other RNA
aatggaaacttgccatcttgca

SEQ ID NO: 113723 - RNA, 22 nt, synthetic construct
  source 1..22: mol_type = other RNA
aatggaaagaaatagaactgtc

SEQ ID NO: 113724 - RNA, 22 nt, synthetic construct
  source 1..22: mol_type = other RNA
aatggaaatgtaaattcctaac

SEQ ID NO: 113725 - RNA, 22 nt, synthetic construct
  source 1..22: mol_type = other RNA
aatggaaccactgtaggccccg

SEQ ID NO: 113726 - RNA, 22 nt, synthetic construct
  source 1..22: mol_type = other RNA
aatggaagactttatggtaatt

SEQ ID NO: 113727 - RNA, 22 nt, synthetic construct
  source 1..22: mol_type = other RNA
aatggaagtgctgggctaggga

SEQ ID NO: 113728 - RNA, 22 nt, synthetic construct
  source 1..22: mol_type = other RNA
aatggaatagaagggagaaccc

SEQ ID NO: 113729 - RNA, 22 nt, synthetic construct
  source 1..22: mol_type = other RNA
aatggaatattactcagtctcg

SEQ ID NO: 113730 - RNA, 22 nt, synthetic construct
  source 1..22: mol_type = other RNA
aatggaattctgatgcacaagc

SEQ ID NO: 113731 - RNA, 22 nt, synthetic construct
  source 1..22: mol_type = other RNA
aatggacagcacattaaataag

SEQ ID NO: 113732 - RNA, 22 nt, synthetic construct
  source 1..22: mol_type = other RNA
aatggacagcggggatggttgc

SEQ ID NO: 113733 - RNA, 22 nt, synthetic construct
  source 1..22: mol_type = other RNA
aatggagacatctgagacatca

SEQ ID NO: 113734 - RNA, 22 nt, synthetic construct
  source 1..22: mol_type = other RNA
aatggagacccatactcagccc

SEQ ID NO: 113735 - RNA, 22 nt, synthetic construct
  source 1..22: mol_type = other RNA
aatggagggccagaggagggat

SEQ ID NO: 113736 - RNA, 22 nt, synthetic construct
  source 1..22: mol_type = other RNA
aatggagtactatgcagcaacg

SEQ ID NO: 113737 - RNA, 22 nt, synthetic construct
  source 1..22: mol_type = other RNA
aatggagtgacttaagcaacag

SEQ ID NO: 113738 - RNA, 22 nt, synthetic construct
  source 1..22: mol_type = other RNA
aatggatcaaagacctaagctt

SEQ ID NO: 113739 - RNA, 22 nt, synthetic construct
  source 1..22: mol_type = other RNA
aatggatcaaggcacagtctgt

SEQ ID NO: 113740 - RNA, 22 nt, synthetic construct
  source 1..22: mol_type = other RNA
aatggatgtttttagagagatg

SEQ ID NO: 113741 - RNA, 22 nt, synthetic construct
  source 1..22: mol_type = other RNA
aatggcaaggctaacagccaaa

SEQ ID NO: 113742 - RNA, 22 nt, synthetic construct
  source 1..22: mol_type = other RNA
aatggcacatactgcatattga

SEQ ID NO: 113743 - RNA, 22 nt, synthetic construct
  source 1..22: mol_type = other RNA
aatggcatgaacccaccaggag

SEQ ID NO: 113744 - RNA, 22 nt, synthetic construct
  source 1..22: mol_type = other RNA
aatggccaagagttgctgactt

SEQ ID NO: 113745 - RNA, 22 nt, synthetic construct
  source 1..22: mol_type = other RNA
aatggccctgcgattggttgga

SEQ ID NO: 113746 - RNA, 22 nt, synthetic construct
  source 1..22: mol_type = other RNA
aatggcccttaacttcacctct

SEQ ID NO: 113747 - RNA, 22 nt, synthetic construct
  source 1..22: mol_type = other RNA
aatggccttctttctttcaaat

SEQ ID NO: 113748 - RNA, 22 nt, synthetic construct
  source 1..22: mol_type = other RNA
aatggcggctttgtggagtgga

SEQ ID NO: 113749 - RNA, 22 nt, synthetic construct
  source 1..22: mol_type = other RNA
aatggctggaatggtgaagaat

SEQ ID NO: 113750 - RNA, 22 nt, synthetic construct
  source 1..22: mol_type = other RNA
aatggctttttacgatgaaatt

SEQ ID NO: 113751 - RNA, 22 nt, synthetic construct
  source 1..22: mol_type = other RNA
aatgggaaagacaggtagacat

SEQ ID NO: 113752 - RNA, 22 nt, synthetic construct
  source 1..22: mol_type = other RNA
aatgggaaattagatgatgttt

SEQ ID NO: 113753 - RNA, 22 nt, synthetic construct
  source 1..22: mol_type = other RNA
aatgggagcatgcacacaggag

SEQ ID NO: 113754 - RNA, 22 nt, synthetic construct
  source 1..22: mol_type = other RNA
aatgggcacttgggatgtttct

SEQ ID NO: 113755 - RNA, 22 nt, synthetic construct
  source 1..22: mol_type = other RNA
aatgggcattagaagttaaatt

SEQ ID NO: 113756 - RNA, 22 nt, synthetic construct
  source 1..22: mol_type = other RNA
aatgggccaaagacttcaacgg

SEQ ID NO: 113757 - RNA, 22 nt, synthetic construct
  source 1..22: mol_type = other RNA
aatgggcgtggagcggtgtctt

SEQ ID NO: 113758 - RNA, 22 nt, synthetic construct
  source 1..22: mol_type = other RNA
aatggggaaatagatgcctaga

SEQ ID NO: 113759 - RNA, 22 nt, synthetic construct
  source 1..22: mol_type = other RNA
aatggggagctagagggtaaga

SEQ ID NO: 113760 - RNA, 22 nt, synthetic construct
  source 1..22: mol_type = other RNA
aatggggatatccaaagataaa

SEQ ID NO: 113761 - RNA, 22 nt, synthetic construct
  source 1..22: mol_type = other RNA
aatggggatgcaacaaatgttg

SEQ ID NO: 113762 - RNA, 22 nt, synthetic construct
  source 1..22: mol_type = other RNA
aatggggcaatctcagctcatt

SEQ ID NO: 113763 - RNA, 22 nt, synthetic construct
  source 1..22: mol_type = other RNA
aatggggcgatcttggctcacc

SEQ ID NO: 113764 - RNA, 22 nt, synthetic construct
  source 1..22: mol_type = other RNA
aatggggctttactgtattagg

SEQ ID NO: 113765 - RNA, 22 nt, synthetic construct
  source 1..22: mol_type = other RNA
aatggggtaattttggggccat

SEQ ID NO: 113766 - RNA, 22 nt, synthetic construct
  source 1..22: mol_type = other RNA
aatgggtaaatttctaaaaacg

SEQ ID NO: 113767 - RNA, 22 nt, synthetic construct
  source 1..22: mol_type = other RNA
aatgggtacagggtttctgttt

SEQ ID NO: 113768 - RNA, 22 nt, synthetic construct
  source 1..22: mol_type = other RNA
aatgggttggaggagaaggcct

SEQ ID NO: 113769 - RNA, 22 nt, synthetic construct
  source 1..22: mol_type = other RNA
aatgggtttaaaagagtgcaca

SEQ ID NO: 113770 - RNA, 22 nt, synthetic construct
  source 1..22: mol_type = other RNA
aatggtaacagccaaataaaac

SEQ ID NO: 113771 - RNA, 22 nt, synthetic construct
  source 1..22: mol_type = other RNA
aatggtactgcctccacaggct

SEQ ID NO: 113772 - RNA, 22 nt, synthetic construct
  source 1..22: mol_type = other RNA
aatggtagcttgggctaaggtg

SEQ ID NO: 113773 - RNA, 22 nt, synthetic construct
  source 1..22: mol_type = other RNA
aatggtcaacatgaaaagatac

SEQ ID NO: 113774 - RNA, 22 nt, synthetic construct
  source 1..22: mol_type = other RNA
aatggtcaatttcatcgtaaaa

SEQ ID NO: 113775 - RNA, 22 nt, synthetic construct
  source 1..22: mol_type = other RNA
aatggtcagagttgtatctgtg

SEQ ID NO: 113776 - RNA, 22 nt, synthetic construct
  source 1..22: mol_type = other RNA
aatggtccttgctgaagaataa

SEQ ID NO: 113777 - RNA, 22 nt, synthetic construct
  source 1..22: mol_type = other RNA
aatggtgaagaatgtgaaaaat

SEQ ID NO: 113778 - RNA, 22 nt, synthetic construct
  source 1..22: mol_type = other RNA
aatggtgcagccactatagaaa

SEQ ID NO: 113779 - RNA, 22 nt, synthetic construct
  source 1..22: mol_type = other RNA
aatggtgcaggccagatatcca

SEQ ID NO: 113780 - RNA, 22 nt, synthetic construct
  source 1..22: mol_type = other RNA
aatggtgggatctctgggctca

SEQ ID NO: 113781 - RNA, 22 nt, synthetic construct
  source 1..22: mol_type = other RNA
aatggtgtgaagttgggcttaa

SEQ ID NO: 113782 - RNA, 22 nt, synthetic construct
  source 1..22: mol_type = other RNA
aatggtgtgatctctgctcacc

SEQ ID NO: 113783 - RNA, 22 nt, synthetic construct
  source 1..22: mol_type = other RNA
aatggttaagactgctgtttac

SEQ ID NO: 113784 - RNA, 22 nt, synthetic construct
  source 1..22: mol_type = other RNA
aatggttagactgcacataaaa

SEQ ID NO: 113785 - RNA, 22 nt, synthetic construct
  source 1..22: mol_type = other RNA
aatggttggccgaggccagtcc

SEQ ID NO: 113786 - RNA, 22 nt, synthetic construct
  source 1..22: mol_type = other RNA
aatggtttaacacatacaaacc

SEQ ID NO: 113787 - RNA, 22 nt, synthetic construct
  source 1..22: mol_type = other RNA
aatggtttaggctgtctccaac

SEQ ID NO: 113788 - RNA, 22 nt, synthetic construct
  source 1..22: mol_type = other RNA
aatggtttcataaaatgatggc

SEQ ID NO: 113789 - RNA, 22 nt, synthetic construct
  source 1..22: mol_type = other RNA
aatggtttctccttctgcaggc

SEQ ID NO: 113790 - RNA, 22 nt, synthetic construct
  source 1..22: mol_type = other RNA
aatggttttatggtaactcctg

SEQ ID NO: 113791 - RNA, 22 nt, synthetic construct
  source 1..22: mol_type = other RNA
aatgtaaaaatatagaaggcca

SEQ ID NO: 113792 - RNA, 22 nt, synthetic construct
  source 1..22: mol_type = other RNA
aatgtaaaacatcaaagtcccc

SEQ ID NO: 113793 - RNA, 22 nt, synthetic construct
  source 1..22: mol_type = other RNA
aatgtaaacagcatactgtgga

SEQ ID NO: 113794 - RNA, 22 nt, synthetic construct
  source 1..22: mol_type = other RNA
aatgtaaattcctaactcaaga

SEQ ID NO: 113795 - RNA, 22 nt, synthetic construct
  source 1..22: mol_type = other RNA
aatgtaaattctgccacattca

SEQ ID NO: 113796 - RNA, 22 nt, synthetic construct
  source 1..22: mol_type = other RNA
aatgtaacacagttctagttct

SEQ ID NO: 113797 - RNA, 22 nt, synthetic construct
  source 1..22: mol_type = other RNA
aatgtaaggtgcacgctgtgaa

SEQ ID NO: 113798 - RNA, 22 nt, synthetic construct
  source 1..22: mol_type = other RNA
aatgtacaacattcatccctct

SEQ ID NO: 113799 - RNA, 22 nt, synthetic construct
  source 1..22: mol_type = other RNA
aatgtagatcaagtatttccta

SEQ ID NO: 113800 - RNA, 22 nt, synthetic construct
  source 1..22: mol_type = other RNA
aatgtagatcctgaggaagcta

SEQ ID NO: 113801 - RNA, 22 nt, synthetic construct
  source 1..22: mol_type = other RNA
aatgtagggaatagacaaagac

SEQ ID NO: 113802 - RNA, 22 nt, synthetic construct
  source 1..22: mol_type = other RNA
aatgtaggtgtctgatgtgtgt

SEQ ID NO: 113803 - RNA, 22 nt, synthetic construct
  source 1..22: mol_type = other RNA
aatgtatgattttctaggaaac

SEQ ID NO: 113804 - RNA, 22 nt, synthetic construct
  source 1..22: mol_type = other RNA
aatgtcaagctgtttgagctga

SEQ ID NO: 113805 - RNA, 22 nt, synthetic construct
  source 1..22: mol_type = other RNA
aatgtcaattttcccccaatta

SEQ ID NO: 113806 - RNA, 22 nt, synthetic construct
  source 1..22: mol_type = other RNA
aatgtcacattttcttatctag

SEQ ID NO: 113807 - RNA, 22 nt, synthetic construct
  source 1..22: mol_type = other RNA
aatgtcagagatctgaaattga

SEQ ID NO: 113808 - RNA, 22 nt, synthetic construct
  source 1..22: mol_type = other RNA
aatgtcatcttctctctctgct

SEQ ID NO: 113809 - RNA, 22 nt, synthetic construct
  source 1..22: mol_type = other RNA
aatgtccagaggaggaagagat

SEQ ID NO: 113810 - RNA, 22 nt, synthetic construct
  source 1..22: mol_type = other RNA
aatgtccatcaggaaaaccagt

SEQ ID NO: 113811 - RNA, 22 nt, synthetic construct
  source 1..22: mol_type = other RNA
aatgtccatcgagagatgaatg

SEQ ID NO: 113812 - RNA, 22 nt, synthetic construct
  source 1..22: mol_type = other RNA
aatgtccgttgaagtctttggc

SEQ ID NO: 113813 - RNA, 22 nt, synthetic construct
  source 1..22: mol_type = other RNA
aatgtccttttcctgttccggg

SEQ ID NO: 113814 - RNA, 22 nt, synthetic construct
  source 1..22: mol_type = other RNA
aatgtctcattgtggatgagat

SEQ ID NO: 113815 - RNA, 22 nt, synthetic construct
  source 1..22: mol_type = other RNA
aatgtctcctctttcatatctg

SEQ ID NO: 113816 - RNA, 22 nt, synthetic construct
  source 1..22: mol_type = other RNA
aatgtctggccgggcacggtgg

SEQ ID NO: 113817 - RNA, 22 nt, synthetic construct
  source 1..22: mol_type = other RNA
aatgtctggtttgctttggagt

SEQ ID NO: 113818 - RNA, 22 nt, synthetic construct
  source 1..22: mol_type = other RNA
aatgtctgtctttatgccaata

SEQ ID NO: 113819 - RNA, 22 nt, synthetic construct
  source 1..22: mol_type = other RNA
aatgtcttaagaaggaaaagaa

SEQ ID NO: 113820 - RNA, 22 nt, synthetic construct
  source 1..22: mol_type = other RNA
aatgtctttggctcttagaaaa

SEQ ID NO: 113821 - RNA, 22 nt, synthetic construct
  source 1..22: mol_type = other RNA
aatgtctttttacacttggagt

SEQ ID NO: 113822 - RNA, 22 nt, synthetic construct
  source 1..22: mol_type = other RNA
aatgtgaaaaatttgacatgac

SEQ ID NO: 113823 - RNA, 22 nt, synthetic construct
  source 1..22: mol_type = other RNA
aatgtgaacagacagacatgca

SEQ ID NO: 113824 - RNA, 22 nt, synthetic construct
  source 1..22: mol_type = other RNA
aatgtgaattagatggcttagg

SEQ ID NO: 113825 - RNA, 22 nt, synthetic construct
  source 1..22: mol_type = other RNA
aatgtgacagaacaaactcaag

SEQ ID NO: 113826 - RNA, 22 nt, synthetic construct
  source 1..22: mol_type = other RNA
aatgtgacattagtggtggtag

SEQ ID NO: 113827 - RNA, 22 nt, synthetic construct
  source 1..22: mol_type = other RNA
aatgtgacctgtccttgtgttt

SEQ ID NO: 113828 - RNA, 22 nt, synthetic construct
  source 1..22: mol_type = other RNA
aatgtgactagaagaaatgtta

SEQ ID NO: 113829 - RNA, 22 nt, synthetic construct
  source 1..22: mol_type = other RNA
aatgtgacttcgtcaaggggag

SEQ ID NO: 113830 - RNA, 22 nt, synthetic construct
  source 1..22: mol_type = other RNA
aatgtgagcatttagccccctg

SEQ ID NO: 113831 - RNA, 22 nt, synthetic construct
  source 1..22: mol_type = other RNA
aatgtgagccacatacatagta

SEQ ID NO: 113832 - RNA, 22 nt, synthetic construct
  source 1..22: mol_type = other RNA
aatgtgaggtgaggacatggag

SEQ ID NO: 113833 - RNA, 22 nt, synthetic construct
  source 1..22: mol_type = other RNA
aatgtgatatgccacatttttt

SEQ ID NO: 113834 - RNA, 22 nt, synthetic construct
  source 1..22: mol_type = other RNA
aatgtgatggcatcattcataa

SEQ ID NO: 113835 - RNA, 22 nt, synthetic construct
  source 1..22: mol_type = other RNA
aatgtgcaaggagagaaaaaca

SEQ ID NO: 113836 - RNA, 22 nt, synthetic construct
  source 1..22: mol_type = other RNA
aatgtgcacctccagtgtcctg

SEQ ID NO: 113837 - RNA, 22 nt, synthetic construct
  source 1..22: mol_type = other RNA
aatgtgcactcttttaaaccca

SEQ ID NO: 113838 - RNA, 22 nt, synthetic construct
  source 1..22: mol_type = other RNA
aatgtgcctacatagtccactt

SEQ ID NO: 113839 - RNA, 22 nt, synthetic construct
  source 1..22: mol_type = other RNA
aatgtgctgtccatttccttaa

SEQ ID NO: 113840 - RNA, 22 nt, synthetic construct
  source 1..22: mol_type = other RNA
aatgtgcttcctaaacctgcta

SEQ ID NO: 113841 - RNA, 22 nt, synthetic construct
  source 1..22: mol_type = other RNA
aatgtggaagcagaactaagac

SEQ ID NO: 113842 - RNA, 22 nt, synthetic construct
  source 1..22: mol_type = other RNA
aatgtggagataaagagcaggt

SEQ ID NO: 113843 - RNA, 22 nt, synthetic construct
  source 1..22: mol_type = other RNA
aatgtggagttggtgcaaggat

SEQ ID NO: 113844 - RNA, 22 nt, synthetic construct
  source 1..22: mol_type = other RNA
aatgtggatagtgctttttact

SEQ ID NO: 113845 - RNA, 22 nt, synthetic construct
  source 1..22: mol_type = other RNA
aatgtggatgcatgaggcatat

SEQ ID NO: 113846 - RNA, 22 nt, synthetic construct
  source 1..22: mol_type = other RNA
aatgtggcaaatttatgtgaaa

SEQ ID NO: 113847 - RNA, 22 nt, synthetic construct
  source 1..22: mol_type = other RNA
aatgtggcagaatttacatttt

SEQ ID NO: 113848 - RNA, 22 nt, synthetic construct
  source 1..22: mol_type = other RNA
aatgtggcatttcttacacatt

SEQ ID NO: 113849 - RNA, 22 nt, synthetic construct
  source 1..22: mol_type = other RNA
aatgtggcttgcaaggcccacc

SEQ ID NO: 113850 - RNA, 22 nt, synthetic construct
  source 1..22: mol_type = other RNA
aatgtggtcacactttttgtga

SEQ ID NO: 113851 - RNA, 22 nt, synthetic construct
  source 1..22: mol_type = other RNA
aatgtggtggtatgcactgtac

SEQ ID NO: 113852 - RNA, 22 nt, synthetic construct
  source 1..22: mol_type = other RNA
aatgtggtttttggttcacttg

SEQ ID NO: 113853 - RNA, 22 nt, synthetic construct
  source 1..22: mol_type = other RNA
aatgtgtaagaaatgccacatt

SEQ ID NO: 113854 - RNA, 22 nt, synthetic construct
  source 1..22: mol_type = other RNA
aatgtgtagttctggtgtcgtt

SEQ ID NO: 113855 - RNA, 22 nt, synthetic construct
  source 1..22: mol_type = other RNA
aatgtgtctagtgaatgagacc

SEQ ID NO: 113856 - RNA, 22 nt, synthetic construct
  source 1..22: mol_type = other RNA
aatgtgtgaagaaggaatgtgc

SEQ ID NO: 113857 - RNA, 22 nt, synthetic construct
  source 1..22: mol_type = other RNA
aatgtgtgttccagacaaaaat

SEQ ID NO: 113858 - RNA, 22 nt, synthetic construct
  source 1..22: mol_type = other RNA
aatgtgttgtctgattcagttt

SEQ ID NO: 113859 - RNA, 22 nt, synthetic construct
  source 1..22: mol_type = other RNA
aatgttaacaattggtgaatct

SEQ ID NO: 113860 - RNA, 22 nt, synthetic construct
  source 1..22: mol_type = other RNA
aatgttaagcccaacttcacac

SEQ ID NO: 113861 - RNA, 22 nt, synthetic construct
  source 1..22: mol_type = other RNA
aatgttacttctcagctatagc

SEQ ID NO: 113862 - RNA, 22 nt, synthetic construct
  source 1..22: mol_type = other RNA
aatgttagaattcaggacagtt

SEQ ID NO: 113863 - RNA, 22 nt, synthetic construct
  source 1..22: mol_type = other RNA
aatgttatatttccgtatccag

SEQ ID NO: 113864 - RNA, 22 nt, synthetic construct
  source 1..22: mol_type = other RNA
aatgttatgaagcttttctcct

SEQ ID NO: 113865 - RNA, 22 nt, synthetic construct
  source 1..22: mol_type = other RNA
aatgttcaagtatttccacggg

SEQ ID NO: 113866 - RNA, 22 nt, synthetic construct
  source 1..22: mol_type = other RNA
aatgttcagatagaaaagacaa

SEQ ID NO: 113867 - RNA, 22 nt, synthetic construct
  source 1..22: mol_type = other RNA
aatgttcagtttatgggtcaac

SEQ ID NO: 113868 - RNA, 22 nt, synthetic construct
  source 1..22: mol_type = other RNA
aatgttccctcttcaatatttt

SEQ ID NO: 113869 - RNA, 22 nt, synthetic construct
  source 1..22: mol_type = other RNA
aatgttctcttttcctcgtttt

SEQ ID NO: 113870 - RNA, 22 nt, synthetic construct
  source 1..22: mol_type = other RNA
aatgttgacatcttgcataact

SEQ ID NO: 113871 - RNA, 22 nt, synthetic construct
  source 1..22: mol_type = other RNA
aatgttgattttgaggcagaga

SEQ ID NO: 113872 - RNA, 22 nt, synthetic construct
  source 1..22: mol_type = other RNA
aatgttgcagagactggatagc

SEQ ID NO: 113873 - RNA, 22 nt, synthetic construct
  source 1..22: mol_type = other RNA
aatgttgccaatatctatcagg

SEQ ID NO: 113874 - RNA, 22 nt, synthetic construct
  source 1..22: mol_type = other RNA
aatgttggttagtgttgttttt

SEQ ID NO: 113875 - RNA, 22 nt, synthetic construct
  source 1..22: mol_type = other RNA
aatgttgtggatgtccttaatg

SEQ ID NO: 113876 - RNA, 22 nt, synthetic construct
  source 1..22: mol_type = other RNA
aatgtttaattacccaggcatg

SEQ ID NO: 113877 - RNA, 22 nt, synthetic construct
  source 1..22: mol_type = other RNA
aatgtttagcggaatgactata

SEQ ID NO: 113878 - RNA, 22 nt, synthetic construct
  source 1..22: mol_type = other RNA
aatgtttagtagaattctccag

SEQ ID NO: 113879 - RNA, 22 nt, synthetic construct
  source 1..22: mol_type = other RNA
aatgtttgctaataatgatgac

SEQ ID NO: 113880 - RNA, 22 nt, synthetic construct
  source 1..22: mol_type = other RNA
aatgtttggtagatttctgcat

SEQ ID NO: 113881 - RNA, 22 nt, synthetic construct
  source 1..22: mol_type = other RNA
aatgtttgtacttctaccttga

SEQ ID NO: 113882 - RNA, 22 nt, synthetic construct
  source 1..22: mol_type = other RNA
aatgtttgtttaattagccggg

SEQ ID NO: 113883 - RNA, 22 nt, synthetic construct
  source 1..22: mol_type = other RNA
aatgttttaaggcagggcttgg

SEQ ID NO: 113884 - RNA, 22 nt, synthetic construct
  source 1..22: mol_type = other RNA
aatgttttatttagcccatgtc

SEQ ID NO: 113885 - RNA, 22 nt, synthetic construct
  source 1..22: mol_type = other RNA
aatgttttccgtgtgacaaaaa

SEQ ID NO: 113886 - RNA, 22 nt, synthetic construct
  source 1..22: mol_type = other RNA
aatgttttgcagagatgaggtc

SEQ ID NO: 113887 - RNA, 22 nt, synthetic construct
  source 1..22: mol_type = other RNA
aatgtttttccgtctagccact

SEQ ID NO: 113888 - RNA, 22 nt, synthetic construct
  source 1..22: mol_type = other RNA
aattaaaaactgagaccggatg

SEQ ID NO: 113889 - RNA, 22 nt, synthetic construct
  source 1..22: mol_type = other RNA
aattaaacaatcttgaaagggg

SEQ ID NO: 113890 - RNA, 22 nt, synthetic construct
  source 1..22: mol_type = other RNA
aattaaacacacccttggtaaa

SEQ ID NO: 113891 - RNA, 22 nt, synthetic construct
  source 1..22: mol_type = other RNA
aattaaactatagacccaaagc

SEQ ID NO: 113892 - RNA, 22 nt, synthetic construct
  source 1..22: mol_type = other RNA
aattaaactcattatcccagac

SEQ ID NO: 113893 - RNA, 22 nt, synthetic construct
  source 1..22: mol_type = other RNA
aattaaaggatgtcaactgagg

SEQ ID NO: 113894 - RNA, 22 nt, synthetic construct
  source 1..22: mol_type = other RNA
aattaacactaatccttctcat

SEQ ID NO: 113895 - RNA, 22 nt, synthetic construct
  source 1..22: mol_type = other RNA
aattaactccaggggacatgct

SEQ ID NO: 113896 - RNA, 22 nt, synthetic construct
  source 1..22: mol_type = other RNA
aattaactttaaagctctatgg

SEQ ID NO: 113897 - RNA, 22 nt, synthetic construct
  source 1..22: mol_type = other RNA
aattaagacaatgtggagttgg

SEQ ID NO: 113898 - RNA, 22 nt, synthetic construct
  source 1..22: mol_type = other RNA
aattaagagaatggaaacttgc

SEQ ID NO: 113899 - RNA, 22 nt, synthetic construct
  source 1..22: mol_type = other RNA
aattaagcaaccttttaggtgc

SEQ ID NO: 113900 - RNA, 22 nt, synthetic construct
  source 1..22: mol_type = other RNA
aattaagcaccactagagtatt

SEQ ID NO: 113901 - RNA, 22 nt, synthetic construct
  source 1..22: mol_type = other RNA
aattaagcttcgacagtccctt

SEQ ID NO: 113902 - RNA, 22 nt, synthetic construct
  source 1..22: mol_type = other RNA
aattaatcagtctgtaagcacc

SEQ ID NO: 113903 - RNA, 22 nt, synthetic construct
  source 1..22: mol_type = other RNA
aattaatctcttacacctgttt

SEQ ID NO: 113904 - RNA, 22 nt, synthetic construct
  source 1..22: mol_type = other RNA
aattaatgcccaatcaaatcca

SEQ ID NO: 113905 - RNA, 22 nt, synthetic construct
  source 1..22: mol_type = other RNA
aattaatgccccatgtgttggc

SEQ ID NO: 113906 - RNA, 22 nt, synthetic construct
  source 1..22: mol_type = other RNA
aattacaaaataggcagtcctc

SEQ ID NO: 113907 - RNA, 22 nt, synthetic construct
  source 1..22: mol_type = other RNA
aattacaaatgaaagtcagcta

SEQ ID NO: 113908 - RNA, 22 nt, synthetic construct
  source 1..22: mol_type = other RNA
aattacaactggtttctgcata

SEQ ID NO: 113909 - RNA, 22 nt, synthetic construct
  source 1..22: mol_type = other RNA
aattacaataatgcacatgggc

SEQ ID NO: 113910 - RNA, 22 nt, synthetic construct
  source 1..22: mol_type = other RNA
aattacacatctcccataccac

SEQ ID NO: 113911 - RNA, 22 nt, synthetic construct
  source 1..22: mol_type = other RNA
aattacaggcatgagtcgccat

SEQ ID NO: 113912 - RNA, 22 nt, synthetic construct
  source 1..22: mol_type = other RNA
aattacaggggactttgatgtt

SEQ ID NO: 113913 - RNA, 22 nt, synthetic construct
  source 1..22: mol_type = other RNA
aattacaggtcaaactcactta

SEQ ID NO: 113914 - RNA, 22 nt, synthetic construct
  source 1..22: mol_type = other RNA
aattacatacttcaaagggtca

SEQ ID NO: 113915 - RNA, 22 nt, synthetic construct
  source 1..22: mol_type = other RNA
aattaccataaagtcttccatt

SEQ ID NO: 113916 - RNA, 22 nt, synthetic construct
  source 1..22: mol_type = other RNA
aattacccaaagactttgtttt

SEQ ID NO: 113917 - RNA, 22 nt, synthetic construct
  source 1..22: mol_type = other RNA
aattacccaggcatgatggctc

SEQ ID NO: 113918 - RNA, 22 nt, synthetic construct
  source 1..22: mol_type = other RNA
aattaccccattcactcagcat

SEQ ID NO: 113919 - RNA, 22 nt, synthetic construct
  source 1..22: mol_type = other RNA
aattactgacaatagccaagac

SEQ ID NO: 113920 - RNA, 22 nt, synthetic construct
  source 1..22: mol_type = other RNA
aattactgtacaaagatttacc

SEQ ID NO: 113921 - RNA, 22 nt, synthetic construct
  source 1..22: mol_type = other RNA
aattacttcatagatgttatgc

SEQ ID NO: 113922 - RNA, 22 nt, synthetic construct
  source 1..22: mol_type = other RNA
aattacttccagtgttttaggg

SEQ ID NO: 113923 - RNA, 22 nt, synthetic construct
  source 1..22: mol_type = other RNA
aattacttctttctctttcagc

SEQ ID NO: 113924 - RNA, 22 nt, synthetic construct
  source 1..22: mol_type = other RNA
aattacttgagagcagagacac

SEQ ID NO: 113925 - RNA, 22 nt, synthetic construct
  source 1..22: mol_type = other RNA
aattagaaactggtgaactggg

SEQ ID NO: 113926 - RNA, 22 nt, synthetic construct
  source 1..22: mol_type = other RNA
aattagaaagctggactcattc

SEQ ID NO: 113927 - RNA, 22 nt, synthetic construct
  source 1..22: mol_type = other RNA
aattagaaatgtggaagcagaa

SEQ ID NO: 113928 - RNA, 22 nt, synthetic construct
  source 1..22: mol_type = other RNA
aattagaacatctggcagcagg

SEQ ID NO: 113929 - RNA, 22 nt, synthetic construct
  source 1..22: mol_type = other RNA
aattagatgatgttttgaacga

SEQ ID NO: 113930 - RNA, 22 nt, synthetic construct
  source 1..22: mol_type = other RNA
aattagatggcttaggatcacc

SEQ ID NO: 113931 - RNA, 22 nt, synthetic construct
  source 1..22: mol_type = other RNA
aattagcaatgcgaatcatcta

SEQ ID NO: 113932 - RNA, 22 nt, synthetic construct
  source 1..22: mol_type = other RNA
aattagcacctttattaactag

SEQ ID NO: 113933 - RNA, 22 nt, synthetic construct
  source 1..22: mol_type = other RNA
aattagccaagcatggtggtag

SEQ ID NO: 113934 - RNA, 22 nt, synthetic construct
  source 1..22: mol_type = other RNA
aattagccaggcgtggtggcgg

SEQ ID NO: 113935 - RNA, 22 nt, synthetic construct
  source 1..22: mol_type = other RNA
aattagccgggtgtagtggtgt

SEQ ID NO: 113936 - RNA, 22 nt, synthetic construct
  source 1..22: mol_type = other RNA
aattagccttttacaccctagg

SEQ ID NO: 113937 - RNA, 22 nt, synthetic construct
  source 1..22: mol_type = other RNA
aattagctaagtatgcagaaac

SEQ ID NO: 113938 - RNA, 22 nt, synthetic construct
  source 1..22: mol_type = other RNA
aattagctgactttcatttgta

SEQ ID NO: 113939 - RNA, 22 nt, synthetic construct
  source 1..22: mol_type = other RNA
aattagctggatgtggtgtggc

SEQ ID NO: 113940 - RNA, 22 nt, synthetic construct
  source 1..22: mol_type = other RNA
aattagctgggcgagatggcgt

SEQ ID NO: 113941 - RNA, 22 nt, synthetic construct
  source 1..22: mol_type = other RNA
aattagctttctcccagctgtc

SEQ ID NO: 113942 - RNA, 22 nt, synthetic construct
  source 1..22: mol_type = other RNA
aattaggctgtttgagatcttt

SEQ ID NO: 113943 - RNA, 22 nt, synthetic construct
  source 1..22: mol_type = other RNA
aattagtcatagcagtgggaag

SEQ ID NO: 113944 - RNA, 22 nt, synthetic construct
  source 1..22: mol_type = other RNA
aattagtgattttaccaaggct

SEQ ID NO: 113945 - RNA, 22 nt, synthetic construct
  source 1..22: mol_type = other RNA
aattagttacatgaggtcaccc

SEQ ID NO: 113946 - RNA, 22 nt, synthetic construct
  source 1..22: mol_type = other RNA
aattagttcctccttttgtaga

SEQ ID NO: 113947 - RNA, 22 nt, synthetic construct
  source 1..22: mol_type = other RNA
aattagttccttttaagggaaa

SEQ ID NO: 113948 - RNA, 22 nt, synthetic construct
  source 1..22: mol_type = other RNA
aattataagcttcctctggctg

SEQ ID NO: 113949 - RNA, 22 nt, synthetic construct
  source 1..22: mol_type = other RNA
aattatagagggcctaaataaa

SEQ ID NO: 113950 - RNA, 22 nt, synthetic construct
  source 1..22: mol_type = other RNA
aattatagctccaaaagcgaaa

SEQ ID NO: 113951 - RNA, 22 nt, synthetic construct
  source 1..22: mol_type = other RNA
aattatctgtgggttaaaagtt

SEQ ID NO: 113952 - RNA, 22 nt, synthetic construct
  source 1..22: mol_type = other RNA
aattatgactgagatacttaag

SEQ ID NO: 113953 - RNA, 22 nt, synthetic construct
  source 1..22: mol_type = other RNA
aattatgagcattccccacata

SEQ ID NO: 113954 - RNA, 22 nt, synthetic construct
  source 1..22: mol_type = other RNA
aattatgctaacatgaactact

SEQ ID NO: 113955 - RNA, 22 nt, synthetic construct
  source 1..22: mol_type = other RNA
aattatgctgagtgaatggggt

SEQ ID NO: 113956 - RNA, 22 nt, synthetic construct
  source 1..22: mol_type = other RNA
aattattagcttgctagtagca

SEQ ID NO: 113957 - RNA, 22 nt, synthetic construct
  source 1..22: mol_type = other RNA
aattattagttgtacttgacac

SEQ ID NO: 113958 - RNA, 22 nt, synthetic construct
  source 1..22: mol_type = other RNA
aattattgacaagacgtgtaca

SEQ ID NO: 113959 - RNA, 22 nt, synthetic construct
  source 1..22: mol_type = other RNA
aattattgtctgcaagcagatc

SEQ ID NO: 113960 - RNA, 22 nt, synthetic construct
  source 1..22: mol_type = other RNA
aattatttgagagtaagttgca

SEQ ID NO: 113961 - RNA, 22 nt, synthetic construct
  source 1..22: mol_type = other RNA
aattatttgtgcatactgtgat

SEQ ID NO: 113962 - RNA, 22 nt, synthetic construct
  source 1..22: mol_type = other RNA
aattattttcctccttctgctc

SEQ ID NO: 113963 - RNA, 22 nt, synthetic construct
  source 1..22: mol_type = other RNA
aattcaaacatgacagatccca

SEQ ID NO: 113964 - RNA, 22 nt, synthetic construct
  source 1..22: mol_type = other RNA
aattcaaagcaagttaaaagac

SEQ ID NO: 113965 - RNA, 22 nt, synthetic construct
  source 1..22: mol_type = other RNA
aattcaacaatagcaacaaaac

SEQ ID NO: 113966 - RNA, 22 nt, synthetic construct
  source 1..22: mol_type = other RNA
aattcaacagctactatgaata

SEQ ID NO: 113967 - RNA, 22 nt, synthetic construct
  source 1..22: mol_type = other RNA
aattcaacttggtaaaaagtgc

SEQ ID NO: 113968 - RNA, 22 nt, synthetic construct
  source 1..22: mol_type = other RNA
aattcaattttcatgggttgat

SEQ ID NO: 113969 - RNA, 22 nt, synthetic construct
  source 1..22: mol_type = other RNA
aattcacaagattaatcttgca

SEQ ID NO: 113970 - RNA, 22 nt, synthetic construct
  source 1..22: mol_type = other RNA
aattcacagaactgtcactgac

SEQ ID NO: 113971 - RNA, 22 nt, synthetic construct
  source 1..22: mol_type = other RNA
aattcacagaatatactcagaa

SEQ ID NO: 113972 - RNA, 22 nt, synthetic construct
  source 1..22: mol_type = other RNA
aattcacagcatgaatacctat

SEQ ID NO: 113973 - RNA, 22 nt, synthetic construct
  source 1..22: mol_type = other RNA
aattcacagtagaagactcagc

SEQ ID NO: 113974 - RNA, 22 nt, synthetic construct
  source 1..22: mol_type = other RNA
aattcacatttaagaagggaac

SEQ ID NO: 113975 - RNA, 22 nt, synthetic construct
  source 1..22: mol_type = other RNA
aattcaccaaacaccttacact

SEQ ID NO: 113976 - RNA, 22 nt, synthetic construct
  source 1..22: mol_type = other RNA
aattcacgagactgttagggac

SEQ ID NO: 113977 - RNA, 22 nt, synthetic construct
  source 1..22: mol_type = other RNA
aattcactaatgcctcaaatta

SEQ ID NO: 113978 - RNA, 22 nt, synthetic construct
  source 1..22: mol_type = other RNA
aattcactcctcattcacacta

SEQ ID NO: 113979 - RNA, 22 nt, synthetic construct
  source 1..22: mol_type = other RNA
aattcactgtgactccaaagca

SEQ ID NO: 113980 - RNA, 22 nt, synthetic construct
  source 1..22: mol_type = other RNA
aattcagagtggctaatgtggc

SEQ ID NO: 113981 - RNA, 22 nt, synthetic construct
  source 1..22: mol_type = other RNA
aattcagatggccccaaaatta

SEQ ID NO: 113982 - RNA, 22 nt, synthetic construct
  source 1..22: mol_type = other RNA
aattcaggacagtcatcctcaa

SEQ ID NO: 113983 - RNA, 22 nt, synthetic construct
  source 1..22: mol_type = other RNA
aattcaggacagttattcttca

SEQ ID NO: 113984 - RNA, 22 nt, synthetic construct
  source 1..22: mol_type = other RNA
aattcagtcaacaccaagcaac

SEQ ID NO: 113985 - RNA, 22 nt, synthetic construct
  source 1..22: mol_type = other RNA
aattcagtcaccaaacgtttag

SEQ ID NO: 113986 - RNA, 22 nt, synthetic construct
  source 1..22: mol_type = other RNA
aattcatagatcaccaggggct

SEQ ID NO: 113987 - RNA, 22 nt, synthetic construct
  source 1..22: mol_type = other RNA
aattcatgcaactgaaaacatc

SEQ ID NO: 113988 - RNA, 22 nt, synthetic construct
  source 1..22: mol_type = other RNA
aattcattgtacatgaagtcct

SEQ ID NO: 113989 - RNA, 22 nt, synthetic construct
  source 1..22: mol_type = other RNA
aattccaaaagtgaatatagct

SEQ ID NO: 113990 - RNA, 22 nt, synthetic construct
  source 1..22: mol_type = other RNA
aattccaaattagctttctccc

SEQ ID NO: 113991 - RNA, 22 nt, synthetic construct
  source 1..22: mol_type = other RNA
aattccacaaccactggggagt

SEQ ID NO: 113992 - RNA, 22 nt, synthetic construct
  source 1..22: mol_type = other RNA
aattccatcagtggttgtgctt

SEQ ID NO: 113993 - RNA, 22 nt, synthetic construct
  source 1..22: mol_type = other RNA
aattccattccttttcgagact

SEQ ID NO: 113994 - RNA, 22 nt, synthetic construct
  source 1..22: mol_type = other RNA
aattcccacaaaatatgaagca

SEQ ID NO: 113995 - RNA, 22 nt, synthetic construct
  source 1..22: mol_type = other RNA
aattccccagcctcagcctccc

SEQ ID NO: 113996 - RNA, 22 nt, synthetic construct
  source 1..22: mol_type = other RNA
aattccctcagcaaaagcaatt

SEQ ID NO: 113997 - RNA, 22 nt, synthetic construct
  source 1..22: mol_type = other RNA
aattccctctacaaaaggagga

SEQ ID NO: 113998 - RNA, 22 nt, synthetic construct
  source 1..22: mol_type = other RNA
aattcccttcagtgtagtcaga

SEQ ID NO: 113999 - RNA, 22 nt, synthetic construct
  source 1..22: mol_type = other RNA
aattccgctctggttttaaaga

SEQ ID NO: 114000 - RNA, 22 nt, synthetic construct
  source 1..22: mol_type = other RNA
aattcctaactcaagagttact

SEQ ID NO: 114001 - RNA, 22 nt, synthetic construct
  source 1..22: mol_type = other RNA
aattcctactttcttcaaccat

SEQ ID NO: 114002 - RNA, 22 nt, synthetic construct
  source 1..22: mol_type = other RNA
aattccttcccctttctttggt

SEQ ID NO: 114003 - RNA, 22 nt, synthetic construct
  source 1..22: mol_type = other RNA
aattccttcctttgatgactta

SEQ ID NO: 114004 - RNA, 22 nt, synthetic construct
  source 1..22: mol_type = other RNA
aattcctttctaggcatctatt

SEQ ID NO: 114005 - RNA, 22 nt, synthetic construct
  source 1..22: mol_type = other RNA
aattcgaaaatgggccaaagac

SEQ ID NO: 114006 - RNA, 22 nt, synthetic construct
  source 1..22: mol_type = other RNA
aattcggtggcattaaggacat

SEQ ID NO: 114007 - RNA, 22 nt, synthetic construct
  source 1..22: mol_type = other RNA
aattcgttaatacttgtgtagc

SEQ ID NO: 114008 - RNA, 22 nt, synthetic construct
  source 1..22: mol_type = other RNA
aattctaacaagaagctgtttt

SEQ ID NO: 114009 - RNA, 22 nt, synthetic construct
  source 1..22: mol_type = other RNA
aattctaacattatcttctacc

SEQ ID NO: 114010 - RNA, 22 nt, synthetic construct
  source 1..22: mol_type = other RNA
aattctaatgaactcccagaac

SEQ ID NO: 114011 - RNA, 22 nt, synthetic construct
  source 1..22: mol_type = other RNA
aattctaattagaaactggtga

SEQ ID NO: 114012 - RNA, 22 nt, synthetic construct
  source 1..22: mol_type = other RNA
aattctagttaataaaggtgct

SEQ ID NO: 114013 - RNA, 22 nt, synthetic construct
  source 1..22: mol_type = other RNA
aattctatctgaactttcgaag

SEQ ID NO: 114014 - RNA, 22 nt, synthetic construct
  source 1..22: mol_type = other RNA
aattctatttttctgcaattgg

SEQ ID NO: 114015 - RNA, 22 nt, synthetic construct
  source 1..22: mol_type = other RNA
aattctcaaatgaacaggttct

SEQ ID NO: 114016 - RNA, 22 nt, synthetic construct
  source 1..22: mol_type = other RNA
aattctccactttcatgatttg

SEQ ID NO: 114017 - RNA, 22 nt, synthetic construct
  source 1..22: mol_type = other RNA
aattctccctgaaattgtcaga

SEQ ID NO: 114018 - RNA, 22 nt, synthetic construct
  source 1..22: mol_type = other RNA
aattctctctcaactggcccct

SEQ ID NO: 114019 - RNA, 22 nt, synthetic construct
  source 1..22: mol_type = other RNA
aattctctggaatagaagagca

SEQ ID NO: 114020 - RNA, 22 nt, synthetic construct
  source 1..22: mol_type = other RNA
aattctgacaactgggagaatg

SEQ ID NO: 114021 - RNA, 22 nt, synthetic construct
  source 1..22: mol_type = other RNA
aattctgacacccgaagaggac

SEQ ID NO: 114022 - RNA, 22 nt, synthetic construct
  source 1..22: mol_type = other RNA
aattctgaccctttattcaaag

SEQ ID NO: 114023 - RNA, 22 nt, synthetic construct
  source 1..22: mol_type = other RNA
aattctgacttagtgagggagg

SEQ ID NO: 114024 - RNA, 22 nt, synthetic construct
  source 1..22: mol_type = other RNA
aattctgaggcctcctgccttc

SEQ ID NO: 114025 - RNA, 22 nt, synthetic construct
  source 1..22: mol_type = other RNA
aattctgagggaaattatttcc

SEQ ID NO: 114026 - RNA, 22 nt, synthetic construct
  source 1..22: mol_type = other RNA
aattctgatagcttgacaaaag

SEQ ID NO: 114027 - RNA, 22 nt, synthetic construct
  source 1..22: mol_type = other RNA
aattctgatgcacaagccttga

SEQ ID NO: 114028 - RNA, 22 nt, synthetic construct
  source 1..22: mol_type = other RNA
aattctgcagtgaacatgggaa

SEQ ID NO: 114029 - RNA, 22 nt, synthetic construct
  source 1..22: mol_type = other RNA
aattctgccacattcaacaaca

SEQ ID NO: 114030 - RNA, 22 nt, synthetic construct
  source 1..22: mol_type = other RNA
aattctgccttcaatgtttggt

SEQ ID NO: 114031 - RNA, 22 nt, synthetic construct
  source 1..22: mol_type = other RNA
aattctgcttattatatgccta

SEQ ID NO: 114032 - RNA, 22 nt, synthetic construct
  source 1..22: mol_type = other RNA
aattctgtgccaagcaacttga

SEQ ID NO: 114033 - RNA, 22 nt, synthetic construct
  source 1..22: mol_type = other RNA
aattctgttctcagtatccttt

SEQ ID NO: 114034 - RNA, 22 nt, synthetic construct
  source 1..22: mol_type = other RNA
aattctgtttacccttactaaa

SEQ ID NO: 114035 - RNA, 22 nt, synthetic construct
  source 1..22: mol_type = other RNA
aattcttaaactgccaaaccct

SEQ ID NO: 114036 - RNA, 22 nt, synthetic construct
  source 1..22: mol_type = other RNA
aattcttccagcctggtaatga

SEQ ID NO: 114037 - RNA, 22 nt, synthetic construct
  source 1..22: mol_type = other RNA
aattcttcctgtcttggaccca

SEQ ID NO: 114038 - RNA, 22 nt, synthetic construct
  source 1..22: mol_type = other RNA
aattcttgacctcaaatgatcc

SEQ ID NO: 114039 - RNA, 22 nt, synthetic construct
  source 1..22: mol_type = other RNA
aattcttgggtgaataacccat

SEQ ID NO: 114040 - RNA, 22 nt, synthetic construct
  source 1..22: mol_type = other RNA
aattctttaaaactgctgagtc

SEQ ID NO: 114041 - RNA, 22 nt, synthetic construct
  source 1..22: mol_type = other RNA
aattcttttgctgtatacccag

SEQ ID NO: 114042 - RNA, 22 nt, synthetic construct
  source 1..22: mol_type = other RNA
aattgaacagcctaaagtccac

SEQ ID NO: 114043 - RNA, 22 nt, synthetic construct
  source 1..22: mol_type = other RNA
aattgaacccactgagcattta

SEQ ID NO: 114044 - RNA, 22 nt, synthetic construct
  source 1..22: mol_type = other RNA
aattgaatggggatgcaacaaa

SEQ ID NO: 114045 - RNA, 22 nt, synthetic construct
  source 1..22: mol_type = other RNA
aattgaccaaacatgtgaggat

SEQ ID NO: 114046 - RNA, 22 nt, synthetic construct
  source 1..22: mol_type = other RNA
aattgaccattccacgctgtgg

SEQ ID NO: 114047 - RNA, 22 nt, synthetic construct
  source 1..22: mol_type = other RNA
aattgacttcactagatctctt

SEQ ID NO: 114048 - RNA, 22 nt, synthetic construct
  source 1..22: mol_type = other RNA
aattgactttaccctgctggaa

SEQ ID NO: 114049 - RNA, 22 nt, synthetic construct
  source 1..22: mol_type = other RNA
aattgagagctttcttttaaag

SEQ ID NO: 114050 - RNA, 22 nt, synthetic construct
  source 1..22: mol_type = other RNA
aattgagatgtactggaagtgt

SEQ ID NO: 114051 - RNA, 22 nt, synthetic construct
  source 1..22: mol_type = other RNA
aattgagctgtccccaccgcct

SEQ ID NO: 114052 - RNA, 22 nt, synthetic construct
  source 1..22: mol_type = other RNA
aattgatctgccaggacaattg

SEQ ID NO: 114053 - RNA, 22 nt, synthetic construct
  source 1..22: mol_type = other RNA
aattgcaaaaacagtttccctc

SEQ ID NO: 114054 - RNA, 22 nt, synthetic construct
  source 1..22: mol_type = other RNA
aattgcactccagcctaggcaa

SEQ ID NO: 114055 - RNA, 22 nt, synthetic construct
  source 1..22: mol_type = other RNA
aattgcagagtgttcaaaagcc

SEQ ID NO: 114056 - RNA, 22 nt, synthetic construct
  source 1..22: mol_type = other RNA
aattgcagccagagagtggaaa

SEQ ID NO: 114057 - RNA, 22 nt, synthetic construct
  source 1..22: mol_type = other RNA
aattgcaggtttactccaagaa

SEQ ID NO: 114058 - RNA, 22 nt, synthetic construct
  source 1..22: mol_type = other RNA
aattgcatcaactgcttcccta

SEQ ID NO: 114059 - RNA, 22 nt, synthetic construct
  source 1..22: mol_type = other RNA
aattgcatgagacttggagttt

SEQ ID NO: 114060 - RNA, 22 nt, synthetic construct
  source 1..22: mol_type = other RNA
aattgccaaactgttttccaca

SEQ ID NO: 114061 - RNA, 22 nt, synthetic construct
  source 1..22: mol_type = other RNA
aattgccatatgtagggcaccg

SEQ ID NO: 114062 - RNA, 22 nt, synthetic construct
  source 1..22: mol_type = other RNA
aattgcgcagaactggggcttg

SEQ ID NO: 114063 - RNA, 22 nt, synthetic construct
  source 1..22: mol_type = other RNA
aattgctgcagtttttccacta

SEQ ID NO: 114064 - RNA, 22 nt, synthetic construct
  source 1..22: mol_type = other RNA
aattgcttcaaagagaacaaaa

SEQ ID NO: 114065 - RNA, 22 nt, synthetic construct
  source 1..22: mol_type = other RNA
aattgcttttgctgagggaatt

SEQ ID NO: 114066 - RNA, 22 nt, synthetic construct
  source 1..22: mol_type = other RNA
aattggaacctttgtccactgt

SEQ ID NO: 114067 - RNA, 22 nt, synthetic construct
  source 1..22: mol_type = other RNA
aattggaagactatcacgattc

SEQ ID NO: 114068 - RNA, 22 nt, synthetic construct
  source 1..22: mol_type = other RNA
aattggacgggtggtagggagg

SEQ ID NO: 114069 - RNA, 22 nt, synthetic construct
  source 1..22: mol_type = other RNA
aattggcatttaaaagaacctc

SEQ ID NO: 114070 - RNA, 22 nt, synthetic construct
  source 1..22: mol_type = other RNA
aattggcgtacatgtagatatg

SEQ ID NO: 114071 - RNA, 22 nt, synthetic construct
  source 1..22: mol_type = other RNA
aattgggggaaaattgacattt

SEQ ID NO: 114072 - RNA, 22 nt, synthetic construct
  source 1..22: mol_type = other RNA
aattggtagtcaatgcaatgcg

SEQ ID NO: 114073 - RNA, 22 nt, synthetic construct
  source 1..22: mol_type = other RNA
aattggtcctggaaaaagacca

SEQ ID NO: 114074 - RNA, 22 nt, synthetic construct
  source 1..22: mol_type = other RNA
aattggtgaatctgagtaaagg

SEQ ID NO: 114075 - RNA, 22 nt, synthetic construct
  source 1..22: mol_type = other RNA
aattggttaaacttggtctggg

SEQ ID NO: 114076 - RNA, 22 nt, synthetic construct
  source 1..22: mol_type = other RNA
aattggttcgtttgaggctttt

SEQ ID NO: 114077 - RNA, 22 nt, synthetic construct
  source 1..22: mol_type = other RNA
aattgtaatcacagtacgcttt

SEQ ID NO: 114078 - RNA, 22 nt, synthetic construct
  source 1..22: mol_type = other RNA
aattgtaatgtctcctctttca

SEQ ID NO: 114079 - RNA, 22 nt, synthetic construct
  source 1..22: mol_type = other RNA
aattgtacaattttcttaccct

SEQ ID NO: 114080 - RNA, 22 nt, synthetic construct
  source 1..22: mol_type = other RNA
aattgtacacctcaaactagaa

SEQ ID NO: 114081 - RNA, 22 nt, synthetic construct
  source 1..22: mol_type = other RNA
aattgtaccttggagagaaacc

SEQ ID NO: 114082 - RNA, 22 nt, synthetic construct
  source 1..22: mol_type = other RNA
aattgtagtttccatggagggg

SEQ ID NO: 114083 - RNA, 22 nt, synthetic construct
  source 1..22: mol_type = other RNA
aattgtcagaaaagatcagtaa

SEQ ID NO: 114084 - RNA, 22 nt, synthetic construct
  source 1..22: mol_type = other RNA
aattgtcctggcagatcaattg

SEQ ID NO: 114085 - RNA, 22 nt, synthetic construct
  source 1..22: mol_type = other RNA
aattgtgacagttctatttctt

SEQ ID NO: 114086 - RNA, 22 nt, synthetic construct
  source 1..22: mol_type = other RNA
aattgtgtgttctctttttgac

SEQ ID NO: 114087 - RNA, 22 nt, synthetic construct
  source 1..22: mol_type = other RNA
aattgttcatgaaatccccttt

SEQ ID NO: 114088 - RNA, 22 nt, synthetic construct
  source 1..22: mol_type = other RNA
aattgttgcgcgtcaaaagatg

SEQ ID NO: 114089 - RNA, 22 nt, synthetic construct
  source 1..22: mol_type = other RNA
aattgtttgttgggtttaactg

SEQ ID NO: 114090 - RNA, 22 nt, synthetic construct
  source 1..22: mol_type = other RNA
aattgttttcccttttgtagct

SEQ ID NO: 114091 - RNA, 22 nt, synthetic construct
  source 1..22: mol_type = other RNA
aatttaaagacgttcagataac

SEQ ID NO: 114092 - RNA, 22 nt, synthetic construct
  source 1..22: mol_type = other RNA
aatttaaagttagtgaagcaga

SEQ ID NO: 114093 - RNA, 22 nt, synthetic construct
  source 1..22: mol_type = other RNA
aatttaacttctaatgcccatt

SEQ ID NO: 114094 - RNA, 22 nt, synthetic construct
  source 1..22: mol_type = other RNA
aatttaagacacaaggaaggtc

SEQ ID NO: 114095 - RNA, 22 nt, synthetic construct
  source 1..22: mol_type = other RNA
aatttaaggaccaggtatggcg

SEQ ID NO: 114096 - RNA, 22 nt, synthetic construct
  source 1..22: mol_type = other RNA
aatttaaggggtaaatggtttc

SEQ ID NO: 114097 - RNA, 22 nt, synthetic construct
  source 1..22: mol_type = other RNA
aatttaatactatgtatgtggc

SEQ ID NO: 114098 - RNA, 22 nt, synthetic construct
  source 1..22: mol_type = other RNA
aatttaatatgtgtacaatggg

SEQ ID NO: 114099 - RNA, 22 nt, synthetic construct
  source 1..22: mol_type = other RNA
aatttaattttctgactctgtg

SEQ ID NO: 114100 - RNA, 22 nt, synthetic construct
  source 1..22: mol_type = other RNA
aatttaattttgagagtgcagt

SEQ ID NO: 114101 - RNA, 22 nt, synthetic construct
  source 1..22: mol_type = other RNA
aatttacatagtgctcttctga

SEQ ID NO: 114102 - RNA, 22 nt, synthetic construct
  source 1..22: mol_type = other RNA
aatttaccatctgacatatgtt

SEQ ID NO: 114103 - RNA, 22 nt, synthetic construct
  source 1..22: mol_type = other RNA
aatttagaattctctctcaact

SEQ ID NO: 114104 - RNA, 22 nt, synthetic construct
  source 1..22: mol_type = other RNA
aatttagatctcatgttaagtg

SEQ ID NO: 114105 - RNA, 22 nt, synthetic construct
  source 1..22: mol_type = other RNA
aatttagatgagagtggcctaa

SEQ ID NO: 114106 - RNA, 22 nt, synthetic construct
  source 1..22: mol_type = other RNA
aatttagcgttcatccaaatta

SEQ ID NO: 114107 - RNA, 22 nt, synthetic construct
  source 1..22: mol_type = other RNA
aatttagcttctgaattgagat

SEQ ID NO: 114108 - RNA, 22 nt, synthetic construct
  source 1..22: mol_type = other RNA
aatttagtaagggtaaacagaa

SEQ ID NO: 114109 - RNA, 22 nt, synthetic construct
  source 1..22: mol_type = other RNA
aatttagtgtattgtaccttga

SEQ ID NO: 114110 - RNA, 22 nt, synthetic construct
  source 1..22: mol_type = other RNA
aatttatacaaataactccagc

SEQ ID NO: 114111 - RNA, 22 nt, synthetic construct
  source 1..22: mol_type = other RNA
aatttatcagatcccaattact

SEQ ID NO: 114112 - RNA, 22 nt, synthetic construct
  source 1..22: mol_type = other RNA
aatttatctccataagtcccta

SEQ ID NO: 114113 - RNA, 22 nt, synthetic construct
  source 1..22: mol_type = other RNA
aatttatgtacatgacctatct

SEQ ID NO: 114114 - RNA, 22 nt, synthetic construct
  source 1..22: mol_type = other RNA
aatttatgttcatgaaccttca

SEQ ID NO: 114115 - RNA, 22 nt, synthetic construct
  source 1..22: mol_type = other RNA
aatttcacttgtttcttttcac

SEQ ID NO: 114116 - RNA, 22 nt, synthetic construct
  source 1..22: mol_type = other RNA
aatttcagaaagagaatagcag

SEQ ID NO: 114117 - RNA, 22 nt, synthetic construct
  source 1..22: mol_type = other RNA
aatttcagagagacctgaagac

SEQ ID NO: 114118 - RNA, 22 nt, synthetic construct
  source 1..22: mol_type = other RNA
aatttcagatctctgacattgg

SEQ ID NO: 114119 - RNA, 22 nt, synthetic construct
  source 1..22: mol_type = other RNA
aatttcagggagaattggtagt

SEQ ID NO: 114120 - RNA, 22 nt, synthetic construct
  source 1..22: mol_type = other RNA
aatttcaggtgtgtaaacactg

SEQ ID NO: 114121 - RNA, 22 nt, synthetic construct
  source 1..22: mol_type = other RNA
aatttcatcgtaaaaagccatt

SEQ ID NO: 114122 - RNA, 22 nt, synthetic construct
  source 1..22: mol_type = other RNA
aatttcatgcctttcagcatag

SEQ ID NO: 114123 - RNA, 22 nt, synthetic construct
  source 1..22: mol_type = other RNA
aatttcattaggttgatggctg

SEQ ID NO: 114124 - RNA, 22 nt, synthetic construct
  source 1..22: mol_type = other RNA
aatttccaagaaccctttgtta

SEQ ID NO: 114125 - RNA, 22 nt, synthetic construct
  source 1..22: mol_type = other RNA
aatttccacccatgaagccagc

SEQ ID NO: 114126 - RNA, 22 nt, synthetic construct
  source 1..22: mol_type = other RNA
aatttccagcattttataggca

SEQ ID NO: 114127 - RNA, 22 nt, synthetic construct
  source 1..22: mol_type = other RNA
aatttccaggtcattacatatt

SEQ ID NO: 114128 - RNA, 22 nt, synthetic construct
  source 1..22: mol_type = other RNA
aatttcccatttgatttcttct

SEQ ID NO: 114129 - RNA, 22 nt, synthetic construct
  source 1..22: mol_type = other RNA
aatttccctcagaatttgaggt

SEQ ID NO: 114130 - RNA, 22 nt, synthetic construct
  source 1..22: mol_type = other RNA
aatttctaaaaacgtgcaaact

SEQ ID NO: 114131 - RNA, 22 nt, synthetic construct
  source 1..22: mol_type = other RNA
aatttctaaggttctgctatgc

SEQ ID NO: 114132 - RNA, 22 nt, synthetic construct
  source 1..22: mol_type = other RNA
aatttctatagtcattccgcta

SEQ ID NO: 114133 - RNA, 22 nt, synthetic construct
  source 1..22: mol_type = other RNA
aatttctccacatccttgccaa

SEQ ID NO: 114134 - RNA, 22 nt, synthetic construct
  source 1..22: mol_type = other RNA
aatttctgagagtattgccagg

SEQ ID NO: 114135 - RNA, 22 nt, synthetic construct
  source 1..22: mol_type = other RNA
aatttctgtccttggattgcta

SEQ ID NO: 114136 - RNA, 22 nt, synthetic construct
  source 1..22: mol_type = other RNA
aatttctgttgcttaagtcact

SEQ ID NO: 114137 - RNA, 22 nt, synthetic construct
  source 1..22: mol_type = other RNA
aatttctttaaaaccagagcgg

SEQ ID NO: 114138 - RNA, 22 nt, synthetic construct
  source 1..22: mol_type = other RNA
aatttctttggctgttagcctt

SEQ ID NO: 114139 - RNA, 22 nt, synthetic construct
  source 1..22: mol_type = other RNA
aatttgacatgacaggtgagtg

SEQ ID NO: 114140 - RNA, 22 nt, synthetic construct
  source 1..22: mol_type = other RNA
aatttgaggcattagtgaattc

SEQ ID NO: 114141 - RNA, 22 nt, synthetic construct
  source 1..22: mol_type = other RNA
aatttgaggccctattcaacct

SEQ ID NO: 114142 - RNA, 22 nt, synthetic construct
  source 1..22: mol_type = other RNA
aatttgaggtagcacaactagt

SEQ ID NO: 114143 - RNA, 22 nt, synthetic construct
  source 1..22: mol_type = other RNA
aatttgaggtctaggctaatgt

SEQ ID NO: 114144 - RNA, 22 nt, synthetic construct
  source 1..22: mol_type = other RNA
aatttgaggtcttctagctttc

SEQ ID NO: 114145 - RNA, 22 nt, synthetic construct
  source 1..22: mol_type = other RNA
aatttgattgttagccacagcg

SEQ ID NO: 114146 - RNA, 22 nt, synthetic construct
  source 1..22: mol_type = other RNA
aatttgccaaaatgattttcac

SEQ ID NO: 114147 - RNA, 22 nt, synthetic construct
  source 1..22: mol_type = other RNA
aatttgccacattttaccaaaa

SEQ ID NO: 114148 - RNA, 22 nt, synthetic construct
  source 1..22: mol_type = other RNA
aatttgcctattctggggctca

SEQ ID NO: 114149 - RNA, 22 nt, synthetic construct
  source 1..22: mol_type = other RNA
aatttggaaagggtagagcact

SEQ ID NO: 114150 - RNA, 22 nt, synthetic construct
  source 1..22: mol_type = other RNA
aatttggaattaaaatgttgcc

SEQ ID NO: 114151 - RNA, 22 nt, synthetic construct
  source 1..22: mol_type = other RNA
aatttggatgaacgctaaatta

SEQ ID NO: 114152 - RNA, 22 nt, synthetic construct
  source 1..22: mol_type = other RNA
aatttggcaaaaaatgcagtag

SEQ ID NO: 114153 - RNA, 22 nt, synthetic construct
  source 1..22: mol_type = other RNA
aatttggcttggggaacagttt

SEQ ID NO: 114154 - RNA, 22 nt, synthetic construct
  source 1..22: mol_type = other RNA
aatttgggatatagctacaatg

SEQ ID NO: 114155 - RNA, 22 nt, synthetic construct
  source 1..22: mol_type = other RNA
aatttgggtttgagtttccaga

SEQ ID NO: 114156 - RNA, 22 nt, synthetic construct
  source 1..22: mol_type = other RNA
aatttggtattcttatccctac

SEQ ID NO: 114157 - RNA, 22 nt, synthetic construct
  source 1..22: mol_type = other RNA
aatttggttatgcgaatttact

SEQ ID NO: 114158 - RNA, 22 nt, synthetic construct
  source 1..22: mol_type = other RNA
aatttgtcaacttttagtaggt

SEQ ID NO: 114159 - RNA, 22 nt, synthetic construct
  source 1..22: mol_type = other RNA
aatttgtccatctggattatag

SEQ ID NO: 114160 - RNA, 22 nt, synthetic construct
  source 1..22: mol_type = other RNA
aatttgtgaaccttgaagtact

SEQ ID NO: 114161 - RNA, 22 nt, synthetic construct
  source 1..22: mol_type = other RNA
aatttgttctaatttgtgaacc

SEQ ID NO: 114162 - RNA, 22 nt, synthetic construct
  source 1..22: mol_type = other RNA
aatttgttttaccatctaaagc

SEQ ID NO: 114163 - RNA, 22 nt, synthetic construct
  source 1..22: mol_type = other RNA
aatttgttttccaagccttaaa

SEQ ID NO: 114164 - RNA, 22 nt, synthetic construct
  source 1..22: mol_type = other RNA
aattttaaatcagcaccatcta

SEQ ID NO: 114165 - RNA, 22 nt, synthetic construct
  source 1..22: mol_type = other RNA
aattttaagcctagagattagg

SEQ ID NO: 114166 - RNA, 22 nt, synthetic construct
  source 1..22: mol_type = other RNA
aattttaagtgcacaatgcagt

SEQ ID NO: 114167 - RNA, 22 nt, synthetic construct
  source 1..22: mol_type = other RNA
aattttactgatcttttctgac

SEQ ID NO: 114168 - RNA, 22 nt, synthetic construct
  source 1..22: mol_type = other RNA
aattttaggacaaggaaaggat

SEQ ID NO: 114169 - RNA, 22 nt, synthetic construct
  source 1..22: mol_type = other RNA
aattttatggttttttcccccc

SEQ ID NO: 114170 - RNA, 22 nt, synthetic construct
  source 1..22: mol_type = other RNA
aattttcaagggtgttttcccc

SEQ ID NO: 114171 - RNA, 22 nt, synthetic construct
  source 1..22: mol_type = other RNA
aattttcaggactcatgagagc

SEQ ID NO: 114172 - RNA, 22 nt, synthetic construct
  source 1..22: mol_type = other RNA
aattttcatagcagcattgttt

SEQ ID NO: 114173 - RNA, 22 nt, synthetic construct
  source 1..22: mol_type = other RNA
aattttcattctacctggagcc

SEQ ID NO: 114174 - RNA, 22 nt, synthetic construct
  source 1..22: mol_type = other RNA
aattttccattcacacaccctt

SEQ ID NO: 114175 - RNA, 22 nt, synthetic construct
  source 1..22: mol_type = other RNA
aattttccattcatgtaatgca

SEQ ID NO: 114176 - RNA, 22 nt, synthetic construct
  source 1..22: mol_type = other RNA
aattttcccccaattaaactat

SEQ ID NO: 114177 - RNA, 22 nt, synthetic construct
  source 1..22: mol_type = other RNA
aattttctaggaaccatattag

SEQ ID NO: 114178 - RNA, 22 nt, synthetic construct
  source 1..22: mol_type = other RNA
aattttctcccaaggttgcctg

SEQ ID NO: 114179 - RNA, 22 nt, synthetic construct
  source 1..22: mol_type = other RNA
aattttctctcatgttgggtaa

SEQ ID NO: 114180 - RNA, 22 nt, synthetic construct
  source 1..22: mol_type = other RNA
aattttctgactctgtgcttgt

SEQ ID NO: 114181 - RNA, 22 nt, synthetic construct
  source 1..22: mol_type = other RNA
aattttctgagcaactactatt

SEQ ID NO: 114182 - RNA, 22 nt, synthetic construct
  source 1..22: mol_type = other RNA
aattttcttaccctttactcag

SEQ ID NO: 114183 - RNA, 22 nt, synthetic construct
  source 1..22: mol_type = other RNA
aattttgaagaaagttttgcag

SEQ ID NO: 114184 - RNA, 22 nt, synthetic construct
  source 1..22: mol_type = other RNA
aattttgagacctcaggcagtc

SEQ ID NO: 114185 - RNA, 22 nt, synthetic construct
  source 1..22: mol_type = other RNA
aattttgagagtgcagtatgta

SEQ ID NO: 114186 - RNA, 22 nt, synthetic construct
  source 1..22: mol_type = other RNA
aattttgaggcttttggatttt

SEQ ID NO: 114187 - RNA, 22 nt, synthetic construct
  source 1..22: mol_type = other RNA
aattttgcttaaagttggtcct

SEQ ID NO: 114188 - RNA, 22 nt, synthetic construct
  source 1..22: mol_type = other RNA
aattttgcttttgctttgggtc

SEQ ID NO: 114189 - RNA, 22 nt, synthetic construct
  source 1..22: mol_type = other RNA
aattttggggccatctgaattc

SEQ ID NO: 114190 - RNA, 22 nt, synthetic construct
  source 1..22: mol_type = other RNA
aattttgttcaggagttttgcc

SEQ ID NO: 114191 - RNA, 22 nt, synthetic construct
  source 1..22: mol_type = other RNA
aatttttaaaaagcagctacct

SEQ ID NO: 114192 - RNA, 22 nt, synthetic construct
  source 1..22: mol_type = other RNA
aatttttaaaagagcgaagagg

SEQ ID NO: 114193 - RNA, 22 nt, synthetic construct
  source 1..22: mol_type = other RNA
aatttttcacattcttcaccat

SEQ ID NO: 114194 - RNA, 22 nt, synthetic construct
  source 1..22: mol_type = other RNA
aatttttcttacctaagcatcg

SEQ ID NO: 114195 - RNA, 22 nt, synthetic construct
  source 1..22: mol_type = other RNA
aatttttgagaaattgccaaac

SEQ ID NO: 114196 - RNA, 22 nt, synthetic construct
  source 1..22: mol_type = other RNA
aatttttgcaaaccaaatgcag

SEQ ID NO: 114197 - RNA, 22 nt, synthetic construct
  source 1..22: mol_type = other RNA
aatttttgtcaagtgactccaa

SEQ ID NO: 114198 - RNA, 22 nt, synthetic construct
  source 1..22: mol_type = other RNA
aatttttgtctggaacacacat

SEQ ID NO: 114199 - RNA, 22 nt, synthetic construct
  source 1..22: mol_type = other RNA
aattttttgagacggaatctta

SEQ ID NO: 114200 - RNA, 22 nt, synthetic construct
  source 1..22: mol_type = other RNA
aattttttggcatacaactgct

SEQ ID NO: 114201 - RNA, 22 nt, synthetic construct
  source 1..22: mol_type = other RNA
acaaaaaaccactggatacgga

SEQ ID NO: 114202 - RNA, 22 nt, synthetic construct
  source 1..22: mol_type = other RNA
acaaaaaacgcggcacttggta

SEQ ID NO: 114203 - RNA, 22 nt, synthetic construct
  source 1..22: mol_type = other RNA
acaaaaaatcttaaagatgcca

SEQ ID NO: 114204 - RNA, 22 nt, synthetic construct
  source 1..22: mol_type = other RNA
acaaaaacacactgagcttttt

SEQ ID NO: 114205 - RNA, 22 nt, synthetic construct
  source 1..22: mol_type = other RNA
acaaaaagacaagtactgcatg

SEQ ID NO: 114206 - RNA, 22 nt, synthetic construct
  source 1..22: mol_type = other RNA
acaaaaagagaaaaattacagg

SEQ ID NO: 114207 - RNA, 22 nt, synthetic construct
  source 1..22: mol_type = other RNA
acaaaaagatctgtggacttta

SEQ ID NO: 114208 - RNA, 22 nt, synthetic construct
  source 1..22: mol_type = other RNA
acaaaaagcacctaccataaca

SEQ ID NO: 114209 - RNA, 22 nt, synthetic construct
  source 1..22: mol_type = other RNA
acaaaaagtaggggtaaatctt

SEQ ID NO: 114210 - RNA, 22 nt, synthetic construct
  source 1..22: mol_type = other RNA
acaaaaagtgataccataaagt

SEQ ID NO: 114211 - RNA, 22 nt, synthetic construct
  source 1..22: mol_type = other RNA
acaaaaagtgtgaccacattcc

SEQ ID NO: 114212 - RNA, 22 nt, synthetic construct
  source 1..22: mol_type = other RNA
acaaaaataatatgataccctc

SEQ ID NO: 114213 - RNA, 22 nt, synthetic construct
  source 1..22: mol_type = other RNA
acaaaaatacgaaagtgctcta

SEQ ID NO: 114214 - RNA, 22 nt, synthetic construct
  source 1..22: mol_type = other RNA
acaaaaatacttaagagcatgt

SEQ ID NO: 114215 - RNA, 22 nt, synthetic construct
  source 1..22: mol_type = other RNA
acaaaaatagaggatgggcatt

SEQ ID NO: 114216 - RNA, 22 nt, synthetic construct
  source 1..22: mol_type = other RNA
acaaaaatgacacaacttacta

SEQ ID NO: 114217 - RNA, 22 nt, synthetic construct
  source 1..22: mol_type = other RNA
acaaaaattagctgggcgagat

SEQ ID NO: 114218 - RNA, 22 nt, synthetic construct
  source 1..22: mol_type = other RNA
acaaaaattttcattctacctg

SEQ ID NO: 114219 - RNA, 22 nt, synthetic construct
  source 1..22: mol_type = other RNA
acaaaacaaaaccctgttgggc

SEQ ID NO: 114220 - RNA, 22 nt, synthetic construct
  source 1..22: mol_type = other RNA
acaaaacaaagtctttgggtaa

SEQ ID NO: 114221 - RNA, 22 nt, synthetic construct
  source 1..22: mol_type = other RNA
acaaaacaaatggaaccactgt

SEQ ID NO: 114222 - RNA, 22 nt, synthetic construct
  source 1..22: mol_type = other RNA
acaaaacaagaagaaaaagcaa

SEQ ID NO: 114223 - RNA, 22 nt, synthetic construct
  source 1..22: mol_type = other RNA
acaaaacacacgggtacacatc

SEQ ID NO: 114224 - RNA, 22 nt, synthetic construct
  source 1..22: mol_type = other RNA
acaaaacacatggcatcggggc

SEQ ID NO: 114225 - RNA, 22 nt, synthetic construct
  source 1..22: mol_type = other RNA
acaaaacagggttattaacata

SEQ ID NO: 114226 - RNA, 22 nt, synthetic construct
  source 1..22: mol_type = other RNA
acaaaacatgttttcaaatgct

SEQ ID NO: 114227 - RNA, 22 nt, synthetic construct
  source 1..22: mol_type = other RNA
acaaaaccctgttgggctatta

SEQ ID NO: 114228 - RNA, 22 nt, synthetic construct
  source 1..22: mol_type = other RNA
acaaaactaggctgtcccaaat

SEQ ID NO: 114229 - RNA, 22 nt, synthetic construct
  source 1..22: mol_type = other RNA
acaaaactgaactcaaaatgga

SEQ ID NO: 114230 - RNA, 22 nt, synthetic construct
  source 1..22: mol_type = other RNA
acaaaactgggggctggacata

SEQ ID NO: 114231 - RNA, 22 nt, synthetic construct
  source 1..22: mol_type = other RNA
acaaaagaaaattttctgagca

SEQ ID NO: 114232 - RNA, 22 nt, synthetic construct
  source 1..22: mol_type = other RNA
acaaaagaacaggacttttggt

SEQ ID NO: 114233 - RNA, 22 nt, synthetic construct
  source 1..22: mol_type = other RNA
acaaaagagctgggcccgcagt

SEQ ID NO: 114234 - RNA, 22 nt, synthetic construct
  source 1..22: mol_type = other RNA
acaaaagagtagattccccctt

SEQ ID NO: 114235 - RNA, 22 nt, synthetic construct
  source 1..22: mol_type = other RNA
acaaaagatacacaagatctct

SEQ ID NO: 114236 - RNA, 22 nt, synthetic construct
  source 1..22: mol_type = other RNA
acaaaagatcatttcaaaccaa

SEQ ID NO: 114237 - RNA, 22 nt, synthetic construct
  source 1..22: mol_type = other RNA
acaaaaggaggaactaattgat

SEQ ID NO: 114238 - RNA, 22 nt, synthetic construct
  source 1..22: mol_type = other RNA
acaaaaggccccttgaaagatc

SEQ ID NO: 114239 - RNA, 22 nt, synthetic construct
  source 1..22: mol_type = other RNA
acaaaagggaaaacaattactt

SEQ ID NO: 114240 - RNA, 22 nt, synthetic construct
  source 1..22: mol_type = other RNA
acaaaaggtagaagataatgtt

SEQ ID NO: 114241 - RNA, 22 nt, synthetic construct
  source 1..22: mol_type = other RNA
acaaaaggtttccagtggcccc

SEQ ID NO: 114242 - RNA, 22 nt, synthetic construct
  source 1..22: mol_type = other RNA
acaaaagtgaaaactaaggtca

SEQ ID NO: 114243 - RNA, 22 nt, synthetic construct
  source 1..22: mol_type = other RNA
acaaaagtgctgttgaggctgg

SEQ ID NO: 114244 - RNA, 22 nt, synthetic construct
  source 1..22: mol_type = other RNA
acaaaatacccacaagaaaaac

SEQ ID NO: 114245 - RNA, 22 nt, synthetic construct
  source 1..22: mol_type = other RNA
acaaaatacctgggaatccaac

SEQ ID NO: 114246 - RNA, 22 nt, synthetic construct
  source 1..22: mol_type = other RNA
acaaaataggattaagacacta

SEQ ID NO: 114247 - RNA, 22 nt, synthetic construct
  source 1..22: mol_type = other RNA
acaaaataggcagtcctctact

SEQ ID NO: 114248 - RNA, 22 nt, synthetic construct
  source 1..22: mol_type = other RNA
acaaaatatgaagcattaatgc

SEQ ID NO: 114249 - RNA, 22 nt, synthetic construct
  source 1..22: mol_type = other RNA
acaaaatatgtaatgacctgga

SEQ ID NO: 114250 - RNA, 22 nt, synthetic construct
  source 1..22: mol_type = other RNA
acaaaatcagatatgaaagagg

SEQ ID NO: 114251 - RNA, 22 nt, synthetic construct
  source 1..22: mol_type = other RNA
acaaaatgtggatgcatgaggc

SEQ ID NO: 114252 - RNA, 22 nt, synthetic construct
  source 1..22: mol_type = other RNA
acaaaatgtggtatatatgcac

SEQ ID NO: 114253 - RNA, 22 nt, synthetic construct
  source 1..22: mol_type = other RNA
acaaacaaacagaaaggcccaa

SEQ ID NO: 114254 - RNA, 22 nt, synthetic construct
  source 1..22: mol_type = other RNA
acaaacaaatccttttcccagg

SEQ ID NO: 114255 - RNA, 22 nt, synthetic construct
  source 1..22: mol_type = other RNA
acaaacaattagcacctttatt

SEQ ID NO: 114256 - RNA, 22 nt, synthetic construct
  source 1..22: mol_type = other RNA
acaaacacaaaacaaatggaac

SEQ ID NO: 114257 - RNA, 22 nt, synthetic construct
  source 1..22: mol_type = other RNA
acaaacacacaaaccaacaaca

SEQ ID NO: 114258 - RNA, 22 nt, synthetic construct
  source 1..22: mol_type = other RNA
acaaacacactgggtaaacaag

SEQ ID NO: 114259 - RNA, 22 nt, synthetic construct
  source 1..22: mol_type = other RNA
acaaacacttttcaaacactta

SEQ ID NO: 114260 - RNA, 22 nt, synthetic construct
  source 1..22: mol_type = other RNA
acaaacagaaaggcccaaaaag

SEQ ID NO: 114261 - RNA, 22 nt, synthetic construct
  source 1..22: mol_type = other RNA
acaaacatatgcatgttatttg

SEQ ID NO: 114262 - RNA, 22 nt, synthetic construct
  source 1..22: mol_type = other RNA
acaaacatgaataaccaatgtc

SEQ ID NO: 114263 - RNA, 22 nt, synthetic construct
  source 1..22: mol_type = other RNA
acaaacattttttgcagagacg

SEQ ID NO: 114264 - RNA, 22 nt, synthetic construct
  source 1..22: mol_type = other RNA
acaaaccaaaaaatgtggcata

SEQ ID NO: 114265 - RNA, 22 nt, synthetic construct
  source 1..22: mol_type = other RNA
acaaaccaacaacaaaaaatct

SEQ ID NO: 114266 - RNA, 22 nt, synthetic construct
  source 1..22: mol_type = other RNA
acaaacccttggctagactaag

SEQ ID NO: 114267 - RNA, 22 nt, synthetic construct
  source 1..22: mol_type = other RNA
acaaacctggcaatactctcag

SEQ ID NO: 114268 - RNA, 22 nt, synthetic construct
  source 1..22: mol_type = other RNA
acaaaccttcttatttccttcc

SEQ ID NO: 114269 - RNA, 22 nt, synthetic construct
  source 1..22: mol_type = other RNA
acaaacgcattgtgatgtctca

SEQ ID NO: 114270 - RNA, 22 nt, synthetic construct
  source 1..22: mol_type = other RNA
acaaactaactagaaaaccgac

SEQ ID NO: 114271 - RNA, 22 nt, synthetic construct
  source 1..22: mol_type = other RNA
acaaactcaagttccggttctc

SEQ ID NO: 114272 - RNA, 22 nt, synthetic construct
  source 1..22: mol_type = other RNA
acaaactccaaacctttaagtt

SEQ ID NO: 114273 - RNA, 22 nt, synthetic construct
  source 1..22: mol_type = other RNA
acaaactgcagaatgacagaaa

SEQ ID NO: 114274 - RNA, 22 nt, synthetic construct
  source 1..22: mol_type = other RNA
acaaactgcgtggtttattcat

SEQ ID NO: 114275 - RNA, 22 nt, synthetic construct
  source 1..22: mol_type = other RNA
acaaagaacaggaagggagaga

SEQ ID NO: 114276 - RNA, 22 nt, synthetic construct
  source 1..22: mol_type = other RNA
acaaagacaagttcttacctca

SEQ ID NO: 114277 - RNA, 22 nt, synthetic construct
  source 1..22: mol_type = other RNA
acaaagagaacaatggaataga

SEQ ID NO: 114278 - RNA, 22 nt, synthetic construct
  source 1..22: mol_type = other RNA
acaaagatgccacaaatggagt

SEQ ID NO: 114279 - RNA, 22 nt, synthetic construct
  source 1..22: mol_type = other RNA
acaaagatttacccctactttt

SEQ ID NO: 114280 - RNA, 22 nt, synthetic construct
  source 1..22: mol_type = other RNA
acaaagccctcaggaccaggca

SEQ ID NO: 114281 - RNA, 22 nt, synthetic construct
  source 1..22: mol_type = other RNA
acaaagccttctctactctgcc

SEQ ID NO: 114282 - RNA, 22 nt, synthetic construct
  source 1..22: mol_type = other RNA
acaaagctctgatgctttctct

SEQ ID NO: 114283 - RNA, 22 nt, synthetic construct
  source 1..22: mol_type = other RNA
acaaagctttaaactggatgaa

SEQ ID NO: 114284 - RNA, 22 nt, synthetic construct
  source 1..22: mol_type = other RNA
acaaaggacatgaactcaacct

SEQ ID NO: 114285 - RNA, 22 nt, synthetic construct
  source 1..22: mol_type = other RNA
acaaaggactggaactcatttc

SEQ ID NO: 114286 - RNA, 22 nt, synthetic construct
  source 1..22: mol_type = other RNA
acaaaggattgggaagattggc

SEQ ID NO: 114287 - RNA, 22 nt, synthetic construct
  source 1..22: mol_type = other RNA
acaaaggcaggagcagtgtgaa

SEQ ID NO: 114288 - RNA, 22 nt, synthetic construct
  source 1..22: mol_type = other RNA
acaaaggcgaagcccgccgctc

SEQ ID NO: 114289 - RNA, 22 nt, synthetic construct
  source 1..22: mol_type = other RNA
acaaagggcctgttccaggcct

SEQ ID NO: 114290 - RNA, 22 nt, synthetic construct
  source 1..22: mol_type = other RNA
acaaagggttcttggaaattag

SEQ ID NO: 114291 - RNA, 22 nt, synthetic construct
  source 1..22: mol_type = other RNA
acaaaggtgttaagccgttcca

SEQ ID NO: 114292 - RNA, 22 nt, synthetic construct
  source 1..22: mol_type = other RNA
acaaaggttgaaaactcaactg

SEQ ID NO: 114293 - RNA, 22 nt, synthetic construct
  source 1..22: mol_type = other RNA
acaaaggttgcagtgagcagag

SEQ ID NO: 114294 - RNA, 22 nt, synthetic construct
  source 1..22: mol_type = other RNA
acaaagtatgagaaatgtctgg

SEQ ID NO: 114295 - RNA, 22 nt, synthetic construct
  source 1..22: mol_type = other RNA
acaaagtccccacatgactggc

SEQ ID NO: 114296 - RNA, 22 nt, synthetic construct
  source 1..22: mol_type = other RNA
acaaagtctttgggtaatttat

SEQ ID NO: 114297 - RNA, 22 nt, synthetic construct
  source 1..22: mol_type = other RNA
acaaataacaccatagctgaag

SEQ ID NO: 114298 - RNA, 22 nt, synthetic construct
  source 1..22: mol_type = other RNA
acaaataactccagcttttatt

SEQ ID NO: 114299 - RNA, 22 nt, synthetic construct
  source 1..22: mol_type = other RNA
acaaataagaagattgagtcag

SEQ ID NO: 114300 - RNA, 22 nt, synthetic construct
  source 1..22: mol_type = other RNA
acaaatcagatttcaggtggta

SEQ ID NO: 114301 - RNA, 22 nt, synthetic construct
  source 1..22: mol_type = other RNA
acaaatccttttcccaggagct

SEQ ID NO: 114302 - RNA, 22 nt, synthetic construct
  source 1..22: mol_type = other RNA
acaaatgaaagtcagctaattt

SEQ ID NO: 114303 - RNA, 22 nt, synthetic construct
  source 1..22: mol_type = other RNA
acaaatgatgaagggttttctg

SEQ ID NO: 114304 - RNA, 22 nt, synthetic construct
  source 1..22: mol_type = other RNA
acaaatggaaccactgtaggcc

SEQ ID NO: 114305 - RNA, 22 nt, synthetic construct
  source 1..22: mol_type = other RNA
acaaatggagtgacttaagcaa

SEQ ID NO: 114306 - RNA, 22 nt, synthetic construct
  source 1..22: mol_type = other RNA
acaaatgttgcagagactggat

SEQ ID NO: 114307 - RNA, 22 nt, synthetic construct
  source 1..22: mol_type = other RNA
acaaattaccatgtttccataa

SEQ ID NO: 114308 - RNA, 22 nt, synthetic construct
  source 1..22: mol_type = other RNA
acaaattagccaggcgtggtgg

SEQ ID NO: 114309 - RNA, 22 nt, synthetic construct
  source 1..22: mol_type = other RNA
acaaattatgactgagatactt

SEQ ID NO: 114310 - RNA, 22 nt, synthetic construct
  source 1..22: mol_type = other RNA
acaaattcatgcaactgaaaac

SEQ ID NO: 114311 - RNA, 22 nt, synthetic construct
  source 1..22: mol_type = other RNA
acaaattccctctacaaaagga

SEQ ID NO: 114312 - RNA, 22 nt, synthetic construct
  source 1..22: mol_type = other RNA
acaaattgcatcaactgcttcc

SEQ ID NO: 114313 - RNA, 22 nt, synthetic construct
  source 1..22: mol_type = other RNA
acaaatttatgttcatgaacct

SEQ ID NO: 114314 - RNA, 22 nt, synthetic construct
  source 1..22: mol_type = other RNA
acaaatttctatagtcattccg

SEQ ID NO: 114315 - RNA, 22 nt, synthetic construct
  source 1..22: mol_type = other RNA
acaacaaaacacacgggtacac

SEQ ID NO: 114316 - RNA, 22 nt, synthetic construct
  source 1..22: mol_type = other RNA
acaacaaaatacccacaagaaa

SEQ ID NO: 114317 - RNA, 22 nt, synthetic construct
  source 1..22: mol_type = other RNA
acaacaacaaaacacacgggta

SEQ ID NO: 114318 - RNA, 22 nt, synthetic construct
  source 1..22: mol_type = other RNA
acaacaacaaaacatgttttca

SEQ ID NO: 114319 - RNA, 22 nt, synthetic construct
  source 1..22: mol_type = other RNA
acaacaacaaaatacccacaag

SEQ ID NO: 114320 - RNA, 22 nt, synthetic construct
  source 1..22: mol_type = other RNA
acaacaacaacaaaacacacgg

SEQ ID NO: 114321 - RNA, 22 nt, synthetic construct
  source 1..22: mol_type = other RNA
acaacaacaacaaaacatgttt

SEQ ID NO: 114322 - RNA, 22 nt, synthetic construct
  source 1..22: mol_type = other RNA
acaacaacaacaaaatacccac

SEQ ID NO: 114323 - RNA, 22 nt, synthetic construct
  source 1..22: mol_type = other RNA
acaacaacaacaacaaaacaca

SEQ ID NO: 114324 - RNA, 22 nt, synthetic construct
  source 1..22: mol_type = other RNA
acaacaacaacaacaaaacatg

SEQ ID NO: 114325 - RNA, 22 nt, synthetic construct
  source 1..22: mol_type = other RNA
acaacacatgcacactagacct

SEQ ID NO: 114326 - RNA, 22 nt, synthetic construct
  source 1..22: mol_type = other RNA
acaacactaaccaacattgagt

SEQ ID NO: 114327 - RNA, 22 nt, synthetic construct
  source 1..22: mol_type = other RNA
acaacactcagatatcaatctg

SEQ ID NO: 114328 - RNA, 22 nt, synthetic construct
  source 1..22: mol_type = other RNA
acaacagcaaggctcctgcaga

SEQ ID NO: 114329 - RNA, 22 nt, synthetic construct
  source 1..22: mol_type = other RNA
acaacagcaccttttttggtat

SEQ ID NO: 114330 - RNA, 22 nt, synthetic construct
  source 1..22: mol_type = other RNA
acaacaggcctgagccgtcggt

SEQ ID NO: 114331 - RNA, 22 nt, synthetic construct
  source 1..22: mol_type = other RNA
acaacagtgtgagaccgtgtct

SEQ ID NO: 114332 - RNA, 22 nt, synthetic construct
  source 1..22: mol_type = other RNA
acaacataccaaaacccttggg

SEQ ID NO: 114333 - RNA, 22 nt, synthetic construct
  source 1..22: mol_type = other RNA
acaacatggtagaccatataat

SEQ ID NO: 114334 - RNA, 22 nt, synthetic construct
  source 1..22: mol_type = other RNA
acaacattcatccctctaaata

SEQ ID NO: 114335 - RNA, 22 nt, synthetic construct
  source 1..22: mol_type = other RNA
acaacattgtgcaaccatcccc

SEQ ID NO: 114336 - RNA, 22 nt, synthetic construct
  source 1..22: mol_type = other RNA
acaaccactgatggaattctga

SEQ ID NO: 114337 - RNA, 22 nt, synthetic construct
  source 1..22: mol_type = other RNA
acaaccactggggagtgtgccc

SEQ ID NO: 114338 - RNA, 22 nt, synthetic construct
  source 1..22: mol_type = other RNA
acaaccataatgagtaacatgt

SEQ ID NO: 114339 - RNA, 22 nt, synthetic construct
  source 1..22: mol_type = other RNA
acaaccggaaaatgcttaacaa

SEQ ID NO: 114340 - RNA, 22 nt, synthetic construct
  source 1..22: mol_type = other RNA
acaacctaaatgtccatcgaga

SEQ ID NO: 114341 - RNA, 22 nt, synthetic construct
  source 1..22: mol_type = other RNA
acaacctgtctcaaaaataaat

SEQ ID NO: 114342 - RNA, 22 nt, synthetic construct
  source 1..22: mol_type = other RNA
acaacgatttcttaaaaatgac

SEQ ID NO: 114343 - RNA, 22 nt, synthetic construct
  source 1..22: mol_type = other RNA
acaacgctgtggctaacaatca

SEQ ID NO: 114344 - RNA, 22 nt, synthetic construct
  source 1..22: mol_type = other RNA
acaacgtgcaggtttgttacac

SEQ ID NO: 114345 - RNA, 22 nt, synthetic construct
  source 1..22: mol_type = other RNA
acaactaataattgcttttgct

SEQ ID NO: 114346 - RNA, 22 nt, synthetic construct
  source 1..22: mol_type = other RNA
acaactagtaagtaaaatcgga

SEQ ID NO: 114347 - RNA, 22 nt, synthetic construct
  source 1..22: mol_type = other RNA
acaactcaaacgtccatcaaca

SEQ ID NO: 114348 - RNA, 22 nt, synthetic construct
  source 1..22: mol_type = other RNA
acaactctaataacagcctaag

SEQ ID NO: 114349 - RNA, 22 nt, synthetic construct
  source 1..22: mol_type = other RNA
acaactctgaccattgtgtgga

SEQ ID NO: 114350 - RNA, 22 nt, synthetic construct
  source 1..22: mol_type = other RNA
acaactgactctaaagtctatg

SEQ ID NO: 114351 - RNA, 22 nt, synthetic construct
  source 1..22: mol_type = other RNA
acaactgctcataatagtctca

SEQ ID NO: 114352 - RNA, 22 nt, synthetic construct
  source 1..22: mol_type = other RNA
acaactgggagaatggcaaggc

SEQ ID NO: 114353 - RNA, 22 nt, synthetic construct
  source 1..22: mol_type = other RNA
acaactggtttctgcatactta

SEQ ID NO: 114354 - RNA, 22 nt, synthetic construct
  source 1..22: mol_type = other RNA
acaacttgtatgaaattagttc

SEQ ID NO: 114355 - RNA, 22 nt, synthetic construct
  source 1..22: mol_type = other RNA
acaagaaaaacctaaacctgtg

SEQ ID NO: 114356 - RNA, 22 nt, synthetic construct
  source 1..22: mol_type = other RNA
acaagaaaatctgacaatttgc

SEQ ID NO: 114357 - RNA, 22 nt, synthetic construct
  source 1..22: mol_type = other RNA
acaagaaagggtagctttgatg

SEQ ID NO: 114358 - RNA, 22 nt, synthetic construct
  source 1..22: mol_type = other RNA
acaagaagaaaaagcaacttga

SEQ ID NO: 114359 - RNA, 22 nt, synthetic construct
  source 1..22: mol_type = other RNA
acaagaagctgttttggtaaaa

SEQ ID NO: 114360 - RNA, 22 nt, synthetic construct
  source 1..22: mol_type = other RNA
acaagaatcctgctattttatt

SEQ ID NO: 114361 - RNA, 22 nt, synthetic construct
  source 1..22: mol_type = other RNA
acaagaatctttggcaaactta

SEQ ID NO: 114362 - RNA, 22 nt, synthetic construct
  source 1..22: mol_type = other RNA
acaagacagatgtgcttaatct

SEQ ID NO: 114363 - RNA, 22 nt, synthetic construct
  source 1..22: mol_type = other RNA
acaagacataagcattttctaa

SEQ ID NO: 114364 - RNA, 22 nt, synthetic construct
  source 1..22: mol_type = other RNA
acaagaccagcctgggcaatat

SEQ ID NO: 114365 - RNA, 22 nt, synthetic construct
  source 1..22: mol_type = other RNA
acaagacgtgtacataaaataa

SEQ ID NO: 114366 - RNA, 22 nt, synthetic construct
  source 1..22: mol_type = other RNA
acaagactacctaaaacaatct

SEQ ID NO: 114367 - RNA, 22 nt, synthetic construct
  source 1..22: mol_type = other RNA
acaagactcaacatgtgtattt

SEQ ID NO: 114368 - RNA, 22 nt, synthetic construct
  source 1..22: mol_type = other RNA
acaagagaggacagttggcctt

SEQ ID NO: 114369 - RNA, 22 nt, synthetic construct
  source 1..22: mol_type = other RNA
acaagagcagaactccacctca

SEQ ID NO: 114370 - RNA, 22 nt, synthetic construct
  source 1..22: mol_type = other RNA
acaagagcgtcgtacctttcgc

SEQ ID NO: 114371 - RNA, 22 nt, synthetic construct
  source 1..22: mol_type = other RNA
acaagagtctgcagaccaagaa

SEQ ID NO: 114372 - RNA, 22 nt, synthetic construct
  source 1..22: mol_type = other RNA
acaagagttcccctatactgta

SEQ ID NO: 114373 - RNA, 22 nt, synthetic construct
  source 1..22: mol_type = other RNA
acaagatctctatgcagaaatc

SEQ ID NO: 114374 - RNA, 22 nt, synthetic construct
  source 1..22: mol_type = other RNA
acaagattaatcttgcaaaaca

SEQ ID NO: 114375 - RNA, 22 nt, synthetic construct
  source 1..22: mol_type = other RNA
acaagcaaggaagggcttgatc

SEQ ID NO: 114376 - RNA, 22 nt, synthetic construct
  source 1..22: mol_type = other RNA
acaagcacagagtcagaaaatt

SEQ ID NO: 114377 - RNA, 22 nt, synthetic construct
  source 1..22: mol_type = other RNA
acaagcacaggcatctctctaa

SEQ ID NO: 114378 - RNA, 22 nt, synthetic construct
  source 1..22: mol_type = other RNA
acaagccacatgtggttattga

SEQ ID NO: 114379 - RNA, 22 nt, synthetic construct
  source 1..22: mol_type = other RNA
acaagccagggtctgtctcacc

SEQ ID NO: 114380 - RNA, 22 nt, synthetic construct
  source 1..22: mol_type = other RNA
acaagccttgaaaatatactaa

SEQ ID NO: 114381 - RNA, 22 nt, synthetic construct
  source 1..22: mol_type = other RNA
acaaggaaaggatggtttgatt

SEQ ID NO: 114382 - RNA, 22 nt, synthetic construct
  source 1..22: mol_type = other RNA
acaaggaaggtcaaatggtaac

SEQ ID NO: 114383 - RNA, 22 nt, synthetic construct
  source 1..22: mol_type = other RNA
acaaggacaggtcacattctgc

SEQ ID NO: 114384 - RNA, 22 nt, synthetic construct
  source 1..22: mol_type = other RNA
acaaggactggcttcagtgcca

SEQ ID NO: 114385 - RNA, 22 nt, synthetic construct
  source 1..22: mol_type = other RNA
acaaggagacctactaaaagtt

SEQ ID NO: 114386 - RNA, 22 nt, synthetic construct
  source 1..22: mol_type = other RNA
acaaggattaatctttctgaac

SEQ ID NO: 114387 - RNA, 22 nt, synthetic construct
  source 1..22: mol_type = other RNA
acaaggattgaatggaaagaaa

SEQ ID NO: 114388 - RNA, 22 nt, synthetic construct
  source 1..22: mol_type = other RNA
acaaggctagagctcacacgag

SEQ ID NO: 114389 - RNA, 22 nt, synthetic construct
  source 1..22: mol_type = other RNA
acaagggaagaggccacaaagt

SEQ ID NO: 114390 - RNA, 22 nt, synthetic construct
  source 1..22: mol_type = other RNA
acaagggtgacagagccgagca

SEQ ID NO: 114391 - RNA, 22 nt, synthetic construct
  source 1..22: mol_type = other RNA
acaagggttggtgcttccttct

SEQ ID NO: 114392 - RNA, 22 nt, synthetic construct
  source 1..22: mol_type = other RNA
acaaggtcaagagcggcctttg

SEQ ID NO: 114393 - RNA, 22 nt, synthetic construct
  source 1..22: mol_type = other RNA
acaaggtcaatctgaaaaatat

SEQ ID NO: 114394 - RNA, 22 nt, synthetic construct
  source 1..22: mol_type = other RNA
acaaggtcagaagtttggaacc

SEQ ID NO: 114395 - RNA, 22 nt, synthetic construct
  source 1..22: mol_type = other RNA
acaagtaaatgcaatgcaggcg

SEQ ID NO: 114396 - RNA, 22 nt, synthetic construct
  source 1..22: mol_type = other RNA
acaagtacatgaaatactcaaa

SEQ ID NO: 114397 - RNA, 22 nt, synthetic construct
  source 1..22: mol_type = other RNA
acaagtactgcatgattcccct

SEQ ID NO: 114398 - RNA, 22 nt, synthetic construct
  source 1..22: mol_type = other RNA
acaagtagcagggactacagtc

SEQ ID NO: 114399 - RNA, 22 nt, synthetic construct
  source 1..22: mol_type = other RNA
acaagtagtacaaaagtgctgt

SEQ ID NO: 114400 - RNA, 22 nt, synthetic construct
  source 1..22: mol_type = other RNA
acaagtcacaaaaagacaagta

SEQ ID NO: 114401 - RNA, 22 nt, synthetic construct
  source 1..22: mol_type = other RNA
acaagtgggtggatgggtgtag

SEQ ID NO: 114402 - RNA, 22 nt, synthetic construct
  source 1..22: mol_type = other RNA
acaagttacaaacatatgcatg

SEQ ID NO: 114403 - RNA, 22 nt, synthetic construct
  source 1..22: mol_type = other RNA
acaagttcagcatcttcactga

SEQ ID NO: 114404 - RNA, 22 nt, synthetic construct
  source 1..22: mol_type = other RNA
acaagttctcctgtgtgcatgc

SEQ ID NO: 114405 - RNA, 22 nt, synthetic construct
  source 1..22: mol_type = other RNA
acaagttcttacctcaaaggag

SEQ ID NO: 114406 - RNA, 22 nt, synthetic construct
  source 1..22: mol_type = other RNA
acaagttttaacttaagaactg

SEQ ID NO: 114407 - RNA, 22 nt, synthetic construct
  source 1..22: mol_type = other RNA
acaataaatggtgcaggccaga

SEQ ID NO: 114408 - RNA, 22 nt, synthetic construct
  source 1..22: mol_type = other RNA
acaataagacaccgctccacgc

SEQ ID NO: 114409 - RNA, 22 nt, synthetic construct
  source 1..22: mol_type = other RNA
acaataataactacacatcagt

SEQ ID NO: 114410 - RNA, 22 nt, synthetic construct
  source 1..22: mol_type = other RNA
acaataatatgcctcatgcatc

SEQ ID NO: 114411 - RNA, 22 nt, synthetic construct
  source 1..22: mol_type = other RNA
acaataatgcacatgggcatgg

SEQ ID NO: 114412 - RNA, 22 nt, synthetic construct
  source 1..22: mol_type = other RNA
acaataattcttcctgtcttgg

SEQ ID NO: 114413 - RNA, 22 nt, synthetic construct
  source 1..22: mol_type = other RNA
acaatactgcattgtgcactta

SEQ ID NO: 114414 - RNA, 22 nt, synthetic construct
  source 1..22: mol_type = other RNA
acaatactgtctcagtcccaaa

SEQ ID NO: 114415 - RNA, 22 nt, synthetic construct
  source 1..22: mol_type = other RNA
acaatactgttatgacaagact

SEQ ID NO: 114416 - RNA, 22 nt, synthetic construct
  source 1..22: mol_type = other RNA
acaatacttggatcttatctgc

SEQ ID NO: 114417 - RNA, 22 nt, synthetic construct
  source 1..22: mol_type = other RNA
acaatactttagacatgggcta

SEQ ID NO: 114418 - RNA, 22 nt, synthetic construct
  source 1..22: mol_type = other RNA
acaatagcaacaaaacaatcta

SEQ ID NO: 114419 - RNA, 22 nt, synthetic construct
  source 1..22: mol_type = other RNA
acaatagcccagcaggattttt

SEQ ID NO: 114420 - RNA, 22 nt, synthetic construct
  source 1..22: mol_type = other RNA
acaatagctagtgtcttagtct

SEQ ID NO: 114421 - RNA, 22 nt, synthetic construct
  source 1..22: mol_type = other RNA
acaataggaatagtattcagga

SEQ ID NO: 114422 - RNA, 22 nt, synthetic construct
  source 1..22: mol_type = other RNA
acaatataggagactatcgtta

SEQ ID NO: 114423 - RNA, 22 nt, synthetic construct
  source 1..22: mol_type = other RNA
acaatattacagtaaggtttcc

SEQ ID NO: 114424 - RNA, 22 nt, synthetic construct
  source 1..22: mol_type = other RNA
acaatcaaaccatcctttcctt

SEQ ID NO: 114425 - RNA, 22 nt, synthetic construct
  source 1..22: mol_type = other RNA
acaatcaaatttaacacacaac

SEQ ID NO: 114426 - RNA, 22 nt, synthetic construct
  source 1..22: mol_type = other RNA
acaatcaacaggtagctgcttt

SEQ ID NO: 114427 - RNA, 22 nt, synthetic construct
  source 1..22: mol_type = other RNA
acaatcatagctcactagagct

SEQ ID NO: 114428 - RNA, 22 nt, synthetic construct
  source 1..22: mol_type = other RNA
acaatccaagtttctagccata

SEQ ID NO: 114429 - RNA, 22 nt, synthetic construct
  source 1..22: mol_type = other RNA
acaatccttctaatcagtaact

SEQ ID NO: 114430 - RNA, 22 nt, synthetic construct
  source 1..22: mol_type = other RNA
acaatcgcaatccaaaatcctc

SEQ ID NO: 114431 - RNA, 22 nt, synthetic construct
  source 1..22: mol_type = other RNA
acaatctaattcgaaaatgggc

SEQ ID NO: 114432 - RNA, 22 nt, synthetic construct
  source 1..22: mol_type = other RNA
acaatctacagattcaatgcaa

SEQ ID NO: 114433 - RNA, 22 nt, synthetic construct
  source 1..22: mol_type = other RNA
acaatctctggggttagggcct

SEQ ID NO: 114434 - RNA, 22 nt, synthetic construct
  source 1..22: mol_type = other RNA
acaatcttacccccatcacact

SEQ ID NO: 114435 - RNA, 22 nt, synthetic construct
  source 1..22: mol_type = other RNA
acaatcttgaaaggggccaggt

SEQ ID NO: 114436 - RNA, 22 nt, synthetic construct
  source 1..22: mol_type = other RNA
acaatcttgagacggaagactc

SEQ ID NO: 114437 - RNA, 22 nt, synthetic construct
  source 1..22: mol_type = other RNA
acaatgaatatgtactacctat

SEQ ID NO: 114438 - RNA, 22 nt, synthetic construct
  source 1..22: mol_type = other RNA
acaatgaattagcaatgcgaat

SEQ ID NO: 114439 - RNA, 22 nt, synthetic construct
  source 1..22: mol_type = other RNA
acaatgagacatttgagggtgc

SEQ ID NO: 114440 - RNA, 22 nt, synthetic construct
  source 1..22: mol_type = other RNA
acaatgagaccccatctctacc

SEQ ID NO: 114441 - RNA, 22 nt, synthetic construct
  source 1..22: mol_type = other RNA
acaatgcagtattgttaactgt

SEQ ID NO: 114442 - RNA, 22 nt, synthetic construct
  source 1..22: mol_type = other RNA
acaatgccagggcgctcctctc

SEQ ID NO: 114443 - RNA, 22 nt, synthetic construct
  source 1..22: mol_type = other RNA
acaatgcctgccgcagagcaag

SEQ ID NO: 114444 - RNA, 22 nt, synthetic construct
  source 1..22: mol_type = other RNA
acaatgcgtttgttagatctgg

SEQ ID NO: 114445 - RNA, 22 nt, synthetic construct
  source 1..22: mol_type = other RNA
acaatgctgctatgaaaattgg

SEQ ID NO: 114446 - RNA, 22 nt, synthetic construct
  source 1..22: mol_type = other RNA
acaatggaaatgaagtattgat

SEQ ID NO: 114447 - RNA, 22 nt, synthetic construct
  source 1..22: mol_type = other RNA
acaatggaatagaagggagaac

SEQ ID NO: 114448 - RNA, 22 nt, synthetic construct
  source 1..22: mol_type = other RNA
acaatggaatattactcagtct

SEQ ID NO: 114449 - RNA, 22 nt, synthetic construct
  source 1..22: mol_type = other RNA
acaatggggctttactgtatta

SEQ ID NO: 114450 - RNA, 22 nt, synthetic construct
  source 1..22: mol_type = other RNA
acaatggtcagagttgtatctg

SEQ ID NO: 114451 - RNA, 22 nt, synthetic construct
  source 1..22: mol_type = other RNA
acaatggttcataatatatcac

SEQ ID NO: 114452 - RNA, 22 nt, synthetic construct
  source 1..22: mol_type = other RNA
acaatgtaaggtgcacgctgtg

SEQ ID NO: 114453 - RNA, 22 nt, synthetic construct
  source 1..22: mol_type = other RNA
acaatgtctttggctcttagaa

SEQ ID NO: 114454 - RNA, 22 nt, synthetic construct
  source 1..22: mol_type = other RNA
acaatgtgagccacatacatag

SEQ ID NO: 114455 - RNA, 22 nt, synthetic construct
  source 1..22: mol_type = other RNA
acaatgtggagttggtgcaagg

SEQ ID NO: 114456 - RNA, 22 nt, synthetic construct
  source 1..22: mol_type = other RNA
acaatgttgtggatgtccttaa

SEQ ID NO: 114457 - RNA, 22 nt, synthetic construct
  source 1..22: mol_type = other RNA
acaattacacatctcccatacc

SEQ ID NO: 114458 - RNA, 22 nt, synthetic construct
  source 1..22: mol_type = other RNA
acaattacttgagagcagagac

SEQ ID NO: 114459 - RNA, 22 nt, synthetic construct
  source 1..22: mol_type = other RNA
acaattagcacctttattaact

SEQ ID NO: 114460 - RNA, 22 nt, synthetic construct
  source 1..22: mol_type = other RNA
acaattaggctgtttgagatct

SEQ ID NO: 114461 - RNA, 22 nt, synthetic construct
  source 1..22: mol_type = other RNA
acaattcaacaatagcaacaaa

SEQ ID NO: 114462 - RNA, 22 nt, synthetic construct
  source 1..22: mol_type = other RNA
acaattcaacagctactatgaa

SEQ ID NO: 114463 - RNA, 22 nt, synthetic construct
  source 1..22: mol_type = other RNA
acaattcacagaatatactcag

SEQ ID NO: 114464 - RNA, 22 nt, synthetic construct
  source 1..22: mol_type = other RNA
acaattcctttctaggcatcta

SEQ ID NO: 114465 - RNA, 22 nt, synthetic construct
  source 1..22: mol_type = other RNA
acaattcggtggcattaaggac

SEQ ID NO: 114466 - RNA, 22 nt, synthetic construct
  source 1..22: mol_type = other RNA
acaattgaatggggatgcaaca

SEQ ID NO: 114467 - RNA, 22 nt, synthetic construct
  source 1..22: mol_type = other RNA
acaattgcactccagcctaggc

SEQ ID NO: 114468 - RNA, 22 nt, synthetic construct
  source 1..22: mol_type = other RNA
acaattggtgaatctgagtaaa

SEQ ID NO: 114469 - RNA, 22 nt, synthetic construct
  source 1..22: mol_type = other RNA
acaatttcagggagaattggta

SEQ ID NO: 114470 - RNA, 22 nt, synthetic construct
  source 1..22: mol_type = other RNA
acaatttgaggtagcacaacta

SEQ ID NO: 114471 - RNA, 22 nt, synthetic construct
  source 1..22: mol_type = other RNA
acaatttgccaaaatgattttc

SEQ ID NO: 114472 - RNA, 22 nt, synthetic construct
  source 1..22: mol_type = other RNA
acaattttctctcatgttgggt

SEQ ID NO: 114473 - RNA, 22 nt, synthetic construct
  source 1..22: mol_type = other RNA
acaattttcttaccctttactc

SEQ ID NO: 114474 - RNA, 22 nt, synthetic construct
  source 1..22: mol_type = other RNA
acacaaaaagatctgtggactt

SEQ ID NO: 114475 - RNA, 22 nt, synthetic construct
  source 1..22: mol_type = other RNA
acacaaaacaaatggaaccact

SEQ ID NO: 114476 - RNA, 22 nt, synthetic construct
  source 1..22: mol_type = other RNA
acacaaaagagctgggcccgca

SEQ ID NO: 114477 - RNA, 22 nt, synthetic construct
  source 1..22: mol_type = other RNA
acacaaaatcagatatgaaaga

SEQ ID NO: 114478 - RNA, 22 nt, synthetic construct
  source 1..22: mol_type = other RNA
acacaaaccaacaacaaaaaat

SEQ ID NO: 114479 - RNA, 22 nt, synthetic construct
  source 1..22: mol_type = other RNA
acacaaactgcagaatgacaga

SEQ ID NO: 114480 - RNA, 22 nt, synthetic construct
  source 1..22: mol_type = other RNA
acacaaagccttctctactctg

SEQ ID NO: 114481 - RNA, 22 nt, synthetic construct
  source 1..22: mol_type = other RNA
acacaaaggactggaactcatt

SEQ ID NO: 114482 - RNA, 22 nt, synthetic construct
  source 1..22: mol_type = other RNA
acacaaattagccaggcgtggt

SEQ ID NO: 114483 - RNA, 22 nt, synthetic construct
  source 1..22: mol_type = other RNA
acacaaattatgactgagatac

SEQ ID NO: 114484 - RNA, 22 nt, synthetic construct
  source 1..22: mol_type = other RNA
acacaacaatgaattctcatat

SEQ ID NO: 114485 - RNA, 22 nt, synthetic construct
  source 1..22: mol_type = other RNA
acacaacactcagatatcaatc

SEQ ID NO: 114486 - RNA, 22 nt, synthetic construct
  source 1..22: mol_type = other RNA
acacaacataccaaaacccttg

SEQ ID NO: 114487 - RNA, 22 nt, synthetic construct
  source 1..22: mol_type = other RNA
acacaacatgttttatttctgt

SEQ ID NO: 114488 - RNA, 22 nt, synthetic construct
  source 1..22: mol_type = other RNA
acacaagatctctatgcagaaa

SEQ ID NO: 114489 - RNA, 22 nt, synthetic construct
  source 1..22: mol_type = other RNA
acacaaggaaggtcaaatggta

SEQ ID NO: 114490 - RNA, 22 nt, synthetic construct
  source 1..22: mol_type = other RNA
acacaaggacaggtcacattct

SEQ ID NO: 114491 - RNA, 22 nt, synthetic construct
  source 1..22: mol_type = other RNA
acacaagtattaacgaattctt

SEQ ID NO: 114492 - RNA, 22 nt, synthetic construct
  source 1..22: mol_type = other RNA
acacaagtgtttcatttacaaa

SEQ ID NO: 114493 - RNA, 22 nt, synthetic construct
  source 1..22: mol_type = other RNA
acacaatccaagtttctagcca

SEQ ID NO: 114494 - RNA, 22 nt, synthetic construct
  source 1..22: mol_type = other RNA
acacaatcttgagacggaagac

SEQ ID NO: 114495 - RNA, 22 nt, synthetic construct
  source 1..22: mol_type = other RNA
acacaatggtcagagttgtatc

SEQ ID NO: 114496 - RNA, 22 nt, synthetic construct
  source 1..22: mol_type = other RNA
acacaatttgaggtagcacaac

SEQ ID NO: 114497 - RNA, 22 nt, synthetic construct
  source 1..22: mol_type = other RNA
acacacaaaccaacaacaaaaa

SEQ ID NO: 114498 - RNA, 22 nt, synthetic construct
  source 1..22: mol_type = other RNA
acacacaacaatgaattctcat

SEQ ID NO: 114499 - RNA, 22 nt, synthetic construct
  source 1..22: mol_type = other RNA
acacacaatccaagtttctagc

SEQ ID NO: 114500 - RNA, 22 nt, synthetic construct
  source 1..22: mol_type = other RNA
acacacaatttgaggtagcaca

SEQ ID NO: 114501 - RNA, 22 nt, synthetic construct
  source 1..22: mol_type = other RNA
acacacacagtcctgtgtttct

SEQ ID NO: 114502 - RNA, 22 nt, synthetic construct
  source 1..22: mol_type = other RNA
acacacacctaccaccatgctt

SEQ ID NO: 114503 - RNA, 22 nt, synthetic construct
  source 1..22: mol_type = other RNA
acacacacctattcataggtaa

SEQ ID NO: 114504 - RNA, 22 nt, synthetic construct
  source 1..22: mol_type = other RNA
acacacacgtttatattccttt

SEQ ID NO: 114505 - RNA, 22 nt, synthetic construct
  source 1..22: mol_type = other RNA
acacacagtcctgtgtttctgc

SEQ ID NO: 114506 - RNA, 22 nt, synthetic construct
  source 1..22: mol_type = other RNA
acacacataagggggaatctac

SEQ ID NO: 114507 - RNA, 22 nt, synthetic construct
  source 1..22: mol_type = other RNA
acacacatcagacacctacatt

SEQ ID NO: 114508 - RNA, 22 nt, synthetic construct
  source 1..22: mol_type = other RNA
acacacattagcctagacctca

SEQ ID NO: 114509 - RNA, 22 nt, synthetic construct
  source 1..22: mol_type = other RNA
acacaccaaatcatgaaagtgg

SEQ ID NO: 114510 - RNA, 22 nt, synthetic construct
  source 1..22: mol_type = other RNA
acacaccactacacccggctaa

SEQ ID NO: 114511 - RNA, 22 nt, synthetic construct
  source 1..22: mol_type = other RNA
acacaccatgacagagttccac

SEQ ID NO: 114512 - RNA, 22 nt, synthetic construct
  source 1..22: mol_type = other RNA
acacacccttggtaaacagcag

SEQ ID NO: 114513 - RNA, 22 nt, synthetic construct
  source 1..22: mol_type = other RNA
acacaccctttcttaggaagct

SEQ ID NO: 114514 - RNA, 22 nt, synthetic construct
  source 1..22: mol_type = other RNA
acacacctaccaccatgcttgg

SEQ ID NO: 114515 - RNA, 22 nt, synthetic construct
  source 1..22: mol_type = other RNA
acacacctattcataggtaata

SEQ ID NO: 114516 - RNA, 22 nt, synthetic construct
  source 1..22: mol_type = other RNA
acacacctgaaattctcaaatg

SEQ ID NO: 114517 - RNA, 22 nt, synthetic construct
  source 1..22: mol_type = other RNA
acacacgagtattcaagtttca

SEQ ID NO: 114518 - RNA, 22 nt, synthetic construct
  source 1..22: mol_type = other RNA
acacacgggctgggcgcgatgg

SEQ ID NO: 114519 - RNA, 22 nt, synthetic construct
  source 1..22: mol_type = other RNA
acacacgggtacacatcctaat

SEQ ID NO: 114520 - RNA, 22 nt, synthetic construct
  source 1..22: mol_type = other RNA
acacacgtttatattcctttta

SEQ ID NO: 114521 - RNA, 22 nt, synthetic construct
  source 1..22: mol_type = other RNA
acacactagccactgggtctta

SEQ ID NO: 114522 - RNA, 22 nt, synthetic construct
  source 1..22: mol_type = other RNA
acacactagctgacccactggt

SEQ ID NO: 114523 - RNA, 22 nt, synthetic construct
  source 1..22: mol_type = other RNA
acacactcgtgtatgatttcta

SEQ ID NO: 114524 - RNA, 22 nt, synthetic construct
  source 1..22: mol_type = other RNA
acacactgaaacaatcgcaatc

SEQ ID NO: 114525 - RNA, 22 nt, synthetic construct
  source 1..22: mol_type = other RNA
acacactgctcttctattccag

SEQ ID NO: 114526 - RNA, 22 nt, synthetic construct
  source 1..22: mol_type = other RNA
acacactgggtaaacaagactc

SEQ ID NO: 114527 - RNA, 22 nt, synthetic construct
  source 1..22: mol_type = other RNA
acacagaaagcctcttcagaag

SEQ ID NO: 114528 - RNA, 22 nt, synthetic construct
  source 1..22: mol_type = other RNA
acacagaacactaaaggggatt

SEQ ID NO: 114529 - RNA, 22 nt, synthetic construct
  source 1..22: mol_type = other RNA
acacagacatgaacaatccttc

SEQ ID NO: 114530 - RNA, 22 nt, synthetic construct
  source 1..22: mol_type = other RNA
acacagagaacagcattatctt

SEQ ID NO: 114531 - RNA, 22 nt, synthetic construct
  source 1..22: mol_type = other RNA
acacagagggagcgccacgtga

SEQ ID NO: 114532 - RNA, 22 nt, synthetic construct
  source 1..22: mol_type = other RNA
acacaggactgtgtgtgtccag

SEQ ID NO: 114533 - RNA, 22 nt, synthetic construct
  source 1..22: mol_type = other RNA
acacaggagaacttgtctcgga

SEQ ID NO: 114534 - RNA, 22 nt, synthetic construct
  source 1..22: mol_type = other RNA
acacaggctgaagggaggaaaa

SEQ ID NO: 114535 - RNA, 22 nt, synthetic construct
  source 1..22: mol_type = other RNA
acacagggaaaactacatgtaa

SEQ ID NO: 114536 - RNA, 22 nt, synthetic construct
  source 1..22: mol_type = other RNA
acacagggactgatgaagaacc

SEQ ID NO: 114537 - RNA, 22 nt, synthetic construct
  source 1..22: mol_type = other RNA
acacaggtagacatgtgccatg

SEQ ID NO: 114538 - RNA, 22 nt, synthetic construct
  source 1..22: mol_type = other RNA
acacagtacaaggctagagctc

SEQ ID NO: 114539 - RNA, 22 nt, synthetic construct
  source 1..22: mol_type = other RNA
acacagtcctgtgtttctgcta

SEQ ID NO: 114540 - RNA, 22 nt, synthetic construct
  source 1..22: mol_type = other RNA
acacagtgttgagaaagcacat

SEQ ID NO: 114541 - RNA, 22 nt, synthetic construct
  source 1..22: mol_type = other RNA
acacagttctagttctaataaa

SEQ ID NO: 114542 - RNA, 22 nt, synthetic construct
  source 1..22: mol_type = other RNA
acacagtttgagaagccacaca

SEQ ID NO: 114543 - RNA, 22 nt, synthetic construct
  source 1..22: mol_type = other RNA
acacataagggggaatctactc

SEQ ID NO: 114544 - RNA, 22 nt, synthetic construct
  source 1..22: mol_type = other RNA
acacatacaaaccaaaaaatgt

SEQ ID NO: 114545 - RNA, 22 nt, synthetic construct
  source 1..22: mol_type = other RNA
acacatacacagggaaaactac

SEQ ID NO: 114546 - RNA, 22 nt, synthetic construct
  source 1..22: mol_type = other RNA
acacatactgaaagacagacct

SEQ ID NO: 114547 - RNA, 22 nt, synthetic construct
  source 1..22: mol_type = other RNA
acacatatctttaggtgttttt

SEQ ID NO: 114548 - RNA, 22 nt, synthetic construct
  source 1..22: mol_type = other RNA
acacatatttatcaacacatag

SEQ ID NO: 114549 - RNA, 22 nt, synthetic construct
  source 1..22: mol_type = other RNA
acacatcagacacctacattaa

SEQ ID NO: 114550 - RNA, 22 nt, synthetic construct
  source 1..22: mol_type = other RNA
acacatcagattttgaagattt

SEQ ID NO: 114551 - RNA, 22 nt, synthetic construct
  source 1..22: mol_type = other RNA
acacatcagcgctaagtgcatt

SEQ ID NO: 114552 - RNA, 22 nt, synthetic construct
  source 1..22: mol_type = other RNA
acacatcagtgctgctctgacg

SEQ ID NO: 114553 - RNA, 22 nt, synthetic construct
  source 1..22: mol_type = other RNA
acacatccacgcgtaagggtac

SEQ ID NO: 114554 - RNA, 22 nt, synthetic construct
  source 1..22: mol_type = other RNA
acacatccagaagtcacttttt

SEQ ID NO: 114555 - RNA, 22 nt, synthetic construct
  source 1..22: mol_type = other RNA
acacatcctaatacagtaaagc

SEQ ID NO: 114556 - RNA, 22 nt, synthetic construct
  source 1..22: mol_type = other RNA
acacatctcccataccacctgt

SEQ ID NO: 114557 - RNA, 22 nt, synthetic construct
  source 1..22: mol_type = other RNA
acacatgaacctgcatggtgta

SEQ ID NO: 114558 - RNA, 22 nt, synthetic construct
  source 1..22: mol_type = other RNA
acacatgcacactagacctttc

SEQ ID NO: 114559 - RNA, 22 nt, synthetic construct
  source 1..22: mol_type = other RNA
acacatggcatcggggcctaca

SEQ ID NO: 114560 - RNA, 22 nt, synthetic construct
  source 1..22: mol_type = other RNA
acacatggggcattaatttttt

SEQ ID NO: 114561 - RNA, 22 nt, synthetic construct
  source 1..22: mol_type = other RNA
acacatgtcagccacaagacat

SEQ ID NO: 114562 - RNA, 22 nt, synthetic construct
  source 1..22: mol_type = other RNA
acacatgtcatgggccgggcgt

SEQ ID NO: 114563 - RNA, 22 nt, synthetic construct
  source 1..22: mol_type = other RNA
acacatgttgagtcttgtttac

SEQ ID NO: 114564 - RNA, 22 nt, synthetic construct
  source 1..22: mol_type = other RNA
acacattaactatggacatgag

SEQ ID NO: 114565 - RNA, 22 nt, synthetic construct
  source 1..22: mol_type = other RNA
acacattaataagatcatacac

SEQ ID NO: 114566 - RNA, 22 nt, synthetic construct
  source 1..22: mol_type = other RNA
acacattagcctagacctcaaa

SEQ ID NO: 114567 - RNA, 22 nt, synthetic construct
  source 1..22: mol_type = other RNA
acacattaggctctgggtcaga

SEQ ID NO: 114568 - RNA, 22 nt, synthetic construct
  source 1..22: mol_type = other RNA
acacattcaaaattgttctaac

SEQ ID NO: 114569 - RNA, 22 nt, synthetic construct
  source 1..22: mol_type = other RNA
acacattccagaccagcagttc

SEQ ID NO: 114570 - RNA, 22 nt, synthetic construct
  source 1..22: mol_type = other RNA
acacatttttgacagccacgtg

SEQ ID NO: 114571 - RNA, 22 nt, synthetic construct
  source 1..22: mol_type = other RNA
acaccaaaaaagcaccagttat

SEQ ID NO: 114572 - RNA, 22 nt, synthetic construct
  source 1..22: mol_type = other RNA
acaccaaaactacaggcaacaa

SEQ ID NO: 114573 - RNA, 22 nt, synthetic construct
  source 1..22: mol_type = other RNA
acaccaaactcaaaaggacata

SEQ ID NO: 114574 - RNA, 22 nt, synthetic construct
  source 1..22: mol_type = other RNA
acaccaaatcatgaaagtggag

SEQ ID NO: 114575 - RNA, 22 nt, synthetic construct
  source 1..22: mol_type = other RNA
acaccaacacaaagccttctct

SEQ ID NO: 114576 - RNA, 22 nt, synthetic construct
  source 1..22: mol_type = other RNA
acaccaacatggcacatgtcta

SEQ ID NO: 114577 - RNA, 22 nt, synthetic construct
  source 1..22: mol_type = other RNA
acaccaagacatgttaggttga

SEQ ID NO: 114578 - RNA, 22 nt, synthetic construct
  source 1..22: mol_type = other RNA
acaccaagcaacactaaagatt

SEQ ID NO: 114579 - RNA, 22 nt, synthetic construct
  source 1..22: mol_type = other RNA
acaccaaggtttctctccaagg

SEQ ID NO: 114580 - RNA, 22 nt, synthetic construct
  source 1..22: mol_type = other RNA
acaccacatccagctaattttc

SEQ ID NO: 114581 - RNA, 22 nt, synthetic construct
  source 1..22: mol_type = other RNA
acaccactacacccggctaatt

SEQ ID NO: 114582 - RNA, 22 nt, synthetic construct
  source 1..22: mol_type = other RNA
acaccagaactacacattccag

SEQ ID NO: 114583 - RNA, 22 nt, synthetic construct
  source 1..22: mol_type = other RNA
acaccagatactcatgcttgct

SEQ ID NO: 114584 - RNA, 22 nt, synthetic construct
  source 1..22: mol_type = other RNA
acaccagtaagattctgtctct

SEQ ID NO: 114585 - RNA, 22 nt, synthetic construct
  source 1..22: mol_type = other RNA
acaccatagctgaaggcactgt

SEQ ID NO: 114586 - RNA, 22 nt, synthetic construct
  source 1..22: mol_type = other RNA
acaccatgacagagttccacct

SEQ ID NO: 114587 - RNA, 22 nt, synthetic construct
  source 1..22: mol_type = other RNA
acaccatgcaggttcatgtgtg

SEQ ID NO: 114588 - RNA, 22 nt, synthetic construct
  source 1..22: mol_type = other RNA
acaccatggcaggtttcaagtg

SEQ ID NO: 114589 - RNA, 22 nt, synthetic construct
  source 1..22: mol_type = other RNA
acaccatttagatcatcttata

SEQ ID NO: 114590 - RNA, 22 nt, synthetic construct
  source 1..22: mol_type = other RNA
acacccagtatacacgtattta

SEQ ID NO: 114591 - RNA, 22 nt, synthetic construct
  source 1..22: mol_type = other RNA
acacccagttatctctgccctc

SEQ ID NO: 114592 - RNA, 22 nt, synthetic construct
  source 1..22: mol_type = other RNA
acacccagttcaccagtttcta

SEQ ID NO: 114593 - RNA, 22 nt, synthetic construct
  source 1..22: mol_type = other RNA
acacccatccacccacttgtcc

SEQ ID NO: 114594 - RNA, 22 nt, synthetic construct
  source 1..22: mol_type = other RNA
acacccgaagaggacgattttt

SEQ ID NO: 114595 - RNA, 22 nt, synthetic construct
  source 1..22: mol_type = other RNA
acacccgacccactagtgaagt

SEQ ID NO: 114596 - RNA, 22 nt, synthetic construct
  source 1..22: mol_type = other RNA
acacccggctaattaaacaaac

SEQ ID NO: 114597 - RNA, 22 nt, synthetic construct
  source 1..22: mol_type = other RNA
acaccctaggtagggttggggt

SEQ ID NO: 114598 - RNA, 22 nt, synthetic construct
  source 1..22: mol_type = other RNA
acaccctcctaccttccaaagt

SEQ ID NO: 114599 - RNA, 22 nt, synthetic construct
  source 1..22: mol_type = other RNA
acaccctgggaaagcctggctt

SEQ ID NO: 114600 - RNA, 22 nt, synthetic construct
  source 1..22: mol_type = other RNA
acacccttgaaaatttccagca

SEQ ID NO: 114601 - RNA, 22 nt, synthetic construct
  source 1..22: mol_type = other RNA
acacccttggtaaacagcagtc

SEQ ID NO: 114602 - RNA, 22 nt, synthetic construct
  source 1..22: mol_type = other RNA
acaccctttcttaggaagctat

SEQ ID NO: 114603 - RNA, 22 nt, synthetic construct
  source 1..22: mol_type = other RNA
acaccgctccacgcccattagg

SEQ ID NO: 114604 - RNA, 22 nt, synthetic construct
  source 1..22: mol_type = other RNA
acaccgctgcattccagcctgg

SEQ ID NO: 114605 - RNA, 22 nt, synthetic construct
  source 1..22: mol_type = other RNA
acacctaaagatatgtgtagga

SEQ ID NO: 114606 - RNA, 22 nt, synthetic construct
  source 1..22: mol_type = other RNA
acacctacattaatctcatcca

SEQ ID NO: 114607 - RNA, 22 nt, synthetic construct
  source 1..22: mol_type = other RNA
acacctaccaccatgcttggct

SEQ ID NO: 114608 - RNA, 22 nt, synthetic construct
  source 1..22: mol_type = other RNA
acacctaggcctattttaggct

SEQ ID NO: 114609 - RNA, 22 nt, synthetic construct
  source 1..22: mol_type = other RNA
acacctattcataggtaatact

SEQ ID NO: 114610 - RNA, 22 nt, synthetic construct
  source 1..22: mol_type = other RNA
acacctcaaactagaaaaagaa

SEQ ID NO: 114611 - RNA, 22 nt, synthetic construct
  source 1..22: mol_type = other RNA
acacctcagttaaacccaacaa

SEQ ID NO: 114612 - RNA, 22 nt, synthetic construct
  source 1..22: mol_type = other RNA
acacctgaaattctcaaatgaa

SEQ ID NO: 114613 - RNA, 22 nt, synthetic construct
  source 1..22: mol_type = other RNA
acacctgaggggtcttatgctg

SEQ ID NO: 114614 - RNA, 22 nt, synthetic construct
  source 1..22: mol_type = other RNA
acacctgcagtggcgtgtgccc

SEQ ID NO: 114615 - RNA, 22 nt, synthetic construct
  source 1..22: mol_type = other RNA
acacctggatcaagtgggattt

SEQ ID NO: 114616 - RNA, 22 nt, synthetic construct
  source 1..22: mol_type = other RNA
acacctggcccctttcaagatt

SEQ ID NO: 114617 - RNA, 22 nt, synthetic construct
  source 1..22: mol_type = other RNA
acacctggctaatttttaaatg

SEQ ID NO: 114618 - RNA, 22 nt, synthetic construct
  source 1..22: mol_type = other RNA
acacctgggtatacagcaaaag

SEQ ID NO: 114619 - RNA, 22 nt, synthetic construct
  source 1..22: mol_type = other RNA
acacctgtttaaaaagaaaaag

SEQ ID NO: 114620 - RNA, 22 nt, synthetic construct
  source 1..22: mol_type = other RNA
acaccttacactcaaaagccat

SEQ ID NO: 114621 - RNA, 22 nt, synthetic construct
  source 1..22: mol_type = other RNA
acaccttgaacatgaacgagaa

SEQ ID NO: 114622 - RNA, 22 nt, synthetic construct
  source 1..22: mol_type = other RNA
acaccttgaactgggacttcta

SEQ ID NO: 114623 - RNA, 22 nt, synthetic construct
  source 1..22: mol_type = other RNA
acaccttgggaggctgaggctg

SEQ ID NO: 114624 - RNA, 22 nt, synthetic construct
  source 1..22: mol_type = other RNA
acacctttgtattcatccagtt

SEQ ID NO: 114625 - RNA, 22 nt, synthetic construct
  source 1..22: mol_type = other RNA
acacgaaaatatccctggggtt

SEQ ID NO: 114626 - RNA, 22 nt, synthetic construct
  source 1..22: mol_type = other RNA
acacgagaaggacagcttccac

SEQ ID NO: 114627 - RNA, 22 nt, synthetic construct
  source 1..22: mol_type = other RNA
acacgagtattcaagtttcacc

SEQ ID NO: 114628 - RNA, 22 nt, synthetic construct
  source 1..22: mol_type = other RNA
acacgagtgtgtttcgcaaagt

SEQ ID NO: 114629 - RNA, 22 nt, synthetic construct
  source 1..22: mol_type = other RNA
acacgcagaaccactgagcaca

SEQ ID NO: 114630 - RNA, 22 nt, synthetic construct
  source 1..22: mol_type = other RNA
acacgcattgcattgactacca

SEQ ID NO: 114631 - RNA, 22 nt, synthetic construct
  source 1..22: mol_type = other RNA
acacgccactgcaggtgttggt

SEQ ID NO: 114632 - RNA, 22 nt, synthetic construct
  source 1..22: mol_type = other RNA
acacgccttcgcgggcaccttc

SEQ ID NO: 114633 - RNA, 22 nt, synthetic construct
  source 1..22: mol_type = other RNA
acacgctggaagggagcccaag

SEQ ID NO: 114634 - RNA, 22 nt, synthetic construct
  source 1..22: mol_type = other RNA
acacggaaaacattattttctt

SEQ ID NO: 114635 - RNA, 22 nt, synthetic construct
  source 1..22: mol_type = other RNA
acacgggctgggcgcgatggct

SEQ ID NO: 114636 - RNA, 22 nt, synthetic construct
  source 1..22: mol_type = other RNA
acacgggtacacatcctaatac

SEQ ID NO: 114637 - RNA, 22 nt, synthetic construct
  source 1..22: mol_type = other RNA
acacggtctcacactgttgtcc

SEQ ID NO: 114638 - RNA, 22 nt, synthetic construct
  source 1..22: mol_type = other RNA
acacgtatttatattttggtag

SEQ ID NO: 114639 - RNA, 22 nt, synthetic construct
  source 1..22: mol_type = other RNA
acacgtcttgtcaataatttgg

SEQ ID NO: 114640 - RNA, 22 nt, synthetic construct
  source 1..22: mol_type = other RNA
acacgtggctgtcaaaaatgtg

SEQ ID NO: 114641 - RNA, 22 nt, synthetic construct
  source 1..22: mol_type = other RNA
acacgttacaaaatatgtaatg

SEQ ID NO: 114642 - RNA, 22 nt, synthetic construct
  source 1..22: mol_type = other RNA
acactaaagatttgccaatcaa

SEQ ID NO: 114643 - RNA, 22 nt, synthetic construct
  source 1..22: mol_type = other RNA
acactaaaggggatttcatgaa

SEQ ID NO: 114644 - RNA, 22 nt, synthetic construct
  source 1..22: mol_type = other RNA
acactaaccaacattgagtttc

SEQ ID NO: 114645 - RNA, 22 nt, synthetic construct
  source 1..22: mol_type = other RNA
acactaactttctattcccctg

SEQ ID NO: 114646 - RNA, 22 nt, synthetic construct
  source 1..22: mol_type = other RNA
acactaagaagatggttggaag

SEQ ID NO: 114647 - RNA, 22 nt, synthetic construct
  source 1..22: mol_type = other RNA
acactaatccttctcatagtct

SEQ ID NO: 114648 - RNA, 22 nt, synthetic construct
  source 1..22: mol_type = other RNA
acactagacctttcttaggttt

SEQ ID NO: 114649 - RNA, 22 nt, synthetic construct
  source 1..22: mol_type = other RNA
acactagcaatccaggatctta

SEQ ID NO: 114650 - RNA, 22 nt, synthetic construct
  source 1..22: mol_type = other RNA
acactagccactgggtcttata

SEQ ID NO: 114651 - RNA, 22 nt, synthetic construct
  source 1..22: mol_type = other RNA
acactagctattgtcttttcta

SEQ ID NO: 114652 - RNA, 22 nt, synthetic construct
  source 1..22: mol_type = other RNA
acactagctgacccactggttt

SEQ ID NO: 114653 - RNA, 22 nt, synthetic construct
  source 1..22: mol_type = other RNA
acactagggactggcctcggcc

SEQ ID NO: 114654 - RNA, 22 nt, synthetic construct
  source 1..22: mol_type = other RNA
acactagtcaccctacagactc

SEQ ID NO: 114655 - RNA, 22 nt, synthetic construct
  source 1..22: mol_type = other RNA
acactataacagatggaactct

SEQ ID NO: 114656 - RNA, 22 nt, synthetic construct
  source 1..22: mol_type = other RNA
acactataagccaatatccctg

SEQ ID NO: 114657 - RNA, 22 nt, synthetic construct
  source 1..22: mol_type = other RNA
acactatggcttttgagtgtaa

SEQ ID NO: 114658 - RNA, 22 nt, synthetic construct
  source 1..22: mol_type = other RNA
acactatgtgttgataaatatg

SEQ ID NO: 114659 - RNA, 22 nt, synthetic construct
  source 1..22: mol_type = other RNA
acactattgagagtgaaaacac

SEQ ID NO: 114660 - RNA, 22 nt, synthetic construct
  source 1..22: mol_type = other RNA
acactcaaaagccatagtgtaa

SEQ ID NO: 114661 - RNA, 22 nt, synthetic construct
  source 1..22: mol_type = other RNA
acactcaatacacgtggctgtc

SEQ ID NO: 114662 - RNA, 22 nt, synthetic construct
  source 1..22: mol_type = other RNA
acactcagaagtactactcatt

SEQ ID NO: 114663 - RNA, 22 nt, synthetic construct
  source 1..22: mol_type = other RNA
acactcagatatcaatctggat

SEQ ID NO: 114664 - RNA, 22 nt, synthetic construct
  source 1..22: mol_type = other RNA
acactcataccaggttttggta

SEQ ID NO: 114665 - RNA, 22 nt, synthetic construct
  source 1..22: mol_type = other RNA
acactcatttcctttcagtcgg

SEQ ID NO: 114666 - RNA, 22 nt, synthetic construct
  source 1..22: mol_type = other RNA
acactccagaatgaccgagata

SEQ ID NO: 114667 - RNA, 22 nt, synthetic construct
  source 1..22: mol_type = other RNA
acactccagcatccctccagtc

SEQ ID NO: 114668 - RNA, 22 nt, synthetic construct
  source 1..22: mol_type = other RNA
acactccccagtggttgtggaa

SEQ ID NO: 114669 - RNA, 22 nt, synthetic construct
  source 1..22: mol_type = other RNA
acactcgcactccacttcccac

SEQ ID NO: 114670 - RNA, 22 nt, synthetic construct
  source 1..22: mol_type = other RNA
acactcgtgtatgatttctagg

SEQ ID NO: 114671 - RNA, 22 nt, synthetic construct
  source 1..22: mol_type = other RNA
acactctgcaattttaaatgta

SEQ ID NO: 114672 - RNA, 22 nt, synthetic construct
  source 1..22: mol_type = other RNA
acactcttaataactgcctaag

SEQ ID NO: 114673 - RNA, 22 nt, synthetic construct
  source 1..22: mol_type = other RNA
acactcttggtctttctcccag

SEQ ID NO: 114674 - RNA, 22 nt, synthetic construct
  source 1..22: mol_type = other RNA
acactgaaacaatcgcaatcca

SEQ ID NO: 114675 - RNA, 22 nt, synthetic construct
  source 1..22: mol_type = other RNA
acactgaagggaattttactga

SEQ ID NO: 114676 - RNA, 22 nt, synthetic construct
  source 1..22: mol_type = other RNA
acactgacaggacagagcagta

SEQ ID NO: 114677 - RNA, 22 nt, synthetic construct
  source 1..22: mol_type = other RNA
acactgattttctgcttctcaa

SEQ ID NO: 114678 - RNA, 22 nt, synthetic construct
  source 1..22: mol_type = other RNA
acactgcagatgaatgagcaag

SEQ ID NO: 114679 - RNA, 22 nt, synthetic construct
  source 1..22: mol_type = other RNA
acactgctcagaagctttcaga

SEQ ID NO: 114680 - RNA, 22 nt, synthetic construct
  source 1..22: mol_type = other RNA
acactgctcctgcctttgttca

SEQ ID NO: 114681 - RNA, 22 nt, synthetic construct
  source 1..22: mol_type = other RNA
acactgctcttctattccagag

SEQ ID NO: 114682 - RNA, 22 nt, synthetic construct
  source 1..22: mol_type = other RNA
acactggaaatcacaggtttag

SEQ ID NO: 114683 - RNA, 22 nt, synthetic construct
  source 1..22: mol_type = other RNA
acactggaagtaattgggatct

SEQ ID NO: 114684 - RNA, 22 nt, synthetic construct
  source 1..22: mol_type = other RNA
acactggaggtgcacattccaa

SEQ ID NO: 114685 - RNA, 22 nt, synthetic construct
  source 1..22: mol_type = other RNA
acactggcaaaaatcatcatat

SEQ ID NO: 114686 - RNA, 22 nt, synthetic construct
  source 1..22: mol_type = other RNA
acactgggtaaacaagactcaa

SEQ ID NO: 114687 - RNA, 22 nt, synthetic construct
  source 1..22: mol_type = other RNA
acactgggttctcaccaacatc

SEQ ID NO: 114688 - RNA, 22 nt, synthetic construct
  source 1..22: mol_type = other RNA
acactggtcactggccactgat

SEQ ID NO: 114689 - RNA, 22 nt, synthetic construct
  source 1..22: mol_type = other RNA
acactgtagttcagtttttctt

SEQ ID NO: 114690 - RNA, 22 nt, synthetic construct
  source 1..22: mol_type = other RNA
acactgtgttcttttccttctt

SEQ ID NO: 114691 - RNA, 22 nt, synthetic construct
  source 1..22: mol_type = other RNA
acactgttctgcgtggtttttt

SEQ ID NO: 114692 - RNA, 22 nt, synthetic construct
  source 1..22: mol_type = other RNA
acactgttgatttagaaatacc

SEQ ID NO: 114693 - RNA, 22 nt, synthetic construct
  source 1..22: mol_type = other RNA
acactgttgtccaggccagagt

SEQ ID NO: 114694 - RNA, 22 nt, synthetic construct
  source 1..22: mol_type = other RNA
acactgtttgattactgtagct

SEQ ID NO: 114695 - RNA, 22 nt, synthetic construct
  source 1..22: mol_type = other RNA
acacttaacatgagatctaaat

SEQ ID NO: 114696 - RNA, 22 nt, synthetic construct
  source 1..22: mol_type = other RNA
acacttactaaatgatctttca

SEQ ID NO: 114697 - RNA, 22 nt, synthetic construct
  source 1..22: mol_type = other RNA
acacttagcatgttgctttgcg

SEQ ID NO: 114698 - RNA, 22 nt, synthetic construct
  source 1..22: mol_type = other RNA
acacttagttcaagatgcatac

SEQ ID NO: 114699 - RNA, 22 nt, synthetic construct
  source 1..22: mol_type = other RNA
acacttcagtggtaaggactga

SEQ ID NO: 114700 - RNA, 22 nt, synthetic construct
  source 1..22: mol_type = other RNA
acacttccagtacatctcaatt

SEQ ID NO: 114701 - RNA, 22 nt, synthetic construct
  source 1..22: mol_type = other RNA
acacttctatccagtgacacct

SEQ ID NO: 114702 - RNA, 22 nt, synthetic construct
  source 1..22: mol_type = other RNA
acacttctgtgatcagaagagc

SEQ ID NO: 114703 - RNA, 22 nt, synthetic construct
  source 1..22: mol_type = other RNA
acacttgaattagtgattttac

SEQ ID NO: 114704 - RNA, 22 nt, synthetic construct
  source 1..22: mol_type = other RNA
acacttgatggtttggggcttt

SEQ ID NO: 114705 - RNA, 22 nt, synthetic construct
  source 1..22: mol_type = other RNA
acacttgcttgggaacagcagg

SEQ ID NO: 114706 - RNA, 22 nt, synthetic construct
  source 1..22: mol_type = other RNA
acacttggagttttccccctac

SEQ ID NO: 114707 - RNA, 22 nt, synthetic construct
  source 1..22: mol_type = other RNA
acacttgtgtaactaccactga

SEQ ID NO: 114708 - RNA, 22 nt, synthetic construct
  source 1..22: mol_type = other RNA
acactttccttggagaagagtt

SEQ ID NO: 114709 - RNA, 22 nt, synthetic construct
  source 1..22: mol_type = other RNA
acacttttcaaacacttaacat

SEQ ID NO: 114710 - RNA, 22 nt, synthetic construct
  source 1..22: mol_type = other RNA
acacttttcaggtattgagcct

SEQ ID NO: 114711 - RNA, 22 nt, synthetic construct
  source 1..22: mol_type = other RNA
acacttttccagtcttctcata

SEQ ID NO: 114712 - RNA, 22 nt, synthetic construct
  source 1..22: mol_type = other RNA
acactttttgtgagttttaact

SEQ ID NO: 114713 - RNA, 22 nt, synthetic construct
  source 1..22: mol_type = other RNA
acagaaaaaattagccttttac

SEQ ID NO: 114714 - RNA, 22 nt, synthetic construct
  source 1..22: mol_type = other RNA
acagaaaacccttcatcatttg

SEQ ID NO: 114715 - RNA, 22 nt, synthetic construct
  source 1..22: mol_type = other RNA
acagaaaatatctacaaatcac

SEQ ID NO: 114716 - RNA, 22 nt, synthetic construct
  source 1..22: mol_type = other RNA
acagaaacagaaaaatccatct

SEQ ID NO: 114717 - RNA, 22 nt, synthetic construct
  source 1..22: mol_type = other RNA
acagaaaccctgtacccattag

SEQ ID NO: 114718 - RNA, 22 nt, synthetic construct
  source 1..22: mol_type = other RNA
acagaaagacagggagagagag

SEQ ID NO: 114719 - RNA, 22 nt, synthetic construct
  source 1..22: mol_type = other RNA
acagaaagcctcttcagaagag

SEQ ID NO: 114720 - RNA, 22 nt, synthetic construct
  source 1..22: mol_type = other RNA
acagaaaggcccaaaaagtttt

SEQ ID NO: 114721 - RNA, 22 nt, synthetic construct
  source 1..22: mol_type = other RNA
acagaaataaaacatgttgtgt

SEQ ID NO: 114722 - RNA, 22 nt, synthetic construct
  source 1..22: mol_type = other RNA
acagaaatacaatgtgagccac

SEQ ID NO: 114723 - RNA, 22 nt, synthetic construct
  source 1..22: mol_type = other RNA
acagaaatataccttatgtgaa

SEQ ID NO: 114724 - RNA, 22 nt, synthetic construct
  source 1..22: mol_type = other RNA
acagaaatgaaatggcccttaa

SEQ ID NO: 114725 - RNA, 22 nt, synthetic construct
  source 1..22: mol_type = other RNA
acagaaattcaacttggtaaaa

SEQ ID NO: 114726 - RNA, 22 nt, synthetic construct
  source 1..22: mol_type = other RNA
acagaacaaactcaagttccgg

SEQ ID NO: 114727 - RNA, 22 nt, synthetic construct
  source 1..22: mol_type = other RNA
acagaacaaataacaccatagc

SEQ ID NO: 114728 - RNA, 22 nt, synthetic construct
  source 1..22: mol_type = other RNA
acagaacactaaaggggatttc

SEQ ID NO: 114729 - RNA, 22 nt, synthetic construct
  source 1..22: mol_type = other RNA
acagaaccatgtaacaggttta

SEQ ID NO: 114730 - RNA, 22 nt, synthetic construct
  source 1..22: mol_type = other RNA
acagaactgctaatggtccttg

SEQ ID NO: 114731 - RNA, 22 nt, synthetic construct
  source 1..22: mol_type = other RNA
acagaactgtcactgacacagg

SEQ ID NO: 114732 - RNA, 22 nt, synthetic construct
  source 1..22: mol_type = other RNA
acagaagaagaattctataggt

SEQ ID NO: 114733 - RNA, 22 nt, synthetic construct
  source 1..22: mol_type = other RNA
acagaagaagtttctagttatt

SEQ ID NO: 114734 - RNA, 22 nt, synthetic construct
  source 1..22: mol_type = other RNA
acagaagacacaaaatcagata

SEQ ID NO: 114735 - RNA, 22 nt, synthetic construct
  source 1..22: mol_type = other RNA
acagaagggtatatacaatatt

SEQ ID NO: 114736 - RNA, 22 nt, synthetic construct
  source 1..22: mol_type = other RNA
acagaagtgttttgatagttgc

SEQ ID NO: 114737 - RNA, 22 nt, synthetic construct
  source 1..22: mol_type = other RNA
acagaataaaaagtgacttctg

SEQ ID NO: 114738 - RNA, 22 nt, synthetic construct
  source 1..22: mol_type = other RNA
acagaatcttactggtgttagg

SEQ ID NO: 114739 - RNA, 22 nt, synthetic construct
  source 1..22: mol_type = other RNA
acagaatgcatcttttaaaaac

SEQ ID NO: 114740 - RNA, 22 nt, synthetic construct
  source 1..22: mol_type = other RNA
acagaatgttcaagtatttcca

SEQ ID NO: 114741 - RNA, 22 nt, synthetic construct
  source 1..22: mol_type = other RNA
acagaattattgattggcaaat

SEQ ID NO: 114742 - RNA, 22 nt, synthetic construct
  source 1..22: mol_type = other RNA
acagacagacatgcatgcacac

SEQ ID NO: 114743 - RNA, 22 nt, synthetic construct
  source 1..22: mol_type = other RNA
acagacagggaatggggagcta

SEQ ID NO: 114744 - RNA, 22 nt, synthetic construct
  source 1..22: mol_type = other RNA
acagacatgaacaatccttcta

SEQ ID NO: 114745 - RNA, 22 nt, synthetic construct
  source 1..22: mol_type = other RNA
acagacatgcatgcacacagag

SEQ ID NO: 114746 - RNA, 22 nt, synthetic construct
  source 1..22: mol_type = other RNA
acagacatgccacaccacatcc

SEQ ID NO: 114747 - RNA, 22 nt, synthetic construct
  source 1..22: mol_type = other RNA
acagacatttggaatagagagc

SEQ ID NO: 114748 - RNA, 22 nt, synthetic construct
  source 1..22: mol_type = other RNA
acagaccctggcttgtgacatc

SEQ ID NO: 114749 - RNA, 22 nt, synthetic construct
  source 1..22: mol_type = other RNA
acagacccttatgtccagcccc

SEQ ID NO: 114750 - RNA, 22 nt, synthetic construct
  source 1..22: mol_type = other RNA
acagacctctattaaatcatga

SEQ ID NO: 114751 - RNA, 22 nt, synthetic construct
  source 1..22: mol_type = other RNA
acagacctctgaagagtctatc

SEQ ID NO: 114752 - RNA, 22 nt, synthetic construct
  source 1..22: mol_type = other RNA
acagaccttattcaaataattg

SEQ ID NO: 114753 - RNA, 22 nt, synthetic construct
  source 1..22: mol_type = other RNA
acagacgcaaaggatgtcaaca

SEQ ID NO: 114754 - RNA, 22 nt, synthetic construct
  source 1..22: mol_type = other RNA
acagactaatatgagttcctgc

SEQ ID NO: 114755 - RNA, 22 nt, synthetic construct
  source 1..22: mol_type = other RNA
acagactcaagcctgataagct

SEQ ID NO: 114756 - RNA, 22 nt, synthetic construct
  source 1..22: mol_type = other RNA
acagactcaataaccacatgtg

SEQ ID NO: 114757 - RNA, 22 nt, synthetic construct
  source 1..22: mol_type = other RNA
acagactgagccagcaaatcag

SEQ ID NO: 114758 - RNA, 22 nt, synthetic construct
  source 1..22: mol_type = other RNA
acagactgattaatttgaggtc

SEQ ID NO: 114759 - RNA, 22 nt, synthetic construct
  source 1..22: mol_type = other RNA
acagactgcagttggattatat

SEQ ID NO: 114760 - RNA, 22 nt, synthetic construct
  source 1..22: mol_type = other RNA
acagactgtgccttgatccatt

SEQ ID NO: 114761 - RNA, 22 nt, synthetic construct
  source 1..22: mol_type = other RNA
acagagaacagcattatcttaa

SEQ ID NO: 114762 - RNA, 22 nt, synthetic construct
  source 1..22: mol_type = other RNA
acagagacagagaatctgtctc

SEQ ID NO: 114763 - RNA, 22 nt, synthetic construct
  source 1..22: mol_type = other RNA
acagagagagacctttctttaa

SEQ ID NO: 114764 - RNA, 22 nt, synthetic construct
  source 1..22: mol_type = other RNA
acagagcaacaacctgtctcaa

SEQ ID NO: 114765 - RNA, 22 nt, synthetic construct
  source 1..22: mol_type = other RNA
acagagcacagactcaagcctg

SEQ ID NO: 114766 - RNA, 22 nt, synthetic construct
  source 1..22: mol_type = other RNA
acagagcagtaggcttagatag

SEQ ID NO: 114767 - RNA, 22 nt, synthetic construct
  source 1..22: mol_type = other RNA
acagagccgaaatgcacttagc

SEQ ID NO: 114768 - RNA, 22 nt, synthetic construct
  source 1..22: mol_type = other RNA
acagagccgagcagaagggaaa

SEQ ID NO: 114769 - RNA, 22 nt, synthetic construct
  source 1..22: mol_type = other RNA
acagagcctaaaataggcctag

SEQ ID NO: 114770 - RNA, 22 nt, synthetic construct
  source 1..22: mol_type = other RNA
acagagctagaactagaatact

SEQ ID NO: 114771 - RNA, 22 nt, synthetic construct
  source 1..22: mol_type = other RNA
acagagctccctctccctcccc

SEQ ID NO: 114772 - RNA, 22 nt, synthetic construct
  source 1..22: mol_type = other RNA
acagaggattttggattgcgat

SEQ ID NO: 114773 - RNA, 22 nt, synthetic construct
  source 1..22: mol_type = other RNA
acagaggcaacagtcattcagg

SEQ ID NO: 114774 - RNA, 22 nt, synthetic construct
  source 1..22: mol_type = other RNA
acagaggcatgcacggacttgg

SEQ ID NO: 114775 - RNA, 22 nt, synthetic construct
  source 1..22: mol_type = other RNA
acagaggctttttatatttccg

SEQ ID NO: 114776 - RNA, 22 nt, synthetic construct
  source 1..22: mol_type = other RNA
acagagggagcgccacgtgaag

SEQ ID NO: 114777 - RNA, 22 nt, synthetic construct
  source 1..22: mol_type = other RNA
acagagtgaaactctggctcag

SEQ ID NO: 114778 - RNA, 22 nt, synthetic construct
  source 1..22: mol_type = other RNA
acagagttcagcttacagtcat

SEQ ID NO: 114779 - RNA, 22 nt, synthetic construct
  source 1..22: mol_type = other RNA
acagagttccacctccatcact

SEQ ID NO: 114780 - RNA, 22 nt, synthetic construct
  source 1..22: mol_type = other RNA
acagagttttccaataagttaa

SEQ ID NO: 114781 - RNA, 22 nt, synthetic construct
  source 1..22: mol_type = other RNA
acagataaccaataagaagtga

SEQ ID NO: 114782 - RNA, 22 nt, synthetic construct
  source 1..22: mol_type = other RNA
acagataatttcttcagaagaa

SEQ ID NO: 114783 - RNA, 22 nt, synthetic construct
  source 1..22: mol_type = other RNA
acagatacaactctgaccattg

SEQ ID NO: 114784 - RNA, 22 nt, synthetic construct
  source 1..22: mol_type = other RNA
acagatatatgcattcccatgt

SEQ ID NO: 114785 - RNA, 22 nt, synthetic construct
  source 1..22: mol_type = other RNA
acagatatcacccagaccaagt

SEQ ID NO: 114786 - RNA, 22 nt, synthetic construct
  source 1..22: mol_type = other RNA
acagatcccaaaaaggttttta

SEQ ID NO: 114787 - RNA, 22 nt, synthetic construct
  source 1..22: mol_type = other RNA
acagatcctcacatcagttacc

SEQ ID NO: 114788 - RNA, 22 nt, synthetic construct
  source 1..22: mol_type = other RNA
acagatctgagaagactaagca

SEQ ID NO: 114789 - RNA, 22 nt, synthetic construct
  source 1..22: mol_type = other RNA
acagatcttatggaatagttga

SEQ ID NO: 114790 - RNA, 22 nt, synthetic construct
  source 1..22: mol_type = other RNA
acagatcttggccgaatgtggt

SEQ ID NO: 114791 - RNA, 22 nt, synthetic construct
  source 1..22: mol_type = other RNA
acagatctttttgtgtatatgg

SEQ ID NO: 114792 - RNA, 22 nt, synthetic construct
  source 1..22: mol_type = other RNA
acagatgaatgaacaaaatgtg

SEQ ID NO: 114793 - RNA, 22 nt, synthetic construct
  source 1..22: mol_type = other RNA
acagatgagaaatacttggaca

SEQ ID NO: 114794 - RNA, 22 nt, synthetic construct
  source 1..22: mol_type = other RNA
acagatgagactcttaatattg

SEQ ID NO: 114795 - RNA, 22 nt, synthetic construct
  source 1..22: mol_type = other RNA
acagatggaactctattttcct

SEQ ID NO: 114796 - RNA, 22 nt, synthetic construct
  source 1..22: mol_type = other RNA
acagatggtccttttttactga

SEQ ID NO: 114797 - RNA, 22 nt, synthetic construct
  source 1..22: mol_type = other RNA
acagatgtgagcccccacgccc

SEQ ID NO: 114798 - RNA, 22 nt, synthetic construct
  source 1..22: mol_type = other RNA
acagatgtgcttaatcttcaca

SEQ ID NO: 114799 - RNA, 22 nt, synthetic construct
  source 1..22: mol_type = other RNA
acagattaaataccacctgaaa

SEQ ID NO: 114800 - RNA, 22 nt, synthetic construct
  source 1..22: mol_type = other RNA
acagattcaatgcaatacttaa

SEQ ID NO: 114801 - RNA, 22 nt, synthetic construct
  source 1..22: mol_type = other RNA
acagattcacgcacagggagat

SEQ ID NO: 114802 - RNA, 22 nt, synthetic construct
  source 1..22: mol_type = other RNA
acagattctctgtctctgttgc

SEQ ID NO: 114803 - RNA, 22 nt, synthetic construct
  source 1..22: mol_type = other RNA
acagcaaaagaattaaactcat

SEQ ID NO: 114804 - RNA, 22 nt, synthetic construct
  source 1..22: mol_type = other RNA
acagcaaatctctagaacttat

SEQ ID NO: 114805 - RNA, 22 nt, synthetic construct
  source 1..22: mol_type = other RNA
acagcaaggctcctgcagacat

SEQ ID NO: 114806 - RNA, 22 nt, synthetic construct
  source 1..22: mol_type = other RNA
acagcacattaaataagggcat

SEQ ID NO: 114807 - RNA, 22 nt, synthetic construct
  source 1..22: mol_type = other RNA
acagcaccttttttggtatttt

SEQ ID NO: 114808 - RNA, 22 nt, synthetic construct
  source 1..22: mol_type = other RNA
acagcactgttaactgacttac

SEQ ID NO: 114809 - RNA, 22 nt, synthetic construct
  source 1..22: mol_type = other RNA
acagcacttggggaggccaagg

SEQ ID NO: 114810 - RNA, 22 nt, synthetic construct
  source 1..22: mol_type = other RNA
acagcacttttgtactacttgt

SEQ ID NO: 114811 - RNA, 22 nt, synthetic construct
  source 1..22: mol_type = other RNA
acagcagaacaaactgcgtggt

SEQ ID NO: 114812 - RNA, 22 nt, synthetic construct
  source 1..22: mol_type = other RNA
acagcagataagatccaagtat

SEQ ID NO: 114813 - RNA, 22 nt, synthetic construct
  source 1..22: mol_type = other RNA
acagcagatctgcttgcagaca

SEQ ID NO: 114814 - RNA, 22 nt, synthetic construct
  source 1..22: mol_type = other RNA
acagcagctctagcaaacaaac

SEQ ID NO: 114815 - RNA, 22 nt, synthetic construct
  source 1..22: mol_type = other RNA
acagcaggaaaagctaccctcg

SEQ ID NO: 114816 - RNA, 22 nt, synthetic construct
  source 1..22: mol_type = other RNA
acagcagggctcctccaaggct

SEQ ID NO: 114817 - RNA, 22 nt, synthetic construct
  source 1..22: mol_type = other RNA
acagcaggggaaggcttcgagt

SEQ ID NO: 114818 - RNA, 22 nt, synthetic construct
  source 1..22: mol_type = other RNA
acagcagtcttaaccattgagc

SEQ ID NO: 114819 - RNA, 22 nt, synthetic construct
  source 1..22: mol_type = other RNA
acagcatactgtggatatcttt

SEQ ID NO: 114820 - RNA, 22 nt, synthetic construct
  source 1..22: mol_type = other RNA
acagcatatacatgacatggtt

SEQ ID NO: 114821 - RNA, 22 nt, synthetic construct
  source 1..22: mol_type = other RNA
acagcatattagctgtctggat

SEQ ID NO: 114822 - RNA, 22 nt, synthetic construct
  source 1..22: mol_type = other RNA
acagcatccccagaaagagaga

SEQ ID NO: 114823 - RNA, 22 nt, synthetic construct
  source 1..22: mol_type = other RNA
acagcatgaatacctatttaga

SEQ ID NO: 114824 - RNA, 22 nt, synthetic construct
  source 1..22: mol_type = other RNA
acagcattatcttaataacctc

SEQ ID NO: 114825 - RNA, 22 nt, synthetic construct
  source 1..22: mol_type = other RNA
acagcatttcagccaaagctgg

SEQ ID NO: 114826 - RNA, 22 nt, synthetic construct
  source 1..22: mol_type = other RNA
acagccaaagaaattggacggg

SEQ ID NO: 114827 - RNA, 22 nt, synthetic construct
  source 1..22: mol_type = other RNA
acagccaaataaaacacaagga

SEQ ID NO: 114828 - RNA, 22 nt, synthetic construct
  source 1..22: mol_type = other RNA
acagccacgtgtattgagtgta

SEQ ID NO: 114829 - RNA, 22 nt, synthetic construct
  source 1..22: mol_type = other RNA
acagccagtcagtgatggaggt

SEQ ID NO: 114830 - RNA, 22 nt, synthetic construct
  source 1..22: mol_type = other RNA
acagccatcaacctaatgaaat

SEQ ID NO: 114831 - RNA, 22 nt, synthetic construct
  source 1..22: mol_type = other RNA
acagcccctagcatgcagtagc

SEQ ID NO: 114832 - RNA, 22 nt, synthetic construct
  source 1..22: mol_type = other RNA
acagccggcatatgtcactgta

SEQ ID NO: 114833 - RNA, 22 nt, synthetic construct
  source 1..22: mol_type = other RNA
acagcctaaaccattttcaatc

SEQ ID NO: 114834 - RNA, 22 nt, synthetic construct
  source 1..22: mol_type = other RNA
acagcctaaagtccacagatct

SEQ ID NO: 114835 - RNA, 22 nt, synthetic construct
  source 1..22: mol_type = other RNA
acagcctaagcaaatgtaatga

SEQ ID NO: 114836 - RNA, 22 nt, synthetic construct
  source 1..22: mol_type = other RNA
acagcctaattgtacacctcaa

SEQ ID NO: 114837 - RNA, 22 nt, synthetic construct
  source 1..22: mol_type = other RNA
acagcgccacttaaaaaatgcg

SEQ ID NO: 114838 - RNA, 22 nt, synthetic construct
  source 1..22: mol_type = other RNA
acagcgcccggcccgttatttt

SEQ ID NO: 114839 - RNA, 22 nt, synthetic construct
  source 1..22: mol_type = other RNA
acagcggggatggttgcacaat

SEQ ID NO: 114840 - RNA, 22 nt, synthetic construct
  source 1..22: mol_type = other RNA
acagcgtgcaccttacattgta

SEQ ID NO: 114841 - RNA, 22 nt, synthetic construct
  source 1..22: mol_type = other RNA
acagcgtggaatggtcaatttc

SEQ ID NO: 114842 - RNA, 22 nt, synthetic construct
  source 1..22: mol_type = other RNA
acagcgttgttcagttgaaaag

SEQ ID NO: 114843 - RNA, 22 nt, synthetic construct
  source 1..22: mol_type = other RNA
acagctaatatgctgtagtgat

SEQ ID NO: 114844 - RNA, 22 nt, synthetic construct
  source 1..22: mol_type = other RNA
acagctacactcaatacacgtg

SEQ ID NO: 114845 - RNA, 22 nt, synthetic construct
  source 1..22: mol_type = other RNA
acagctacggaggatgaggggc

SEQ ID NO: 114846 - RNA, 22 nt, synthetic construct
  source 1..22: mol_type = other RNA
acagctactaaacaaatcagat

SEQ ID NO: 114847 - RNA, 22 nt, synthetic construct
  source 1..22: mol_type = other RNA
acagctactatgaatatactgg

SEQ ID NO: 114848 - RNA, 22 nt, synthetic construct
  source 1..22: mol_type = other RNA
acagctactcagggggctgagg

SEQ ID NO: 114849 - RNA, 22 nt, synthetic construct
  source 1..22: mol_type = other RNA
acagctaggtgagtgagatggg

SEQ ID NO: 114850 - RNA, 22 nt, synthetic construct
  source 1..22: mol_type = other RNA
acagctatcaggccttccacct

SEQ ID NO: 114851 - RNA, 22 nt, synthetic construct
  source 1..22: mol_type = other RNA
acagctcaattaagcaaccttt

SEQ ID NO: 114852 - RNA, 22 nt, synthetic construct
  source 1..22: mol_type = other RNA
acagctcagaagctatagctga

SEQ ID NO: 114853 - RNA, 22 nt, synthetic construct
  source 1..22: mol_type = other RNA
acagctccaaagaacaggagtt

SEQ ID NO: 114854 - RNA, 22 nt, synthetic construct
  source 1..22: mol_type = other RNA
acagctctcatgagtcctgaaa

SEQ ID NO: 114855 - RNA, 22 nt, synthetic construct
  source 1..22: mol_type = other RNA
acagctcttctcagttgcagca

SEQ ID NO: 114856 - RNA, 22 nt, synthetic construct
  source 1..22: mol_type = other RNA
acagctgagtagcgctttaagc

SEQ ID NO: 114857 - RNA, 22 nt, synthetic construct
  source 1..22: mol_type = other RNA
acagctgggagaaagctaattt

SEQ ID NO: 114858 - RNA, 22 nt, synthetic construct
  source 1..22: mol_type = other RNA
acagcttaccaagtgccgcgtt

SEQ ID NO: 114859 - RNA, 22 nt, synthetic construct
  source 1..22: mol_type = other RNA
acagcttccacccaagtggagc

SEQ ID NO: 114860 - RNA, 22 nt, synthetic construct
  source 1..22: mol_type = other RNA
acagcttcttgttagaattttg

SEQ ID NO: 114861 - RNA, 22 nt, synthetic construct
  source 1..22: mol_type = other RNA
acagcttgacattcttaccttc

SEQ ID NO: 114862 - RNA, 22 nt, synthetic construct
  source 1..22: mol_type = other RNA
acagctttcttttccaaccaag

SEQ ID NO: 114863 - RNA, 22 nt, synthetic construct
  source 1..22: mol_type = other RNA
acaggaaagatgtcttttaact

SEQ ID NO: 114864 - RNA, 22 nt, synthetic construct
  source 1..22: mol_type = other RNA
acaggaagaattattgtctgca

SEQ ID NO: 114865 - RNA, 22 nt, synthetic construct
  source 1..22: mol_type = other RNA
acaggaagagactatctcttcc

SEQ ID NO: 114866 - RNA, 22 nt, synthetic construct
  source 1..22: mol_type = other RNA
acaggaagaggcagctaagcac

SEQ ID NO: 114867 - RNA, 22 nt, synthetic construct
  source 1..22: mol_type = other RNA
acaggaagggagagatgcctat

SEQ ID NO: 114868 - RNA, 22 nt, synthetic construct
  source 1..22: mol_type = other RNA
acaggaagttgagaaagaggga

SEQ ID NO: 114869 - RNA, 22 nt, synthetic construct
  source 1..22: mol_type = other RNA
acaggacagagcagtaggctta

SEQ ID NO: 114870 - RNA, 22 nt, synthetic construct
  source 1..22: mol_type = other RNA
acaggactccacagagttcagc

SEQ ID NO: 114871 - RNA, 22 nt, synthetic construct
  source 1..22: mol_type = other RNA
acaggactgtgtgtgtccaggc

SEQ ID NO: 114872 - RNA, 22 nt, synthetic construct
  source 1..22: mol_type = other RNA
acaggacttttggtacacatct

SEQ ID NO: 114873 - RNA, 22 nt, synthetic construct
  source 1..22: mol_type = other RNA
acaggagaacttgtctcggatt

SEQ ID NO: 114874 - RNA, 22 nt, synthetic construct
  source 1..22: mol_type = other RNA
acaggagagcgacagctacgga

SEQ ID NO: 114875 - RNA, 22 nt, synthetic construct
  source 1..22: mol_type = other RNA
acaggagcccaccaccatgcct

SEQ ID NO: 114876 - RNA, 22 nt, synthetic construct
  source 1..22: mol_type = other RNA
acaggagttaccataaaaccat

SEQ ID NO: 114877 - RNA, 22 nt, synthetic construct
  source 1..22: mol_type = other RNA
acaggagttccgatttctcggc

SEQ ID NO: 114878 - RNA, 22 nt, synthetic construct
  source 1..22: mol_type = other RNA
acaggatacaaaaagcacctac

SEQ ID NO: 114879 - RNA, 22 nt, synthetic construct
  source 1..22: mol_type = other RNA
acaggatatcagaagtgctgac

SEQ ID NO: 114880 - RNA, 22 nt, synthetic construct
  source 1..22: mol_type = other RNA
acaggatccagatgtagagaaa

SEQ ID NO: 114881 - RNA, 22 nt, synthetic construct
  source 1..22: mol_type = other RNA
acaggatcccggaacaggaaaa

SEQ ID NO: 114882 - RNA, 22 nt, synthetic construct
  source 1..22: mol_type = other RNA
acaggattacaatgtaaggtgc

SEQ ID NO: 114883 - RNA, 22 nt, synthetic construct
  source 1..22: mol_type = other RNA
acaggcaaccttgggagaaaat

SEQ ID NO: 114884 - RNA, 22 nt, synthetic construct
  source 1..22: mol_type = other RNA
acaggcataagccaccgcactc

SEQ ID NO: 114885 - RNA, 22 nt, synthetic construct
  source 1..22: mol_type = other RNA
acaggcatcggccgggcgtggg

SEQ ID NO: 114886 - RNA, 22 nt, synthetic construct
  source 1..22: mol_type = other RNA
acaggcatctctctaaaaacat

SEQ ID NO: 114887 - RNA, 22 nt, synthetic construct
  source 1..22: mol_type = other RNA
acaggcatgagccactgcgggc

SEQ ID NO: 114888 - RNA, 22 nt, synthetic construct
  source 1..22: mol_type = other RNA
acaggcatgagtcgccatacct

SEQ ID NO: 114889 - RNA, 22 nt, synthetic construct
  source 1..22: mol_type = other RNA
acaggcatgcgccatcacaccc

SEQ ID NO: 114890 - RNA, 22 nt, synthetic construct
  source 1..22: mol_type = other RNA
acaggccctttgttagtgcctt

SEQ ID NO: 114891 - RNA, 22 nt, synthetic construct
  source 1..22: mol_type = other RNA
acaggcctgagccgtcggtatg

SEQ ID NO: 114892 - RNA, 22 nt, synthetic construct
  source 1..22: mol_type = other RNA
acaggcgcacgccatctcgccc

SEQ ID NO: 114893 - RNA, 22 nt, synthetic construct
  source 1..22: mol_type = other RNA
acaggcgtgagccaccacgtcc

SEQ ID NO: 114894 - RNA, 22 nt, synthetic construct
  source 1..22: mol_type = other RNA
acaggcgtgagccacctcatcc

SEQ ID NO: 114895 - RNA, 22 nt, synthetic construct
  source 1..22: mol_type = other RNA
acaggcgtgagcctccacacct

SEQ ID NO: 114896 - RNA, 22 nt, synthetic construct
  source 1..22: mol_type = other RNA
acaggcgttgagccatcatgcc

SEQ ID NO: 114897 - RNA, 22 nt, synthetic construct
  source 1..22: mol_type = other RNA
acaggctcaatacctgaaaagt

SEQ ID NO: 114898 - RNA, 22 nt, synthetic construct
  source 1..22: mol_type = other RNA
acaggctctcttcaccaactga

SEQ ID NO: 114899 - RNA, 22 nt, synthetic construct
  source 1..22: mol_type = other RNA
acaggctgaagggaggaaaaaa

SEQ ID NO: 114900 - RNA, 22 nt, synthetic construct
  source 1..22: mol_type = other RNA
acaggctgagtgcggtggctta

SEQ ID NO: 114901 - RNA, 22 nt, synthetic construct
  source 1..22: mol_type = other RNA
acaggctggtctcgaactctcg

SEQ ID NO: 114902 - RNA, 22 nt, synthetic construct
  source 1..22: mol_type = other RNA
acaggctttcctacaatacagc

SEQ ID NO: 114903 - RNA, 22 nt, synthetic construct
  source 1..22: mol_type = other RNA
acaggctttgacttctcagggc

SEQ ID NO: 114904 - RNA, 22 nt, synthetic construct
  source 1..22: mol_type = other RNA
acagggaaaactacatgtaaaa

SEQ ID NO: 114905 - RNA, 22 nt, synthetic construct
  source 1..22: mol_type = other RNA
acagggaaccgtaacttctttt

SEQ ID NO: 114906 - RNA, 22 nt, synthetic construct
  source 1..22: mol_type = other RNA
acagggaatgcccctgtagcag

SEQ ID NO: 114907 - RNA, 22 nt, synthetic construct
  source 1..22: mol_type = other RNA
acagggaatggggagctagagg

SEQ ID NO: 114908 - RNA, 22 nt, synthetic construct
  source 1..22: mol_type = other RNA
acagggactgatgaagaacctg

SEQ ID NO: 114909 - RNA, 22 nt, synthetic construct
  source 1..22: mol_type = other RNA
acagggagatacttgattacaa

SEQ ID NO: 114910 - RNA, 22 nt, synthetic construct
  source 1..22: mol_type = other RNA
acagggcagggagagagaaact

SEQ ID NO: 114911 - RNA, 22 nt, synthetic construct
  source 1..22: mol_type = other RNA
acagggccactgagagctcagg

SEQ ID NO: 114912 - RNA, 22 nt, synthetic construct
  source 1..22: mol_type = other RNA
acagggcccagcctcaacagca

SEQ ID NO: 114913 - RNA, 22 nt, synthetic construct
  source 1..22: mol_type = other RNA
acaggggacatgaaggaaggat

SEQ ID NO: 114914 - RNA, 22 nt, synthetic construct
  source 1..22: mol_type = other RNA
acaggggactttgatgttttac

SEQ ID NO: 114915 - RNA, 22 nt, synthetic construct
  source 1..22: mol_type = other RNA
acaggggcattccctgtctggg

SEQ ID NO: 114916 - RNA, 22 nt, synthetic construct
  source 1..22: mol_type = other RNA
acagggtaagattccgtctcaa

SEQ ID NO: 114917 - RNA, 22 nt, synthetic construct
  source 1..22: mol_type = other RNA
acagggtctacaaaaggtttcc

SEQ ID NO: 114918 - RNA, 22 nt, synthetic construct
  source 1..22: mol_type = other RNA
acagggtctcactcttaccaag

SEQ ID NO: 114919 - RNA, 22 nt, synthetic construct
  source 1..22: mol_type = other RNA
acagggtcttgctctgtcaccc

SEQ ID NO: 114920 - RNA, 22 nt, synthetic construct
  source 1..22: mol_type = other RNA
acagggttacagtataggggaa

SEQ ID NO: 114921 - RNA, 22 nt, synthetic construct
  source 1..22: mol_type = other RNA
acagggttattaacataccgac

SEQ ID NO: 114922 - RNA, 22 nt, synthetic construct
  source 1..22: mol_type = other RNA
acagggtttctgtttggatgaa

SEQ ID NO: 114923 - RNA, 22 nt, synthetic construct
  source 1..22: mol_type = other RNA
acagggttttgttttgtttttt

SEQ ID NO: 114924 - RNA, 22 nt, synthetic construct
  source 1..22: mol_type = other RNA
acaggtagacatgagtaaaaag

SEQ ID NO: 114925 - RNA, 22 nt, synthetic construct
  source 1..22: mol_type = other RNA
acaggtagacatgtgccatgtt

SEQ ID NO: 114926 - RNA, 22 nt, synthetic construct
  source 1..22: mol_type = other RNA
acaggtagctgctttttaaaaa

SEQ ID NO: 114927 - RNA, 22 nt, synthetic construct
  source 1..22: mol_type = other RNA
acaggtataaagtttccgtttt

SEQ ID NO: 114928 - RNA, 22 nt, synthetic construct
  source 1..22: mol_type = other RNA
acaggtcaaactcacttattag

SEQ ID NO: 114929 - RNA, 22 nt, synthetic construct
  source 1..22: mol_type = other RNA
acaggtcacattctgcctgcag

SEQ ID NO: 114930 - RNA, 22 nt, synthetic construct
  source 1..22: mol_type = other RNA
acaggtcggaaggaatgtgctt

SEQ ID NO: 114931 - RNA, 22 nt, synthetic construct
  source 1..22: mol_type = other RNA
acaggtgagtggactgtgaggg

SEQ ID NO: 114932 - RNA, 22 nt, synthetic construct
  source 1..22: mol_type = other RNA
acaggtgcttacagactgatta

SEQ ID NO: 114933 - RNA, 22 nt, synthetic construct
  source 1..22: mol_type = other RNA
acaggtggtatgggagatgtgt

SEQ ID NO: 114934 - RNA, 22 nt, synthetic construct
  source 1..22: mol_type = other RNA
acaggtgtaagagattaattca

SEQ ID NO: 114935 - RNA, 22 nt, synthetic construct
  source 1..22: mol_type = other RNA
acaggtgtgaaccacgcatctg

SEQ ID NO: 114936 - RNA, 22 nt, synthetic construct
  source 1..22: mol_type = other RNA
acaggtgtgagccaccgtgccg

SEQ ID NO: 114937 - RNA, 22 nt, synthetic construct
  source 1..22: mol_type = other RNA
acaggttcttcatcagtccctg

SEQ ID NO: 114938 - RNA, 22 nt, synthetic construct
  source 1..22: mol_type = other RNA
acaggtttaggtttttcttgtg

SEQ ID NO: 114939 - RNA, 22 nt, synthetic construct
  source 1..22: mol_type = other RNA
acagtaaagccccattgtacac

SEQ ID NO: 114940 - RNA, 22 nt, synthetic construct
  source 1..22: mol_type = other RNA
acagtaaagtcactgtggaaaa

SEQ ID NO: 114941 - RNA, 22 nt, synthetic construct
  source 1..22: mol_type = other RNA
acagtaagatcctggattgcta

SEQ ID NO: 114942 - RNA, 22 nt, synthetic construct
  source 1..22: mol_type = other RNA
acagtaaggtttccctggggaa

SEQ ID NO: 114943 - RNA, 22 nt, synthetic construct
  source 1..22: mol_type = other RNA
acagtaatcaaacagtgtgata

SEQ ID NO: 114944 - RNA, 22 nt, synthetic construct
  source 1..22: mol_type = other RNA
acagtaattagttacatgaggt

SEQ ID NO: 114945 - RNA, 22 nt, synthetic construct
  source 1..22: mol_type = other RNA
acagtaattgtagtttccatgg

SEQ ID NO: 114946 - RNA, 22 nt, synthetic construct
  source 1..22: mol_type = other RNA
acagtacaaggctagagctcac

SEQ ID NO: 114947 - RNA, 22 nt, synthetic construct
  source 1..22: mol_type = other RNA
acagtacagtagtaaaaccaaa

SEQ ID NO: 114948 - RNA, 22 nt, synthetic construct
  source 1..22: mol_type = other RNA
acagtacgcttttatgttataa

SEQ ID NO: 114949 - RNA, 22 nt, synthetic construct
  source 1..22: mol_type = other RNA
acagtagaagactcagcagttt

SEQ ID NO: 114950 - RNA, 22 nt, synthetic construct
  source 1..22: mol_type = other RNA
acagtagccaaaggtagaaaca

SEQ ID NO: 114951 - RNA, 22 nt, synthetic construct
  source 1..22: mol_type = other RNA
acagtagtaaaaccaaatgtgg

SEQ ID NO: 114952 - RNA, 22 nt, synthetic construct
  source 1..22: mol_type = other RNA
acagtataggggaactcttgta

SEQ ID NO: 114953 - RNA, 22 nt, synthetic construct
  source 1..22: mol_type = other RNA
acagtatgcacaaataattaac

SEQ ID NO: 114954 - RNA, 22 nt, synthetic construct
  source 1..22: mol_type = other RNA
acagtatgcggggtttcagcac

SEQ ID NO: 114955 - RNA, 22 nt, synthetic construct
  source 1..22: mol_type = other RNA
acagtatgctgtttacattaga

SEQ ID NO: 114956 - RNA, 22 nt, synthetic construct
  source 1..22: mol_type = other RNA
acagtatgtcagactcattgcc

SEQ ID NO: 114957 - RNA, 22 nt, synthetic construct
  source 1..22: mol_type = other RNA
acagtattacacagaaagcctc

SEQ ID NO: 114958 - RNA, 22 nt, synthetic construct
  source 1..22: mol_type = other RNA
acagtattgtcttctaaccctc

SEQ ID NO: 114959 - RNA, 22 nt, synthetic construct
  source 1..22: mol_type = other RNA
acagtattgtgctgaaaccccg

SEQ ID NO: 114960 - RNA, 22 nt, synthetic construct
  source 1..22: mol_type = other RNA
acagtcacaaagctttaaactg

SEQ ID NO: 114961 - RNA, 22 nt, synthetic construct
  source 1..22: mol_type = other RNA
acagtcacacaccactacaccc

SEQ ID NO: 114962 - RNA, 22 nt, synthetic construct
  source 1..22: mol_type = other RNA
acagtcatcacagtccaggaac

SEQ ID NO: 114963 - RNA, 22 nt, synthetic construct
  source 1..22: mol_type = other RNA
acagtcatcctcaacaagagag

SEQ ID NO: 114964 - RNA, 22 nt, synthetic construct
  source 1..22: mol_type = other RNA
acagtcattcaggtctatgtga

SEQ ID NO: 114965 - RNA, 22 nt, synthetic construct
  source 1..22: mol_type = other RNA
acagtccactcacctgtcatgt

SEQ ID NO: 114966 - RNA, 22 nt, synthetic construct
  source 1..22: mol_type = other RNA
acagtccaggaacttacagtaa

SEQ ID NO: 114967 - RNA, 22 nt, synthetic construct
  source 1..22: mol_type = other RNA
acagtcccttgcctgacagcaa

SEQ ID NO: 114968 - RNA, 22 nt, synthetic construct
  source 1..22: mol_type = other RNA
acagtcctgtgtttctgctatt

SEQ ID NO: 114969 - RNA, 22 nt, synthetic construct
  source 1..22: mol_type = other RNA
acagtctcccccaggtggttct

SEQ ID NO: 114970 - RNA, 22 nt, synthetic construct
  source 1..22: mol_type = other RNA
acagtctcgaccccctgggctc

SEQ ID NO: 114971 - RNA, 22 nt, synthetic construct
  source 1..22: mol_type = other RNA
acagtctcgtgaatttggtatt

SEQ ID NO: 114972 - RNA, 22 nt, synthetic construct
  source 1..22: mol_type = other RNA
acagtctctgcagagcaggctc

SEQ ID NO: 114973 - RNA, 22 nt, synthetic construct
  source 1..22: mol_type = other RNA
acagtctgtgcttaaggaaatg

SEQ ID NO: 114974 - RNA, 22 nt, synthetic construct
  source 1..22: mol_type = other RNA
acagtgaattctgacttagtga

SEQ ID NO: 114975 - RNA, 22 nt, synthetic construct
  source 1..22: mol_type = other RNA
acagtgacatatgccggctgtt

SEQ ID NO: 114976 - RNA, 22 nt, synthetic construct
  source 1..22: mol_type = other RNA
acagtgaccacagtttgaaact

SEQ ID NO: 114977 - RNA, 22 nt, synthetic construct
  source 1..22: mol_type = other RNA
acagtgactttactgttctcca

SEQ ID NO: 114978 - RNA, 22 nt, synthetic construct
  source 1..22: mol_type = other RNA
acagtgagcatgctgcaactga

SEQ ID NO: 114979 - RNA, 22 nt, synthetic construct
  source 1..22: mol_type = other RNA
acagtgaggacgctgatgacag

SEQ ID NO: 114980 - RNA, 22 nt, synthetic construct
  source 1..22: mol_type = other RNA
acagtgagtagaagagtaatgg

SEQ ID NO: 114981 - RNA, 22 nt, synthetic construct
  source 1..22: mol_type = other RNA
acagtgcataccaccacattcg

SEQ ID NO: 114982 - RNA, 22 nt, synthetic construct
  source 1..22: mol_type = other RNA
acagtgccttcagctatggtgt

SEQ ID NO: 114983 - RNA, 22 nt, synthetic construct
  source 1..22: mol_type = other RNA
acagtgctccatagcttcctaa

SEQ ID NO: 114984 - RNA, 22 nt, synthetic construct
  source 1..22: mol_type = other RNA
acagtgctgtgccagtgcaaac

SEQ ID NO: 114985 - RNA, 22 nt, synthetic construct
  source 1..22: mol_type = other RNA
acagtggcacgattttggctca

SEQ ID NO: 114986 - RNA, 22 nt, synthetic construct
  source 1..22: mol_type = other RNA
acagtggttaggaaaatacatg

SEQ ID NO: 114987 - RNA, 22 nt, synthetic construct
  source 1..22: mol_type = other RNA
acagtggttccatttgttttgt

SEQ ID NO: 114988 - RNA, 22 nt, synthetic construct
  source 1..22: mol_type = other RNA
acagtgtactagtctccataca

SEQ ID NO: 114989 - RNA, 22 nt, synthetic construct
  source 1..22: mol_type = other RNA
acagtgttgagaaagcacataa

SEQ ID NO: 114990 - RNA, 22 nt, synthetic construct
  source 1..22: mol_type = other RNA
acagtgtttacacacctgaaat

SEQ ID NO: 114991 - RNA, 22 nt, synthetic construct
  source 1..22: mol_type = other RNA
acagtgtttagggacgaatgca

SEQ ID NO: 114992 - RNA, 22 nt, synthetic construct
  source 1..22: mol_type = other RNA
acagtgtttttgaattctgctt

SEQ ID NO: 114993 - RNA, 22 nt, synthetic construct
  source 1..22: mol_type = other RNA
acagttaaaatgaaaatgttcc

SEQ ID NO: 114994 - RNA, 22 nt, synthetic construct
  source 1..22: mol_type = other RNA
acagttaacaatactgcattgt

SEQ ID NO: 114995 - RNA, 22 nt, synthetic construct
  source 1..22: mol_type = other RNA
acagttaacgtatgaataaact

SEQ ID NO: 114996 - RNA, 22 nt, synthetic construct
  source 1..22: mol_type = other RNA
acagttactttcctttttcaaa

SEQ ID NO: 114997 - RNA, 22 nt, synthetic construct
  source 1..22: mol_type = other RNA
acagttatgtcagtcaacacac

SEQ ID NO: 114998 - RNA, 22 nt, synthetic construct
  source 1..22: mol_type = other RNA
acagttattcttcagcaaggac

SEQ ID NO: 114999 - RNA, 22 nt, synthetic construct
  source 1..22: mol_type = other RNA
acagttcaatactactgcaaat

SEQ ID NO: 115000 - RNA, 22 nt, synthetic construct
  source 1..22: mol_type = other RNA
acagttctagttctaataaacg

SEQ ID NO: 115001 - RNA, 22 nt, synthetic construct
  source 1..22: mol_type = other RNA
acagttctatttctttccattc

SEQ ID NO: 115002 - RNA, 22 nt, synthetic construct
  source 1..22: mol_type = other RNA
acagttctgtgaatttgattat

SEQ ID NO: 115003 - RNA, 22 nt, synthetic construct
  source 1..22: mol_type = other RNA
acagttcttaagttaaaacttg

SEQ ID NO: 115004 - RNA, 22 nt, synthetic construct
  source 1..22: mol_type = other RNA
acagttgctattcaacaggtat

SEQ ID NO: 115005 - RNA, 22 nt, synthetic construct
  source 1..22: mol_type = other RNA
acagttggaactcttgcggtct

SEQ ID NO: 115006 - RNA, 22 nt, synthetic construct
  source 1..22: mol_type = other RNA
acagttggccttgaggtgagac

SEQ ID NO: 115007 - RNA, 22 nt, synthetic construct
  source 1..22: mol_type = other RNA
acagtttaaaagtaaattcgca

SEQ ID NO: 115008 - RNA, 22 nt, synthetic construct
  source 1..22: mol_type = other RNA
acagtttacacgccttcgcggg

SEQ ID NO: 115009 - RNA, 22 nt, synthetic construct
  source 1..22: mol_type = other RNA
acagtttagcaatccaaggaca

SEQ ID NO: 115010 - RNA, 22 nt, synthetic construct
  source 1..22: mol_type = other RNA
acagtttccctctgagagaagt

SEQ ID NO: 115011 - RNA, 22 nt, synthetic construct
  source 1..22: mol_type = other RNA
acagtttgaaactttaagagta

SEQ ID NO: 115012 - RNA, 22 nt, synthetic construct
  source 1..22: mol_type = other RNA
acagtttgagaagccacacagt

SEQ ID NO: 115013 - RNA, 22 nt, synthetic construct
  source 1..22: mol_type = other RNA
acagtttggcaatttctcaaaa

SEQ ID NO: 115014 - RNA, 22 nt, synthetic construct
  source 1..22: mol_type = other RNA
acagttttgaccaaaacaaaaa

SEQ ID NO: 115015 - RNA, 22 nt, synthetic construct
  source 1..22: mol_type = other RNA
acagtttttacatgtagttttc

SEQ ID NO: 115016 - RNA, 22 nt, synthetic construct
  source 1..22: mol_type = other RNA
acataaaaaaggaatctgggcc

SEQ ID NO: 115017 - RNA, 22 nt, synthetic construct
  source 1..22: mol_type = other RNA
acataaaagcgtactgtgatta

SEQ ID NO: 115018 - RNA, 22 nt, synthetic construct
  source 1..22: mol_type = other RNA
acataaaaggatatgggccaaa

SEQ ID NO: 115019 - RNA, 22 nt, synthetic construct
  source 1..22: mol_type = other RNA
acataaagtcttgctggaagtt

SEQ ID NO: 115020 - RNA, 22 nt, synthetic construct
  source 1..22: mol_type = other RNA
acataaatagggtgctactcaa

SEQ ID NO: 115021 - RNA, 22 nt, synthetic construct
  source 1..22: mol_type = other RNA
acataaatcacaggaaagatgt

SEQ ID NO: 115022 - RNA, 22 nt, synthetic construct
  source 1..22: mol_type = other RNA
acataaatttgccacattttac

SEQ ID NO: 115023 - RNA, 22 nt, synthetic construct
  source 1..22: mol_type = other RNA
acataactgtaaagtaatcaag

SEQ ID NO: 115024 - RNA, 22 nt, synthetic construct
  source 1..22: mol_type = other RNA
acataacttcccagacagggaa

SEQ ID NO: 115025 - RNA, 22 nt, synthetic construct
  source 1..22: mol_type = other RNA
acataagggggaatctactctt

SEQ ID NO: 115026 - RNA, 22 nt, synthetic construct
  source 1..22: mol_type = other RNA
acataagggtctgttttacatg

SEQ ID NO: 115027 - RNA, 22 nt, synthetic construct
  source 1..22: mol_type = other RNA
acataatcaaattcacagaact

SEQ ID NO: 115028 - RNA, 22 nt, synthetic construct
  source 1..22: mol_type = other RNA
acataatctttggtgctgataa

SEQ ID NO: 115029 - RNA, 22 nt, synthetic construct
  source 1..22: mol_type = other RNA
acataattgaacccactgagca

SEQ ID NO: 115030 - RNA, 22 nt, synthetic construct
  source 1..22: mol_type = other RNA
acatacaaaccaaaaaatgtgg

SEQ ID NO: 115031 - RNA, 22 nt, synthetic construct
  source 1..22: mol_type = other RNA
acatacacagggaaaactacat

SEQ ID NO: 115032 - RNA, 22 nt, synthetic construct
  source 1..22: mol_type = other RNA
acatacacatcagattttgaag

SEQ ID NO: 115033 - RNA, 22 nt, synthetic construct
  source 1..22: mol_type = other RNA
acatacatgagaaatgttaaga

SEQ ID NO: 115034 - RNA, 22 nt, synthetic construct
  source 1..22: mol_type = other RNA
acataccaaaacccttgggatg

SEQ ID NO: 115035 - RNA, 22 nt, synthetic construct
  source 1..22: mol_type = other RNA
acataccccaaccctacctagg

SEQ ID NO: 115036 - RNA, 22 nt, synthetic construct
  source 1..22: mol_type = other RNA
acataccgacggctcaggcctg

SEQ ID NO: 115037 - RNA, 22 nt, synthetic construct
  source 1..22: mol_type = other RNA
acataccgagtaatgggatggc

SEQ ID NO: 115038 - RNA, 22 nt, synthetic construct
  source 1..22: mol_type = other RNA
acatactgaaagacagacctct

SEQ ID NO: 115039 - RNA, 22 nt, synthetic construct
  source 1..22: mol_type = other RNA
acatactgcactctcaaaatta

SEQ ID NO: 115040 - RNA, 22 nt, synthetic construct
  source 1..22: mol_type = other RNA
acatactgcatattgaagccag

SEQ ID NO: 115041 - RNA, 22 nt, synthetic construct
  source 1..22: mol_type = other RNA
acatactgtcacaggctttcct

SEQ ID NO: 115042 - RNA, 22 nt, synthetic construct
  source 1..22: mol_type = other RNA
acatacttcaaagggtcactat

SEQ ID NO: 115043 - RNA, 22 nt, synthetic construct
  source 1..22: mol_type = other RNA
acatagaagcgctcttcaagca

SEQ ID NO: 115044 - RNA, 22 nt, synthetic construct
  source 1..22: mol_type = other RNA
acatagacctgaatgactgttg

SEQ ID NO: 115045 - RNA, 22 nt, synthetic construct
  source 1..22: mol_type = other RNA
acatagatgaaactaaatgtga

SEQ ID NO: 115046 - RNA, 22 nt, synthetic construct
  source 1..22: mol_type = other RNA
acatagcaaggaagcagaatgt

SEQ ID NO: 115047 - RNA, 22 nt, synthetic construct
  source 1..22: mol_type = other RNA
acataggatagttaaacatgta

SEQ ID NO: 115048 - RNA, 22 nt, synthetic construct
  source 1..22: mol_type = other RNA
acataggcttagtacagccatc

SEQ ID NO: 115049 - RNA, 22 nt, synthetic construct
  source 1..22: mol_type = other RNA
acatagtccactttccatctta

SEQ ID NO: 115050 - RNA, 22 nt, synthetic construct
  source 1..22: mol_type = other RNA
acatagtgctcttctgatcaca

SEQ ID NO: 115051 - RNA, 22 nt, synthetic construct
  source 1..22: mol_type = other RNA
acatagtgttaattatttgtgc

SEQ ID NO: 115052 - RNA, 22 nt, synthetic construct
  source 1..22: mol_type = other RNA
acatataaatcaatctgtttcc

SEQ ID NO: 115053 - RNA, 22 nt, synthetic construct
  source 1..22: mol_type = other RNA
acatataatccaactgcagtct

SEQ ID NO: 115054 - RNA, 22 nt, synthetic construct
  source 1..22: mol_type = other RNA
acatatagaagtaaatcccggc

SEQ ID NO: 115055 - RNA, 22 nt, synthetic construct
  source 1..22: mol_type = other RNA
acatatcagggatcacagatac

SEQ ID NO: 115056 - RNA, 22 nt, synthetic construct
  source 1..22: mol_type = other RNA
acatatccttctacatcccccc

SEQ ID NO: 115057 - RNA, 22 nt, synthetic construct
  source 1..22: mol_type = other RNA
acatatctaattaacatccaga

SEQ ID NO: 115058 - RNA, 22 nt, synthetic construct
  source 1..22: mol_type = other RNA
acatatctttaggtgttttttc

SEQ ID NO: 115059 - RNA, 22 nt, synthetic construct
  source 1..22: mol_type = other RNA
acatatgcaggaccaactttaa

SEQ ID NO: 115060 - RNA, 22 nt, synthetic construct
  source 1..22: mol_type = other RNA
acatatgcatgttatttgggga

SEQ ID NO: 115061 - RNA, 22 nt, synthetic construct
  source 1..22: mol_type = other RNA
acatatgccggctgttaggtat

SEQ ID NO: 115062 - RNA, 22 nt, synthetic construct
  source 1..22: mol_type = other RNA
acatatggcaattccataaatg

SEQ ID NO: 115063 - RNA, 22 nt, synthetic construct
  source 1..22: mol_type = other RNA
acatatgtcagatggtaaattg

SEQ ID NO: 115064 - RNA, 22 nt, synthetic construct
  source 1..22: mol_type = other RNA
acatatgttttgcttcgaagct

SEQ ID NO: 115065 - RNA, 22 nt, synthetic construct
  source 1..22: mol_type = other RNA
acatattgaataatttccaggt

SEQ ID NO: 115066 - RNA, 22 nt, synthetic construct
  source 1..22: mol_type = other RNA
acatatttatcaacacatagtg

SEQ ID NO: 115067 - RNA, 22 nt, synthetic construct
  source 1..22: mol_type = other RNA
acatatttatttccttaagcca

SEQ ID NO: 115068 - RNA, 22 nt, synthetic construct
  source 1..22: mol_type = other RNA
acatattttaaaagtcagctag

SEQ ID NO: 115069 - RNA, 22 nt, synthetic construct
  source 1..22: mol_type = other RNA
acatattttatgctttgtctct

SEQ ID NO: 115070 - RNA, 22 nt, synthetic construct
  source 1..22: mol_type = other RNA
acatattttgtaacgtgtatag

SEQ ID NO: 115071 - RNA, 22 nt, synthetic construct
  source 1..22: mol_type = other RNA
acatcaaagtcccctgtaatta

SEQ ID NO: 115072 - RNA, 22 nt, synthetic construct
  source 1..22: mol_type = other RNA
acatcaagggtggtgctggact

SEQ ID NO: 115073 - RNA, 22 nt, synthetic construct
  source 1..22: mol_type = other RNA
acatcacaatgcgtttgttaga

SEQ ID NO: 115074 - RNA, 22 nt, synthetic construct
  source 1..22: mol_type = other RNA
acatcacagacagggaatgggg

SEQ ID NO: 115075 - RNA, 22 nt, synthetic construct
  source 1..22: mol_type = other RNA
acatcacccagctcgaccaggg

SEQ ID NO: 115076 - RNA, 22 nt, synthetic construct
  source 1..22: mol_type = other RNA
acatcactaagagtgaaaaggc

SEQ ID NO: 115077 - RNA, 22 nt, synthetic construct
  source 1..22: mol_type = other RNA
acatcactagctattagagaaa

SEQ ID NO: 115078 - RNA, 22 nt, synthetic construct
  source 1..22: mol_type = other RNA
acatcagacacctacattaatc

SEQ ID NO: 115079 - RNA, 22 nt, synthetic construct
  source 1..22: mol_type = other RNA
acatcagcagtgaccatatttc

SEQ ID NO: 115080 - RNA, 22 nt, synthetic construct
  source 1..22: mol_type = other RNA
acatcagcgctaagtgcatttc

SEQ ID NO: 115081 - RNA, 22 nt, synthetic construct
  source 1..22: mol_type = other RNA
acatcagtgctgctctgacgtt

SEQ ID NO: 115082 - RNA, 22 nt, synthetic construct
  source 1..22: mol_type = other RNA
acatcagttaccaccaagaaaa

SEQ ID NO: 115083 - RNA, 22 nt, synthetic construct
  source 1..22: mol_type = other RNA
acatcatctaatttcccatttg

SEQ ID NO: 115084 - RNA, 22 nt, synthetic construct
  source 1..22: mol_type = other RNA
acatcatgatttaatagaggtc

SEQ ID NO: 115085 - RNA, 22 nt, synthetic construct
  source 1..22: mol_type = other RNA
acatccacaacattgtgcaacc

SEQ ID NO: 115086 - RNA, 22 nt, synthetic construct
  source 1..22: mol_type = other RNA
acatccacagctttcttttcca

SEQ ID NO: 115087 - RNA, 22 nt, synthetic construct
  source 1..22: mol_type = other RNA
acatccacgcgtaagggtacag

SEQ ID NO: 115088 - RNA, 22 nt, synthetic construct
  source 1..22: mol_type = other RNA
acatccagaagtcactttttat

SEQ ID NO: 115089 - RNA, 22 nt, synthetic construct
  source 1..22: mol_type = other RNA
acatccagctaattttcattac

SEQ ID NO: 115090 - RNA, 22 nt, synthetic construct
  source 1..22: mol_type = other RNA
acatccattactcgtggttata

SEQ ID NO: 115091 - RNA, 22 nt, synthetic construct
  source 1..22: mol_type = other RNA
acatcccaagtgcccattaaca

SEQ ID NO: 115092 - RNA, 22 nt, synthetic construct
  source 1..22: mol_type = other RNA
acatccccccacccctgctctg

SEQ ID NO: 115093 - RNA, 22 nt, synthetic construct
  source 1..22: mol_type = other RNA
acatccctatgcaataactcaa

SEQ ID NO: 115094 - RNA, 22 nt, synthetic construct
  source 1..22: mol_type = other RNA
acatcctaatacagtaaagccc

SEQ ID NO: 115095 - RNA, 22 nt, synthetic construct
  source 1..22: mol_type = other RNA
acatcctgatttaggccactct

SEQ ID NO: 115096 - RNA, 22 nt, synthetic construct
  source 1..22: mol_type = other RNA
acatccttgccaacagttactt

SEQ ID NO: 115097 - RNA, 22 nt, synthetic construct
  source 1..22: mol_type = other RNA
acatcctttaatttgggtttga

SEQ ID NO: 115098 - RNA, 22 nt, synthetic construct
  source 1..22: mol_type = other RNA
acatcctttgcgtctgtgatta

SEQ ID NO: 115099 - RNA, 22 nt, synthetic construct
  source 1..22: mol_type = other RNA
acatcgtaaaacctcatctcta

SEQ ID NO: 115100 - RNA, 22 nt, synthetic construct
  source 1..22: mol_type = other RNA
acatctatgaagtaattgtttg

SEQ ID NO: 115101 - RNA, 22 nt, synthetic construct
  source 1..22: mol_type = other RNA
acatctcccataccacctgtca

SEQ ID NO: 115102 - RNA, 22 nt, synthetic construct
  source 1..22: mol_type = other RNA
acatctgagacatcacaatgcg

SEQ ID NO: 115103 - RNA, 22 nt, synthetic construct
  source 1..22: mol_type = other RNA
acatctgcctcccgggtccagg

SEQ ID NO: 115104 - RNA, 22 nt, synthetic construct
  source 1..22: mol_type = other RNA
acatctggaaggaaacactata

SEQ ID NO: 115105 - RNA, 22 nt, synthetic construct
  source 1..22: mol_type = other RNA
acatctggatcctgtctcagag

SEQ ID NO: 115106 - RNA, 22 nt, synthetic construct
  source 1..22: mol_type = other RNA
acatctggcagcaggggctaag

SEQ ID NO: 115107 - RNA, 22 nt, synthetic construct
  source 1..22: mol_type = other RNA
acatctgtcttgtgcatccttt

SEQ ID NO: 115108 - RNA, 22 nt, synthetic construct
  source 1..22: mol_type = other RNA
acatcttgcataactcgtaatg

SEQ ID NO: 115109 - RNA, 22 nt, synthetic construct
  source 1..22: mol_type = other RNA
acatctttcctgtgatttatgt

SEQ ID NO: 115110 - RNA, 22 nt, synthetic construct
  source 1..22: mol_type = other RNA
acatgaaaagatactcaacatc

SEQ ID NO: 115111 - RNA, 22 nt, synthetic construct
  source 1..22: mol_type = other RNA
acatgaaatactcaaactatgc

SEQ ID NO: 115112 - RNA, 22 nt, synthetic construct
  source 1..22: mol_type = other RNA
acatgaacaagttacaaacata

SEQ ID NO: 115113 - RNA, 22 nt, synthetic construct
  source 1..22: mol_type = other RNA
acatgaacaatccttctaatca

SEQ ID NO: 115114 - RNA, 22 nt, synthetic construct
  source 1..22: mol_type = other RNA
acatgaacctgcatggtgtaaa

SEQ ID NO: 115115 - RNA, 22 nt, synthetic construct
  source 1..22: mol_type = other RNA
acatgaacgagaacaaaacaag

SEQ ID NO: 115116 - RNA, 22 nt, synthetic construct
  source 1..22: mol_type = other RNA
acatgaactactcaaagaaaat

SEQ ID NO: 115117 - RNA, 22 nt, synthetic construct
  source 1..22: mol_type = other RNA
acatgaaggaaggattggaatg

SEQ ID NO: 115118 - RNA, 22 nt, synthetic construct
  source 1..22: mol_type = other RNA
acatgaagtcctcaatcatgtc

SEQ ID NO: 115119 - RNA, 22 nt, synthetic construct
  source 1..22: mol_type = other RNA
acatgaataaccaatgtcagag

SEQ ID NO: 115120 - RNA, 22 nt, synthetic construct
  source 1..22: mol_type = other RNA
acatgaatggaaaattcttggt

SEQ ID NO: 115121 - RNA, 22 nt, synthetic construct
  source 1..22: mol_type = other RNA
acatgacagatcccaaaaaggt

SEQ ID NO: 115122 - RNA, 22 nt, synthetic construct
  source 1..22: mol_type = other RNA
acatgacaggtgagtggactgt

SEQ ID NO: 115123 - RNA, 22 nt, synthetic construct
  source 1..22: mol_type = other RNA
acatgacatggttttcctacta

SEQ ID NO: 115124 - RNA, 22 nt, synthetic construct
  source 1..22: mol_type = other RNA
acatgacctatctattaacaga

SEQ ID NO: 115125 - RNA, 22 nt, synthetic construct
  source 1..22: mol_type = other RNA
acatgactggccatccttccca

SEQ ID NO: 115126 - RNA, 22 nt, synthetic construct
  source 1..22: mol_type = other RNA
acatgagaaatgttaagattca

SEQ ID NO: 115127 - RNA, 22 nt, synthetic construct
  source 1..22: mol_type = other RNA
acatgagagaaaattgttcatg

SEQ ID NO: 115128 - RNA, 22 nt, synthetic construct
  source 1..22: mol_type = other RNA
acatgagagctaagggaagttt

SEQ ID NO: 115129 - RNA, 22 nt, synthetic construct
  source 1..22: mol_type = other RNA
acatgaggaaagcaggttgcat

SEQ ID NO: 115130 - RNA, 22 nt, synthetic construct
  source 1..22: mol_type = other RNA
acatgaggcctctccccttgac

SEQ ID NO: 115131 - RNA, 22 nt, synthetic construct
  source 1..22: mol_type = other RNA
acatgaggtcacccaagccaca

SEQ ID NO: 115132 - RNA, 22 nt, synthetic construct
  source 1..22: mol_type = other RNA
acatgagtaaaaagaaatctgc

SEQ ID NO: 115133 - RNA, 22 nt, synthetic construct
  source 1..22: mol_type = other RNA
acatgattgaggacttcatgta

SEQ ID NO: 115134 - RNA, 22 nt, synthetic construct
  source 1..22: mol_type = other RNA
acatgattgggtcaacaaacta

SEQ ID NO: 115135 - RNA, 22 nt, synthetic construct
  source 1..22: mol_type = other RNA
acatgcacaaggtcaagagcgg

SEQ ID NO: 115136 - RNA, 22 nt, synthetic construct
  source 1..22: mol_type = other RNA
acatgcacactagacctttctt

SEQ ID NO: 115137 - RNA, 22 nt, synthetic construct
  source 1..22: mol_type = other RNA
acatgcacgagaaaagcacagg

SEQ ID NO: 115138 - RNA, 22 nt, synthetic construct
  source 1..22: mol_type = other RNA
acatgcatatgtttgtaacttg

SEQ ID NO: 115139 - RNA, 22 nt, synthetic construct
  source 1..22: mol_type = other RNA
acatgcatgcacacagagggag

SEQ ID NO: 115140 - RNA, 22 nt, synthetic construct
  source 1..22: mol_type = other RNA
acatgccacaccacatccagct

SEQ ID NO: 115141 - RNA, 22 nt, synthetic construct
  source 1..22: mol_type = other RNA
acatgccagctttggctgaaat

SEQ ID NO: 115142 - RNA, 22 nt, synthetic construct
  source 1..22: mol_type = other RNA
acatgctaagtgtttaggatat

SEQ ID NO: 115143 - RNA, 22 nt, synthetic construct
  source 1..22: mol_type = other RNA
acatgctctgataggataatgt

SEQ ID NO: 115144 - RNA, 22 nt, synthetic construct
  source 1..22: mol_type = other RNA
acatgctcttaagtatttttgt

SEQ ID NO: 115145 - RNA, 22 nt, synthetic construct
  source 1..22: mol_type = other RNA
acatgctgaggccccaggggac

SEQ ID NO: 115146 - RNA, 22 nt, synthetic construct
  source 1..22: mol_type = other RNA
acatgcttagccttccagagac

SEQ ID NO: 115147 - RNA, 22 nt, synthetic construct
  source 1..22: mol_type = other RNA
acatgcttccaaaagcaggccc

SEQ ID NO: 115148 - RNA, 22 nt, synthetic construct
  source 1..22: mol_type = other RNA
acatggaaacaacctaaatgtc

SEQ ID NO: 115149 - RNA, 22 nt, synthetic construct
  source 1..22: mol_type = other RNA
acatggagacagtgagcatgct

SEQ ID NO: 115150 - RNA, 22 nt, synthetic construct
  source 1..22: mol_type = other RNA
acatggatatttggccgggcgc

SEQ ID NO: 115151 - RNA, 22 nt, synthetic construct
  source 1..22: mol_type = other RNA
acatggcacatgtctacctgtg

SEQ ID NO: 115152 - RNA, 22 nt, synthetic construct
  source 1..22: mol_type = other RNA
acatggcatcggggcctacagt

SEQ ID NO: 115153 - RNA, 22 nt, synthetic construct
  source 1..22: mol_type = other RNA
acatggccagtatctcctttcc

SEQ ID NO: 115154 - RNA, 22 nt, synthetic construct
  source 1..22: mol_type = other RNA
acatggcttagaaatgaagatg

SEQ ID NO: 115155 - RNA, 22 nt, synthetic construct
  source 1..22: mol_type = other RNA
acatgggaatgcatatatctgt

SEQ ID NO: 115156 - RNA, 22 nt, synthetic construct
  source 1..22: mol_type = other RNA
acatgggcatgggtccaagaca

SEQ ID NO: 115157 - RNA, 22 nt, synthetic construct
  source 1..22: mol_type = other RNA
acatgggctaaataaaacatta

SEQ ID NO: 115158 - RNA, 22 nt, synthetic construct
  source 1..22: mol_type = other RNA
acatggtaatttgtccatctgg

SEQ ID NO: 115159 - RNA, 22 nt, synthetic construct
  source 1..22: mol_type = other RNA
acatggtagaccatataatcta

SEQ ID NO: 115160 - RNA, 22 nt, synthetic construct
  source 1..22: mol_type = other RNA
acatggtccacagaggcttttt

SEQ ID NO: 115161 - RNA, 22 nt, synthetic construct
  source 1..22: mol_type = other RNA
acatggtgataactggtgcttt

SEQ ID NO: 115162 - RNA, 22 nt, synthetic construct
  source 1..22: mol_type = other RNA
acatggttctgtgctagatgct

SEQ ID NO: 115163 - RNA, 22 nt, synthetic construct
  source 1..22: mol_type = other RNA
acatggtttgatcccactagtg

SEQ ID NO: 115164 - RNA, 22 nt, synthetic construct
  source 1..22: mol_type = other RNA
acatggttttcctactaacaag

SEQ ID NO: 115165 - RNA, 22 nt, synthetic construct
  source 1..22: mol_type = other RNA
acatgtaaaaactgtttggctg

SEQ ID NO: 115166 - RNA, 22 nt, synthetic construct
  source 1..22: mol_type = other RNA
acatgtaaaacagacccttatg

SEQ ID NO: 115167 - RNA, 22 nt, synthetic construct
  source 1..22: mol_type = other RNA
acatgtacgccaattttcatag

SEQ ID NO: 115168 - RNA, 22 nt, synthetic construct
  source 1..22: mol_type = other RNA
acatgtagatatgggagtccct

SEQ ID NO: 115169 - RNA, 22 nt, synthetic construct
  source 1..22: mol_type = other RNA
acatgtagttttccctgtgtat

SEQ ID NO: 115170 - RNA, 22 nt, synthetic construct
  source 1..22: mol_type = other RNA
acatgtatgtttctcattcttc

SEQ ID NO: 115171 - RNA, 22 nt, synthetic construct
  source 1..22: mol_type = other RNA
acatgtcagccacaagacataa

SEQ ID NO: 115172 - RNA, 22 nt, synthetic construct
  source 1..22: mol_type = other RNA
acatgtcatgggccgggcgtag

SEQ ID NO: 115173 - RNA, 22 nt, synthetic construct
  source 1..22: mol_type = other RNA
acatgtcatgttcccggattgg

SEQ ID NO: 115174 - RNA, 22 nt, synthetic construct
  source 1..22: mol_type = other RNA
acatgtcttggtgtgctctttt

SEQ ID NO: 115175 - RNA, 22 nt, synthetic construct
  source 1..22: mol_type = other RNA
acatgtgaggatttatttctgg

SEQ ID NO: 115176 - RNA, 22 nt, synthetic construct
  source 1..22: mol_type = other RNA
acatgtggaacataatctttgg

SEQ ID NO: 115177 - RNA, 22 nt, synthetic construct
  source 1..22: mol_type = other RNA
acatgtggcttgtggctacacc

SEQ ID NO: 115178 - RNA, 22 nt, synthetic construct
  source 1..22: mol_type = other RNA
acatgtggttattgagtctgta

SEQ ID NO: 115179 - RNA, 22 nt, synthetic construct
  source 1..22: mol_type = other RNA
acatgtgtaaaacatctggaag

SEQ ID NO: 115180 - RNA, 22 nt, synthetic construct
  source 1..22: mol_type = other RNA
acatgtgtatttagggagcata

SEQ ID NO: 115181 - RNA, 22 nt, synthetic construct
  source 1..22: mol_type = other RNA
acatgtgttttatttaggccct

SEQ ID NO: 115182 - RNA, 22 nt, synthetic construct
  source 1..22: mol_type = other RNA
acatgttactcattatggttgt

SEQ ID NO: 115183 - RNA, 22 nt, synthetic construct
  source 1..22: mol_type = other RNA
acatgttagattaggaaacaga

SEQ ID NO: 115184 - RNA, 22 nt, synthetic construct
  source 1..22: mol_type = other RNA
acatgttaggttgaaagttcag

SEQ ID NO: 115185 - RNA, 22 nt, synthetic construct
  source 1..22: mol_type = other RNA
acatgttccctagaacttaaaa

SEQ ID NO: 115186 - RNA, 22 nt, synthetic construct
  source 1..22: mol_type = other RNA
acatgttgagtcttgtttaccc

SEQ ID NO: 115187 - RNA, 22 nt, synthetic construct
  source 1..22: mol_type = other RNA
acatgttgtgtagaaatgtgga

SEQ ID NO: 115188 - RNA, 22 nt, synthetic construct
  source 1..22: mol_type = other RNA
acatgtttaactatcctatgtg

SEQ ID NO: 115189 - RNA, 22 nt, synthetic construct
  source 1..22: mol_type = other RNA
acatgtttagcaagattactgg

SEQ ID NO: 115190 - RNA, 22 nt, synthetic construct
  source 1..22: mol_type = other RNA
acatgtttggtcaattgatctg

SEQ ID NO: 115191 - RNA, 22 nt, synthetic construct
  source 1..22: mol_type = other RNA
acatgttttgttgttgttgttg

SEQ ID NO: 115192 - RNA, 22 nt, synthetic construct
  source 1..22: mol_type = other RNA
acattaaagacagctactaaac

SEQ ID NO: 115193 - RNA, 22 nt, synthetic construct
  source 1..22: mol_type = other RNA
acattaaataagggcattttca

SEQ ID NO: 115194 - RNA, 22 nt, synthetic construct
  source 1..22: mol_type = other RNA
acattaactatggacatgagga

SEQ ID NO: 115195 - RNA, 22 nt, synthetic construct
  source 1..22: mol_type = other RNA
acattaaggaagaattaacact

SEQ ID NO: 115196 - RNA, 22 nt, synthetic construct
  source 1..22: mol_type = other RNA
acattaagggaaacagggttac

SEQ ID NO: 115197 - RNA, 22 nt, synthetic construct
  source 1..22: mol_type = other RNA
acattaataagatcatacacct

SEQ ID NO: 115198 - RNA, 22 nt, synthetic construct
  source 1..22: mol_type = other RNA
acattaatctcatccacaatga

SEQ ID NO: 115199 - RNA, 22 nt, synthetic construct
  source 1..22: mol_type = other RNA
acattacaacagcaaggctcct

SEQ ID NO: 115200 - RNA, 22 nt, synthetic construct
  source 1..22: mol_type = other RNA
acattacaattgataccatgaa

SEQ ID NO: 115201 - RNA, 22 nt, synthetic construct
  source 1..22: mol_type = other RNA
acattacagaaaaaattagcct

SEQ ID NO: 115202 - RNA, 22 nt, synthetic construct
  source 1..22: mol_type = other RNA
acattaccaataaaagcctcat

SEQ ID NO: 115203 - RNA, 22 nt, synthetic construct
  source 1..22: mol_type = other RNA
acattagaatcatccggggagc

SEQ ID NO: 115204 - RNA, 22 nt, synthetic construct
  source 1..22: mol_type = other RNA
acattagagaagaatgagaaac

SEQ ID NO: 115205 - RNA, 22 nt, synthetic construct
  source 1..22: mol_type = other RNA
acattagccactctgaattctc

SEQ ID NO: 115206 - RNA, 22 nt, synthetic construct
  source 1..22: mol_type = other RNA
acattagcctagacctcaaatt

SEQ ID NO: 115207 - RNA, 22 nt, synthetic construct
  source 1..22: mol_type = other RNA
acattaggctctgggtcagaat

SEQ ID NO: 115208 - RNA, 22 nt, synthetic construct
  source 1..22: mol_type = other RNA
acattagtggaaaaactgcagc

SEQ ID NO: 115209 - RNA, 22 nt, synthetic construct
  source 1..22: mol_type = other RNA
acattagtggtggtagtaagga

SEQ ID NO: 115210 - RNA, 22 nt, synthetic construct
  source 1..22: mol_type = other RNA
acattatcctatcagagcatgt

SEQ ID NO: 115211 - RNA, 22 nt, synthetic construct
  source 1..22: mol_type = other RNA
acattatcttctaccttttgtt

SEQ ID NO: 115212 - RNA, 22 nt, synthetic construct
  source 1..22: mol_type = other RNA
acattattcttacagtgacata

SEQ ID NO: 115213 - RNA, 22 nt, synthetic construct
  source 1..22: mol_type = other RNA
acattcaacaacatggatgaac

SEQ ID NO: 115214 - RNA, 22 nt, synthetic construct
  source 1..22: mol_type = other RNA
acattcaagcagaaatgagttc

SEQ ID NO: 115215 - RNA, 22 nt, synthetic construct
  source 1..22: mol_type = other RNA
acattcacagcgtgcaccttac

SEQ ID NO: 115216 - RNA, 22 nt, synthetic construct
  source 1..22: mol_type = other RNA
acattcagaggtatttggggct

SEQ ID NO: 115217 - RNA, 22 nt, synthetic construct
  source 1..22: mol_type = other RNA
acattcatccctctaaataggt

SEQ ID NO: 115218 - RNA, 22 nt, synthetic construct
  source 1..22: mol_type = other RNA
acattcattcatgacaagaatc

SEQ ID NO: 115219 - RNA, 22 nt, synthetic construct
  source 1..22: mol_type = other RNA
acattccaagagaggaataaat

SEQ ID NO: 115220 - RNA, 22 nt, synthetic construct
  source 1..22: mol_type = other RNA
acattccagaccagcagttcaa

SEQ ID NO: 115221 - RNA, 22 nt, synthetic construct
  source 1..22: mol_type = other RNA
acattcccaaatgtcttaagaa

SEQ ID NO: 115222 - RNA, 22 nt, synthetic construct
  source 1..22: mol_type = other RNA
acattccttccgacctgtagat

SEQ ID NO: 115223 - RNA, 22 nt, synthetic construct
  source 1..22: mol_type = other RNA
acattccttcttcacacattaa

SEQ ID NO: 115224 - RNA, 22 nt, synthetic construct
  source 1..22: mol_type = other RNA
acattcggccaagatctgtttt

SEQ ID NO: 115225 - RNA, 22 nt, synthetic construct
  source 1..22: mol_type = other RNA
acattctacagtattacacaga

SEQ ID NO: 115226 - RNA, 22 nt, synthetic construct
  source 1..22: mol_type = other RNA
acattctagtgatgggagatgg

SEQ ID NO: 115227 - RNA, 22 nt, synthetic construct
  source 1..22: mol_type = other RNA
acattctgcctgcagactgcag

SEQ ID NO: 115228 - RNA, 22 nt, synthetic construct
  source 1..22: mol_type = other RNA
acattctgcttccttgctatgt

SEQ ID NO: 115229 - RNA, 22 nt, synthetic construct
  source 1..22: mol_type = other RNA
acattcttaccttctaaaatca

SEQ ID NO: 115230 - RNA, 22 nt, synthetic construct
  source 1..22: mol_type = other RNA
acattcttcaccattccagcca

SEQ ID NO: 115231 - RNA, 22 nt, synthetic construct
  source 1..22: mol_type = other RNA
acattgaaggcagaattataga

SEQ ID NO: 115232 - RNA, 22 nt, synthetic construct
  source 1..22: mol_type = other RNA
acattgagtttcaatgactttt

SEQ ID NO: 115233 - RNA, 22 nt, synthetic construct
  source 1..22: mol_type = other RNA
acattgatacaatacttggatc

SEQ ID NO: 115234 - RNA, 22 nt, synthetic construct
  source 1..22: mol_type = other RNA
acattgattttgtatcctgaga

SEQ ID NO: 115235 - RNA, 22 nt, synthetic construct
  source 1..22: mol_type = other RNA
acattgcacagtctcccccagg

SEQ ID NO: 115236 - RNA, 22 nt, synthetic construct
  source 1..22: mol_type = other RNA
acattgcctccatatgggatgc

SEQ ID NO: 115237 - RNA, 22 nt, synthetic construct
  source 1..22: mol_type = other RNA
acattgccttcaagttgctttt

SEQ ID NO: 115238 - RNA, 22 nt, synthetic construct
  source 1..22: mol_type = other RNA
acattgccttcgcagggtgaaa

SEQ ID NO: 115239 - RNA, 22 nt, synthetic construct
  source 1..22: mol_type = other RNA
acattggaggataatatctgga

SEQ ID NO: 115240 - RNA, 22 nt, synthetic construct
  source 1..22: mol_type = other RNA
acattggttattcatgtttgtg

SEQ ID NO: 115241 - RNA, 22 nt, synthetic construct
  source 1..22: mol_type = other RNA
acattggtttgaaatgatcttt

SEQ ID NO: 115242 - RNA, 22 nt, synthetic construct
  source 1..22: mol_type = other RNA
acattgtaatcctgtttctcta

SEQ ID NO: 115243 - RNA, 22 nt, synthetic construct
  source 1..22: mol_type = other RNA
acattgtatttctgttagatgg

SEQ ID NO: 115244 - RNA, 22 nt, synthetic construct
  source 1..22: mol_type = other RNA
acattgtcttacataggcttag

SEQ ID NO: 115245 - RNA, 22 nt, synthetic construct
  source 1..22: mol_type = other RNA
acattgtgcaaccatccccgct

SEQ ID NO: 115246 - RNA, 22 nt, synthetic construct
  source 1..22: mol_type = other RNA
acatttaaaaattagccaggtg

SEQ ID NO: 115247 - RNA, 22 nt, synthetic construct
  source 1..22: mol_type = other RNA
acatttaaaagaaaatggccaa

SEQ ID NO: 115248 - RNA, 22 nt, synthetic construct
  source 1..22: mol_type = other RNA
acatttaaaatctgattcagtg

SEQ ID NO: 115249 - RNA, 22 nt, synthetic construct
  source 1..22: mol_type = other RNA
acatttaaaattgcagagtgtt

SEQ ID NO: 115250 - RNA, 22 nt, synthetic construct
  source 1..22: mol_type = other RNA
acatttaagaagggaacactaa

SEQ ID NO: 115251 - RNA, 22 nt, synthetic construct
  source 1..22: mol_type = other RNA
acatttagtttcatctatgtcc

SEQ ID NO: 115252 - RNA, 22 nt, synthetic construct
  source 1..22: mol_type = other RNA
acatttatacagttggaactct

SEQ ID NO: 115253 - RNA, 22 nt, synthetic construct
  source 1..22: mol_type = other RNA
acatttatggaattgccatatg

SEQ ID NO: 115254 - RNA, 22 nt, synthetic construct
  source 1..22: mol_type = other RNA
acatttcatagcagaatggccc

SEQ ID NO: 115255 - RNA, 22 nt, synthetic construct
  source 1..22: mol_type = other RNA
acatttcgccttctcagaagga

SEQ ID NO: 115256 - RNA, 22 nt, synthetic construct
  source 1..22: mol_type = other RNA
acatttctaatttccaagaacc

SEQ ID NO: 115257 - RNA, 22 nt, synthetic construct
  source 1..22: mol_type = other RNA
acatttctacacaacatgtttt

SEQ ID NO: 115258 - RNA, 22 nt, synthetic construct
  source 1..22: mol_type = other RNA
acatttctcatactttgtcagg

SEQ ID NO: 115259 - RNA, 22 nt, synthetic construct
  source 1..22: mol_type = other RNA
acatttctcatgtatgttttag

SEQ ID NO: 115260 - RNA, 22 nt, synthetic construct
  source 1..22: mol_type = other RNA
acatttcttctagtcacatttg

SEQ ID NO: 115261 - RNA, 22 nt, synthetic construct
  source 1..22: mol_type = other RNA
acatttgaaagaaagaaggcca

SEQ ID NO: 115262 - RNA, 22 nt, synthetic construct
  source 1..22: mol_type = other RNA
acatttgaactcactggccagc

SEQ ID NO: 115263 - RNA, 22 nt, synthetic construct
  source 1..22: mol_type = other RNA
acatttgagggtgctgatcagg

SEQ ID NO: 115264 - RNA, 22 nt, synthetic construct
  source 1..22: mol_type = other RNA
acatttgcttaggctgttatta

SEQ ID NO: 115265 - RNA, 22 nt, synthetic construct
  source 1..22: mol_type = other RNA
acatttgctttactactgcatt

SEQ ID NO: 115266 - RNA, 22 nt, synthetic construct
  source 1..22: mol_type = other RNA
acatttgcttttcctggaaaac

SEQ ID NO: 115267 - RNA, 22 nt, synthetic construct
  source 1..22: mol_type = other RNA
acatttggaatagagagcccag

SEQ ID NO: 115268 - RNA, 22 nt, synthetic construct
  source 1..22: mol_type = other RNA
acatttgggaatgtggtcacac

SEQ ID NO: 115269 - RNA, 22 nt, synthetic construct
  source 1..22: mol_type = other RNA
acatttggttttactactgtac

SEQ ID NO: 115270 - RNA, 22 nt, synthetic construct
  source 1..22: mol_type = other RNA
acatttgttgcatccccattca

SEQ ID NO: 115271 - RNA, 22 nt, synthetic construct
  source 1..22: mol_type = other RNA
acattttaccaaaacagcttct

SEQ ID NO: 115272 - RNA, 22 nt, synthetic construct
  source 1..22: mol_type = other RNA
acattttagctggggcagcaaa

SEQ ID NO: 115273 - RNA, 22 nt, synthetic construct
  source 1..22: mol_type = other RNA
acattttattaggtgcacacaa

SEQ ID NO: 115274 - RNA, 22 nt, synthetic construct
  source 1..22: mol_type = other RNA
acattttatttatacaggtgct

SEQ ID NO: 115275 - RNA, 22 nt, synthetic construct
  source 1..22: mol_type = other RNA
acattttccctcctttttatca

SEQ ID NO: 115276 - RNA, 22 nt, synthetic construct
  source 1..22: mol_type = other RNA
acattttctctacagttaacaa

SEQ ID NO: 115277 - RNA, 22 nt, synthetic construct
  source 1..22: mol_type = other RNA
acattttcttatctaggcgaaa

SEQ ID NO: 115278 - RNA, 22 nt, synthetic construct
  source 1..22: mol_type = other RNA
acattttgaatcatgggagcca

SEQ ID NO: 115279 - RNA, 22 nt, synthetic construct
  source 1..22: mol_type = other RNA
acattttgagttattgcatagg

SEQ ID NO: 115280 - RNA, 22 nt, synthetic construct
  source 1..22: mol_type = other RNA
acattttgtgacaagttcagca

SEQ ID NO: 115281 - RNA, 22 nt, synthetic construct
  source 1..22: mol_type = other RNA
acattttgttcattcatctgtt

SEQ ID NO: 115282 - RNA, 22 nt, synthetic construct
  source 1..22: mol_type = other RNA
acatttttgacagccacgtgta

SEQ ID NO: 115283 - RNA, 22 nt, synthetic construct
  source 1..22: mol_type = other RNA
acattttttgcagagacggggt

SEQ ID NO: 115284 - RNA, 22 nt, synthetic construct
  source 1..22: mol_type = other RNA
acattttttggtttgtatgtgt

SEQ ID NO: 115285 - RNA, 22 nt, synthetic construct
  source 1..22: mol_type = other RNA
accaaaaaactacgagtatcat

SEQ ID NO: 115286 - RNA, 22 nt, synthetic construct
  source 1..22: mol_type = other RNA
accaaaaaagcaccagttatca

SEQ ID NO: 115287 - RNA, 22 nt, synthetic construct
  source 1..22: mol_type = other RNA
accaaaaaaggtgctgttgtat

SEQ ID NO: 115288 - RNA, 22 nt, synthetic construct
  source 1..22: mol_type = other RNA
accaaaaaatgtggcatatcac

SEQ ID NO: 115289 - RNA, 22 nt, synthetic construct
  source 1..22: mol_type = other RNA
accaaaaaccacatttcatagc

SEQ ID NO: 115290 - RNA, 22 nt, synthetic construct
  source 1..22: mol_type = other RNA
accaaaacaaaaaacaaacccc

SEQ ID NO: 115291 - RNA, 22 nt, synthetic construct
  source 1..22: mol_type = other RNA
accaaaacagcttcttgttaga

SEQ ID NO: 115292 - RNA, 22 nt, synthetic construct
  source 1..22: mol_type = other RNA
accaaaacccttgggatgcagc

SEQ ID NO: 115293 - RNA, 22 nt, synthetic construct
  source 1..22: mol_type = other RNA
accaaaacctggtatgagtgtt

SEQ ID NO: 115294 - RNA, 22 nt, synthetic construct
  source 1..22: mol_type = other RNA
accaaaagtcctgttcttttgt

SEQ ID NO: 115295 - RNA, 22 nt, synthetic construct
  source 1..22: mol_type = other RNA
accaaaatggagacccatactc

SEQ ID NO: 115296 - RNA, 22 nt, synthetic construct
  source 1..22: mol_type = other RNA
accaaacaccttacactcaaaa

SEQ ID NO: 115297 - RNA, 22 nt, synthetic construct
  source 1..22: mol_type = other RNA
accaaacactggaaatcacagg

SEQ ID NO: 115298 - RNA, 22 nt, synthetic construct
  source 1..22: mol_type = other RNA
accaaacatgtgaggatttatt

SEQ ID NO: 115299 - RNA, 22 nt, synthetic construct
  source 1..22: mol_type = other RNA
accaaacattgaaggcagaatt

SEQ ID NO: 115300 - RNA, 22 nt, synthetic construct
  source 1..22: mol_type = other RNA
accaaacgtttagatgaatgat

SEQ ID NO: 115301 - RNA, 22 nt, synthetic construct
  source 1..22: mol_type = other RNA
accaaactcaaaaggacatatt

SEQ ID NO: 115302 - RNA, 22 nt, synthetic construct
  source 1..22: mol_type = other RNA
accaaacttggtttattttctg

SEQ ID NO: 115303 - RNA, 22 nt, synthetic construct
  source 1..22: mol_type = other RNA
accaaagaaaggggaaggaatt

SEQ ID NO: 115304 - RNA, 22 nt, synthetic construct
  source 1..22: mol_type = other RNA
accaaagacttcaggaacacct

SEQ ID NO: 115305 - RNA, 22 nt, synthetic construct
  source 1..22: mol_type = other RNA
accaaagattatgttccacatg

SEQ ID NO: 115306 - RNA, 22 nt, synthetic construct
  source 1..22: mol_type = other RNA
accaaagatttactaaactgaa

SEQ ID NO: 115307 - RNA, 22 nt, synthetic construct
  source 1..22: mol_type = other RNA
accaaagcagaaatacagaccg

SEQ ID NO: 115308 - RNA, 22 nt, synthetic construct
  source 1..22: mol_type = other RNA
accaaatcatgaaagtggagaa

SEQ ID NO: 115309 - RNA, 22 nt, synthetic construct
  source 1..22: mol_type = other RNA
accaaatgcagaaaataaacca

SEQ ID NO: 115310 - RNA, 22 nt, synthetic construct
  source 1..22: mol_type = other RNA
accaaatgtggatagtgctttt

SEQ ID NO: 115311 - RNA, 22 nt, synthetic construct
  source 1..22: mol_type = other RNA
accaaattcacgagactgttag

SEQ ID NO: 115312 - RNA, 22 nt, synthetic construct
  source 1..22: mol_type = other RNA
accaacacaaagccttctctac

SEQ ID NO: 115313 - RNA, 22 nt, synthetic construct
  source 1..22: mol_type = other RNA
accaacacctgcagtggcgtgt

SEQ ID NO: 115314 - RNA, 22 nt, synthetic construct
  source 1..22: mol_type = other RNA
accaacagatcctcacatcagt

SEQ ID NO: 115315 - RNA, 22 nt, synthetic construct
  source 1..22: mol_type = other RNA
accaacatccacagctttcttt

SEQ ID NO: 115316 - RNA, 22 nt, synthetic construct
  source 1..22: mol_type = other RNA
accaacatggcacatgtctacc

SEQ ID NO: 115317 - RNA, 22 nt, synthetic construct
  source 1..22: mol_type = other RNA
accaacattgagtttcaatgac

SEQ ID NO: 115318 - RNA, 22 nt, synthetic construct
  source 1..22: mol_type = other RNA
accaacccttgttggacagctg

SEQ ID NO: 115319 - RNA, 22 nt, synthetic construct
  source 1..22: mol_type = other RNA
accaactccacattgtcttaat

SEQ ID NO: 115320 - RNA, 22 nt, synthetic construct
  source 1..22: mol_type = other RNA
accaactgaagcggggctgcca

SEQ ID NO: 115321 - RNA, 22 nt, synthetic construct
  source 1..22: mol_type = other RNA
accaagaaaaagcagagaaact

SEQ ID NO: 115322 - RNA, 22 nt, synthetic construct
  source 1..22: mol_type = other RNA
accaagaaaggacttcagtcct

SEQ ID NO: 115323 - RNA, 22 nt, synthetic construct
  source 1..22: mol_type = other RNA
accaagaacaaccttatctatt

SEQ ID NO: 115324 - RNA, 22 nt, synthetic construct
  source 1..22: mol_type = other RNA
accaagaattttccattcatgt

SEQ ID NO: 115325 - RNA, 22 nt, synthetic construct
  source 1..22: mol_type = other RNA
accaagacatgttaggttgaaa

SEQ ID NO: 115326 - RNA, 22 nt, synthetic construct
  source 1..22: mol_type = other RNA
accaagagcatagactttagag

SEQ ID NO: 115327 - RNA, 22 nt, synthetic construct
  source 1..22: mol_type = other RNA
accaagagtgtggctttaaggc

SEQ ID NO: 115328 - RNA, 22 nt, synthetic construct
  source 1..22: mol_type = other RNA
accaagcaacactaaagatttg

SEQ ID NO: 115329 - RNA, 22 nt, synthetic construct
  source 1..22: mol_type = other RNA
accaagcaagtaaaagaagatg

SEQ ID NO: 115330 - RNA, 22 nt, synthetic construct
  source 1..22: mol_type = other RNA
accaagcccaactttttctttt

SEQ ID NO: 115331 - RNA, 22 nt, synthetic construct
  source 1..22: mol_type = other RNA
accaagcccggcacggtggctc

SEQ ID NO: 115332 - RNA, 22 nt, synthetic construct
  source 1..22: mol_type = other RNA
accaagccctgccttaaaacat

SEQ ID NO: 115333 - RNA, 22 nt, synthetic construct
  source 1..22: mol_type = other RNA
accaaggctaagttgagaaact

SEQ ID NO: 115334 - RNA, 22 nt, synthetic construct
  source 1..22: mol_type = other RNA
accaaggctggagtgcagtggc

SEQ ID NO: 115335 - RNA, 22 nt, synthetic construct
  source 1..22: mol_type = other RNA
accaagggtgtgtttaatttcc

SEQ ID NO: 115336 - RNA, 22 nt, synthetic construct
  source 1..22: mol_type = other RNA
accaaggtttctctccaaggta

SEQ ID NO: 115337 - RNA, 22 nt, synthetic construct
  source 1..22: mol_type = other RNA
accaagtgccgcgttttttgtc

SEQ ID NO: 115338 - RNA, 22 nt, synthetic construct
  source 1..22: mol_type = other RNA
accaagttactagaagcacttt

SEQ ID NO: 115339 - RNA, 22 nt, synthetic construct
  source 1..22: mol_type = other RNA
accaagttgaatttctgtcctt

SEQ ID NO: 115340 - RNA, 22 nt, synthetic construct
  source 1..22: mol_type = other RNA
accaagtttaaccaattatgct

SEQ ID NO: 115341 - RNA, 22 nt, synthetic construct
  source 1..22: mol_type = other RNA
accaagtttggttcatttcagg

SEQ ID NO: 115342 - RNA, 22 nt, synthetic construct
  source 1..22: mol_type = other RNA
accaataaaagcctcatttgaa

SEQ ID NO: 115343 - RNA, 22 nt, synthetic construct
  source 1..22: mol_type = other RNA
accaataagaagtgaaaaatga

SEQ ID NO: 115344 - RNA, 22 nt, synthetic construct
  source 1..22: mol_type = other RNA
accaatcgcagggccattctgc

SEQ ID NO: 115345 - RNA, 22 nt, synthetic construct
  source 1..22: mol_type = other RNA
accaatgtcagagatctgaaat

SEQ ID NO: 115346 - RNA, 22 nt, synthetic construct
  source 1..22: mol_type = other RNA
accaatgttctcttttcctcgt

SEQ ID NO: 115347 - RNA, 22 nt, synthetic construct
  source 1..22: mol_type = other RNA
accaattaccataaagtcttcc

SEQ ID NO: 115348 - RNA, 22 nt, synthetic construct
  source 1..22: mol_type = other RNA
accaattatgctgagtgaatgg

SEQ ID NO: 115349 - RNA, 22 nt, synthetic construct
  source 1..22: mol_type = other RNA
accaattctccctgaaattgtc

SEQ ID NO: 115350 - RNA, 22 nt, synthetic construct
  source 1..22: mol_type = other RNA
accaattgttaacatttcttct

SEQ ID NO: 115351 - RNA, 22 nt, synthetic construct
  source 1..22: mol_type = other RNA
accaatttaccatctgacatat

SEQ ID NO: 115352 - RNA, 22 nt, synthetic construct
  source 1..22: mol_type = other RNA
accacaaacatgaataaccaat

SEQ ID NO: 115353 - RNA, 22 nt, synthetic construct
  source 1..22: mol_type = other RNA
accacaaggattaatctttctg

SEQ ID NO: 115354 - RNA, 22 nt, synthetic construct
  source 1..22: mol_type = other RNA
accacaatcttacccccatcac

SEQ ID NO: 115355 - RNA, 22 nt, synthetic construct
  source 1..22: mol_type = other RNA
accacacagagaacagcattat

SEQ ID NO: 115356 - RNA, 22 nt, synthetic construct
  source 1..22: mol_type = other RNA
accacactgacaggacagagca

SEQ ID NO: 115357 - RNA, 22 nt, synthetic construct
  source 1..22: mol_type = other RNA
accacacttgcttgggaacagc

SEQ ID NO: 115358 - RNA, 22 nt, synthetic construct
  source 1..22: mol_type = other RNA
accacagagcctaaaataggcc

SEQ ID NO: 115359 - RNA, 22 nt, synthetic construct
  source 1..22: mol_type = other RNA
accacaggcatgcgccatcaca

SEQ ID NO: 115360 - RNA, 22 nt, synthetic construct
  source 1..22: mol_type = other RNA
accacaggctctcttcaccaac

SEQ ID NO: 115361 - RNA, 22 nt, synthetic construct
  source 1..22: mol_type = other RNA
accacagtttgaaactttaaga

SEQ ID NO: 115362 - RNA, 22 nt, synthetic construct
  source 1..22: mol_type = other RNA
accacatccagctaattttcat

SEQ ID NO: 115363 - RNA, 22 nt, synthetic construct
  source 1..22: mol_type = other RNA
accacatgtggcttgtggctac

SEQ ID NO: 115364 - RNA, 22 nt, synthetic construct
  source 1..22: mol_type = other RNA
accacattcccaaatgtcttaa

SEQ ID NO: 115365 - RNA, 22 nt, synthetic construct
  source 1..22: mol_type = other RNA
accacattcggccaagatctgt

SEQ ID NO: 115366 - RNA, 22 nt, synthetic construct
  source 1..22: mol_type = other RNA
accacatttcatagcagaatgg

SEQ ID NO: 115367 - RNA, 22 nt, synthetic construct
  source 1..22: mol_type = other RNA
accacattttgttcattcatct

SEQ ID NO: 115368 - RNA, 22 nt, synthetic construct
  source 1..22: mol_type = other RNA
accaccaagaaaaagcagagaa

SEQ ID NO: 115369 - RNA, 22 nt, synthetic construct
  source 1..22: mol_type = other RNA
accaccacacttgcttgggaac

SEQ ID NO: 115370 - RNA, 22 nt, synthetic construct
  source 1..22: mol_type = other RNA
accaccacattcggccaagatc

SEQ ID NO: 115371 - RNA, 22 nt, synthetic construct
  source 1..22: mol_type = other RNA
accaccactaatgtcacatttt

SEQ ID NO: 115372 - RNA, 22 nt, synthetic construct
  source 1..22: mol_type = other RNA
accacccgtccaatttctttgg

SEQ ID NO: 115373 - RNA, 22 nt, synthetic construct
  source 1..22: mol_type = other RNA
accacccttgatgtcacaagcc

SEQ ID NO: 115374 - RNA, 22 nt, synthetic construct
  source 1..22: mol_type = other RNA
accacctaactactaataaatg

SEQ ID NO: 115375 - RNA, 22 nt, synthetic construct
  source 1..22: mol_type = other RNA
accacctgaaatctgatttgtt

SEQ ID NO: 115376 - RNA, 22 nt, synthetic construct
  source 1..22: mol_type = other RNA
accacctgggggagactgtgca

SEQ ID NO: 115377 - RNA, 22 nt, synthetic construct
  source 1..22: mol_type = other RNA
accacctgtcagaaacaccaac

SEQ ID NO: 115378 - RNA, 22 nt, synthetic construct
  source 1..22: mol_type = other RNA
accacgagtaatggatgttttt

SEQ ID NO: 115379 - RNA, 22 nt, synthetic construct
  source 1..22: mol_type = other RNA
accacgcagaacagtgtttaca

SEQ ID NO: 115380 - RNA, 22 nt, synthetic construct
  source 1..22: mol_type = other RNA
accacgcagtttgttctgctgt

SEQ ID NO: 115381 - RNA, 22 nt, synthetic construct
  source 1..22: mol_type = other RNA
accacgcatctggtctatctca

SEQ ID NO: 115382 - RNA, 22 nt, synthetic construct
  source 1..22: mol_type = other RNA
accacgtccggtcgttggattt

SEQ ID NO: 115383 - RNA, 22 nt, synthetic construct
  source 1..22: mol_type = other RNA
accactaaggtcaacacatcag

SEQ ID NO: 115384 - RNA, 22 nt, synthetic construct
  source 1..22: mol_type = other RNA
accactaatgtcacattttctt

SEQ ID NO: 115385 - RNA, 22 nt, synthetic construct
  source 1..22: mol_type = other RNA
accactacacccggctaattaa

SEQ ID NO: 115386 - RNA, 22 nt, synthetic construct
  source 1..22: mol_type = other RNA
accactagagtattacctatga

SEQ ID NO: 115387 - RNA, 22 nt, synthetic construct
  source 1..22: mol_type = other RNA
accactagcaaactactgatag

SEQ ID NO: 115388 - RNA, 22 nt, synthetic construct
  source 1..22: mol_type = other RNA
accactataatccagatggaca

SEQ ID NO: 115389 - RNA, 22 nt, synthetic construct
  source 1..22: mol_type = other RNA
accactatctaataaaatagca

SEQ ID NO: 115390 - RNA, 22 nt, synthetic construct
  source 1..22: mol_type = other RNA
accactccaccttagcccaagc

SEQ ID NO: 115391 - RNA, 22 nt, synthetic construct
  source 1..22: mol_type = other RNA
accactcccggccgtatttttt

SEQ ID NO: 115392 - RNA, 22 nt, synthetic construct
  source 1..22: mol_type = other RNA
accactgaaacttttcttttct

SEQ ID NO: 115393 - RNA, 22 nt, synthetic construct
  source 1..22: mol_type = other RNA
accactgaagtgttgagaggct

SEQ ID NO: 115394 - RNA, 22 nt, synthetic construct
  source 1..22: mol_type = other RNA
accactgaatcagattttaaat

SEQ ID NO: 115395 - RNA, 22 nt, synthetic construct
  source 1..22: mol_type = other RNA
accactgagagggaagtttata

SEQ ID NO: 115396 - RNA, 22 nt, synthetic construct
  source 1..22: mol_type = other RNA
accactgagcacaatgcctgcc

SEQ ID NO: 115397 - RNA, 22 nt, synthetic construct
  source 1..22: mol_type = other RNA
accactgaggtcaagaaataaa

SEQ ID NO: 115398 - RNA, 22 nt, synthetic construct
  source 1..22: mol_type = other RNA
accactgatggaattctgacac

SEQ ID NO: 115399 - RNA, 22 nt, synthetic construct
  source 1..22: mol_type = other RNA
accactggatacggaaatataa

SEQ ID NO: 115400 - RNA, 22 nt, synthetic construct
  source 1..22: mol_type = other RNA
accactggggagtgtgcccaag

SEQ ID NO: 115401 - RNA, 22 nt, synthetic construct
  source 1..22: mol_type = other RNA
accactgtaggccccgatgcca

SEQ ID NO: 115402 - RNA, 22 nt, synthetic construct
  source 1..22: mol_type = other RNA
accactgttatctgggaacagc

SEQ ID NO: 115403 - RNA, 22 nt, synthetic construct
  source 1..22: mol_type = other RNA
accacttagtttgcaatacagt

SEQ ID NO: 115404 - RNA, 22 nt, synthetic construct
  source 1..22: mol_type = other RNA
accacttcgagaagggaagtaa

SEQ ID NO: 115405 - RNA, 22 nt, synthetic construct
  source 1..22: mol_type = other RNA
accagaaaagtgaaacaataaa

SEQ ID NO: 115406 - RNA, 22 nt, synthetic construct
  source 1..22: mol_type = other RNA
accagaactacacattccagac

SEQ ID NO: 115407 - RNA, 22 nt, synthetic construct
  source 1..22: mol_type = other RNA
accagacaaaaatagaggatgg

SEQ ID NO: 115408 - RNA, 22 nt, synthetic construct
  source 1..22: mol_type = other RNA
accagacatttctcatactttg

SEQ ID NO: 115409 - RNA, 22 nt, synthetic construct
  source 1..22: mol_type = other RNA
accagaccctttatcggataag

SEQ ID NO: 115410 - RNA, 22 nt, synthetic construct
  source 1..22: mol_type = other RNA
accagactgaccaacatggaca

SEQ ID NO: 115411 - RNA, 22 nt, synthetic construct
  source 1..22: mol_type = other RNA
accagagattgggaaaatcttg

SEQ ID NO: 115412 - RNA, 22 nt, synthetic construct
  source 1..22: mol_type = other RNA
accagagcggaatttttatatt

SEQ ID NO: 115413 - RNA, 22 nt, synthetic construct
  source 1..22: mol_type = other RNA
accagaggttaaagcaacagga

SEQ ID NO: 115414 - RNA, 22 nt, synthetic construct
  source 1..22: mol_type = other RNA
accagatactcaatcagtggcc

SEQ ID NO: 115415 - RNA, 22 nt, synthetic construct
  source 1..22: mol_type = other RNA
accagatactcatgcttgctcc

SEQ ID NO: 115416 - RNA, 22 nt, synthetic construct
  source 1..22: mol_type = other RNA
accagatcaaacgtgctttcct

SEQ ID NO: 115417 - RNA, 22 nt, synthetic construct
  source 1..22: mol_type = other RNA
accagatgcgtggttcacacct

SEQ ID NO: 115418 - RNA, 22 nt, synthetic construct
  source 1..22: mol_type = other RNA
accagcagttcaagcaccactt

SEQ ID NO: 115419 - RNA, 22 nt, synthetic construct
  source 1..22: mol_type = other RNA
accagcataagacccctcaggt

SEQ ID NO: 115420 - RNA, 22 nt, synthetic construct
  source 1..22: mol_type = other RNA
accagcatcttttgacgcgcaa

SEQ ID NO: 115421 - RNA, 22 nt, synthetic construct
  source 1..22: mol_type = other RNA
accagcctggccaacatcgtaa

SEQ ID NO: 115422 - RNA, 22 nt, synthetic construct
  source 1..22: mol_type = other RNA
accagcggcatacaggagttcc

SEQ ID NO: 115423 - RNA, 22 nt, synthetic construct
  source 1..22: mol_type = other RNA
accagcttacagcagatctgct

SEQ ID NO: 115424 - RNA, 22 nt, synthetic construct
  source 1..22: mol_type = other RNA
accagcttggccaacatggcga

SEQ ID NO: 115425 - RNA, 22 nt, synthetic construct
  source 1..22: mol_type = other RNA
accagcttgggcaagagagcaa

SEQ ID NO: 115426 - RNA, 22 nt, synthetic construct
  source 1..22: mol_type = other RNA
accaggaggtttgcactggcac

SEQ ID NO: 115427 - RNA, 22 nt, synthetic construct
  source 1..22: mol_type = other RNA
accaggagttcttatgaggtta

SEQ ID NO: 115428 - RNA, 22 nt, synthetic construct
  source 1..22: mol_type = other RNA
accaggcagtcctctcactcca

SEQ ID NO: 115429 - RNA, 22 nt, synthetic construct
  source 1..22: mol_type = other RNA
accaggcccggggcagagaact

SEQ ID NO: 115430 - RNA, 22 nt, synthetic construct
  source 1..22: mol_type = other RNA
accaggctggaagaattttaag

SEQ ID NO: 115431 - RNA, 22 nt, synthetic construct
  source 1..22: mol_type = other RNA
accaggctggaatgcagcggtg

SEQ ID NO: 115432 - RNA, 22 nt, synthetic construct
  source 1..22: mol_type = other RNA
accagggaggcggaggttgcgg

SEQ ID NO: 115433 - RNA, 22 nt, synthetic construct
  source 1..22: mol_type = other RNA
accagggcctctgaagacatgc

SEQ ID NO: 115434 - RNA, 22 nt, synthetic construct
  source 1..22: mol_type = other RNA
accaggggaaggagtctgccca

SEQ ID NO: 115435 - RNA, 22 nt, synthetic construct
  source 1..22: mol_type = other RNA
accaggggctgggggatccagg

SEQ ID NO: 115436 - RNA, 22 nt, synthetic construct
  source 1..22: mol_type = other RNA
accaggtatggcgactcatgcc

SEQ ID NO: 115437 - RNA, 22 nt, synthetic construct
  source 1..22: mol_type = other RNA
accaggtcagccagaggaagct

SEQ ID NO: 115438 - RNA, 22 nt, synthetic construct
  source 1..22: mol_type = other RNA
accaggttttggtaatgggaaa

SEQ ID NO: 115439 - RNA, 22 nt, synthetic construct
  source 1..22: mol_type = other RNA
accagtaagattctgtctctac

SEQ ID NO: 115440 - RNA, 22 nt, synthetic construct
  source 1..22: mol_type = other RNA
accagtgctctcccccgaatcc

SEQ ID NO: 115441 - RNA, 22 nt, synthetic construct
  source 1..22: mol_type = other RNA
accagtgcttgcagccttccct

SEQ ID NO: 115442 - RNA, 22 nt, synthetic construct
  source 1..22: mol_type = other RNA
accagtgggtcagctagtgtgt

SEQ ID NO: 115443 - RNA, 22 nt, synthetic construct
  source 1..22: mol_type = other RNA
accagtgtgatgggggtaagat

SEQ ID NO: 115444 - RNA, 22 nt, synthetic construct
  source 1..22: mol_type = other RNA
accagttactctctctgcctcg

SEQ ID NO: 115445 - RNA, 22 nt, synthetic construct
  source 1..22: mol_type = other RNA
accagttaggaagccactgcat

SEQ ID NO: 115446 - RNA, 22 nt, synthetic construct
  source 1..22: mol_type = other RNA
accagttatcaccatgtgctta

SEQ ID NO: 115447 - RNA, 22 nt, synthetic construct
  source 1..22: mol_type = other RNA
accataaaaccatttttcagaa

SEQ ID NO: 115448 - RNA, 22 nt, synthetic construct
  source 1..22: mol_type = other RNA
accataaagtcagaggagcagt

SEQ ID NO: 115449 - RNA, 22 nt, synthetic construct
  source 1..22: mol_type = other RNA
accataaagtcttccattttag

SEQ ID NO: 115450 - RNA, 22 nt, synthetic construct
  source 1..22: mol_type = other RNA
accataatgagtaacatgtgga

SEQ ID NO: 115451 - RNA, 22 nt, synthetic construct
  source 1..22: mol_type = other RNA
accatacagtgccttcagctat

SEQ ID NO: 115452 - RNA, 22 nt, synthetic construct
  source 1..22: mol_type = other RNA
accatacttttcaactgaacaa

SEQ ID NO: 115453 - RNA, 22 nt, synthetic construct
  source 1..22: mol_type = other RNA
accatagctgaaggcactgtat

SEQ ID NO: 115454 - RNA, 22 nt, synthetic construct
  source 1..22: mol_type = other RNA
accataggcacgcgcccccatg

SEQ ID NO: 115455 - RNA, 22 nt, synthetic construct
  source 1..22: mol_type = other RNA
accatataatctaaccctcctc

SEQ ID NO: 115456 - RNA, 22 nt, synthetic construct
  source 1..22: mol_type = other RNA
accatatacacaaaaagatctg

SEQ ID NO: 115457 - RNA, 22 nt, synthetic construct
  source 1..22: mol_type = other RNA
accatatggttaatagtgaccc

SEQ ID NO: 115458 - RNA, 22 nt, synthetic construct
  source 1..22: mol_type = other RNA
accatatggtttacaatggttc

SEQ ID NO: 115459 - RNA, 22 nt, synthetic construct
  source 1..22: mol_type = other RNA
accatattagagtgaaaagaaa

SEQ ID NO: 115460 - RNA, 22 nt, synthetic construct
  source 1..22: mol_type = other RNA
accatattggccaggctggttc

SEQ ID NO: 115461 - RNA, 22 nt, synthetic construct
  source 1..22: mol_type = other RNA
accatcaagtgtgatcccaaaa

SEQ ID NO: 115462 - RNA, 22 nt, synthetic construct
  source 1..22: mol_type = other RNA
accatcagagtgaacaggcaac

SEQ ID NO: 115463 - RNA, 22 nt, synthetic construct
  source 1..22: mol_type = other RNA
accatcatcatcaggctggctc

SEQ ID NO: 115464 - RNA, 22 nt, synthetic construct
  source 1..22: mol_type = other RNA
accatccccgctgtccatttcc

SEQ ID NO: 115465 - RNA, 22 nt, synthetic construct
  source 1..22: mol_type = other RNA
accatcctttccttgtcctaaa

SEQ ID NO: 115466 - RNA, 22 nt, synthetic construct
  source 1..22: mol_type = other RNA
accatcgttcacactcgcactc

SEQ ID NO: 115467 - RNA, 22 nt, synthetic construct
  source 1..22: mol_type = other RNA
accatctaaagccaggctttcc

SEQ ID NO: 115468 - RNA, 22 nt, synthetic construct
  source 1..22: mol_type = other RNA
accatctaacagaaatacaatg

SEQ ID NO: 115469 - RNA, 22 nt, synthetic construct
  source 1..22: mol_type = other RNA
accatctcagcacagagccgaa

SEQ ID NO: 115470 - RNA, 22 nt, synthetic construct
  source 1..22: mol_type = other RNA
accatctctccaacagaagaag

SEQ ID NO: 115471 - RNA, 22 nt, synthetic construct
  source 1..22: mol_type = other RNA
accatctctctgcctcaaaatc

SEQ ID NO: 115472 - RNA, 22 nt, synthetic construct
  source 1..22: mol_type = other RNA
accatctgacatatgttttgct

SEQ ID NO: 115473 - RNA, 22 nt, synthetic construct
  source 1..22: mol_type = other RNA
accatctgataagcccaacctg

SEQ ID NO: 115474 - RNA, 22 nt, synthetic construct
  source 1..22: mol_type = other RNA
accatctgttaaaagatacgaa

SEQ ID NO: 115475 - RNA, 22 nt, synthetic construct
  source 1..22: mol_type = other RNA
accatcttcttagtgttccctt

SEQ ID NO: 115476 - RNA, 22 nt, synthetic construct
  source 1..22: mol_type = other RNA
accatgaaaataaaaagtatcg

SEQ ID NO: 115477 - RNA, 22 nt, synthetic construct
  source 1..22: mol_type = other RNA
accatgacagagttccacctcc

SEQ ID NO: 115478 - RNA, 22 nt, synthetic construct
  source 1..22: mol_type = other RNA
accatgatgcagcccctgccac

SEQ ID NO: 115479 - RNA, 22 nt, synthetic construct
  source 1..22: mol_type = other RNA
accatgcaggttcatgtgtgct

SEQ ID NO: 115480 - RNA, 22 nt, synthetic construct
  source 1..22: mol_type = other RNA
accatggcaggtttcaagtgaa

SEQ ID NO: 115481 - RNA, 22 nt, synthetic construct
  source 1..22: mol_type = other RNA
accatgggacaagtgggtggat

SEQ ID NO: 115482 - RNA, 22 nt, synthetic construct
  source 1..22: mol_type = other RNA
accatgtaacaggtttaataaa

SEQ ID NO: 115483 - RNA, 22 nt, synthetic construct
  source 1..22: mol_type = other RNA
accatgtcatgtatatgctgtt

SEQ ID NO: 115484 - RNA, 22 nt, synthetic construct
  source 1..22: mol_type = other RNA
accatgtgcttatcaataaaat

SEQ ID NO: 115485 - RNA, 22 nt, synthetic construct
  source 1..22: mol_type = other RNA
accatgttcatgggaagatgct

SEQ ID NO: 115486 - RNA, 22 nt, synthetic construct
  source 1..22: mol_type = other RNA
accatgttgttcttttcaaaaa

SEQ ID NO: 115487 - RNA, 22 nt, synthetic construct
  source 1..22: mol_type = other RNA
accatgtttccataaaaagcgt

SEQ ID NO: 115488 - RNA, 22 nt, synthetic construct
  source 1..22: mol_type = other RNA
accatgttttaggagtcaacta

SEQ ID NO: 115489 - RNA, 22 nt, synthetic construct
  source 1..22: mol_type = other RNA
accattaacagctcagaagcta

SEQ ID NO: 115490 - RNA, 22 nt, synthetic construct
  source 1..22: mol_type = other RNA
accattactcttctactcactg

SEQ ID NO: 115491 - RNA, 22 nt, synthetic construct
  source 1..22: mol_type = other RNA
accattagcagttctgtaccct

SEQ ID NO: 115492 - RNA, 22 nt, synthetic construct
  source 1..22: mol_type = other RNA
accattccacgctgtggcttgg

SEQ ID NO: 115493 - RNA, 22 nt, synthetic construct
  source 1..22: mol_type = other RNA
accattccagccattctcttct

SEQ ID NO: 115494 - RNA, 22 nt, synthetic construct
  source 1..22: mol_type = other RNA
accattccccttgccaaggctt

SEQ ID NO: 115495 - RNA, 22 nt, synthetic construct
  source 1..22: mol_type = other RNA
accattgagccaaagaagaaat

SEQ ID NO: 115496 - RNA, 22 nt, synthetic construct
  source 1..22: mol_type = other RNA
accattgtaaaccatatggtta

SEQ ID NO: 115497 - RNA, 22 nt, synthetic construct
  source 1..22: mol_type = other RNA
accattgtgtggacacactgaa

SEQ ID NO: 115498 - RNA, 22 nt, synthetic construct
  source 1..22: mol_type = other RNA
accatttaccccttaaattcca

SEQ ID NO: 115499 - RNA, 22 nt, synthetic construct
  source 1..22: mol_type = other RNA
accatttattcctctcttggaa

SEQ ID NO: 115500 - RNA, 22 nt, synthetic construct
  source 1..22: mol_type = other RNA
accatttattgtcaaggtcatc

SEQ ID NO: 115501 - RNA, 22 nt, synthetic construct
  source 1..22: mol_type = other RNA
accatttgaccttccttgtgtc

SEQ ID NO: 115502 - RNA, 22 nt, synthetic construct
  source 1..22: mol_type = other RNA
accatttggcccagccatccca

SEQ ID NO: 115503 - RNA, 22 nt, synthetic construct
  source 1..22: mol_type = other RNA
accattttcaatcttggaaatg

SEQ ID NO: 115504 - RNA, 22 nt, synthetic construct
  source 1..22: mol_type = other RNA
accattttttcaccagcggcat

SEQ ID NO: 115505 - RNA, 22 nt, synthetic construct
  source 1..22: mol_type = other RNA
acccaaactggagtgcagtggt

SEQ ID NO: 115506 - RNA, 22 nt, synthetic construct
  source 1..22: mol_type = other RNA
acccaaagactttgttttgttt

SEQ ID NO: 115507 - RNA, 22 nt, synthetic construct
  source 1..22: mol_type = other RNA
acccaaagcaaaagcaaaattc

SEQ ID NO: 115508 - RNA, 22 nt, synthetic construct
  source 1..22: mol_type = other RNA
acccaaattaaaggatgtcaac

SEQ ID NO: 115509 - RNA, 22 nt, synthetic construct
  source 1..22: mol_type = other RNA
acccaacaaacaattagcacct

SEQ ID NO: 115510 - RNA, 22 nt, synthetic construct
  source 1..22: mol_type = other RNA
acccaacatgagagaaaattgt

SEQ ID NO: 115511 - RNA, 22 nt, synthetic construct
  source 1..22: mol_type = other RNA
acccaactctttctttgatttt

SEQ ID NO: 115512 - RNA, 22 nt, synthetic construct
  source 1..22: mol_type = other RNA
acccaagaatttcatgcctttc

SEQ ID NO: 115513 - RNA, 22 nt, synthetic construct
  source 1..22: mol_type = other RNA
acccaagccacagcgtggaatg

SEQ ID NO: 115514 - RNA, 22 nt, synthetic construct
  source 1..22: mol_type = other RNA
acccaagcttaggtcagattcc

SEQ ID NO: 115515 - RNA, 22 nt, synthetic construct
  source 1..22: mol_type = other RNA
acccaagtaaacaactgactct

SEQ ID NO: 115516 - RNA, 22 nt, synthetic construct
  source 1..22: mol_type = other RNA
acccaagtggagcctgctctgc

SEQ ID NO: 115517 - RNA, 22 nt, synthetic construct
  source 1..22: mol_type = other RNA
acccaatcatgttctttatagc

SEQ ID NO: 115518 - RNA, 22 nt, synthetic construct
  source 1..22: mol_type = other RNA
acccacaaaagaaaattttctg

SEQ ID NO: 115519 - RNA, 22 nt, synthetic construct
  source 1..22: mol_type = other RNA
acccacaagaaaaacctaaacc

SEQ ID NO: 115520 - RNA, 22 nt, synthetic construct
  source 1..22: mol_type = other RNA
acccacagataatttcttcaga

SEQ ID NO: 115521 - RNA, 22 nt, synthetic construct
  source 1..22: mol_type = other RNA
acccaccaggaggcggagcttg

SEQ ID NO: 115522 - RNA, 22 nt, synthetic construct
  source 1..22: mol_type = other RNA
acccacgtggagtgcaatgggg

SEQ ID NO: 115523 - RNA, 22 nt, synthetic construct
  source 1..22: mol_type = other RNA
acccactagtgaagtcccatct

SEQ ID NO: 115524 - RNA, 22 nt, synthetic construct
  source 1..22: mol_type = other RNA
acccactattgaaagcccttga

SEQ ID NO: 115525 - RNA, 22 nt, synthetic construct
  source 1..22: mol_type = other RNA
acccactgagcatttatataag

SEQ ID NO: 115526 - RNA, 22 nt, synthetic construct
  source 1..22: mol_type = other RNA
acccactggtttcagtccctcc

SEQ ID NO: 115527 - RNA, 22 nt, synthetic construct
  source 1..22: mol_type = other RNA
acccacttgtcccatggtcaaa

SEQ ID NO: 115528 - RNA, 22 nt, synthetic construct
  source 1..22: mol_type = other RNA
acccagaccaagtttaaccaat

SEQ ID NO: 115529 - RNA, 22 nt, synthetic construct
  source 1..22: mol_type = other RNA
acccagacctgcacaaaggatt

SEQ ID NO: 115530 - RNA, 22 nt, synthetic construct
  source 1..22: mol_type = other RNA
acccagagcctaatgtgtaaga

SEQ ID NO: 115531 - RNA, 22 nt, synthetic construct
  source 1..22: mol_type = other RNA
acccagagcgggtttcctcggt

SEQ ID NO: 115532 - RNA, 22 nt, synthetic construct
  source 1..22: mol_type = other RNA
acccagcactctgaatcacctc

SEQ ID NO: 115533 - RNA, 22 nt, synthetic construct
  source 1..22: mol_type = other RNA
acccagctcgaccaggggaagg

SEQ ID NO: 115534 - RNA, 22 nt, synthetic construct
  source 1..22: mol_type = other RNA
acccaggaacagattcacgcac

SEQ ID NO: 115535 - RNA, 22 nt, synthetic construct
  source 1..22: mol_type = other RNA
acccaggaggcaaaggttgaga

SEQ ID NO: 115536 - RNA, 22 nt, synthetic construct
  source 1..22: mol_type = other RNA
acccaggcatgatggctcaacg

SEQ ID NO: 115537 - RNA, 22 nt, synthetic construct
  source 1..22: mol_type = other RNA
acccaggtgtgagattgataga

SEQ ID NO: 115538 - RNA, 22 nt, synthetic construct
  source 1..22: mol_type = other RNA
acccagtatacacgtatttata

SEQ ID NO: 115539 - RNA, 22 nt, synthetic construct
  source 1..22: mol_type = other RNA
acccagtggctagtgtgttgac

SEQ ID NO: 115540 - RNA, 22 nt, synthetic construct
  source 1..22: mol_type = other RNA
acccagtgtctgctacaggggc

SEQ ID NO: 115541 - RNA, 22 nt, synthetic construct
  source 1..22: mol_type = other RNA
acccagtgtgtttgtttgctag

SEQ ID NO: 115542 - RNA, 22 nt, synthetic construct
  source 1..22: mol_type = other RNA
acccagttatctctgccctcat

SEQ ID NO: 115543 - RNA, 22 nt, synthetic construct
  source 1..22: mol_type = other RNA
acccagttcaccagtttctaat

SEQ ID NO: 115544 - RNA, 22 nt, synthetic construct
  source 1..22: mol_type = other RNA
acccataaactgaacatttata

SEQ ID NO: 115545 - RNA, 22 nt, synthetic construct
  source 1..22: mol_type = other RNA
acccatactcagccccctcgaa

SEQ ID NO: 115546 - RNA, 22 nt, synthetic construct
  source 1..22: mol_type = other RNA
acccatatctttgcttataaca

SEQ ID NO: 115547 - RNA, 22 nt, synthetic construct
  source 1..22: mol_type = other RNA
acccatccacccacttgtccca

SEQ ID NO: 115548 - RNA, 22 nt, synthetic construct
  source 1..22: mol_type = other RNA
acccatgaaaattgaattatag

SEQ ID NO: 115549 - RNA, 22 nt, synthetic construct
  source 1..22: mol_type = other RNA
acccatgaagccagcattaccc

SEQ ID NO: 115550 - RNA, 22 nt, synthetic construct
  source 1..22: mol_type = other RNA
acccatgatctttggaaatgaa

SEQ ID NO: 115551 - RNA, 22 nt, synthetic construct
  source 1..22: mol_type = other RNA
acccatgcccatgtgcattatt

SEQ ID NO: 115552 - RNA, 22 nt, synthetic construct
  source 1..22: mol_type = other RNA
acccattagacactaactttct

SEQ ID NO: 115553 - RNA, 22 nt, synthetic construct
  source 1..22: mol_type = other RNA
acccattccaggttttatctct

SEQ ID NO: 115554 - RNA, 22 nt, synthetic construct
  source 1..22: mol_type = other RNA
acccatttcatgccatcctgga

SEQ ID NO: 115555 - RNA, 22 nt, synthetic construct
  source 1..22: mol_type = other RNA
acccatttcttctaggttatcc

SEQ ID NO: 115556 - RNA, 22 nt, synthetic construct
  source 1..22: mol_type = other RNA
accccaaccctacctagggtgt

SEQ ID NO: 115557 - RNA, 22 nt, synthetic construct
  source 1..22: mol_type = other RNA
accccagaaggttaactaatag

SEQ ID NO: 115558 - RNA, 22 nt, synthetic construct
  source 1..22: mol_type = other RNA
accccagagattgtcgttgagt

SEQ ID NO: 115559 - RNA, 22 nt, synthetic construct
  source 1..22: mol_type = other RNA
accccagggatattttcgtgta

SEQ ID NO: 115560 - RNA, 22 nt, synthetic construct
  source 1..22: mol_type = other RNA
accccagtagaaatcttccaga

SEQ ID NO: 115561 - RNA, 22 nt, synthetic construct
  source 1..22: mol_type = other RNA
accccatctctaccaaaatata

SEQ ID NO: 115562 - RNA, 22 nt, synthetic construct
  source 1..22: mol_type = other RNA
accccattcactcagcataatt

SEQ ID NO: 115563 - RNA, 22 nt, synthetic construct
  source 1..22: mol_type = other RNA
acccccatcacactggtcactg

SEQ ID NO: 115564 - RNA, 22 nt, synthetic construct
  source 1..22: mol_type = other RNA
accccctggaaataagtttcat

SEQ ID NO: 115565 - RNA, 22 nt, synthetic construct
  source 1..22: mol_type = other RNA
accccctgggctcaagccatcc

SEQ ID NO: 115566 - RNA, 22 nt, synthetic construct
  source 1..22: mol_type = other RNA
accccgcatactgtgcagtgga

SEQ ID NO: 115567 - RNA, 22 nt, synthetic construct
  source 1..22: mol_type = other RNA
accccgtacgctccctcgcgcg

SEQ ID NO: 115568 - RNA, 22 nt, synthetic construct
  source 1..22: mol_type = other RNA
accccgtctctgcaaaaaatgt

SEQ ID NO: 115569 - RNA, 22 nt, synthetic construct
  source 1..22: mol_type = other RNA
acccctactttttgtcacacgg

SEQ ID NO: 115570 - RNA, 22 nt, synthetic construct
  source 1..22: mol_type = other RNA
acccctcaggtgtcactggata

SEQ ID NO: 115571 - RNA, 22 nt, synthetic construct
  source 1..22: mol_type = other RNA
acccctccctacctggcagtct

SEQ ID NO: 115572 - RNA, 22 nt, synthetic construct
  source 1..22: mol_type = other RNA
acccctccctgctttaaaacac

SEQ ID NO: 115573 - RNA, 22 nt, synthetic construct
  source 1..22: mol_type = other RNA
acccctgagaacttcagtatat

SEQ ID NO: 115574 - RNA, 22 nt, synthetic construct
  source 1..22: mol_type = other RNA
acccctgctctgcacgtactag

SEQ ID NO: 115575 - RNA, 22 nt, synthetic construct
  source 1..22: mol_type = other RNA
accccttaaattccaaaagtga

SEQ ID NO: 115576 - RNA, 22 nt, synthetic construct
  source 1..22: mol_type = other RNA
acccgaagaggacgatttttcc

SEQ ID NO: 115577 - RNA, 22 nt, synthetic construct
  source 1..22: mol_type = other RNA
acccgacccactagtgaagtcc

SEQ ID NO: 115578 - RNA, 22 nt, synthetic construct
  source 1..22: mol_type = other RNA
acccgaggtgcacaagggaaga

SEQ ID NO: 115579 - RNA, 22 nt, synthetic construct
  source 1..22: mol_type = other RNA
acccgctctgggtgcgttgacc

SEQ ID NO: 115580 - RNA, 22 nt, synthetic construct
  source 1..22: mol_type = other RNA
acccggagaggtgaactattag

SEQ ID NO: 115581 - RNA, 22 nt, synthetic construct
  source 1..22: mol_type = other RNA
acccggctaattaaacaaacat

SEQ ID NO: 115582 - RNA, 22 nt, synthetic construct
  source 1..22: mol_type = other RNA
acccgggagacaaaggttgcag

SEQ ID NO: 115583 - RNA, 22 nt, synthetic construct
  source 1..22: mol_type = other RNA
acccgggaggcagatgttgcgg

SEQ ID NO: 115584 - RNA, 22 nt, synthetic construct
  source 1..22: mol_type = other RNA
acccgtccaatttctttggctg

SEQ ID NO: 115585 - RNA, 22 nt, synthetic construct
  source 1..22: mol_type = other RNA
acccgtggaaatacttgaacat

SEQ ID NO: 115586 - RNA, 22 nt, synthetic construct
  source 1..22: mol_type = other RNA
acccgtgtgttttgttgttgtt

SEQ ID NO: 115587 - RNA, 22 nt, synthetic construct
  source 1..22: mol_type = other RNA
acccgttttttccttcatttaa

SEQ ID NO: 115588 - RNA, 22 nt, synthetic construct
  source 1..22: mol_type = other RNA
accctaataacaaaataggatt

SEQ ID NO: 115589 - RNA, 22 nt, synthetic construct
  source 1..22: mol_type = other RNA
accctacacccatccacccact

SEQ ID NO: 115590 - RNA, 22 nt, synthetic construct
  source 1..22: mol_type = other RNA
accctacagactcaataaccac

SEQ ID NO: 115591 - RNA, 22 nt, synthetic construct
  source 1..22: mol_type = other RNA
accctacctagggtgtaaaagg

SEQ ID NO: 115592 - RNA, 22 nt, synthetic construct
  source 1..22: mol_type = other RNA
accctaggtagggttggggtat

SEQ ID NO: 115593 - RNA, 22 nt, synthetic construct
  source 1..22: mol_type = other RNA
accctatttatgttgcacaaaa

SEQ ID NO: 115594 - RNA, 22 nt, synthetic construct
  source 1..22: mol_type = other RNA
accctcaaaagatgcagaaaaa

SEQ ID NO: 115595 - RNA, 22 nt, synthetic construct
  source 1..22: mol_type = other RNA
accctcaaatgccatagagctt

SEQ ID NO: 115596 - RNA, 22 nt, synthetic construct
  source 1..22: mol_type = other RNA
accctcaaatgtctcattgtgg

SEQ ID NO: 115597 - RNA, 22 nt, synthetic construct
  source 1..22: mol_type = other RNA
accctcaatccccatctgggat

SEQ ID NO: 115598 - RNA, 22 nt, synthetic construct
  source 1..22: mol_type = other RNA
accctcacagtcacaaagcttt

SEQ ID NO: 115599 - RNA, 22 nt, synthetic construct
  source 1..22: mol_type = other RNA
accctcacgaaagcggtcaacg

SEQ ID NO: 115600 - RNA, 22 nt, synthetic construct
  source 1..22: mol_type = other RNA
accctcaggactctgctcaaag

SEQ ID NO: 115601 - RNA, 22 nt, synthetic construct
  source 1..22: mol_type = other RNA
accctcattttataagggtgat

SEQ ID NO: 115602 - RNA, 22 nt, synthetic construct
  source 1..22: mol_type = other RNA
accctcctaccttccaaagtat

SEQ ID NO: 115603 - RNA, 22 nt, synthetic construct
  source 1..22: mol_type = other RNA
accctcctcctcctggccacat

SEQ ID NO: 115604 - RNA, 22 nt, synthetic construct
  source 1..22: mol_type = other RNA
accctcctcctctacaagtttt

SEQ ID NO: 115605 - RNA, 22 nt, synthetic construct
  source 1..22: mol_type = other RNA
accctcgagtaaaaagaatgaa

SEQ ID NO: 115606 - RNA, 22 nt, synthetic construct
  source 1..22: mol_type = other RNA
accctcggcctctactgactcc

SEQ ID NO: 115607 - RNA, 22 nt, synthetic construct
  source 1..22: mol_type = other RNA
accctctagctccccattccct

SEQ ID NO: 115608 - RNA, 22 nt, synthetic construct
  source 1..22: mol_type = other RNA
accctctggaatgcccatcctc

SEQ ID NO: 115609 - RNA, 22 nt, synthetic construct
  source 1..22: mol_type = other RNA
accctgagcatccccgctgcga

SEQ ID NO: 115610 - RNA, 22 nt, synthetic construct
  source 1..22: mol_type = other RNA
accctgaggatataacgatagt

SEQ ID NO: 115611 - RNA, 22 nt, synthetic construct
  source 1..22: mol_type = other RNA
accctgagtccagaggtgagct

SEQ ID NO: 115612 - RNA, 22 nt, synthetic construct
  source 1..22: mol_type = other RNA
accctgccccttatcctcttct

SEQ ID NO: 115613 - RNA, 22 nt, synthetic construct
  source 1..22: mol_type = other RNA
accctgccttccttgggcacac

SEQ ID NO: 115614 - RNA, 22 nt, synthetic construct
  source 1..22: mol_type = other RNA
accctgcgaaggcaatgtaaca

SEQ ID NO: 115615 - RNA, 22 nt, synthetic construct
  source 1..22: mol_type = other RNA
accctgctatgcatactttgga

SEQ ID NO: 115616 - RNA, 22 nt, synthetic construct
  source 1..22: mol_type = other RNA
accctgctccagtatgacctcc

SEQ ID NO: 115617 - RNA, 22 nt, synthetic construct
  source 1..22: mol_type = other RNA
accctgctggaacgaatattca

SEQ ID NO: 115618 - RNA, 22 nt, synthetic construct
  source 1..22: mol_type = other RNA
accctggcttgtgacatcaagg

SEQ ID NO: 115619 - RNA, 22 nt, synthetic construct
  source 1..22: mol_type = other RNA
accctgggaaagcctggcttta

SEQ ID NO: 115620 - RNA, 22 nt, synthetic construct
  source 1..22: mol_type = other RNA
accctgtacccattagacacta

SEQ ID NO: 115621 - RNA, 22 nt, synthetic construct
  source 1..22: mol_type = other RNA
accctgtctctaaaaaatacca

SEQ ID NO: 115622 - RNA, 22 nt, synthetic construct
  source 1..22: mol_type = other RNA
accctgttagtcccctagtgga

SEQ ID NO: 115623 - RNA, 22 nt, synthetic construct
  source 1..22: mol_type = other RNA
accctgttgggctattaagtat

SEQ ID NO: 115624 - RNA, 22 nt, synthetic construct
  source 1..22: mol_type = other RNA
accctgtttcccttaatgttga

SEQ ID NO: 115625 - RNA, 22 nt, synthetic construct
  source 1..22: mol_type = other RNA
accctgttttgtagattaaaaa

SEQ ID NO: 115626 - RNA, 22 nt, synthetic construct
  source 1..22: mol_type = other RNA
acccttaccttaaaccatatac

SEQ ID NO: 115627 - RNA, 22 nt, synthetic construct
  source 1..22: mol_type = other RNA
acccttacgcgtggatgtgtgc

SEQ ID NO: 115628 - RNA, 22 nt, synthetic construct
  source 1..22: mol_type = other RNA
acccttactaaattttgaggct

SEQ ID NO: 115629 - RNA, 22 nt, synthetic construct
  source 1..22: mol_type = other RNA
acccttataaaatgagggtaaa

SEQ ID NO: 115630 - RNA, 22 nt, synthetic construct
  source 1..22: mol_type = other RNA
acccttatgtccagcccccagt

SEQ ID NO: 115631 - RNA, 22 nt, synthetic construct
  source 1..22: mol_type = other RNA
acccttcatcatttgtattatt

SEQ ID NO: 115632 - RNA, 22 nt, synthetic construct
  source 1..22: mol_type = other RNA
acccttctgttaatagataggt

SEQ ID NO: 115633 - RNA, 22 nt, synthetic construct
  source 1..22: mol_type = other RNA
acccttgaaaatttccagcatt

SEQ ID NO: 115634 - RNA, 22 nt, synthetic construct
  source 1..22: mol_type = other RNA
acccttgatgtcacaagccagg

SEQ ID NO: 115635 - RNA, 22 nt, synthetic construct
  source 1..22: mol_type = other RNA
acccttgctgcttctacccact

SEQ ID NO: 115636 - RNA, 22 nt, synthetic construct
  source 1..22: mol_type = other RNA
acccttggctagactaagaaaa

SEQ ID NO: 115637 - RNA, 22 nt, synthetic construct
  source 1..22: mol_type = other RNA
acccttgggatgcagcaaaagc

SEQ ID NO: 115638 - RNA, 22 nt, synthetic construct
  source 1..22: mol_type = other RNA
acccttggtaaacagcagtctt

SEQ ID NO: 115639 - RNA, 22 nt, synthetic construct
  source 1..22: mol_type = other RNA
acccttgtaatcaagtatctcc

SEQ ID NO: 115640 - RNA, 22 nt, synthetic construct
  source 1..22: mol_type = other RNA
acccttgttggacagctgggag

SEQ ID NO: 115641 - RNA, 22 nt, synthetic construct
  source 1..22: mol_type = other RNA
accctttactcagattcaccaa

SEQ ID NO: 115642 - RNA, 22 nt, synthetic construct
  source 1..22: mol_type = other RNA
accctttatcggataaggaaga

SEQ ID NO: 115643 - RNA, 22 nt, synthetic construct
  source 1..22: mol_type = other RNA
accctttattcaaagatcattt

SEQ ID NO: 115644 - RNA, 22 nt, synthetic construct
  source 1..22: mol_type = other RNA
accctttccaaattcaaagcaa

SEQ ID NO: 115645 - RNA, 22 nt, synthetic construct
  source 1..22: mol_type = other RNA
accctttcttaggaagctatgg

SEQ ID NO: 115646 - RNA, 22 nt, synthetic construct
  source 1..22: mol_type = other RNA
accctttcttgttagtaggaaa

SEQ ID NO: 115647 - RNA, 22 nt, synthetic construct
  source 1..22: mol_type = other RNA
accctttgaagtatgtaattac

SEQ ID NO: 115648 - RNA, 22 nt, synthetic construct
  source 1..22: mol_type = other RNA
accctttgttatctgaacgtct

SEQ ID NO: 115649 - RNA, 22 nt, synthetic construct
  source 1..22: mol_type = other RNA
accgacagcagataagatccaa

SEQ ID NO: 115650 - RNA, 22 nt, synthetic construct
  source 1..22: mol_type = other RNA
accgacggctcaggcctgttgt

SEQ ID NO: 115651 - RNA, 22 nt, synthetic construct
  source 1..22: mol_type = other RNA
accgactgaaaggaaatgagtg

SEQ ID NO: 115652 - RNA, 22 nt, synthetic construct
  source 1..22: mol_type = other RNA
accgagatacttaagtttttaa

SEQ ID NO: 115653 - RNA, 22 nt, synthetic construct
  source 1..22: mol_type = other RNA
accgaggaaacccgctctgggt

SEQ ID NO: 115654 - RNA, 22 nt, synthetic construct
  source 1..22: mol_type = other RNA
accgagtaatgggatggctggg

SEQ ID NO: 115655 - RNA, 22 nt, synthetic construct
  source 1..22: mol_type = other RNA
accgcaacatctgcctcccggg

SEQ ID NO: 115656 - RNA, 22 nt, synthetic construct
  source 1..22: mol_type = other RNA
accgcaagagttccaactgtat

SEQ ID NO: 115657 - RNA, 22 nt, synthetic construct
  source 1..22: mol_type = other RNA
accgcacctggccgggatttac

SEQ ID NO: 115658 - RNA, 22 nt, synthetic construct
  source 1..22: mol_type = other RNA
accgcactcagcctgttgggag

SEQ ID NO: 115659 - RNA, 22 nt, synthetic construct
  source 1..22: mol_type = other RNA
accgccttcctaccctgccttc

SEQ ID NO: 115660 - RNA, 22 nt, synthetic construct
  source 1..22: mol_type = other RNA
accgcgcccggccaaatatcca

SEQ ID NO: 115661 - RNA, 22 nt, synthetic construct
  source 1..22: mol_type = other RNA
accgcgcccggcccagattcct

SEQ ID NO: 115662 - RNA, 22 nt, synthetic construct
  source 1..22: mol_type = other RNA
accgcgcccggccgagaaatcg

SEQ ID NO: 115663 - RNA, 22 nt, synthetic construct
  source 1..22: mol_type = other RNA
accgcgcctggtgattaaagtt

SEQ ID NO: 115664 - RNA, 22 nt, synthetic construct
  source 1..22: mol_type = other RNA
accgctccacgcccattaggat

SEQ ID NO: 115665 - RNA, 22 nt, synthetic construct
  source 1..22: mol_type = other RNA
accgctgcattccagcctggtg

SEQ ID NO: 115666 - RNA, 22 nt, synthetic construct
  source 1..22: mol_type = other RNA
accgctttcgtgagggtttcag

SEQ ID NO: 115667 - RNA, 22 nt, synthetic construct
  source 1..22: mol_type = other RNA
accggaaaatgcttaacaagaa

SEQ ID NO: 115668 - RNA, 22 nt, synthetic construct
  source 1..22: mol_type = other RNA
accggaacttgagtttgttctg

SEQ ID NO: 115669 - RNA, 22 nt, synthetic construct
  source 1..22: mol_type = other RNA
accggatgaggtggctcacgcc

SEQ ID NO: 115670 - RNA, 22 nt, synthetic construct
  source 1..22: mol_type = other RNA
accggcatccgccaccacgcct

SEQ ID NO: 115671 - RNA, 22 nt, synthetic construct
  source 1..22: mol_type = other RNA
accggggactgcaacagatctg

SEQ ID NO: 115672 - RNA, 22 nt, synthetic construct
  source 1..22: mol_type = other RNA
accgtaacttcttttcttaaaa

SEQ ID NO: 115673 - RNA, 22 nt, synthetic construct
  source 1..22: mol_type = other RNA
accgtgacagaacaaataacac

SEQ ID NO: 115674 - RNA, 22 nt, synthetic construct
  source 1..22: mol_type = other RNA
accgtgcaactagagaaagcat

SEQ ID NO: 115675 - RNA, 22 nt, synthetic construct
  source 1..22: mol_type = other RNA
accgtgcccggccagacatttt

SEQ ID NO: 115676 - RNA, 22 nt, synthetic construct
  source 1..22: mol_type = other RNA
accgtgccgggcttggtatgca

SEQ ID NO: 115677 - RNA, 22 nt, synthetic construct
  source 1..22: mol_type = other RNA
accgtggggggagggaggggga

SEQ ID NO: 115678 - RNA, 22 nt, synthetic construct
  source 1..22: mol_type = other RNA
acctaaaaagggagtcagtaga

SEQ ID NO: 115679 - RNA, 22 nt, synthetic construct
  source 1..22: mol_type = other RNA
acctaaaaggttgcttaattga

SEQ ID NO: 115680 - RNA, 22 nt, synthetic construct
  source 1..22: mol_type = other RNA
acctaaaatcttattccccagg

SEQ ID NO: 115681 - RNA, 22 nt, synthetic construct
  source 1..22: mol_type = other RNA
acctaaacctgtgatttccagt

SEQ ID NO: 115682 - RNA, 22 nt, synthetic construct
  source 1..22: mol_type = other RNA
acctaaagatatgtgtaggaag

SEQ ID NO: 115683 - RNA, 22 nt, synthetic construct
  source 1..22: mol_type = other RNA
acctaaagttgaggttgaagac

SEQ ID NO: 115684 - RNA, 22 nt, synthetic construct
  source 1..22: mol_type = other RNA
acctaaatgtccatcgagagat

SEQ ID NO: 115685 - RNA, 22 nt, synthetic construct
  source 1..22: mol_type = other RNA
acctaacaatgattatttcgaa

SEQ ID NO: 115686 - RNA, 22 nt, synthetic construct
  source 1..22: mol_type = other RNA
acctaacagccggcatatgtca

SEQ ID NO: 115687 - RNA, 22 nt, synthetic construct
  source 1..22: mol_type = other RNA
acctaacatgtcttggtgtgct

SEQ ID NO: 115688 - RNA, 22 nt, synthetic construct
  source 1..22: mol_type = other RNA
acctaactactaataaatgcat

SEQ ID NO: 115689 - RNA, 22 nt, synthetic construct
  source 1..22: mol_type = other RNA
acctaagaaaggtctagtgtgc

SEQ ID NO: 115690 - RNA, 22 nt, synthetic construct
  source 1..22: mol_type = other RNA
acctaagcatcgtgaagtcttt

SEQ ID NO: 115691 - RNA, 22 nt, synthetic construct
  source 1..22: mol_type = other RNA
acctaagcttaagagctaagac

SEQ ID NO: 115692 - RNA, 22 nt, synthetic construct
  source 1..22: mol_type = other RNA
acctaagcttgggtaggaagct

SEQ ID NO: 115693 - RNA, 22 nt, synthetic construct
  source 1..22: mol_type = other RNA
acctaataaaatgtttagcgga

SEQ ID NO: 115694 - RNA, 22 nt, synthetic construct
  source 1..22: mol_type = other RNA
acctacattaatctcatccaca

SEQ ID NO: 115695 - RNA, 22 nt, synthetic construct
  source 1..22: mol_type = other RNA
acctaccaccatgcttggctaa

SEQ ID NO: 115696 - RNA, 22 nt, synthetic construct
  source 1..22: mol_type = other RNA
acctactaaaagttgacaaatt

SEQ ID NO: 115697 - RNA, 22 nt, synthetic construct
  source 1..22: mol_type = other RNA
acctactttaaatcagggcctt

SEQ ID NO: 115698 - RNA, 22 nt, synthetic construct
  source 1..22: mol_type = other RNA
acctagaaaaacaccaaaaaag

SEQ ID NO: 115699 - RNA, 22 nt, synthetic construct
  source 1..22: mol_type = other RNA
acctagaagaaatgggtaaatt

SEQ ID NO: 115700 - RNA, 22 nt, synthetic construct
  source 1..22: mol_type = other RNA
acctagcctctctgggcttcac

SEQ ID NO: 115701 - RNA, 22 nt, synthetic construct
  source 1..22: mol_type = other RNA
acctagctgttttcatgcgaca

SEQ ID NO: 115702 - RNA, 22 nt, synthetic construct
  source 1..22: mol_type = other RNA
acctaggcctattttaggctct

SEQ ID NO: 115703 - RNA, 22 nt, synthetic construct
  source 1..22: mol_type = other RNA
acctagggtgtaaaaggctaat

SEQ ID NO: 115704 - RNA, 22 nt, synthetic construct
  source 1..22: mol_type = other RNA
acctagtacgtaacctaaagtt

SEQ ID NO: 115705 - RNA, 22 nt, synthetic construct
  source 1..22: mol_type = other RNA
acctagttttccaatccgggaa

SEQ ID NO: 115706 - RNA, 22 nt, synthetic construct
  source 1..22: mol_type = other RNA
acctataagacccagtggctag

SEQ ID NO: 115707 - RNA, 22 nt, synthetic construct
  source 1..22: mol_type = other RNA
acctatagaattcttcttctgt

SEQ ID NO: 115708 - RNA, 22 nt, synthetic construct
  source 1..22: mol_type = other RNA
acctatcattgcaccactgcac

SEQ ID NO: 115709 - RNA, 22 nt, synthetic construct
  source 1..22: mol_type = other RNA
acctatctattaacagaagggt

SEQ ID NO: 115710 - RNA, 22 nt, synthetic construct
  source 1..22: mol_type = other RNA
acctatgaataggtgtgtgttc

SEQ ID NO: 115711 - RNA, 22 nt, synthetic construct
  source 1..22: mol_type = other RNA
acctattatttagagtttgcat

SEQ ID NO: 115712 - RNA, 22 nt, synthetic construct
  source 1..22: mol_type = other RNA
acctattcataggtaatactct

SEQ ID NO: 115713 - RNA, 22 nt, synthetic construct
  source 1..22: mol_type = other RNA
acctatttagagggatgaatgt

SEQ ID NO: 115714 - RNA, 22 nt, synthetic construct
  source 1..22: mol_type = other RNA
acctcaaactagaaaaagaata

SEQ ID NO: 115715 - RNA, 22 nt, synthetic construct
  source 1..22: mol_type = other RNA
acctcaaaggagagaagagggg

SEQ ID NO: 115716 - RNA, 22 nt, synthetic construct
  source 1..22: mol_type = other RNA
acctcaaagtggaaacaactca

SEQ ID NO: 115717 - RNA, 22 nt, synthetic construct
  source 1..22: mol_type = other RNA
acctcaaattaatcagtctgta

SEQ ID NO: 115718 - RNA, 22 nt, synthetic construct
  source 1..22: mol_type = other RNA
acctcaaattctgagggaaatt

SEQ ID NO: 115719 - RNA, 22 nt, synthetic construct
  source 1..22: mol_type = other RNA
acctcaaattgtgtgttctctt

SEQ ID NO: 115720 - RNA, 22 nt, synthetic construct
  source 1..22: mol_type = other RNA
acctcaactttaggttacgtac

SEQ ID NO: 115721 - RNA, 22 nt, synthetic construct
  source 1..22: mol_type = other RNA
acctcaagcgatccagccgcct

SEQ ID NO: 115722 - RNA, 22 nt, synthetic construct
  source 1..22: mol_type = other RNA
acctcaaggcagaacacactgc

SEQ ID NO: 115723 - RNA, 22 nt, synthetic construct
  source 1..22: mol_type = other RNA
acctcaaggccaactgtcctct

SEQ ID NO: 115724 - RNA, 22 nt, synthetic construct
  source 1..22: mol_type = other RNA
acctcaagtcttttcctagact

SEQ ID NO: 115725 - RNA, 22 nt, synthetic construct
  source 1..22: mol_type = other RNA
acctcaagtgatgcaactcctg

SEQ ID NO: 115726 - RNA, 22 nt, synthetic construct
  source 1..22: mol_type = other RNA
acctcacattcacagcgtgcac

SEQ ID NO: 115727 - RNA, 22 nt, synthetic construct
  source 1..22: mol_type = other RNA
acctcagccccacaagtagcag

SEQ ID NO: 115728 - RNA, 22 nt, synthetic construct
  source 1..22: mol_type = other RNA
acctcaggcagtctagtccatg

SEQ ID NO: 115729 - RNA, 22 nt, synthetic construct
  source 1..22: mol_type = other RNA
acctcaggtttagaatatattt

SEQ ID NO: 115730 - RNA, 22 nt, synthetic construct
  source 1..22: mol_type = other RNA
acctcagtggtagttacacaag

SEQ ID NO: 115731 - RNA, 22 nt, synthetic construct
  source 1..22: mol_type = other RNA
acctcagttaaacccaacaaac

SEQ ID NO: 115732 - RNA, 22 nt, synthetic construct
  source 1..22: mol_type = other RNA
acctcataagaactcctggtct

SEQ ID NO: 115733 - RNA, 22 nt, synthetic construct
  source 1..22: mol_type = other RNA
acctcatccggtctcagttttt

SEQ ID NO: 115734 - RNA, 22 nt, synthetic construct
  source 1..22: mol_type = other RNA
acctcatctctgcaaaacattt

SEQ ID NO: 115735 - RNA, 22 nt, synthetic construct
  source 1..22: mol_type = other RNA
acctcatcttagccgggaggag

SEQ ID NO: 115736 - RNA, 22 nt, synthetic construct
  source 1..22: mol_type = other RNA
acctcatgtaactaattactgt

SEQ ID NO: 115737 - RNA, 22 nt, synthetic construct
  source 1..22: mol_type = other RNA
acctcatttgcagagcaaactc

SEQ ID NO: 115738 - RNA, 22 nt, synthetic construct
  source 1..22: mol_type = other RNA
acctccagcgctaagcactgcg

SEQ ID NO: 115739 - RNA, 22 nt, synthetic construct
  source 1..22: mol_type = other RNA
acctccagtgtcctgaatgatt

SEQ ID NO: 115740 - RNA, 22 nt, synthetic construct
  source 1..22: mol_type = other RNA
acctccatcactgactggctgt

SEQ ID NO: 115741 - RNA, 22 nt, synthetic construct
  source 1..22: mol_type = other RNA
acctcccaaaggactgggatcc

SEQ ID NO: 115742 - RNA, 22 nt, synthetic construct
  source 1..22: mol_type = other RNA
acctcccaacaggctgagtgcg

SEQ ID NO: 115743 - RNA, 22 nt, synthetic construct
  source 1..22: mol_type = other RNA
acctcccatgcattcgtcccta

SEQ ID NO: 115744 - RNA, 22 nt, synthetic construct
  source 1..22: mol_type = other RNA
acctcccttcacaaagccctca

SEQ ID NO: 115745 - RNA, 22 nt, synthetic construct
  source 1..22: mol_type = other RNA
acctccgcctccctggttcaag

SEQ ID NO: 115746 - RNA, 22 nt, synthetic construct
  source 1..22: mol_type = other RNA
acctccgtttttcaggttcaag

SEQ ID NO: 115747 - RNA, 22 nt, synthetic construct
  source 1..22: mol_type = other RNA
acctcctagattgaccttctac

SEQ ID NO: 115748 - RNA, 22 nt, synthetic construct
  source 1..22: mol_type = other RNA
acctcctcccacttacatcagc

SEQ ID NO: 115749 - RNA, 22 nt, synthetic construct
  source 1..22: mol_type = other RNA
acctcctccggggacccagtgc

SEQ ID NO: 115750 - RNA, 22 nt, synthetic construct
  source 1..22: mol_type = other RNA
acctcctggttttgatcatcgc

SEQ ID NO: 115751 - RNA, 22 nt, synthetic construct
  source 1..22: mol_type = other RNA
acctcgaagcacaaccactgat

SEQ ID NO: 115752 - RNA, 22 nt, synthetic construct
  source 1..22: mol_type = other RNA
acctcgggttcaagccccagtt

SEQ ID NO: 115753 - RNA, 22 nt, synthetic construct
  source 1..22: mol_type = other RNA
acctctacacaaaaatccagat

SEQ ID NO: 115754 - RNA, 22 nt, synthetic construct
  source 1..22: mol_type = other RNA
acctctattaaatcatgatgtt

SEQ ID NO: 115755 - RNA, 22 nt, synthetic construct
  source 1..22: mol_type = other RNA
acctctccgggtaaaaagcctg

SEQ ID NO: 115756 - RNA, 22 nt, synthetic construct
  source 1..22: mol_type = other RNA
acctctgaagagtctatctttg

SEQ ID NO: 115757 - RNA, 22 nt, synthetic construct
  source 1..22: mol_type = other RNA
acctctgcagttagcatgcctg

SEQ ID NO: 115758 - RNA, 22 nt, synthetic construct
  source 1..22: mol_type = other RNA
acctctggaaaggacttgatct

SEQ ID NO: 115759 - RNA, 22 nt, synthetic construct
  source 1..22: mol_type = other RNA
acctctggactcagggtcactt

SEQ ID NO: 115760 - RNA, 22 nt, synthetic construct
  source 1..22: mol_type = other RNA
acctctgggatgctcagtttca

SEQ ID NO: 115761 - RNA, 22 nt, synthetic construct
  source 1..22: mol_type = other RNA
acctctggtattttaagattct

SEQ ID NO: 115762 - RNA, 22 nt, synthetic construct
  source 1..22: mol_type = other RNA
acctcttactaaaaagaaaaag

SEQ ID NO: 115763 - RNA, 22 nt, synthetic construct
  source 1..22: mol_type = other RNA
acctcttgaagtcagttacagc

SEQ ID NO: 115764 - RNA, 22 nt, synthetic construct
  source 1..22: mol_type = other RNA
acctgaaaaacggaggttgcag

SEQ ID NO: 115765 - RNA, 22 nt, synthetic construct
  source 1..22: mol_type = other RNA
acctgaaaagtgtattattcta

SEQ ID NO: 115766 - RNA, 22 nt, synthetic construct
  source 1..22: mol_type = other RNA
acctgaaatctgatttgtttag

SEQ ID NO: 115767 - RNA, 22 nt, synthetic construct
  source 1..22: mol_type = other RNA
acctgaaatggcttaaggaaat

SEQ ID NO: 115768 - RNA, 22 nt, synthetic construct
  source 1..22: mol_type = other RNA
acctgaaattctcaaatgaaca

SEQ ID NO: 115769 - RNA, 22 nt, synthetic construct
  source 1..22: mol_type = other RNA
acctgaacccaggaggcaaagg

SEQ ID NO: 115770 - RNA, 22 nt, synthetic construct
  source 1..22: mol_type = other RNA
acctgaagactggatttgattg

SEQ ID NO: 115771 - RNA, 22 nt, synthetic construct
  source 1..22: mol_type = other RNA
acctgaatgactgttgcctctg

SEQ ID NO: 115772 - RNA, 22 nt, synthetic construct
  source 1..22: mol_type = other RNA
acctgacaagtagtacaaaagt

SEQ ID NO: 115773 - RNA, 22 nt, synthetic construct
  source 1..22: mol_type = other RNA
acctgacttcaaactatacttc

SEQ ID NO: 115774 - RNA, 22 nt, synthetic construct
  source 1..22: mol_type = other RNA
acctgaggggtcttatgctggt

SEQ ID NO: 115775 - RNA, 22 nt, synthetic construct
  source 1..22: mol_type = other RNA
acctgaggtctttaaaagaaag

SEQ ID NO: 115776 - RNA, 22 nt, synthetic construct
  source 1..22: mol_type = other RNA
acctgattagaggctgcaccct

SEQ ID NO: 115777 - RNA, 22 nt, synthetic construct
  source 1..22: mol_type = other RNA
acctgattcttccactagtggg

SEQ ID NO: 115778 - RNA, 22 nt, synthetic construct
  source 1..22: mol_type = other RNA
acctgcaatcacagcacttggg

SEQ ID NO: 115779 - RNA, 22 nt, synthetic construct
  source 1..22: mol_type = other RNA
acctgcacaaaggattgggaag

SEQ ID NO: 115780 - RNA, 22 nt, synthetic construct
  source 1..22: mol_type = other RNA
acctgcaggtatttctaaatca

SEQ ID NO: 115781 - RNA, 22 nt, synthetic construct
  source 1..22: mol_type = other RNA
acctgcaggttgatactagttt

SEQ ID NO: 115782 - RNA, 22 nt, synthetic construct
  source 1..22: mol_type = other RNA
acctgcagtctgcaggcagaat

SEQ ID NO: 115783 - RNA, 22 nt, synthetic construct
  source 1..22: mol_type = other RNA
acctgcagtggcgtgtgcccag

SEQ ID NO: 115784 - RNA, 22 nt, synthetic construct
  source 1..22: mol_type = other RNA
acctgcatggtgtaaaatacaa

SEQ ID NO: 115785 - RNA, 22 nt, synthetic construct
  source 1..22: mol_type = other RNA
acctgccagagttggcacagcc

SEQ ID NO: 115786 - RNA, 22 nt, synthetic construct
  source 1..22: mol_type = other RNA
acctgccatggtgttaaatatt

SEQ ID NO: 115787 - RNA, 22 nt, synthetic construct
  source 1..22: mol_type = other RNA
acctgcgagcggcgggcttcgc

SEQ ID NO: 115788 - RNA, 22 nt, synthetic construct
  source 1..22: mol_type = other RNA
acctgctacgaatgaactccta

SEQ ID NO: 115789 - RNA, 22 nt, synthetic construct
  source 1..22: mol_type = other RNA
acctgctctttatctccacatt

SEQ ID NO: 115790 - RNA, 22 nt, synthetic construct
  source 1..22: mol_type = other RNA
acctgctttcctcatgtccata

SEQ ID NO: 115791 - RNA, 22 nt, synthetic construct
  source 1..22: mol_type = other RNA
acctgctttctactagtataag

SEQ ID NO: 115792 - RNA, 22 nt, synthetic construct
  source 1..22: mol_type = other RNA
acctgctttcttggggctctaa

SEQ ID NO: 115793 - RNA, 22 nt, synthetic construct
  source 1..22: mol_type = other RNA
acctggaaattattcaatatgt

SEQ ID NO: 115794 - RNA, 22 nt, synthetic construct
  source 1..22: mol_type = other RNA
acctggaatcctctaccaaaaa

SEQ ID NO: 115795 - RNA, 22 nt, synthetic construct
  source 1..22: mol_type = other RNA
acctggaatgggttggaggaga

SEQ ID NO: 115796 - RNA, 22 nt, synthetic construct
  source 1..22: mol_type = other RNA
acctggagcctgaggacactag

SEQ ID NO: 115797 - RNA, 22 nt, synthetic construct
  source 1..22: mol_type = other RNA
acctggatcaagtgggatttat

SEQ ID NO: 115798 - RNA, 22 nt, synthetic construct
  source 1..22: mol_type = other RNA
acctggcaacaaaggcgaagcc

SEQ ID NO: 115799 - RNA, 22 nt, synthetic construct
  source 1..22: mol_type = other RNA
acctggcaatactctcagaaat

SEQ ID NO: 115800 - RNA, 22 nt, synthetic construct
  source 1..22: mol_type = other RNA
acctggcagtctaggaaaagac

SEQ ID NO: 115801 - RNA, 22 nt, synthetic construct
  source 1..22: mol_type = other RNA
acctggcccctttcaagattgt

SEQ ID NO: 115802 - RNA, 22 nt, synthetic construct
  source 1..22: mol_type = other RNA
acctggccgggatttacttcta

SEQ ID NO: 115803 - RNA, 22 nt, synthetic construct
  source 1..22: mol_type = other RNA
acctggctaatttttaaatgtt

SEQ ID NO: 115804 - RNA, 22 nt, synthetic construct
  source 1..22: mol_type = other RNA
acctgggagaaagaccaagagt

SEQ ID NO: 115805 - RNA, 22 nt, synthetic construct
  source 1..22: mol_type = other RNA
acctgggggagactgtgcaatg

SEQ ID NO: 115806 - RNA, 22 nt, synthetic construct
  source 1..22: mol_type = other RNA
acctgggtatacagcaaaagaa

SEQ ID NO: 115807 - RNA, 22 nt, synthetic construct
  source 1..22: mol_type = other RNA
acctggtaataatgaaagctcc

SEQ ID NO: 115808 - RNA, 22 nt, synthetic construct
  source 1..22: mol_type = other RNA
acctggtactctatgatatata

SEQ ID NO: 115809 - RNA, 22 nt, synthetic construct
  source 1..22: mol_type = other RNA
acctggtatgagtgtttccctt

SEQ ID NO: 115810 - RNA, 22 nt, synthetic construct
  source 1..22: mol_type = other RNA
acctggtccttaaatttctaag

SEQ ID NO: 115811 - RNA, 22 nt, synthetic construct
  source 1..22: mol_type = other RNA
acctgtaatttttctctttttg

SEQ ID NO: 115812 - RNA, 22 nt, synthetic construct
  source 1..22: mol_type = other RNA
acctgtagaaaatagggacggc

SEQ ID NO: 115813 - RNA, 22 nt, synthetic construct
  source 1..22: mol_type = other RNA
acctgtagattgggcttttcat

SEQ ID NO: 115814 - RNA, 22 nt, synthetic construct
  source 1..22: mol_type = other RNA
acctgtataaataaaatgtctg

SEQ ID NO: 115815 - RNA, 22 nt, synthetic construct
  source 1..22: mol_type = other RNA
acctgtcagaaacaccaacaca

SEQ ID NO: 115816 - RNA, 22 nt, synthetic construct
  source 1..22: mol_type = other RNA
acctgtcatgtcaaatttttca

SEQ ID NO: 115817 - RNA, 22 nt, synthetic construct
  source 1..22: mol_type = other RNA
acctgtccttgtgttttatttg

SEQ ID NO: 115818 - RNA, 22 nt, synthetic construct
  source 1..22: mol_type = other RNA
acctgtctttcccattaccaaa

SEQ ID NO: 115819 - RNA, 22 nt, synthetic construct
  source 1..22: mol_type = other RNA
acctgtgatttccagtgtttgg

SEQ ID NO: 115820 - RNA, 22 nt, synthetic construct
  source 1..22: mol_type = other RNA
acctgttacatggttctgtgct

SEQ ID NO: 115821 - RNA, 22 nt, synthetic construct
  source 1..22: mol_type = other RNA
acctgttcatttgagaatttca

SEQ ID NO: 115822 - RNA, 22 nt, synthetic construct
  source 1..22: mol_type = other RNA
acctgttgaatagcaactgttt

SEQ ID NO: 115823 - RNA, 22 nt, synthetic construct
  source 1..22: mol_type = other RNA
acctgttgattgttgccatcat

SEQ ID NO: 115824 - RNA, 22 nt, synthetic construct
  source 1..22: mol_type = other RNA
acctgtttaaaaagaaaaagct

SEQ ID NO: 115825 - RNA, 22 nt, synthetic construct
  source 1..22: mol_type = other RNA
accttaaaagagtgaaatgatt

SEQ ID NO: 115826 - RNA, 22 nt, synthetic construct
  source 1..22: mol_type = other RNA
accttaaaccatatacaaaact

SEQ ID NO: 115827 - RNA, 22 nt, synthetic construct
  source 1..22: mol_type = other RNA
accttacactcaaaagccatag

SEQ ID NO: 115828 - RNA, 22 nt, synthetic construct
  source 1..22: mol_type = other RNA
accttacattgtaatcctgttt

SEQ ID NO: 115829 - RNA, 22 nt, synthetic construct
  source 1..22: mol_type = other RNA
accttagaaatttaaggaccag

SEQ ID NO: 115830 - RNA, 22 nt, synthetic construct
  source 1..22: mol_type = other RNA
accttagcccaagctaccattt

SEQ ID NO: 115831 - RNA, 22 nt, synthetic construct
  source 1..22: mol_type = other RNA
accttagtggttgacccataaa

SEQ ID NO: 115832 - RNA, 22 nt, synthetic construct
  source 1..22: mol_type = other RNA
accttagttttcacttttgtgc

SEQ ID NO: 115833 - RNA, 22 nt, synthetic construct
  source 1..22: mol_type = other RNA
accttatagatgacgaaagtga

SEQ ID NO: 115834 - RNA, 22 nt, synthetic construct
  source 1..22: mol_type = other RNA
accttatgtgaaagtagaggac

SEQ ID NO: 115835 - RNA, 22 nt, synthetic construct
  source 1..22: mol_type = other RNA
accttattcaaataattgctgc

SEQ ID NO: 115836 - RNA, 22 nt, synthetic construct
  source 1..22: mol_type = other RNA
accttatttggaaatatggtca

SEQ ID NO: 115837 - RNA, 22 nt, synthetic construct
  source 1..22: mol_type = other RNA
accttcaccaaagatttactaa

SEQ ID NO: 115838 - RNA, 22 nt, synthetic construct
  source 1..22: mol_type = other RNA
accttcagaagccctgcagcca

SEQ ID NO: 115839 - RNA, 22 nt, synthetic construct
  source 1..22: mol_type = other RNA
accttcatactattttctatag

SEQ ID NO: 115840 - RNA, 22 nt, synthetic construct
  source 1..22: mol_type = other RNA
accttccaaagtatgcatagca

SEQ ID NO: 115841 - RNA, 22 nt, synthetic construct
  source 1..22: mol_type = other RNA
accttccctactcactgaaacc

SEQ ID NO: 115842 - RNA, 22 nt, synthetic construct
  source 1..22: mol_type = other RNA
accttcctcttcctcatccctc

SEQ ID NO: 115843 - RNA, 22 nt, synthetic construct
  source 1..22: mol_type = other RNA
accttccttgtgtcttaaattc

SEQ ID NO: 115844 - RNA, 22 nt, synthetic construct
  source 1..22: mol_type = other RNA
accttctaaaatcatcacagta

SEQ ID NO: 115845 - RNA, 22 nt, synthetic construct
  source 1..22: mol_type = other RNA
accttctacttatcttttctag

SEQ ID NO: 115846 - RNA, 22 nt, synthetic construct
  source 1..22: mol_type = other RNA
accttctgctgggcccactctc

SEQ ID NO: 115847 - RNA, 22 nt, synthetic construct
  source 1..22: mol_type = other RNA
accttctggggttcaaaccacc

SEQ ID NO: 115848 - RNA, 22 nt, synthetic construct
  source 1..22: mol_type = other RNA
accttcttatttccttccagtt

SEQ ID NO: 115849 - RNA, 22 nt, synthetic construct
  source 1..22: mol_type = other RNA
accttcttgagagtctcttaag

SEQ ID NO: 115850 - RNA, 22 nt, synthetic construct
  source 1..22: mol_type = other RNA
accttgaaaatgcccttattta

SEQ ID NO: 115851 - RNA, 22 nt, synthetic construct
  source 1..22: mol_type = other RNA
accttgaaaggatactgagaac

SEQ ID NO: 115852 - RNA, 22 nt, synthetic construct
  source 1..22: mol_type = other RNA
accttgaacatgaacgagaaca

SEQ ID NO: 115853 - RNA, 22 nt, synthetic construct
  source 1..22: mol_type = other RNA
accttgaactgggacttctagc

SEQ ID NO: 115854 - RNA, 22 nt, synthetic construct
  source 1..22: mol_type = other RNA
accttgaagtacttcagcgctt

SEQ ID NO: 115855 - RNA, 22 nt, synthetic construct
  source 1..22: mol_type = other RNA
accttgacaataaatggtgcag

SEQ ID NO: 115856 - RNA, 22 nt, synthetic construct
  source 1..22: mol_type = other RNA
accttgatttatggcctaagat

SEQ ID NO: 115857 - RNA, 22 nt, synthetic construct
  source 1..22: mol_type = other RNA
accttgctcattcatctgcagt

SEQ ID NO: 115858 - RNA, 22 nt, synthetic construct
  source 1..22: mol_type = other RNA
accttggagagaaaccttggtg

SEQ ID NO: 115859 - RNA, 22 nt, synthetic construct
  source 1..22: mol_type = other RNA
accttgggagaaaatttttaca

SEQ ID NO: 115860 - RNA, 22 nt, synthetic construct
  source 1..22: mol_type = other RNA
accttgggaggctgaggctggg

SEQ ID NO: 115861 - RNA, 22 nt, synthetic construct
  source 1..22: mol_type = other RNA
accttggtgtgcttctgatagg

SEQ ID NO: 115862 - RNA, 22 nt, synthetic construct
  source 1..22: mol_type = other RNA
accttgtatccagtaatcttgc

SEQ ID NO: 115863 - RNA, 22 nt, synthetic construct
  source 1..22: mol_type = other RNA
accttgtgcatgtgcaggaaac

SEQ ID NO: 115864 - RNA, 22 nt, synthetic construct
  source 1..22: mol_type = other RNA
acctttaagttctccaagttat

SEQ ID NO: 115865 - RNA, 22 nt, synthetic construct
  source 1..22: mol_type = other RNA
acctttatctttggatatcccc

SEQ ID NO: 115866 - RNA, 22 nt, synthetic construct
  source 1..22: mol_type = other RNA
acctttattaactagaattgac

SEQ ID NO: 115867 - RNA, 22 nt, synthetic construct
  source 1..22: mol_type = other RNA
acctttcctgcccctccactcc

SEQ ID NO: 115868 - RNA, 22 nt, synthetic construct
  source 1..22: mol_type = other RNA
acctttcgctatcagtagtttg

SEQ ID NO: 115869 - RNA, 22 nt, synthetic construct
  source 1..22: mol_type = other RNA
acctttctcaaagcccaccagc

SEQ ID NO: 115870 - RNA, 22 nt, synthetic construct
  source 1..22: mol_type = other RNA
acctttcttaggtttctcattt

SEQ ID NO: 115871 - RNA, 22 nt, synthetic construct
  source 1..22: mol_type = other RNA
acctttgcctcctgggttcagg

SEQ ID NO: 115872 - RNA, 22 nt, synthetic construct
  source 1..22: mol_type = other RNA
acctttggctactgtaaacaat

SEQ ID NO: 115873 - RNA, 22 nt, synthetic construct
  source 1..22: mol_type = other RNA
acctttgtattcatccagttta

SEQ ID NO: 115874 - RNA, 22 nt, synthetic construct
  source 1..22: mol_type = other RNA
acctttgtccactgtcagtggg

SEQ ID NO: 115875 - RNA, 22 nt, synthetic construct
  source 1..22: mol_type = other RNA
acctttgttgaaaacgaggaaa

SEQ ID NO: 115876 - RNA, 22 nt, synthetic construct
  source 1..22: mol_type = other RNA
accttttaggtgccccactcca

SEQ ID NO: 115877 - RNA, 22 nt, synthetic construct
  source 1..22: mol_type = other RNA
accttttgtagaccctgttagt

SEQ ID NO: 115878 - RNA, 22 nt, synthetic construct
  source 1..22: mol_type = other RNA
acctttttgggatctgtcatgt

SEQ ID NO: 115879 - RNA, 22 nt, synthetic construct
  source 1..22: mol_type = other RNA
accttttttaaggaaaagtcag

SEQ ID NO: 115880 - RNA, 22 nt, synthetic construct
  source 1..22: mol_type = other RNA
acgaaaatatccctggggtttc

SEQ ID NO: 115881 - RNA, 22 nt, synthetic construct
  source 1..22: mol_type = other RNA
acgaaagcctttattttttctt

SEQ ID NO: 115882 - RNA, 22 nt, synthetic construct
  source 1..22: mol_type = other RNA
acgaaagcggtcaacgcaccca

SEQ ID NO: 115883 - RNA, 22 nt, synthetic construct
  source 1..22: mol_type = other RNA
acgaaagtgaagcccagagagg

SEQ ID NO: 115884 - RNA, 22 nt, synthetic construct
  source 1..22: mol_type = other RNA
acgaaagtgctctaccctttcc

SEQ ID NO: 115885 - RNA, 22 nt, synthetic construct
  source 1..22: mol_type = other RNA
acgaaccaattaccataaagtc

SEQ ID NO: 115886 - RNA, 22 nt, synthetic construct
  source 1..22: mol_type = other RNA
acgaagctacagtaatcaaaca

SEQ ID NO: 115887 - RNA, 22 nt, synthetic construct
  source 1..22: mol_type = other RNA
acgaagtcacattctagtgatg

SEQ ID NO: 115888 - RNA, 22 nt, synthetic construct
  source 1..22: mol_type = other RNA
acgaatgaaaacacaacatacc

SEQ ID NO: 115889 - RNA, 22 nt, synthetic construct
  source 1..22: mol_type = other RNA
acgaatgaactcctatagttaa

SEQ ID NO: 115890 - RNA, 22 nt, synthetic construct
  source 1..22: mol_type = other RNA
acgaatgcatgggaggtaatac

SEQ ID NO: 115891 - RNA, 22 nt, synthetic construct
  source 1..22: mol_type = other RNA
acgaattctttaaaactgctga

SEQ ID NO: 115892 - RNA, 22 nt, synthetic construct
  source 1..22: mol_type = other RNA
acgacaatctctggggttaggg

SEQ ID NO: 115893 - RNA, 22 nt, synthetic construct
  source 1..22: mol_type = other RNA
acgacaccagaactacacattc

SEQ ID NO: 115894 - RNA, 22 nt, synthetic construct
  source 1..22: mol_type = other RNA
acgacagcaggaaaagctaccc

SEQ ID NO: 115895 - RNA, 22 nt, synthetic construct
  source 1..22: mol_type = other RNA
acgaccggacgtggtggctcac

SEQ ID NO: 115896 - RNA, 22 nt, synthetic construct
  source 1..22: mol_type = other RNA
acgaccttgctcattcatctgc

SEQ ID NO: 115897 - RNA, 22 nt, synthetic construct
  source 1..22: mol_type = other RNA
acgacgctcttgttcaaaaacc

SEQ ID NO: 115898 - RNA, 22 nt, synthetic construct
  source 1..22: mol_type = other RNA
acgacgtatgcaacttactctc

SEQ ID NO: 115899 - RNA, 22 nt, synthetic construct
  source 1..22: mol_type = other RNA
acgagaaaagcacaggcatcgg

SEQ ID NO: 115900 - RNA, 22 nt, synthetic construct
  source 1..22: mol_type = other RNA
acgagaacaaaacaagaagaaa

SEQ ID NO: 115901 - RNA, 22 nt, synthetic construct
  source 1..22: mol_type = other RNA
acgagaaggacagcttccaccc

SEQ ID NO: 115902 - RNA, 22 nt, synthetic construct
  source 1..22: mol_type = other RNA
acgagactgttagggacttatg

SEQ ID NO: 115903 - RNA, 22 nt, synthetic construct
  source 1..22: mol_type = other RNA
acgaggaaaagagaacattggt

SEQ ID NO: 115904 - RNA, 22 nt, synthetic construct
  source 1..22: mol_type = other RNA
acgaggacagactgcagttgga

SEQ ID NO: 115905 - RNA, 22 nt, synthetic construct
  source 1..22: mol_type = other RNA
acgagtaatggatgtttttaga

SEQ ID NO: 115906 - RNA, 22 nt, synthetic construct
  source 1..22: mol_type = other RNA
acgagtatcatataaattgcaa

SEQ ID NO: 115907 - RNA, 22 nt, synthetic construct
  source 1..22: mol_type = other RNA
acgagtattcaagtttcaccct

SEQ ID NO: 115908 - RNA, 22 nt, synthetic construct
  source 1..22: mol_type = other RNA
acgagtgtgtttcgcaaagtaa

SEQ ID NO: 115909 - RNA, 22 nt, synthetic construct
  source 1..22: mol_type = other RNA
acgagttatgcaagatgtcaac

SEQ ID NO: 115910 - RNA, 22 nt, synthetic construct
  source 1..22: mol_type = other RNA
acgagttcaggaccagcttggg

SEQ ID NO: 115911 - RNA, 22 nt, synthetic construct
  source 1..22: mol_type = other RNA
acgataaacttcagttttatca

SEQ ID NO: 115912 - RNA, 22 nt, synthetic construct
  source 1..22: mol_type = other RNA
acgatactttttattttcatgg

SEQ ID NO: 115913 - RNA, 22 nt, synthetic construct
  source 1..22: mol_type = other RNA
acgatagtctcctatattgtca

SEQ ID NO: 115914 - RNA, 22 nt, synthetic construct
  source 1..22: mol_type = other RNA
acgatattcctatcagaagcac

SEQ ID NO: 115915 - RNA, 22 nt, synthetic construct
  source 1..22: mol_type = other RNA
acgatccttactaccaccacta

SEQ ID NO: 115916 - RNA, 22 nt, synthetic construct
  source 1..22: mol_type = other RNA
acgatgaaattgaccattccac

SEQ ID NO: 115917 - RNA, 22 nt, synthetic construct
  source 1..22: mol_type = other RNA
acgatgcattccagattgaaat

SEQ ID NO: 115918 - RNA, 22 nt, synthetic construct
  source 1..22: mol_type = other RNA
acgatgcttaggtaagaaaaat

SEQ ID NO: 115919 - RNA, 22 nt, synthetic construct
  source 1..22: mol_type = other RNA
acgatggtttctgacacccgac

SEQ ID NO: 115920 - RNA, 22 nt, synthetic construct
  source 1..22: mol_type = other RNA
acgattctgacccagagcctaa

SEQ ID NO: 115921 - RNA, 22 nt, synthetic construct
  source 1..22: mol_type = other RNA
acgatttcttaaaaatgacacc

SEQ ID NO: 115922 - RNA, 22 nt, synthetic construct
  source 1..22: mol_type = other RNA
acgatttttccaacagtttaca

SEQ ID NO: 115923 - RNA, 22 nt, synthetic construct
  source 1..22: mol_type = other RNA
acgcaaaggatgtcaacaaaat

SEQ ID NO: 115924 - RNA, 22 nt, synthetic construct
  source 1..22: mol_type = other RNA
acgcacagggagatacttgatt

SEQ ID NO: 115925 - RNA, 22 nt, synthetic construct
  source 1..22: mol_type = other RNA
acgcacccagagcgggtttcct

SEQ ID NO: 115926 - RNA, 22 nt, synthetic construct
  source 1..22: mol_type = other RNA
acgcagaacagtgtttacacac

SEQ ID NO: 115927 - RNA, 22 nt, synthetic construct
  source 1..22: mol_type = other RNA
acgcagaaccactgagcacaat

SEQ ID NO: 115928 - RNA, 22 nt, synthetic construct
  source 1..22: mol_type = other RNA
acgcaggcaaacagcgccactt

SEQ ID NO: 115929 - RNA, 22 nt, synthetic construct
  source 1..22: mol_type = other RNA
acgcagtttgttctgctgttga

SEQ ID NO: 115930 - RNA, 22 nt, synthetic construct
  source 1..22: mol_type = other RNA
acgcatctggtctatctcatta

SEQ ID NO: 115931 - RNA, 22 nt, synthetic construct
  source 1..22: mol_type = other RNA
acgcattgcattgactaccaat

SEQ ID NO: 115932 - RNA, 22 nt, synthetic construct
  source 1..22: mol_type = other RNA
acgcattgtgatgtctcagatg

SEQ ID NO: 115933 - RNA, 22 nt, synthetic construct
  source 1..22: mol_type = other RNA
acgccaattttcatagcagcat

SEQ ID NO: 115934 - RNA, 22 nt, synthetic construct
  source 1..22: mol_type = other RNA
acgccactgcaggtgttggtgc

SEQ ID NO: 115935 - RNA, 22 nt, synthetic construct
  source 1..22: mol_type = other RNA
acgccactgcattccgcctggg

SEQ ID NO: 115936 - RNA, 22 nt, synthetic construct
  source 1..22: mol_type = other RNA
acgccatctcgcccagctaatt

SEQ ID NO: 115937 - RNA, 22 nt, synthetic construct
  source 1..22: mol_type = other RNA
acgcccattaggatagctatta

SEQ ID NO: 115938 - RNA, 22 nt, synthetic construct
  source 1..22: mol_type = other RNA
acgcccggcccatgacatgtgt

SEQ ID NO: 115939 - RNA, 22 nt, synthetic construct
  source 1..22: mol_type = other RNA
acgcccggccgatgcctgtgct

SEQ ID NO: 115940 - RNA, 22 nt, synthetic construct
  source 1..22: mol_type = other RNA
acgcctagctgacttttaaaat

SEQ ID NO: 115941 - RNA, 22 nt, synthetic construct
  source 1..22: mol_type = other RNA
acgccttcgcgggcaccttccc

SEQ ID NO: 115942 - RNA, 22 nt, synthetic construct
  source 1..22: mol_type = other RNA
acgcctttcatttggcctctgc

SEQ ID NO: 115943 - RNA, 22 nt, synthetic construct
  source 1..22: mol_type = other RNA
acgcgcaacaattcaacagcta

SEQ ID NO: 115944 - RNA, 22 nt, synthetic construct
  source 1..22: mol_type = other RNA
acgcgcattttttaagtggcgc

SEQ ID NO: 115945 - RNA, 22 nt, synthetic construct
  source 1..22: mol_type = other RNA
acgcggaatgaagcaggccttc

SEQ ID NO: 115946 - RNA, 22 nt, synthetic construct
  source 1..22: mol_type = other RNA
acgcggcacttggtaagctgtg

SEQ ID NO: 115947 - RNA, 22 nt, synthetic construct
  source 1..22: mol_type = other RNA
acgcgggaggctgaggcaggag

SEQ ID NO: 115948 - RNA, 22 nt, synthetic construct
  source 1..22: mol_type = other RNA
acgcgtaagggtacagaactgc

SEQ ID NO: 115949 - RNA, 22 nt, synthetic construct
  source 1..22: mol_type = other RNA
acgcgtggatgtgtgcacaaca

SEQ ID NO: 115950 - RNA, 22 nt, synthetic construct
  source 1..22: mol_type = other RNA
acgctaaattaaaggctggaaa

SEQ ID NO: 115951 - RNA, 22 nt, synthetic construct
  source 1..22: mol_type = other RNA
acgctcttgttcaaaaaccttt

SEQ ID NO: 115952 - RNA, 22 nt, synthetic construct
  source 1..22: mol_type = other RNA
acgctgatgacagttactctaa

SEQ ID NO: 115953 - RNA, 22 nt, synthetic construct
  source 1..22: mol_type = other RNA
acgctgccaaaagccaagagcg

SEQ ID NO: 115954 - RNA, 22 nt, synthetic construct
  source 1..22: mol_type = other RNA
acgctggaagggagcccaagca

SEQ ID NO: 115955 - RNA, 22 nt, synthetic construct
  source 1..22: mol_type = other RNA
acgctgtgaatgtgaggtgagg

SEQ ID NO: 115956 - RNA, 22 nt, synthetic construct
  source 1..22: mol_type = other RNA
acgctgtggctaacaatcaaat

SEQ ID NO: 115957 - RNA, 22 nt, synthetic construct
  source 1..22: mol_type = other RNA
acgctgtggcttgggtgacctc

SEQ ID NO: 115958 - RNA, 22 nt, synthetic construct
  source 1..22: mol_type = other RNA
acgcttttatgttataatgaga

SEQ ID NO: 115959 - RNA, 22 nt, synthetic construct
  source 1..22: mol_type = other RNA
acgctttttatggaaacatggt

SEQ ID NO: 115960 - RNA, 22 nt, synthetic construct
  source 1..22: mol_type = other RNA
acggaaaaacattctacagtat

SEQ ID NO: 115961 - RNA, 22 nt, synthetic construct
  source 1..22: mol_type = other RNA
acggaaaacattattttctttg

SEQ ID NO: 115962 - RNA, 22 nt, synthetic construct
  source 1..22: mol_type = other RNA
acggaaactttatacctgttga

SEQ ID NO: 115963 - RNA, 22 nt, synthetic construct
  source 1..22: mol_type = other RNA
acggaaatataacattaccaat

SEQ ID NO: 115964 - RNA, 22 nt, synthetic construct
  source 1..22: mol_type = other RNA
acggaaatgagtgagccacagc

SEQ ID NO: 115965 - RNA, 22 nt, synthetic construct
  source 1..22: mol_type = other RNA
acggaagactcatacttcctga

SEQ ID NO: 115966 - RNA, 22 nt, synthetic construct
  source 1..22: mol_type = other RNA
acggaatcttaccctgttgacc

SEQ ID NO: 115967 - RNA, 22 nt, synthetic construct
  source 1..22: mol_type = other RNA
acggaatgattccacttatatg

SEQ ID NO: 115968 - RNA, 22 nt, synthetic construct
  source 1..22: mol_type = other RNA
acggaatgcccctttgagcaga

SEQ ID NO: 115969 - RNA, 22 nt, synthetic construct
  source 1..22: mol_type = other RNA
acggacatttttccaaagatat

SEQ ID NO: 115970 - RNA, 22 nt, synthetic construct
  source 1..22: mol_type = other RNA
acggacgcaggcaaacagcgcc

SEQ ID NO: 115971 - RNA, 22 nt, synthetic construct
  source 1..22: mol_type = other RNA
acggacttggcacaggagagcg

SEQ ID NO: 115972 - RNA, 22 nt, synthetic construct
  source 1..22: mol_type = other RNA
acggaggatgaggggctgagcc

SEQ ID NO: 115973 - RNA, 22 nt, synthetic construct
  source 1..22: mol_type = other RNA
acggcgagcttgatctttactt

SEQ ID NO: 115974 - RNA, 22 nt, synthetic construct
  source 1..22: mol_type = other RNA
acggcgtttcgccatgttggcc

SEQ ID NO: 115975 - RNA, 22 nt, synthetic construct
  source 1..22: mol_type = other RNA
acggctcaggcctgttgtgagg

SEQ ID NO: 115976 - RNA, 22 nt, synthetic construct
  source 1..22: mol_type = other RNA
acggctgattataaccttgaac

SEQ ID NO: 115977 - RNA, 22 nt, synthetic construct
  source 1..22: mol_type = other RNA
acggcttaacacctttgtattc

SEQ ID NO: 115978 - RNA, 22 nt, synthetic construct
  source 1..22: mol_type = other RNA
acgggctgggcgcgatggctca

SEQ ID NO: 115979 - RNA, 22 nt, synthetic construct
  source 1..22: mol_type = other RNA
acgggtacacatcctaatacag

SEQ ID NO: 115980 - RNA, 22 nt, synthetic construct
  source 1..22: mol_type = other RNA
acgggtggtagggagggggctg

SEQ ID NO: 115981 - RNA, 22 nt, synthetic construct
  source 1..22: mol_type = other RNA
acgggttatacacacataaggg

SEQ ID NO: 115982 - RNA, 22 nt, synthetic construct
  source 1..22: mol_type = other RNA
acggtctcacactgttgtccag

SEQ ID NO: 115983 - RNA, 22 nt, synthetic construct
  source 1..22: mol_type = other RNA
acggtgaagaaccgactgaaag

SEQ ID NO: 115984 - RNA, 22 nt, synthetic construct
  source 1..22: mol_type = other RNA
acggtgccctacatatggcaat

SEQ ID NO: 115985 - RNA, 22 nt, synthetic construct
  source 1..22: mol_type = other RNA
acggttccctgtagagattttt

SEQ ID NO: 115986 - RNA, 22 nt, synthetic construct
  source 1..22: mol_type = other RNA
acgtaacctaaagttgaggttg

SEQ ID NO: 115987 - RNA, 22 nt, synthetic construct
  source 1..22: mol_type = other RNA
acgtactaggtatcacagtgag

SEQ ID NO: 115988 - RNA, 22 nt, synthetic construct
  source 1..22: mol_type = other RNA
acgtactagtcagcacactctt

SEQ ID NO: 115989 - RNA, 22 nt, synthetic construct
  source 1..22: mol_type = other RNA
acgtatatgaaaagcccaatct

SEQ ID NO: 115990 - RNA, 22 nt, synthetic construct
  source 1..22: mol_type = other RNA
acgtatctgggaaaaaataaga

SEQ ID NO: 115991 - RNA, 22 nt, synthetic construct
  source 1..22: mol_type = other RNA
acgtatgaataaactaacaaag

SEQ ID NO: 115992 - RNA, 22 nt, synthetic construct
  source 1..22: mol_type = other RNA
acgtatgcaacttactctcaaa

SEQ ID NO: 115993 - RNA, 22 nt, synthetic construct
  source 1..22: mol_type = other RNA
acgtatttatattttggtagag

SEQ ID NO: 115994 - RNA, 22 nt, synthetic construct
  source 1..22: mol_type = other RNA
acgtatttatcatgtcttcttg

SEQ ID NO: 115995 - RNA, 22 nt, synthetic construct
  source 1..22: mol_type = other RNA
acgtcaccgcaacctccgcctc

SEQ ID NO: 115996 - RNA, 22 nt, synthetic construct
  source 1..22: mol_type = other RNA
acgtcagagcagcactgatgtg

SEQ ID NO: 115997 - RNA, 22 nt, synthetic construct
  source 1..22: mol_type = other RNA
acgtccatcaacagcagaacaa

SEQ ID NO: 115998 - RNA, 22 nt, synthetic construct
  source 1..22: mol_type = other RNA
acgtccggtcgttggatttatc

SEQ ID NO: 115999 - RNA, 22 nt, synthetic construct
  source 1..22: mol_type = other RNA
acgtcgtcccccatccccttta

SEQ ID NO: 116000 - RNA, 22 nt, synthetic construct
  source 1..22: mol_type = other RNA
acgtctgtggtctcagctcctc

SEQ ID NO: 116001 - RNA, 22 nt, synthetic construct
  source 1..22: mol_type = other RNA
acgtcttgtcaataatttggat

SEQ ID NO: 116002 - RNA, 22 nt, synthetic construct
  source 1..22: mol_type = other RNA
acgtgaagatggagttacgctg

SEQ ID NO: 116003 - RNA, 22 nt, synthetic construct
  source 1..22: mol_type = other RNA
acgtgaagctacagactaatat

SEQ ID NO: 116004 - RNA, 22 nt, synthetic construct
  source 1..22: mol_type = other RNA
acgtgagatcatgccactccac

SEQ ID NO: 116005 - RNA, 22 nt, synthetic construct
  source 1..22: mol_type = other RNA
acgtgagccaccgcacctggcc

SEQ ID NO: 116006 - RNA, 22 nt, synthetic construct
  source 1..22: mol_type = other RNA
acgtgagctggaagtaaggatt

SEQ ID NO: 116007 - RNA, 22 nt, synthetic construct
  source 1..22: mol_type = other RNA
acgtgcaaactaccaagactga

SEQ ID NO: 116008 - RNA, 22 nt, synthetic construct
  source 1..22: mol_type = other RNA
acgtgcacacccagttatctct

SEQ ID NO: 116009 - RNA, 22 nt, synthetic construct
  source 1..22: mol_type = other RNA
acgtgcagagcaggggtggggg

SEQ ID NO: 116010 - RNA, 22 nt, synthetic construct
  source 1..22: mol_type = other RNA
acgtgcattcatactgaaggca

SEQ ID NO: 116011 - RNA, 22 nt, synthetic construct
  source 1..22: mol_type = other RNA
acgtgcttgctctgcggcaggc

SEQ ID NO: 116012 - RNA, 22 nt, synthetic construct
  source 1..22: mol_type = other RNA
acgtgctttccttattgagaag

SEQ ID NO: 116013 - RNA, 22 nt, synthetic construct
  source 1..22: mol_type = other RNA
acgtggagtgcaatggggcaat

SEQ ID NO: 116014 - RNA, 22 nt, synthetic construct
  source 1..22: mol_type = other RNA
acgtggcgctccctctgtgtgc

SEQ ID NO: 116015 - RNA, 22 nt, synthetic construct
  source 1..22: mol_type = other RNA
acgtggctgtcaaaaatgtgtc

SEQ ID NO: 116016 - RNA, 22 nt, synthetic construct
  source 1..22: mol_type = other RNA
acgtgtacataaaataaaaacc

SEQ ID NO: 116017 - RNA, 22 nt, synthetic construct
  source 1..22: mol_type = other RNA
acgtgtatactgggtgtgatgg

SEQ ID NO: 116018 - RNA, 22 nt, synthetic construct
  source 1..22: mol_type = other RNA
acgtgtattgagtgtagctgtg

SEQ ID NO: 116019 - RNA, 22 nt, synthetic construct
  source 1..22: mol_type = other RNA
acgtgtgtgtaagcacacatga

SEQ ID NO: 116020 - RNA, 22 nt, synthetic construct
  source 1..22: mol_type = other RNA
acgttaaaggaaaagagatcta

SEQ ID NO: 116021 - RNA, 22 nt, synthetic construct
  source 1..22: mol_type = other RNA
acgttaactgtattgcaaacta

SEQ ID NO: 116022 - RNA, 22 nt, synthetic construct
  source 1..22: mol_type = other RNA
acgttacaaaatatgtaatgac

SEQ ID NO: 116023 - RNA, 22 nt, synthetic construct
  source 1..22: mol_type = other RNA
acgttaccctctggaatgccca

SEQ ID NO: 116024 - RNA, 22 nt, synthetic construct
  source 1..22: mol_type = other RNA
acgttagcatcaccatcatcat

SEQ ID NO: 116025 - RNA, 22 nt, synthetic construct
  source 1..22: mol_type = other RNA
acgttcagataacaaagggttc

SEQ ID NO: 116026 - RNA, 22 nt, synthetic construct
  source 1..22: mol_type = other RNA
acgtttatctacagaggatttt

SEQ ID NO: 116027 - RNA, 22 nt, synthetic construct
  source 1..22: mol_type = other RNA
acgtttgagttgtttccacttt

SEQ ID NO: 116028 - RNA, 22 nt, synthetic construct
  source 1..22: mol_type = other RNA
acgtttgatctggtcacaaaca

SEQ ID NO: 116029 - RNA, 22 nt, synthetic construct
  source 1..22: mol_type = other RNA
acgtttgctttggagtgagagg

SEQ ID NO: 116030 - RNA, 22 nt, synthetic construct
  source 1..22: mol_type = other RNA
acgtttggtgactgaattccca

SEQ ID NO: 116031 - RNA, 22 nt, synthetic construct
  source 1..22: mol_type = other RNA
acgtttttagaaatttacccat

SEQ ID NO: 116032 - RNA, 22 nt, synthetic construct
  source 1..22: mol_type = other RNA
actaaaaagaaaaagttgggct

SEQ ID NO: 116033 - RNA, 22 nt, synthetic construct
  source 1..22: mol_type = other RNA
actaaaacaggaagttgagaaa

SEQ ID NO: 116034 - RNA, 22 nt, synthetic construct
  source 1..22: mol_type = other RNA
actaaacaaatcagatttcagg

SEQ ID NO: 116035 - RNA, 22 nt, synthetic construct
  source 1..22: mol_type = other RNA
actaaactagtatcaacctgca

SEQ ID NO: 116036 - RNA, 22 nt, synthetic construct
  source 1..22: mol_type = other RNA
actaaactgaacgaagtgaaaa

SEQ ID NO: 116037 - RNA, 22 nt, synthetic construct
  source 1..22: mol_type = other RNA
actaaactttgagtagcaccct

SEQ ID NO: 116038 - RNA, 22 nt, synthetic construct
  source 1..22: mol_type = other RNA
actaaagatttgccaatcaata

SEQ ID NO: 116039 - RNA, 22 nt, synthetic construct
  source 1..22: mol_type = other RNA
actaaaggggatttcatgaaca

SEQ ID NO: 116040 - RNA, 22 nt, synthetic construct
  source 1..22: mol_type = other RNA
actaaatacaccaaactcaaaa

SEQ ID NO: 116041 - RNA, 22 nt, synthetic construct
  source 1..22: mol_type = other RNA
actaaatgatctttcaaggggc

SEQ ID NO: 116042 - RNA, 22 nt, synthetic construct
  source 1..22: mol_type = other RNA
actaaatgtgagcatttagccc

SEQ ID NO: 116043 - RNA, 22 nt, synthetic construct
  source 1..22: mol_type = other RNA
actaaattttgaggcttttgga

SEQ ID NO: 116044 - RNA, 22 nt, synthetic construct
  source 1..22: mol_type = other RNA
actaacaaagaacaggaaggga

SEQ ID NO: 116045 - RNA, 22 nt, synthetic construct
  source 1..22: mol_type = other RNA
actaacaaagggcctgttccag

SEQ ID NO: 116046 - RNA, 22 nt, synthetic construct
  source 1..22: mol_type = other RNA
actaacaagaaagggtagcttt

SEQ ID NO: 116047 - RNA, 22 nt, synthetic construct
  source 1..22: mol_type = other RNA
actaacagggtctacaaaaggt

SEQ ID NO: 116048 - RNA, 22 nt, synthetic construct
  source 1..22: mol_type = other RNA
actaaccaacattgagtttcaa

SEQ ID NO: 116049 - RNA, 22 nt, synthetic construct
  source 1..22: mol_type = other RNA
actaacgatccttactaccacc

SEQ ID NO: 116050 - RNA, 22 nt, synthetic construct
  source 1..22: mol_type = other RNA
actaactagaaaaccgacagca

SEQ ID NO: 116051 - RNA, 22 nt, synthetic construct
  source 1..22: mol_type = other RNA
actaactttaaattttgagacc

SEQ ID NO: 116052 - RNA, 22 nt, synthetic construct
  source 1..22: mol_type = other RNA
actaactttctattcccctgga

SEQ ID NO: 116053 - RNA, 22 nt, synthetic construct
  source 1..22: mol_type = other RNA
actaagaaaaacagaagacaca

SEQ ID NO: 116054 - RNA, 22 nt, synthetic construct
  source 1..22: mol_type = other RNA
actaagaagatggttggaagtt

SEQ ID NO: 116055 - RNA, 22 nt, synthetic construct
  source 1..22: mol_type = other RNA
actaagaagtgaaactgctgga

SEQ ID NO: 116056 - RNA, 22 nt, synthetic construct
  source 1..22: mol_type = other RNA
actaagacactagctattgtct

SEQ ID NO: 116057 - RNA, 22 nt, synthetic construct
  source 1..22: mol_type = other RNA
actaagaccccagtagaaatct

SEQ ID NO: 116058 - RNA, 22 nt, synthetic construct
  source 1..22: mol_type = other RNA
actaagagtgaaaaggcaaacc

SEQ ID NO: 116059 - RNA, 22 nt, synthetic construct
  source 1..22: mol_type = other RNA
actaagcagaaatgacaagtaa

SEQ ID NO: 116060 - RNA, 22 nt, synthetic construct
  source 1..22: mol_type = other RNA
actaagcctatgtaagacaatg

SEQ ID NO: 116061 - RNA, 22 nt, synthetic construct
  source 1..22: mol_type = other RNA
actaaggaaagctcaggaccag

SEQ ID NO: 116062 - RNA, 22 nt, synthetic construct
  source 1..22: mol_type = other RNA
actaaggtcaacacatcagcgc

SEQ ID NO: 116063 - RNA, 22 nt, synthetic construct
  source 1..22: mol_type = other RNA
actaaggtcaagagagattaaa

SEQ ID NO: 116064 - RNA, 22 nt, synthetic construct
  source 1..22: mol_type = other RNA
actaagtcagaattcactgtga

SEQ ID NO: 116065 - RNA, 22 nt, synthetic construct
  source 1..22: mol_type = other RNA
actaagtggtattctatcatca

SEQ ID NO: 116066 - RNA, 22 nt, synthetic construct
  source 1..22: mol_type = other RNA
actaagtgtgaagattaagcac

SEQ ID NO: 116067 - RNA, 22 nt, synthetic construct
  source 1..22: mol_type = other RNA
actaataaatgcataaacgaca

SEQ ID NO: 116068 - RNA, 22 nt, synthetic construct
  source 1..22: mol_type = other RNA
actaataattgcttttgctgag

SEQ ID NO: 116069 - RNA, 22 nt, synthetic construct
  source 1..22: mol_type = other RNA
actaatagccagtgcagcaagc

SEQ ID NO: 116070 - RNA, 22 nt, synthetic construct
  source 1..22: mol_type = other RNA
actaatatgagttcctgcttcc

SEQ ID NO: 116071 - RNA, 22 nt, synthetic construct
  source 1..22: mol_type = other RNA
actaatcaaacataccccaacc

SEQ ID NO: 116072 - RNA, 22 nt, synthetic construct
  source 1..22: mol_type = other RNA
actaatccttctcatagtcttc

SEQ ID NO: 116073 - RNA, 22 nt, synthetic construct
  source 1..22: mol_type = other RNA
actaatgagaatttcagaaaga

SEQ ID NO: 116074 - RNA, 22 nt, synthetic construct
  source 1..22: mol_type = other RNA
actaatgcctcaaattagtcat

SEQ ID NO: 116075 - RNA, 22 nt, synthetic construct
  source 1..22: mol_type = other RNA
actaatgtcacattttcttatc

SEQ ID NO: 116076 - RNA, 22 nt, synthetic construct
  source 1..22: mol_type = other RNA
actaatgtccttttcctgttcc

SEQ ID NO: 116077 - RNA, 22 nt, synthetic construct
  source 1..22: mol_type = other RNA
actaattactgtttcttagcta

SEQ ID NO: 116078 - RNA, 22 nt, synthetic construct
  source 1..22: mol_type = other RNA
actaatttcatacaagttgtga

SEQ ID NO: 116079 - RNA, 22 nt, synthetic construct
  source 1..22: mol_type = other RNA
actaatttgaggcattagtgaa

SEQ ID NO: 116080 - RNA, 22 nt, synthetic construct
  source 1..22: mol_type = other RNA
actacaaaagatcatttcaaac

SEQ ID NO: 116081 - RNA, 22 nt, synthetic construct
  source 1..22: mol_type = other RNA
actacaagagttcccctatact

SEQ ID NO: 116082 - RNA, 22 nt, synthetic construct
  source 1..22: mol_type = other RNA
actacaattactgtacaaagat

SEQ ID NO: 116083 - RNA, 22 nt, synthetic construct
  source 1..22: mol_type = other RNA
actacacagacatgaacaatcc

SEQ ID NO: 116084 - RNA, 22 nt, synthetic construct
  source 1..22: mol_type = other RNA
actacacatacacagggaaaac

SEQ ID NO: 116085 - RNA, 22 nt, synthetic construct
  source 1..22: mol_type = other RNA
actacacatcagtgctgctctg

SEQ ID NO: 116086 - RNA, 22 nt, synthetic construct
  source 1..22: mol_type = other RNA
actacacattccagaccagcag

SEQ ID NO: 116087 - RNA, 22 nt, synthetic construct
  source 1..22: mol_type = other RNA
actacacccggctaattaaaca

SEQ ID NO: 116088 - RNA, 22 nt, synthetic construct
  source 1..22: mol_type = other RNA
actacactgaagggaattttac

SEQ ID NO: 116089 - RNA, 22 nt, synthetic construct
  source 1..22: mol_type = other RNA
actacagacatgccacaccaca

SEQ ID NO: 116090 - RNA, 22 nt, synthetic construct
  source 1..22: mol_type = other RNA
actacagcatattagctgtctg

SEQ ID NO: 116091 - RNA, 22 nt, synthetic construct
  source 1..22: mol_type = other RNA
actacaggcaacaaaagaaaaa

SEQ ID NO: 116092 - RNA, 22 nt, synthetic construct
  source 1..22: mol_type = other RNA
actacaggtgtgaaccacgcat

SEQ ID NO: 116093 - RNA, 22 nt, synthetic construct
  source 1..22: mol_type = other RNA
actacagtcacacaccactaca

SEQ ID NO: 116094 - RNA, 22 nt, synthetic construct
  source 1..22: mol_type = other RNA
actacagtgtttagggacgaat

SEQ ID NO: 116095 - RNA, 22 nt, synthetic construct
  source 1..22: mol_type = other RNA
actacatgtaaaaactgtttgg

SEQ ID NO: 116096 - RNA, 22 nt, synthetic construct
  source 1..22: mol_type = other RNA
actaccaattctccctgaaatt

SEQ ID NO: 116097 - RNA, 22 nt, synthetic construct
  source 1..22: mol_type = other RNA
actaccaccactaatgtcacat

SEQ ID NO: 116098 - RNA, 22 nt, synthetic construct
  source 1..22: mol_type = other RNA
actaccactgaggtcaagaaat

SEQ ID NO: 116099 - RNA, 22 nt, synthetic construct
  source 1..22: mol_type = other RNA
actaccatctctccaacagaag

SEQ ID NO: 116100 - RNA, 22 nt, synthetic construct
  source 1..22: mol_type = other RNA
actacctagaaaaacaccaaaa

SEQ ID NO: 116101 - RNA, 22 nt, synthetic construct
  source 1..22: mol_type = other RNA
actacctatagaattcttcttc

SEQ ID NO: 116102 - RNA, 22 nt, synthetic construct
  source 1..22: mol_type = other RNA
actacgaagctacagtaatcaa

SEQ ID NO: 116103 - RNA, 22 nt, synthetic construct
  source 1..22: mol_type = other RNA
actacgagtatcatataaattg

SEQ ID NO: 116104 - RNA, 22 nt, synthetic construct
  source 1..22: mol_type = other RNA
actacgcccggcccatgacatg

SEQ ID NO: 116105 - RNA, 22 nt, synthetic construct
  source 1..22: mol_type = other RNA
actacgcctagctgacttttaa

SEQ ID NO: 116106 - RNA, 22 nt, synthetic construct
  source 1..22: mol_type = other RNA
actactaataaatgcataaacg

SEQ ID NO: 116107 - RNA, 22 nt, synthetic construct
  source 1..22: mol_type = other RNA
actactatttcgcaaagcaaca

SEQ ID NO: 116108 - RNA, 22 nt, synthetic construct
  source 1..22: mol_type = other RNA
actactcgggaggctgaggccg

SEQ ID NO: 116109 - RNA, 22 nt, synthetic construct
  source 1..22: mol_type = other RNA
actactgacctgggagaaagac

SEQ ID NO: 116110 - RNA, 22 nt, synthetic construct
  source 1..22: mol_type = other RNA
actactgatagcgaaaggtacg

SEQ ID NO: 116111 - RNA, 22 nt, synthetic construct
  source 1..22: mol_type = other RNA
actactgcaaatatccaatcac

SEQ ID NO: 116112 - RNA, 22 nt, synthetic construct
  source 1..22: mol_type = other RNA
actactgcattttttgccaaat

SEQ ID NO: 116113 - RNA, 22 nt, synthetic construct
  source 1..22: mol_type = other RNA
actactgtactgtttagcatct

SEQ ID NO: 116114 - RNA, 22 nt, synthetic construct
  source 1..22: mol_type = other RNA
actacttagcccctgctgccag

SEQ ID NO: 116115 - RNA, 22 nt, synthetic construct
  source 1..22: mol_type = other RNA
actacttcgtgtgtggagtggg

SEQ ID NO: 116116 - RNA, 22 nt, synthetic construct
  source 1..22: mol_type = other RNA
actacttgtcaggtgggcactg

SEQ ID NO: 116117 - RNA, 22 nt, synthetic construct
  source 1..22: mol_type = other RNA
actagaaaaccgacagcagata

SEQ ID NO: 116118 - RNA, 22 nt, synthetic construct
  source 1..22: mol_type = other RNA
actagaaaagataagtagaagg

SEQ ID NO: 116119 - RNA, 22 nt, synthetic construct
  source 1..22: mol_type = other RNA
actagaaacttcttctgttgga

SEQ ID NO: 116120 - RNA, 22 nt, synthetic construct
  source 1..22: mol_type = other RNA
actagaactgtgttacattgcc

SEQ ID NO: 116121 - RNA, 22 nt, synthetic construct
  source 1..22: mol_type = other RNA
actagaagcactttttaccaag

SEQ ID NO: 116122 - RNA, 22 nt, synthetic construct
  source 1..22: mol_type = other RNA
actagaatactccaccagcatc

SEQ ID NO: 116123 - RNA, 22 nt, synthetic construct
  source 1..22: mol_type = other RNA
actagaatgtgacttcgtcaag

SEQ ID NO: 116124 - RNA, 22 nt, synthetic construct
  source 1..22: mol_type = other RNA
actagaattgactttaccctgc

SEQ ID NO: 116125 - RNA, 22 nt, synthetic construct
  source 1..22: mol_type = other RNA
actagacacatttttgacagcc

SEQ ID NO: 116126 - RNA, 22 nt, synthetic construct
  source 1..22: mol_type = other RNA
actagacctttcttaggtttct

SEQ ID NO: 116127 - RNA, 22 nt, synthetic construct
  source 1..22: mol_type = other RNA
actagactgcctgaggtctcaa

SEQ ID NO: 116128 - RNA, 22 nt, synthetic construct
  source 1..22: mol_type = other RNA
actagagaaagcatcagagctt

SEQ ID NO: 116129 - RNA, 22 nt, synthetic construct
  source 1..22: mol_type = other RNA
actagagatgggaaagtattcc

SEQ ID NO: 116130 - RNA, 22 nt, synthetic construct
  source 1..22: mol_type = other RNA
actagagcttcaacctcctggg

SEQ ID NO: 116131 - RNA, 22 nt, synthetic construct
  source 1..22: mol_type = other RNA
actagagtattacctatgaata

SEQ ID NO: 116132 - RNA, 22 nt, synthetic construct
  source 1..22: mol_type = other RNA
actagatcaagcccttccttgc

SEQ ID NO: 116133 - RNA, 22 nt, synthetic construct
  source 1..22: mol_type = other RNA
actagatctcttttcctttaac

SEQ ID NO: 116134 - RNA, 22 nt, synthetic construct
  source 1..22: mol_type = other RNA
actagatgcctcgaaggcctgc

SEQ ID NO: 116135 - RNA, 22 nt, synthetic construct
  source 1..22: mol_type = other RNA
actagattaccttgaagtttaa

SEQ ID NO: 116136 - RNA, 22 nt, synthetic construct
  source 1..22: mol_type = other RNA
actagcaaactactgatagcga

SEQ ID NO: 116137 - RNA, 22 nt, synthetic construct
  source 1..22: mol_type = other RNA
actagcaaactgaatcagacaa

SEQ ID NO: 116138 - RNA, 22 nt, synthetic construct
  source 1..22: mol_type = other RNA
actagcaagctaataatttatc

SEQ ID NO: 116139 - RNA, 22 nt, synthetic construct
  source 1..22: mol_type = other RNA
actagcaatccaggatcttact

SEQ ID NO: 116140 - RNA, 22 nt, synthetic construct
  source 1..22: mol_type = other RNA
actagccactgggtcttatagg

SEQ ID NO: 116141 - RNA, 22 nt, synthetic construct
  source 1..22: mol_type = other RNA
actagccagtgattggatattt

SEQ ID NO: 116142 - RNA, 22 nt, synthetic construct
  source 1..22: mol_type = other RNA
actagctattagagaaatgcaa

SEQ ID NO: 116143 - RNA, 22 nt, synthetic construct
  source 1..22: mol_type = other RNA
actagctattgtcttttctatc

SEQ ID NO: 116144 - RNA, 22 nt, synthetic construct
  source 1..22: mol_type = other RNA
actagctgacccactggtttca

SEQ ID NO: 116145 - RNA, 22 nt, synthetic construct
  source 1..22: mol_type = other RNA
actaggctcctgagaaccggaa

SEQ ID NO: 116146 - RNA, 22 nt, synthetic construct
  source 1..22: mol_type = other RNA
actaggctgtcccaaatgcacc

SEQ ID NO: 116147 - RNA, 22 nt, synthetic construct
  source 1..22: mol_type = other RNA
actagggactggcctcggccaa

SEQ ID NO: 116148 - RNA, 22 nt, synthetic construct
  source 1..22: mol_type = other RNA
actaggggactaacagggtcta

SEQ ID NO: 116149 - RNA, 22 nt, synthetic construct
  source 1..22: mol_type = other RNA
actaggtatcacagtgaggacg

SEQ ID NO: 116150 - RNA, 22 nt, synthetic construct
  source 1..22: mol_type = other RNA
actaggtatttgaaaaatgtca

SEQ ID NO: 116151 - RNA, 22 nt, synthetic construct
  source 1..22: mol_type = other RNA
actagtaagtaaaatcggaaca

SEQ ID NO: 116152 - RNA, 22 nt, synthetic construct
  source 1..22: mol_type = other RNA
actagtacactgttgatttaga

SEQ ID NO: 116153 - RNA, 22 nt, synthetic construct
  source 1..22: mol_type = other RNA
actagtacgtgcagagcagggg

SEQ ID NO: 116154 - RNA, 22 nt, synthetic construct
  source 1..22: mol_type = other RNA
actagtagaaagcaggttcatt

SEQ ID NO: 116155 - RNA, 22 nt, synthetic construct
  source 1..22: mol_type = other RNA
actagtaggatgaattacaaat

SEQ ID NO: 116156 - RNA, 22 nt, synthetic construct
  source 1..22: mol_type = other RNA
actagtataagagaaggaagca

SEQ ID NO: 116157 - RNA, 22 nt, synthetic construct
  source 1..22: mol_type = other RNA
actagtatcaacctgcaggtat

SEQ ID NO: 116158 - RNA, 22 nt, synthetic construct
  source 1..22: mol_type = other RNA
actagtcaccctacagactcaa

SEQ ID NO: 116159 - RNA, 22 nt, synthetic construct
  source 1..22: mol_type = other RNA
actagtcagcacactcttaata

SEQ ID NO: 116160 - RNA, 22 nt, synthetic construct
  source 1..22: mol_type = other RNA
actagtcagtatatttactgct

SEQ ID NO: 116161 - RNA, 22 nt, synthetic construct
  source 1..22: mol_type = other RNA
actagtctccatacaaggagac

SEQ ID NO: 116162 - RNA, 22 nt, synthetic construct
  source 1..22: mol_type = other RNA
actagtgaagtcccatcttcca

SEQ ID NO: 116163 - RNA, 22 nt, synthetic construct
  source 1..22: mol_type = other RNA
actagtggaagaatcaggtctc

SEQ ID NO: 116164 - RNA, 22 nt, synthetic construct
  source 1..22: mol_type = other RNA
actagtggctcatacttgcttt

SEQ ID NO: 116165 - RNA, 22 nt, synthetic construct
  source 1..22: mol_type = other RNA
actagtgggatcaaaccatgtt

SEQ ID NO: 116166 - RNA, 22 nt, synthetic construct
  source 1..22: mol_type = other RNA
actagtgggtcgggtgtcagaa

SEQ ID NO: 116167 - RNA, 22 nt, synthetic construct
  source 1..22: mol_type = other RNA
actagtgtgaatgaggagtgaa

SEQ ID NO: 116168 - RNA, 22 nt, synthetic construct
  source 1..22: mol_type = other RNA
actagttgtgctacctcaaatt

SEQ ID NO: 116169 - RNA, 22 nt, synthetic construct
  source 1..22: mol_type = other RNA
actagtttagtgcagtatcttg

SEQ ID NO: 116170 - RNA, 22 nt, synthetic construct
  source 1..22: mol_type = other RNA
actataaaactcttagcttaga

SEQ ID NO: 116171 - RNA, 22 nt, synthetic construct
  source 1..22: mol_type = other RNA
actataacagatggaactctat

SEQ ID NO: 116172 - RNA, 22 nt, synthetic construct
  source 1..22: mol_type = other RNA
actataagccaatatccctgat

SEQ ID NO: 116173 - RNA, 22 nt, synthetic construct
  source 1..22: mol_type = other RNA
actataatccagatggacaaat

SEQ ID NO: 116174 - RNA, 22 nt, synthetic construct
  source 1..22: mol_type = other RNA
actatacttcaatgctacagta

SEQ ID NO: 116175 - RNA, 22 nt, synthetic construct
  source 1..22: mol_type = other RNA
actatagaaaatagtatgaagg

SEQ ID NO: 116176 - RNA, 22 nt, synthetic construct
  source 1..22: mol_type = other RNA
actatagacccaaagcaaaagc

SEQ ID NO: 116177 - RNA, 22 nt, synthetic construct
  source 1..22: mol_type = other RNA
actataggagttcattcgtagc

SEQ ID NO: 116178 - RNA, 22 nt, synthetic construct
  source 1..22: mol_type = other RNA
actatatgatccagcagtttca

SEQ ID NO: 116179 - RNA, 22 nt, synthetic construct
  source 1..22: mol_type = other RNA
actatcaaaacacttctgtgat

SEQ ID NO: 116180 - RNA, 22 nt, synthetic construct
  source 1..22: mol_type = other RNA
actatcacgattctgacccaga

SEQ ID NO: 116181 - RNA, 22 nt, synthetic construct
  source 1..22: mol_type = other RNA
actatccaacatgccagctttg

SEQ ID NO: 116182 - RNA, 22 nt, synthetic construct
  source 1..22: mol_type = other RNA
actatccacatttggttttact

SEQ ID NO: 116183 - RNA, 22 nt, synthetic construct
  source 1..22: mol_type = other RNA
actatcctatgtggggaatgct

SEQ ID NO: 116184 - RNA, 22 nt, synthetic construct
  source 1..22: mol_type = other RNA
actatcgttatatcctcagggt

SEQ ID NO: 116185 - RNA, 22 nt, synthetic construct
  source 1..22: mol_type = other RNA
actatctaataaaatagcagga

SEQ ID NO: 116186 - RNA, 22 nt, synthetic construct
  source 1..22: mol_type = other RNA
actatctcttcctcctctggac

SEQ ID NO: 116187 - RNA, 22 nt, synthetic construct
  source 1..22: mol_type = other RNA
actatcttccctaaagagaatc

SEQ ID NO: 116188 - RNA, 22 nt, synthetic construct
  source 1..22: mol_type = other RNA
actatgaaaagcctcaaacgaa

SEQ ID NO: 116189 - RNA, 22 nt, synthetic construct
  source 1..22: mol_type = other RNA
actatgaatatactggaaaact

SEQ ID NO: 116190 - RNA, 22 nt, synthetic construct
  source 1..22: mol_type = other RNA
actatgagaaggattagtgtta

SEQ ID NO: 116191 - RNA, 22 nt, synthetic construct
  source 1..22: mol_type = other RNA
actatgcagcaacggaaatgag

SEQ ID NO: 116192 - RNA, 22 nt, synthetic construct
  source 1..22: mol_type = other RNA
actatggacatgaggaaagcag

SEQ ID NO: 116193 - RNA, 22 nt, synthetic construct
  source 1..22: mol_type = other RNA
actatggcttttgagtgtaagg

SEQ ID NO: 116194 - RNA, 22 nt, synthetic construct
  source 1..22: mol_type = other RNA
actatgtaggcacattcaagca

SEQ ID NO: 116195 - RNA, 22 nt, synthetic construct
  source 1..22: mol_type = other RNA
actatgtatgtggctcacattg

SEQ ID NO: 116196 - RNA, 22 nt, synthetic construct
  source 1..22: mol_type = other RNA
actatgtgttgataaatatgtg

SEQ ID NO: 116197 - RNA, 22 nt, synthetic construct
  source 1..22: mol_type = other RNA
actattaaccatatggtttaca

SEQ ID NO: 116198 - RNA, 22 nt, synthetic construct
  source 1..22: mol_type = other RNA
actattatgagcagttgtatgc

SEQ ID NO: 116199 - RNA, 22 nt, synthetic construct
  source 1..22: mol_type = other RNA
actattccaggatcaaatctgg

SEQ ID NO: 116200 - RNA, 22 nt, synthetic construct
  source 1..22: mol_type = other RNA
actattccataagatctgtctt

SEQ ID NO: 116201 - RNA, 22 nt, synthetic construct
  source 1..22: mol_type = other RNA
actattgaaagcccttgagtat

SEQ ID NO: 116202 - RNA, 22 nt, synthetic construct
  source 1..22: mol_type = other RNA
actattgagagtgaaaacacaa

SEQ ID NO: 116203 - RNA, 22 nt, synthetic construct
  source 1..22: mol_type = other RNA
actattgtatgaacattttgag

SEQ ID NO: 116204 - RNA, 22 nt, synthetic construct
  source 1..22: mol_type = other RNA
actatttcgcaaagcaacatgc

SEQ ID NO: 116205 - RNA, 22 nt, synthetic construct
  source 1..22: mol_type = other RNA
actatttctctttaaagctgaa

SEQ ID NO: 116206 - RNA, 22 nt, synthetic construct
  source 1..22: mol_type = other RNA
actatttgtatcttcacaaaca

SEQ ID NO: 116207 - RNA, 22 nt, synthetic construct
  source 1..22: mol_type = other RNA
actattttcataacaaagctct

SEQ ID NO: 116208 - RNA, 22 nt, synthetic construct
  source 1..22: mol_type = other RNA
actattttctatagtggctgca

SEQ ID NO: 116209 - RNA, 22 nt, synthetic construct
  source 1..22: mol_type = other RNA
actcaaaactgaagtttatcag

SEQ ID NO: 116210 - RNA, 22 nt, synthetic construct
  source 1..22: mol_type = other RNA
actcaaaagccatagtgtaaac

SEQ ID NO: 116211 - RNA, 22 nt, synthetic construct
  source 1..22: mol_type = other RNA
actcaaaaggacatattttatg

SEQ ID NO: 116212 - RNA, 22 nt, synthetic construct
  source 1..22: mol_type = other RNA
actcaaaagtgaatcactacag

SEQ ID NO: 116213 - RNA, 22 nt, synthetic construct
  source 1..22: mol_type = other RNA
actcaaaatggatcaaagacct

SEQ ID NO: 116214 - RNA, 22 nt, synthetic construct
  source 1..22: mol_type = other RNA
actcaaaatgttcatacaatag

SEQ ID NO: 116215 - RNA, 22 nt, synthetic construct
  source 1..22: mol_type = other RNA
actcaaacccaaattaaaggat

SEQ ID NO: 116216 - RNA, 22 nt, synthetic construct
  source 1..22: mol_type = other RNA
actcaaacgtccatcaacagca

SEQ ID NO: 116217 - RNA, 22 nt, synthetic construct
  source 1..22: mol_type = other RNA
actcaaactatgcttaatctga

SEQ ID NO: 116218 - RNA, 22 nt, synthetic construct
  source 1..22: mol_type = other RNA
actcaaatccaaattcacagca

SEQ ID NO: 116219 - RNA, 22 nt, synthetic construct
  source 1..22: mol_type = other RNA
actcaacatcactagctattag

SEQ ID NO: 116220 - RNA, 22 nt, synthetic construct
  source 1..22: mol_type = other RNA
actcaacatgtgtatttaggga

SEQ ID NO: 116221 - RNA, 22 nt, synthetic construct
  source 1..22: mol_type = other RNA
actcaacattcattcatgacaa

SEQ ID NO: 116222 - RNA, 22 nt, synthetic construct
  source 1..22: mol_type = other RNA
actcaacgacaatctctggggt

SEQ ID NO: 116223 - RNA, 22 nt, synthetic construct
  source 1..22: mol_type = other RNA
actcaactgcctctacatcaca

SEQ ID NO: 116224 - RNA, 22 nt, synthetic construct
  source 1..22: mol_type = other RNA
actcaagagttacttctggaaa

SEQ ID NO: 116225 - RNA, 22 nt, synthetic construct
  source 1..22: mol_type = other RNA
actcaagcctgataagctccca

SEQ ID NO: 116226 - RNA, 22 nt, synthetic construct
  source 1..22: mol_type = other RNA
actcaagggctttcaatagtgg

SEQ ID NO: 116227 - RNA, 22 nt, synthetic construct
  source 1..22: mol_type = other RNA
actcaagttccggttctcagga

SEQ ID NO: 116228 - RNA, 22 nt, synthetic construct
  source 1..22: mol_type = other RNA
actcaataaccacatgtggctt

SEQ ID NO: 116229 - RNA, 22 nt, synthetic construct
  source 1..22: mol_type = other RNA
actcaatacacgtggctgtcaa

SEQ ID NO: 116230 - RNA, 22 nt, synthetic construct
  source 1..22: mol_type = other RNA
actcaatcagtggccagtgacc

SEQ ID NO: 116231 - RNA, 22 nt, synthetic construct
  source 1..22: mol_type = other RNA
actcaatcttcttatttgttac

SEQ ID NO: 116232 - RNA, 22 nt, synthetic construct
  source 1..22: mol_type = other RNA
actcaatgttggttagtgttgt

SEQ ID NO: 116233 - RNA, 22 nt, synthetic construct
  source 1..22: mol_type = other RNA
actcacaaaaagtgtgaccaca

SEQ ID NO: 116234 - RNA, 22 nt, synthetic construct
  source 1..22: mol_type = other RNA
actcacagcttaccaagtgccg

SEQ ID NO: 116235 - RNA, 22 nt, synthetic construct
  source 1..22: mol_type = other RNA
actcacctagctgttttcatgc

SEQ ID NO: 116236 - RNA, 22 nt, synthetic construct
  source 1..22: mol_type = other RNA
actcacctgtcatgtcaaattt

SEQ ID NO: 116237 - RNA, 22 nt, synthetic construct
  source 1..22: mol_type = other RNA
actcactgaaaccctcacgaaa

SEQ ID NO: 116238 - RNA, 22 nt, synthetic construct
  source 1..22: mol_type = other RNA
actcactggccagcattactta

SEQ ID NO: 116239 - RNA, 22 nt, synthetic construct
  source 1..22: mol_type = other RNA
actcactggcctgagctctcag

SEQ ID NO: 116240 - RNA, 22 nt, synthetic construct
  source 1..22: mol_type = other RNA
actcactgtactactgacctgg

SEQ ID NO: 116241 - RNA, 22 nt, synthetic construct
  source 1..22: mol_type = other RNA
actcacttattagcaaagaggc

SEQ ID NO: 116242 - RNA, 22 nt, synthetic construct
  source 1..22: mol_type = other RNA
actcagaagtactactcattaa

SEQ ID NO: 116243 - RNA, 22 nt, synthetic construct
  source 1..22: mol_type = other RNA
actcagatatcaatctggatat

SEQ ID NO: 116244 - RNA, 22 nt, synthetic construct
  source 1..22: mol_type = other RNA
actcagatctgagagatagaaa

SEQ ID NO: 116245 - RNA, 22 nt, synthetic construct
  source 1..22: mol_type = other RNA
actcagattcaccaattgttaa

SEQ ID NO: 116246 - RNA, 22 nt, synthetic construct
  source 1..22: mol_type = other RNA
actcagcagttttaaagaattc

SEQ ID NO: 116247 - RNA, 22 nt, synthetic construct
  source 1..22: mol_type = other RNA
actcagcataattggttaaact

SEQ ID NO: 116248 - RNA, 22 nt, synthetic construct
  source 1..22: mol_type = other RNA
actcagccccctcgaagagacc

SEQ ID NO: 116249 - RNA, 22 nt, synthetic construct
  source 1..22: mol_type = other RNA
actcagcctgttgggaggtttt

SEQ ID NO: 116250 - RNA, 22 nt, synthetic construct
  source 1..22: mol_type = other RNA
actcagctgtcactctctttag

SEQ ID NO: 116251 - RNA, 22 nt, synthetic construct
  source 1..22: mol_type = other RNA
actcaggagattaaggctggag

SEQ ID NO: 116252 - RNA, 22 nt, synthetic construct
  source 1..22: mol_type = other RNA
actcaggaggctgaggcaggag

SEQ ID NO: 116253 - RNA, 22 nt, synthetic construct
  source 1..22: mol_type = other RNA
actcagggtcacttcctctctt

SEQ ID NO: 116254 - RNA, 22 nt, synthetic construct
  source 1..22: mol_type = other RNA
actcagtacttccctctttctc

SEQ ID NO: 116255 - RNA, 22 nt, synthetic construct
  source 1..22: mol_type = other RNA
actcagtctcgaaaaggaatgg

SEQ ID NO: 116256 - RNA, 22 nt, synthetic construct
  source 1..22: mol_type = other RNA
actcataccaggttttggtaat

SEQ ID NO: 116257 - RNA, 22 nt, synthetic construct
  source 1..22: mol_type = other RNA
actcatattagtctgtagcttc

SEQ ID NO: 116258 - RNA, 22 nt, synthetic construct
  source 1..22: mol_type = other RNA
actcatgagagctgtgccgagg

SEQ ID NO: 116259 - RNA, 22 nt, synthetic construct
  source 1..22: mol_type = other RNA
actcatgcttgctccagagaag

SEQ ID NO: 116260 - RNA, 22 nt, synthetic construct
  source 1..22: mol_type = other RNA
actcatgtctacctgtctttcc

SEQ ID NO: 116261 - RNA, 22 nt, synthetic construct
  source 1..22: mol_type = other RNA
actcattatcccagacagatat

SEQ ID NO: 116262 - RNA, 22 nt, synthetic construct
  source 1..22: mol_type = other RNA
actcattatggttgttggctaa

SEQ ID NO: 116263 - RNA, 22 nt, synthetic construct
  source 1..22: mol_type = other RNA
actcattccaatccttccttca

SEQ ID NO: 116264 - RNA, 22 nt, synthetic construct
  source 1..22: mol_type = other RNA
actcattgcctatagacagcat

SEQ ID NO: 116265 - RNA, 22 nt, synthetic construct
  source 1..22: mol_type = other RNA
actcatttaaacgtcagagcag

SEQ ID NO: 116266 - RNA, 22 nt, synthetic construct
  source 1..22: mol_type = other RNA
actcatttccgttgctgcatag

SEQ ID NO: 116267 - RNA, 22 nt, synthetic construct
  source 1..22: mol_type = other RNA
actcatttcctttcagtcggtt

SEQ ID NO: 116268 - RNA, 22 nt, synthetic construct
  source 1..22: mol_type = other RNA
actcatttctgcttgaatgtgc

SEQ ID NO: 116269 - RNA, 22 nt, synthetic construct
  source 1..22: mol_type = other RNA
actccaaacctttaagttctcc

SEQ ID NO: 116270 - RNA, 22 nt, synthetic construct
  source 1..22: mol_type = other RNA
actccaaagcaaaccagacatt

SEQ ID NO: 116271 - RNA, 22 nt, synthetic construct
  source 1..22: mol_type = other RNA
actccaaagcaaacgtgcacac

SEQ ID NO: 116272 - RNA, 22 nt, synthetic construct
  source 1..22: mol_type = other RNA
actccaacaattcaacaatagc

SEQ ID NO: 116273 - RNA, 22 nt, synthetic construct
  source 1..22: mol_type = other RNA
actccaactcaaaaaagaaaaa

SEQ ID NO: 116274 - RNA, 22 nt, synthetic construct
  source 1..22: mol_type = other RNA
actccaagaaggctagcacaga

SEQ ID NO: 116275 - RNA, 22 nt, synthetic construct
  source 1..22: mol_type = other RNA
actccaagcacacagtttgaga

SEQ ID NO: 116276 - RNA, 22 nt, synthetic construct
  source 1..22: mol_type = other RNA
actccaagtctcatgcaattcc

SEQ ID NO: 116277 - RNA, 22 nt, synthetic construct
  source 1..22: mol_type = other RNA
actccaagtgtaaaaagacatt

SEQ ID NO: 116278 - RNA, 22 nt, synthetic construct
  source 1..22: mol_type = other RNA
actccacacacgaagtagtttt

SEQ ID NO: 116279 - RNA, 22 nt, synthetic construct
  source 1..22: mol_type = other RNA
actccacagagttcagcttaca

SEQ ID NO: 116280 - RNA, 22 nt, synthetic construct
  source 1..22: mol_type = other RNA
actccacattgtcttaattatt

SEQ ID NO: 116281 - RNA, 22 nt, synthetic construct
  source 1..22: mol_type = other RNA
actccaccagcatcttttgacg

SEQ ID NO: 116282 - RNA, 22 nt, synthetic construct
  source 1..22: mol_type = other RNA
actccaccctgccccttatcct

SEQ ID NO: 116283 - RNA, 22 nt, synthetic construct
  source 1..22: mol_type = other RNA
actccacctcagaaacaaacaa

SEQ ID NO: 116284 - RNA, 22 nt, synthetic construct
  source 1..22: mol_type = other RNA
actccaccttagcccaagctac

SEQ ID NO: 116285 - RNA, 22 nt, synthetic construct
  source 1..22: mol_type = other RNA
actccacgtgggtgacagagca

SEQ ID NO: 116286 - RNA, 22 nt, synthetic construct
  source 1..22: mol_type = other RNA
actccactccagcctgagcaac

SEQ ID NO: 116287 - RNA, 22 nt, synthetic construct
  source 1..22: mol_type = other RNA
actccacttcccactgctatga

SEQ ID NO: 116288 - RNA, 22 nt, synthetic construct
  source 1..22: mol_type = other RNA
actccagaatgaccgagatact

SEQ ID NO: 116289 - RNA, 22 nt, synthetic construct
  source 1..22: mol_type = other RNA
actccagactgggcaacagaga

SEQ ID NO: 116290 - RNA, 22 nt, synthetic construct
  source 1..22: mol_type = other RNA
actccagcatccctccagtcca

SEQ ID NO: 116291 - RNA, 22 nt, synthetic construct
  source 1..22: mol_type = other RNA
actccagcctggtcaacagggt

SEQ ID NO: 116292 - RNA, 22 nt, synthetic construct
  source 1..22: mol_type = other RNA
actccagccttggtaagagtga

SEQ ID NO: 116293 - RNA, 22 nt, synthetic construct
  source 1..22: mol_type = other RNA
actccagcttttattagagctt

SEQ ID NO: 116294 - RNA, 22 nt, synthetic construct
  source 1..22: mol_type = other RNA
actccaggggacatgctctgat

SEQ ID NO: 116295 - RNA, 22 nt, synthetic construct
  source 1..22: mol_type = other RNA
actccatctcaagaaaacaaga

SEQ ID NO: 116296 - RNA, 22 nt, synthetic construct
  source 1..22: mol_type = other RNA
actccatcttcacgtggcgctc

SEQ ID NO: 116297 - RNA, 22 nt, synthetic construct
  source 1..22: mol_type = other RNA
actccattatatgaataaacca

SEQ ID NO: 116298 - RNA, 22 nt, synthetic construct
  source 1..22: mol_type = other RNA
actccatttgtggcatctttgt

SEQ ID NO: 116299 - RNA, 22 nt, synthetic construct
  source 1..22: mol_type = other RNA
actcccagaactcgaagccttc

SEQ ID NO: 116300 - RNA, 22 nt, synthetic construct
  source 1..22: mol_type = other RNA
actcccagcctcaaacaatcct

SEQ ID NO: 116301 - RNA, 22 nt, synthetic construct
  source 1..22: mol_type = other RNA
actcccatatctacatgtacgc

SEQ ID NO: 116302 - RNA, 22 nt, synthetic construct
  source 1..22: mol_type = other RNA
actccccagtggttgtggaatt

SEQ ID NO: 116303 - RNA, 22 nt, synthetic construct
  source 1..22: mol_type = other RNA
actccccatgcaggagaaacat

SEQ ID NO: 116304 - RNA, 22 nt, synthetic construct
  source 1..22: mol_type = other RNA
actcccgatttcagttaactta

SEQ ID NO: 116305 - RNA, 22 nt, synthetic construct
  source 1..22: mol_type = other RNA
actccctttttaggtagggata

SEQ ID NO: 116306 - RNA, 22 nt, synthetic construct
  source 1..22: mol_type = other RNA
actccggcgggagaggagcgcc

SEQ ID NO: 116307 - RNA, 22 nt, synthetic construct
  source 1..22: mol_type = other RNA
actcctaaaacatggtccacag

SEQ ID NO: 116308 - RNA, 22 nt, synthetic construct
  source 1..22: mol_type = other RNA
actcctagatactcgggaggct

SEQ ID NO: 116309 - RNA, 22 nt, synthetic construct
  source 1..22: mol_type = other RNA
actcctatagttaagtctgaaa

SEQ ID NO: 116310 - RNA, 22 nt, synthetic construct
  source 1..22: mol_type = other RNA
actcctcattcacactagtcac

SEQ ID NO: 116311 - RNA, 22 nt, synthetic construct
  source 1..22: mol_type = other RNA
actcctgaacaaaatttttgca

SEQ ID NO: 116312 - RNA, 22 nt, synthetic construct
  source 1..22: mol_type = other RNA
actcctgacctcaagcgatcca

SEQ ID NO: 116313 - RNA, 22 nt, synthetic construct
  source 1..22: mol_type = other RNA
actcctgagcaaggaaggaaag

SEQ ID NO: 116314 - RNA, 22 nt, synthetic construct
  source 1..22: mol_type = other RNA
actcctgcactcaagcaatcct

SEQ ID NO: 116315 - RNA, 22 nt, synthetic construct
  source 1..22: mol_type = other RNA
actcctgggctcatctaagcct

SEQ ID NO: 116316 - RNA, 22 nt, synthetic construct
  source 1..22: mol_type = other RNA
actcctggtctcccagcatgaa

SEQ ID NO: 116317 - RNA, 22 nt, synthetic construct
  source 1..22: mol_type = other RNA
actcctgtatgccgctggtgaa

SEQ ID NO: 116318 - RNA, 22 nt, synthetic construct
  source 1..22: mol_type = other RNA
actcctgttctttggagctgta

SEQ ID NO: 116319 - RNA, 22 nt, synthetic construct
  source 1..22: mol_type = other RNA
actccttcccctggtcgagctg

SEQ ID NO: 116320 - RNA, 22 nt, synthetic construct
  source 1..22: mol_type = other RNA
actccttctgaaggcactaaca

SEQ ID NO: 116321 - RNA, 22 nt, synthetic construct
  source 1..22: mol_type = other RNA
actcctttcttaccctcacagt

SEQ ID NO: 116322 - RNA, 22 nt, synthetic construct
  source 1..22: mol_type = other RNA
actcgaagccttcccctgctgt

SEQ ID NO: 116323 - RNA, 22 nt, synthetic construct
  source 1..22: mol_type = other RNA
actcgagggtagcttttcctgc

SEQ ID NO: 116324 - RNA, 22 nt, synthetic construct
  source 1..22: mol_type = other RNA
actcgcactccacttcccactg

SEQ ID NO: 116325 - RNA, 22 nt, synthetic construct
  source 1..22: mol_type = other RNA
actcggtatgtacccaatggat

SEQ ID NO: 116326 - RNA, 22 nt, synthetic construct
  source 1..22: mol_type = other RNA
actcggtctcaaaacaaacaaa

SEQ ID NO: 116327 - RNA, 22 nt, synthetic construct
  source 1..22: mol_type = other RNA
actcgtaatgcgatgatcaaaa

SEQ ID NO: 116328 - RNA, 22 nt, synthetic construct
  source 1..22: mol_type = other RNA
actcgtagttttttggtagata

SEQ ID NO: 116329 - RNA, 22 nt, synthetic construct
  source 1..22: mol_type = other RNA
actcgtggcctcaagcagtcct

SEQ ID NO: 116330 - RNA, 22 nt, synthetic construct
  source 1..22: mol_type = other RNA
actcgtggttatagccataaga

SEQ ID NO: 116331 - RNA, 22 nt, synthetic construct
  source 1..22: mol_type = other RNA
actcgtgtatgatttctaggcc

SEQ ID NO: 116332 - RNA, 22 nt, synthetic construct
  source 1..22: mol_type = other RNA
actcgtgtgtctcataaagccg

SEQ ID NO: 116333 - RNA, 22 nt, synthetic construct
  source 1..22: mol_type = other RNA
actctaaactagttcaaccatt

SEQ ID NO: 116334 - RNA, 22 nt, synthetic construct
  source 1..22: mol_type = other RNA
actctaaagtctatgctcttgg

SEQ ID NO: 116335 - RNA, 22 nt, synthetic construct
  source 1..22: mol_type = other RNA
actctaataacagcctaagcaa

SEQ ID NO: 116336 - RNA, 22 nt, synthetic construct
  source 1..22: mol_type = other RNA
actctaatatggttcctagaaa

SEQ ID NO: 116337 - RNA, 22 nt, synthetic construct
  source 1..22: mol_type = other RNA
actctaatggggaaatagatgc

SEQ ID NO: 116338 - RNA, 22 nt, synthetic construct
  source 1..22: mol_type = other RNA
actctagtggtgcttaattcaa

SEQ ID NO: 116339 - RNA, 22 nt, synthetic construct
  source 1..22: mol_type = other RNA
actctattttcctaaaactccc

SEQ ID NO: 116340 - RNA, 22 nt, synthetic construct
  source 1..22: mol_type = other RNA
actctcaaataatttggcaaaa

SEQ ID NO: 116341 - RNA, 22 nt, synthetic construct
  source 1..22: mol_type = other RNA
actctcaagaaggtatcatcgg

SEQ ID NO: 116342 - RNA, 22 nt, synthetic construct
  source 1..22: mol_type = other RNA
actctcaatagtgtcctttgat

SEQ ID NO: 116343 - RNA, 22 nt, synthetic construct
  source 1..22: mol_type = other RNA
actctcagaaattataagcttc

SEQ ID NO: 116344 - RNA, 22 nt, synthetic construct
  source 1..22: mol_type = other RNA
actctcatctaaattaagcttc

SEQ ID NO: 116345 - RNA, 22 nt, synthetic construct
  source 1..22: mol_type = other RNA
actctccccaagtaaacctcaa

SEQ ID NO: 116346 - RNA, 22 nt, synthetic construct
  source 1..22: mol_type = other RNA
actctcgacctcgtgatctgcc

SEQ ID NO: 116347 - RNA, 22 nt, synthetic construct
  source 1..22: mol_type = other RNA
actctctctgcctcggcacagc

SEQ ID NO: 116348 - RNA, 22 nt, synthetic construct
  source 1..22: mol_type = other RNA
actctctggctgcaattgcgca

SEQ ID NO: 116349 - RNA, 22 nt, synthetic construct
  source 1..22: mol_type = other RNA
actctctttaattatgagcatt

SEQ ID NO: 116350 - RNA, 22 nt, synthetic construct
  source 1..22: mol_type = other RNA
actctctttaggaagcttcctt

SEQ ID NO: 116351 - RNA, 22 nt, synthetic construct
  source 1..22: mol_type = other RNA
actctgaatcacctcaaggcag

SEQ ID NO: 116352 - RNA, 22 nt, synthetic construct
  source 1..22: mol_type = other RNA
actctgaattctctggaataga

SEQ ID NO: 116353 - RNA, 22 nt, synthetic construct
  source 1..22: mol_type = other RNA
actctgaccattgtgtggacac

SEQ ID NO: 116354 - RNA, 22 nt, synthetic construct
  source 1..22: mol_type = other RNA
actctgagacaggatccagatg

SEQ ID NO: 116355 - RNA, 22 nt, synthetic construct
  source 1..22: mol_type = other RNA
actctgcaattttaaatgtaca

SEQ ID NO: 116356 - RNA, 22 nt, synthetic construct
  source 1..22: mol_type = other RNA
actctgcctcagttgacatcct

SEQ ID NO: 116357 - RNA, 22 nt, synthetic construct
  source 1..22: mol_type = other RNA
actctgctcaaaggggcattcc

SEQ ID NO: 116358 - RNA, 22 nt, synthetic construct
  source 1..22: mol_type = other RNA
actctggcaggtcacctagcct

SEQ ID NO: 116359 - RNA, 22 nt, synthetic construct
  source 1..22: mol_type = other RNA
actctggcctggacaacagtgt

SEQ ID NO: 116360 - RNA, 22 nt, synthetic construct
  source 1..22: mol_type = other RNA
actctggctcagaaacaacaac

SEQ ID NO: 116361 - RNA, 22 nt, synthetic construct
  source 1..22: mol_type = other RNA
actctgtcatggtgtgtctgcg

SEQ ID NO: 116362 - RNA, 22 nt, synthetic construct
  source 1..22: mol_type = other RNA
actctgtcgcccaggctggagc

SEQ ID NO: 116363 - RNA, 22 nt, synthetic construct
  source 1..22: mol_type = other RNA
actctgtgcttgtgcttttaat

SEQ ID NO: 116364 - RNA, 22 nt, synthetic construct
  source 1..22: mol_type = other RNA
actctgtggagtcctgtcagtt

SEQ ID NO: 116365 - RNA, 22 nt, synthetic construct
  source 1..22: mol_type = other RNA
actctgtttccttaccagtgct

SEQ ID NO: 116366 - RNA, 22 nt, synthetic construct
  source 1..22: mol_type = other RNA
actcttaaaaggagatatacag

SEQ ID NO: 116367 - RNA, 22 nt, synthetic construct
  source 1..22: mol_type = other RNA
actcttaaagtttcaaactgtg

SEQ ID NO: 116368 - RNA, 22 nt, synthetic construct
  source 1..22: mol_type = other RNA
actcttaataactgcctaagta

SEQ ID NO: 116369 - RNA, 22 nt, synthetic construct
  source 1..22: mol_type = other RNA
actcttaatattgaaacgatgc

SEQ ID NO: 116370 - RNA, 22 nt, synthetic construct
  source 1..22: mol_type = other RNA
actcttaccaaggctggagtgc

SEQ ID NO: 116371 - RNA, 22 nt, synthetic construct
  source 1..22: mol_type = other RNA
actcttagcttagaagaagact

SEQ ID NO: 116372 - RNA, 22 nt, synthetic construct
  source 1..22: mol_type = other RNA
actcttagtgatgtcttttgaa

SEQ ID NO: 116373 - RNA, 22 nt, synthetic construct
  source 1..22: mol_type = other RNA
actcttatatcctaaacactta

SEQ ID NO: 116374 - RNA, 22 nt, synthetic construct
  source 1..22: mol_type = other RNA
actcttatggctataaccacga

SEQ ID NO: 116375 - RNA, 22 nt, synthetic construct
  source 1..22: mol_type = other RNA
actcttcagaggtctgttactc

SEQ ID NO: 116376 - RNA, 22 nt, synthetic construct
  source 1..22: mol_type = other RNA
actcttccttatccgataaagg

SEQ ID NO: 116377 - RNA, 22 nt, synthetic construct
  source 1..22: mol_type = other RNA
actcttctactcactgtactac

SEQ ID NO: 116378 - RNA, 22 nt, synthetic construct
  source 1..22: mol_type = other RNA
actcttctccaaggaaagtgtg

SEQ ID NO: 116379 - RNA, 22 nt, synthetic construct
  source 1..22: mol_type = other RNA
actcttctgcaagttgctatcc

SEQ ID NO: 116380 - RNA, 22 nt, synthetic construct
  source 1..22: mol_type = other RNA
actcttgagttaggaatttaca

SEQ ID NO: 116381 - RNA, 22 nt, synthetic construct
  source 1..22: mol_type = other RNA
actcttgcattagagccccaag

SEQ ID NO: 116382 - RNA, 22 nt, synthetic construct
  source 1..22: mol_type = other RNA
actcttgcggtcttttagccaa

SEQ ID NO: 116383 - RNA, 22 nt, synthetic construct
  source 1..22: mol_type = other RNA
actcttggccattttcttttaa

SEQ ID NO: 116384 - RNA, 22 nt, synthetic construct
  source 1..22: mol_type = other RNA
actcttggtctttctcccaggt

SEQ ID NO: 116385 - RNA, 22 nt, synthetic construct
  source 1..22: mol_type = other RNA
actcttgtagtatttttgcaac

SEQ ID NO: 116386 - RNA, 22 nt, synthetic construct
  source 1..22: mol_type = other RNA
actcttgtcccggcatgcctct

SEQ ID NO: 116387 - RNA, 22 nt, synthetic construct
  source 1..22: mol_type = other RNA
actcttttaaacccatttcatg

SEQ ID NO: 116388 - RNA, 22 nt, synthetic construct
  source 1..22: mol_type = other RNA
actcttttaaggtttagaaaac

SEQ ID NO: 116389 - RNA, 22 nt, synthetic construct
  source 1..22: mol_type = other RNA
actgaaacaatcgcaatccaaa

SEQ ID NO: 116390 - RNA, 22 nt, synthetic construct
  source 1..22: mol_type = other RNA
actgaaaccagtgctctccccc

SEQ ID NO: 116391 - RNA, 22 nt, synthetic construct
  source 1..22: mol_type = other RNA
actgaaaccagtgggtcagcta

SEQ ID NO: 116392 - RNA, 22 nt, synthetic construct
  source 1..22: mol_type = other RNA
actgaaaccctcacgaaagcgg

SEQ ID NO: 116393 - RNA, 22 nt, synthetic construct
  source 1..22: mol_type = other RNA
actgaaagacagacctctatta

SEQ ID NO: 116394 - RNA, 22 nt, synthetic construct
  source 1..22: mol_type = other RNA
actgaaagcagggactcccata

SEQ ID NO: 116395 - RNA, 22 nt, synthetic construct
  source 1..22: mol_type = other RNA
actgaaaggaaatgagtgtatg

SEQ ID NO: 116396 - RNA, 22 nt, synthetic construct
  source 1..22: mol_type = other RNA
actgaaataatttggttatgcg

SEQ ID NO: 116397 - RNA, 22 nt, synthetic construct
  source 1..22: mol_type = other RNA
actgaaatcctagccccaaata

SEQ ID NO: 116398 - RNA, 22 nt, synthetic construct
  source 1..22: mol_type = other RNA
actgaaatcgggagtaacagac

SEQ ID NO: 116399 - RNA, 22 nt, synthetic construct
  source 1..22: mol_type = other RNA
actgaacaacgctgtggctaac

SEQ ID NO: 116400 - RNA, 22 nt, synthetic construct
  source 1..22: mol_type = other RNA
actgaacatgtatgtttctcat

SEQ ID NO: 116401 - RNA, 22 nt, synthetic construct
  source 1..22: mol_type = other RNA
actgaacatttatacagttgga

SEQ ID NO: 116402 - RNA, 22 nt, synthetic construct
  source 1..22: mol_type = other RNA
actgaactacagtgtttaggga

SEQ ID NO: 116403 - RNA, 22 nt, synthetic construct
  source 1..22: mol_type = other RNA
actgaactcaaaatggatcaaa

SEQ ID NO: 116404 - RNA, 22 nt, synthetic construct
  source 1..22: mol_type = other RNA
actgaagccagtccttgtgatc

SEQ ID NO: 116405 - RNA, 22 nt, synthetic construct
  source 1..22: mol_type = other RNA
actgaagcggggctgccactac

SEQ ID NO: 116406 - RNA, 22 nt, synthetic construct
  source 1..22: mol_type = other RNA
actgaaggattcctccctggag

SEQ ID NO: 116407 - RNA, 22 nt, synthetic construct
  source 1..22: mol_type = other RNA
actgaaggcatagggccttcta

SEQ ID NO: 116408 - RNA, 22 nt, synthetic construct
  source 1..22: mol_type = other RNA
actgaagggaattttactgatc

SEQ ID NO: 116409 - RNA, 22 nt, synthetic construct
  source 1..22: mol_type = other RNA
actgaagtaataaagcaagtat

SEQ ID NO: 116410 - RNA, 22 nt, synthetic construct
  source 1..22: mol_type = other RNA
actgaagtcctttcttggtctg

SEQ ID NO: 116411 - RNA, 22 nt, synthetic construct
  source 1..22: mol_type = other RNA
actgaagtgttgagaggcttta

SEQ ID NO: 116412 - RNA, 22 nt, synthetic construct
  source 1..22: mol_type = other RNA
actgaagttctcaggggtaaag

SEQ ID NO: 116413 - RNA, 22 nt, synthetic construct
  source 1..22: mol_type = other RNA
actgaagtttatcagtctccaa

SEQ ID NO: 116414 - RNA, 22 nt, synthetic construct
  source 1..22: mol_type = other RNA
actgaagtttatcgtatttatc

SEQ ID NO: 116415 - RNA, 22 nt, synthetic construct
  source 1..22: mol_type = other RNA
actgaatcagacaacacattaa

SEQ ID NO: 116416 - RNA, 22 nt, synthetic construct
  source 1..22: mol_type = other RNA
actgaattaatctcttacacct

SEQ ID NO: 116417 - RNA, 22 nt, synthetic construct
  source 1..22: mol_type = other RNA
actgaattcccacaaaatatga

SEQ ID NO: 116418 - RNA, 22 nt, synthetic construct
  source 1..22: mol_type = other RNA
actgacaatagccaagacatgg

SEQ ID NO: 116419 - RNA, 22 nt, synthetic construct
  source 1..22: mol_type = other RNA
actgacacaggctgaagggagg

SEQ ID NO: 116420 - RNA, 22 nt, synthetic construct
  source 1..22: mol_type = other RNA
actgacaggacagagcagtagg

SEQ ID NO: 116421 - RNA, 22 nt, synthetic construct
  source 1..22: mol_type = other RNA
actgacaggactccacagagtt

SEQ ID NO: 116422 - RNA, 22 nt, synthetic construct
  source 1..22: mol_type = other RNA
actgacagtggacaaaggttcc

SEQ ID NO: 116423 - RNA, 22 nt, synthetic construct
  source 1..22: mol_type = other RNA
actgacataactgtaaagtaat

SEQ ID NO: 116424 - RNA, 22 nt, synthetic construct
  source 1..22: mol_type = other RNA
actgaccaacatggacaaaccc

SEQ ID NO: 116425 - RNA, 22 nt, synthetic construct
  source 1..22: mol_type = other RNA
actgaccatctcagcacagagc

SEQ ID NO: 116426 - RNA, 22 nt, synthetic construct
  source 1..22: mol_type = other RNA
actgacctgggagaaagaccaa

SEQ ID NO: 116427 - RNA, 22 nt, synthetic construct
  source 1..22: mol_type = other RNA
actgactacacatacacaggga

SEQ ID NO: 116428 - RNA, 22 nt, synthetic construct
  source 1..22: mol_type = other RNA
actgactagtggctcatacttg

SEQ ID NO: 116429 - RNA, 22 nt, synthetic construct
  source 1..22: mol_type = other RNA
actgactcaatcttcttatttg

SEQ ID NO: 116430 - RNA, 22 nt, synthetic construct
  source 1..22: mol_type = other RNA
actgactccctttttaggtagg

SEQ ID NO: 116431 - RNA, 22 nt, synthetic construct
  source 1..22: mol_type = other RNA
actgactctaaagtctatgctc

SEQ ID NO: 116432 - RNA, 22 nt, synthetic construct
  source 1..22: mol_type = other RNA
actgactgaaggattcctccct

SEQ ID NO: 116433 - RNA, 22 nt, synthetic construct
  source 1..22: mol_type = other RNA
actgactggctgtgccaactct

SEQ ID NO: 116434 - RNA, 22 nt, synthetic construct
  source 1..22: mol_type = other RNA
actgacttacagaccttattca

SEQ ID NO: 116435 - RNA, 22 nt, synthetic construct
  source 1..22: mol_type = other RNA
actgacttcaagaggttaaaac

SEQ ID NO: 116436 - RNA, 22 nt, synthetic construct
  source 1..22: mol_type = other RNA
actgacttttccttaaaaaagg

SEQ ID NO: 116437 - RNA, 22 nt, synthetic construct
  source 1..22: mol_type = other RNA
actgagaagagctgtaacagag

SEQ ID NO: 116438 - RNA, 22 nt, synthetic construct
  source 1..22: mol_type = other RNA
actgagacagtattgtgctgaa

SEQ ID NO: 116439 - RNA, 22 nt, synthetic construct
  source 1..22: mol_type = other RNA
actgagaccggatgaggtggct

SEQ ID NO: 116440 - RNA, 22 nt, synthetic construct
  source 1..22: mol_type = other RNA
actgagagctcaggccagtgag

SEQ ID NO: 116441 - RNA, 22 nt, synthetic construct
  source 1..22: mol_type = other RNA
actgagcacaatgcctgccgca

SEQ ID NO: 116442 - RNA, 22 nt, synthetic construct
  source 1..22: mol_type = other RNA
actgagcagtgaaagtctccct

SEQ ID NO: 116443 - RNA, 22 nt, synthetic construct
  source 1..22: mol_type = other RNA
actgagcatcccagaggtactc

SEQ ID NO: 116444 - RNA, 22 nt, synthetic construct
  source 1..22: mol_type = other RNA
actgagcatttatataagttca

SEQ ID NO: 116445 - RNA, 22 nt, synthetic construct
  source 1..22: mol_type = other RNA
actgagccagcaaatcagaaaa

SEQ ID NO: 116446 - RNA, 22 nt, synthetic construct
  source 1..22: mol_type = other RNA
actgaggcagagtagagaaggc

SEQ ID NO: 116447 - RNA, 22 nt, synthetic construct
  source 1..22: mol_type = other RNA
actgaggtcaagaaataaaaca

SEQ ID NO: 116448 - RNA, 22 nt, synthetic construct
  source 1..22: mol_type = other RNA
actgaggtgtttttcagccctg

SEQ ID NO: 116449 - RNA, 22 nt, synthetic construct
  source 1..22: mol_type = other RNA
actgagtaatattccattgtgc

SEQ ID NO: 116450 - RNA, 22 nt, synthetic construct
  source 1..22: mol_type = other RNA
actgagtcaaaaccaaagaaag

SEQ ID NO: 116451 - RNA, 22 nt, synthetic construct
  source 1..22: mol_type = other RNA
actgataaacttcagttttgag

SEQ ID NO: 116452 - RNA, 22 nt, synthetic construct
  source 1..22: mol_type = other RNA
actgatagcgaaaggtacgacg

SEQ ID NO: 116453 - RNA, 22 nt, synthetic construct
  source 1..22: mol_type = other RNA
actgatatgagggatgaggaag

SEQ ID NO: 116454 - RNA, 22 nt, synthetic construct
  source 1..22: mol_type = other RNA
actgatctgctcaagttttcta

SEQ ID NO: 116455 - RNA, 22 nt, synthetic construct
  source 1..22: mol_type = other RNA
actgatcttttctgacaatttc

SEQ ID NO: 116456 - RNA, 22 nt, synthetic construct
  source 1..22: mol_type = other RNA
actgatgaagaacctgttcatt

SEQ ID NO: 116457 - RNA, 22 nt, synthetic construct
  source 1..22: mol_type = other RNA
actgatggaattctgacacccg

SEQ ID NO: 116458 - RNA, 22 nt, synthetic construct
  source 1..22: mol_type = other RNA
actgatgtgaggatctgttggt

SEQ ID NO: 116459 - RNA, 22 nt, synthetic construct
  source 1..22: mol_type = other RNA
actgatgtgtagttattattgt

SEQ ID NO: 116460 - RNA, 22 nt, synthetic construct
  source 1..22: mol_type = other RNA
actgattaatttgaggtctagg

SEQ ID NO: 116461 - RNA, 22 nt, synthetic construct
  source 1..22: mol_type = other RNA
actgattagaaggattgttcat

SEQ ID NO: 116462 - RNA, 22 nt, synthetic construct
  source 1..22: mol_type = other RNA
actgattgagtatctggtgctg

SEQ ID NO: 116463 - RNA, 22 nt, synthetic construct
  source 1..22: mol_type = other RNA
actgatttatagtgtttccttc

SEQ ID NO: 116464 - RNA, 22 nt, synthetic construct
  source 1..22: mol_type = other RNA
actgattttctgcttctcaata

SEQ ID NO: 116465 - RNA, 22 nt, synthetic construct
  source 1..22: mol_type = other RNA
actgcaaaactttcttcaaaat

SEQ ID NO: 116466 - RNA, 22 nt, synthetic construct
  source 1..22: mol_type = other RNA
actgcaaatatccaatcactgg

SEQ ID NO: 116467 - RNA, 22 nt, synthetic construct
  source 1..22: mol_type = other RNA
actgcaacagatctgagaagac

SEQ ID NO: 116468 - RNA, 22 nt, synthetic construct
  source 1..22: mol_type = other RNA
actgcaacctccgtttttcagg

SEQ ID NO: 116469 - RNA, 22 nt, synthetic construct
  source 1..22: mol_type = other RNA
actgcaagctccgcctcctggt

SEQ ID NO: 116470 - RNA, 22 nt, synthetic construct
  source 1..22: mol_type = other RNA
actgcacagtatgcggggtttc

SEQ ID NO: 116471 - RNA, 22 nt, synthetic construct
  source 1..22: mol_type = other RNA
actgcacataaaaggatatggg

SEQ ID NO: 116472 - RNA, 22 nt, synthetic construct
  source 1..22: mol_type = other RNA
actgcactaaactagtatcaac

SEQ ID NO: 116473 - RNA, 22 nt, synthetic construct
  source 1..22: mol_type = other RNA
actgcactccagccttggtaag

SEQ ID NO: 116474 - RNA, 22 nt, synthetic construct
  source 1..22: mol_type = other RNA
actgcactctcaaaattaaatt

SEQ ID NO: 116475 - RNA, 22 nt, synthetic construct
  source 1..22: mol_type = other RNA
actgcactctggcctggacaac

SEQ ID NO: 116476 - RNA, 22 nt, synthetic construct
  source 1..22: mol_type = other RNA
actgcagaatgacagaaaatat

SEQ ID NO: 116477 - RNA, 22 nt, synthetic construct
  source 1..22: mol_type = other RNA
actgcagaattactgacaatag

SEQ ID NO: 116478 - RNA, 22 nt, synthetic construct
  source 1..22: mol_type = other RNA
actgcagaggtcaggaaggcag

SEQ ID NO: 116479 - RNA, 22 nt, synthetic construct
  source 1..22: mol_type = other RNA
actgcagatgaatgagcaaggt

SEQ ID NO: 116480 - RNA, 22 nt, synthetic construct
  source 1..22: mol_type = other RNA
actgcagcaattatttgaataa

SEQ ID NO: 116481 - RNA, 22 nt, synthetic construct
  source 1..22: mol_type = other RNA
actgcaggtcttcaacctcaac

SEQ ID NO: 116482 - RNA, 22 nt, synthetic construct
  source 1..22: mol_type = other RNA
actgcaggtgttggtgcatttg

SEQ ID NO: 116483 - RNA, 22 nt, synthetic construct
  source 1..22: mol_type = other RNA
actgcagtctcaaactcctgca

SEQ ID NO: 116484 - RNA, 22 nt, synthetic construct
  source 1..22: mol_type = other RNA
actgcagtctgtcctcgtaaaa

SEQ ID NO: 116485 - RNA, 22 nt, synthetic construct
  source 1..22: mol_type = other RNA
actgcagtgacctatcattgca

SEQ ID NO: 116486 - RNA, 22 nt, synthetic construct
  source 1..22: mol_type = other RNA
actgcagttggattatatgttc

SEQ ID NO: 116487 - RNA, 22 nt, synthetic construct
  source 1..22: mol_type = other RNA
actgcatattgaagccagcacc

SEQ ID NO: 116488 - RNA, 22 nt, synthetic construct
  source 1..22: mol_type = other RNA
actgcatcttcttttacttgct

SEQ ID NO: 116489 - RNA, 22 nt, synthetic construct
  source 1..22: mol_type = other RNA
actgcatgattccccttatatg

SEQ ID NO: 116490 - RNA, 22 nt, synthetic construct
  source 1..22: mol_type = other RNA
actgcatgctaggggctgttcc

SEQ ID NO: 116491 - RNA, 22 nt, synthetic construct
  source 1..22: mol_type = other RNA
actgcattcatccaggcaaaag

SEQ ID NO: 116492 - RNA, 22 nt, synthetic construct
  source 1..22: mol_type = other RNA
actgcattccgcctgggcgaca

SEQ ID NO: 116493 - RNA, 22 nt, synthetic construct
  source 1..22: mol_type = other RNA
actgcattgtgcacttaaaatt

SEQ ID NO: 116494 - RNA, 22 nt, synthetic construct
  source 1..22: mol_type = other RNA
actgcattttttgccaaattat

SEQ ID NO: 116495 - RNA, 22 nt, synthetic construct
  source 1..22: mol_type = other RNA
actgccaaaccctacacccatc

SEQ ID NO: 116496 - RNA, 22 nt, synthetic construct
  source 1..22: mol_type = other RNA
actgccaggtagggaggggtat

SEQ ID NO: 116497 - RNA, 22 nt, synthetic construct
  source 1..22: mol_type = other RNA
actgcctaagtaatgctggcca

SEQ ID NO: 116498 - RNA, 22 nt, synthetic construct
  source 1..22: mol_type = other RNA
actgcctccacaggctttgact

SEQ ID NO: 116499 - RNA, 22 nt, synthetic construct
  source 1..22: mol_type = other RNA
actgcctctacatcacagacag

SEQ ID NO: 116500 - RNA, 22 nt, synthetic construct
  source 1..22: mol_type = other RNA
actgcctgaggtctcaaaattt

SEQ ID NO: 116501 - RNA, 22 nt, synthetic construct
  source 1..22: mol_type = other RNA
actgcctggacccgggaggcag

SEQ ID NO: 116502 - RNA, 22 nt, synthetic construct
  source 1..22: mol_type = other RNA
actgcctggtcctgagggcttt

SEQ ID NO: 116503 - RNA, 22 nt, synthetic construct
  source 1..22: mol_type = other RNA
actgcgccaagcagggacgggc

SEQ ID NO: 116504 - RNA, 22 nt, synthetic construct
  source 1..22: mol_type = other RNA
actgcgggcccagctcttttgt

SEQ ID NO: 116505 - RNA, 22 nt, synthetic construct
  source 1..22: mol_type = other RNA
actgcgtggtttattcatataa

SEQ ID NO: 116506 - RNA, 22 nt, synthetic construct
  source 1..22: mol_type = other RNA
actgctaatggtccttgctgaa

SEQ ID NO: 116507 - RNA, 22 nt, synthetic construct
  source 1..22: mol_type = other RNA
actgctataaacttccctctca

SEQ ID NO: 116508 - RNA, 22 nt, synthetic construct
  source 1..22: mol_type = other RNA
actgctatacaaccggaaaatg

SEQ ID NO: 116509 - RNA, 22 nt, synthetic construct
  source 1..22: mol_type = other RNA
actgctatgactaatttgaggc

SEQ ID NO: 116510 - RNA, 22 nt, synthetic construct
  source 1..22: mol_type = other RNA
actgctattgataaatctaaag

SEQ ID NO: 116511 - RNA, 22 nt, synthetic construct
  source 1..22: mol_type = other RNA
actgctcagaagctttcagact

SEQ ID NO: 116512 - RNA, 22 nt, synthetic construct
  source 1..22: mol_type = other RNA
actgctcagtccctcaccttct

SEQ ID NO: 116513 - RNA, 22 nt, synthetic construct
  source 1..22: mol_type = other RNA
actgctcataatagtctcacga

SEQ ID NO: 116514 - RNA, 22 nt, synthetic construct
  source 1..22: mol_type = other RNA
actgctcctctgactttatggt

SEQ ID NO: 116515 - RNA, 22 nt, synthetic construct
  source 1..22: mol_type = other RNA
actgctcctgcctttgttcatc

SEQ ID NO: 116516 - RNA, 22 nt, synthetic construct
  source 1..22: mol_type = other RNA
actgctctgtcctgtcagtgtg

SEQ ID NO: 116517 - RNA, 22 nt, synthetic construct
  source 1..22: mol_type = other RNA
actgctcttctattccagagaa

SEQ ID NO: 116518 - RNA, 22 nt, synthetic construct
  source 1..22: mol_type = other RNA
actgctgacagattaaatacca

SEQ ID NO: 116519 - RNA, 22 nt, synthetic construct
  source 1..22: mol_type = other RNA
actgctgagtcttctactgtga

SEQ ID NO: 116520 - RNA, 22 nt, synthetic construct
  source 1..22: mol_type = other RNA
actgctgatgtaagtgggagga

SEQ ID NO: 116521 - RNA, 22 nt, synthetic construct
  source 1..22: mol_type = other RNA
actgctggatcatatagtaatt

SEQ ID NO: 116522 - RNA, 22 nt, synthetic construct
  source 1..22: mol_type = other RNA
actgctggtctggaatgtgtag

SEQ ID NO: 116523 - RNA, 22 nt, synthetic construct
  source 1..22: mol_type = other RNA
actgctgtttaccaagggtgtg

SEQ ID NO: 116524 - RNA, 22 nt, synthetic construct
  source 1..22: mol_type = other RNA
actgcttccctagcccagcact

SEQ ID NO: 116525 - RNA, 22 nt, synthetic construct
  source 1..22: mol_type = other RNA
actgcttgaggccacgagttca

SEQ ID NO: 116526 - RNA, 22 nt, synthetic construct
  source 1..22: mol_type = other RNA
actgcttgctgcactggctatt

SEQ ID NO: 116527 - RNA, 22 nt, synthetic construct
  source 1..22: mol_type = other RNA
actggaaaactagagatgggaa

SEQ ID NO: 116528 - RNA, 22 nt, synthetic construct
  source 1..22: mol_type = other RNA
actggaaaagtgttgactacca

SEQ ID NO: 116529 - RNA, 22 nt, synthetic construct
  source 1..22: mol_type = other RNA
actggaaaccttttgtagaccc

SEQ ID NO: 116530 - RNA, 22 nt, synthetic construct
  source 1..22: mol_type = other RNA
actggaaatcacaggtttaggt

SEQ ID NO: 116531 - RNA, 22 nt, synthetic construct
  source 1..22: mol_type = other RNA
actggaaatggacagcggggat

SEQ ID NO: 116532 - RNA, 22 nt, synthetic construct
  source 1..22: mol_type = other RNA
actggaactcatttctgcttga

SEQ ID NO: 116533 - RNA, 22 nt, synthetic construct
  source 1..22: mol_type = other RNA
actggaaggaaataagaaggtt

SEQ ID NO: 116534 - RNA, 22 nt, synthetic construct
  source 1..22: mol_type = other RNA
actggaaggactcacagcttac

SEQ ID NO: 116535 - RNA, 22 nt, synthetic construct
  source 1..22: mol_type = other RNA
actggaagtaattgggatctga

SEQ ID NO: 116536 - RNA, 22 nt, synthetic construct
  source 1..22: mol_type = other RNA
actggaagtgtaacatacacat

SEQ ID NO: 116537 - RNA, 22 nt, synthetic construct
  source 1..22: mol_type = other RNA
actggaatcaatccagacagct

SEQ ID NO: 116538 - RNA, 22 nt, synthetic construct
  source 1..22: mol_type = other RNA
actggaattcatcaaagttaaa

SEQ ID NO: 116539 - RNA, 22 nt, synthetic construct
  source 1..22: mol_type = other RNA
actggactccttctgaaggcac

SEQ ID NO: 116540 - RNA, 22 nt, synthetic construct
  source 1..22: mol_type = other RNA
actggagaacagtaaagtcact

SEQ ID NO: 116541 - RNA, 22 nt, synthetic construct
  source 1..22: mol_type = other RNA
actggagaattctactaaacat

SEQ ID NO: 116542 - RNA, 22 nt, synthetic construct
  source 1..22: mol_type = other RNA
actggagcagggtgggccctta

SEQ ID NO: 116543 - RNA, 22 nt, synthetic construct
  source 1..22: mol_type = other RNA
actggagggatgctggagtgtg

SEQ ID NO: 116544 - RNA, 22 nt, synthetic construct
  source 1..22: mol_type = other RNA
actggaggtgcacattccaaga

SEQ ID NO: 116545 - RNA, 22 nt, synthetic construct
  source 1..22: mol_type = other RNA
actggagtgcagtggtgcaatg

SEQ ID NO: 116546 - RNA, 22 nt, synthetic construct
  source 1..22: mol_type = other RNA
actggagttcactggcacaatc

SEQ ID NO: 116547 - RNA, 22 nt, synthetic construct
  source 1..22: mol_type = other RNA
actggatacaaggtcaatctga

SEQ ID NO: 116548 - RNA, 22 nt, synthetic construct
  source 1..22: mol_type = other RNA
actggatacggaaatataacat

SEQ ID NO: 116549 - RNA, 22 nt, synthetic construct
  source 1..22: mol_type = other RNA
actggatagaagtgtatcagat

SEQ ID NO: 116550 - RNA, 22 nt, synthetic construct
  source 1..22: mol_type = other RNA
actggatagcaacttgcagaag

SEQ ID NO: 116551 - RNA, 22 nt, synthetic construct
  source 1..22: mol_type = other RNA
actggatcctggagggctccca

SEQ ID NO: 116552 - RNA, 22 nt, synthetic construct
  source 1..22: mol_type = other RNA
actggatgaatacaaaggtgtt

SEQ ID NO: 116553 - RNA, 22 nt, synthetic construct
  source 1..22: mol_type = other RNA
actggattaaggagatggcaca

SEQ ID NO: 116554 - RNA, 22 nt, synthetic construct
  source 1..22: mol_type = other RNA
actggatttgattgggcattaa

SEQ ID NO: 116555 - RNA, 22 nt, synthetic construct
  source 1..22: mol_type = other RNA
actggcaaaaatcatcatatat

SEQ ID NO: 116556 - RNA, 22 nt, synthetic construct
  source 1..22: mol_type = other RNA
actggcaatcaaatggccttct

SEQ ID NO: 116557 - RNA, 22 nt, synthetic construct
  source 1..22: mol_type = other RNA
actggcacagcactgttaactg

SEQ ID NO: 116558 - RNA, 22 nt, synthetic construct
  source 1..22: mol_type = other RNA
actggccactgattgagtatct

SEQ ID NO: 116559 - RNA, 22 nt, synthetic construct
  source 1..22: mol_type = other RNA
actggccagcattacttaggca

SEQ ID NO: 116560 - RNA, 22 nt, synthetic construct
  source 1..22: mol_type = other RNA
actggccatccttcccaaatcc

SEQ ID NO: 116561 - RNA, 22 nt, synthetic construct
  source 1..22: mol_type = other RNA
actggccatgttttatttcttg

SEQ ID NO: 116562 - RNA, 22 nt, synthetic construct
  source 1..22: mol_type = other RNA
actggcccctccatggaaacta

SEQ ID NO: 116563 - RNA, 22 nt, synthetic construct
  source 1..22: mol_type = other RNA
actggcctcggccaaccattac

SEQ ID NO: 116564 - RNA, 22 nt, synthetic construct
  source 1..22: mol_type = other RNA
actggcctgagctctcagtggc

SEQ ID NO: 116565 - RNA, 22 nt, synthetic construct
  source 1..22: mol_type = other RNA
actggctagtaggcaacatccc

SEQ ID NO: 116566 - RNA, 22 nt, synthetic construct
  source 1..22: mol_type = other RNA
actggctattagttaaccttct

SEQ ID NO: 116567 - RNA, 22 nt, synthetic construct
  source 1..22: mol_type = other RNA
actggctgtgccaactctggca

SEQ ID NO: 116568 - RNA, 22 nt, synthetic construct
  source 1..22: mol_type = other RNA
actggcttaatgcatataaaaa

SEQ ID NO: 116569 - RNA, 22 nt, synthetic construct
  source 1..22: mol_type = other RNA
actggcttcagtgccaacacat

SEQ ID NO: 116570 - RNA, 22 nt, synthetic construct
  source 1..22: mol_type = other RNA
actgggacttctagcctccaga

SEQ ID NO: 116571 - RNA, 22 nt, synthetic construct
  source 1..22: mol_type = other RNA
actgggagaatggcaaggctaa

SEQ ID NO: 116572 - RNA, 22 nt, synthetic construct
  source 1..22: mol_type = other RNA
actgggagccctccaggatcca

SEQ ID NO: 116573 - RNA, 22 nt, synthetic construct
  source 1..22: mol_type = other RNA
actgggatcctaagcatgagat

SEQ ID NO: 116574 - RNA, 22 nt, synthetic construct
  source 1..22: mol_type = other RNA
actgggcaacagagacagagaa

SEQ ID NO: 116575 - RNA, 22 nt, synthetic construct
  source 1..22: mol_type = other RNA
actggggagtgtgcccaaggaa

SEQ ID NO: 116576 - RNA, 22 nt, synthetic construct
  source 1..22: mol_type = other RNA
actggggcttgaacccgaggtg

SEQ ID NO: 116577 - RNA, 22 nt, synthetic construct
  source 1..22: mol_type = other RNA
actgggggctggacataagggt

SEQ ID NO: 116578 - RNA, 22 nt, synthetic construct
  source 1..22: mol_type = other RNA
actggggtcttagttctgcttc

SEQ ID NO: 116579 - RNA, 22 nt, synthetic construct
  source 1..22: mol_type = other RNA
actgggtaaacaagactcaaca

SEQ ID NO: 116580 - RNA, 22 nt, synthetic construct
  source 1..22: mol_type = other RNA
actgggtccccggaggaggtgg

SEQ ID NO: 116581 - RNA, 22 nt, synthetic construct
  source 1..22: mol_type = other RNA
actgggtcttataggttgaata

SEQ ID NO: 116582 - RNA, 22 nt, synthetic construct
  source 1..22: mol_type = other RNA
actgggtgtagggggaaaactc

SEQ ID NO: 116583 - RNA, 22 nt, synthetic construct
  source 1..22: mol_type = other RNA
actgggtgtgatggcgcatgcc

SEQ ID NO: 116584 - RNA, 22 nt, synthetic construct
  source 1..22: mol_type = other RNA
actgggtgtgcacgtttgcttt

SEQ ID NO: 116585 - RNA, 22 nt, synthetic construct
  source 1..22: mol_type = other RNA
actgggttctcaccaacatcca

SEQ ID NO: 116586 - RNA, 22 nt, synthetic construct
  source 1..22: mol_type = other RNA
actggtaaggaaacagagtttt

SEQ ID NO: 116587 - RNA, 22 nt, synthetic construct
  source 1..22: mol_type = other RNA
actggtaccaaagcagaaatac

SEQ ID NO: 116588 - RNA, 22 nt, synthetic construct
  source 1..22: mol_type = other RNA
actggtcactggccactgattg

SEQ ID NO: 116589 - RNA, 22 nt, synthetic construct
  source 1..22: mol_type = other RNA
actggtccagatgaagcaggga

SEQ ID NO: 116590 - RNA, 22 nt, synthetic construct
  source 1..22: mol_type = other RNA
actggtctcctttctatacttc

SEQ ID NO: 116591 - RNA, 22 nt, synthetic construct
  source 1..22: mol_type = other RNA
actggtgaactgggtgtagggg

SEQ ID NO: 116592 - RNA, 22 nt, synthetic construct
  source 1..22: mol_type = other RNA
actggtgcttttttggtgtttt

SEQ ID NO: 116593 - RNA, 22 nt, synthetic construct
  source 1..22: mol_type = other RNA
actggtgtccttctgagaaggc

SEQ ID NO: 116594 - RNA, 22 nt, synthetic construct
  source 1..22: mol_type = other RNA
actggtgttaggcaatccttcc

SEQ ID NO: 116595 - RNA, 22 nt, synthetic construct
  source 1..22: mol_type = other RNA
actggtttcagtacacgaaaat

SEQ ID NO: 116596 - RNA, 22 nt, synthetic construct
  source 1..22: mol_type = other RNA
actggtttcagtccctcctttc

SEQ ID NO: 116597 - RNA, 22 nt, synthetic construct
  source 1..22: mol_type = other RNA
actggtttctgcatacttagct

SEQ ID NO: 116598 - RNA, 22 nt, synthetic construct
  source 1..22: mol_type = other RNA
actggttttcctgatggacatt

SEQ ID NO: 116599 - RNA, 22 nt, synthetic construct
  source 1..22: mol_type = other RNA
actgtaaaaattttctcccaag

SEQ ID NO: 116600 - RNA, 22 nt, synthetic construct
  source 1..22: mol_type = other RNA
actgtaaacaatgctgctatga

SEQ ID NO: 116601 - RNA, 22 nt, synthetic construct
  source 1..22: mol_type = other RNA
actgtaaagtaatcaagtgaaa

SEQ ID NO: 116602 - RNA, 22 nt, synthetic construct
  source 1..22: mol_type = other RNA
actgtaaccctgtttcccttaa

SEQ ID NO: 116603 - RNA, 22 nt, synthetic construct
  source 1..22: mol_type = other RNA
actgtaacctccacctcccaga

SEQ ID NO: 116604 - RNA, 22 nt, synthetic construct
  source 1..22: mol_type = other RNA
actgtaagctgaactctgtgga

SEQ ID NO: 116605 - RNA, 22 nt, synthetic construct
  source 1..22: mol_type = other RNA
actgtaagttcctggactgtga

SEQ ID NO: 116606 - RNA, 22 nt, synthetic construct
  source 1..22: mol_type = other RNA
actgtaatattgtatataccct

SEQ ID NO: 116607 - RNA, 22 nt, synthetic construct
  source 1..22: mol_type = other RNA
actgtaatgagctgagattgcc

SEQ ID NO: 116608 - RNA, 22 nt, synthetic construct
  source 1..22: mol_type = other RNA
actgtacaaagatttaccccta

SEQ ID NO: 116609 - RNA, 22 nt, synthetic construct
  source 1..22: mol_type = other RNA
actgtactactgacctgggaga

SEQ ID NO: 116610 - RNA, 22 nt, synthetic construct
  source 1..22: mol_type = other RNA
actgtactcctagatactcggg

SEQ ID NO: 116611 - RNA, 22 nt, synthetic construct
  source 1..22: mol_type = other RNA
actgtactgtttagcatctagc

SEQ ID NO: 116612 - RNA, 22 nt, synthetic construct
  source 1..22: mol_type = other RNA
actgtagaatgtttttccgtct

SEQ ID NO: 116613 - RNA, 22 nt, synthetic construct
  source 1..22: mol_type = other RNA
actgtagagaaaatgttataca

SEQ ID NO: 116614 - RNA, 22 nt, synthetic construct
  source 1..22: mol_type = other RNA
actgtaggccccgatgccatgt

SEQ ID NO: 116615 - RNA, 22 nt, synthetic construct
  source 1..22: mol_type = other RNA
actgtagtccctgctacttgtg

SEQ ID NO: 116616 - RNA, 22 nt, synthetic construct
  source 1..22: mol_type = other RNA
actgtagttcagtttttctttc

SEQ ID NO: 116617 - RNA, 22 nt, synthetic construct
  source 1..22: mol_type = other RNA
actgtatggttcttaagatgat

SEQ ID NO: 116618 - RNA, 22 nt, synthetic construct
  source 1..22: mol_type = other RNA
actgtattaccagcttacagca

SEQ ID NO: 116619 - RNA, 22 nt, synthetic construct
  source 1..22: mol_type = other RNA
actgtattaggatgtgtacccg

SEQ ID NO: 116620 - RNA, 22 nt, synthetic construct
  source 1..22: mol_type = other RNA
actgtattgcaaactaagtggt

SEQ ID NO: 116621 - RNA, 22 nt, synthetic construct
  source 1..22: mol_type = other RNA
actgtcacaattcacagaatat

SEQ ID NO: 116622 - RNA, 22 nt, synthetic construct
  source 1..22: mol_type = other RNA
actgtcacaggctttcctacaa

SEQ ID NO: 116623 - RNA, 22 nt, synthetic construct
  source 1..22: mol_type = other RNA
actgtcactgacacaggctgaa

SEQ ID NO: 116624 - RNA, 22 nt, synthetic construct
  source 1..22: mol_type = other RNA
actgtcagtgggactggagaac

SEQ ID NO: 116625 - RNA, 22 nt, synthetic construct
  source 1..22: mol_type = other RNA
actgtcatcagcgtcctcactg

SEQ ID NO: 116626 - RNA, 22 nt, synthetic construct
  source 1..22: mol_type = other RNA
actgtccaaacagtgaccacag

SEQ ID NO: 116627 - RNA, 22 nt, synthetic construct
  source 1..22: mol_type = other RNA
actgtcctctcttgttgaggat

SEQ ID NO: 116628 - RNA, 22 nt, synthetic construct
  source 1..22: mol_type = other RNA
actgtcctgaattctaacatta

SEQ ID NO: 116629 - RNA, 22 nt, synthetic construct
  source 1..22: mol_type = other RNA
actgtcctgaattctaatgaac

SEQ ID NO: 116630 - RNA, 22 nt, synthetic construct
  source 1..22: mol_type = other RNA
actgtcgaagcttaatttagat

SEQ ID NO: 116631 - RNA, 22 nt, synthetic construct
  source 1..22: mol_type = other RNA
actgtctcagtcccaaatggga

SEQ ID NO: 116632 - RNA, 22 nt, synthetic construct
  source 1..22: mol_type = other RNA
actgtctccatgtcctcacctc

SEQ ID NO: 116633 - RNA, 22 nt, synthetic construct
  source 1..22: mol_type = other RNA
actgtctgtgaaaataatacct

SEQ ID NO: 116634 - RNA, 22 nt, synthetic construct
  source 1..22: mol_type = other RNA
actgtgaattcactaatgcctc

SEQ ID NO: 116635 - RNA, 22 nt, synthetic construct
  source 1..22: mol_type = other RNA
actgtgactccaaagcaaacca

SEQ ID NO: 116636 - RNA, 22 nt, synthetic construct
  source 1..22: mol_type = other RNA
actgtgagccactaaaacagga

SEQ ID NO: 116637 - RNA, 22 nt, synthetic construct
  source 1..22: mol_type = other RNA
actgtgagggagatatttcgcc

SEQ ID NO: 116638 - RNA, 22 nt, synthetic construct
  source 1..22: mol_type = other RNA
actgtgagggtaagaaaggagt

SEQ ID NO: 116639 - RNA, 22 nt, synthetic construct
  source 1..22: mol_type = other RNA
actgtgatacctagtacgtaac

SEQ ID NO: 116640 - RNA, 22 nt, synthetic construct
  source 1..22: mol_type = other RNA
actgtgatgactgtaagctgaa

SEQ ID NO: 116641 - RNA, 22 nt, synthetic construct
  source 1..22: mol_type = other RNA
actgtgatgattttagaaggta

SEQ ID NO: 116642 - RNA, 22 nt, synthetic construct
  source 1..22: mol_type = other RNA
actgtgattacaattcctttct

SEQ ID NO: 116643 - RNA, 22 nt, synthetic construct
  source 1..22: mol_type = other RNA
actgtgcagtggatgactaggc

SEQ ID NO: 116644 - RNA, 22 nt, synthetic construct
  source 1..22: mol_type = other RNA
actgtgccttgatccattacat

SEQ ID NO: 116645 - RNA, 22 nt, synthetic construct
  source 1..22: mol_type = other RNA
actgtgcttccacagctatcag

SEQ ID NO: 116646 - RNA, 22 nt, synthetic construct
  source 1..22: mol_type = other RNA
actgtggtcactgtttggacag

SEQ ID NO: 116647 - RNA, 22 nt, synthetic construct
  source 1..22: mol_type = other RNA
actgtgtgcttggagtcacttg

SEQ ID NO: 116648 - RNA, 22 nt, synthetic construct
  source 1..22: mol_type = other RNA
actgtgtggcttctcaaactgt

SEQ ID NO: 116649 - RNA, 22 nt, synthetic construct
  source 1..22: mol_type = other RNA
actgtgtgtgtccaggccaaca

SEQ ID NO: 116650 - RNA, 22 nt, synthetic construct
  source 1..22: mol_type = other RNA
actgtgttacattgccttcgca

SEQ ID NO: 116651 - RNA, 22 nt, synthetic construct
  source 1..22: mol_type = other RNA
actgtgttcttttccttcttaa

SEQ ID NO: 116652 - RNA, 22 nt, synthetic construct
  source 1..22: mol_type = other RNA
actgttaactgacttacagacc

SEQ ID NO: 116653 - RNA, 22 nt, synthetic construct
  source 1..22: mol_type = other RNA
actgttacttgactattttacc

SEQ ID NO: 116654 - RNA, 22 nt, synthetic construct
  source 1..22: mol_type = other RNA
actgttagggacttatggagat

SEQ ID NO: 116655 - RNA, 22 nt, synthetic construct
  source 1..22: mol_type = other RNA
actgttatctgggaacagcccc

SEQ ID NO: 116656 - RNA, 22 nt, synthetic construct
  source 1..22: mol_type = other RNA
actgttatgacaagactaccta

SEQ ID NO: 116657 - RNA, 22 nt, synthetic construct
  source 1..22: mol_type = other RNA
actgttccccaagccaaattaa

SEQ ID NO: 116658 - RNA, 22 nt, synthetic construct
  source 1..22: mol_type = other RNA
actgttctccagtcccactgac

SEQ ID NO: 116659 - RNA, 22 nt, synthetic construct
  source 1..22: mol_type = other RNA
actgttgatttagaaatacctg

SEQ ID NO: 116660 - RNA, 22 nt, synthetic construct
  source 1..22: mol_type = other RNA
actgttgcctctgtgctagcct

SEQ ID NO: 116661 - RNA, 22 nt, synthetic construct
  source 1..22: mol_type = other RNA
actgttggaaaaatcgtcctct

SEQ ID NO: 116662 - RNA, 22 nt, synthetic construct
  source 1..22: mol_type = other RNA
actgttgtccaggccagagtgc

SEQ ID NO: 116663 - RNA, 22 nt, synthetic construct
  source 1..22: mol_type = other RNA
actgtttagcatctagcacaga

SEQ ID NO: 116664 - RNA, 22 nt, synthetic construct
  source 1..22: mol_type = other RNA
actgtttcttagctatattcac

SEQ ID NO: 116665 - RNA, 22 nt, synthetic construct
  source 1..22: mol_type = other RNA
actgtttgattactgtagcttc

SEQ ID NO: 116666 - RNA, 22 nt, synthetic construct
  source 1..22: mol_type = other RNA
actgtttggctgggagcttatc

SEQ ID NO: 116667 - RNA, 22 nt, synthetic construct
  source 1..22: mol_type = other RNA
actgttttccacagtgacttta

SEQ ID NO: 116668 - RNA, 22 nt, synthetic construct
  source 1..22: mol_type = other RNA
actgttttttcctcccttcagc

SEQ ID NO: 116669 - RNA, 22 nt, synthetic construct
  source 1..22: mol_type = other RNA
acttaaaaaatgcgcgtccgcg

SEQ ID NO: 116670 - RNA, 22 nt, synthetic construct
  source 1..22: mol_type = other RNA
acttaaaggtttggagtttgta

SEQ ID NO: 116671 - RNA, 22 nt, synthetic construct
  source 1..22: mol_type = other RNA
acttaactataggagttcattc

SEQ ID NO: 116672 - RNA, 22 nt, synthetic construct
  source 1..22: mol_type = other RNA
acttaagagcatgttgggccaa

SEQ ID NO: 116673 - RNA, 22 nt, synthetic construct
  source 1..22: mol_type = other RNA
acttaagtatctcagtcataat

SEQ ID NO: 116674 - RNA, 22 nt, synthetic construct
  source 1..22: mol_type = other RNA
acttaagtatctcggtcattct

SEQ ID NO: 116675 - RNA, 22 nt, synthetic construct
  source 1..22: mol_type = other RNA
acttaatagcccaacagggttt

SEQ ID NO: 116676 - RNA, 22 nt, synthetic construct
  source 1..22: mol_type = other RNA
acttaatttacccacaaaagaa

SEQ ID NO: 116677 - RNA, 22 nt, synthetic construct
  source 1..22: mol_type = other RNA
acttacagaccttattcaaata

SEQ ID NO: 116678 - RNA, 22 nt, synthetic construct
  source 1..22: mol_type = other RNA
acttacagatatcacccagacc

SEQ ID NO: 116679 - RNA, 22 nt, synthetic construct
  source 1..22: mol_type = other RNA
acttacagtaagatcctggatt

SEQ ID NO: 116680 - RNA, 22 nt, synthetic construct
  source 1..22: mol_type = other RNA
acttacatcagcagtgaccata

SEQ ID NO: 116681 - RNA, 22 nt, synthetic construct
  source 1..22: mol_type = other RNA
acttactaaatgatctttcaag

SEQ ID NO: 116682 - RNA, 22 nt, synthetic construct
  source 1..22: mol_type = other RNA
acttactagttgtgctacctca

SEQ ID NO: 116683 - RNA, 22 nt, synthetic construct
  source 1..22: mol_type = other RNA
acttactctcaaataatttggc

SEQ ID NO: 116684 - RNA, 22 nt, synthetic construct
  source 1..22: mol_type = other RNA
acttacttgagccccagaatag

SEQ ID NO: 116685 - RNA, 22 nt, synthetic construct
  source 1..22: mol_type = other RNA
acttagaatataaactcttcct

SEQ ID NO: 116686 - RNA, 22 nt, synthetic construct
  source 1..22: mol_type = other RNA
acttagagggcttcatgctggg

SEQ ID NO: 116687 - RNA, 22 nt, synthetic construct
  source 1..22: mol_type = other RNA
acttagcatgttgctttgcgaa

SEQ ID NO: 116688 - RNA, 22 nt, synthetic construct
  source 1..22: mol_type = other RNA
acttagcccctgctgccagatg

SEQ ID NO: 116689 - RNA, 22 nt, synthetic construct
  source 1..22: mol_type = other RNA
acttagccttggtaaaatcact

SEQ ID NO: 116690 - RNA, 22 nt, synthetic construct
  source 1..22: mol_type = other RNA
acttagcgctgatgtgttgacc

SEQ ID NO: 116691 - RNA, 22 nt, synthetic construct
  source 1..22: mol_type = other RNA
acttagctaatttcagagagac

SEQ ID NO: 116692 - RNA, 22 nt, synthetic construct
  source 1..22: mol_type = other RNA
acttaggagaaaagcttcataa

SEQ ID NO: 116693 - RNA, 22 nt, synthetic construct
  source 1..22: mol_type = other RNA
acttaggaggctattaactttg

SEQ ID NO: 116694 - RNA, 22 nt, synthetic construct
  source 1..22: mol_type = other RNA
acttaggcaaaggaaaaatcta

SEQ ID NO: 116695 - RNA, 22 nt, synthetic construct
  source 1..22: mol_type = other RNA
acttaggcagttattaagagtg

SEQ ID NO: 116696 - RNA, 22 nt, synthetic construct
  source 1..22: mol_type = other RNA
acttagtgagggaggccatctt

SEQ ID NO: 116697 - RNA, 22 nt, synthetic construct
  source 1..22: mol_type = other RNA
acttagttcaagatgcatacca

SEQ ID NO: 116698 - RNA, 22 nt, synthetic construct
  source 1..22: mol_type = other RNA
acttagtttgcaatacagttaa

SEQ ID NO: 116699 - RNA, 22 nt, synthetic construct
  source 1..22: mol_type = other RNA
acttatataaatgctcagtggg

SEQ ID NO: 116700 - RNA, 22 nt, synthetic construct
  source 1..22: mol_type = other RNA
acttatgcaagatggcaagttt

SEQ ID NO: 116701 - RNA, 22 nt, synthetic construct
  source 1..22: mol_type = other RNA
acttatgcatcttgcaaaacgg

SEQ ID NO: 116702 - RNA, 22 nt, synthetic construct
  source 1..22: mol_type = other RNA
acttatggagataaattaccca

SEQ ID NO: 116703 - RNA, 22 nt, synthetic construct
  source 1..22: mol_type = other RNA
acttattagcaaagaggcaaaa

SEQ ID NO: 116704 - RNA, 22 nt, synthetic construct
  source 1..22: mol_type = other RNA
acttattggaaaactctgtttc

SEQ ID NO: 116705 - RNA, 22 nt, synthetic construct
  source 1..22: mol_type = other RNA
acttatttccagggggtatgga

SEQ ID NO: 116706 - RNA, 22 nt, synthetic construct
  source 1..22: mol_type = other RNA
acttcaaagggtcactattaac

SEQ ID NO: 116707 - RNA, 22 nt, synthetic construct
  source 1..22: mol_type = other RNA
acttcaacggacatttttccaa

SEQ ID NO: 116708 - RNA, 22 nt, synthetic construct
  source 1..22: mol_type = other RNA
acttcaagaggttaaaaccaca

SEQ ID NO: 116709 - RNA, 22 nt, synthetic construct
  source 1..22: mol_type = other RNA
acttcaaggtaatctagtttat

SEQ ID NO: 116710 - RNA, 22 nt, synthetic construct
  source 1..22: mol_type = other RNA
acttcaaggttcacaaattaga

SEQ ID NO: 116711 - RNA, 22 nt, synthetic construct
  source 1..22: mol_type = other RNA
acttcaatgctacagtaagcaa

SEQ ID NO: 116712 - RNA, 22 nt, synthetic construct
  source 1..22: mol_type = other RNA
acttcacaccatttagatcatc

SEQ ID NO: 116713 - RNA, 22 nt, synthetic construct
  source 1..22: mol_type = other RNA
acttcacctctacacaaaaatc

SEQ ID NO: 116714 - RNA, 22 nt, synthetic construct
  source 1..22: mol_type = other RNA
acttcacgatgcttaggtaaga

SEQ ID NO: 116715 - RNA, 22 nt, synthetic construct
  source 1..22: mol_type = other RNA
acttcactagatctcttttcct

SEQ ID NO: 116716 - RNA, 22 nt, synthetic construct
  source 1..22: mol_type = other RNA
acttcactagtgggtcgggtgt

SEQ ID NO: 116717 - RNA, 22 nt, synthetic construct
  source 1..22: mol_type = other RNA
acttcactggagaattctacta

SEQ ID NO: 116718 - RNA, 22 nt, synthetic construct
  source 1..22: mol_type = other RNA
acttcacttccaagtcccggaa

SEQ ID NO: 116719 - RNA, 22 nt, synthetic construct
  source 1..22: mol_type = other RNA
acttcagcgcttgaacaaatat

SEQ ID NO: 116720 - RNA, 22 nt, synthetic construct
  source 1..22: mol_type = other RNA
acttcaggaacaccttgaacat

SEQ ID NO: 116721 - RNA, 22 nt, synthetic construct
  source 1..22: mol_type = other RNA
acttcagtccttaccactgaag

SEQ ID NO: 116722 - RNA, 22 nt, synthetic construct
  source 1..22: mol_type = other RNA
acttcagtggtaaggactgaag

SEQ ID NO: 116723 - RNA, 22 nt, synthetic construct
  source 1..22: mol_type = other RNA
acttcagttttgagtggcatca

SEQ ID NO: 116724 - RNA, 22 nt, synthetic construct
  source 1..22: mol_type = other RNA
acttcatagatgttatgccccc

SEQ ID NO: 116725 - RNA, 22 nt, synthetic construct
  source 1..22: mol_type = other RNA
acttcatctttcctgatcacac

SEQ ID NO: 116726 - RNA, 22 nt, synthetic construct
  source 1..22: mol_type = other RNA
acttcatgtacaatgaattagc

SEQ ID NO: 116727 - RNA, 22 nt, synthetic construct
  source 1..22: mol_type = other RNA
acttcattcttgacatgattga

SEQ ID NO: 116728 - RNA, 22 nt, synthetic construct
  source 1..22: mol_type = other RNA
acttccaaccatcttcttagtg

SEQ ID NO: 116729 - RNA, 22 nt, synthetic construct
  source 1..22: mol_type = other RNA
acttccaagtcccggaagctgg

SEQ ID NO: 116730 - RNA, 22 nt, synthetic construct
  source 1..22: mol_type = other RNA
acttccagaaacttccaaccat

SEQ ID NO: 116731 - RNA, 22 nt, synthetic construct
  source 1..22: mol_type = other RNA
acttccagcaagactttatgtg

SEQ ID NO: 116732 - RNA, 22 nt, synthetic construct
  source 1..22: mol_type = other RNA
acttccagctcacgttaccctc

SEQ ID NO: 116733 - RNA, 22 nt, synthetic construct
  source 1..22: mol_type = other RNA
acttccagtacatctcaattca

SEQ ID NO: 116734 - RNA, 22 nt, synthetic construct
  source 1..22: mol_type = other RNA
acttccagtgttttagggggga

SEQ ID NO: 116735 - RNA, 22 nt, synthetic construct
  source 1..22: mol_type = other RNA
acttccatgagattacatagca

SEQ ID NO: 116736 - RNA, 22 nt, synthetic construct
  source 1..22: mol_type = other RNA
acttcccactgctatgactaat

SEQ ID NO: 116737 - RNA, 22 nt, synthetic construct
  source 1..22: mol_type = other RNA
acttcccagacagggaatgccc

SEQ ID NO: 116738 - RNA, 22 nt, synthetic construct
  source 1..22: mol_type = other RNA
acttccctctcagtggtgcttt

SEQ ID NO: 116739 - RNA, 22 nt, synthetic construct
  source 1..22: mol_type = other RNA
acttccctctttctcaacttcc

SEQ ID NO: 116740 - RNA, 22 nt, synthetic construct
  source 1..22: mol_type = other RNA
acttcccttagctctcatgtca

SEQ ID NO: 116741 - RNA, 22 nt, synthetic construct
  source 1..22: mol_type = other RNA
acttcccttctcgaagtggtgc

SEQ ID NO: 116742 - RNA, 22 nt, synthetic construct
  source 1..22: mol_type = other RNA
acttcctattagaagaatgatt

SEQ ID NO: 116743 - RNA, 22 nt, synthetic construct
  source 1..22: mol_type = other RNA
acttcctattttataatgggca

SEQ ID NO: 116744 - RNA, 22 nt, synthetic construct
  source 1..22: mol_type = other RNA
acttcctctcttaaatccgaga

SEQ ID NO: 116745 - RNA, 22 nt, synthetic construct
  source 1..22: mol_type = other RNA
acttcctggctctagcccagct

SEQ ID NO: 116746 - RNA, 22 nt, synthetic construct
  source 1..22: mol_type = other RNA
acttcctgttttagtggctcac

SEQ ID NO: 116747 - RNA, 22 nt, synthetic construct
  source 1..22: mol_type = other RNA
acttcgaaagttcagatagaat

SEQ ID NO: 116748 - RNA, 22 nt, synthetic construct
  source 1..22: mol_type = other RNA
acttcgaactaaggaaagctca

SEQ ID NO: 116749 - RNA, 22 nt, synthetic construct
  source 1..22: mol_type = other RNA
acttcgagaagggaagtaaaga

SEQ ID NO: 116750 - RNA, 22 nt, synthetic construct
  source 1..22: mol_type = other RNA
acttcgtcaaggggagaggcct

SEQ ID NO: 116751 - RNA, 22 nt, synthetic construct
  source 1..22: mol_type = other RNA
acttcgtgtgtggagtggggca

SEQ ID NO: 116752 - RNA, 22 nt, synthetic construct
  source 1..22: mol_type = other RNA
acttcgttcagtttagtaaatc

SEQ ID NO: 116753 - RNA, 22 nt, synthetic construct
  source 1..22: mol_type = other RNA
acttctaatgcccattaaaacc

SEQ ID NO: 116754 - RNA, 22 nt, synthetic construct
  source 1..22: mol_type = other RNA
acttctacagaatgttcaagta

SEQ ID NO: 116755 - RNA, 22 nt, synthetic construct
  source 1..22: mol_type = other RNA
acttctaccttgaaaatgccct

SEQ ID NO: 116756 - RNA, 22 nt, synthetic construct
  source 1..22: mol_type = other RNA
acttctagcctccagaaaacca

SEQ ID NO: 116757 - RNA, 22 nt, synthetic construct
  source 1..22: mol_type = other RNA
acttctatccagtgacacctga

SEQ ID NO: 116758 - RNA, 22 nt, synthetic construct
  source 1..22: mol_type = other RNA
acttctcaaacaggatacaaaa

SEQ ID NO: 116759 - RNA, 22 nt, synthetic construct
  source 1..22: mol_type = other RNA
acttctcagctatagcttctga

SEQ ID NO: 116760 - RNA, 22 nt, synthetic construct
  source 1..22: mol_type = other RNA
acttctcagggcctgcttttgg

SEQ ID NO: 116761 - RNA, 22 nt, synthetic construct
  source 1..22: mol_type = other RNA
acttctctcagagggaaactgt

SEQ ID NO: 116762 - RNA, 22 nt, synthetic construct
  source 1..22: mol_type = other RNA
acttctctgctgctgaaaaaga

SEQ ID NO: 116763 - RNA, 22 nt, synthetic construct
  source 1..22: mol_type = other RNA
acttctctggagcaagcatgag

SEQ ID NO: 116764 - RNA, 22 nt, synthetic construct
  source 1..22: mol_type = other RNA
acttctgagtgttacttgaaat

SEQ ID NO: 116765 - RNA, 22 nt, synthetic construct
  source 1..22: mol_type = other RNA
acttctgatatcctgtaaacct

SEQ ID NO: 116766 - RNA, 22 nt, synthetic construct
  source 1..22: mol_type = other RNA
acttctggaaagttcaaatgag

SEQ ID NO: 116767 - RNA, 22 nt, synthetic construct
  source 1..22: mol_type = other RNA
acttctggatgtgtatgatcaa

SEQ ID NO: 116768 - RNA, 22 nt, synthetic construct
  source 1..22: mol_type = other RNA
acttctgtgatcagaagagcac

SEQ ID NO: 116769 - RNA, 22 nt, synthetic construct
  source 1..22: mol_type = other RNA
acttcttagtaaatatccgaaa

SEQ ID NO: 116770 - RNA, 22 nt, synthetic construct
  source 1..22: mol_type = other RNA
acttcttattggttatctgtac

SEQ ID NO: 116771 - RNA, 22 nt, synthetic construct
  source 1..22: mol_type = other RNA
acttcttcaaaagacatcacta

SEQ ID NO: 116772 - RNA, 22 nt, synthetic construct
  source 1..22: mol_type = other RNA
acttcttctgttggagagatgg

SEQ ID NO: 116773 - RNA, 22 nt, synthetic construct
  source 1..22: mol_type = other RNA
acttctttctctttcagccatc

SEQ ID NO: 116774 - RNA, 22 nt, synthetic construct
  source 1..22: mol_type = other RNA
acttgaaacctgccatggtgtt

SEQ ID NO: 116775 - RNA, 22 nt, synthetic construct
  source 1..22: mol_type = other RNA
acttgaaatcatttcactcttt

SEQ ID NO: 116776 - RNA, 22 nt, synthetic construct
  source 1..22: mol_type = other RNA
acttgaacattctgtagaagta

SEQ ID NO: 116777 - RNA, 22 nt, synthetic construct
  source 1..22: mol_type = other RNA
acttgaaccttcctcttcctca

SEQ ID NO: 116778 - RNA, 22 nt, synthetic construct
  source 1..22: mol_type = other RNA
acttgaaggcaatgtagggaat

SEQ ID NO: 116779 - RNA, 22 nt, synthetic construct
  source 1..22: mol_type = other RNA
acttgaatactcgtgtgtctca

SEQ ID NO: 116780 - RNA, 22 nt, synthetic construct
  source 1..22: mol_type = other RNA
acttgaattagtgattttacca

SEQ ID NO: 116781 - RNA, 22 nt, synthetic construct
  source 1..22: mol_type = other RNA
acttgaattcagatggccccaa

SEQ ID NO: 116782 - RNA, 22 nt, synthetic construct
  source 1..22: mol_type = other RNA
acttgacacaaaggactggaac

SEQ ID NO: 116783 - RNA, 22 nt, synthetic construct
  source 1..22: mol_type = other RNA
acttgactattttaccctcatt

SEQ ID NO: 116784 - RNA, 22 nt, synthetic construct
  source 1..22: mol_type = other RNA
acttgagagcagagacacacat

SEQ ID NO: 116785 - RNA, 22 nt, synthetic construct
  source 1..22: mol_type = other RNA
acttgagcagatcagtaacaaa

SEQ ID NO: 116786 - RNA, 22 nt, synthetic construct
  source 1..22: mol_type = other RNA
acttgagccccagaataggcaa

SEQ ID NO: 116787 - RNA, 22 nt, synthetic construct
  source 1..22: mol_type = other RNA
acttgagcctggaagttcaagg

SEQ ID NO: 116788 - RNA, 22 nt, synthetic construct
  source 1..22: mol_type = other RNA
acttgaggtgattaaaggccct

SEQ ID NO: 116789 - RNA, 22 nt, synthetic construct
  source 1..22: mol_type = other RNA
acttgaggtttacttggggaga

SEQ ID NO: 116790 - RNA, 22 nt, synthetic construct
  source 1..22: mol_type = other RNA
acttgagtttgttctgtcacat

SEQ ID NO: 116791 - RNA, 22 nt, synthetic construct
  source 1..22: mol_type = other RNA
acttgatcagggatttggccag

SEQ ID NO: 116792 - RNA, 22 nt, synthetic construct
  source 1..22: mol_type = other RNA
acttgatccaggtgtatgatct

SEQ ID NO: 116793 - RNA, 22 nt, synthetic construct
  source 1..22: mol_type = other RNA
acttgatctaaaatggaagact

SEQ ID NO: 116794 - RNA, 22 nt, synthetic construct
  source 1..22: mol_type = other RNA
acttgatctacatttagatttc

SEQ ID NO: 116795 - RNA, 22 nt, synthetic construct
  source 1..22: mol_type = other RNA
acttgatggtttggggcttttg

SEQ ID NO: 116796 - RNA, 22 nt, synthetic construct
  source 1..22: mol_type = other RNA
acttgattacaagggtgacaga

SEQ ID NO: 116797 - RNA, 22 nt, synthetic construct
  source 1..22: mol_type = other RNA
acttgattactttacagttatg

SEQ ID NO: 116798 - RNA, 22 nt, synthetic construct
  source 1..22: mol_type = other RNA
acttgcagaagagtgaagctgg

SEQ ID NO: 116799 - RNA, 22 nt, synthetic construct
  source 1..22: mol_type = other RNA
acttgccatcttgcataagttt

SEQ ID NO: 116800 - RNA, 22 nt, synthetic construct
  source 1..22: mol_type = other RNA
acttgctctcttgcccaagctg

SEQ ID NO: 116801 - RNA, 22 nt, synthetic construct
  source 1..22: mol_type = other RNA
acttgcttaggctgaagcaggc

SEQ ID NO: 116802 - RNA, 22 nt, synthetic construct
  source 1..22: mol_type = other RNA
acttgcttgggaacagcagggg

SEQ ID NO: 116803 - RNA, 22 nt, synthetic construct
  source 1..22: mol_type = other RNA
acttgcttggtttcacacgcat

SEQ ID NO: 116804 - RNA, 22 nt, synthetic construct
  source 1..22: mol_type = other RNA
acttgctttattacttcagttt

SEQ ID NO: 116805 - RNA, 22 nt, synthetic construct
  source 1..22: mol_type = other RNA
acttgctttgaatttggaaagg

SEQ ID NO: 116806 - RNA, 22 nt, synthetic construct
  source 1..22: mol_type = other RNA
acttggaagtgaagtcaagatg

SEQ ID NO: 116807 - RNA, 22 nt, synthetic construct
  source 1..22: mol_type = other RNA
acttggacaggggacatgaagg

SEQ ID NO: 116808 - RNA, 22 nt, synthetic construct
  source 1..22: mol_type = other RNA
acttggagaacttaaaggtttg

SEQ ID NO: 116809 - RNA, 22 nt, synthetic construct
  source 1..22: mol_type = other RNA
acttggagttttccccctacac

SEQ ID NO: 116810 - RNA, 22 nt, synthetic construct
  source 1..22: mol_type = other RNA
acttggatcttatctgctgtcg

SEQ ID NO: 116811 - RNA, 22 nt, synthetic construct
  source 1..22: mol_type = other RNA
acttggattgtgtgtcgagaaa

SEQ ID NO: 116812 - RNA, 22 nt, synthetic construct
  source 1..22: mol_type = other RNA
acttggcacaggagagcgacag

SEQ ID NO: 116813 - RNA, 22 nt, synthetic construct
  source 1..22: mol_type = other RNA
acttggctcctcccggctaaga

SEQ ID NO: 116814 - RNA, 22 nt, synthetic construct
  source 1..22: mol_type = other RNA
acttgggaggctgagacactag

SEQ ID NO: 116815 - RNA, 22 nt, synthetic construct
  source 1..22: mol_type = other RNA
acttgggatgtttctacctttg

SEQ ID NO: 116816 - RNA, 22 nt, synthetic construct
  source 1..22: mol_type = other RNA
acttggggagagtgggcccagc

SEQ ID NO: 116817 - RNA, 22 nt, synthetic construct
  source 1..22: mol_type = other RNA
acttggggaggccaaggcagga

SEQ ID NO: 116818 - RNA, 22 nt, synthetic construct
  source 1..22: mol_type = other RNA
acttgggtataaatgatgagct

SEQ ID NO: 116819 - RNA, 22 nt, synthetic construct
  source 1..22: mol_type = other RNA
acttgggtggaagctgtccttc

SEQ ID NO: 116820 - RNA, 22 nt, synthetic construct
  source 1..22: mol_type = other RNA
acttggtaaaaagtgcttctag

SEQ ID NO: 116821 - RNA, 22 nt, synthetic construct
  source 1..22: mol_type = other RNA
acttggtaagctgtgagtcctt

SEQ ID NO: 116822 - RNA, 22 nt, synthetic construct
  source 1..22: mol_type = other RNA
acttggtcgaaaacctgaaatg

SEQ ID NO: 116823 - RNA, 22 nt, synthetic construct
  source 1..22: mol_type = other RNA
acttggtctgggtgatatctgt

SEQ ID NO: 116824 - RNA, 22 nt, synthetic construct
  source 1..22: mol_type = other RNA
acttggtttattttctgcattt

SEQ ID NO: 116825 - RNA, 22 nt, synthetic construct
  source 1..22: mol_type = other RNA
acttgtagaggaggagggttag

SEQ ID NO: 116826 - RNA, 22 nt, synthetic construct
  source 1..22: mol_type = other RNA
acttgtatgaaattagttcctt

SEQ ID NO: 116827 - RNA, 22 nt, synthetic construct
  source 1..22: mol_type = other RNA
acttgtcaagttctgatttcaa

SEQ ID NO: 116828 - RNA, 22 nt, synthetic construct
  source 1..22: mol_type = other RNA
acttgtcacaaaatgtggatgc

SEQ ID NO: 116829 - RNA, 22 nt, synthetic construct
  source 1..22: mol_type = other RNA
acttgtcaggtgggcactggga

SEQ ID NO: 116830 - RNA, 22 nt, synthetic construct
  source 1..22: mol_type = other RNA
acttgtcatttctgcttagtct

SEQ ID NO: 116831 - RNA, 22 nt, synthetic construct
  source 1..22: mol_type = other RNA
acttgtcccatggtcaaatcaa

SEQ ID NO: 116832 - RNA, 22 nt, synthetic construct
  source 1..22: mol_type = other RNA
acttgtctcggatttaagagag

SEQ ID NO: 116833 - RNA, 22 nt, synthetic construct
  source 1..22: mol_type = other RNA
acttgtctttgtctattcccta

SEQ ID NO: 116834 - RNA, 22 nt, synthetic construct
  source 1..22: mol_type = other RNA
acttgtctttttgtgacttgtt

SEQ ID NO: 116835 - RNA, 22 nt, synthetic construct
  source 1..22: mol_type = other RNA
acttgtgtaactaccactgagg

SEQ ID NO: 116836 - RNA, 22 nt, synthetic construct
  source 1..22: mol_type = other RNA
acttgtgtagcgggaaaaaata

SEQ ID NO: 116837 - RNA, 22 nt, synthetic construct
  source 1..22: mol_type = other RNA
acttgttcatgtttacagaaat

SEQ ID NO: 116838 - RNA, 22 nt, synthetic construct
  source 1..22: mol_type = other RNA
acttgtttcttttcactctaat

SEQ ID NO: 116839 - RNA, 22 nt, synthetic construct
  source 1..22: mol_type = other RNA
actttaaagctctatggcattt

SEQ ID NO: 116840 - RNA, 22 nt, synthetic construct
  source 1..22: mol_type = other RNA
actttaaatcagggcctttaat

SEQ ID NO: 116841 - RNA, 22 nt, synthetic construct
  source 1..22: mol_type = other RNA
actttaaattttgagacctcag

SEQ ID NO: 116842 - RNA, 22 nt, synthetic construct
  source 1..22: mol_type = other RNA
actttaagagtatctttttcag

SEQ ID NO: 116843 - RNA, 22 nt, synthetic construct
  source 1..22: mol_type = other RNA
actttaatcaccaggcgcggtg

SEQ ID NO: 116844 - RNA, 22 nt, synthetic construct
  source 1..22: mol_type = other RNA
actttacagttatgtcagtcaa

SEQ ID NO: 116845 - RNA, 22 nt, synthetic construct
  source 1..22: mol_type = other RNA
actttaccctgctggaacgaat

SEQ ID NO: 116846 - RNA, 22 nt, synthetic construct
  source 1..22: mol_type = other RNA
actttactgttctccagtccca

SEQ ID NO: 116847 - RNA, 22 nt, synthetic construct
  source 1..22: mol_type = other RNA
actttagaacatataatccaac

SEQ ID NO: 116848 - RNA, 22 nt, synthetic construct
  source 1..22: mol_type = other RNA
actttagacatgggctaaataa

SEQ ID NO: 116849 - RNA, 22 nt, synthetic construct
  source 1..22: mol_type = other RNA
actttagagtcagttgtttact

SEQ ID NO: 116850 - RNA, 22 nt, synthetic construct
  source 1..22: mol_type = other RNA
actttaggctgttcaatttaga

SEQ ID NO: 116851 - RNA, 22 nt, synthetic construct
  source 1..22: mol_type = other RNA
actttaggtcagaatacaaaaa

SEQ ID NO: 116852 - RNA, 22 nt, synthetic construct
  source 1..22: mol_type = other RNA
actttaggttacgtactaggta

SEQ ID NO: 116853 - RNA, 22 nt, synthetic construct
  source 1..22: mol_type = other RNA
actttatacctgttgaatagca

SEQ ID NO: 116854 - RNA, 22 nt, synthetic construct
  source 1..22: mol_type = other RNA
actttatggtaattggttcgtt

SEQ ID NO: 116855 - RNA, 22 nt, synthetic construct
  source 1..22: mol_type = other RNA
actttatggtatcactttttgt

SEQ ID NO: 116856 - RNA, 22 nt, synthetic construct
  source 1..22: mol_type = other RNA
actttatgtggaaaaatatagg

SEQ ID NO: 116857 - RNA, 22 nt, synthetic construct
  source 1..22: mol_type = other RNA
actttcaacctaacatgtcttg

SEQ ID NO: 116858 - RNA, 22 nt, synthetic construct
  source 1..22: mol_type = other RNA
actttcacactgattttctgct

SEQ ID NO: 116859 - RNA, 22 nt, synthetic construct
  source 1..22: mol_type = other RNA
actttcacataaggtatatttc

SEQ ID NO: 116860 - RNA, 22 nt, synthetic construct
  source 1..22: mol_type = other RNA
actttcactgctcagtccctca

SEQ ID NO: 116861 - RNA, 22 nt, synthetic construct
  source 1..22: mol_type = other RNA
actttcagctcaaacagcttga

SEQ ID NO: 116862 - RNA, 22 nt, synthetic construct
  source 1..22: mol_type = other RNA
actttcatgatttggtgtgtgc

SEQ ID NO: 116863 - RNA, 22 nt, synthetic construct
  source 1..22: mol_type = other RNA
actttcatttgtaattcatcct

SEQ ID NO: 116864 - RNA, 22 nt, synthetic construct
  source 1..22: mol_type = other RNA
actttccagaagtaactcttga

SEQ ID NO: 116865 - RNA, 22 nt, synthetic construct
  source 1..22: mol_type = other RNA
actttccatcttaggccataaa

SEQ ID NO: 116866 - RNA, 22 nt, synthetic construct
  source 1..22: mol_type = other RNA
actttcccatctctagttttcc

SEQ ID NO: 116867 - RNA, 22 nt, synthetic construct
  source 1..22: mol_type = other RNA
actttcctattcacactgctcc

SEQ ID NO: 116868 - RNA, 22 nt, synthetic construct
  source 1..22: mol_type = other RNA
actttcctgataaggggctatc

SEQ ID NO: 116869 - RNA, 22 nt, synthetic construct
  source 1..22: mol_type = other RNA
actttccttggagaagagttct

SEQ ID NO: 116870 - RNA, 22 nt, synthetic construct
  source 1..22: mol_type = other RNA
actttcgaagtgggaagcaaag

SEQ ID NO: 116871 - RNA, 22 nt, synthetic construct
  source 1..22: mol_type = other RNA
actttcgtcatctataaggtaa

SEQ ID NO: 116872 - RNA, 22 nt, synthetic construct
  source 1..22: mol_type = other RNA
actttctaatcctttgcacaca

SEQ ID NO: 116873 - RNA, 22 nt, synthetic construct
  source 1..22: mol_type = other RNA
actttctattcccctggatccc

SEQ ID NO: 116874 - RNA, 22 nt, synthetic construct
  source 1..22: mol_type = other RNA
actttctgcttaaagcctctca

SEQ ID NO: 116875 - RNA, 22 nt, synthetic construct
  source 1..22: mol_type = other RNA
actttcttcaaccatacttttc

SEQ ID NO: 116876 - RNA, 22 nt, synthetic construct
  source 1..22: mol_type = other RNA
actttgaaatcagaacttgaca

SEQ ID NO: 116877 - RNA, 22 nt, synthetic construct
  source 1..22: mol_type = other RNA
actttgaatttaagacacaagg

SEQ ID NO: 116878 - RNA, 22 nt, synthetic construct
  source 1..22: mol_type = other RNA
actttgagtagcaccctattta

SEQ ID NO: 116879 - RNA, 22 nt, synthetic construct
  source 1..22: mol_type = other RNA
actttgatcatacacatccaga

SEQ ID NO: 116880 - RNA, 22 nt, synthetic construct
  source 1..22: mol_type = other RNA
actttgatgaattccagtttat

SEQ ID NO: 116881 - RNA, 22 nt, synthetic construct
  source 1..22: mol_type = other RNA
actttgatgttttacattttcc

SEQ ID NO: 116882 - RNA, 22 nt, synthetic construct
  source 1..22: mol_type = other RNA
actttgcattcctgaaatgaac

SEQ ID NO: 116883 - RNA, 22 nt, synthetic construct
  source 1..22: mol_type = other RNA
actttgcgaaacacactcgtgt

SEQ ID NO: 116884 - RNA, 22 nt, synthetic construct
  source 1..22: mol_type = other RNA
actttggaaggtaggagggtgt

SEQ ID NO: 116885 - RNA, 22 nt, synthetic construct
  source 1..22: mol_type = other RNA
actttgggattagcttattctt

SEQ ID NO: 116886 - RNA, 22 nt, synthetic construct
  source 1..22: mol_type = other RNA
actttgtcaggcatgctaactg

SEQ ID NO: 116887 - RNA, 22 nt, synthetic construct
  source 1..22: mol_type = other RNA
actttgtggcctcttcccttgt

SEQ ID NO: 116888 - RNA, 22 nt, synthetic construct
  source 1..22: mol_type = other RNA
actttgttgctcaggctggagt

SEQ ID NO: 116889 - RNA, 22 nt, synthetic construct
  source 1..22: mol_type = other RNA
actttgttttgtttttctctcc

SEQ ID NO: 116890 - RNA, 22 nt, synthetic construct
  source 1..22: mol_type = other RNA
acttttaaagaaaggtctctct

SEQ ID NO: 116891 - RNA, 22 nt, synthetic construct
  source 1..22: mol_type = other RNA
acttttaacccacagataattt

SEQ ID NO: 116892 - RNA, 22 nt, synthetic construct
  source 1..22: mol_type = other RNA
acttttaaggcttggaaaacaa

SEQ ID NO: 116893 - RNA, 22 nt, synthetic construct
  source 1..22: mol_type = other RNA
acttttagtaggtctccttgta

SEQ ID NO: 116894 - RNA, 22 nt, synthetic construct
  source 1..22: mol_type = other RNA
acttttagtttacactatggct

SEQ ID NO: 116895 - RNA, 22 nt, synthetic construct
  source 1..22: mol_type = other RNA
acttttcaactgaacaacgctg

SEQ ID NO: 116896 - RNA, 22 nt, synthetic construct
  source 1..22: mol_type = other RNA
acttttcaggtattgagcctgt

SEQ ID NO: 116897 - RNA, 22 nt, synthetic construct
  source 1..22: mol_type = other RNA
acttttccagtcttctcataca

SEQ ID NO: 116898 - RNA, 22 nt, synthetic construct
  source 1..22: mol_type = other RNA
acttttctggttttctggaggc

SEQ ID NO: 116899 - RNA, 22 nt, synthetic construct
  source 1..22: mol_type = other RNA
acttttgagttcagaaagatta

SEQ ID NO: 116900 - RNA, 22 nt, synthetic construct
  source 1..22: mol_type = other RNA
acttttggaatttaaggggtaa

SEQ ID NO: 116901 - RNA, 22 nt, synthetic construct
  source 1..22: mol_type = other RNA
acttttggtacacatctttttt

SEQ ID NO: 116902 - RNA, 22 nt, synthetic construct
  source 1..22: mol_type = other RNA
acttttgtactacttgtcaggt

SEQ ID NO: 116903 - RNA, 22 nt, synthetic construct
  source 1..22: mol_type = other RNA
acttttgtgcaacataaatagg

SEQ ID NO: 116904 - RNA, 22 nt, synthetic construct
  source 1..22: mol_type = other RNA
actttttaccaagttgaatttc

SEQ ID NO: 116905 - RNA, 22 nt, synthetic construct
  source 1..22: mol_type = other RNA
actttttattctgttctagctc

SEQ ID NO: 116906 - RNA, 22 nt, synthetic construct
  source 1..22: mol_type = other RNA
actttttcatccaaacagaaac

SEQ ID NO: 116907 - RNA, 22 nt, synthetic construct
  source 1..22: mol_type = other RNA
actttttctttttagtaagagg

SEQ ID NO: 116908 - RNA, 22 nt, synthetic construct
  source 1..22: mol_type = other RNA
actttttgggcctttctgtttg

SEQ ID NO: 116909 - RNA, 22 nt, synthetic construct
  source 1..22: mol_type = other RNA
actttttgtcacacggaaaaca

SEQ ID NO: 116910 - RNA, 22 nt, synthetic construct
  source 1..22: mol_type = other RNA
actttttgtgagttttaactct

SEQ ID NO: 116911 - RNA, 22 nt, synthetic construct
  source 1..22: mol_type = other RNA
acttttttgcccactcttatat

SEQ ID NO: 116912 - RNA, 22 nt, synthetic construct
  source 1..22: mol_type = other RNA
acttttttgtagagacagaatc

SEQ ID NO: 116913 - RNA, 22 nt, synthetic construct
  source 1..22: mol_type = other RNA
agaaaaaataaaggctttcgta

SEQ ID NO: 116914 - RNA, 22 nt, synthetic construct
  source 1..22: mol_type = other RNA
agaaaaaattagccttttacac

SEQ ID NO: 116915 - RNA, 22 nt, synthetic construct
  source 1..22: mol_type = other RNA
agaaaaacaccaaaaaagcacc

SEQ ID NO: 116916 - RNA, 22 nt, synthetic construct
  source 1..22: mol_type = other RNA
agaaaaacagaagacacaaaat

SEQ ID NO: 116917 - RNA, 22 nt, synthetic construct
  source 1..22: mol_type = other RNA
agaaaaacctaaacctgtgatt

SEQ ID NO: 116918 - RNA, 22 nt, synthetic construct
  source 1..22: mol_type = other RNA
agaaaaactgaactacagtgtt

SEQ ID NO: 116919 - RNA, 22 nt, synthetic construct
  source 1..22: mol_type = other RNA
agaaaaagaaaagacaagacta

SEQ ID NO: 116920 - RNA, 22 nt, synthetic construct
  source 1..22: mol_type = other RNA
agaaaaagaataagctaatccc

SEQ ID NO: 116921 - RNA, 22 nt, synthetic construct
  source 1..22: mol_type = other RNA
agaaaaagcaacttgaaggcaa

SEQ ID NO: 116922 - RNA, 22 nt, synthetic construct
  source 1..22: mol_type = other RNA
agaaaaagcagagaaactggaa

SEQ ID NO: 116923 - RNA, 22 nt, synthetic construct
  source 1..22: mol_type = other RNA
agaaaaagctcacctctggact

SEQ ID NO: 116924 - RNA, 22 nt, synthetic construct
  source 1..22: mol_type = other RNA
agaaaaaggttaagggaagagc

SEQ ID NO: 116925 - RNA, 22 nt, synthetic construct
  source 1..22: mol_type = other RNA
agaaaaagttgggcttggttgg

SEQ ID NO: 116926 - RNA, 22 nt, synthetic construct
  source 1..22: mol_type = other RNA
agaaaaatggggatatccaaag

SEQ ID NO: 116927 - RNA, 22 nt, synthetic construct
  source 1..22: mol_type = other RNA
agaaaaattacaggtcaaactc

SEQ ID NO: 116928 - RNA, 22 nt, synthetic construct
  source 1..22: mol_type = other RNA
agaaaaattccctcagcaaaag

SEQ ID NO: 116929 - RNA, 22 nt, synthetic construct
  source 1..22: mol_type = other RNA
agaaaacaaattcatgcaactg

SEQ ID NO: 116930 - RNA, 22 nt, synthetic construct
  source 1..22: mol_type = other RNA
agaaaacactccagaatgaccg

SEQ ID NO: 116931 - RNA, 22 nt, synthetic construct
  source 1..22: mol_type = other RNA
agaaaacagataacctagattt

SEQ ID NO: 116932 - RNA, 22 nt, synthetic construct
  source 1..22: mol_type = other RNA
agaaaacatatccttctacatc

SEQ ID NO: 116933 - RNA, 22 nt, synthetic construct
  source 1..22: mol_type = other RNA
agaaaaccagaaaagtgaaaca

SEQ ID NO: 116934 - RNA, 22 nt, synthetic construct
  source 1..22: mol_type = other RNA
agaaaacccttcatcatttgta

SEQ ID NO: 116935 - RNA, 22 nt, synthetic construct
  source 1..22: mol_type = other RNA
agaaaaccgacagcagataaga

SEQ ID NO: 116936 - RNA, 22 nt, synthetic construct
  source 1..22: mol_type = other RNA
agaaaactggcaatcaaatggc

SEQ ID NO: 116937 - RNA, 22 nt, synthetic construct
  source 1..22: mol_type = other RNA
agaaaacttgagcagatcagta

SEQ ID NO: 116938 - RNA, 22 nt, synthetic construct
  source 1..22: mol_type = other RNA
agaaaagaaaagtttcagtggt

SEQ ID NO: 116939 - RNA, 22 nt, synthetic construct
  source 1..22: mol_type = other RNA
agaaaagaagttacggttccct

SEQ ID NO: 116940 - RNA, 22 nt, synthetic construct
  source 1..22: mol_type = other RNA
agaaaagacaatagctagtgtc

SEQ ID NO: 116941 - RNA, 22 nt, synthetic construct
  source 1..22: mol_type = other RNA
agaaaagataagtagaaggtca

SEQ ID NO: 116942 - RNA, 22 nt, synthetic construct
  source 1..22: mol_type = other RNA
agaaaagatcagtaaaattccc

SEQ ID NO: 116943 - RNA, 22 nt, synthetic construct
  source 1..22: mol_type = other RNA
agaaaagcacaggcatcggccg

SEQ ID NO: 116944 - RNA, 22 nt, synthetic construct
  source 1..22: mol_type = other RNA
agaaaaggctgagacctcatct

SEQ ID NO: 116945 - RNA, 22 nt, synthetic construct
  source 1..22: mol_type = other RNA
agaaaagtttcagtggttaata

SEQ ID NO: 116946 - RNA, 22 nt, synthetic construct
  source 1..22: mol_type = other RNA
agaaaataaaattctgaccctt

SEQ ID NO: 116947 - RNA, 22 nt, synthetic construct
  source 1..22: mol_type = other RNA
agaaaataaaccaagtttggtt

SEQ ID NO: 116948 - RNA, 22 nt, synthetic construct
  source 1..22: mol_type = other RNA
agaaaataatgttttccgtgtg

SEQ ID NO: 116949 - RNA, 22 nt, synthetic construct
  source 1..22: mol_type = other RNA
agaaaatacagttttgaccaaa

SEQ ID NO: 116950 - RNA, 22 nt, synthetic construct
  source 1..22: mol_type = other RNA
agaaaatagggacggccttctt

SEQ ID NO: 116951 - RNA, 22 nt, synthetic construct
  source 1..22: mol_type = other RNA
agaaaatagtatgaaggttctt

SEQ ID NO: 116952 - RNA, 22 nt, synthetic construct
  source 1..22: mol_type = other RNA
agaaaatcagtgtgaaagtatt

SEQ ID NO: 116953 - RNA, 22 nt, synthetic construct
  source 1..22: mol_type = other RNA
agaaaatcatacattttccaca

SEQ ID NO: 116954 - RNA, 22 nt, synthetic construct
  source 1..22: mol_type = other RNA
agaaaatcattgttcagggaag

SEQ ID NO: 116955 - RNA, 22 nt, synthetic construct
  source 1..22: mol_type = other RNA
agaaaatccaaaagcctcaaaa

SEQ ID NO: 116956 - RNA, 22 nt, synthetic construct
  source 1..22: mol_type = other RNA
agaaaatccaagaagacatgat

SEQ ID NO: 116957 - RNA, 22 nt, synthetic construct
  source 1..22: mol_type = other RNA
agaaaatccttacttccagctc

SEQ ID NO: 116958 - RNA, 22 nt, synthetic construct
  source 1..22: mol_type = other RNA
agaaaatctgacaatttgccaa

SEQ ID NO: 116959 - RNA, 22 nt, synthetic construct
  source 1..22: mol_type = other RNA
agaaaatgcttatgtcttgtgg

SEQ ID NO: 116960 - RNA, 22 nt, synthetic construct
  source 1..22: mol_type = other RNA
agaaaatggccaagagttgctg

SEQ ID NO: 116961 - RNA, 22 nt, synthetic construct
  source 1..22: mol_type = other RNA
agaaaatgtgacattagtggtg

SEQ ID NO: 116962 - RNA, 22 nt, synthetic construct
  source 1..22: mol_type = other RNA
agaaaatgttatacagcaaatc

SEQ ID NO: 116963 - RNA, 22 nt, synthetic construct
  source 1..22: mol_type = other RNA
agaaaattagctgactttcatt

SEQ ID NO: 116964 - RNA, 22 nt, synthetic construct
  source 1..22: mol_type = other RNA
agaaaattgttcatgaaatccc

SEQ ID NO: 116965 - RNA, 22 nt, synthetic construct
  source 1..22: mol_type = other RNA
agaaaattttctgagcaactac

SEQ ID NO: 116966 - RNA, 22 nt, synthetic construct
  source 1..22: mol_type = other RNA
agaaaattttcttttgtgggta

SEQ ID NO: 116967 - RNA, 22 nt, synthetic construct
  source 1..22: mol_type = other RNA
agaaacaacaacaacaaaatac

SEQ ID NO: 116968 - RNA, 22 nt, synthetic construct
  source 1..22: mol_type = other RNA
agaaacacaggactgtgtgtgt

SEQ ID NO: 116969 - RNA, 22 nt, synthetic construct
  source 1..22: mol_type = other RNA
agaaacaccaacacaaagcctt

SEQ ID NO: 116970 - RNA, 22 nt, synthetic construct
  source 1..22: mol_type = other RNA
agaaacagaaaaatccatctta

SEQ ID NO: 116971 - RNA, 22 nt, synthetic construct
  source 1..22: mol_type = other RNA
agaaacaggattacaatgtaag

SEQ ID NO: 116972 - RNA, 22 nt, synthetic construct
  source 1..22: mol_type = other RNA
agaaacagtaattagttacatg

SEQ ID NO: 116973 - RNA, 22 nt, synthetic construct
  source 1..22: mol_type = other RNA
agaaacatacatgttcagttat

SEQ ID NO: 116974 - RNA, 22 nt, synthetic construct
  source 1..22: mol_type = other RNA
agaaacatcccaagtgcccatt

SEQ ID NO: 116975 - RNA, 22 nt, synthetic construct
  source 1..22: mol_type = other RNA
agaaacatggcttagaaatgaa

SEQ ID NO: 116976 - RNA, 22 nt, synthetic construct
  source 1..22: mol_type = other RNA
agaaaccaagagcatagacttt

SEQ ID NO: 116977 - RNA, 22 nt, synthetic construct
  source 1..22: mol_type = other RNA
agaaaccacagagcctaaaata

SEQ ID NO: 116978 - RNA, 22 nt, synthetic construct
  source 1..22: mol_type = other RNA
agaaaccatcgttcacactcgc

SEQ ID NO: 116979 - RNA, 22 nt, synthetic construct
  source 1..22: mol_type = other RNA
agaaaccatttaccccttaaat

SEQ ID NO: 116980 - RNA, 22 nt, synthetic construct
  source 1..22: mol_type = other RNA
agaaaccctgtacccattagac

SEQ ID NO: 116981 - RNA, 22 nt, synthetic construct
  source 1..22: mol_type = other RNA
agaaacctaagaaaggtctagt

SEQ ID NO: 116982 - RNA, 22 nt, synthetic construct
  source 1..22: mol_type = other RNA
agaaaccttggtgtgcttctga

SEQ ID NO: 116983 - RNA, 22 nt, synthetic construct
  source 1..22: mol_type = other RNA
agaaacctttctcaaagcccac

SEQ ID NO: 116984 - RNA, 22 nt, synthetic construct
  source 1..22: mol_type = other RNA
agaaactacctagaaaaacacc

SEQ ID NO: 116985 - RNA, 22 nt, synthetic construct
  source 1..22: mol_type = other RNA
agaaactagaaaagataagtag

SEQ ID NO: 116986 - RNA, 22 nt, synthetic construct
  source 1..22: mol_type = other RNA
agaaactatccaacatgccagc

SEQ ID NO: 116987 - RNA, 22 nt, synthetic construct
  source 1..22: mol_type = other RNA
agaaactgacaggactccacag

SEQ ID NO: 116988 - RNA, 22 nt, synthetic construct
  source 1..22: mol_type = other RNA
agaaactggaatcaatccagac

SEQ ID NO: 116989 - RNA, 22 nt, synthetic construct
  source 1..22: mol_type = other RNA
agaaactggtgaactgggtgta

SEQ ID NO: 116990 - RNA, 22 nt, synthetic construct
  source 1..22: mol_type = other RNA
agaaacttccaaccatcttctt

SEQ ID NO: 116991 - RNA, 22 nt, synthetic construct
  source 1..22: mol_type = other RNA
agaaacttcttctgttggagag

SEQ ID NO: 116992 - RNA, 22 nt, synthetic construct
  source 1..22: mol_type = other RNA
agaaacttggattgtgtgtcga

SEQ ID NO: 116993 - RNA, 22 nt, synthetic construct
  source 1..22: mol_type = other RNA
agaaagaaaaactgaactacag

SEQ ID NO: 116994 - RNA, 22 nt, synthetic construct
  source 1..22: mol_type = other RNA
agaaagaaaatccaaaagcctc

SEQ ID NO: 116995 - RNA, 22 nt, synthetic construct
  source 1..22: mol_type = other RNA
agaaagaaggccatttgattgc

SEQ ID NO: 116996 - RNA, 22 nt, synthetic construct
  source 1..22: mol_type = other RNA
agaaagaagtaatttcttctga

SEQ ID NO: 116997 - RNA, 22 nt, synthetic construct
  source 1..22: mol_type = other RNA
agaaagacagggagagagagag

SEQ ID NO: 116998 - RNA, 22 nt, synthetic construct
  source 1..22: mol_type = other RNA
agaaagaccaagagtgtggctt

SEQ ID NO: 116999 - RNA, 22 nt, synthetic construct
  source 1..22: mol_type = other RNA
agaaagagaatagcagaaacac

SEQ ID NO: 117000 - RNA, 22 nt, synthetic construct
  source 1..22: mol_type = other RNA
agaaagagagagacaagcacag

SEQ ID NO: 117001 - RNA, 22 nt, synthetic construct
  source 1..22: mol_type = other RNA
agaaagagagaggggggaagct

SEQ ID NO: 117002 - RNA, 22 nt, synthetic construct
  source 1..22: mol_type = other RNA
agaaagagggaagtactgagtc

SEQ ID NO: 117003 - RNA, 22 nt, synthetic construct
  source 1..22: mol_type = other RNA
agaaagagttgggtttttgaaa

SEQ ID NO: 117004 - RNA, 22 nt, synthetic construct
  source 1..22: mol_type = other RNA
agaaagataaatcagaaactga

SEQ ID NO: 117005 - RNA, 22 nt, synthetic construct
  source 1..22: mol_type = other RNA
agaaagataaatccaacgaccg

SEQ ID NO: 117006 - RNA, 22 nt, synthetic construct
  source 1..22: mol_type = other RNA
agaaagatctcaaacagcctaa

SEQ ID NO: 117007 - RNA, 22 nt, synthetic construct
  source 1..22: mol_type = other RNA
agaaagattaatccttgtggtc

SEQ ID NO: 117008 - RNA, 22 nt, synthetic construct
  source 1..22: mol_type = other RNA
agaaagcacataaaaaaggaat

SEQ ID NO: 117009 - RNA, 22 nt, synthetic construct
  source 1..22: mol_type = other RNA
agaaagcaccagggcctctgaa

SEQ ID NO: 117010 - RNA, 22 nt, synthetic construct
  source 1..22: mol_type = other RNA
agaaagcaggtcatgacttttt

SEQ ID NO: 117011 - RNA, 22 nt, synthetic construct
  source 1..22: mol_type = other RNA
agaaagcaggttcattttaata

SEQ ID NO: 117012 - RNA, 22 nt, synthetic construct
  source 1..22: mol_type = other RNA
agaaagcatcagagctttgtta

SEQ ID NO: 117013 - RNA, 22 nt, synthetic construct
  source 1..22: mol_type = other RNA
agaaagcccagccgcggactcc

SEQ ID NO: 117014 - RNA, 22 nt, synthetic construct
  source 1..22: mol_type = other RNA
agaaagcctcttcagaagagga

SEQ ID NO: 117015 - RNA, 22 nt, synthetic construct
  source 1..22: mol_type = other RNA
agaaagctctcaattaatgccc

SEQ ID NO: 117016 - RNA, 22 nt, synthetic construct
  source 1..22: mol_type = other RNA
agaaagctggactcattccaat

SEQ ID NO: 117017 - RNA, 22 nt, synthetic construct
  source 1..22: mol_type = other RNA
agaaagctgtggatgttggtga

SEQ ID NO: 117018 - RNA, 22 nt, synthetic construct
  source 1..22: mol_type = other RNA
agaaaggaattgtaatcacagt

SEQ ID NO: 117019 - RNA, 22 nt, synthetic construct
  source 1..22: mol_type = other RNA
agaaaggacttcagtccttacc

SEQ ID NO: 117020 - RNA, 22 nt, synthetic construct
  source 1..22: mol_type = other RNA
agaaaggagaccagttaggaag

SEQ ID NO: 117021 - RNA, 22 nt, synthetic construct
  source 1..22: mol_type = other RNA
agaaaggagggactgaaaccag

SEQ ID NO: 117022 - RNA, 22 nt, synthetic construct
  source 1..22: mol_type = other RNA
agaaaggagttcagctttaaag

SEQ ID NO: 117023 - RNA, 22 nt, synthetic construct
  source 1..22: mol_type = other RNA
agaaaggcccaaaaagttttta

SEQ ID NO: 117024 - RNA, 22 nt, synthetic construct
  source 1..22: mol_type = other RNA
agaaaggcgaagcggcagggcc

SEQ ID NO: 117025 - RNA, 22 nt, synthetic construct
  source 1..22: mol_type = other RNA
agaaaggggaaggaattttcag

SEQ ID NO: 117026 - RNA, 22 nt, synthetic construct
  source 1..22: mol_type = other RNA
agaaagggtagctttgatgccc

SEQ ID NO: 117027 - RNA, 22 nt, synthetic construct
  source 1..22: mol_type = other RNA
agaaagggtgtgtgaatggaaa

SEQ ID NO: 117028 - RNA, 22 nt, synthetic construct
  source 1..22: mol_type = other RNA
agaaaggtctagtgtgcatgtg

SEQ ID NO: 117029 - RNA, 22 nt, synthetic construct
  source 1..22: mol_type = other RNA
agaaaggtctctctctgtcacc

SEQ ID NO: 117030 - RNA, 22 nt, synthetic construct
  source 1..22: mol_type = other RNA
agaaaggtttcttcactcttaa

SEQ ID NO: 117031 - RNA, 22 nt, synthetic construct
  source 1..22: mol_type = other RNA
agaaagtagattagcttttacg

SEQ ID NO: 117032 - RNA, 22 nt, synthetic construct
  source 1..22: mol_type = other RNA
agaaagttagtgtctaatgggt

SEQ ID NO: 117033 - RNA, 22 nt, synthetic construct
  source 1..22: mol_type = other RNA
agaaagttttgcagttggggac

SEQ ID NO: 117034 - RNA, 22 nt, synthetic construct
  source 1..22: mol_type = other RNA
agaaataaaacatggccagtat

SEQ ID NO: 117035 - RNA, 22 nt, synthetic construct
  source 1..22: mol_type = other RNA
agaaataaaacatgttgtgtag

SEQ ID NO: 117036 - RNA, 22 nt, synthetic construct
  source 1..22: mol_type = other RNA
agaaataaacgacaccagaact

SEQ ID NO: 117037 - RNA, 22 nt, synthetic construct
  source 1..22: mol_type = other RNA
agaaataaatcctcacatgttt

SEQ ID NO: 117038 - RNA, 22 nt, synthetic construct
  source 1..22: mol_type = other RNA
agaaataactttaatcaccagg

SEQ ID NO: 117039 - RNA, 22 nt, synthetic construct
  source 1..22: mol_type = other RNA
agaaatacaatgtgagccacat

SEQ ID NO: 117040 - RNA, 22 nt, synthetic construct
  source 1..22: mol_type = other RNA
agaaatacagaccgatggaaca

SEQ ID NO: 117041 - RNA, 22 nt, synthetic construct
  source 1..22: mol_type = other RNA
agaaatacctgcaggttgatac

SEQ ID NO: 117042 - RNA, 22 nt, synthetic construct
  source 1..22: mol_type = other RNA
agaaatacttggacaggggaca

SEQ ID NO: 117043 - RNA, 22 nt, synthetic construct
  source 1..22: mol_type = other RNA
agaaatagaaaacttgagcaga

SEQ ID NO: 117044 - RNA, 22 nt, synthetic construct
  source 1..22: mol_type = other RNA
agaaatagaactgtcacaattc

SEQ ID NO: 117045 - RNA, 22 nt, synthetic construct
  source 1..22: mol_type = other RNA
agaaatagactcccaacttata

SEQ ID NO: 117046 - RNA, 22 nt, synthetic construct
  source 1..22: mol_type = other RNA
agaaatataccttatgtgaaag

SEQ ID NO: 117047 - RNA, 22 nt, synthetic construct
  source 1..22: mol_type = other RNA
agaaatcaaatgggaaattaga

SEQ ID NO: 117048 - RNA, 22 nt, synthetic construct
  source 1..22: mol_type = other RNA
agaaatcatacacgagtgtgtt

SEQ ID NO: 117049 - RNA, 22 nt, synthetic construct
  source 1..22: mol_type = other RNA
agaaatcggaactcctgtatgc

SEQ ID NO: 117050 - RNA, 22 nt, synthetic construct
  source 1..22: mol_type = other RNA
agaaatctaccaaacattgaag

SEQ ID NO: 117051 - RNA, 22 nt, synthetic construct
  source 1..22: mol_type = other RNA
agaaatctgcatccaaaaggga

SEQ ID NO: 117052 - RNA, 22 nt, synthetic construct
  source 1..22: mol_type = other RNA
agaaatcttccagaaggagaaa

SEQ ID NO: 117053 - RNA, 22 nt, synthetic construct
  source 1..22: mol_type = other RNA
agaaatgaaatggcccttaact

SEQ ID NO: 117054 - RNA, 22 nt, synthetic construct
  source 1..22: mol_type = other RNA
agaaatgaagatggcctccctc

SEQ ID NO: 117055 - RNA, 22 nt, synthetic construct
  source 1..22: mol_type = other RNA
agaaatgacaagtaaatgcaat

SEQ ID NO: 117056 - RNA, 22 nt, synthetic construct
  source 1..22: mol_type = other RNA
agaaatgagttccagtcctttg

SEQ ID NO: 117057 - RNA, 22 nt, synthetic construct
  source 1..22: mol_type = other RNA
agaaatgtctggtttgctttgg

SEQ ID NO: 117058 - RNA, 22 nt, synthetic construct
  source 1..22: mol_type = other RNA
agaaatgtggaagcagaactaa

SEQ ID NO: 117059 - RNA, 22 nt, synthetic construct
  source 1..22: mol_type = other RNA
agaaatgtggagataaagagca

SEQ ID NO: 117060 - RNA, 22 nt, synthetic construct
  source 1..22: mol_type = other RNA
agaaatgttaacaattggtgaa

SEQ ID NO: 117061 - RNA, 22 nt, synthetic construct
  source 1..22: mol_type = other RNA
agaaattacttctttctctttc

SEQ ID NO: 117062 - RNA, 22 nt, synthetic construct
  source 1..22: mol_type = other RNA
agaaattagaacatctggcagc

SEQ ID NO: 117063 - RNA, 22 nt, synthetic construct
  source 1..22: mol_type = other RNA
agaaattataagcttcctctgg

SEQ ID NO: 117064 - RNA, 22 nt, synthetic construct
  source 1..22: mol_type = other RNA
agaaattatctgtgggttaaaa

SEQ ID NO: 117065 - RNA, 22 nt, synthetic construct
  source 1..22: mol_type = other RNA
agaaattcaacttggtaaaaag

SEQ ID NO: 117066 - RNA, 22 nt, synthetic construct
  source 1..22: mol_type = other RNA
agaaattggaacctttgtccac

SEQ ID NO: 117067 - RNA, 22 nt, synthetic construct
  source 1..22: mol_type = other RNA
agaaattggacgggtggtaggg

SEQ ID NO: 117068 - RNA, 22 nt, synthetic construct
  source 1..22: mol_type = other RNA
agaaatttaaggaccaggtatg

SEQ ID NO: 117069 - RNA, 22 nt, synthetic construct
  source 1..22: mol_type = other RNA
agaacaaaacaagaagaaaaag

SEQ ID NO: 117070 - RNA, 22 nt, synthetic construct
  source 1..22: mol_type = other RNA
agaacaaaatacctgggaatcc

SEQ ID NO: 117071 - RNA, 22 nt, synthetic construct
  source 1..22: mol_type = other RNA
agaacaaactcaagttccggtt

SEQ ID NO: 117072 - RNA, 22 nt, synthetic construct
  source 1..22: mol_type = other RNA
agaacaaactgcgtggtttatt

SEQ ID NO: 117073 - RNA, 22 nt, synthetic construct
  source 1..22: mol_type = other RNA
agaacaaataacaccatagctg

SEQ ID NO: 117074 - RNA, 22 nt, synthetic construct
  source 1..22: mol_type = other RNA
agaacaacatggtagaccatat

SEQ ID NO: 117075 - RNA, 22 nt, synthetic construct
  source 1..22: mol_type = other RNA
agaacaatggaatagaagggag

SEQ ID NO: 117076 - RNA, 22 nt, synthetic construct
  source 1..22: mol_type = other RNA
agaacaattttgaatgtgttga

SEQ ID NO: 117077 - RNA, 22 nt, synthetic construct
  source 1..22: mol_type = other RNA
agaacacacaatttgaggtagc

SEQ ID NO: 117078 - RNA, 22 nt, synthetic construct
  source 1..22: mol_type = other RNA
agaacacactgctcttctattc

SEQ ID NO: 117079 - RNA, 22 nt, synthetic construct
  source 1..22: mol_type = other RNA
agaacacagtgttgagaaagca

SEQ ID NO: 117080 - RNA, 22 nt, synthetic construct
  source 1..22: mol_type = other RNA
agaacactaaaggggatttcat

SEQ ID NO: 117081 - RNA, 22 nt, synthetic construct
  source 1..22: mol_type = other RNA
agaacactataagccaatatcc

SEQ ID NO: 117082 - RNA, 22 nt, synthetic construct
  source 1..22: mol_type = other RNA
agaacacttaacatgagatcta

SEQ ID NO: 117083 - RNA, 22 nt, synthetic construct
  source 1..22: mol_type = other RNA
agaacagaataaaaagtgactt

SEQ ID NO: 117084 - RNA, 22 nt, synthetic construct
  source 1..22: mol_type = other RNA
agaacagcattatcttaataac

SEQ ID NO: 117085 - RNA, 22 nt, synthetic construct
  source 1..22: mol_type = other RNA
agaacaggaagggagagatgcc

SEQ ID NO: 117086 - RNA, 22 nt, synthetic construct
  source 1..22: mol_type = other RNA
agaacaggacttttggtacaca

SEQ ID NO: 117087 - RNA, 22 nt, synthetic construct
  source 1..22: mol_type = other RNA
agaacaggagttaccataaaac

SEQ ID NO: 117088 - RNA, 22 nt, synthetic construct
  source 1..22: mol_type = other RNA
agaacagtaaagtcactgtgga

SEQ ID NO: 117089 - RNA, 22 nt, synthetic construct
  source 1..22: mol_type = other RNA
agaacagtgtttacacacctga

SEQ ID NO: 117090 - RNA, 22 nt, synthetic construct
  source 1..22: mol_type = other RNA
agaacatataatccaactgcag

SEQ ID NO: 117091 - RNA, 22 nt, synthetic construct
  source 1..22: mol_type = other RNA
agaacatctggcagcaggggct

SEQ ID NO: 117092 - RNA, 22 nt, synthetic construct
  source 1..22: mol_type = other RNA
agaacatgattgggtcaacaaa

SEQ ID NO: 117093 - RNA, 22 nt, synthetic construct
  source 1..22: mol_type = other RNA
agaacattggtttgaaatgatc

SEQ ID NO: 117094 - RNA, 22 nt, synthetic construct
  source 1..22: mol_type = other RNA
agaaccacctgggggagactgt

SEQ ID NO: 117095 - RNA, 22 nt, synthetic construct
  source 1..22: mol_type = other RNA
agaaccactgagcacaatgcct

SEQ ID NO: 117096 - RNA, 22 nt, synthetic construct
  source 1..22: mol_type = other RNA
agaaccatacagtgccttcagc

SEQ ID NO: 117097 - RNA, 22 nt, synthetic construct
  source 1..22: mol_type = other RNA
agaaccatgtaacaggtttaat

SEQ ID NO: 117098 - RNA, 22 nt, synthetic construct
  source 1..22: mol_type = other RNA
agaacccaggaacagattcacg

SEQ ID NO: 117099 - RNA, 22 nt, synthetic construct
  source 1..22: mol_type = other RNA
agaacccagtgtctgctacagg

SEQ ID NO: 117100 - RNA, 22 nt, synthetic construct
  source 1..22: mol_type = other RNA
agaaccctttgttatctgaacg

SEQ ID NO: 117101 - RNA, 22 nt, synthetic construct
  source 1..22: mol_type = other RNA
agaaccgactgaaaggaaatga

SEQ ID NO: 117102 - RNA, 22 nt, synthetic construct
  source 1..22: mol_type = other RNA
agaaccggaacttgagtttgtt

SEQ ID NO: 117103 - RNA, 22 nt, synthetic construct
  source 1..22: mol_type = other RNA
agaacctctggaaaggacttga

SEQ ID NO: 117104 - RNA, 22 nt, synthetic construct
  source 1..22: mol_type = other RNA
agaacctgttcatttgagaatt

SEQ ID NO: 117105 - RNA, 22 nt, synthetic construct
  source 1..22: mol_type = other RNA
agaaccttagaaatttaaggac

SEQ ID NO: 117106 - RNA, 22 nt, synthetic construct
  source 1..22: mol_type = other RNA
agaaccttcatactattttcta

SEQ ID NO: 117107 - RNA, 22 nt, synthetic construct
  source 1..22: mol_type = other RNA
agaactaagaccccagtagaaa

SEQ ID NO: 117108 - RNA, 22 nt, synthetic construct
  source 1..22: mol_type = other RNA
agaactacacattccagaccag

SEQ ID NO: 117109 - RNA, 22 nt, synthetic construct
  source 1..22: mol_type = other RNA
agaactagaactgtgttacatt

SEQ ID NO: 117110 - RNA, 22 nt, synthetic construct
  source 1..22: mol_type = other RNA
agaactagaatactccaccagc

SEQ ID NO: 117111 - RNA, 22 nt, synthetic construct
  source 1..22: mol_type = other RNA
agaactccaacaattcaacaat

SEQ ID NO: 117112 - RNA, 22 nt, synthetic construct
  source 1..22: mol_type = other RNA
agaactccacctcagaaacaaa

SEQ ID NO: 117113 - RNA, 22 nt, synthetic construct
  source 1..22: mol_type = other RNA
agaactcctggtctcccagcat

SEQ ID NO: 117114 - RNA, 22 nt, synthetic construct
  source 1..22: mol_type = other RNA
agaactcgaagccttcccctgc

SEQ ID NO: 117115 - RNA, 22 nt, synthetic construct
  source 1..22: mol_type = other RNA
agaactcttctccaaggaaagt

SEQ ID NO: 117116 - RNA, 22 nt, synthetic construct
  source 1..22: mol_type = other RNA
agaactgaaagcagggactccc

SEQ ID NO: 117117 - RNA, 22 nt, synthetic construct
  source 1..22: mol_type = other RNA
agaactgactgaaggattcctc

SEQ ID NO: 117118 - RNA, 22 nt, synthetic construct
  source 1..22: mol_type = other RNA
agaactgcctggacccgggagg

SEQ ID NO: 117119 - RNA, 22 nt, synthetic construct
  source 1..22: mol_type = other RNA
agaactgctaatggtccttgct

SEQ ID NO: 117120 - RNA, 22 nt, synthetic construct
  source 1..22: mol_type = other RNA
agaactggggcttgaacccgag

SEQ ID NO: 117121 - RNA, 22 nt, synthetic construct
  source 1..22: mol_type = other RNA
agaactgtcacaattcacagaa

SEQ ID NO: 117122 - RNA, 22 nt, synthetic construct
  source 1..22: mol_type = other RNA
agaactgtcactgacacaggct

SEQ ID NO: 117123 - RNA, 22 nt, synthetic construct
  source 1..22: mol_type = other RNA
agaactgtgttacattgccttc

SEQ ID NO: 117124 - RNA, 22 nt, synthetic construct
  source 1..22: mol_type = other RNA
agaacttaaaggtttggagttt

SEQ ID NO: 117125 - RNA, 22 nt, synthetic construct
  source 1..22: mol_type = other RNA
agaacttatgcatcttgcaaaa

SEQ ID NO: 117126 - RNA, 22 nt, synthetic construct
  source 1..22: mol_type = other RNA
agaacttcttcaaaagacatca

SEQ ID NO: 117127 - RNA, 22 nt, synthetic construct
  source 1..22: mol_type = other RNA
agaacttgacaagtatattaca

SEQ ID NO: 117128 - RNA, 22 nt, synthetic construct
  source 1..22: mol_type = other RNA
agaacttgtctcggatttaaga

SEQ ID NO: 117129 - RNA, 22 nt, synthetic construct
  source 1..22: mol_type = other RNA
agaacttgtctttgtctattcc

SEQ ID NO: 117130 - RNA, 22 nt, synthetic construct
  source 1..22: mol_type = other RNA
agaagaaaaagcaacttgaagg

SEQ ID NO: 117131 - RNA, 22 nt, synthetic construct
  source 1..22: mol_type = other RNA
agaagaaataaacgacaccaga

SEQ ID NO: 117132 - RNA, 22 nt, synthetic construct
  source 1..22: mol_type = other RNA
agaagaaatcaaatgggaaatt

SEQ ID NO: 117133 - RNA, 22 nt, synthetic construct
  source 1..22: mol_type = other RNA
agaagaaatgggtaaatttcta

SEQ ID NO: 117134 - RNA, 22 nt, synthetic construct
  source 1..22: mol_type = other RNA
agaagaaatgttaacaattggt

SEQ ID NO: 117135 - RNA, 22 nt, synthetic construct
  source 1..22: mol_type = other RNA
agaagaaattacttctttctct

SEQ ID NO: 117136 - RNA, 22 nt, synthetic construct
  source 1..22: mol_type = other RNA
agaagaagaattctataggtag

SEQ ID NO: 117137 - RNA, 22 nt, synthetic construct
  source 1..22: mol_type = other RNA
agaagaagacttaggagaaaag

SEQ ID NO: 117138 - RNA, 22 nt, synthetic construct
  source 1..22: mol_type = other RNA
agaagaatcgcttgaacccggg

SEQ ID NO: 117139 - RNA, 22 nt, synthetic construct
  source 1..22: mol_type = other RNA
agaagaatgagaaacatacatg

SEQ ID NO: 117140 - RNA, 22 nt, synthetic construct
  source 1..22: mol_type = other RNA
agaagaatgattatttgcggct

SEQ ID NO: 117141 - RNA, 22 nt, synthetic construct
  source 1..22: mol_type = other RNA
agaagaattctataggtagtac

SEQ ID NO: 117142 - RNA, 22 nt, synthetic construct
  source 1..22: mol_type = other RNA
agaagacaatactgttatgaca

SEQ ID NO: 117143 - RNA, 22 nt, synthetic construct
  source 1..22: mol_type = other RNA
agaagacacaaaatcagatatg

SEQ ID NO: 117144 - RNA, 22 nt, synthetic construct
  source 1..22: mol_type = other RNA
agaagacatgataaatacgtat

SEQ ID NO: 117145 - RNA, 22 nt, synthetic construct
  source 1..22: mol_type = other RNA
agaagacctcaaattctgaggg

SEQ ID NO: 117146 - RNA, 22 nt, synthetic construct
  source 1..22: mol_type = other RNA
agaagactaagcagaaatgaca

SEQ ID NO: 117147 - RNA, 22 nt, synthetic construct
  source 1..22: mol_type = other RNA
agaagactcagcagttttaaag

SEQ ID NO: 117148 - RNA, 22 nt, synthetic construct
  source 1..22: mol_type = other RNA
agaagactggaaaagtgttgac

SEQ ID NO: 117149 - RNA, 22 nt, synthetic construct
  source 1..22: mol_type = other RNA
agaagacttaggagaaaagctt

SEQ ID NO: 117150 - RNA, 22 nt, synthetic construct
  source 1..22: mol_type = other RNA
agaagagaatggctggaatggt

SEQ ID NO: 117151 - RNA, 22 nt, synthetic construct
  source 1..22: mol_type = other RNA
agaagagcactatgtaaattat

SEQ ID NO: 117152 - RNA, 22 nt, synthetic construct
  source 1..22: mol_type = other RNA
agaagagcagtgtgttctgcct

SEQ ID NO: 117153 - RNA, 22 nt, synthetic construct
  source 1..22: mol_type = other RNA
agaagagctgtaacagaggcat

SEQ ID NO: 117154 - RNA, 22 nt, synthetic construct
  source 1..22: mol_type = other RNA
agaagaggataaggggcagggt

SEQ ID NO: 117155 - RNA, 22 nt, synthetic construct
  source 1..22: mol_type = other RNA
agaagagggggcataacatcta

SEQ ID NO: 117156 - RNA, 22 nt, synthetic construct
  source 1..22: mol_type = other RNA
agaagagtaatggttggccgag

SEQ ID NO: 117157 - RNA, 22 nt, synthetic construct
  source 1..22: mol_type = other RNA
agaagagtgaagctggaccctt

SEQ ID NO: 117158 - RNA, 22 nt, synthetic construct
  source 1..22: mol_type = other RNA
agaagagttctgaaggctcagc

SEQ ID NO: 117159 - RNA, 22 nt, synthetic construct
  source 1..22: mol_type = other RNA
agaagataatgttagaattcag

SEQ ID NO: 117160 - RNA, 22 nt, synthetic construct
  source 1..22: mol_type = other RNA
agaagatgacatttgcttttcc

SEQ ID NO: 117161 - RNA, 22 nt, synthetic construct
  source 1..22: mol_type = other RNA
agaagatgcagttgcttactct

SEQ ID NO: 117162 - RNA, 22 nt, synthetic construct
  source 1..22: mol_type = other RNA
agaagatggttggaagtttctg

SEQ ID NO: 117163 - RNA, 22 nt, synthetic construct
  source 1..22: mol_type = other RNA
agaagattgagtcagtaatcaa

SEQ ID NO: 117164 - RNA, 22 nt, synthetic construct
  source 1..22: mol_type = other RNA
agaagcacaccaaggtttctct

SEQ ID NO: 117165 - RNA, 22 nt, synthetic construct
  source 1..22: mol_type = other RNA
agaagcactttttaccaagttg

SEQ ID NO: 117166 - RNA, 22 nt, synthetic construct
  source 1..22: mol_type = other RNA
agaagcagaaaatcagtgtgaa

SEQ ID NO: 117167 - RNA, 22 nt, synthetic construct
  source 1..22: mol_type = other RNA
agaagcagcaagggtggctggc

SEQ ID NO: 117168 - RNA, 22 nt, synthetic construct
  source 1..22: mol_type = other RNA
agaagcatctgatacacttcta

SEQ ID NO: 117169 - RNA, 22 nt, synthetic construct
  source 1..22: mol_type = other RNA
agaagccacacagtacaaggct

SEQ ID NO: 117170 - RNA, 22 nt, synthetic construct
  source 1..22: mol_type = other RNA
agaagccctgcagccagatttg

SEQ ID NO: 117171 - RNA, 22 nt, synthetic construct
  source 1..22: mol_type = other RNA
agaagcgctcttcaagcattgg

SEQ ID NO: 117172 - RNA, 22 nt, synthetic construct
  source 1..22: mol_type = other RNA
agaagctaaattttcataggaa

SEQ ID NO: 117173 - RNA, 22 nt, synthetic construct
  source 1..22: mol_type = other RNA
agaagctatagctgagaagtaa

SEQ ID NO: 117174 - RNA, 22 nt, synthetic construct
  source 1..22: mol_type = other RNA
agaagctgttttggtaaaatgt

SEQ ID NO: 117175 - RNA, 22 nt, synthetic construct
  source 1..22: mol_type = other RNA
agaagctttcagacttaactat

SEQ ID NO: 117176 - RNA, 22 nt, synthetic construct
  source 1..22: mol_type = other RNA
agaaggaaaaaacacctaaaga

SEQ ID NO: 117177 - RNA, 22 nt, synthetic construct
  source 1..22: mol_type = other RNA
agaaggaaaagaacacagtgtt

SEQ ID NO: 117178 - RNA, 22 nt, synthetic construct
  source 1..22: mol_type = other RNA
agaaggaagcaccaacccttgt

SEQ ID NO: 117179 - RNA, 22 nt, synthetic construct
  source 1..22: mol_type = other RNA
agaaggaatgtgcactctttta

SEQ ID NO: 117180 - RNA, 22 nt, synthetic construct
  source 1..22: mol_type = other RNA
agaaggacagcttccacccaag

SEQ ID NO: 117181 - RNA, 22 nt, synthetic construct
  source 1..22: mol_type = other RNA
agaaggagaaaacaaaaagaaa

SEQ ID NO: 117182 - RNA, 22 nt, synthetic construct
  source 1..22: mol_type = other RNA
agaaggagaaaccatttacccc

SEQ ID NO: 117183 - RNA, 22 nt, synthetic construct
  source 1..22: mol_type = other RNA
agaaggaggaaaataatttgca

SEQ ID NO: 117184 - RNA, 22 nt, synthetic construct
  source 1..22: mol_type = other RNA
agaaggagtccagtcctgctaa

SEQ ID NO: 117185 - RNA, 22 nt, synthetic construct
  source 1..22: mol_type = other RNA
agaaggatatgttttctaaacc

SEQ ID NO: 117186 - RNA, 22 nt, synthetic construct
  source 1..22: mol_type = other RNA
agaaggattgttcatgtctgtg

SEQ ID NO: 117187 - RNA, 22 nt, synthetic construct
  source 1..22: mol_type = other RNA
agaaggccagagggaatctagg

SEQ ID NO: 117188 - RNA, 22 nt, synthetic construct
  source 1..22: mol_type = other RNA
agaaggccatttgattgccagt

SEQ ID NO: 117189 - RNA, 22 nt, synthetic construct
  source 1..22: mol_type = other RNA
agaaggccctatgccttcagta

SEQ ID NO: 117190 - RNA, 22 nt, synthetic construct
  source 1..22: mol_type = other RNA
agaaggccgtccctattttcta

SEQ ID NO: 117191 - RNA, 22 nt, synthetic construct
  source 1..22: mol_type = other RNA
agaaggccttccacggaatgcc

SEQ ID NO: 117192 - RNA, 22 nt, synthetic construct
  source 1..22: mol_type = other RNA
agaaggcgaaatgtgaacagac

SEQ ID NO: 117193 - RNA, 22 nt, synthetic construct
  source 1..22: mol_type = other RNA
agaaggctagcacagaggcaac

SEQ ID NO: 117194 - RNA, 22 nt, synthetic construct
  source 1..22: mol_type = other RNA
agaaggctgccagcaccagata

SEQ ID NO: 117195 - RNA, 22 nt, synthetic construct
  source 1..22: mol_type = other RNA
agaaggctttgtgttggtgttt

SEQ ID NO: 117196 - RNA, 22 nt, synthetic construct
  source 1..22: mol_type = other RNA
agaagggaaaggatgaccttga

SEQ ID NO: 117197 - RNA, 22 nt, synthetic construct
  source 1..22: mol_type = other RNA
agaagggaacactaagaagatg

SEQ ID NO: 117198 - RNA, 22 nt, synthetic construct
  source 1..22: mol_type = other RNA
agaagggaagtaaagatcaagc

SEQ ID NO: 117199 - RNA, 22 nt, synthetic construct
  source 1..22: mol_type = other RNA
agaagggagaacccaggaacag

SEQ ID NO: 117200 - RNA, 22 nt, synthetic construct
  source 1..22: mol_type = other RNA
agaagggtatatacaatattac

SEQ ID NO: 117201 - RNA, 22 nt, synthetic construct
  source 1..22: mol_type = other RNA
agaaggtaagaatgtcaagctg

SEQ ID NO: 117202 - RNA, 22 nt, synthetic construct
  source 1..22: mol_type = other RNA
agaaggtatcatcggaaatata

SEQ ID NO: 117203 - RNA, 22 nt, synthetic construct
  source 1..22: mol_type = other RNA
agaaggtcaatctaggaggtct

SEQ ID NO: 117204 - RNA, 22 nt, synthetic construct
  source 1..22: mol_type = other RNA
agaaggtgagggactgagcagt

SEQ ID NO: 117205 - RNA, 22 nt, synthetic construct
  source 1..22: mol_type = other RNA
agaaggttaactaatagccagt

SEQ ID NO: 117206 - RNA, 22 nt, synthetic construct
  source 1..22: mol_type = other RNA
agaaggtttgtagagcaagcaa

SEQ ID NO: 117207 - RNA, 22 nt, synthetic construct
  source 1..22: mol_type = other RNA
agaagtaaatcccggccaggtg

SEQ ID NO: 117208 - RNA, 22 nt, synthetic construct
  source 1..22: mol_type = other RNA
agaagtaacattacaacagcaa

SEQ ID NO: 117209 - RNA, 22 nt, synthetic construct
  source 1..22: mol_type = other RNA
agaagtaactcttgagttagga

SEQ ID NO: 117210 - RNA, 22 nt, synthetic construct
  source 1..22: mol_type = other RNA
agaagtaatttcttctgaagaa

SEQ ID NO: 117211 - RNA, 22 nt, synthetic construct
  source 1..22: mol_type = other RNA
agaagtacaaacattacagaaa

SEQ ID NO: 117212 - RNA, 22 nt, synthetic construct
  source 1..22: mol_type = other RNA
agaagtatcccagatggggatt

SEQ ID NO: 117213 - RNA, 22 nt, synthetic construct
  source 1..22: mol_type = other RNA
agaagtcaaagcctgtggaggc

SEQ ID NO: 117214 - RNA, 22 nt, synthetic construct
  source 1..22: mol_type = other RNA
agaagtcactttttattctgtt

SEQ ID NO: 117215 - RNA, 22 nt, synthetic construct
  source 1..22: mol_type = other RNA
agaagtcagactaagacactag

SEQ ID NO: 117216 - RNA, 22 nt, synthetic construct
  source 1..22: mol_type = other RNA
agaagtcccagttcaaggtgtt

SEQ ID NO: 117217 - RNA, 22 nt, synthetic construct
  source 1..22: mol_type = other RNA
agaagtcttttcctaccctgag

SEQ ID NO: 117218 - RNA, 22 nt, synthetic construct
  source 1..22: mol_type = other RNA
agaagtgaaaaatgacctaaaa

SEQ ID NO: 117219 - RNA, 22 nt, synthetic construct
  source 1..22: mol_type = other RNA
agaagtgaaactgctggatcat

SEQ ID NO: 117220 - RNA, 22 nt, synthetic construct
  source 1..22: mol_type = other RNA
agaagtgaagcttcaaaccact

SEQ ID NO: 117221 - RNA, 22 nt, synthetic construct
  source 1..22: mol_type = other RNA
agaagtgctgacttggcagcaa

SEQ ID NO: 117222 - RNA, 22 nt, synthetic construct
  source 1..22: mol_type = other RNA
agaagtgtatcagatgcttcta

SEQ ID NO: 117223 - RNA, 22 nt, synthetic construct
  source 1..22: mol_type = other RNA
agaagtgttttgatagttgcag

SEQ ID NO: 117224 - RNA, 22 nt, synthetic construct
  source 1..22: mol_type = other RNA
agaagttacggttccctgtaga

SEQ ID NO: 117225 - RNA, 22 nt, synthetic construct
  source 1..22: mol_type = other RNA
agaagttgtggtgagccaagat

SEQ ID NO: 117226 - RNA, 22 nt, synthetic construct
  source 1..22: mol_type = other RNA
agaagtttggaaccagcctggc

SEQ ID NO: 117227 - RNA, 22 nt, synthetic construct
  source 1..22: mol_type = other RNA
agaagttttccaggaaaagcaa

SEQ ID NO: 117228 - RNA, 22 nt, synthetic construct
  source 1..22: mol_type = other RNA
agaataaaaagtgacttctgga

SEQ ID NO: 117229 - RNA, 22 nt, synthetic construct
  source 1..22: mol_type = other RNA
agaataaaattcaccaaacacc

SEQ ID NO: 117230 - RNA, 22 nt, synthetic construct
  source 1..22: mol_type = other RNA
agaataactgtcctgaattcta

SEQ ID NO: 117231 - RNA, 22 nt, synthetic construct
  source 1..22: mol_type = other RNA
agaataagctaatcccaaagtg

SEQ ID NO: 117232 - RNA, 22 nt, synthetic construct
  source 1..22: mol_type = other RNA
agaataatacacttttcaggta

SEQ ID NO: 117233 - RNA, 22 nt, synthetic construct
  source 1..22: mol_type = other RNA
agaatacaaaaatgacacaact

SEQ ID NO: 117234 - RNA, 22 nt, synthetic construct
  source 1..22: mol_type = other RNA
agaataccaaattcacgagact

SEQ ID NO: 117235 - RNA, 22 nt, synthetic construct
  source 1..22: mol_type = other RNA
agaataccacttagtttgcaat

SEQ ID NO: 117236 - RNA, 22 nt, synthetic construct
  source 1..22: mol_type = other RNA
agaataccagagattgggaaaa

SEQ ID NO: 117237 - RNA, 22 nt, synthetic construct
  source 1..22: mol_type = other RNA
agaatactccaccagcatcttt

SEQ ID NO: 117238 - RNA, 22 nt, synthetic construct
  source 1..22: mol_type = other RNA
agaatagcagaaacacaggact

SEQ ID NO: 117239 - RNA, 22 nt, synthetic construct
  source 1..22: mol_type = other RNA
agaataggcaaattcatagatc

SEQ ID NO: 117240 - RNA, 22 nt, synthetic construct
  source 1..22: mol_type = other RNA
agaatataaactcttccttatc

SEQ ID NO: 117241 - RNA, 22 nt, synthetic construct
  source 1..22: mol_type = other RNA
agaatatataaagaactccaac

SEQ ID NO: 117242 - RNA, 22 nt, synthetic construct
  source 1..22: mol_type = other RNA
agaatatccaagcacaaacctg

SEQ ID NO: 117243 - RNA, 22 nt, synthetic construct
  source 1..22: mol_type = other RNA
agaatcaggtctctttgaaagg

SEQ ID NO: 117244 - RNA, 22 nt, synthetic construct
  source 1..22: mol_type = other RNA
agaatcatccggggagcttttg

SEQ ID NO: 117245 - RNA, 22 nt, synthetic construct
  source 1..22: mol_type = other RNA
agaatccccaaataacatgcat

SEQ ID NO: 117246 - RNA, 22 nt, synthetic construct
  source 1..22: mol_type = other RNA
agaatccctttcgctaatctca

SEQ ID NO: 117247 - RNA, 22 nt, synthetic construct
  source 1..22: mol_type = other RNA
agaatcctgctattttattaga

SEQ ID NO: 117248 - RNA, 22 nt, synthetic construct
  source 1..22: mol_type = other RNA
agaatcgtgatagtcttccaat

SEQ ID NO: 117249 - RNA, 22 nt, synthetic construct
  source 1..22: mol_type = other RNA
agaatctgggaggtggaggtta

SEQ ID NO: 117250 - RNA, 22 nt, synthetic construct
  source 1..22: mol_type = other RNA
agaatcttaaaataccagaggt

SEQ ID NO: 117251 - RNA, 22 nt, synthetic construct
  source 1..22: mol_type = other RNA
agaatcttactggtgttaggca

SEQ ID NO: 117252 - RNA, 22 nt, synthetic construct
  source 1..22: mol_type = other RNA
agaatctttggcaaacttagaa

SEQ ID NO: 117253 - RNA, 22 nt, synthetic construct
  source 1..22: mol_type = other RNA
agaatgaaaatttttgtctgga

SEQ ID NO: 117254 - RNA, 22 nt, synthetic construct
  source 1..22: mol_type = other RNA
agaatgaagtcagagattttcc

SEQ ID NO: 117255 - RNA, 22 nt, synthetic construct
  source 1..22: mol_type = other RNA
agaatgacagaaaatatctaca

SEQ ID NO: 117256 - RNA, 22 nt, synthetic construct
  source 1..22: mol_type = other RNA
agaatgaccgagatacttaagt

SEQ ID NO: 117257 - RNA, 22 nt, synthetic construct
  source 1..22: mol_type = other RNA
agaatgagaaacatacatgttc

SEQ ID NO: 117258 - RNA, 22 nt, synthetic construct
  source 1..22: mol_type = other RNA
agaatgattatttgcggcttga

SEQ ID NO: 117259 - RNA, 22 nt, synthetic construct
  source 1..22: mol_type = other RNA
agaatgcatccctcctctggcc

SEQ ID NO: 117260 - RNA, 22 nt, synthetic construct
  source 1..22: mol_type = other RNA
agaatgcatcttttaaaaacct

SEQ ID NO: 117261 - RNA, 22 nt, synthetic construct
  source 1..22: mol_type = other RNA
agaatggaaacttgccatcttg

SEQ ID NO: 117262 - RNA, 22 nt, synthetic construct
  source 1..22: mol_type = other RNA
agaatggcaaggctaacagcca

SEQ ID NO: 117263 - RNA, 22 nt, synthetic construct
  source 1..22: mol_type = other RNA
agaatggcatgaacccaccagg

SEQ ID NO: 117264 - RNA, 22 nt, synthetic construct
  source 1..22: mol_type = other RNA
agaatggccctgcgattggttg

SEQ ID NO: 117265 - RNA, 22 nt, synthetic construct
  source 1..22: mol_type = other RNA
agaatggctggaatggtgaaga

SEQ ID NO: 117266 - RNA, 22 nt, synthetic construct
  source 1..22: mol_type = other RNA
agaatggtttaacacatacaaa

SEQ ID NO: 117267 - RNA, 22 nt, synthetic construct
  source 1..22: mol_type = other RNA
agaatgtcaagctgtttgagct

SEQ ID NO: 117268 - RNA, 22 nt, synthetic construct
  source 1..22: mol_type = other RNA
agaatgtccatcaggaaaacca

SEQ ID NO: 117269 - RNA, 22 nt, synthetic construct
  source 1..22: mol_type = other RNA
agaatgtgaaaaatttgacatg

SEQ ID NO: 117270 - RNA, 22 nt, synthetic construct
  source 1..22: mol_type = other RNA
agaatgtgacctgtccttgtgt

SEQ ID NO: 117271 - RNA, 22 nt, synthetic construct
  source 1..22: mol_type = other RNA
agaatgtgacttcgtcaagggg

SEQ ID NO: 117272 - RNA, 22 nt, synthetic construct
  source 1..22: mol_type = other RNA
agaatgttcaagtatttccacg

SEQ ID NO: 117273 - RNA, 22 nt, synthetic construct
  source 1..22: mol_type = other RNA
agaatgtttttccgtctagcca

SEQ ID NO: 117274 - RNA, 22 nt, synthetic construct
  source 1..22: mol_type = other RNA
agaattaaaaacattggaggat

SEQ ID NO: 117275 - RNA, 22 nt, synthetic construct
  source 1..22: mol_type = other RNA
agaattaaacaatcttgaaagg

SEQ ID NO: 117276 - RNA, 22 nt, synthetic construct
  source 1..22: mol_type = other RNA
agaattaaactcattatcccag

SEQ ID NO: 117277 - RNA, 22 nt, synthetic construct
  source 1..22: mol_type = other RNA
agaattaacactaatccttctc

SEQ ID NO: 117278 - RNA, 22 nt, synthetic construct
  source 1..22: mol_type = other RNA
agaattacaggcatgagtcgcc

SEQ ID NO: 117279 - RNA, 22 nt, synthetic construct
  source 1..22: mol_type = other RNA
agaattactgacaatagccaag

SEQ ID NO: 117280 - RNA, 22 nt, synthetic construct
  source 1..22: mol_type = other RNA
agaattagaaagctggactcat

SEQ ID NO: 117281 - RNA, 22 nt, synthetic construct
  source 1..22: mol_type = other RNA
agaattatagagggcctaaata

SEQ ID NO: 117282 - RNA, 22 nt, synthetic construct
  source 1..22: mol_type = other RNA
agaattattgattggcaaatct

SEQ ID NO: 117283 - RNA, 22 nt, synthetic construct
  source 1..22: mol_type = other RNA
agaattattgtctgcaagcaga

SEQ ID NO: 117284 - RNA, 22 nt, synthetic construct
  source 1..22: mol_type = other RNA
agaattcaagaccagcctggcc

SEQ ID NO: 117285 - RNA, 22 nt, synthetic construct
  source 1..22: mol_type = other RNA
agaattcactgtgactccaaag

SEQ ID NO: 117286 - RNA, 22 nt, synthetic construct
  source 1..22: mol_type = other RNA
agaattcagagtggctaatgtg

SEQ ID NO: 117287 - RNA, 22 nt, synthetic construct
  source 1..22: mol_type = other RNA
agaattcaggacagtcatcctc

SEQ ID NO: 117288 - RNA, 22 nt, synthetic construct
  source 1..22: mol_type = other RNA
agaattcaggacagttattctt

SEQ ID NO: 117289 - RNA, 22 nt, synthetic construct
  source 1..22: mol_type = other RNA
agaattcattgttgtgtgttaa

SEQ ID NO: 117290 - RNA, 22 nt, synthetic construct
  source 1..22: mol_type = other RNA
agaattccatcagtggttgtgc

SEQ ID NO: 117291 - RNA, 22 nt, synthetic construct
  source 1..22: mol_type = other RNA
agaattccattccttttcgaga

SEQ ID NO: 117292 - RNA, 22 nt, synthetic construct
  source 1..22: mol_type = other RNA
agaattcgttaatacttgtgta

SEQ ID NO: 117293 - RNA, 22 nt, synthetic construct
  source 1..22: mol_type = other RNA
agaattctactaaacattaagg

SEQ ID NO: 117294 - RNA, 22 nt, synthetic construct
  source 1..22: mol_type = other RNA
agaattctataggtagtacata

SEQ ID NO: 117295 - RNA, 22 nt, synthetic construct
  source 1..22: mol_type = other RNA
agaattctctctcaactggccc

SEQ ID NO: 117296 - RNA, 22 nt, synthetic construct
  source 1..22: mol_type = other RNA
agaattgactttaccctgctgg

SEQ ID NO: 117297 - RNA, 22 nt, synthetic construct
  source 1..22: mol_type = other RNA
agaattggtagtcaatgcaatg

SEQ ID NO: 117298 - RNA, 22 nt, synthetic construct
  source 1..22: mol_type = other RNA
agaatttcagaaagagaatagc

SEQ ID NO: 117299 - RNA, 22 nt, synthetic construct
  source 1..22: mol_type = other RNA
agaatttcaggtgtgtaaacac

SEQ ID NO: 117300 - RNA, 22 nt, synthetic construct
  source 1..22: mol_type = other RNA
agaatttcatgcctttcagcat

SEQ ID NO: 117301 - RNA, 22 nt, synthetic construct
  source 1..22: mol_type = other RNA
agaatttgaggtcttctagctt

SEQ ID NO: 117302 - RNA, 22 nt, synthetic construct
  source 1..22: mol_type = other RNA
agaattttaagcctagagatta

SEQ ID NO: 117303 - RNA, 22 nt, synthetic construct
  source 1..22: mol_type = other RNA
agaattttccattcatgtaatg

SEQ ID NO: 117304 - RNA, 22 nt, synthetic construct
  source 1..22: mol_type = other RNA
agaattttgcttttgctttggg

SEQ ID NO: 117305 - RNA, 22 nt, synthetic construct
  source 1..22: mol_type = other RNA
agacaaaaatagaggatgggca

SEQ ID NO: 117306 - RNA, 22 nt, synthetic construct
  source 1..22: mol_type = other RNA
agacaaaaattttcattctacc

SEQ ID NO: 117307 - RNA, 22 nt, synthetic construct
  source 1..22: mol_type = other RNA
agacaaagacaagttcttacct

SEQ ID NO: 117308 - RNA, 22 nt, synthetic construct
  source 1..22: mol_type = other RNA
agacaaagcataaaatatgtga

SEQ ID NO: 117309 - RNA, 22 nt, synthetic construct
  source 1..22: mol_type = other RNA
agacaaaggttgcagtgagcag

SEQ ID NO: 117310 - RNA, 22 nt, synthetic construct
  source 1..22: mol_type = other RNA
agacaacacattaataagatca

SEQ ID NO: 117311 - RNA, 22 nt, synthetic construct
  source 1..22: mol_type = other RNA
agacaagactaaaaaattagac

SEQ ID NO: 117312 - RNA, 22 nt, synthetic construct
  source 1..22: mol_type = other RNA
agacaagcaaggaagggcttga

SEQ ID NO: 117313 - RNA, 22 nt, synthetic construct
  source 1..22: mol_type = other RNA
agacaagcacaggcatctctct

SEQ ID NO: 117314 - RNA, 22 nt, synthetic construct
  source 1..22: mol_type = other RNA
agacaagtactgcatgattccc

SEQ ID NO: 117315 - RNA, 22 nt, synthetic construct
  source 1..22: mol_type = other RNA
agacaagttctcctgtgtgcat

SEQ ID NO: 117316 - RNA, 22 nt, synthetic construct
  source 1..22: mol_type = other RNA
agacaagttcttacctcaaagg

SEQ ID NO: 117317 - RNA, 22 nt, synthetic construct
  source 1..22: mol_type = other RNA
agacaataattcttcctgtctt

SEQ ID NO: 117318 - RNA, 22 nt, synthetic construct
  source 1..22: mol_type = other RNA
agacaatactgttatgacaaga

SEQ ID NO: 117319 - RNA, 22 nt, synthetic construct
  source 1..22: mol_type = other RNA
agacaatagctagtgtcttagt

SEQ ID NO: 117320 - RNA, 22 nt, synthetic construct
  source 1..22: mol_type = other RNA
agacaatgtctttggctcttag

SEQ ID NO: 117321 - RNA, 22 nt, synthetic construct
  source 1..22: mol_type = other RNA
agacaatgtggagttggtgcaa

SEQ ID NO: 117322 - RNA, 22 nt, synthetic construct
  source 1..22: mol_type = other RNA
agacacaaaagagctgggcccg

SEQ ID NO: 117323 - RNA, 22 nt, synthetic construct
  source 1..22: mol_type = other RNA
agacacaaaatcagatatgaaa

SEQ ID NO: 117324 - RNA, 22 nt, synthetic construct
  source 1..22: mol_type = other RNA
agacacaaggaaggtcaaatgg

SEQ ID NO: 117325 - RNA, 22 nt, synthetic construct
  source 1..22: mol_type = other RNA
agacacacatcagacacctaca

SEQ ID NO: 117326 - RNA, 22 nt, synthetic construct
  source 1..22: mol_type = other RNA
agacacaccatgacagagttcc

SEQ ID NO: 117327 - RNA, 22 nt, synthetic construct
  source 1..22: mol_type = other RNA
agacacacgagtattcaagttt

SEQ ID NO: 117328 - RNA, 22 nt, synthetic construct
  source 1..22: mol_type = other RNA
agacacactagctgacccactg

SEQ ID NO: 117329 - RNA, 22 nt, synthetic construct
  source 1..22: mol_type = other RNA
agacacatactgaaagacagac

SEQ ID NO: 117330 - RNA, 22 nt, synthetic construct
  source 1..22: mol_type = other RNA
agacacatttttgacagccacg

SEQ ID NO: 117331 - RNA, 22 nt, synthetic construct
  source 1..22: mol_type = other RNA
agacaccgctccacgcccatta

SEQ ID NO: 117332 - RNA, 22 nt, synthetic construct
  source 1..22: mol_type = other RNA
agacacctacaatattaacttt

SEQ ID NO: 117333 - RNA, 22 nt, synthetic construct
  source 1..22: mol_type = other RNA
agacacctacattaatctcatc

SEQ ID NO: 117334 - RNA, 22 nt, synthetic construct
  source 1..22: mol_type = other RNA
agacacggtctcacactgttgt

SEQ ID NO: 117335 - RNA, 22 nt, synthetic construct
  source 1..22: mol_type = other RNA
agacactaactttctattcccc

SEQ ID NO: 117336 - RNA, 22 nt, synthetic construct
  source 1..22: mol_type = other RNA
agacactagctattgtcttttc

SEQ ID NO: 117337 - RNA, 22 nt, synthetic construct
  source 1..22: mol_type = other RNA
agacactagggactggcctcgg

SEQ ID NO: 117338 - RNA, 22 nt, synthetic construct
  source 1..22: mol_type = other RNA
agacactgggttctcaccaaca

SEQ ID NO: 117339 - RNA, 22 nt, synthetic construct
  source 1..22: mol_type = other RNA
agacagaatcttactggtgtta

SEQ ID NO: 117340 - RNA, 22 nt, synthetic construct
  source 1..22: mol_type = other RNA
agacagacatgcatgcacacag

SEQ ID NO: 117341 - RNA, 22 nt, synthetic construct
  source 1..22: mol_type = other RNA
agacagacatttggaatagaga

SEQ ID NO: 117342 - RNA, 22 nt, synthetic construct
  source 1..22: mol_type = other RNA
agacagaccctggcttgtgaca

SEQ ID NO: 117343 - RNA, 22 nt, synthetic construct
  source 1..22: mol_type = other RNA
agacagacctctattaaatcat

SEQ ID NO: 117344 - RNA, 22 nt, synthetic construct
  source 1..22: mol_type = other RNA
agacagagctagaactagaata

SEQ ID NO: 117345 - RNA, 22 nt, synthetic construct
  source 1..22: mol_type = other RNA
agacagagctccctctccctcc

SEQ ID NO: 117346 - RNA, 22 nt, synthetic construct
  source 1..22: mol_type = other RNA
agacagatatatgcattcccat

SEQ ID NO: 117347 - RNA, 22 nt, synthetic construct
  source 1..22: mol_type = other RNA
agacagatcttatggaatagtt

SEQ ID NO: 117348 - RNA, 22 nt, synthetic construct
  source 1..22: mol_type = other RNA
agacagatgtgcttaatcttca

SEQ ID NO: 117349 - RNA, 22 nt, synthetic construct
  source 1..22: mol_type = other RNA
agacagattctctgtctctgtt

SEQ ID NO: 117350 - RNA, 22 nt, synthetic construct
  source 1..22: mol_type = other RNA
agacagcatccccagaaagaga

SEQ ID NO: 117351 - RNA, 22 nt, synthetic construct
  source 1..22: mol_type = other RNA
agacagcctaaaccattttcaa

SEQ ID NO: 117352 - RNA, 22 nt, synthetic construct
  source 1..22: mol_type = other RNA
agacagctaatatgctgtagtg

SEQ ID NO: 117353 - RNA, 22 nt, synthetic construct
  source 1..22: mol_type = other RNA
agacagctactaaacaaatcag

SEQ ID NO: 117354 - RNA, 22 nt, synthetic construct
  source 1..22: mol_type = other RNA
agacaggaagaattattgtctg

SEQ ID NO: 117355 - RNA, 22 nt, synthetic construct
  source 1..22: mol_type = other RNA
agacaggatccagatgtagaga

SEQ ID NO: 117356 - RNA, 22 nt, synthetic construct
  source 1..22: mol_type = other RNA
agacagggaatgcccctgtagc

SEQ ID NO: 117357 - RNA, 22 nt, synthetic construct
  source 1..22: mol_type = other RNA
agacagggaatggggagctaga

SEQ ID NO: 117358 - RNA, 22 nt, synthetic construct
  source 1..22: mol_type = other RNA
agacagggtctcactcttacca

SEQ ID NO: 117359 - RNA, 22 nt, synthetic construct
  source 1..22: mol_type = other RNA
agacaggtagacatgagtaaaa

SEQ ID NO: 117360 - RNA, 22 nt, synthetic construct
  source 1..22: mol_type = other RNA
agacagtattgtgctgaaaccc

SEQ ID NO: 117361 - RNA, 22 nt, synthetic construct
  source 1..22: mol_type = other RNA
agacagtgagcatgctgcaact

SEQ ID NO: 117362 - RNA, 22 nt, synthetic construct
  source 1..22: mol_type = other RNA
agacatcacaatgcgtttgtta

SEQ ID NO: 117363 - RNA, 22 nt, synthetic construct
  source 1..22: mol_type = other RNA
agacatcactaagagtgaaaag

SEQ ID NO: 117364 - RNA, 22 nt, synthetic construct
  source 1..22: mol_type = other RNA
agacatcctgatttaggccact

SEQ ID NO: 117365 - RNA, 22 nt, synthetic construct
  source 1..22: mol_type = other RNA
agacatctgagacatcacaatg

SEQ ID NO: 117366 - RNA, 22 nt, synthetic construct
  source 1..22: mol_type = other RNA
agacatctttcctgtgatttat

SEQ ID NO: 117367 - RNA, 22 nt, synthetic construct
  source 1..22: mol_type = other RNA
agacatgaacaatccttctaat

SEQ ID NO: 117368 - RNA, 22 nt, synthetic construct
  source 1..22: mol_type = other RNA
agacatgagtaaaaagaaatct

SEQ ID NO: 117369 - RNA, 22 nt, synthetic construct
  source 1..22: mol_type = other RNA
agacatgataaatacgtatatg

SEQ ID NO: 117370 - RNA, 22 nt, synthetic construct
  source 1..22: mol_type = other RNA
agacatgcacgagaaaagcaca

SEQ ID NO: 117371 - RNA, 22 nt, synthetic construct
  source 1..22: mol_type = other RNA
agacatgcatgcacacagaggg

SEQ ID NO: 117372 - RNA, 22 nt, synthetic construct
  source 1..22: mol_type = other RNA
agacatgccacaccacatccag

SEQ ID NO: 117373 - RNA, 22 nt, synthetic construct
  source 1..22: mol_type = other RNA
agacatgctgaggccccagggg

SEQ ID NO: 117374 - RNA, 22 nt, synthetic construct
  source 1..22: mol_type = other RNA
agacatggaaacaacctaaatg

SEQ ID NO: 117375 - RNA, 22 nt, synthetic construct
  source 1..22: mol_type = other RNA
agacatgggctaaataaaacat

SEQ ID NO: 117376 - RNA, 22 nt, synthetic construct
  source 1..22: mol_type = other RNA
agacatgttaggttgaaagttc

SEQ ID NO: 117377 - RNA, 22 nt, synthetic construct
  source 1..22: mol_type = other RNA
agacattacaattgataccatg

SEQ ID NO: 117378 - RNA, 22 nt, synthetic construct
  source 1..22: mol_type = other RNA
agacattattcttacagtgaca

SEQ ID NO: 117379 - RNA, 22 nt, synthetic construct
  source 1..22: mol_type = other RNA
agacattgtcttacataggctt

SEQ ID NO: 117380 - RNA, 22 nt, synthetic construct
  source 1..22: mol_type = other RNA
agacatttctcatactttgtca

SEQ ID NO: 117381 - RNA, 22 nt, synthetic construct
  source 1..22: mol_type = other RNA
agacatttgagggtgctgatca

SEQ ID NO: 117382 - RNA, 22 nt, synthetic construct
  source 1..22: mol_type = other RNA
agacatttggaatagagagccc

SEQ ID NO: 117383 - RNA, 22 nt, synthetic construct
  source 1..22: mol_type = other RNA
agacatttgggaatgtggtcac

SEQ ID NO: 117384 - RNA, 22 nt, synthetic construct
  source 1..22: mol_type = other RNA
agacattttatttatacaggtg

SEQ ID NO: 117385 - RNA, 22 nt, synthetic construct
  source 1..22: mol_type = other RNA
agaccaaaatggagacccatac

SEQ ID NO: 117386 - RNA, 22 nt, synthetic construct
  source 1..22: mol_type = other RNA
agaccaagaaaggacttcagtc

SEQ ID NO: 117387 - RNA, 22 nt, synthetic construct
  source 1..22: mol_type = other RNA
agaccaagaattttccattcat

SEQ ID NO: 117388 - RNA, 22 nt, synthetic construct
  source 1..22: mol_type = other RNA
agaccaagagtgtggctttaag

SEQ ID NO: 117389 - RNA, 22 nt, synthetic construct
  source 1..22: mol_type = other RNA
agaccaagtttaaccaattatg

SEQ ID NO: 117390 - RNA, 22 nt, synthetic construct
  source 1..22: mol_type = other RNA
agaccacaaggattaatctttc

SEQ ID NO: 117391 - RNA, 22 nt, synthetic construct
  source 1..22: mol_type = other RNA
agaccacagacgtgcagcacca

SEQ ID NO: 117392 - RNA, 22 nt, synthetic construct
  source 1..22: mol_type = other RNA
agaccacaggctctcttcacca

SEQ ID NO: 117393 - RNA, 22 nt, synthetic construct
  source 1..22: mol_type = other RNA
agaccaccacacttgcttggga

SEQ ID NO: 117394 - RNA, 22 nt, synthetic construct
  source 1..22: mol_type = other RNA
agaccagatgcgtggttcacac

SEQ ID NO: 117395 - RNA, 22 nt, synthetic construct
  source 1..22: mol_type = other RNA
agaccagcagttcaagcaccac

SEQ ID NO: 117396 - RNA, 22 nt, synthetic construct
  source 1..22: mol_type = other RNA
agaccaggagttcttatgaggt

SEQ ID NO: 117397 - RNA, 22 nt, synthetic construct
  source 1..22: mol_type = other RNA
agaccagttaggaagccactgc

SEQ ID NO: 117398 - RNA, 22 nt, synthetic construct
  source 1..22: mol_type = other RNA
agaccatataatctaaccctcc

SEQ ID NO: 117399 - RNA, 22 nt, synthetic construct
  source 1..22: mol_type = other RNA
agacccaaagcaaaagcaaaat

SEQ ID NO: 117400 - RNA, 22 nt, synthetic construct
  source 1..22: mol_type = other RNA
agacccagtggctagtgtgttg

SEQ ID NO: 117401 - RNA, 22 nt, synthetic construct
  source 1..22: mol_type = other RNA
agacccatactcagccccctcg

SEQ ID NO: 117402 - RNA, 22 nt, synthetic construct
  source 1..22: mol_type = other RNA
agaccccagtagaaatcttcca

SEQ ID NO: 117403 - RNA, 22 nt, synthetic construct
  source 1..22: mol_type = other RNA
agaccccatctctaccaaaata

SEQ ID NO: 117404 - RNA, 22 nt, synthetic construct
  source 1..22: mol_type = other RNA
agacccctcaggtgtcactgga

SEQ ID NO: 117405 - RNA, 22 nt, synthetic construct
  source 1..22: mol_type = other RNA
agacccgccgcagagccggacc

SEQ ID NO: 117406 - RNA, 22 nt, synthetic construct
  source 1..22: mol_type = other RNA
agaccctggcttgtgacatcaa

SEQ ID NO: 117407 - RNA, 22 nt, synthetic construct
  source 1..22: mol_type = other RNA
agaccctgtctctaaaaaatac

SEQ ID NO: 117408 - RNA, 22 nt, synthetic construct
  source 1..22: mol_type = other RNA
agaccctgttagtcccctagtg

SEQ ID NO: 117409 - RNA, 22 nt, synthetic construct
  source 1..22: mol_type = other RNA
agacccttatgtccagccccca

SEQ ID NO: 117410 - RNA, 22 nt, synthetic construct
  source 1..22: mol_type = other RNA
agaccctttatcggataaggaa

SEQ ID NO: 117411 - RNA, 22 nt, synthetic construct
  source 1..22: mol_type = other RNA
agaccgaggaaacccgctctgg

SEQ ID NO: 117412 - RNA, 22 nt, synthetic construct
  source 1..22: mol_type = other RNA
agaccgcaagagttccaactgt

SEQ ID NO: 117413 - RNA, 22 nt, synthetic construct
  source 1..22: mol_type = other RNA
agaccggatgaggtggctcacg

SEQ ID NO: 117414 - RNA, 22 nt, synthetic construct
  source 1..22: mol_type = other RNA
agaccggggactgcaacagatc

SEQ ID NO: 117415 - RNA, 22 nt, synthetic construct
  source 1..22: mol_type = other RNA
agaccgtggggggagggagggg

SEQ ID NO: 117416 - RNA, 22 nt, synthetic construct
  source 1..22: mol_type = other RNA
agacctaagcttaagagctaag

SEQ ID NO: 117417 - RNA, 22 nt, synthetic construct
  source 1..22: mol_type = other RNA
agacctactaaaagttgacaaa

SEQ ID NO: 117418 - RNA, 22 nt, synthetic construct
  source 1..22: mol_type = other RNA
agacctcaaattaatcagtctg

SEQ ID NO: 117419 - RNA, 22 nt, synthetic construct
  source 1..22: mol_type = other RNA
agacctcaaattctgagggaaa

SEQ ID NO: 117420 - RNA, 22 nt, synthetic construct
  source 1..22: mol_type = other RNA
agacctcaggcagtctagtcca

SEQ ID NO: 117421 - RNA, 22 nt, synthetic construct
  source 1..22: mol_type = other RNA
agacctcaggtttagaatatat

SEQ ID NO: 117422 - RNA, 22 nt, synthetic construct
  source 1..22: mol_type = other RNA
agacctcatctctgcaaaacat

SEQ ID NO: 117423 - RNA, 22 nt, synthetic construct
  source 1..22: mol_type = other RNA
agacctcatcttagccgggagg

SEQ ID NO: 117424 - RNA, 22 nt, synthetic construct
  source 1..22: mol_type = other RNA
agacctcctagattgaccttct

SEQ ID NO: 117425 - RNA, 22 nt, synthetic construct
  source 1..22: mol_type = other RNA
agacctctattaaatcatgatg

SEQ ID NO: 117426 - RNA, 22 nt, synthetic construct
  source 1..22: mol_type = other RNA
agacctctgaagagtctatctt

SEQ ID NO: 117427 - RNA, 22 nt, synthetic construct
  source 1..22: mol_type = other RNA
agacctgaagactggatttgat

SEQ ID NO: 117428 - RNA, 22 nt, synthetic construct
  source 1..22: mol_type = other RNA
agacctgaatgactgttgcctc

SEQ ID NO: 117429 - RNA, 22 nt, synthetic construct
  source 1..22: mol_type = other RNA
agacctgattcttccactagtg

SEQ ID NO: 117430 - RNA, 22 nt, synthetic construct
  source 1..22: mol_type = other RNA
agacctgcacaaaggattggga

SEQ ID NO: 117431 - RNA, 22 nt, synthetic construct
  source 1..22: mol_type = other RNA
agacctgcagtctgcaggcaga

SEQ ID NO: 117432 - RNA, 22 nt, synthetic construct
  source 1..22: mol_type = other RNA
agaccttattcaaataattgct

SEQ ID NO: 117433 - RNA, 22 nt, synthetic construct
  source 1..22: mol_type = other RNA
agacctttcttaggtttctcat

SEQ ID NO: 117434 - RNA, 22 nt, synthetic construct
  source 1..22: mol_type = other RNA
agacgatattcctatcagaagc

SEQ ID NO: 117435 - RNA, 22 nt, synthetic construct
  source 1..22: mol_type = other RNA
agacgcaaaggatgtcaacaaa

SEQ ID NO: 117436 - RNA, 22 nt, synthetic construct
  source 1..22: mol_type = other RNA
agacggaaaaacattctacagt

SEQ ID NO: 117437 - RNA, 22 nt, synthetic construct
  source 1..22: mol_type = other RNA
agacggaagactcatacttcct

SEQ ID NO: 117438 - RNA, 22 nt, synthetic construct
  source 1..22: mol_type = other RNA
agacggaatcttaccctgttga

SEQ ID NO: 117439 - RNA, 22 nt, synthetic construct
  source 1..22: mol_type = other RNA
agacggcgagcttgatctttac

SEQ ID NO: 117440 - RNA, 22 nt, synthetic construct
  source 1..22: mol_type = other RNA
agacggcgtttcgccatgttgg

SEQ ID NO: 117441 - RNA, 22 nt, synthetic construct
  source 1..22: mol_type = other RNA
agacgtgagccaccgcacctgg

SEQ ID NO: 117442 - RNA, 22 nt, synthetic construct
  source 1..22: mol_type = other RNA
agacgttcagataacaaagggt

SEQ ID NO: 117443 - RNA, 22 nt, synthetic construct
  source 1..22: mol_type = other RNA
agactaagaaaaacagaagaca

SEQ ID NO: 117444 - RNA, 22 nt, synthetic construct
  source 1..22: mol_type = other RNA
agactaagacactagctattgt

SEQ ID NO: 117445 - RNA, 22 nt, synthetic construct
  source 1..22: mol_type = other RNA
agactaagcagaaatgacaagt

SEQ ID NO: 117446 - RNA, 22 nt, synthetic construct
  source 1..22: mol_type = other RNA
agactaatatgagttcctgctt

SEQ ID NO: 117447 - RNA, 22 nt, synthetic construct
  source 1..22: mol_type = other RNA
agactacctaaaacaatctaca

SEQ ID NO: 117448 - RNA, 22 nt, synthetic construct
  source 1..22: mol_type = other RNA
agactagtacactgttgattta

SEQ ID NO: 117449 - RNA, 22 nt, synthetic construct
  source 1..22: mol_type = other RNA
agactataaaactcttagctta

SEQ ID NO: 117450 - RNA, 22 nt, synthetic construct
  source 1..22: mol_type = other RNA
agactatcacgattctgaccca

SEQ ID NO: 117451 - RNA, 22 nt, synthetic construct
  source 1..22: mol_type = other RNA
agactatcgttatatcctcagg

SEQ ID NO: 117452 - RNA, 22 nt, synthetic construct
  source 1..22: mol_type = other RNA
agactatctcttcctcctctgg

SEQ ID NO: 117453 - RNA, 22 nt, synthetic construct
  source 1..22: mol_type = other RNA
agactatgagaaggattagtgt

SEQ ID NO: 117454 - RNA, 22 nt, synthetic construct
  source 1..22: mol_type = other RNA
agactattatgagcagttgtat

SEQ ID NO: 117455 - RNA, 22 nt, synthetic construct
  source 1..22: mol_type = other RNA
agactcaacatgtgtatttagg

SEQ ID NO: 117456 - RNA, 22 nt, synthetic construct
  source 1..22: mol_type = other RNA
agactcaagcctgataagctcc

SEQ ID NO: 117457 - RNA, 22 nt, synthetic construct
  source 1..22: mol_type = other RNA
agactcaataaccacatgtggc

SEQ ID NO: 117458 - RNA, 22 nt, synthetic construct
  source 1..22: mol_type = other RNA
agactcagcagttttaaagaat

SEQ ID NO: 117459 - RNA, 22 nt, synthetic construct
  source 1..22: mol_type = other RNA
agactcattgcctatagacagc

SEQ ID NO: 117460 - RNA, 22 nt, synthetic construct
  source 1..22: mol_type = other RNA
agactccaactcaaaaaagaaa

SEQ ID NO: 117461 - RNA, 22 nt, synthetic construct
  source 1..22: mol_type = other RNA
agactccatctcaagaaaacaa

SEQ ID NO: 117462 - RNA, 22 nt, synthetic construct
  source 1..22: mol_type = other RNA
agactcccaacttataatatta

SEQ ID NO: 117463 - RNA, 22 nt, synthetic construct
  source 1..22: mol_type = other RNA
agactccttcccctggtcgagc

SEQ ID NO: 117464 - RNA, 22 nt, synthetic construct
  source 1..22: mol_type = other RNA
agactcggtctcaaaacaaaca

SEQ ID NO: 117465 - RNA, 22 nt, synthetic construct
  source 1..22: mol_type = other RNA
agactctcaagaaggtatcatc

SEQ ID NO: 117466 - RNA, 22 nt, synthetic construct
  source 1..22: mol_type = other RNA
agactcttaatattgaaacgat

SEQ ID NO: 117467 - RNA, 22 nt, synthetic construct
  source 1..22: mol_type = other RNA
agactcttcagaggtctgttac

SEQ ID NO: 117468 - RNA, 22 nt, synthetic construct
  source 1..22: mol_type = other RNA
agactcttgtcccggcatgcct

SEQ ID NO: 117469 - RNA, 22 nt, synthetic construct
  source 1..22: mol_type = other RNA
agactgaatcatgaagaaatag

SEQ ID NO: 117470 - RNA, 22 nt, synthetic construct
  source 1..22: mol_type = other RNA
agactgaccaacatggacaaac

SEQ ID NO: 117471 - RNA, 22 nt, synthetic construct
  source 1..22: mol_type = other RNA
agactgagccagcaaatcagaa

SEQ ID NO: 117472 - RNA, 22 nt, synthetic construct
  source 1..22: mol_type = other RNA
agactgagtaatattccattgt

SEQ ID NO: 117473 - RNA, 22 nt, synthetic construct
  source 1..22: mol_type = other RNA
agactgataaacttcagttttg

SEQ ID NO: 117474 - RNA, 22 nt, synthetic construct
  source 1..22: mol_type = other RNA
agactgattaatttgaggtcta

SEQ ID NO: 117475 - RNA, 22 nt, synthetic construct
  source 1..22: mol_type = other RNA
agactgcacataaaaggatatg

SEQ ID NO: 117476 - RNA, 22 nt, synthetic construct
  source 1..22: mol_type = other RNA
agactgcaggtcttcaacctca

SEQ ID NO: 117477 - RNA, 22 nt, synthetic construct
  source 1..22: mol_type = other RNA
agactgcagtgacctatcattg

SEQ ID NO: 117478 - RNA, 22 nt, synthetic construct
  source 1..22: mol_type = other RNA
agactgcagttggattatatgt

SEQ ID NO: 117479 - RNA, 22 nt, synthetic construct
  source 1..22: mol_type = other RNA
agactgccaggtagggaggggt

SEQ ID NO: 117480 - RNA, 22 nt, synthetic construct
  source 1..22: mol_type = other RNA
agactgcctgaggtctcaaaat

SEQ ID NO: 117481 - RNA, 22 nt, synthetic construct
  source 1..22: mol_type = other RNA
agactgctgtttaccaagggtg

SEQ ID NO: 117482 - RNA, 22 nt, synthetic construct
  source 1..22: mol_type = other RNA
agactggaaaagtgttgactac

SEQ ID NO: 117483 - RNA, 22 nt, synthetic construct
  source 1..22: mol_type = other RNA
agactggagttcactggcacaa

SEQ ID NO: 117484 - RNA, 22 nt, synthetic construct
  source 1..22: mol_type = other RNA
agactggatagcaacttgcaga

SEQ ID NO: 117485 - RNA, 22 nt, synthetic construct
  source 1..22: mol_type = other RNA
agactggatcctggagggctcc

SEQ ID NO: 117486 - RNA, 22 nt, synthetic construct
  source 1..22: mol_type = other RNA
agactggattaaggagatggca

SEQ ID NO: 117487 - RNA, 22 nt, synthetic construct
  source 1..22: mol_type = other RNA
agactggatttgattgggcatt

SEQ ID NO: 117488 - RNA, 22 nt, synthetic construct
  source 1..22: mol_type = other RNA
agactgggcaacagagacagag

SEQ ID NO: 117489 - RNA, 22 nt, synthetic construct
  source 1..22: mol_type = other RNA
agactgtaaaaattttctccca

SEQ ID NO: 117490 - RNA, 22 nt, synthetic construct
  source 1..22: mol_type = other RNA
agactgtaatgagctgagattg

SEQ ID NO: 117491 - RNA, 22 nt, synthetic construct
  source 1..22: mol_type = other RNA
agactgtattaccagcttacag

SEQ ID NO: 117492 - RNA, 22 nt, synthetic construct
  source 1..22: mol_type = other RNA
agactgtgccttgatccattac

SEQ ID NO: 117493 - RNA, 22 nt, synthetic construct
  source 1..22: mol_type = other RNA
agactgtgcttccacagctatc

SEQ ID NO: 117494 - RNA, 22 nt, synthetic construct
  source 1..22: mol_type = other RNA
agactgttagggacttatggag

SEQ ID NO: 117495 - RNA, 22 nt, synthetic construct
  source 1..22: mol_type = other RNA
agacttaactataggagttcat

SEQ ID NO: 117496 - RNA, 22 nt, synthetic construct
  source 1..22: mol_type = other RNA
agacttaggagaaaagcttcat

SEQ ID NO: 117497 - RNA, 22 nt, synthetic construct
  source 1..22: mol_type = other RNA
agacttaggcaaaggaaaaatc

SEQ ID NO: 117498 - RNA, 22 nt, synthetic construct
  source 1..22: mol_type = other RNA
agacttcaacggacatttttcc

SEQ ID NO: 117499 - RNA, 22 nt, synthetic construct
  source 1..22: mol_type = other RNA
agacttcacgatgcttaggtaa

SEQ ID NO: 117500 - RNA, 22 nt, synthetic construct
  source 1..22: mol_type = other RNA
agacttcaggaacaccttgaac

SEQ ID NO: 117501 - RNA, 22 nt, synthetic construct
  source 1..22: mol_type = other RNA
agacttctcaaacaggatacaa

SEQ ID NO: 117502 - RNA, 22 nt, synthetic construct
  source 1..22: mol_type = other RNA
agacttgaggtttacttgggga

SEQ ID NO: 117503 - RNA, 22 nt, synthetic construct
  source 1..22: mol_type = other RNA
agactttagagtcagttgttta

SEQ ID NO: 117504 - RNA, 22 nt, synthetic construct
  source 1..22: mol_type = other RNA
agactttatggtaattggttcg

SEQ ID NO: 117505 - RNA, 22 nt, synthetic construct
  source 1..22: mol_type = other RNA
agactttcactgctcagtccct

SEQ ID NO: 117506 - RNA, 22 nt, synthetic construct
  source 1..22: mol_type = other RNA
agactttgttttgtttttctct

SEQ ID NO: 117507 - RNA, 22 nt, synthetic construct
  source 1..22: mol_type = other RNA
agagaaaaacaaaacaaagtct

SEQ ID NO: 117508 - RNA, 22 nt, synthetic construct
  source 1..22: mol_type = other RNA
agagaaaaattacaggtcaaac

SEQ ID NO: 117509 - RNA, 22 nt, synthetic construct
  source 1..22: mol_type = other RNA
agagaaaatgttatacagcaaa

SEQ ID NO: 117510 - RNA, 22 nt, synthetic construct
  source 1..22: mol_type = other RNA
agagaaaattgttcatgaaatc

SEQ ID NO: 117511 - RNA, 22 nt, synthetic construct
  source 1..22: mol_type = other RNA
agagaaacaggattacaatgta

SEQ ID NO: 117512 - RNA, 22 nt, synthetic construct
  source 1..22: mol_type = other RNA
agagaaaccttggtgtgcttct

SEQ ID NO: 117513 - RNA, 22 nt, synthetic construct
  source 1..22: mol_type = other RNA
agagaaactggaatcaatccag

SEQ ID NO: 117514 - RNA, 22 nt, synthetic construct
  source 1..22: mol_type = other RNA
agagaaagaagtaatttcttct

SEQ ID NO: 117515 - RNA, 22 nt, synthetic construct
  source 1..22: mol_type = other RNA
agagaaagagagagacaagcac

SEQ ID NO: 117516 - RNA, 22 nt, synthetic construct
  source 1..22: mol_type = other RNA
agagaaagcatcagagctttgt

SEQ ID NO: 117517 - RNA, 22 nt, synthetic construct
  source 1..22: mol_type = other RNA
agagaaatagttaacgtttatc

SEQ ID NO: 117518 - RNA, 22 nt, synthetic construct
  source 1..22: mol_type = other RNA
agagaaatgcaaatcaaaacaa

SEQ ID NO: 117519 - RNA, 22 nt, synthetic construct
  source 1..22: mol_type = other RNA
agagaacaaaatacctgggaat

SEQ ID NO: 117520 - RNA, 22 nt, synthetic construct
  source 1..22: mol_type = other RNA
agagaacaatggaatagaaggg

SEQ ID NO: 117521 - RNA, 22 nt, synthetic construct
  source 1..22: mol_type = other RNA
agagaacacacaatttgaggta

SEQ ID NO: 117522 - RNA, 22 nt, synthetic construct
  source 1..22: mol_type = other RNA
agagaacagcattatcttaata

SEQ ID NO: 117523 - RNA, 22 nt, synthetic construct
  source 1..22: mol_type = other RNA
agagaacattggtttgaaatga

SEQ ID NO: 117524 - RNA, 22 nt, synthetic construct
  source 1..22: mol_type = other RNA
agagaactgactgaaggattcc

SEQ ID NO: 117525 - RNA, 22 nt, synthetic construct
  source 1..22: mol_type = other RNA
agagaacttgcacataatataa

SEQ ID NO: 117526 - RNA, 22 nt, synthetic construct
  source 1..22: mol_type = other RNA
agagaagaatgagaaacataca

SEQ ID NO: 117527 - RNA, 22 nt, synthetic construct
  source 1..22: mol_type = other RNA
agagaagagggggcataacatc

SEQ ID NO: 117528 - RNA, 22 nt, synthetic construct
  source 1..22: mol_type = other RNA
agagaagatgacatttgctttt

SEQ ID NO: 117529 - RNA, 22 nt, synthetic construct
  source 1..22: mol_type = other RNA
agagaaggaagcaccaaccctt

SEQ ID NO: 117530 - RNA, 22 nt, synthetic construct
  source 1..22: mol_type = other RNA
agagaaggctgccagcaccaga

SEQ ID NO: 117531 - RNA, 22 nt, synthetic construct
  source 1..22: mol_type = other RNA
agagaaggctttgtgttggtgt

SEQ ID NO: 117532 - RNA, 22 nt, synthetic construct
  source 1..22: mol_type = other RNA
agagaagtcagactaagacact

SEQ ID NO: 117533 - RNA, 22 nt, synthetic construct
  source 1..22: mol_type = other RNA
agagaagtgaagcttcaaacca

SEQ ID NO: 117534 - RNA, 22 nt, synthetic construct
  source 1..22: mol_type = other RNA
agagaagttttccaggaaaagc

SEQ ID NO: 117535 - RNA, 22 nt, synthetic construct
  source 1..22: mol_type = other RNA
agagaatagcagaaacacagga

SEQ ID NO: 117536 - RNA, 22 nt, synthetic construct
  source 1..22: mol_type = other RNA
agagaatcttaaaataccagag

SEQ ID NO: 117537 - RNA, 22 nt, synthetic construct
  source 1..22: mol_type = other RNA
agagaatggaaacttgccatct

SEQ ID NO: 117538 - RNA, 22 nt, synthetic construct
  source 1..22: mol_type = other RNA
agagaatggctggaatggtgaa

SEQ ID NO: 117539 - RNA, 22 nt, synthetic construct
  source 1..22: mol_type = other RNA
agagaattcagagtggctaatg

SEQ ID NO: 117540 - RNA, 22 nt, synthetic construct
  source 1..22: mol_type = other RNA
agagaattctaaattgcctata

SEQ ID NO: 117541 - RNA, 22 nt, synthetic construct
  source 1..22: mol_type = other RNA
agagacaaagcataaaatatgt

SEQ ID NO: 117542 - RNA, 22 nt, synthetic construct
  source 1..22: mol_type = other RNA
agagacaagcacaggcatctct

SEQ ID NO: 117543 - RNA, 22 nt, synthetic construct
  source 1..22: mol_type = other RNA
agagacacacatcagacaccta

SEQ ID NO: 117544 - RNA, 22 nt, synthetic construct
  source 1..22: mol_type = other RNA
agagacacatactgaaagacag

SEQ ID NO: 117545 - RNA, 22 nt, synthetic construct
  source 1..22: mol_type = other RNA
agagacagaatcttactggtgt

SEQ ID NO: 117546 - RNA, 22 nt, synthetic construct
  source 1..22: mol_type = other RNA
agagacagagaatctgtctcaa

SEQ ID NO: 117547 - RNA, 22 nt, synthetic construct
  source 1..22: mol_type = other RNA
agagaccacaggctctcttcac

SEQ ID NO: 117548 - RNA, 22 nt, synthetic construct
  source 1..22: mol_type = other RNA
agagacctgaagactggatttg

SEQ ID NO: 117549 - RNA, 22 nt, synthetic construct
  source 1..22: mol_type = other RNA
agagacctgattcttccactag

SEQ ID NO: 117550 - RNA, 22 nt, synthetic construct
  source 1..22: mol_type = other RNA
agagacctttctttaaaagtaa

SEQ ID NO: 117551 - RNA, 22 nt, synthetic construct
  source 1..22: mol_type = other RNA
agagacggcgtttcgccatgtt

SEQ ID NO: 117552 - RNA, 22 nt, synthetic construct
  source 1..22: mol_type = other RNA
agagactatctcttcctcctct

SEQ ID NO: 117553 - RNA, 22 nt, synthetic construct
  source 1..22: mol_type = other RNA
agagactctcaagaaggtatca

SEQ ID NO: 117554 - RNA, 22 nt, synthetic construct
  source 1..22: mol_type = other RNA
agagactggatagcaacttgca

SEQ ID NO: 117555 - RNA, 22 nt, synthetic construct
  source 1..22: mol_type = other RNA
agagactggatcctggagggct

SEQ ID NO: 117556 - RNA, 22 nt, synthetic construct
  source 1..22: mol_type = other RNA
agagactgtgcttccacagcta

SEQ ID NO: 117557 - RNA, 22 nt, synthetic construct
  source 1..22: mol_type = other RNA
agagagaaactttacactttaa

SEQ ID NO: 117558 - RNA, 22 nt, synthetic construct
  source 1..22: mol_type = other RNA
agagagaaagagagagacaagc

SEQ ID NO: 117559 - RNA, 22 nt, synthetic construct
  source 1..22: mol_type = other RNA
agagagaagatgacatttgctt

SEQ ID NO: 117560 - RNA, 22 nt, synthetic construct
  source 1..22: mol_type = other RNA
agagagaaggctgccagcacca

SEQ ID NO: 117561 - RNA, 22 nt, synthetic construct
  source 1..22: mol_type = other RNA
agagagaattctaaattgccta

SEQ ID NO: 117562 - RNA, 22 nt, synthetic construct
  source 1..22: mol_type = other RNA
agagagacaagcacaggcatct

SEQ ID NO: 117563 - RNA, 22 nt, synthetic construct
  source 1..22: mol_type = other RNA
agagagacctgaagactggatt

SEQ ID NO: 117564 - RNA, 22 nt, synthetic construct
  source 1..22: mol_type = other RNA
agagagacctttctttaaaagt

SEQ ID NO: 117565 - RNA, 22 nt, synthetic construct
  source 1..22: mol_type = other RNA
agagagagaaagagagagacaa

SEQ ID NO: 117566 - RNA, 22 nt, synthetic construct
  source 1..22: mol_type = other RNA
agagagagaagatgacatttgc

SEQ ID NO: 117567 - RNA, 22 nt, synthetic construct
  source 1..22: mol_type = other RNA
agagagagacaagcacaggcat

SEQ ID NO: 117568 - RNA, 22 nt, synthetic construct
  source 1..22: mol_type = other RNA
agagagagacctttctttaaaa

SEQ ID NO: 117569 - RNA, 22 nt, synthetic construct
  source 1..22: mol_type = other RNA
agagagagagaaagagagagac

SEQ ID NO: 117570 - RNA, 22 nt, synthetic construct
  source 1..22: mol_type = other RNA
agagagaggggggaagcttttc

SEQ ID NO: 117571 - RNA, 22 nt, synthetic construct
  source 1..22: mol_type = other RNA
agagagagtaactggtccagat

SEQ ID NO: 117572 - RNA, 22 nt, synthetic construct
  source 1..22: mol_type = other RNA
agagagataaaacctggaatgg

SEQ ID NO: 117573 - RNA, 22 nt, synthetic construct
  source 1..22: mol_type = other RNA
agagagatgcctgtgcttgtct

SEQ ID NO: 117574 - RNA, 22 nt, synthetic construct
  source 1..22: mol_type = other RNA
agagagatggtgggagaggcat

SEQ ID NO: 117575 - RNA, 22 nt, synthetic construct
  source 1..22: mol_type = other RNA
agagagattaaataacttccat

SEQ ID NO: 117576 - RNA, 22 nt, synthetic construct
  source 1..22: mol_type = other RNA
agagagattcaagaaaccacag

SEQ ID NO: 117577 - RNA, 22 nt, synthetic construct
  source 1..22: mol_type = other RNA
agagagcaagactcaaatctca

SEQ ID NO: 117578 - RNA, 22 nt, synthetic construct
  source 1..22: mol_type = other RNA
agagagcaagtccccatctcca

SEQ ID NO: 117579 - RNA, 22 nt, synthetic construct
  source 1..22: mol_type = other RNA
agagagcattgcctttattact

SEQ ID NO: 117580 - RNA, 22 nt, synthetic construct
  source 1..22: mol_type = other RNA
agagagcccagaaataaatcct

SEQ ID NO: 117581 - RNA, 22 nt, synthetic construct
  source 1..22: mol_type = other RNA
agagagcctgtggtctcttcga

SEQ ID NO: 117582 - RNA, 22 nt, synthetic construct
  source 1..22: mol_type = other RNA
agagaggaagtgaccctgagtc

SEQ ID NO: 117583 - RNA, 22 nt, synthetic construct
  source 1..22: mol_type = other RNA
agagaggaataaatggtagctt

SEQ ID NO: 117584 - RNA, 22 nt, synthetic construct
  source 1..22: mol_type = other RNA
agagaggacagttggccttgag

SEQ ID NO: 117585 - RNA, 22 nt, synthetic construct
  source 1..22: mol_type = other RNA
agagaggctaggtgacctgcca

SEQ ID NO: 117586 - RNA, 22 nt, synthetic construct
  source 1..22: mol_type = other RNA
agagaggctttttattagattt

SEQ ID NO: 117587 - RNA, 22 nt, synthetic construct
  source 1..22: mol_type = other RNA
agagaggggggaagcttttcat

SEQ ID NO: 117588 - RNA, 22 nt, synthetic construct
  source 1..22: mol_type = other RNA
agagagtaaaataaaagctcta

SEQ ID NO: 117589 - RNA, 22 nt, synthetic construct
  source 1..22: mol_type = other RNA
agagagtaactggtccagatga

SEQ ID NO: 117590 - RNA, 22 nt, synthetic construct
  source 1..22: mol_type = other RNA
agagagtgacagctgagtagcg

SEQ ID NO: 117591 - RNA, 22 nt, synthetic construct
  source 1..22: mol_type = other RNA
agagagtggaaagagccagcct

SEQ ID NO: 117592 - RNA, 22 nt, synthetic construct
  source 1..22: mol_type = other RNA
agagataaaacctggaatgggt

SEQ ID NO: 117593 - RNA, 22 nt, synthetic construct
  source 1..22: mol_type = other RNA
agagataactaatgagaatttc

SEQ ID NO: 117594 - RNA, 22 nt, synthetic construct
  source 1..22: mol_type = other RNA
agagataactgggtgtgcacgt

SEQ ID NO: 117595 - RNA, 22 nt, synthetic construct
  source 1..22: mol_type = other RNA
agagatagaaagcaccagggcc

SEQ ID NO: 117596 - RNA, 22 nt, synthetic construct
  source 1..22: mol_type = other RNA
agagatagtctcttcctgtata

SEQ ID NO: 117597 - RNA, 22 nt, synthetic construct
  source 1..22: mol_type = other RNA
agagatctagtgaagtcaattt

SEQ ID NO: 117598 - RNA, 22 nt, synthetic construct
  source 1..22: mol_type = other RNA
agagatctgaaattgacttcac

SEQ ID NO: 117599 - RNA, 22 nt, synthetic construct
  source 1..22: mol_type = other RNA
agagatcttgtgtatcttttgt

SEQ ID NO: 117600 - RNA, 22 nt, synthetic construct
  source 1..22: mol_type = other RNA
agagatgaatggataaggaaaa

SEQ ID NO: 117601 - RNA, 22 nt, synthetic construct
  source 1..22: mol_type = other RNA
agagatgaggttttacgatgtt

SEQ ID NO: 117602 - RNA, 22 nt, synthetic construct
  source 1..22: mol_type = other RNA
agagatgcctatgaaatcttga

SEQ ID NO: 117603 - RNA, 22 nt, synthetic construct
  source 1..22: mol_type = other RNA
agagatgcctgtgcttgtctct

SEQ ID NO: 117604 - RNA, 22 nt, synthetic construct
  source 1..22: mol_type = other RNA
agagatgggaaagtattcccaa

SEQ ID NO: 117605 - RNA, 22 nt, synthetic construct
  source 1..22: mol_type = other RNA
agagatggggtctcattgtgtt

SEQ ID NO: 117606 - RNA, 22 nt, synthetic construct
  source 1..22: mol_type = other RNA
agagatggtagtcaacactttt

SEQ ID NO: 117607 - RNA, 22 nt, synthetic construct
  source 1..22: mol_type = other RNA
agagatggtgggagaggcatgc

SEQ ID NO: 117608 - RNA, 22 nt, synthetic construct
  source 1..22: mol_type = other RNA
agagattaaataacttccatga

SEQ ID NO: 117609 - RNA, 22 nt, synthetic construct
  source 1..22: mol_type = other RNA
agagattaattcagtcaacacc

SEQ ID NO: 117610 - RNA, 22 nt, synthetic construct
  source 1..22: mol_type = other RNA
agagattaggcagaaccacctg

SEQ ID NO: 117611 - RNA, 22 nt, synthetic construct
  source 1..22: mol_type = other RNA
agagattcaagaaaccacagag

SEQ ID NO: 117612 - RNA, 22 nt, synthetic construct
  source 1..22: mol_type = other RNA
agagattgggaaaatcttggaa

SEQ ID NO: 117613 - RNA, 22 nt, synthetic construct
  source 1..22: mol_type = other RNA
agagattgtcgttgagtacctc

SEQ ID NO: 117614 - RNA, 22 nt, synthetic construct
  source 1..22: mol_type = other RNA
agagatttgctgtataacattt

SEQ ID NO: 117615 - RNA, 22 nt, synthetic construct
  source 1..22: mol_type = other RNA
agagattttcccaaagatagac

SEQ ID NO: 117616 - RNA, 22 nt, synthetic construct
  source 1..22: mol_type = other RNA
agagcaaactcagatctgagag

SEQ ID NO: 117617 - RNA, 22 nt, synthetic construct
  source 1..22: mol_type = other RNA
agagcaacaacctgtctcaaaa

SEQ ID NO: 117618 - RNA, 22 nt, synthetic construct
  source 1..22: mol_type = other RNA
agagcaagactcaaatctcaaa

SEQ ID NO: 117619 - RNA, 22 nt, synthetic construct
  source 1..22: mol_type = other RNA
agagcaagcaacaccagatact

SEQ ID NO: 117620 - RNA, 22 nt, synthetic construct
  source 1..22: mol_type = other RNA
agagcaagcacgttagcatcac

SEQ ID NO: 117621 - RNA, 22 nt, synthetic construct
  source 1..22: mol_type = other RNA
agagcaagtccccatctccaca

SEQ ID NO: 117622 - RNA, 22 nt, synthetic construct
  source 1..22: mol_type = other RNA
agagcacaccaagacatgttag

SEQ ID NO: 117623 - RNA, 22 nt, synthetic construct
  source 1..22: mol_type = other RNA
agagcacagactcaagcctgat

SEQ ID NO: 117624 - RNA, 22 nt, synthetic construct
  source 1..22: mol_type = other RNA
agagcactggtttcagtacacg

SEQ ID NO: 117625 - RNA, 22 nt, synthetic construct
  source 1..22: mol_type = other RNA
agagcactttcgtatttttgtt

SEQ ID NO: 117626 - RNA, 22 nt, synthetic construct
  source 1..22: mol_type = other RNA
agagcagaactccacctcagaa

SEQ ID NO: 117627 - RNA, 22 nt, synthetic construct
  source 1..22: mol_type = other RNA
agagcagagacacacatcagac

SEQ ID NO: 117628 - RNA, 22 nt, synthetic construct
  source 1..22: mol_type = other RNA
agagcagcactgatgtgtagtt

SEQ ID NO: 117629 - RNA, 22 nt, synthetic construct
  source 1..22: mol_type = other RNA
agagcaggctccacttgggtgg

SEQ ID NO: 117630 - RNA, 22 nt, synthetic construct
  source 1..22: mol_type = other RNA
agagcaggggtggggggatgta

SEQ ID NO: 117631 - RNA, 22 nt, synthetic construct
  source 1..22: mol_type = other RNA
agagcaggtggaaggcctgata

SEQ ID NO: 117632 - RNA, 22 nt, synthetic construct
  source 1..22: mol_type = other RNA
agagcagtaggcttagatagga

SEQ ID NO: 117633 - RNA, 22 nt, synthetic construct
  source 1..22: mol_type = other RNA
agagcagtgtgttctgccttga

SEQ ID NO: 117634 - RNA, 22 nt, synthetic construct
  source 1..22: mol_type = other RNA
agagcatagactttagagtcag

SEQ ID NO: 117635 - RNA, 22 nt, synthetic construct
  source 1..22: mol_type = other RNA
agagcatgtcccctggagttaa

SEQ ID NO: 117636 - RNA, 22 nt, synthetic construct
  source 1..22: mol_type = other RNA
agagcatgttgggccaacttcc

SEQ ID NO: 117637 - RNA, 22 nt, synthetic construct
  source 1..22: mol_type = other RNA
agagcattgcctttattactat

SEQ ID NO: 117638 - RNA, 22 nt, synthetic construct
  source 1..22: mol_type = other RNA
agagccaaagacattgtcttac

SEQ ID NO: 117639 - RNA, 22 nt, synthetic construct
  source 1..22: mol_type = other RNA
agagccagcctgatgatgatgg

SEQ ID NO: 117640 - RNA, 22 nt, synthetic construct
  source 1..22: mol_type = other RNA
agagccaggaagtcagcaactc

SEQ ID NO: 117641 - RNA, 22 nt, synthetic construct
  source 1..22: mol_type = other RNA
agagcccagaaataaatcctca

SEQ ID NO: 117642 - RNA, 22 nt, synthetic construct
  source 1..22: mol_type = other RNA
agagccccaagaaagcaggtca

SEQ ID NO: 117643 - RNA, 22 nt, synthetic construct
  source 1..22: mol_type = other RNA
agagccgaaatgcacttagcgc

SEQ ID NO: 117644 - RNA, 22 nt, synthetic construct
  source 1..22: mol_type = other RNA
agagccgagcagaagggaaagg

SEQ ID NO: 117645 - RNA, 22 nt, synthetic construct
  source 1..22: mol_type = other RNA
agagcctaaaataggcctaggt

SEQ ID NO: 117646 - RNA, 22 nt, synthetic construct
  source 1..22: mol_type = other RNA
agagcctaatgtgtaagaaatg

SEQ ID NO: 117647 - RNA, 22 nt, synthetic construct
  source 1..22: mol_type = other RNA
agagcctgtggtctcttcgagg

SEQ ID NO: 117648 - RNA, 22 nt, synthetic construct
  source 1..22: mol_type = other RNA
agagcgaagagggagaagaaat

SEQ ID NO: 117649 - RNA, 22 nt, synthetic construct
  source 1..22: mol_type = other RNA
agagcgacagctacggaggatg

SEQ ID NO: 117650 - RNA, 22 nt, synthetic construct
  source 1..22: mol_type = other RNA
agagcgaggcctggaacaggcc

SEQ ID NO: 117651 - RNA, 22 nt, synthetic construct
  source 1..22: mol_type = other RNA
agagcgcttctatgtgacaaac

SEQ ID NO: 117652 - RNA, 22 nt, synthetic construct
  source 1..22: mol_type = other RNA
agagcggcctttgcctctccag

SEQ ID NO: 117653 - RNA, 22 nt, synthetic construct
  source 1..22: mol_type = other RNA
agagcgggtttcctcggtctac

SEQ ID NO: 117654 - RNA, 22 nt, synthetic construct
  source 1..22: mol_type = other RNA
agagcgtcgtacctttcgctat

SEQ ID NO: 117655 - RNA, 22 nt, synthetic construct
  source 1..22: mol_type = other RNA
agagctaagactataaaactct

SEQ ID NO: 117656 - RNA, 22 nt, synthetic construct
  source 1..22: mol_type = other RNA
agagctaagatgctattcaaga

SEQ ID NO: 117657 - RNA, 22 nt, synthetic construct
  source 1..22: mol_type = other RNA
agagctaagggaagttttttca

SEQ ID NO: 117658 - RNA, 22 nt, synthetic construct
  source 1..22: mol_type = other RNA
agagctagaactagaatactcc

SEQ ID NO: 117659 - RNA, 22 nt, synthetic construct
  source 1..22: mol_type = other RNA
agagctcacacgagaaggacag

SEQ ID NO: 117660 - RNA, 22 nt, synthetic construct
  source 1..22: mol_type = other RNA
agagctcaggccagtgagtgat

SEQ ID NO: 117661 - RNA, 22 nt, synthetic construct
  source 1..22: mol_type = other RNA
agagctgctgtaacaaagatgc

SEQ ID NO: 117662 - RNA, 22 nt, synthetic construct
  source 1..22: mol_type = other RNA
agagctgggactacaggtgtga

SEQ ID NO: 117663 - RNA, 22 nt, synthetic construct
  source 1..22: mol_type = other RNA
agagctgggcccgcagtggctc

SEQ ID NO: 117664 - RNA, 22 nt, synthetic construct
  source 1..22: mol_type = other RNA
agagctgtaacagaggcatgca

SEQ ID NO: 117665 - RNA, 22 nt, synthetic construct
  source 1..22: mol_type = other RNA
agagctgtgccgaggcagagag

SEQ ID NO: 117666 - RNA, 22 nt, synthetic construct
  source 1..22: mol_type = other RNA
agagcttcaacctcctgggctc

SEQ ID NO: 117667 - RNA, 22 nt, synthetic construct
  source 1..22: mol_type = other RNA
agagctttcttttaaagacctc

SEQ ID NO: 117668 - RNA, 22 nt, synthetic construct
  source 1..22: mol_type = other RNA
agagctttgttatgaaaatagt

SEQ ID NO: 117669 - RNA, 22 nt, synthetic construct
  source 1..22: mol_type = other RNA
agagcttttattttactctctt

SEQ ID NO: 117670 - RNA, 22 nt, synthetic construct
  source 1..22: mol_type = other RNA
agaggaagcttataatttctga

SEQ ID NO: 117671 - RNA, 22 nt, synthetic construct
  source 1..22: mol_type = other RNA
agaggaaggttcaagtttggct

SEQ ID NO: 117672 - RNA, 22 nt, synthetic construct
  source 1..22: mol_type = other RNA
agaggaagtgaccctgagtcca

SEQ ID NO: 117673 - RNA, 22 nt, synthetic construct
  source 1..22: mol_type = other RNA
agaggaataaatggtagcttgg

SEQ ID NO: 117674 - RNA, 22 nt, synthetic construct
  source 1..22: mol_type = other RNA
agaggacagttggccttgaggt

SEQ ID NO: 117675 - RNA, 22 nt, synthetic construct
  source 1..22: mol_type = other RNA
agaggacgatttttccaacagt

SEQ ID NO: 117676 - RNA, 22 nt, synthetic construct
  source 1..22: mol_type = other RNA
agaggactgcctattttgtaat

SEQ ID NO: 117677 - RNA, 22 nt, synthetic construct
  source 1..22: mol_type = other RNA
agaggactgcctggtcctgagg

SEQ ID NO: 117678 - RNA, 22 nt, synthetic construct
  source 1..22: mol_type = other RNA
agaggagacattacaattgata

SEQ ID NO: 117679 - RNA, 22 nt, synthetic construct
  source 1..22: mol_type = other RNA
agaggagcagttactcctgagc

SEQ ID NO: 117680 - RNA, 22 nt, synthetic construct
  source 1..22: mol_type = other RNA
agaggagcgccctggcattgtc

SEQ ID NO: 117681 - RNA, 22 nt, synthetic construct
  source 1..22: mol_type = other RNA
agaggaggaagagatagtctct

SEQ ID NO: 117682 - RNA, 22 nt, synthetic construct
  source 1..22: mol_type = other RNA
agaggaggagggttagattata

SEQ ID NO: 117683 - RNA, 22 nt, synthetic construct
  source 1..22: mol_type = other RNA
agaggagggatgcattctagaa

SEQ ID NO: 117684 - RNA, 22 nt, synthetic construct
  source 1..22: mol_type = other RNA
agaggataaggggcagggtgga

SEQ ID NO: 117685 - RNA, 22 nt, synthetic construct
  source 1..22: mol_type = other RNA
agaggatgggcattccagaggg

SEQ ID NO: 117686 - RNA, 22 nt, synthetic construct
  source 1..22: mol_type = other RNA
agaggattccaggtttacagga

SEQ ID NO: 117687 - RNA, 22 nt, synthetic construct
  source 1..22: mol_type = other RNA
agaggattttggattgcgattg

SEQ ID NO: 117688 - RNA, 22 nt, synthetic construct
  source 1..22: mol_type = other RNA
agaggcaaaactcctgaacaaa

SEQ ID NO: 117689 - RNA, 22 nt, synthetic construct
  source 1..22: mol_type = other RNA
agaggcaaaggccgctcttgac

SEQ ID NO: 117690 - RNA, 22 nt, synthetic construct
  source 1..22: mol_type = other RNA
agaggcaacagtcattcaggtc

SEQ ID NO: 117691 - RNA, 22 nt, synthetic construct
  source 1..22: mol_type = other RNA
agaggcagctaagcaccaacag

SEQ ID NO: 117692 - RNA, 22 nt, synthetic construct
  source 1..22: mol_type = other RNA
agaggcagttgagttttcaacc

SEQ ID NO: 117693 - RNA, 22 nt, synthetic construct
  source 1..22: mol_type = other RNA
agaggcatgcacggacttggca

SEQ ID NO: 117694 - RNA, 22 nt, synthetic construct
  source 1..22: mol_type = other RNA
agaggcatgccgggacaagagt

SEQ ID NO: 117695 - RNA, 22 nt, synthetic construct
  source 1..22: mol_type = other RNA
agaggccaaatgaaaggcgtcg

SEQ ID NO: 117696 - RNA, 22 nt, synthetic construct
  source 1..22: mol_type = other RNA
agaggccacaaagtccccacat

SEQ ID NO: 117697 - RNA, 22 nt, synthetic construct
  source 1..22: mol_type = other RNA
agaggccctggtgctttctatc

SEQ ID NO: 117698 - RNA, 22 nt, synthetic construct
  source 1..22: mol_type = other RNA
agaggccgagggttgaacatca

SEQ ID NO: 117699 - RNA, 22 nt, synthetic construct
  source 1..22: mol_type = other RNA
agaggcctcatgtattttccta

SEQ ID NO: 117700 - RNA, 22 nt, synthetic construct
  source 1..22: mol_type = other RNA
agaggctaggtgacctgccaga

SEQ ID NO: 117701 - RNA, 22 nt, synthetic construct
  source 1..22: mol_type = other RNA
agaggctgcaccctcctcctcc

SEQ ID NO: 117702 - RNA, 22 nt, synthetic construct
  source 1..22: mol_type = other RNA
agaggctgtattgtaggaaagc

SEQ ID NO: 117703 - RNA, 22 nt, synthetic construct
  source 1..22: mol_type = other RNA
agaggctttaagcagaaagtta

SEQ ID NO: 117704 - RNA, 22 nt, synthetic construct
  source 1..22: mol_type = other RNA
agaggctttctgtgtaatactg

SEQ ID NO: 117705 - RNA, 22 nt, synthetic construct
  source 1..22: mol_type = other RNA
agaggctttttatatttccgat

SEQ ID NO: 117706 - RNA, 22 nt, synthetic construct
  source 1..22: mol_type = other RNA
agagggaaactgtttttgcaat

SEQ ID NO: 117707 - RNA, 22 nt, synthetic construct
  source 1..22: mol_type = other RNA
agagggaacattttcattttaa

SEQ ID NO: 117708 - RNA, 22 nt, synthetic construct
  source 1..22: mol_type = other RNA
agagggaagtactgagtcaaaa

SEQ ID NO: 117709 - RNA, 22 nt, synthetic construct
  source 1..22: mol_type = other RNA
agagggaatctaggaaacactg

SEQ ID NO: 117710 - RNA, 22 nt, synthetic construct
  source 1..22: mol_type = other RNA
agagggaatttgttttaccatc

SEQ ID NO: 117711 - RNA, 22 nt, synthetic construct
  source 1..22: mol_type = other RNA
agagggagaagaaataaacgac

SEQ ID NO: 117712 - RNA, 22 nt, synthetic construct
  source 1..22: mol_type = other RNA
agagggagaccgtggggggagg

SEQ ID NO: 117713 - RNA, 22 nt, synthetic construct
  source 1..22: mol_type = other RNA
agagggagcagcgggcggcctg

SEQ ID NO: 117714 - RNA, 22 nt, synthetic construct
  source 1..22: mol_type = other RNA
agagggagcatcttcccatgaa

SEQ ID NO: 117715 - RNA, 22 nt, synthetic construct
  source 1..22: mol_type = other RNA
agagggagcgccacgtgaagat

SEQ ID NO: 117716 - RNA, 22 nt, synthetic construct
  source 1..22: mol_type = other RNA
agagggagctctgtcttgatga

SEQ ID NO: 117717 - RNA, 22 nt, synthetic construct
  source 1..22: mol_type = other RNA
agagggatgaatgttgtacatt

SEQ ID NO: 117718 - RNA, 22 nt, synthetic construct
  source 1..22: mol_type = other RNA
agagggcctaaataaaacacat

SEQ ID NO: 117719 - RNA, 22 nt, synthetic construct
  source 1..22: mol_type = other RNA
agagggcttcatgctgggagac

SEQ ID NO: 117720 - RNA, 22 nt, synthetic construct
  source 1..22: mol_type = other RNA
agagggggcataacatctatga

SEQ ID NO: 117721 - RNA, 22 nt, synthetic construct
  source 1..22: mol_type = other RNA
agaggggggaagcttttcatat

SEQ ID NO: 117722 - RNA, 22 nt, synthetic construct
  source 1..22: mol_type = other RNA
agagggtaacgtgagctggaag

SEQ ID NO: 117723 - RNA, 22 nt, synthetic construct
  source 1..22: mol_type = other RNA
agagggtaagaccaaaatggag

SEQ ID NO: 117724 - RNA, 22 nt, synthetic construct
  source 1..22: mol_type = other RNA
agaggtactcaacgacaatctc

SEQ ID NO: 117725 - RNA, 22 nt, synthetic construct
  source 1..22: mol_type = other RNA
agaggtatcaccatctgataag

SEQ ID NO: 117726 - RNA, 22 nt, synthetic construct
  source 1..22: mol_type = other RNA
agaggtatttggggctaggatt

SEQ ID NO: 117727 - RNA, 22 nt, synthetic construct
  source 1..22: mol_type = other RNA
agaggtcaggaaggcaggaggc

SEQ ID NO: 117728 - RNA, 22 nt, synthetic construct
  source 1..22: mol_type = other RNA
agaggtctgtctttcagtatgt

SEQ ID NO: 117729 - RNA, 22 nt, synthetic construct
  source 1..22: mol_type = other RNA
agaggtctgttactcccgattt

SEQ ID NO: 117730 - RNA, 22 nt, synthetic construct
  source 1..22: mol_type = other RNA
agaggtgaactattagagcttt

SEQ ID NO: 117731 - RNA, 22 nt, synthetic construct
  source 1..22: mol_type = other RNA
agaggtgaagttaagggccatt

SEQ ID NO: 117732 - RNA, 22 nt, synthetic construct
  source 1..22: mol_type = other RNA
agaggtgagctttttcttttta

SEQ ID NO: 117733 - RNA, 22 nt, synthetic construct
  source 1..22: mol_type = other RNA
agaggttaaaaccacaaacatg

SEQ ID NO: 117734 - RNA, 22 nt, synthetic construct
  source 1..22: mol_type = other RNA
agaggttaaagcaacaggaaga

SEQ ID NO: 117735 - RNA, 22 nt, synthetic construct
  source 1..22: mol_type = other RNA
agaggttcttttaaatgccaat

SEQ ID NO: 117736 - RNA, 22 nt, synthetic construct
  source 1..22: mol_type = other RNA
agaggttgcagtgaagccgaga

SEQ ID NO: 117737 - RNA, 22 nt, synthetic construct
  source 1..22: mol_type = other RNA
agagtaactggtccagatgaag

SEQ ID NO: 117738 - RNA, 22 nt, synthetic construct
  source 1..22: mol_type = other RNA
agagtaactgtcatcagcgtcc

SEQ ID NO: 117739 - RNA, 22 nt, synthetic construct
  source 1..22: mol_type = other RNA
agagtaagcaactgcatcttct

SEQ ID NO: 117740 - RNA, 22 nt, synthetic construct
  source 1..22: mol_type = other RNA
agagtaagttgcatacgtcgtc

SEQ ID NO: 117741 - RNA, 22 nt, synthetic construct
  source 1..22: mol_type = other RNA
agagtaatggttggccgaggcc

SEQ ID NO: 117742 - RNA, 22 nt, synthetic construct
  source 1..22: mol_type = other RNA
agagtaccaggtcagccagagg

SEQ ID NO: 117743 - RNA, 22 nt, synthetic construct
  source 1..22: mol_type = other RNA
agagtagagaaggctttgtgtt

SEQ ID NO: 117744 - RNA, 22 nt, synthetic construct
  source 1..22: mol_type = other RNA
agagtagattcccccttatgtg

SEQ ID NO: 117745 - RNA, 22 nt, synthetic construct
  source 1..22: mol_type = other RNA
agagtatatatgctccctaaat

SEQ ID NO: 117746 - RNA, 22 nt, synthetic construct
  source 1..22: mol_type = other RNA
agagtatctttttcagcagcag

SEQ ID NO: 117747 - RNA, 22 nt, synthetic construct
  source 1..22: mol_type = other RNA
agagtattacctatgaataggt

SEQ ID NO: 117748 - RNA, 22 nt, synthetic construct
  source 1..22: mol_type = other RNA
agagtattgccaggtttgtgct

SEQ ID NO: 117749 - RNA, 22 nt, synthetic construct
  source 1..22: mol_type = other RNA
agagtcagttgtttacttgggt

SEQ ID NO: 117750 - RNA, 22 nt, synthetic construct
  source 1..22: mol_type = other RNA
agagtcatttgagcccaggagg

SEQ ID NO: 117751 - RNA, 22 nt, synthetic construct
  source 1..22: mol_type = other RNA
agagtccccaactgcaaaactt

SEQ ID NO: 117752 - RNA, 22 nt, synthetic construct
  source 1..22: mol_type = other RNA
agagtcctgagggtgagaccac

SEQ ID NO: 117753 - RNA, 22 nt, synthetic construct
  source 1..22: mol_type = other RNA
agagtcgcttgaacctgaaaaa

SEQ ID NO: 117754 - RNA, 22 nt, synthetic construct
  source 1..22: mol_type = other RNA
agagtctatctttgggaaaatc

SEQ ID NO: 117755 - RNA, 22 nt, synthetic construct
  source 1..22: mol_type = other RNA
agagtctcatctgtcaaaaaga

SEQ ID NO: 117756 - RNA, 22 nt, synthetic construct
  source 1..22: mol_type = other RNA
agagtctcttaagaccacaagg

SEQ ID NO: 117757 - RNA, 22 nt, synthetic construct
  source 1..22: mol_type = other RNA
agagtctgcagaccaagaaagg

SEQ ID NO: 117758 - RNA, 22 nt, synthetic construct
  source 1..22: mol_type = other RNA
agagtgaaaacacaaactgcag

SEQ ID NO: 117759 - RNA, 22 nt, synthetic construct
  source 1..22: mol_type = other RNA
agagtgaaaagaaacaagtgaa

SEQ ID NO: 117760 - RNA, 22 nt, synthetic construct
  source 1..22: mol_type = other RNA
agagtgaaaaggcaaaccacac

SEQ ID NO: 117761 - RNA, 22 nt, synthetic construct
  source 1..22: mol_type = other RNA
agagtgaaactctggctcagaa

SEQ ID NO: 117762 - RNA, 22 nt, synthetic construct
  source 1..22: mol_type = other RNA
agagtgaaatgatttcaagtaa

SEQ ID NO: 117763 - RNA, 22 nt, synthetic construct
  source 1..22: mol_type = other RNA
agagtgaacaggcaaccttggg

SEQ ID NO: 117764 - RNA, 22 nt, synthetic construct
  source 1..22: mol_type = other RNA
agagtgaagaaacctttctcaa

SEQ ID NO: 117765 - RNA, 22 nt, synthetic construct
  source 1..22: mol_type = other RNA
agagtgaagctggacccttacc

SEQ ID NO: 117766 - RNA, 22 nt, synthetic construct
  source 1..22: mol_type = other RNA
agagtgacagctgagtagcgct

SEQ ID NO: 117767 - RNA, 22 nt, synthetic construct
  source 1..22: mol_type = other RNA
agagtgcacattccttcttcac

SEQ ID NO: 117768 - RNA, 22 nt, synthetic construct
  source 1..22: mol_type = other RNA
agagtgcagtatgtaggaaact

SEQ ID NO: 117769 - RNA, 22 nt, synthetic construct
  source 1..22: mol_type = other RNA
agagtgctgggtagagactgga

SEQ ID NO: 117770 - RNA, 22 nt, synthetic construct
  source 1..22: mol_type = other RNA
agagtggaaagagccagcctga

SEQ ID NO: 117771 - RNA, 22 nt, synthetic construct
  source 1..22: mol_type = other RNA
agagtggcctaaatcaggatgt

SEQ ID NO: 117772 - RNA, 22 nt, synthetic construct
  source 1..22: mol_type = other RNA
agagtggctaatgtggcttgca

SEQ ID NO: 117773 - RNA, 22 nt, synthetic construct
  source 1..22: mol_type = other RNA
agagtgggcaaaaaagtcatga

SEQ ID NO: 117774 - RNA, 22 nt, synthetic construct
  source 1..22: mol_type = other RNA
agagtgggcccagcagaaggtg

SEQ ID NO: 117775 - RNA, 22 nt, synthetic construct
  source 1..22: mol_type = other RNA
agagtgtgctgactagtacgtg

SEQ ID NO: 117776 - RNA, 22 nt, synthetic construct
  source 1..22: mol_type = other RNA
agagtgtggctttaaggcgcag

SEQ ID NO: 117777 - RNA, 22 nt, synthetic construct
  source 1..22: mol_type = other RNA
agagtgttcaaaagccccaaac

SEQ ID NO: 117778 - RNA, 22 nt, synthetic construct
  source 1..22: mol_type = other RNA
agagttaaaactcacaaaaagt

SEQ ID NO: 117779 - RNA, 22 nt, synthetic construct
  source 1..22: mol_type = other RNA
agagttacttctggaaagttca

SEQ ID NO: 117780 - RNA, 22 nt, synthetic construct
  source 1..22: mol_type = other RNA
agagttcagcttacagtcatca

SEQ ID NO: 117781 - RNA, 22 nt, synthetic construct
  source 1..22: mol_type = other RNA
agagttccaactgtataaatgt

SEQ ID NO: 117782 - RNA, 22 nt, synthetic construct
  source 1..22: mol_type = other RNA
agagttccacctccatcactga

SEQ ID NO: 117783 - RNA, 22 nt, synthetic construct
  source 1..22: mol_type = other RNA
agagttccatctgttatagtgt

SEQ ID NO: 117784 - RNA, 22 nt, synthetic construct
  source 1..22: mol_type = other RNA
agagttcccctatactgtaacc

SEQ ID NO: 117785 - RNA, 22 nt, synthetic construct
  source 1..22: mol_type = other RNA
agagttctgaaggctcagcccc

SEQ ID NO: 117786 - RNA, 22 nt, synthetic construct
  source 1..22: mol_type = other RNA
agagttgctgacttcctggctc

SEQ ID NO: 117787 - RNA, 22 nt, synthetic construct
  source 1..22: mol_type = other RNA
agagttggcacagccagtcagt

SEQ ID NO: 117788 - RNA, 22 nt, synthetic construct
  source 1..22: mol_type = other RNA
agagttgtaacacatatttatc

SEQ ID NO: 117789 - RNA, 22 nt, synthetic construct
  source 1..22: mol_type = other RNA
agagttgtatctgtgatccctg

SEQ ID NO: 117790 - RNA, 22 nt, synthetic construct
  source 1..22: mol_type = other RNA
agagtttatattctaagtttgc

SEQ ID NO: 117791 - RNA, 22 nt, synthetic construct
  source 1..22: mol_type = other RNA
agagtttgagaccagcgtgggc

SEQ ID NO: 117792 - RNA, 22 nt, synthetic construct
  source 1..22: mol_type = other RNA
agagtttgcattacatgaatgg

SEQ ID NO: 117793 - RNA, 22 nt, synthetic construct
  source 1..22: mol_type = other RNA
agagttttatagtcttagctct

SEQ ID NO: 117794 - RNA, 22 nt, synthetic construct
  source 1..22: mol_type = other RNA
agagttttccaataagttaact

SEQ ID NO: 117795 - RNA, 22 nt, synthetic construct
  source 1..22: mol_type = other RNA
agataaaacctggaatgggttg

SEQ ID NO: 117796 - RNA, 22 nt, synthetic construct
  source 1..22: mol_type = other RNA
agataaacgttaactatttctc

SEQ ID NO: 117797 - RNA, 22 nt, synthetic construct
  source 1..22: mol_type = other RNA
agataaactagattaccttgaa

SEQ ID NO: 117798 - RNA, 22 nt, synthetic construct
  source 1..22: mol_type = other RNA
agataaactggaattcatcaaa

SEQ ID NO: 117799 - RNA, 22 nt, synthetic construct
  source 1..22: mol_type = other RNA
agataaagagcaggtggaaggc

SEQ ID NO: 117800 - RNA, 22 nt, synthetic construct
  source 1..22: mol_type = other RNA
agataaaggtaaggaaacccca

SEQ ID NO: 117801 - RNA, 22 nt, synthetic construct
  source 1..22: mol_type = other RNA
agataaatcagaaactgacagg

SEQ ID NO: 117802 - RNA, 22 nt, synthetic construct
  source 1..22: mol_type = other RNA
agataaatccaacgaccggacg

SEQ ID NO: 117803 - RNA, 22 nt, synthetic construct
  source 1..22: mol_type = other RNA
agataaattacccaaagacttt

SEQ ID NO: 117804 - RNA, 22 nt, synthetic construct
  source 1..22: mol_type = other RNA
agataaattatagctccaaaag

SEQ ID NO: 117805 - RNA, 22 nt, synthetic construct
  source 1..22: mol_type = other RNA
agataacaaagggttcttggaa

SEQ ID NO: 117806 - RNA, 22 nt, synthetic construct
  source 1..22: mol_type = other RNA
agataacagtggttaggaaaat

SEQ ID NO: 117807 - RNA, 22 nt, synthetic construct
  source 1..22: mol_type = other RNA
agataaccaataagaagtgaaa

SEQ ID NO: 117808 - RNA, 22 nt, synthetic construct
  source 1..22: mol_type = other RNA
agataactaatgagaatttcag

SEQ ID NO: 117809 - RNA, 22 nt, synthetic construct
  source 1..22: mol_type = other RNA
agataactgggtgtgcacgttt

SEQ ID NO: 117810 - RNA, 22 nt, synthetic construct
  source 1..22: mol_type = other RNA
agataagaaaatgtgacattag

SEQ ID NO: 117811 - RNA, 22 nt, synthetic construct
  source 1..22: mol_type = other RNA
agataagatccaagtattgtat

SEQ ID NO: 117812 - RNA, 22 nt, synthetic construct
  source 1..22: mol_type = other RNA
agataagcaaaattgacaaacc

SEQ ID NO: 117813 - RNA, 22 nt, synthetic construct
  source 1..22: mol_type = other RNA
agataaggttgttcttggttaa

SEQ ID NO: 117814 - RNA, 22 nt, synthetic construct
  source 1..22: mol_type = other RNA
agataagtagaaggtcaatcta

SEQ ID NO: 117815 - RNA, 22 nt, synthetic construct
  source 1..22: mol_type = other RNA
agataatgctgttctctgtgtg

SEQ ID NO: 117816 - RNA, 22 nt, synthetic construct
  source 1..22: mol_type = other RNA
agataatgttagaattcaggac

SEQ ID NO: 117817 - RNA, 22 nt, synthetic construct
  source 1..22: mol_type = other RNA
agatacaactctgaccattgtg

SEQ ID NO: 117818 - RNA, 22 nt, synthetic construct
  source 1..22: mol_type = other RNA
agatacacaagatctctatgca

SEQ ID NO: 117819 - RNA, 22 nt, synthetic construct
  source 1..22: mol_type = other RNA
agataccagaccctttatcgga

SEQ ID NO: 117820 - RNA, 22 nt, synthetic construct
  source 1..22: mol_type = other RNA
agataccttgaaaggatactga

SEQ ID NO: 117821 - RNA, 22 nt, synthetic construct
  source 1..22: mol_type = other RNA
agatacgttaaaggaaaagaga

SEQ ID NO: 117822 - RNA, 22 nt, synthetic construct
  source 1..22: mol_type = other RNA
agatactacgcctagctgactt

SEQ ID NO: 117823 - RNA, 22 nt, synthetic construct
  source 1..22: mol_type = other RNA
agatactcaacatcactagcta

SEQ ID NO: 117824 - RNA, 22 nt, synthetic construct
  source 1..22: mol_type = other RNA
agatactcaatcagtggccagt

SEQ ID NO: 117825 - RNA, 22 nt, synthetic construct
  source 1..22: mol_type = other RNA
agatactcatgcttgctccaga

SEQ ID NO: 117826 - RNA, 22 nt, synthetic construct
  source 1..22: mol_type = other RNA
agatactcttaaagtttcaaac

SEQ ID NO: 117827 - RNA, 22 nt, synthetic construct
  source 1..22: mol_type = other RNA
agatactgcactaaactagtat

SEQ ID NO: 117828 - RNA, 22 nt, synthetic construct
  source 1..22: mol_type = other RNA
agatactggccatgttttattt

SEQ ID NO: 117829 - RNA, 22 nt, synthetic construct
  source 1..22: mol_type = other RNA
agatacttgattacaagggtga

SEQ ID NO: 117830 - RNA, 22 nt, synthetic construct
  source 1..22: mol_type = other RNA
agatagaaaagacaatagctag

SEQ ID NO: 117831 - RNA, 22 nt, synthetic construct
  source 1..22: mol_type = other RNA
agatagaaagcaccagggcctc

SEQ ID NO: 117832 - RNA, 22 nt, synthetic construct
  source 1..22: mol_type = other RNA
agatagaccagatgcgtggttc

SEQ ID NO: 117833 - RNA, 22 nt, synthetic construct
  source 1..22: mol_type = other RNA
agatagactcttcagaggtctg

SEQ ID NO: 117834 - RNA, 22 nt, synthetic construct
  source 1..22: mol_type = other RNA
agatagccccttatcaggaaag

SEQ ID NO: 117835 - RNA, 22 nt, synthetic construct
  source 1..22: mol_type = other RNA
agataggatgggcagactcctt

SEQ ID NO: 117836 - RNA, 22 nt, synthetic construct
  source 1..22: mol_type = other RNA
agataggtcatgtacataaatt

SEQ ID NO: 117837 - RNA, 22 nt, synthetic construct
  source 1..22: mol_type = other RNA
agatagtactgaccatctcagc

SEQ ID NO: 117838 - RNA, 22 nt, synthetic construct
  source 1..22: mol_type = other RNA
agatagtctcttcctgtatatc

SEQ ID NO: 117839 - RNA, 22 nt, synthetic construct
  source 1..22: mol_type = other RNA
agatagtggtttgaagcttcac

SEQ ID NO: 117840 - RNA, 22 nt, synthetic construct
  source 1..22: mol_type = other RNA
agatataaaaatggtcaacatg

SEQ ID NO: 117841 - RNA, 22 nt, synthetic construct
  source 1..22: mol_type = other RNA
agatatacaggaagagactatc

SEQ ID NO: 117842 - RNA, 22 nt, synthetic construct
  source 1..22: mol_type = other RNA
agatatatgcattcccatgttc

SEQ ID NO: 117843 - RNA, 22 nt, synthetic construct
  source 1..22: mol_type = other RNA
agatatcaatctggatataaca

SEQ ID NO: 117844 - RNA, 22 nt, synthetic construct
  source 1..22: mol_type = other RNA
agatatcacccagaccaagttt

SEQ ID NO: 117845 - RNA, 22 nt, synthetic construct
  source 1..22: mol_type = other RNA
agatatccacagtatgctgttt

SEQ ID NO: 117846 - RNA, 22 nt, synthetic construct
  source 1..22: mol_type = other RNA
agatatcccatataaggggaat

SEQ ID NO: 117847 - RNA, 22 nt, synthetic construct
  source 1..22: mol_type = other RNA
agatatgaaagaggagacatta

SEQ ID NO: 117848 - RNA, 22 nt, synthetic construct
  source 1..22: mol_type = other RNA
agatatgggagtccctgctttc

SEQ ID NO: 117849 - RNA, 22 nt, synthetic construct
  source 1..22: mol_type = other RNA
agatatgggttattcacccaag

SEQ ID NO: 117850 - RNA, 22 nt, synthetic construct
  source 1..22: mol_type = other RNA
agatatgtgtaggaaggaacac

SEQ ID NO: 117851 - RNA, 22 nt, synthetic construct
  source 1..22: mol_type = other RNA
agatattagctacaaaagggaa

SEQ ID NO: 117852 - RNA, 22 nt, synthetic construct
  source 1..22: mol_type = other RNA
agatattatcctccaatgtttt

SEQ ID NO: 117853 - RNA, 22 nt, synthetic construct
  source 1..22: mol_type = other RNA
agatatttcgcctagataagaa

SEQ ID NO: 117854 - RNA, 22 nt, synthetic construct
  source 1..22: mol_type = other RNA
agatattttctgtcattctgca

SEQ ID NO: 117855 - RNA, 22 nt, synthetic construct
  source 1..22: mol_type = other RNA
agatcaaacgtgctttccttat

SEQ ID NO: 117856 - RNA, 22 nt, synthetic construct
  source 1..22: mol_type = other RNA
agatcaagcccttccttgcttg

SEQ ID NO: 117857 - RNA, 22 nt, synthetic construct
  source 1..22: mol_type = other RNA
agatcaagctcgccgtctccct

SEQ ID NO: 117858 - RNA, 22 nt, synthetic construct
  source 1..22: mol_type = other RNA
agatcaagtatttcctatgaaa

SEQ ID NO: 117859 - RNA, 22 nt, synthetic construct
  source 1..22: mol_type = other RNA
agatcaagtcctttccagaggt

SEQ ID NO: 117860 - RNA, 22 nt, synthetic construct
  source 1..22: mol_type = other RNA
agatcaattgaccaaacatgtg

SEQ ID NO: 117861 - RNA, 22 nt, synthetic construct
  source 1..22: mol_type = other RNA
agatcacaaggactggcttcag

SEQ ID NO: 117862 - RNA, 22 nt, synthetic construct
  source 1..22: mol_type = other RNA
agatcacaaggtcagaagtttg

SEQ ID NO: 117863 - RNA, 22 nt, synthetic construct
  source 1..22: mol_type = other RNA
agatcacaccgctgcattccag

SEQ ID NO: 117864 - RNA, 22 nt, synthetic construct
  source 1..22: mol_type = other RNA
agatcaccaggggctgggggat

SEQ ID NO: 117865 - RNA, 22 nt, synthetic construct
  source 1..22: mol_type = other RNA
agatcacgaggtcgagagttcg

SEQ ID NO: 117866 - RNA, 22 nt, synthetic construct
  source 1..22: mol_type = other RNA
agatcacgccactgcattccgc

SEQ ID NO: 117867 - RNA, 22 nt, synthetic construct
  source 1..22: mol_type = other RNA
agatcagtaaaattcccttcag

SEQ ID NO: 117868 - RNA, 22 nt, synthetic construct
  source 1..22: mol_type = other RNA
agatcagtaacaaataagaaga

SEQ ID NO: 117869 - RNA, 22 nt, synthetic construct
  source 1..22: mol_type = other RNA
agatcataagcttttatttgtc

SEQ ID NO: 117870 - RNA, 22 nt, synthetic construct
  source 1..22: mol_type = other RNA
agatcatacacctggatcaagt

SEQ ID NO: 117871 - RNA, 22 nt, synthetic construct
  source 1..22: mol_type = other RNA
agatcatttagtaagtgtgagc

SEQ ID NO: 117872 - RNA, 22 nt, synthetic construct
  source 1..22: mol_type = other RNA
agatcatttcaaaccaatgttc

SEQ ID NO: 117873 - RNA, 22 nt, synthetic construct
  source 1..22: mol_type = other RNA
agatcatttcacttgattactt

SEQ ID NO: 117874 - RNA, 22 nt, synthetic construct
  source 1..22: mol_type = other RNA
agatccaagtattgtatcaatg

SEQ ID NO: 117875 - RNA, 22 nt, synthetic construct
  source 1..22: mol_type = other RNA
agatcccaaaaaggtttttatt

SEQ ID NO: 117876 - RNA, 22 nt, synthetic construct
  source 1..22: mol_type = other RNA
agatcccaattacttccagtgt

SEQ ID NO: 117877 - RNA, 22 nt, synthetic construct
  source 1..22: mol_type = other RNA
agatcctcacatcagttaccac

SEQ ID NO: 117878 - RNA, 22 nt, synthetic construct
  source 1..22: mol_type = other RNA
agatcctgaggaagctaatcaa

SEQ ID NO: 117879 - RNA, 22 nt, synthetic construct
  source 1..22: mol_type = other RNA
agatcctggattgctagtgtcc

SEQ ID NO: 117880 - RNA, 22 nt, synthetic construct
  source 1..22: mol_type = other RNA
agatctaaattttaagtgcaca

SEQ ID NO: 117881 - RNA, 22 nt, synthetic construct
  source 1..22: mol_type = other RNA
agatctaacaaacgcattgtga

SEQ ID NO: 117882 - RNA, 22 nt, synthetic construct
  source 1..22: mol_type = other RNA
agatctagtgaagtcaatttca

SEQ ID NO: 117883 - RNA, 22 nt, synthetic construct
  source 1..22: mol_type = other RNA
agatctcaaacagcctaattgt

SEQ ID NO: 117884 - RNA, 22 nt, synthetic construct
  source 1..22: mol_type = other RNA
agatctcattttgaaaaacaga

SEQ ID NO: 117885 - RNA, 22 nt, synthetic construct
  source 1..22: mol_type = other RNA
agatctctatgcagaaatctac

SEQ ID NO: 117886 - RNA, 22 nt, synthetic construct
  source 1..22: mol_type = other RNA
agatctctgacattggttattc

SEQ ID NO: 117887 - RNA, 22 nt, synthetic construct
  source 1..22: mol_type = other RNA
agatctcttttcctttaacgta

SEQ ID NO: 117888 - RNA, 22 nt, synthetic construct
  source 1..22: mol_type = other RNA
agatctgaaattgacttcacta

SEQ ID NO: 117889 - RNA, 22 nt, synthetic construct
  source 1..22: mol_type = other RNA
agatctgagaagactaagcaga

SEQ ID NO: 117890 - RNA, 22 nt, synthetic construct
  source 1..22: mol_type = other RNA
agatctgagagatagaaagcac

SEQ ID NO: 117891 - RNA, 22 nt, synthetic construct
  source 1..22: mol_type = other RNA
agatctgagtttgctctgcaaa

SEQ ID NO: 117892 - RNA, 22 nt, synthetic construct
  source 1..22: mol_type = other RNA
agatctgctgtaagctggtaat

SEQ ID NO: 117893 - RNA, 22 nt, synthetic construct
  source 1..22: mol_type = other RNA
agatctgcttgcagacaataat

SEQ ID NO: 117894 - RNA, 22 nt, synthetic construct
  source 1..22: mol_type = other RNA
agatctgggataatgctatcat

SEQ ID NO: 117895 - RNA, 22 nt, synthetic construct
  source 1..22: mol_type = other RNA
agatctgtctttggcccatatc

SEQ ID NO: 117896 - RNA, 22 nt, synthetic construct
  source 1..22: mol_type = other RNA
agatctgtggactttaggctgt

SEQ ID NO: 117897 - RNA, 22 nt, synthetic construct
  source 1..22: mol_type = other RNA
agatctgttgcagtccccggtc

SEQ ID NO: 117898 - RNA, 22 nt, synthetic construct
  source 1..22: mol_type = other RNA
agatctgtttttcaaaatgaga

SEQ ID NO: 117899 - RNA, 22 nt, synthetic construct
  source 1..22: mol_type = other RNA
agatcttatggaatagttgatt

SEQ ID NO: 117900 - RNA, 22 nt, synthetic construct
  source 1..22: mol_type = other RNA
agatcttggccgaatgtggtgg

SEQ ID NO: 117901 - RNA, 22 nt, synthetic construct
  source 1..22: mol_type = other RNA
agatcttgtgtatcttttgtta

SEQ ID NO: 117902 - RNA, 22 nt, synthetic construct
  source 1..22: mol_type = other RNA
agatctttttgtgtatatggta

SEQ ID NO: 117903 - RNA, 22 nt, synthetic construct
  source 1..22: mol_type = other RNA
agatgaaactaaatgtgagcat

SEQ ID NO: 117904 - RNA, 22 nt, synthetic construct
  source 1..22: mol_type = other RNA
agatgaagattagaaaattagc

SEQ ID NO: 117905 - RNA, 22 nt, synthetic construct
  source 1..22: mol_type = other RNA
agatgaagcagggaaatggagg

SEQ ID NO: 117906 - RNA, 22 nt, synthetic construct
  source 1..22: mol_type = other RNA
agatgaagtatagaaaggagac

SEQ ID NO: 117907 - RNA, 22 nt, synthetic construct
  source 1..22: mol_type = other RNA
agatgaatctgcaactatcaaa

SEQ ID NO: 117908 - RNA, 22 nt, synthetic construct
  source 1..22: mol_type = other RNA
agatgaatgaacaaaatgtggt

SEQ ID NO: 117909 - RNA, 22 nt, synthetic construct
  source 1..22: mol_type = other RNA
agatgaatgagcaaggtcgttt

SEQ ID NO: 117910 - RNA, 22 nt, synthetic construct
  source 1..22: mol_type = other RNA
agatgaatggataaggaaaata

SEQ ID NO: 117911 - RNA, 22 nt, synthetic construct
  source 1..22: mol_type = other RNA
agatgacatttgcttttcctgg

SEQ ID NO: 117912 - RNA, 22 nt, synthetic construct
  source 1..22: mol_type = other RNA
agatgacgaaagtgaagcccag

SEQ ID NO: 117913 - RNA, 22 nt, synthetic construct
  source 1..22: mol_type = other RNA
agatgacttcactggagaattc

SEQ ID NO: 117914 - RNA, 22 nt, synthetic construct
  source 1..22: mol_type = other RNA
agatgagaaatacttggacagg

SEQ ID NO: 117915 - RNA, 22 nt, synthetic construct
  source 1..22: mol_type = other RNA
agatgagactcttaatattgaa

SEQ ID NO: 117916 - RNA, 22 nt, synthetic construct
  source 1..22: mol_type = other RNA
agatgagagtggcctaaatcag

SEQ ID NO: 117917 - RNA, 22 nt, synthetic construct
  source 1..22: mol_type = other RNA
agatgagcccaggagttgcatc

SEQ ID NO: 117918 - RNA, 22 nt, synthetic construct
  source 1..22: mol_type = other RNA
agatgaggtctcagccttttct

SEQ ID NO: 117919 - RNA, 22 nt, synthetic construct
  source 1..22: mol_type = other RNA
agatgaggttttacgatgttgg

SEQ ID NO: 117920 - RNA, 22 nt, synthetic construct
  source 1..22: mol_type = other RNA
agatgatcctcccgccttggcc

SEQ ID NO: 117921 - RNA, 22 nt, synthetic construct
  source 1..22: mol_type = other RNA
agatgatctaaatggtgtgaag

SEQ ID NO: 117922 - RNA, 22 nt, synthetic construct
  source 1..22: mol_type = other RNA
agatgatgaacaaaggcaggag

SEQ ID NO: 117923 - RNA, 22 nt, synthetic construct
  source 1..22: mol_type = other RNA
agatgatgttttgaacgaatga

SEQ ID NO: 117924 - RNA, 22 nt, synthetic construct
  source 1..22: mol_type = other RNA
agatgattcgcattgctaattc

SEQ ID NO: 117925 - RNA, 22 nt, synthetic construct
  source 1..22: mol_type = other RNA
agatgcagaaaaagcatttttt

SEQ ID NO: 117926 - RNA, 22 nt, synthetic construct
  source 1..22: mol_type = other RNA
agatgcagttgcttactctaat

SEQ ID NO: 117927 - RNA, 22 nt, synthetic construct
  source 1..22: mol_type = other RNA
agatgcataagttctagagatt

SEQ ID NO: 117928 - RNA, 22 nt, synthetic construct
  source 1..22: mol_type = other RNA
agatgcataccaagcccggcac

SEQ ID NO: 117929 - RNA, 22 nt, synthetic construct
  source 1..22: mol_type = other RNA
agatgcattctgtcacatagac

SEQ ID NO: 117930 - RNA, 22 nt, synthetic construct
  source 1..22: mol_type = other RNA
agatgccacaaatggagtgact

SEQ ID NO: 117931 - RNA, 22 nt, synthetic construct
  source 1..22: mol_type = other RNA
agatgccatttataatagcata

SEQ ID NO: 117932 - RNA, 22 nt, synthetic construct
  source 1..22: mol_type = other RNA
agatgcctagaaaggaattgta

SEQ ID NO: 117933 - RNA, 22 nt, synthetic construct
  source 1..22: mol_type = other RNA
agatgcctatgaaatcttgaag

SEQ ID NO: 117934 - RNA, 22 nt, synthetic construct
  source 1..22: mol_type = other RNA
agatgcctcgaaggcctgcttc

SEQ ID NO: 117935 - RNA, 22 nt, synthetic construct
  source 1..22: mol_type = other RNA
agatgcctgtgcttgtctctct

SEQ ID NO: 117936 - RNA, 22 nt, synthetic construct
  source 1..22: mol_type = other RNA
agatgcgtggttcacacctgta

SEQ ID NO: 117937 - RNA, 22 nt, synthetic construct
  source 1..22: mol_type = other RNA
agatgctaaacagtacagtagt

SEQ ID NO: 117938 - RNA, 22 nt, synthetic construct
  source 1..22: mol_type = other RNA
agatgctattcaagacaagcaa

SEQ ID NO: 117939 - RNA, 22 nt, synthetic construct
  source 1..22: mol_type = other RNA
agatgctccctctatggcaggc

SEQ ID NO: 117940 - RNA, 22 nt, synthetic construct
  source 1..22: mol_type = other RNA
agatgctgaacttgtcacaaaa

SEQ ID NO: 117941 - RNA, 22 nt, synthetic construct
  source 1..22: mol_type = other RNA
agatgctggtggagtattctag

SEQ ID NO: 117942 - RNA, 22 nt, synthetic construct
  source 1..22: mol_type = other RNA
agatgcttctagccaaagcaag

SEQ ID NO: 117943 - RNA, 22 nt, synthetic construct
  source 1..22: mol_type = other RNA
agatggaaagtggactatgtag

SEQ ID NO: 117944 - RNA, 22 nt, synthetic construct
  source 1..22: mol_type = other RNA
agatggaactctattttcctaa

SEQ ID NO: 117945 - RNA, 22 nt, synthetic construct
  source 1..22: mol_type = other RNA
agatggacaaattaccatgttt

SEQ ID NO: 117946 - RNA, 22 nt, synthetic construct
  source 1..22: mol_type = other RNA
agatggacactgcagatgaatg

SEQ ID NO: 117947 - RNA, 22 nt, synthetic construct
  source 1..22: mol_type = other RNA
agatggagttacgctgccaaaa

SEQ ID NO: 117948 - RNA, 22 nt, synthetic construct
  source 1..22: mol_type = other RNA
agatggatttttctgtttctgt

SEQ ID NO: 117949 - RNA, 22 nt, synthetic construct
  source 1..22: mol_type = other RNA
agatggcaaacagactgagcca

SEQ ID NO: 117950 - RNA, 22 nt, synthetic construct
  source 1..22: mol_type = other RNA
agatggcaagtttccattctct

SEQ ID NO: 117951 - RNA, 22 nt, synthetic construct
  source 1..22: mol_type = other RNA
agatggcacataccatggaata

SEQ ID NO: 117952 - RNA, 22 nt, synthetic construct
  source 1..22: mol_type = other RNA
agatggccccaaaattacccca

SEQ ID NO: 117953 - RNA, 22 nt, synthetic construct
  source 1..22: mol_type = other RNA
agatggcctccctcactaagtc

SEQ ID NO: 117954 - RNA, 22 nt, synthetic construct
  source 1..22: mol_type = other RNA
agatggcgtgcgcctgtaatcc

SEQ ID NO: 117955 - RNA, 22 nt, synthetic construct
  source 1..22: mol_type = other RNA
agatggcttaggatcaccaaag

SEQ ID NO: 117956 - RNA, 22 nt, synthetic construct
  source 1..22: mol_type = other RNA
agatgggaaagtattcccaaga

SEQ ID NO: 117957 - RNA, 22 nt, synthetic construct
  source 1..22: mol_type = other RNA
agatgggaagaaaaaataaagg

SEQ ID NO: 117958 - RNA, 22 nt, synthetic construct
  source 1..22: mol_type = other RNA
agatgggacttcactagtgggt

SEQ ID NO: 117959 - RNA, 22 nt, synthetic construct
  source 1..22: mol_type = other RNA
agatggggacttgctctcttgc

SEQ ID NO: 117960 - RNA, 22 nt, synthetic construct
  source 1..22: mol_type = other RNA
agatggggattgagggttagat

SEQ ID NO: 117961 - RNA, 22 nt, synthetic construct
  source 1..22: mol_type = other RNA
agatggggtctcattgtgttgc

SEQ ID NO: 117962 - RNA, 22 nt, synthetic construct
  source 1..22: mol_type = other RNA
agatggggtttgtccatgttgg

SEQ ID NO: 117963 - RNA, 22 nt, synthetic construct
  source 1..22: mol_type = other RNA
agatggtaaaacaaattccctc

SEQ ID NO: 117964 - RNA, 22 nt, synthetic construct
  source 1..22: mol_type = other RNA
agatggtaaattggtcctggaa

SEQ ID NO: 117965 - RNA, 22 nt, synthetic construct
  source 1..22: mol_type = other RNA
agatggtagtcaacacttttcc

SEQ ID NO: 117966 - RNA, 22 nt, synthetic construct
  source 1..22: mol_type = other RNA
agatggtcagtactatcttccc

SEQ ID NO: 117967 - RNA, 22 nt, synthetic construct
  source 1..22: mol_type = other RNA
agatggtccttttttactgact

SEQ ID NO: 117968 - RNA, 22 nt, synthetic construct
  source 1..22: mol_type = other RNA
agatggtgatacctcttactaa

SEQ ID NO: 117969 - RNA, 22 nt, synthetic construct
  source 1..22: mol_type = other RNA
agatggtgctgatttaaaattt

SEQ ID NO: 117970 - RNA, 22 nt, synthetic construct
  source 1..22: mol_type = other RNA
agatggtgggagaggcatgccg

SEQ ID NO: 117971 - RNA, 22 nt, synthetic construct
  source 1..22: mol_type = other RNA
agatggttggaagtttctggaa

SEQ ID NO: 117972 - RNA, 22 nt, synthetic construct
  source 1..22: mol_type = other RNA
agatgtactggaagtgtaacat

SEQ ID NO: 117973 - RNA, 22 nt, synthetic construct
  source 1..22: mol_type = other RNA
agatgtagagaaacaggattac

SEQ ID NO: 117974 - RNA, 22 nt, synthetic construct
  source 1..22: mol_type = other RNA
agatgtcaacattaagggaaac

SEQ ID NO: 117975 - RNA, 22 nt, synthetic construct
  source 1..22: mol_type = other RNA
agatgtctccattttgccagct

SEQ ID NO: 117976 - RNA, 22 nt, synthetic construct
  source 1..22: mol_type = other RNA
agatgtcttttaacttgctttg

SEQ ID NO: 117977 - RNA, 22 nt, synthetic construct
  source 1..22: mol_type = other RNA
agatgtgagcccccacgcccgg

SEQ ID NO: 117978 - RNA, 22 nt, synthetic construct
  source 1..22: mol_type = other RNA
agatgtgcttaatcttcacact

SEQ ID NO: 117979 - RNA, 22 nt, synthetic construct
  source 1..22: mol_type = other RNA
agatgtgtaattgtaccttgga

SEQ ID NO: 117980 - RNA, 22 nt, synthetic construct
  source 1..22: mol_type = other RNA
agatgtgtaccaaaagtcctgt

SEQ ID NO: 117981 - RNA, 22 nt, synthetic construct
  source 1..22: mol_type = other RNA
agatgttatgccccctcttctc

SEQ ID NO: 117982 - RNA, 22 nt, synthetic construct
  source 1..22: mol_type = other RNA
agatgttgcggtgagcagagat

SEQ ID NO: 117983 - RNA, 22 nt, synthetic construct
  source 1..22: mol_type = other RNA
agatgttttacacatgtcagcc

SEQ ID NO: 117984 - RNA, 22 nt, synthetic construct
  source 1..22: mol_type = other RNA
agatgttttcagttgcatgaat

SEQ ID NO: 117985 - RNA, 22 nt, synthetic construct
  source 1..22: mol_type = other RNA
agattaaataacttccatgaga

SEQ ID NO: 117986 - RNA, 22 nt, synthetic construct
  source 1..22: mol_type = other RNA
agattaaatacagagcacagac

SEQ ID NO: 117987 - RNA, 22 nt, synthetic construct
  source 1..22: mol_type = other RNA
agattaaataccacctgaaatc

SEQ ID NO: 117988 - RNA, 22 nt, synthetic construct
  source 1..22: mol_type = other RNA
agattaagcacatctgtcttgt

SEQ ID NO: 117989 - RNA, 22 nt, synthetic construct
  source 1..22: mol_type = other RNA
agattaagcatagtttgagtat

SEQ ID NO: 117990 - RNA, 22 nt, synthetic construct
  source 1..22: mol_type = other RNA
agattaaggctggaggatggct

SEQ ID NO: 117991 - RNA, 22 nt, synthetic construct
  source 1..22: mol_type = other RNA
agattaatccttgtggtcttaa

SEQ ID NO: 117992 - RNA, 22 nt, synthetic construct
  source 1..22: mol_type = other RNA
agattaatgtaggtgtctgatg

SEQ ID NO: 117993 - RNA, 22 nt, synthetic construct
  source 1..22: mol_type = other RNA
agattaattcagtcaacaccaa

SEQ ID NO: 117994 - RNA, 22 nt, synthetic construct
  source 1..22: mol_type = other RNA
agattacaaaagaacaggactt

SEQ ID NO: 117995 - RNA, 22 nt, synthetic construct
  source 1..22: mol_type = other RNA
agattacagatgtgagccccca

SEQ ID NO: 117996 - RNA, 22 nt, synthetic construct
  source 1..22: mol_type = other RNA
agattacatagcaaggaagcag

SEQ ID NO: 117997 - RNA, 22 nt, synthetic construct
  source 1..22: mol_type = other RNA
agattactggatacaaggtcaa

SEQ ID NO: 117998 - RNA, 22 nt, synthetic construct
  source 1..22: mol_type = other RNA
agattagaaaattagctgactt

SEQ ID NO: 117999 - RNA, 22 nt, synthetic construct
  source 1..22: mol_type = other RNA
agattagcgaaagggattctgg

SEQ ID NO: 118000 - RNA, 22 nt, synthetic construct
  source 1..22: mol_type = other RNA
agattagcttttacgaggacag

SEQ ID NO: 118001 - RNA, 22 nt, synthetic construct
  source 1..22: mol_type = other RNA
agattaggaaacagattgattt

SEQ ID NO: 118002 - RNA, 22 nt, synthetic construct
  source 1..22: mol_type = other RNA
agattaggcagaaccacctggg

SEQ ID NO: 118003 - RNA, 22 nt, synthetic construct
  source 1..22: mol_type = other RNA
agattataggtgtgagccacta

SEQ ID NO: 118004 - RNA, 22 nt, synthetic construct
  source 1..22: mol_type = other RNA
agattatatggtctaccatgtt

SEQ ID NO: 118005 - RNA, 22 nt, synthetic construct
  source 1..22: mol_type = other RNA
agattatgttccacatgttact

SEQ ID NO: 118006 - RNA, 22 nt, synthetic construct
  source 1..22: mol_type = other RNA
agattcaacaaaactgggggct

SEQ ID NO: 118007 - RNA, 22 nt, synthetic construct
  source 1..22: mol_type = other RNA
agattcaagaaaccacagagcc

SEQ ID NO: 118008 - RNA, 22 nt, synthetic construct
  source 1..22: mol_type = other RNA
agattcaccaattgttaacatt

SEQ ID NO: 118009 - RNA, 22 nt, synthetic construct
  source 1..22: mol_type = other RNA
agattcacgcacagggagatac

SEQ ID NO: 118010 - RNA, 22 nt, synthetic construct
  source 1..22: mol_type = other RNA
agattcatatgctttgagctac

SEQ ID NO: 118011 - RNA, 22 nt, synthetic construct
  source 1..22: mol_type = other RNA
agattcatcttgacttcacttc

SEQ ID NO: 118012 - RNA, 22 nt, synthetic construct
  source 1..22: mol_type = other RNA
agattcccccttatgtgtgtat

SEQ ID NO: 118013 - RNA, 22 nt, synthetic construct
  source 1..22: mol_type = other RNA
agattccctctggccttctata

SEQ ID NO: 118014 - RNA, 22 nt, synthetic construct
  source 1..22: mol_type = other RNA
agattccgtctcaaaaaattat

SEQ ID NO: 118015 - RNA, 22 nt, synthetic construct
  source 1..22: mol_type = other RNA
agattccttttttatgtgcttt

SEQ ID NO: 118016 - RNA, 22 nt, synthetic construct
  source 1..22: mol_type = other RNA
agattctctgtctctgttgccc

SEQ ID NO: 118017 - RNA, 22 nt, synthetic construct
  source 1..22: mol_type = other RNA
agattctctttagggaagatag

SEQ ID NO: 118018 - RNA, 22 nt, synthetic construct
  source 1..22: mol_type = other RNA
agattctgtctctacaaaaaag

SEQ ID NO: 118019 - RNA, 22 nt, synthetic construct
  source 1..22: mol_type = other RNA
agattcttgtcatgaatgaatg

SEQ ID NO: 118020 - RNA, 22 nt, synthetic construct
  source 1..22: mol_type = other RNA
agattgaaaatggtttaggctg

SEQ ID NO: 118021 - RNA, 22 nt, synthetic construct
  source 1..22: mol_type = other RNA
agattgaaatctaggcatataa

SEQ ID NO: 118022 - RNA, 22 nt, synthetic construct
  source 1..22: mol_type = other RNA
agattgaccttctacttatctt

SEQ ID NO: 118023 - RNA, 22 nt, synthetic construct
  source 1..22: mol_type = other RNA
agattgaccttgtatccagtaa

SEQ ID NO: 118024 - RNA, 22 nt, synthetic construct
  source 1..22: mol_type = other RNA
agattgatatctgagtgttgtg

SEQ ID NO: 118025 - RNA, 22 nt, synthetic construct
  source 1..22: mol_type = other RNA
agattgccccattgcactccac

SEQ ID NO: 118026 - RNA, 22 nt, synthetic construct
  source 1..22: mol_type = other RNA
agattgcttgagagagataaaa

SEQ ID NO: 118027 - RNA, 22 nt, synthetic construct
  source 1..22: mol_type = other RNA
agattggctttagatttatcaa

SEQ ID NO: 118028 - RNA, 22 nt, synthetic construct
  source 1..22: mol_type = other RNA
agattgggaaaatcttggaact

SEQ ID NO: 118029 - RNA, 22 nt, synthetic construct
  source 1..22: mol_type = other RNA
agattgggcttttcatatacgt

SEQ ID NO: 118030 - RNA, 22 nt, synthetic construct
  source 1..22: mol_type = other RNA
agattgtcgttgagtacctctg

SEQ ID NO: 118031 - RNA, 22 nt, synthetic construct
  source 1..22: mol_type = other RNA
agattgtgccagtgaactccag

SEQ ID NO: 118032 - RNA, 22 nt, synthetic construct
  source 1..22: mol_type = other RNA
agattgtgtgatttcatatgaa

SEQ ID NO: 118033 - RNA, 22 nt, synthetic construct
  source 1..22: mol_type = other RNA
agattgtttaattctgtttacc

SEQ ID NO: 118034 - RNA, 22 nt, synthetic construct
  source 1..22: mol_type = other RNA
agattgttttaggtagtcttgt

SEQ ID NO: 118035 - RNA, 22 nt, synthetic construct
  source 1..22: mol_type = other RNA
agattgttttgttgctattgtt

SEQ ID NO: 118036 - RNA, 22 nt, synthetic construct
  source 1..22: mol_type = other RNA
agatttacccctactttttgtc

SEQ ID NO: 118037 - RNA, 22 nt, synthetic construct
  source 1..22: mol_type = other RNA
agatttactaaactgaacgaag

SEQ ID NO: 118038 - RNA, 22 nt, synthetic construct
  source 1..22: mol_type = other RNA
agatttatcaatagcagtgctg

SEQ ID NO: 118039 - RNA, 22 nt, synthetic construct
  source 1..22: mol_type = other RNA
agatttatttttacccgtggaa

SEQ ID NO: 118040 - RNA, 22 nt, synthetic construct
  source 1..22: mol_type = other RNA
agatttcaatctggaatgcatc

SEQ ID NO: 118041 - RNA, 22 nt, synthetic construct
  source 1..22: mol_type = other RNA
agatttcaggtggtatttaatc

SEQ ID NO: 118042 - RNA, 22 nt, synthetic construct
  source 1..22: mol_type = other RNA
agatttcataggcatctctccc

SEQ ID NO: 118043 - RNA, 22 nt, synthetic construct
  source 1..22: mol_type = other RNA
agatttctactggggtcttagt

SEQ ID NO: 118044 - RNA, 22 nt, synthetic construct
  source 1..22: mol_type = other RNA
agatttctgcatagagatcttg

SEQ ID NO: 118045 - RNA, 22 nt, synthetic construct
  source 1..22: mol_type = other RNA
agatttctttttactcatgtct

SEQ ID NO: 118046 - RNA, 22 nt, synthetic construct
  source 1..22: mol_type = other RNA
agatttgagtcttgctctcttg

SEQ ID NO: 118047 - RNA, 22 nt, synthetic construct
  source 1..22: mol_type = other RNA
agatttgatcctggaatagtag

SEQ ID NO: 118048 - RNA, 22 nt, synthetic construct
  source 1..22: mol_type = other RNA
agatttgccaatcaataattct

SEQ ID NO: 118049 - RNA, 22 nt, synthetic construct
  source 1..22: mol_type = other RNA
agatttgctgtataacattttc

SEQ ID NO: 118050 - RNA, 22 nt, synthetic construct
  source 1..22: mol_type = other RNA
agattttaggtcatttttcact

SEQ ID NO: 118051 - RNA, 22 nt, synthetic construct
  source 1..22: mol_type = other RNA
agattttcccaaagatagactc

SEQ ID NO: 118052 - RNA, 22 nt, synthetic construct
  source 1..22: mol_type = other RNA
agattttcccaatctctggtat

SEQ ID NO: 118053 - RNA, 22 nt, synthetic construct
  source 1..22: mol_type = other RNA
agatttttcctttgcctaagtc

SEQ ID NO: 118054 - RNA, 22 nt, synthetic construct
  source 1..22: mol_type = other RNA
agattttttgttgttggtttgt

SEQ ID NO: 118055 - RNA, 22 nt, synthetic construct
  source 1..22: mol_type = other RNA
agcaaaaatacagctccaaaga

SEQ ID NO: 118056 - RNA, 22 nt, synthetic construct
  source 1..22: mol_type = other RNA
agcaaaacatatgtcagatggt

SEQ ID NO: 118057 - RNA, 22 nt, synthetic construct
  source 1..22: mol_type = other RNA
agcaaaagcaaaattctaacaa

SEQ ID NO: 118058 - RNA, 22 nt, synthetic construct
  source 1..22: mol_type = other RNA
agcaaaagcaattattagttgt

SEQ ID NO: 118059 - RNA, 22 nt, synthetic construct
  source 1..22: mol_type = other RNA
agcaaaagcaccactgagaggg

SEQ ID NO: 118060 - RNA, 22 nt, synthetic construct
  source 1..22: mol_type = other RNA
agcaaaatggaagtgctgggct

SEQ ID NO: 118061 - RNA, 22 nt, synthetic construct
  source 1..22: mol_type = other RNA
agcaaaattctaacaagaagct

SEQ ID NO: 118062 - RNA, 22 nt, synthetic construct
  source 1..22: mol_type = other RNA
agcaaaattgacaaacccttgg

SEQ ID NO: 118063 - RNA, 22 nt, synthetic construct
  source 1..22: mol_type = other RNA
agcaaaattttaaatcagcacc

SEQ ID NO: 118064 - RNA, 22 nt, synthetic construct
  source 1..22: mol_type = other RNA
agcaaacaaacacactgggtaa

SEQ ID NO: 118065 - RNA, 22 nt, synthetic construct
  source 1..22: mol_type = other RNA
agcaaacatttatggaattgcc

SEQ ID NO: 118066 - RNA, 22 nt, synthetic construct
  source 1..22: mol_type = other RNA
agcaaaccagacatttctcata

SEQ ID NO: 118067 - RNA, 22 nt, synthetic construct
  source 1..22: mol_type = other RNA
agcaaacgtgcacacccagtta

SEQ ID NO: 118068 - RNA, 22 nt, synthetic construct
  source 1..22: mol_type = other RNA
agcaaactactgatagcgaaag

SEQ ID NO: 118069 - RNA, 22 nt, synthetic construct
  source 1..22: mol_type = other RNA
agcaaactcagatctgagagat

SEQ ID NO: 118070 - RNA, 22 nt, synthetic construct
  source 1..22: mol_type = other RNA
agcaaactgaatcagacaacac

SEQ ID NO: 118071 - RNA, 22 nt, synthetic construct
  source 1..22: mol_type = other RNA
agcaaagaggcaaaactcctga

SEQ ID NO: 118072 - RNA, 22 nt, synthetic construct
  source 1..22: mol_type = other RNA
agcaaagatatgggttattcac

SEQ ID NO: 118073 - RNA, 22 nt, synthetic construct
  source 1..22: mol_type = other RNA
agcaaagcaagaaaaagaaata

SEQ ID NO: 118074 - RNA, 22 nt, synthetic construct
  source 1..22: mol_type = other RNA
agcaaaggattcgggggagagc

SEQ ID NO: 118075 - RNA, 22 nt, synthetic construct
  source 1..22: mol_type = other RNA
agcaaatcagaaaaggctgaga

SEQ ID NO: 118076 - RNA, 22 nt, synthetic construct
  source 1..22: mol_type = other RNA
agcaaatctctagaacttatgc

SEQ ID NO: 118077 - RNA, 22 nt, synthetic construct
  source 1..22: mol_type = other RNA
agcaaatgtcatcttctctctc

SEQ ID NO: 118078 - RNA, 22 nt, synthetic construct
  source 1..22: mol_type = other RNA
agcaaatgtgactagaagaaat

SEQ ID NO: 118079 - RNA, 22 nt, synthetic construct
  source 1..22: mol_type = other RNA
agcaacaaaacaatctaattcg

SEQ ID NO: 118080 - RNA, 22 nt, synthetic construct
  source 1..22: mol_type = other RNA
agcaacaccagatactcatgct

SEQ ID NO: 118081 - RNA, 22 nt, synthetic construct
  source 1..22: mol_type = other RNA
agcaacactaaagatttgccaa

SEQ ID NO: 118082 - RNA, 22 nt, synthetic construct
  source 1..22: mol_type = other RNA
agcaacagaaatttattgtttc

SEQ ID NO: 118083 - RNA, 22 nt, synthetic construct
  source 1..22: mol_type = other RNA
agcaacaggaagaggcagctaa

SEQ ID NO: 118084 - RNA, 22 nt, synthetic construct
  source 1..22: mol_type = other RNA
agcaacatgctaagtgtttagg

SEQ ID NO: 118085 - RNA, 22 nt, synthetic construct
  source 1..22: mol_type = other RNA
agcaacctcatttgcagagcaa

SEQ ID NO: 118086 - RNA, 22 nt, synthetic construct
  source 1..22: mol_type = other RNA
agcaaccttttaggtgccccac

SEQ ID NO: 118087 - RNA, 22 nt, synthetic construct
  source 1..22: mol_type = other RNA
agcaacggaaatgagtgagcca

SEQ ID NO: 118088 - RNA, 22 nt, synthetic construct
  source 1..22: mol_type = other RNA
agcaactactatttcgcaaagc

SEQ ID NO: 118089 - RNA, 22 nt, synthetic construct
  source 1..22: mol_type = other RNA
agcaactcttggccattttctt

SEQ ID NO: 118090 - RNA, 22 nt, synthetic construct
  source 1..22: mol_type = other RNA
agcaactgcatcttcttttact

SEQ ID NO: 118091 - RNA, 22 nt, synthetic construct
  source 1..22: mol_type = other RNA
agcaactgttttttcctccctt

SEQ ID NO: 118092 - RNA, 22 nt, synthetic construct
  source 1..22: mol_type = other RNA
agcaacttgaaggcaatgtagg

SEQ ID NO: 118093 - RNA, 22 nt, synthetic construct
  source 1..22: mol_type = other RNA
agcaacttgatcagggatttgg

SEQ ID NO: 118094 - RNA, 22 nt, synthetic construct
  source 1..22: mol_type = other RNA
agcaacttgcagaagagtgaag

SEQ ID NO: 118095 - RNA, 22 nt, synthetic construct
  source 1..22: mol_type = other RNA
agcaagaccctgtctctaaaaa

SEQ ID NO: 118096 - RNA, 22 nt, synthetic construct
  source 1..22: mol_type = other RNA
agcaagactcaaatctcaaaaa

SEQ ID NO: 118097 - RNA, 22 nt, synthetic construct
  source 1..22: mol_type = other RNA
agcaagactttatgtggaaaaa

SEQ ID NO: 118098 - RNA, 22 nt, synthetic construct
  source 1..22: mol_type = other RNA
agcaagattactggatacaagg

SEQ ID NO: 118099 - RNA, 22 nt, synthetic construct
  source 1..22: mol_type = other RNA
agcaagcaacaccagatactca

SEQ ID NO: 118100 - RNA, 22 nt, synthetic construct
  source 1..22: mol_type = other RNA
agcaagcacgttagcatcacca

SEQ ID NO: 118101 - RNA, 22 nt, synthetic construct
  source 1..22: mol_type = other RNA
agcaagcagtaaatatactgac

SEQ ID NO: 118102 - RNA, 22 nt, synthetic construct
  source 1..22: mol_type = other RNA
agcaagcatgagtatctggtgt

SEQ ID NO: 118103 - RNA, 22 nt, synthetic construct
  source 1..22: mol_type = other RNA
agcaagccttggcaaggggaat

SEQ ID NO: 118104 - RNA, 22 nt, synthetic construct
  source 1..22: mol_type = other RNA
agcaagctaataatttatcaga

SEQ ID NO: 118105 - RNA, 22 nt, synthetic construct
  source 1..22: mol_type = other RNA
agcaaggaagcagaatgtccat

SEQ ID NO: 118106 - RNA, 22 nt, synthetic construct
  source 1..22: mol_type = other RNA
agcaaggaaggaaaggagatac

SEQ ID NO: 118107 - RNA, 22 nt, synthetic construct
  source 1..22: mol_type = other RNA
agcaaggaagggcttgatctag

SEQ ID NO: 118108 - RNA, 22 nt, synthetic construct
  source 1..22: mol_type = other RNA
agcaaggaccattagcagttct

SEQ ID NO: 118109 - RNA, 22 nt, synthetic construct
  source 1..22: mol_type = other RNA
agcaaggctcctgcagacatgc

SEQ ID NO: 118110 - RNA, 22 nt, synthetic construct
  source 1..22: mol_type = other RNA
agcaagggtggctggcactttc

SEQ ID NO: 118111 - RNA, 22 nt, synthetic construct
  source 1..22: mol_type = other RNA
agcaaggtcgtttcagattgct

SEQ ID NO: 118112 - RNA, 22 nt, synthetic construct
  source 1..22: mol_type = other RNA
agcaagtaaaagaagatgcagt

SEQ ID NO: 118113 - RNA, 22 nt, synthetic construct
  source 1..22: mol_type = other RNA
agcaagtatgagccactagtca

SEQ ID NO: 118114 - RNA, 22 nt, synthetic construct
  source 1..22: mol_type = other RNA
agcaagtccccatctccacaaa

SEQ ID NO: 118115 - RNA, 22 nt, synthetic construct
  source 1..22: mol_type = other RNA
agcaagtgtggtggtctcaccc

SEQ ID NO: 118116 - RNA, 22 nt, synthetic construct
  source 1..22: mol_type = other RNA
agcaagttaaaagacatctttc

SEQ ID NO: 118117 - RNA, 22 nt, synthetic construct
  source 1..22: mol_type = other RNA
agcaagttacatgcttagcctt

SEQ ID NO: 118118 - RNA, 22 nt, synthetic construct
  source 1..22: mol_type = other RNA
agcaatccaaggacagaaattc

SEQ ID NO: 118119 - RNA, 22 nt, synthetic construct
  source 1..22: mol_type = other RNA
agcaatccaggatcttactgta

SEQ ID NO: 118120 - RNA, 22 nt, synthetic construct
  source 1..22: mol_type = other RNA
agcaatctgaaacgaccttgct

SEQ ID NO: 118121 - RNA, 22 nt, synthetic construct
  source 1..22: mol_type = other RNA
agcaatgcgaatcatctaggca

SEQ ID NO: 118122 - RNA, 22 nt, synthetic construct
  source 1..22: mol_type = other RNA
agcaattattagttgtacttga

SEQ ID NO: 118123 - RNA, 22 nt, synthetic construct
  source 1..22: mol_type = other RNA
agcaattatttgaataaggtct

SEQ ID NO: 118124 - RNA, 22 nt, synthetic construct
  source 1..22: mol_type = other RNA
agcacaaacctggcaatactct

SEQ ID NO: 118125 - RNA, 22 nt, synthetic construct
  source 1..22: mol_type = other RNA
agcacaaccactgatggaattc

SEQ ID NO: 118126 - RNA, 22 nt, synthetic construct
  source 1..22: mol_type = other RNA
agcacaactagtaagtaaaatc

SEQ ID NO: 118127 - RNA, 22 nt, synthetic construct
  source 1..22: mol_type = other RNA
agcacaagcacagagtcagaaa

SEQ ID NO: 118128 - RNA, 22 nt, synthetic construct
  source 1..22: mol_type = other RNA
agcacaatactgtctcagtccc

SEQ ID NO: 118129 - RNA, 22 nt, synthetic construct
  source 1..22: mol_type = other RNA
agcacaatgcctgccgcagagc

SEQ ID NO: 118130 - RNA, 22 nt, synthetic construct
  source 1..22: mol_type = other RNA
agcacacagtttgagaagccac

SEQ ID NO: 118131 - RNA, 22 nt, synthetic construct
  source 1..22: mol_type = other RNA
agcacacatgaacctgcatggt

SEQ ID NO: 118132 - RNA, 22 nt, synthetic construct
  source 1..22: mol_type = other RNA
agcacaccaacatggcacatgt

SEQ ID NO: 118133 - RNA, 22 nt, synthetic construct
  source 1..22: mol_type = other RNA
agcacaccaagacatgttaggt

SEQ ID NO: 118134 - RNA, 22 nt, synthetic construct
  source 1..22: mol_type = other RNA
agcacaccaaggtttctctcca

SEQ ID NO: 118135 - RNA, 22 nt, synthetic construct
  source 1..22: mol_type = other RNA
agcacactcttaataactgcct

SEQ ID NO: 118136 - RNA, 22 nt, synthetic construct
  source 1..22: mol_type = other RNA
agcacactttccttggagaaga

SEQ ID NO: 118137 - RNA, 22 nt, synthetic construct
  source 1..22: mol_type = other RNA
agcacagaaccatgtaacaggt

SEQ ID NO: 118138 - RNA, 22 nt, synthetic construct
  source 1..22: mol_type = other RNA
agcacagaattactatatgatc

SEQ ID NO: 118139 - RNA, 22 nt, synthetic construct
  source 1..22: mol_type = other RNA
agcacagactcaagcctgataa

SEQ ID NO: 118140 - RNA, 22 nt, synthetic construct
  source 1..22: mol_type = other RNA
agcacagactgtgccttgatcc

SEQ ID NO: 118141 - RNA, 22 nt, synthetic construct
  source 1..22: mol_type = other RNA
agcacagagccgaaatgcactt

SEQ ID NO: 118142 - RNA, 22 nt, synthetic construct
  source 1..22: mol_type = other RNA
agcacagaggcaacagtcattc

SEQ ID NO: 118143 - RNA, 22 nt, synthetic construct
  source 1..22: mol_type = other RNA
agcacagagtcagaaaattaaa

SEQ ID NO: 118144 - RNA, 22 nt, synthetic construct
  source 1..22: mol_type = other RNA
agcacaggcatcggccgggcgt

SEQ ID NO: 118145 - RNA, 22 nt, synthetic construct
  source 1..22: mol_type = other RNA
agcacaggcatctctctaaaaa

SEQ ID NO: 118146 - RNA, 22 nt, synthetic construct
  source 1..22: mol_type = other RNA
agcacagtctctgcagagcagg

SEQ ID NO: 118147 - RNA, 22 nt, synthetic construct
  source 1..22: mol_type = other RNA
agcacataaaaaaggaatctgg

SEQ ID NO: 118148 - RNA, 22 nt, synthetic construct
  source 1..22: mol_type = other RNA
agcacatctgtcttgtgcatcc

SEQ ID NO: 118149 - RNA, 22 nt, synthetic construct
  source 1..22: mol_type = other RNA
agcacatggtgataactggtgc

SEQ ID NO: 118150 - RNA, 22 nt, synthetic construct
  source 1..22: mol_type = other RNA
agcacattaaataagggcattt

SEQ ID NO: 118151 - RNA, 22 nt, synthetic construct
  source 1..22: mol_type = other RNA
agcacattccttccgacctgta

SEQ ID NO: 118152 - RNA, 22 nt, synthetic construct
  source 1..22: mol_type = other RNA
agcaccaaagattatgttccac

SEQ ID NO: 118153 - RNA, 22 nt, synthetic construct
  source 1..22: mol_type = other RNA
agcaccaacagatcctcacatc

SEQ ID NO: 118154 - RNA, 22 nt, synthetic construct
  source 1..22: mol_type = other RNA
agcaccaacccttgttggacag

SEQ ID NO: 118155 - RNA, 22 nt, synthetic construct
  source 1..22: mol_type = other RNA
agcaccacacctggctaatttt

SEQ ID NO: 118156 - RNA, 22 nt, synthetic construct
  source 1..22: mol_type = other RNA
agcaccacccttgatgtcacaa

SEQ ID NO: 118157 - RNA, 22 nt, synthetic construct
  source 1..22: mol_type = other RNA
agcaccactagagtattaccta

SEQ ID NO: 118158 - RNA, 22 nt, synthetic construct
  source 1..22: mol_type = other RNA
agcaccactgagagggaagttt

SEQ ID NO: 118159 - RNA, 22 nt, synthetic construct
  source 1..22: mol_type = other RNA
agcaccacttcgagaagggaag

SEQ ID NO: 118160 - RNA, 22 nt, synthetic construct
  source 1..22: mol_type = other RNA
agcaccagatactcaatcagtg

SEQ ID NO: 118161 - RNA, 22 nt, synthetic construct
  source 1..22: mol_type = other RNA
agcaccagggcctctgaagaca

SEQ ID NO: 118162 - RNA, 22 nt, synthetic construct
  source 1..22: mol_type = other RNA
agcaccagttatcaccatgtgc

SEQ ID NO: 118163 - RNA, 22 nt, synthetic construct
  source 1..22: mol_type = other RNA
agcaccatctaacagaaataca

SEQ ID NO: 118164 - RNA, 22 nt, synthetic construct
  source 1..22: mol_type = other RNA
agcaccctatttatgttgcaca

SEQ ID NO: 118165 - RNA, 22 nt, synthetic construct
  source 1..22: mol_type = other RNA
agcaccctcaaatgtctcattg

SEQ ID NO: 118166 - RNA, 22 nt, synthetic construct
  source 1..22: mol_type = other RNA
agcacctaacaatgattatttc

SEQ ID NO: 118167 - RNA, 22 nt, synthetic construct
  source 1..22: mol_type = other RNA
agcacctgtataaataaaatgt

SEQ ID NO: 118168 - RNA, 22 nt, synthetic construct
  source 1..22: mol_type = other RNA
agcacctttattaactagaatt

SEQ ID NO: 118169 - RNA, 22 nt, synthetic construct
  source 1..22: mol_type = other RNA
agcaccttttttggtatttttt

SEQ ID NO: 118170 - RNA, 22 nt, synthetic construct
  source 1..22: mol_type = other RNA
agcacgttagcatcaccatcat

SEQ ID NO: 118171 - RNA, 22 nt, synthetic construct
  source 1..22: mol_type = other RNA
agcacgtttgatctggtcacaa

SEQ ID NO: 118172 - RNA, 22 nt, synthetic construct
  source 1..22: mol_type = other RNA
agcactatccacatttggtttt

SEQ ID NO: 118173 - RNA, 22 nt, synthetic construct
  source 1..22: mol_type = other RNA
agcactctgaatcacctcaagg

SEQ ID NO: 118174 - RNA, 22 nt, synthetic construct
  source 1..22: mol_type = other RNA
agcactgatgtgtagttattat

SEQ ID NO: 118175 - RNA, 22 nt, synthetic construct
  source 1..22: mol_type = other RNA
agcactgcgccaagcagggacg

SEQ ID NO: 118176 - RNA, 22 nt, synthetic construct
  source 1..22: mol_type = other RNA
agcactgctattgataaatcta

SEQ ID NO: 118177 - RNA, 22 nt, synthetic construct
  source 1..22: mol_type = other RNA
agcactggtaaggaaacagagt

SEQ ID NO: 118178 - RNA, 22 nt, synthetic construct
  source 1..22: mol_type = other RNA
agcactggtttcagtacacgaa

SEQ ID NO: 118179 - RNA, 22 nt, synthetic construct
  source 1..22: mol_type = other RNA
agcactgtgagccactaaaaca

SEQ ID NO: 118180 - RNA, 22 nt, synthetic construct
  source 1..22: mol_type = other RNA
agcactgttaactgacttacag

SEQ ID NO: 118181 - RNA, 22 nt, synthetic construct
  source 1..22: mol_type = other RNA
agcacttccattttgcttaata

SEQ ID NO: 118182 - RNA, 22 nt, synthetic construct
  source 1..22: mol_type = other RNA
agcacttctgatatcctgtaaa

SEQ ID NO: 118183 - RNA, 22 nt, synthetic construct
  source 1..22: mol_type = other RNA
agcacttggggaggccaaggca

SEQ ID NO: 118184 - RNA, 22 nt, synthetic construct
  source 1..22: mol_type = other RNA
agcactttcgtatttttgttat

SEQ ID NO: 118185 - RNA, 22 nt, synthetic construct
  source 1..22: mol_type = other RNA
agcacttttaaggcttggaaaa

SEQ ID NO: 118186 - RNA, 22 nt, synthetic construct
  source 1..22: mol_type = other RNA
agcacttttgtactacttgtca

SEQ ID NO: 118187 - RNA, 22 nt, synthetic construct
  source 1..22: mol_type = other RNA
agcactttttaccaagttgaat

SEQ ID NO: 118188 - RNA, 22 nt, synthetic construct
  source 1..22: mol_type = other RNA
agcagaaaatcagtgtgaaagt

SEQ ID NO: 118189 - RNA, 22 nt, synthetic construct
  source 1..22: mol_type = other RNA
agcagaaacacaggactgtgtg

SEQ ID NO: 118190 - RNA, 22 nt, synthetic construct
  source 1..22: mol_type = other RNA
agcagaaagttactattttcat

SEQ ID NO: 118191 - RNA, 22 nt, synthetic construct
  source 1..22: mol_type = other RNA
agcagaaatacagaccgatgga

SEQ ID NO: 118192 - RNA, 22 nt, synthetic construct
  source 1..22: mol_type = other RNA
agcagaaatgacaagtaaatgc

SEQ ID NO: 118193 - RNA, 22 nt, synthetic construct
  source 1..22: mol_type = other RNA
agcagaaatgagttccagtcct

SEQ ID NO: 118194 - RNA, 22 nt, synthetic construct
  source 1..22: mol_type = other RNA
agcagaacaaactgcgtggttt

SEQ ID NO: 118195 - RNA, 22 nt, synthetic construct
  source 1..22: mol_type = other RNA
agcagaaccttagaaatttaag

SEQ ID NO: 118196 - RNA, 22 nt, synthetic construct
  source 1..22: mol_type = other RNA
agcagaactaagaccccagtag

SEQ ID NO: 118197 - RNA, 22 nt, synthetic construct
  source 1..22: mol_type = other RNA
agcagaactccacctcagaaac

SEQ ID NO: 118198 - RNA, 22 nt, synthetic construct
  source 1..22: mol_type = other RNA
agcagaaggaggaaaataattt

SEQ ID NO: 118199 - RNA, 22 nt, synthetic construct
  source 1..22: mol_type = other RNA
agcagaagggaaaggatgacct

SEQ ID NO: 118200 - RNA, 22 nt, synthetic construct
  source 1..22: mol_type = other RNA
agcagaaggtgagggactgagc

SEQ ID NO: 118201 - RNA, 22 nt, synthetic construct
  source 1..22: mol_type = other RNA
agcagaatccccaaataacatg

SEQ ID NO: 118202 - RNA, 22 nt, synthetic construct
  source 1..22: mol_type = other RNA
agcagaatggccctgcgattgg

SEQ ID NO: 118203 - RNA, 22 nt, synthetic construct
  source 1..22: mol_type = other RNA
agcagaatgtccatcaggaaaa

SEQ ID NO: 118204 - RNA, 22 nt, synthetic construct
  source 1..22: mol_type = other RNA
agcagaattcaaaaacactgta

SEQ ID NO: 118205 - RNA, 22 nt, synthetic construct
  source 1..22: mol_type = other RNA
agcagacactgggttctcacca

SEQ ID NO: 118206 - RNA, 22 nt, synthetic construct
  source 1..22: mol_type = other RNA
agcagacagaaagacagggaga

SEQ ID NO: 118207 - RNA, 22 nt, synthetic construct
  source 1..22: mol_type = other RNA
agcagagaaactggaatcaatc

SEQ ID NO: 118208 - RNA, 22 nt, synthetic construct
  source 1..22: mol_type = other RNA
agcagagaagtgaagcttcaaa

SEQ ID NO: 118209 - RNA, 22 nt, synthetic construct
  source 1..22: mol_type = other RNA
agcagagacacacatcagacac

SEQ ID NO: 118210 - RNA, 22 nt, synthetic construct
  source 1..22: mol_type = other RNA
agcagagagagaagatgacatt

SEQ ID NO: 118211 - RNA, 22 nt, synthetic construct
  source 1..22: mol_type = other RNA
agcagagtcctgagggtgagac

SEQ ID NO: 118212 - RNA, 22 nt, synthetic construct
  source 1..22: mol_type = other RNA
agcagataagatccaagtattg

SEQ ID NO: 118213 - RNA, 22 nt, synthetic construct
  source 1..22: mol_type = other RNA
agcagatcagtaacaaataaga

SEQ ID NO: 118214 - RNA, 22 nt, synthetic construct
  source 1..22: mol_type = other RNA
agcagatctgctgtaagctggt

SEQ ID NO: 118215 - RNA, 22 nt, synthetic construct
  source 1..22: mol_type = other RNA
agcagatctgcttgcagacaat

SEQ ID NO: 118216 - RNA, 22 nt, synthetic construct
  source 1..22: mol_type = other RNA
agcagcaagggtggctggcact

SEQ ID NO: 118217 - RNA, 22 nt, synthetic construct
  source 1..22: mol_type = other RNA
agcagcactgatgtgtagttat

SEQ ID NO: 118218 - RNA, 22 nt, synthetic construct
  source 1..22: mol_type = other RNA
agcagcagagaagtgaagcttc

SEQ ID NO: 118219 - RNA, 22 nt, synthetic construct
  source 1..22: mol_type = other RNA
agcagcattgtttacagtagcc

SEQ ID NO: 118220 - RNA, 22 nt, synthetic construct
  source 1..22: mol_type = other RNA
agcagccccgacgcctttcatt

SEQ ID NO: 118221 - RNA, 22 nt, synthetic construct
  source 1..22: mol_type = other RNA
agcagctacctgttgattgttg

SEQ ID NO: 118222 - RNA, 22 nt, synthetic construct
  source 1..22: mol_type = other RNA
agcagctctagcaaacaaacac

SEQ ID NO: 118223 - RNA, 22 nt, synthetic construct
  source 1..22: mol_type = other RNA
agcaggaaaagctaccctcgag

SEQ ID NO: 118224 - RNA, 22 nt, synthetic construct
  source 1..22: mol_type = other RNA
agcaggaactcatattagtctg

SEQ ID NO: 118225 - RNA, 22 nt, synthetic construct
  source 1..22: mol_type = other RNA
agcaggactggactccttctga

SEQ ID NO: 118226 - RNA, 22 nt, synthetic construct
  source 1..22: mol_type = other RNA
agcaggattcttgttaagcatt

SEQ ID NO: 118227 - RNA, 22 nt, synthetic construct
  source 1..22: mol_type = other RNA
agcaggccctgagaagtcaaag

SEQ ID NO: 118228 - RNA, 22 nt, synthetic construct
  source 1..22: mol_type = other RNA
agcaggccttcgaggcatctag

SEQ ID NO: 118229 - RNA, 22 nt, synthetic construct
  source 1..22: mol_type = other RNA
agcaggctccacttgggtggaa

SEQ ID NO: 118230 - RNA, 22 nt, synthetic construct
  source 1..22: mol_type = other RNA
agcaggctttttacccggagag

SEQ ID NO: 118231 - RNA, 22 nt, synthetic construct
  source 1..22: mol_type = other RNA
agcagggaaatggagggccaga

SEQ ID NO: 118232 - RNA, 22 nt, synthetic construct
  source 1..22: mol_type = other RNA
agcagggaccacaggcatgcgc

SEQ ID NO: 118233 - RNA, 22 nt, synthetic construct
  source 1..22: mol_type = other RNA
agcagggactacagtcacacac

SEQ ID NO: 118234 - RNA, 22 nt, synthetic construct
  source 1..22: mol_type = other RNA
agcagggactcccatatctaca

SEQ ID NO: 118235 - RNA, 22 nt, synthetic construct
  source 1..22: mol_type = other RNA
agcagggaggggtccccagcat

SEQ ID NO: 118236 - RNA, 22 nt, synthetic construct
  source 1..22: mol_type = other RNA
agcagggctcctccaaggctgc

SEQ ID NO: 118237 - RNA, 22 nt, synthetic construct
  source 1..22: mol_type = other RNA
agcaggggaaggcttcgagttc

SEQ ID NO: 118238 - RNA, 22 nt, synthetic construct
  source 1..22: mol_type = other RNA
agcaggggctaagtagtggcag

SEQ ID NO: 118239 - RNA, 22 nt, synthetic construct
  source 1..22: mol_type = other RNA
agcaggggtggggggatgtaga

SEQ ID NO: 118240 - RNA, 22 nt, synthetic construct
  source 1..22: mol_type = other RNA
agcagggtaaagtcaattctag

SEQ ID NO: 118241 - RNA, 22 nt, synthetic construct
  source 1..22: mol_type = other RNA
agcagggtcatgcacacgctgg

SEQ ID NO: 118242 - RNA, 22 nt, synthetic construct
  source 1..22: mol_type = other RNA
agcagggtgggcccttaatcca

SEQ ID NO: 118243 - RNA, 22 nt, synthetic construct
  source 1..22: mol_type = other RNA
agcaggtcatgacttttttgcc

SEQ ID NO: 118244 - RNA, 22 nt, synthetic construct
  source 1..22: mol_type = other RNA
agcaggtggaaggcctgatagc

SEQ ID NO: 118245 - RNA, 22 nt, synthetic construct
  source 1..22: mol_type = other RNA
agcaggttcattttaataagct

SEQ ID NO: 118246 - RNA, 22 nt, synthetic construct
  source 1..22: mol_type = other RNA
agcaggttgcattaatgcttca

SEQ ID NO: 118247 - RNA, 22 nt, synthetic construct
  source 1..22: mol_type = other RNA
agcaggtttaggaagcacattc

SEQ ID NO: 118248 - RNA, 22 nt, synthetic construct
  source 1..22: mol_type = other RNA
agcagtaaaatgaaaaaaccta

SEQ ID NO: 118249 - RNA, 22 nt, synthetic construct
  source 1..22: mol_type = other RNA
agcagtaaatatactgactagt

SEQ ID NO: 118250 - RNA, 22 nt, synthetic construct
  source 1..22: mol_type = other RNA
agcagtaaatgcctacattaaa

SEQ ID NO: 118251 - RNA, 22 nt, synthetic construct
  source 1..22: mol_type = other RNA
agcagtaggcttagataggatg

SEQ ID NO: 118252 - RNA, 22 nt, synthetic construct
  source 1..22: mol_type = other RNA
agcagtcctgccttggcctccc

SEQ ID NO: 118253 - RNA, 22 nt, synthetic construct
  source 1..22: mol_type = other RNA
agcagtcttaaccattgagcca

SEQ ID NO: 118254 - RNA, 22 nt, synthetic construct
  source 1..22: mol_type = other RNA
agcagtgaaagtctccctaacc

SEQ ID NO: 118255 - RNA, 22 nt, synthetic construct
  source 1..22: mol_type = other RNA
agcagtgaccatatttccaaat

SEQ ID NO: 118256 - RNA, 22 nt, synthetic construct
  source 1..22: mol_type = other RNA
agcagtgctgaaagctagaaga

SEQ ID NO: 118257 - RNA, 22 nt, synthetic construct
  source 1..22: mol_type = other RNA
agcagtgggaagtggagtgcga

SEQ ID NO: 118258 - RNA, 22 nt, synthetic construct
  source 1..22: mol_type = other RNA
agcagtgtgaataggaaagtga

SEQ ID NO: 118259 - RNA, 22 nt, synthetic construct
  source 1..22: mol_type = other RNA
agcagtgtgttctgccttgagg

SEQ ID NO: 118260 - RNA, 22 nt, synthetic construct
  source 1..22: mol_type = other RNA
agcagtgtttcctagattccct

SEQ ID NO: 118261 - RNA, 22 nt, synthetic construct
  source 1..22: mol_type = other RNA
agcagttactcctgagcaagga

SEQ ID NO: 118262 - RNA, 22 nt, synthetic construct
  source 1..22: mol_type = other RNA
agcagttcaagcaccacttcga

SEQ ID NO: 118263 - RNA, 22 nt, synthetic construct
  source 1..22: mol_type = other RNA
agcagttcagcctgcagaagga

SEQ ID NO: 118264 - RNA, 22 nt, synthetic construct
  source 1..22: mol_type = other RNA
agcagttctgtacccttacgcg

SEQ ID NO: 118265 - RNA, 22 nt, synthetic construct
  source 1..22: mol_type = other RNA
agcagttgatgcaatttgtttt

SEQ ID NO: 118266 - RNA, 22 nt, synthetic construct
  source 1..22: mol_type = other RNA
agcagttgtatgccaaaaaatt

SEQ ID NO: 118267 - RNA, 22 nt, synthetic construct
  source 1..22: mol_type = other RNA
agcagtttcacttcttagtaaa

SEQ ID NO: 118268 - RNA, 22 nt, synthetic construct
  source 1..22: mol_type = other RNA
agcagttttaaagaattcgtta

SEQ ID NO: 118269 - RNA, 22 nt, synthetic construct
  source 1..22: mol_type = other RNA
agcataaaaaagatcaaatgac

SEQ ID NO: 118270 - RNA, 22 nt, synthetic construct
  source 1..22: mol_type = other RNA
agcataagacccctcaggtgtc

SEQ ID NO: 118271 - RNA, 22 nt, synthetic construct
  source 1..22: mol_type = other RNA
agcataattggttaaacttggt

SEQ ID NO: 118272 - RNA, 22 nt, synthetic construct
  source 1..22: mol_type = other RNA
agcatactgtggatatctttta

SEQ ID NO: 118273 - RNA, 22 nt, synthetic construct
  source 1..22: mol_type = other RNA
agcatagactttagagtcagtt

SEQ ID NO: 118274 - RNA, 22 nt, synthetic construct
  source 1..22: mol_type = other RNA
agcatagcagaaccttagaaat

SEQ ID NO: 118275 - RNA, 22 nt, synthetic construct
  source 1..22: mol_type = other RNA
agcatagcttgaaccagggagg

SEQ ID NO: 118276 - RNA, 22 nt, synthetic construct
  source 1..22: mol_type = other RNA
agcatagtttgagtatttcatg

SEQ ID NO: 118277 - RNA, 22 nt, synthetic construct
  source 1..22: mol_type = other RNA
agcatatacatgacatggtttt

SEQ ID NO: 118278 - RNA, 22 nt, synthetic construct
  source 1..22: mol_type = other RNA
agcatatatactctgagacagg

SEQ ID NO: 118279 - RNA, 22 nt, synthetic construct
  source 1..22: mol_type = other RNA
agcatatgaatctagaaagata

SEQ ID NO: 118280 - RNA, 22 nt, synthetic construct
  source 1..22: mol_type = other RNA
agcatattagctgtctggattg

SEQ ID NO: 118281 - RNA, 22 nt, synthetic construct
  source 1..22: mol_type = other RNA
agcatcaccatcatcatcaggc

SEQ ID NO: 118282 - RNA, 22 nt, synthetic construct
  source 1..22: mol_type = other RNA
agcatcagagctttgttatgaa

SEQ ID NO: 118283 - RNA, 22 nt, synthetic construct
  source 1..22: mol_type = other RNA
agcatccactaggggactaaca

SEQ ID NO: 118284 - RNA, 22 nt, synthetic construct
  source 1..22: mol_type = other RNA
agcatcccagaggtactcaacg

SEQ ID NO: 118285 - RNA, 22 nt, synthetic construct
  source 1..22: mol_type = other RNA
agcatcccatatggaggcaatg

SEQ ID NO: 118286 - RNA, 22 nt, synthetic construct
  source 1..22: mol_type = other RNA
agcatccccagaaagagagagg

SEQ ID NO: 118287 - RNA, 22 nt, synthetic construct
  source 1..22: mol_type = other RNA
agcatccccgctgcgagaaagg

SEQ ID NO: 118288 - RNA, 22 nt, synthetic construct
  source 1..22: mol_type = other RNA
agcatccctccagtccagcacc

SEQ ID NO: 118289 - RNA, 22 nt, synthetic construct
  source 1..22: mol_type = other RNA
agcatccctgccgcgcgcgaag

SEQ ID NO: 118290 - RNA, 22 nt, synthetic construct
  source 1..22: mol_type = other RNA
agcatcgtgaagtctttatttt

SEQ ID NO: 118291 - RNA, 22 nt, synthetic construct
  source 1..22: mol_type = other RNA
agcatctagcacagaaccatgt

SEQ ID NO: 118292 - RNA, 22 nt, synthetic construct
  source 1..22: mol_type = other RNA
agcatctgatacacttctatcc

SEQ ID NO: 118293 - RNA, 22 nt, synthetic construct
  source 1..22: mol_type = other RNA
agcatcttagctcttcccttaa

SEQ ID NO: 118294 - RNA, 22 nt, synthetic construct
  source 1..22: mol_type = other RNA
agcatcttcactgactacacat

SEQ ID NO: 118295 - RNA, 22 nt, synthetic construct
  source 1..22: mol_type = other RNA
agcatcttcccatgaacatggt

SEQ ID NO: 118296 - RNA, 22 nt, synthetic construct
  source 1..22: mol_type = other RNA
agcatcttttgacgcgcaacaa

SEQ ID NO: 118297 - RNA, 22 nt, synthetic construct
  source 1..22: mol_type = other RNA
agcatgaagccctctaagtcag

SEQ ID NO: 118298 - RNA, 22 nt, synthetic construct
  source 1..22: mol_type = other RNA
agcatgaatacctatttagagg

SEQ ID NO: 118299 - RNA, 22 nt, synthetic construct
  source 1..22: mol_type = other RNA
agcatgagatactacgcctagc

SEQ ID NO: 118300 - RNA, 22 nt, synthetic construct
  source 1..22: mol_type = other RNA
agcatgagtatctggtgttgct

SEQ ID NO: 118301 - RNA, 22 nt, synthetic construct
  source 1..22: mol_type = other RNA
agcatgatttataatccattgg

SEQ ID NO: 118302 - RNA, 22 nt, synthetic construct
  source 1..22: mol_type = other RNA
agcatgcacacaggagaacttg

SEQ ID NO: 118303 - RNA, 22 nt, synthetic construct
  source 1..22: mol_type = other RNA
agcatgcagtagctcatcattt

SEQ ID NO: 118304 - RNA, 22 nt, synthetic construct
  source 1..22: mol_type = other RNA
agcatgcctgacaaagtatgag

SEQ ID NO: 118305 - RNA, 22 nt, synthetic construct
  source 1..22: mol_type = other RNA
agcatgctcactgtctccatgt

SEQ ID NO: 118306 - RNA, 22 nt, synthetic construct
  source 1..22: mol_type = other RNA
agcatgctgcaactgagaagag

SEQ ID NO: 118307 - RNA, 22 nt, synthetic construct
  source 1..22: mol_type = other RNA
agcatggtggtaggtgtgtgta

SEQ ID NO: 118308 - RNA, 22 nt, synthetic construct
  source 1..22: mol_type = other RNA
agcatgtaacttgcttaggctg

SEQ ID NO: 118309 - RNA, 22 nt, synthetic construct
  source 1..22: mol_type = other RNA
agcatgtcccctggagttaatt

SEQ ID NO: 118310 - RNA, 22 nt, synthetic construct
  source 1..22: mol_type = other RNA
agcatgtcttcagaggccctgg

SEQ ID NO: 118311 - RNA, 22 nt, synthetic construct
  source 1..22: mol_type = other RNA
agcatgtggccaggaggaggag

SEQ ID NO: 118312 - RNA, 22 nt, synthetic construct
  source 1..22: mol_type = other RNA
agcatgttgctttgcgaaatag

SEQ ID NO: 118313 - RNA, 22 nt, synthetic construct
  source 1..22: mol_type = other RNA
agcatgttgggccaacttccag

SEQ ID NO: 118314 - RNA, 22 nt, synthetic construct
  source 1..22: mol_type = other RNA
agcattaatgcaacctgctttc

SEQ ID NO: 118315 - RNA, 22 nt, synthetic construct
  source 1..22: mol_type = other RNA
agcattaccctaataacaaaat

SEQ ID NO: 118316 - RNA, 22 nt, synthetic construct
  source 1..22: mol_type = other RNA
agcattacttaggcagttatta

SEQ ID NO: 118317 - RNA, 22 nt, synthetic construct
  source 1..22: mol_type = other RNA
agcattatcccagatctaacaa

SEQ ID NO: 118318 - RNA, 22 nt, synthetic construct
  source 1..22: mol_type = other RNA
agcattatccctttaaaatgat

SEQ ID NO: 118319 - RNA, 22 nt, synthetic construct
  source 1..22: mol_type = other RNA
agcattatcttaataacctcaa

SEQ ID NO: 118320 - RNA, 22 nt, synthetic construct
  source 1..22: mol_type = other RNA
agcattccccacataggatagt

SEQ ID NO: 118321 - RNA, 22 nt, synthetic construct
  source 1..22: mol_type = other RNA
agcattgaagtatagtttgaag

SEQ ID NO: 118322 - RNA, 22 nt, synthetic construct
  source 1..22: mol_type = other RNA
agcattgcctttattactatta

SEQ ID NO: 118323 - RNA, 22 nt, synthetic construct
  source 1..22: mol_type = other RNA
agcattgggagctttcattatt

SEQ ID NO: 118324 - RNA, 22 nt, synthetic construct
  source 1..22: mol_type = other RNA
agcattgtttacagtagccaaa

SEQ ID NO: 118325 - RNA, 22 nt, synthetic construct
  source 1..22: mol_type = other RNA
agcatttagccccctgaatacc

SEQ ID NO: 118326 - RNA, 22 nt, synthetic construct
  source 1..22: mol_type = other RNA
agcatttcagccaaagctggca

SEQ ID NO: 118327 - RNA, 22 nt, synthetic construct
  source 1..22: mol_type = other RNA
agcatttgaaaacatgttttgt

SEQ ID NO: 118328 - RNA, 22 nt, synthetic construct
  source 1..22: mol_type = other RNA
agcattttataggcattcctta

SEQ ID NO: 118329 - RNA, 22 nt, synthetic construct
  source 1..22: mol_type = other RNA
agcattttccggttgtatagca

SEQ ID NO: 118330 - RNA, 22 nt, synthetic construct
  source 1..22: mol_type = other RNA
agcattttctaaattgaacagc

SEQ ID NO: 118331 - RNA, 22 nt, synthetic construct
  source 1..22: mol_type = other RNA
agccaaacagtttttacatgta

SEQ ID NO: 118332 - RNA, 22 nt, synthetic construct
  source 1..22: mol_type = other RNA
agccaaacatcatgatttaata

SEQ ID NO: 118333 - RNA, 22 nt, synthetic construct
  source 1..22: mol_type = other RNA
agccaaacttgaaccttcctct

SEQ ID NO: 118334 - RNA, 22 nt, synthetic construct
  source 1..22: mol_type = other RNA
agccaaagaaattggacgggtg

SEQ ID NO: 118335 - RNA, 22 nt, synthetic construct
  source 1..22: mol_type = other RNA
agccaaagaagaaatcaaatgg

SEQ ID NO: 118336 - RNA, 22 nt, synthetic construct
  source 1..22: mol_type = other RNA
agccaaagacattgtcttacat

SEQ ID NO: 118337 - RNA, 22 nt, synthetic construct
  source 1..22: mol_type = other RNA
agccaaagcaagccttggcaag

SEQ ID NO: 118338 - RNA, 22 nt, synthetic construct
  source 1..22: mol_type = other RNA
agccaaagctggcatgttggat

SEQ ID NO: 118339 - RNA, 22 nt, synthetic construct
  source 1..22: mol_type = other RNA
agccaaaggtagaaacatccca

SEQ ID NO: 118340 - RNA, 22 nt, synthetic construct
  source 1..22: mol_type = other RNA
agccaaataaaacacaaggaca

SEQ ID NO: 118341 - RNA, 22 nt, synthetic construct
  source 1..22: mol_type = other RNA
agccaacaaccataatgagtaa

SEQ ID NO: 118342 - RNA, 22 nt, synthetic construct
  source 1..22: mol_type = other RNA
agccaagagcgaggcctggaac

SEQ ID NO: 118343 - RNA, 22 nt, synthetic construct
  source 1..22: mol_type = other RNA
agccaagcatggtggtaggtgt

SEQ ID NO: 118344 - RNA, 22 nt, synthetic construct
  source 1..22: mol_type = other RNA
agccaagggtttgtcaattttg

SEQ ID NO: 118345 - RNA, 22 nt, synthetic construct
  source 1..22: mol_type = other RNA
agccaagtaaaagcaacctcat

SEQ ID NO: 118346 - RNA, 22 nt, synthetic construct
  source 1..22: mol_type = other RNA
agccaatatccctgataatcac

SEQ ID NO: 118347 - RNA, 22 nt, synthetic construct
  source 1..22: mol_type = other RNA
agccaatcttcccaatcctttg

SEQ ID NO: 118348 - RNA, 22 nt, synthetic construct
  source 1..22: mol_type = other RNA
agccacaagacataagcatttt

SEQ ID NO: 118349 - RNA, 22 nt, synthetic construct
  source 1..22: mol_type = other RNA
agccacaagccacatgtggtta

SEQ ID NO: 118350 - RNA, 22 nt, synthetic construct
  source 1..22: mol_type = other RNA
agccacacagtacaaggctaga

SEQ ID NO: 118351 - RNA, 22 nt, synthetic construct
  source 1..22: mol_type = other RNA
agccacactcttggtctttctc

SEQ ID NO: 118352 - RNA, 22 nt, synthetic construct
  source 1..22: mol_type = other RNA
agccacagcgcccggcccgtta

SEQ ID NO: 118353 - RNA, 22 nt, synthetic construct
  source 1..22: mol_type = other RNA
agccacagcgtggaatggtcaa

SEQ ID NO: 118354 - RNA, 22 nt, synthetic construct
  source 1..22: mol_type = other RNA
agccacagcgttgttcagttga

SEQ ID NO: 118355 - RNA, 22 nt, synthetic construct
  source 1..22: mol_type = other RNA
agccacagctacactcaataca

SEQ ID NO: 118356 - RNA, 22 nt, synthetic construct
  source 1..22: mol_type = other RNA
agccacagggcccagcctcaac

SEQ ID NO: 118357 - RNA, 22 nt, synthetic construct
  source 1..22: mol_type = other RNA
agccacatacatagtattaaat

SEQ ID NO: 118358 - RNA, 22 nt, synthetic construct
  source 1..22: mol_type = other RNA
agccacatgtggttattgagtc

SEQ ID NO: 118359 - RNA, 22 nt, synthetic construct
  source 1..22: mol_type = other RNA
agccacattagccactctgaat

SEQ ID NO: 118360 - RNA, 22 nt, synthetic construct
  source 1..22: mol_type = other RNA
agccaccacgtccggtcgttgg

SEQ ID NO: 118361 - RNA, 22 nt, synthetic construct
  source 1..22: mol_type = other RNA
agccaccactcccggccgtatt

SEQ ID NO: 118362 - RNA, 22 nt, synthetic construct
  source 1..22: mol_type = other RNA
agccacccttgctgcttctacc

SEQ ID NO: 118363 - RNA, 22 nt, synthetic construct
  source 1..22: mol_type = other RNA
agccaccgcacctggccgggat

SEQ ID NO: 118364 - RNA, 22 nt, synthetic construct
  source 1..22: mol_type = other RNA
agccaccgcactcagcctgttg

SEQ ID NO: 118365 - RNA, 22 nt, synthetic construct
  source 1..22: mol_type = other RNA
agccaccgcgcccggccaaata

SEQ ID NO: 118366 - RNA, 22 nt, synthetic construct
  source 1..22: mol_type = other RNA
agccaccgcgcccggcccagat

SEQ ID NO: 118367 - RNA, 22 nt, synthetic construct
  source 1..22: mol_type = other RNA
agccaccgcgcctggtgattaa

SEQ ID NO: 118368 - RNA, 22 nt, synthetic construct
  source 1..22: mol_type = other RNA
agccaccgtgcccggccagaca

SEQ ID NO: 118369 - RNA, 22 nt, synthetic construct
  source 1..22: mol_type = other RNA
agccaccgtgccgggcttggta

SEQ ID NO: 118370 - RNA, 22 nt, synthetic construct
  source 1..22: mol_type = other RNA
agccacctcatccggtctcagt

SEQ ID NO: 118371 - RNA, 22 nt, synthetic construct
  source 1..22: mol_type = other RNA
agccacgtgtattgagtgtagc

SEQ ID NO: 118372 - RNA, 22 nt, synthetic construct
  source 1..22: mol_type = other RNA
agccactaaaacaggaagttga

SEQ ID NO: 118373 - RNA, 22 nt, synthetic construct
  source 1..22: mol_type = other RNA
agccactacgcccggcccatga

SEQ ID NO: 118374 - RNA, 22 nt, synthetic construct
  source 1..22: mol_type = other RNA
agccactagtcagtatatttac

SEQ ID NO: 118375 - RNA, 22 nt, synthetic construct
  source 1..22: mol_type = other RNA
agccactatagaaaatagtatg

SEQ ID NO: 118376 - RNA, 22 nt, synthetic construct
  source 1..22: mol_type = other RNA
agccactctgaattctctggaa

SEQ ID NO: 118377 - RNA, 22 nt, synthetic construct
  source 1..22: mol_type = other RNA
agccactgcattcatccaggca

SEQ ID NO: 118378 - RNA, 22 nt, synthetic construct
  source 1..22: mol_type = other RNA
agccactgcgggcccagctctt

SEQ ID NO: 118379 - RNA, 22 nt, synthetic construct
  source 1..22: mol_type = other RNA
agccactgggtcttataggttg

SEQ ID NO: 118380 - RNA, 22 nt, synthetic construct
  source 1..22: mol_type = other RNA
agccacttcctattagaagaat

SEQ ID NO: 118381 - RNA, 22 nt, synthetic construct
  source 1..22: mol_type = other RNA
agccagagagtggaaagagcca

SEQ ID NO: 118382 - RNA, 22 nt, synthetic construct
  source 1..22: mol_type = other RNA
agccagaggaagcttataattt

SEQ ID NO: 118383 - RNA, 22 nt, synthetic construct
  source 1..22: mol_type = other RNA
agccagagtttcactctgtcgc

SEQ ID NO: 118384 - RNA, 22 nt, synthetic construct
  source 1..22: mol_type = other RNA
agccagatttgatcctggaata

SEQ ID NO: 118385 - RNA, 22 nt, synthetic construct
  source 1..22: mol_type = other RNA
agccagcaaatcagaaaaggct

SEQ ID NO: 118386 - RNA, 22 nt, synthetic construct
  source 1..22: mol_type = other RNA
agccagcacctaacaatgatta

SEQ ID NO: 118387 - RNA, 22 nt, synthetic construct
  source 1..22: mol_type = other RNA
agccagcattaccctaataaca

SEQ ID NO: 118388 - RNA, 22 nt, synthetic construct
  source 1..22: mol_type = other RNA
agccagcctgatgatgatggtg

SEQ ID NO: 118389 - RNA, 22 nt, synthetic construct
  source 1..22: mol_type = other RNA
agccaggaagtcagcaactctt

SEQ ID NO: 118390 - RNA, 22 nt, synthetic construct
  source 1..22: mol_type = other RNA
agccaggcatgggggcgcgtgc

SEQ ID NO: 118391 - RNA, 22 nt, synthetic construct
  source 1..22: mol_type = other RNA
agccaggcgtggtggcggatgc

SEQ ID NO: 118392 - RNA, 22 nt, synthetic construct
  source 1..22: mol_type = other RNA
agccaggctttcccagggtgta

SEQ ID NO: 118393 - RNA, 22 nt, synthetic construct
  source 1..22: mol_type = other RNA
agccagggtctgtctcacctca

SEQ ID NO: 118394 - RNA, 22 nt, synthetic construct
  source 1..22: mol_type = other RNA
agccagtcactaaaaatcagat

SEQ ID NO: 118395 - RNA, 22 nt, synthetic construct
  source 1..22: mol_type = other RNA
agccagtcagtgatggaggtgg

SEQ ID NO: 118396 - RNA, 22 nt, synthetic construct
  source 1..22: mol_type = other RNA
agccagtccttgtgatctatgc

SEQ ID NO: 118397 - RNA, 22 nt, synthetic construct
  source 1..22: mol_type = other RNA
agccagtgattggatatttgca

SEQ ID NO: 118398 - RNA, 22 nt, synthetic construct
  source 1..22: mol_type = other RNA
agccagtgcagcaagcagtaaa

SEQ ID NO: 118399 - RNA, 22 nt, synthetic construct
  source 1..22: mol_type = other RNA
agccataagagtccccaactgc

SEQ ID NO: 118400 - RNA, 22 nt, synthetic construct
  source 1..22: mol_type = other RNA
agccataatccttagattacaa

SEQ ID NO: 118401 - RNA, 22 nt, synthetic construct
  source 1..22: mol_type = other RNA
agccatagtgtaaactaaaagt

SEQ ID NO: 118402 - RNA, 22 nt, synthetic construct
  source 1..22: mol_type = other RNA
agccatcaacctaatgaaattt

SEQ ID NO: 118403 - RNA, 22 nt, synthetic construct
  source 1..22: mol_type = other RNA
agccatcatgcctgggtaatta

SEQ ID NO: 118404 - RNA, 22 nt, synthetic construct
  source 1..22: mol_type = other RNA
agccatcccagctacataactt

SEQ ID NO: 118405 - RNA, 22 nt, synthetic construct
  source 1..22: mol_type = other RNA
agccatcctccagccttaatct

SEQ ID NO: 118406 - RNA, 22 nt, synthetic construct
  source 1..22: mol_type = other RNA
agccatcgcgcccagcccgtgt

SEQ ID NO: 118407 - RNA, 22 nt, synthetic construct
  source 1..22: mol_type = other RNA
agccatctaattcacatttaag

SEQ ID NO: 118408 - RNA, 22 nt, synthetic construct
  source 1..22: mol_type = other RNA
agccatggctcactgcggcctc

SEQ ID NO: 118409 - RNA, 22 nt, synthetic construct
  source 1..22: mol_type = other RNA
agccatgtttctcctgcatggg

SEQ ID NO: 118410 - RNA, 22 nt, synthetic construct
  source 1..22: mol_type = other RNA
agccattctcttctggatagca

SEQ ID NO: 118411 - RNA, 22 nt, synthetic construct
  source 1..22: mol_type = other RNA
agccatttatcagcaccaaaga

SEQ ID NO: 118412 - RNA, 22 nt, synthetic construct
  source 1..22: mol_type = other RNA
agccatttcaggttttcgacca

SEQ ID NO: 118413 - RNA, 22 nt, synthetic construct
  source 1..22: mol_type = other RNA
agcccaacagggttttgttttg

SEQ ID NO: 118414 - RNA, 22 nt, synthetic construct
  source 1..22: mol_type = other RNA
agcccaacctgattagaggctg

SEQ ID NO: 118415 - RNA, 22 nt, synthetic construct
  source 1..22: mol_type = other RNA
agcccaacttcacaccatttag

SEQ ID NO: 118416 - RNA, 22 nt, synthetic construct
  source 1..22: mol_type = other RNA
agcccaactttttctttttagt

SEQ ID NO: 118417 - RNA, 22 nt, synthetic construct
  source 1..22: mol_type = other RNA
agcccaagcacactttccttgg

SEQ ID NO: 118418 - RNA, 22 nt, synthetic construct
  source 1..22: mol_type = other RNA
agcccaagctaccatttattcc

SEQ ID NO: 118419 - RNA, 22 nt, synthetic construct
  source 1..22: mol_type = other RNA
agcccaatctacaggtcggaag

SEQ ID NO: 118420 - RNA, 22 nt, synthetic construct
  source 1..22: mol_type = other RNA
agcccaccaccatgcctggctc

SEQ ID NO: 118421 - RNA, 22 nt, synthetic construct
  source 1..22: mol_type = other RNA
agcccaccagcataagacccct

SEQ ID NO: 118422 - RNA, 22 nt, synthetic construct
  source 1..22: mol_type = other RNA
agcccacttgttgatggggttg

SEQ ID NO: 118423 - RNA, 22 nt, synthetic construct
  source 1..22: mol_type = other RNA
agcccagaaataaatcctcaca

SEQ ID NO: 118424 - RNA, 22 nt, synthetic construct
  source 1..22: mol_type = other RNA
agcccagagaggctaggtgacc

SEQ ID NO: 118425 - RNA, 22 nt, synthetic construct
  source 1..22: mol_type = other RNA
agcccagagatcccaccattgc

SEQ ID NO: 118426 - RNA, 22 nt, synthetic construct
  source 1..22: mol_type = other RNA
agcccagcacttccattttgct

SEQ ID NO: 118427 - RNA, 22 nt, synthetic construct
  source 1..22: mol_type = other RNA
agcccagcttccgggacttgga

SEQ ID NO: 118428 - RNA, 22 nt, synthetic construct
  source 1..22: mol_type = other RNA
agcccaggaggttgaagctcta

SEQ ID NO: 118429 - RNA, 22 nt, synthetic construct
  source 1..22: mol_type = other RNA
agcccaggagttgcatcacttg

SEQ ID NO: 118430 - RNA, 22 nt, synthetic construct
  source 1..22: mol_type = other RNA
agcccagggggtcgagactgta

SEQ ID NO: 118431 - RNA, 22 nt, synthetic construct
  source 1..22: mol_type = other RNA
agcccatgtctaaagtattgtt

SEQ ID NO: 118432 - RNA, 22 nt, synthetic construct
  source 1..22: mol_type = other RNA
agccccaaaccatcaagtgtga

SEQ ID NO: 118433 - RNA, 22 nt, synthetic construct
  source 1..22: mol_type = other RNA
agccccaaatacctctgaatgt

SEQ ID NO: 118434 - RNA, 22 nt, synthetic construct
  source 1..22: mol_type = other RNA
agccccaagaaagcaggtcatg

SEQ ID NO: 118435 - RNA, 22 nt, synthetic construct
  source 1..22: mol_type = other RNA
agccccacaagtagcagggact

SEQ ID NO: 118436 - RNA, 22 nt, synthetic construct
  source 1..22: mol_type = other RNA
agccccagaataggcaaattca

SEQ ID NO: 118437 - RNA, 22 nt, synthetic construct
  source 1..22: mol_type = other RNA
agccccagttctgcgcaattgc

SEQ ID NO: 118438 - RNA, 22 nt, synthetic construct
  source 1..22: mol_type = other RNA
agccccattgtacacatattaa

SEQ ID NO: 118439 - RNA, 22 nt, synthetic construct
  source 1..22: mol_type = other RNA
agcccccagttttgttgaatct

SEQ ID NO: 118440 - RNA, 22 nt, synthetic construct
  source 1..22: mol_type = other RNA
agccccctccctaccacccgtc

SEQ ID NO: 118441 - RNA, 22 nt, synthetic construct
  source 1..22: mol_type = other RNA
agccccctcgaagagaccacag

SEQ ID NO: 118442 - RNA, 22 nt, synthetic construct
  source 1..22: mol_type = other RNA
agccccctgaatacccctccct

SEQ ID NO: 118443 - RNA, 22 nt, synthetic construct
  source 1..22: mol_type = other RNA
agccccctgagtagctgtgatt

SEQ ID NO: 118444 - RNA, 22 nt, synthetic construct
  source 1..22: mol_type = other RNA
agccccgacgcctttcatttgg

SEQ ID NO: 118445 - RNA, 22 nt, synthetic construct
  source 1..22: mol_type = other RNA
agccccgcttcagttggtgaag

SEQ ID NO: 118446 - RNA, 22 nt, synthetic construct
  source 1..22: mol_type = other RNA
agcccctagcatgcagtagctc

SEQ ID NO: 118447 - RNA, 22 nt, synthetic construct
  source 1..22: mol_type = other RNA
agcccctcatcctccgtagctg

SEQ ID NO: 118448 - RNA, 22 nt, synthetic construct
  source 1..22: mol_type = other RNA
agcccctgccacactccagcat

SEQ ID NO: 118449 - RNA, 22 nt, synthetic construct
  source 1..22: mol_type = other RNA
agcccctgctgccagatgttct

SEQ ID NO: 118450 - RNA, 22 nt, synthetic construct
  source 1..22: mol_type = other RNA
agcccctggtgatctatgaatt

SEQ ID NO: 118451 - RNA, 22 nt, synthetic construct
  source 1..22: mol_type = other RNA
agccccttatcaggaaagtgcc

SEQ ID NO: 118452 - RNA, 22 nt, synthetic construct
  source 1..22: mol_type = other RNA
agcccgacctccagcgctaagc

SEQ ID NO: 118453 - RNA, 22 nt, synthetic construct
  source 1..22: mol_type = other RNA
agcccgccgctcgcaggtggga

SEQ ID NO: 118454 - RNA, 22 nt, synthetic construct
  source 1..22: mol_type = other RNA
agcccgtgtgtttagaataata

SEQ ID NO: 118455 - RNA, 22 nt, synthetic construct
  source 1..22: mol_type = other RNA
agccctcaggaccaggcagtcc

SEQ ID NO: 118456 - RNA, 22 nt, synthetic construct
  source 1..22: mol_type = other RNA
agccctccaggatccagtctct

SEQ ID NO: 118457 - RNA, 22 nt, synthetic construct
  source 1..22: mol_type = other RNA
agccctctaagtcagcctgggc

SEQ ID NO: 118458 - RNA, 22 nt, synthetic construct
  source 1..22: mol_type = other RNA
agccctgatagatattggcaac

SEQ ID NO: 118459 - RNA, 22 nt, synthetic construct
  source 1..22: mol_type = other RNA
agccctgcagccagatttgatc

SEQ ID NO: 118460 - RNA, 22 nt, synthetic construct
  source 1..22: mol_type = other RNA
agccctgccttaaaacattttt

SEQ ID NO: 118461 - RNA, 22 nt, synthetic construct
  source 1..22: mol_type = other RNA
agccctgctgtggccgagggag

SEQ ID NO: 118462 - RNA, 22 nt, synthetic construct
  source 1..22: mol_type = other RNA
agcccttccttgcttgtcttga

SEQ ID NO: 118463 - RNA, 22 nt, synthetic construct
  source 1..22: mol_type = other RNA
agcccttgagtatttttgagct

SEQ ID NO: 118464 - RNA, 22 nt, synthetic construct
  source 1..22: mol_type = other RNA
agccgaaatgcacttagcgctg

SEQ ID NO: 118465 - RNA, 22 nt, synthetic construct
  source 1..22: mol_type = other RNA
agccgagatcacgccactgcat

SEQ ID NO: 118466 - RNA, 22 nt, synthetic construct
  source 1..22: mol_type = other RNA
agccgagcagaagggaaaggat

SEQ ID NO: 118467 - RNA, 22 nt, synthetic construct
  source 1..22: mol_type = other RNA
agccgcaaataatcattcttct

SEQ ID NO: 118468 - RNA, 22 nt, synthetic construct
  source 1..22: mol_type = other RNA
agccgccgcagaggccaaatga

SEQ ID NO: 118469 - RNA, 22 nt, synthetic construct
  source 1..22: mol_type = other RNA
agccgcggactccggcgggaga

SEQ ID NO: 118470 - RNA, 22 nt, synthetic construct
  source 1..22: mol_type = other RNA
agccggattcctttcaaagaga

SEQ ID NO: 118471 - RNA, 22 nt, synthetic construct
  source 1..22: mol_type = other RNA
agccggcatatgtcactgtaag

SEQ ID NO: 118472 - RNA, 22 nt, synthetic construct
  source 1..22: mol_type = other RNA
agccgggaggagccaagtaaaa

SEQ ID NO: 118473 - RNA, 22 nt, synthetic construct
  source 1..22: mol_type = other RNA
agccgggtgtagtggtgtgtga

SEQ ID NO: 118474 - RNA, 22 nt, synthetic construct
  source 1..22: mol_type = other RNA
agccgtcggtatgttaataacc

SEQ ID NO: 118475 - RNA, 22 nt, synthetic construct
  source 1..22: mol_type = other RNA
agccgttccatcagagaggctt

SEQ ID NO: 118476 - RNA, 22 nt, synthetic construct
  source 1..22: mol_type = other RNA
agcctaaaataggcctaggtgt

SEQ ID NO: 118477 - RNA, 22 nt, synthetic construct
  source 1..22: mol_type = other RNA
agcctaaaccattttcaatctt

SEQ ID NO: 118478 - RNA, 22 nt, synthetic construct
  source 1..22: mol_type = other RNA
agcctaaagtccacagatcttt

SEQ ID NO: 118479 - RNA, 22 nt, synthetic construct
  source 1..22: mol_type = other RNA
agcctaagcaaatgtaatgaaa

SEQ ID NO: 118480 - RNA, 22 nt, synthetic construct
  source 1..22: mol_type = other RNA
agcctaagcaagttacatgctt

SEQ ID NO: 118481 - RNA, 22 nt, synthetic construct
  source 1..22: mol_type = other RNA
agcctaatgtgtaagaaatgcc

SEQ ID NO: 118482 - RNA, 22 nt, synthetic construct
  source 1..22: mol_type = other RNA
agcctaattgtacacctcaaac

SEQ ID NO: 118483 - RNA, 22 nt, synthetic construct
  source 1..22: mol_type = other RNA
agcctacctcccttcacaaagc

SEQ ID NO: 118484 - RNA, 22 nt, synthetic construct
  source 1..22: mol_type = other RNA
agcctactgctctgtcctgtca

SEQ ID NO: 118485 - RNA, 22 nt, synthetic construct
  source 1..22: mol_type = other RNA
agcctagacctcaaattaatca

SEQ ID NO: 118486 - RNA, 22 nt, synthetic construct
  source 1..22: mol_type = other RNA
agcctagagattaggcagaacc

SEQ ID NO: 118487 - RNA, 22 nt, synthetic construct
  source 1..22: mol_type = other RNA
agcctaggcaagagagcaagac

SEQ ID NO: 118488 - RNA, 22 nt, synthetic construct
  source 1..22: mol_type = other RNA
agcctagtcatccactgcacag

SEQ ID NO: 118489 - RNA, 22 nt, synthetic construct
  source 1..22: mol_type = other RNA
agcctatgtaagacaatgtctt

SEQ ID NO: 118490 - RNA, 22 nt, synthetic construct
  source 1..22: mol_type = other RNA
agcctcaaaatttagtaagggt

SEQ ID NO: 118491 - RNA, 22 nt, synthetic construct
  source 1..22: mol_type = other RNA
agcctcaaacaatcctccctcc

SEQ ID NO: 118492 - RNA, 22 nt, synthetic construct
  source 1..22: mol_type = other RNA
agcctcaaacgaaccaattacc

SEQ ID NO: 118493 - RNA, 22 nt, synthetic construct
  source 1..22: mol_type = other RNA
agcctcaacagcacttttgtac

SEQ ID NO: 118494 - RNA, 22 nt, synthetic construct
  source 1..22: mol_type = other RNA
agcctcatttgaactttccaga

SEQ ID NO: 118495 - RNA, 22 nt, synthetic construct
  source 1..22: mol_type = other RNA
agcctccacacctggccccttt

SEQ ID NO: 118496 - RNA, 22 nt, synthetic construct
  source 1..22: mol_type = other RNA
agcctccagaaaaccagaaaag

SEQ ID NO: 118497 - RNA, 22 nt, synthetic construct
  source 1..22: mol_type = other RNA
agcctcccgagtagttgtaact

SEQ ID NO: 118498 - RNA, 22 nt, synthetic construct
  source 1..22: mol_type = other RNA
agcctcccgagtatctaggagt

SEQ ID NO: 118499 - RNA, 22 nt, synthetic construct
  source 1..22: mol_type = other RNA
agcctcctaagttttgggggaa

SEQ ID NO: 118500 - RNA, 22 nt, synthetic construct
  source 1..22: mol_type = other RNA
agcctctaatcaggttgggctt

SEQ ID NO: 118501 - RNA, 22 nt, synthetic construct
  source 1..22: mol_type = other RNA
agcctctcaacacttcagtggt

SEQ ID NO: 118502 - RNA, 22 nt, synthetic construct
  source 1..22: mol_type = other RNA
agcctctctgatggaacggctt

SEQ ID NO: 118503 - RNA, 22 nt, synthetic construct
  source 1..22: mol_type = other RNA
agcctctctgggcttcactttc

SEQ ID NO: 118504 - RNA, 22 nt, synthetic construct
  source 1..22: mol_type = other RNA
agcctctgtggaccatgtttta

SEQ ID NO: 118505 - RNA, 22 nt, synthetic construct
  source 1..22: mol_type = other RNA
agcctcttcagaagaggataag

SEQ ID NO: 118506 - RNA, 22 nt, synthetic construct
  source 1..22: mol_type = other RNA
agcctgaggacactagcaatcc

SEQ ID NO: 118507 - RNA, 22 nt, synthetic construct
  source 1..22: mol_type = other RNA
agcctgataagctcccagccaa

SEQ ID NO: 118508 - RNA, 22 nt, synthetic construct
  source 1..22: mol_type = other RNA
agcctgatgatgatggtgatgc

SEQ ID NO: 118509 - RNA, 22 nt, synthetic construct
  source 1..22: mol_type = other RNA
agcctgcagaaggagaaaccat

SEQ ID NO: 118510 - RNA, 22 nt, synthetic construct
  source 1..22: mol_type = other RNA
agcctgctctgcagagactgtg

SEQ ID NO: 118511 - RNA, 22 nt, synthetic construct
  source 1..22: mol_type = other RNA
agcctgcttcagcctaagcaag

SEQ ID NO: 118512 - RNA, 22 nt, synthetic construct
  source 1..22: mol_type = other RNA
agcctggaagttcaaggttata

SEQ ID NO: 118513 - RNA, 22 nt, synthetic construct
  source 1..22: mol_type = other RNA
agcctggccaacatcgtaaaac

SEQ ID NO: 118514 - RNA, 22 nt, synthetic construct
  source 1..22: mol_type = other RNA
agcctggctttagatggtaaaa

SEQ ID NO: 118515 - RNA, 22 nt, synthetic construct
  source 1..22: mol_type = other RNA
agcctgggacagagcgagactc

SEQ ID NO: 118516 - RNA, 22 nt, synthetic construct
  source 1..22: mol_type = other RNA
agcctgggcacacgccactgca

SEQ ID NO: 118517 - RNA, 22 nt, synthetic construct
  source 1..22: mol_type = other RNA
agcctgggcgacaagagcagaa

SEQ ID NO: 118518 - RNA, 22 nt, synthetic construct
  source 1..22: mol_type = other RNA
agcctgggcgacagagtgaaac

SEQ ID NO: 118519 - RNA, 22 nt, synthetic construct
  source 1..22: mol_type = other RNA
agcctggtaatgaatagaaaat

SEQ ID NO: 118520 - RNA, 22 nt, synthetic construct
  source 1..22: mol_type = other RNA
agcctggtcaacagggtaagat

SEQ ID NO: 118521 - RNA, 22 nt, synthetic construct
  source 1..22: mol_type = other RNA
agcctgtgacagtatgtcagac

SEQ ID NO: 118522 - RNA, 22 nt, synthetic construct
  source 1..22: mol_type = other RNA
agcctgtggaggcagtaccatt

SEQ ID NO: 118523 - RNA, 22 nt, synthetic construct
  source 1..22: mol_type = other RNA
agcctgtggtctcttcgagggg

SEQ ID NO: 118524 - RNA, 22 nt, synthetic construct
  source 1..22: mol_type = other RNA
agcctgtgtcagtgacagttct

SEQ ID NO: 118525 - RNA, 22 nt, synthetic construct
  source 1..22: mol_type = other RNA
agcctgttccgattttacttac

SEQ ID NO: 118526 - RNA, 22 nt, synthetic construct
  source 1..22: mol_type = other RNA
agccttaaaagtgctgcagtat

SEQ ID NO: 118527 - RNA, 22 nt, synthetic construct
  source 1..22: mol_type = other RNA
agccttaatctcctgagtagca

SEQ ID NO: 118528 - RNA, 22 nt, synthetic construct
  source 1..22: mol_type = other RNA
agccttcagaactcttctccaa

SEQ ID NO: 118529 - RNA, 22 nt, synthetic construct
  source 1..22: mol_type = other RNA
agccttccagagacaaagcata

SEQ ID NO: 118530 - RNA, 22 nt, synthetic construct
  source 1..22: mol_type = other RNA
agccttcccctgctgttcccaa

SEQ ID NO: 118531 - RNA, 22 nt, synthetic construct
  source 1..22: mol_type = other RNA
agccttccctgaacaatgattt

SEQ ID NO: 118532 - RNA, 22 nt, synthetic construct
  source 1..22: mol_type = other RNA
agccttctctactctgcctcag

SEQ ID NO: 118533 - RNA, 22 nt, synthetic construct
  source 1..22: mol_type = other RNA
agccttctctcttccaaataat

SEQ ID NO: 118534 - RNA, 22 nt, synthetic construct
  source 1..22: mol_type = other RNA
agccttcttggagtaaacctgc

SEQ ID NO: 118535 - RNA, 22 nt, synthetic construct
  source 1..22: mol_type = other RNA
agccttgccattctcccagttg

SEQ ID NO: 118536 - RNA, 22 nt, synthetic construct
  source 1..22: mol_type = other RNA
agccttgctgttgtaatgttac

SEQ ID NO: 118537 - RNA, 22 nt, synthetic construct
  source 1..22: mol_type = other RNA
agccttggaggagccctgctgt

SEQ ID NO: 118538 - RNA, 22 nt, synthetic construct
  source 1..22: mol_type = other RNA
agccttggcaaggggaatggta

SEQ ID NO: 118539 - RNA, 22 nt, synthetic construct
  source 1..22: mol_type = other RNA
agccttggtaaaatcactaatt

SEQ ID NO: 118540 - RNA, 22 nt, synthetic construct
  source 1..22: mol_type = other RNA
agccttggtaagagtgagaccc

SEQ ID NO: 118541 - RNA, 22 nt, synthetic construct
  source 1..22: mol_type = other RNA
agccttgtactgtgtggcttct

SEQ ID NO: 118542 - RNA, 22 nt, synthetic construct
  source 1..22: mol_type = other RNA
agcctttaatttagcgttcatc

SEQ ID NO: 118543 - RNA, 22 nt, synthetic construct
  source 1..22: mol_type = other RNA
agcctttattttttcttcccat

SEQ ID NO: 118544 - RNA, 22 nt, synthetic construct
  source 1..22: mol_type = other RNA
agccttttacaccctaggtagg

SEQ ID NO: 118545 - RNA, 22 nt, synthetic construct
  source 1..22: mol_type = other RNA
agccttttctgatttgctggct

SEQ ID NO: 118546 - RNA, 22 nt, synthetic construct
  source 1..22: mol_type = other RNA
agcgaaagggattctggccaaa

SEQ ID NO: 118547 - RNA, 22 nt, synthetic construct
  source 1..22: mol_type = other RNA
agcgaaaggtacgacgctcttg

SEQ ID NO: 118548 - RNA, 22 nt, synthetic construct
  source 1..22: mol_type = other RNA
agcgaagagggagaagaaataa

SEQ ID NO: 118549 - RNA, 22 nt, synthetic construct
  source 1..22: mol_type = other RNA
agcgacagctacggaggatgag

SEQ ID NO: 118550 - RNA, 22 nt, synthetic construct
  source 1..22: mol_type = other RNA
agcgagacctcatctctgcaaa

SEQ ID NO: 118551 - RNA, 22 nt, synthetic construct
  source 1..22: mol_type = other RNA
agcgagactccatctcaagaaa

SEQ ID NO: 118552 - RNA, 22 nt, synthetic construct
  source 1..22: mol_type = other RNA
agcgaggcctggaacaggccct

SEQ ID NO: 118553 - RNA, 22 nt, synthetic construct
  source 1..22: mol_type = other RNA
agcgccacgtgaagatggagtt

SEQ ID NO: 118554 - RNA, 22 nt, synthetic construct
  source 1..22: mol_type = other RNA
agcgccacttaaaaaatgcgcg

SEQ ID NO: 118555 - RNA, 22 nt, synthetic construct
  source 1..22: mol_type = other RNA
agcgcccggcccgttattttta

SEQ ID NO: 118556 - RNA, 22 nt, synthetic construct
  source 1..22: mol_type = other RNA
agcgccctggcattgtcccggg

SEQ ID NO: 118557 - RNA, 22 nt, synthetic construct
  source 1..22: mol_type = other RNA
agcgctaagcactgcgccaagc

SEQ ID NO: 118558 - RNA, 22 nt, synthetic construct
  source 1..22: mol_type = other RNA
agcgctaagtgcatttcggctc

SEQ ID NO: 118559 - RNA, 22 nt, synthetic construct
  source 1..22: mol_type = other RNA
agcgctactcagctgtcactct

SEQ ID NO: 118560 - RNA, 22 nt, synthetic construct
  source 1..22: mol_type = other RNA
agcgctcttcaagcattgggag

SEQ ID NO: 118561 - RNA, 22 nt, synthetic construct
  source 1..22: mol_type = other RNA
agcgctgaagtacttcaaggtt

SEQ ID NO: 118562 - RNA, 22 nt, synthetic construct
  source 1..22: mol_type = other RNA
agcgctgatgtgttgaccttag

SEQ ID NO: 118563 - RNA, 22 nt, synthetic construct
  source 1..22: mol_type = other RNA
agcgctggaggtcgggctgcct

SEQ ID NO: 118564 - RNA, 22 nt, synthetic construct
  source 1..22: mol_type = other RNA
agcgcttctatgtgacaaacac

SEQ ID NO: 118565 - RNA, 22 nt, synthetic construct
  source 1..22: mol_type = other RNA
agcgcttgaacaaatatgaatg

SEQ ID NO: 118566 - RNA, 22 nt, synthetic construct
  source 1..22: mol_type = other RNA
agcgctttaagcatcccatatg

SEQ ID NO: 118567 - RNA, 22 nt, synthetic construct
  source 1..22: mol_type = other RNA
agcggaatgactatagaaattt

SEQ ID NO: 118568 - RNA, 22 nt, synthetic construct
  source 1..22: mol_type = other RNA
agcggcatacaggagttccgat

SEQ ID NO: 118569 - RNA, 22 nt, synthetic construct
  source 1..22: mol_type = other RNA
agcggcctttgcctctccaggg

SEQ ID NO: 118570 - RNA, 22 nt, synthetic construct
  source 1..22: mol_type = other RNA
agcggcgggcttcgcctttgtt

SEQ ID NO: 118571 - RNA, 22 nt, synthetic construct
  source 1..22: mol_type = other RNA
agcgggaaaaaataatatgaga

SEQ ID NO: 118572 - RNA, 22 nt, synthetic construct
  source 1..22: mol_type = other RNA
agcgggcagccttggaggagcc

SEQ ID NO: 118573 - RNA, 22 nt, synthetic construct
  source 1..22: mol_type = other RNA
agcggggatgctcagggtgcga

SEQ ID NO: 118574 - RNA, 22 nt, synthetic construct
  source 1..22: mol_type = other RNA
agcggggatggttgcacaatgt

SEQ ID NO: 118575 - RNA, 22 nt, synthetic construct
  source 1..22: mol_type = other RNA
agcggggctgccactacttagc

SEQ ID NO: 118576 - RNA, 22 nt, synthetic construct
  source 1..22: mol_type = other RNA
agcgggtttcctcggtctacgg

SEQ ID NO: 118577 - RNA, 22 nt, synthetic construct
  source 1..22: mol_type = other RNA
agcggtcaacgcacccagagcg

SEQ ID NO: 118578 - RNA, 22 nt, synthetic construct
  source 1..22: mol_type = other RNA
agcggtgtcttattgttttgat

SEQ ID NO: 118579 - RNA, 22 nt, synthetic construct
  source 1..22: mol_type = other RNA
agcgtaactccatcttcacgtg

SEQ ID NO: 118580 - RNA, 22 nt, synthetic construct
  source 1..22: mol_type = other RNA
agcgtactgtgattacaattcc

SEQ ID NO: 118581 - RNA, 22 nt, synthetic construct
  source 1..22: mol_type = other RNA
agcgtcctcactgtgataccta

SEQ ID NO: 118582 - RNA, 22 nt, synthetic construct
  source 1..22: mol_type = other RNA
agcgtcgtacctttcgctatca

SEQ ID NO: 118583 - RNA, 22 nt, synthetic construct
  source 1..22: mol_type = other RNA
agcgtgcaccttacattgtaat

SEQ ID NO: 118584 - RNA, 22 nt, synthetic construct
  source 1..22: mol_type = other RNA
agcgtggaatggtcaatttcat

SEQ ID NO: 118585 - RNA, 22 nt, synthetic construct
  source 1..22: mol_type = other RNA
agcgtgggcaacacaatgagac

SEQ ID NO: 118586 - RNA, 22 nt, synthetic construct
  source 1..22: mol_type = other RNA
agcgtgtgcatgaccctgctat

SEQ ID NO: 118587 - RNA, 22 nt, synthetic construct
  source 1..22: mol_type = other RNA
agcgttcatccaaattattgac

SEQ ID NO: 118588 - RNA, 22 nt, synthetic construct
  source 1..22: mol_type = other RNA
agcgttggagacagcctaaacc

SEQ ID NO: 118589 - RNA, 22 nt, synthetic construct
  source 1..22: mol_type = other RNA
agcgttgttcagttgaaaagta

SEQ ID NO: 118590 - RNA, 22 nt, synthetic construct
  source 1..22: mol_type = other RNA
agctaaaatgttcagatagaaa

SEQ ID NO: 118591 - RNA, 22 nt, synthetic construct
  source 1..22: mol_type = other RNA
agctaacttttaacccacagat

SEQ ID NO: 118592 - RNA, 22 nt, synthetic construct
  source 1..22: mol_type = other RNA
agctaagaaacagtaattagtt

SEQ ID NO: 118593 - RNA, 22 nt, synthetic construct
  source 1..22: mol_type = other RNA
agctaagactataaaactctta

SEQ ID NO: 118594 - RNA, 22 nt, synthetic construct
  source 1..22: mol_type = other RNA
agctaagagttttatagtctta

SEQ ID NO: 118595 - RNA, 22 nt, synthetic construct
  source 1..22: mol_type = other RNA
agctaagatgctattcaagaca

SEQ ID NO: 118596 - RNA, 22 nt, synthetic construct
  source 1..22: mol_type = other RNA
agctaagcaccaacagatcctc

SEQ ID NO: 118597 - RNA, 22 nt, synthetic construct
  source 1..22: mol_type = other RNA
agctaagggaagttttttcaaa

SEQ ID NO: 118598 - RNA, 22 nt, synthetic construct
  source 1..22: mol_type = other RNA
agctaagtatgcagaaaccagt

SEQ ID NO: 118599 - RNA, 22 nt, synthetic construct
  source 1..22: mol_type = other RNA
agctaataatttatcagatccc

SEQ ID NO: 118600 - RNA, 22 nt, synthetic construct
  source 1..22: mol_type = other RNA
agctaatatctttggggagata

SEQ ID NO: 118601 - RNA, 22 nt, synthetic construct
  source 1..22: mol_type = other RNA
agctaatatgctgtagtgattc

SEQ ID NO: 118602 - RNA, 22 nt, synthetic construct
  source 1..22: mol_type = other RNA
agctaatcaagccgcaaataat

SEQ ID NO: 118603 - RNA, 22 nt, synthetic construct
  source 1..22: mol_type = other RNA
agctaatcccaaagtgagcaga

SEQ ID NO: 118604 - RNA, 22 nt, synthetic construct
  source 1..22: mol_type = other RNA
agctaatctactttctaatcct

SEQ ID NO: 118605 - RNA, 22 nt, synthetic construct
  source 1..22: mol_type = other RNA
agctaatttcagagagacctga

SEQ ID NO: 118606 - RNA, 22 nt, synthetic construct
  source 1..22: mol_type = other RNA
agctaattttctaatcttcatc

SEQ ID NO: 118607 - RNA, 22 nt, synthetic construct
  source 1..22: mol_type = other RNA
agctacaaaagggaaaacaatt

SEQ ID NO: 118608 - RNA, 22 nt, synthetic construct
  source 1..22: mol_type = other RNA
agctacaaactccaaaccttta

SEQ ID NO: 118609 - RNA, 22 nt, synthetic construct
  source 1..22: mol_type = other RNA
agctacactcaatacacgtggc

SEQ ID NO: 118610 - RNA, 22 nt, synthetic construct
  source 1..22: mol_type = other RNA
agctacagactaatatgagttc

SEQ ID NO: 118611 - RNA, 22 nt, synthetic construct
  source 1..22: mol_type = other RNA
agctacagtaatcaaacagtgt

SEQ ID NO: 118612 - RNA, 22 nt, synthetic construct
  source 1..22: mol_type = other RNA
agctacataacttcccagacag

SEQ ID NO: 118613 - RNA, 22 nt, synthetic construct
  source 1..22: mol_type = other RNA
agctaccatttattcctctctt

SEQ ID NO: 118614 - RNA, 22 nt, synthetic construct
  source 1..22: mol_type = other RNA
agctaccctcgagtaaaaagaa

SEQ ID NO: 118615 - RNA, 22 nt, synthetic construct
  source 1..22: mol_type = other RNA
agctaccctttcttgttagtag

SEQ ID NO: 118616 - RNA, 22 nt, synthetic construct
  source 1..22: mol_type = other RNA
agctacctgttgattgttgcca

SEQ ID NO: 118617 - RNA, 22 nt, synthetic construct
  source 1..22: mol_type = other RNA
agctacggaggatgaggggctg

SEQ ID NO: 118618 - RNA, 22 nt, synthetic construct
  source 1..22: mol_type = other RNA
agctactaaacaaatcagattt

SEQ ID NO: 118619 - RNA, 22 nt, synthetic construct
  source 1..22: mol_type = other RNA
agctactatgaatatactggaa

SEQ ID NO: 118620 - RNA, 22 nt, synthetic construct
  source 1..22: mol_type = other RNA
agctactattccaggatcaaat

SEQ ID NO: 118621 - RNA, 22 nt, synthetic construct
  source 1..22: mol_type = other RNA
agctactgcatgctaggggctg

SEQ ID NO: 118622 - RNA, 22 nt, synthetic construct
  source 1..22: mol_type = other RNA
agctagaacagaataaaaagtg

SEQ ID NO: 118623 - RNA, 22 nt, synthetic construct
  source 1..22: mol_type = other RNA
agctagaactagaatactccac

SEQ ID NO: 118624 - RNA, 22 nt, synthetic construct
  source 1..22: mol_type = other RNA
agctagaagacctcaaattctg

SEQ ID NO: 118625 - RNA, 22 nt, synthetic construct
  source 1..22: mol_type = other RNA
agctagagggtaagaccaaaat

SEQ ID NO: 118626 - RNA, 22 nt, synthetic construct
  source 1..22: mol_type = other RNA
agctaggaccataggcacgcgc

SEQ ID NO: 118627 - RNA, 22 nt, synthetic construct
  source 1..22: mol_type = other RNA
agctaggcgtagtatctcatgc

SEQ ID NO: 118628 - RNA, 22 nt, synthetic construct
  source 1..22: mol_type = other RNA
agctaggtgagtgagatgggaa

SEQ ID NO: 118629 - RNA, 22 nt, synthetic construct
  source 1..22: mol_type = other RNA
agctagtgatgttgagtatctt

SEQ ID NO: 118630 - RNA, 22 nt, synthetic construct
  source 1..22: mol_type = other RNA
agctagtgtcttagtctgactt

SEQ ID NO: 118631 - RNA, 22 nt, synthetic construct
  source 1..22: mol_type = other RNA
agctagtgtgtctgactacact

SEQ ID NO: 118632 - RNA, 22 nt, synthetic construct
  source 1..22: mol_type = other RNA
agctatacacgttacaaaatat

SEQ ID NO: 118633 - RNA, 22 nt, synthetic construct
  source 1..22: mol_type = other RNA
agctatagctgagaagtaacat

SEQ ID NO: 118634 - RNA, 22 nt, synthetic construct
  source 1..22: mol_type = other RNA
agctatagcttctgagctgtta

SEQ ID NO: 118635 - RNA, 22 nt, synthetic construct
  source 1..22: mol_type = other RNA
agctatatcccaaattggcatt

SEQ ID NO: 118636 - RNA, 22 nt, synthetic construct
  source 1..22: mol_type = other RNA
agctatattcacttttggaatt

SEQ ID NO: 118637 - RNA, 22 nt, synthetic construct
  source 1..22: mol_type = other RNA
agctatcaggccttccacctgc

SEQ ID NO: 118638 - RNA, 22 nt, synthetic construct
  source 1..22: mol_type = other RNA
agctatcctaatgggcgtggag

SEQ ID NO: 118639 - RNA, 22 nt, synthetic construct
  source 1..22: mol_type = other RNA
agctatgctcctgcctcagcct

SEQ ID NO: 118640 - RNA, 22 nt, synthetic construct
  source 1..22: mol_type = other RNA
agctatggagcactgtgagcca

SEQ ID NO: 118641 - RNA, 22 nt, synthetic construct
  source 1..22: mol_type = other RNA
agctatggtgttatttgttctg

SEQ ID NO: 118642 - RNA, 22 nt, synthetic construct
  source 1..22: mol_type = other RNA
agctattagagaaatgcaaatc

SEQ ID NO: 118643 - RNA, 22 nt, synthetic construct
  source 1..22: mol_type = other RNA
agctattgtcttttctatctga

SEQ ID NO: 118644 - RNA, 22 nt, synthetic construct
  source 1..22: mol_type = other RNA
agctcaaaaatactcaagggct

SEQ ID NO: 118645 - RNA, 22 nt, synthetic construct
  source 1..22: mol_type = other RNA
agctcaaacagcttgacattct

SEQ ID NO: 118646 - RNA, 22 nt, synthetic construct
  source 1..22: mol_type = other RNA
agctcaaagcatatgaatctag

SEQ ID NO: 118647 - RNA, 22 nt, synthetic construct
  source 1..22: mol_type = other RNA
agctcaattaagcaacctttta

SEQ ID NO: 118648 - RNA, 22 nt, synthetic construct
  source 1..22: mol_type = other RNA
agctcacacgagaaggacagct

SEQ ID NO: 118649 - RNA, 22 nt, synthetic construct
  source 1..22: mol_type = other RNA
agctcacctctggactcagggt

SEQ ID NO: 118650 - RNA, 22 nt, synthetic construct
  source 1..22: mol_type = other RNA
agctcacgttaccctctggaat

SEQ ID NO: 118651 - RNA, 22 nt, synthetic construct
  source 1..22: mol_type = other RNA
agctcactagagcttcaacctc

SEQ ID NO: 118652 - RNA, 22 nt, synthetic construct
  source 1..22: mol_type = other RNA
agctcagaagctatagctgaga

SEQ ID NO: 118653 - RNA, 22 nt, synthetic construct
  source 1..22: mol_type = other RNA
agctcaggaccagatgacttca

SEQ ID NO: 118654 - RNA, 22 nt, synthetic construct
  source 1..22: mol_type = other RNA
agctcaggccagtgagtgatga

SEQ ID NO: 118655 - RNA, 22 nt, synthetic construct
  source 1..22: mol_type = other RNA
agctcagtgtgtttttgtaaat

SEQ ID NO: 118656 - RNA, 22 nt, synthetic construct
  source 1..22: mol_type = other RNA
agctcatcatttatacccaagt

SEQ ID NO: 118657 - RNA, 22 nt, synthetic construct
  source 1..22: mol_type = other RNA
agctcattacagtctcgacccc

SEQ ID NO: 118658 - RNA, 22 nt, synthetic construct
  source 1..22: mol_type = other RNA
agctccaaaagcgaaaggcaaa

SEQ ID NO: 118659 - RNA, 22 nt, synthetic construct
  source 1..22: mol_type = other RNA
agctccaaagaacaggagttac

SEQ ID NO: 118660 - RNA, 22 nt, synthetic construct
  source 1..22: mol_type = other RNA
agctccagcctgggcgacagag

SEQ ID NO: 118661 - RNA, 22 nt, synthetic construct
  source 1..22: mol_type = other RNA
agctcccaatgcttgaagagcg

SEQ ID NO: 118662 - RNA, 22 nt, synthetic construct
  source 1..22: mol_type = other RNA
agctcccagccaaacagttttt

SEQ ID NO: 118663 - RNA, 22 nt, synthetic construct
  source 1..22: mol_type = other RNA
agctccccattccctgtctgtg

SEQ ID NO: 118664 - RNA, 22 nt, synthetic construct
  source 1..22: mol_type = other RNA
agctcccccggggctcgcagca

SEQ ID NO: 118665 - RNA, 22 nt, synthetic construct
  source 1..22: mol_type = other RNA
agctccccggatgattctaatg

SEQ ID NO: 118666 - RNA, 22 nt, synthetic construct
  source 1..22: mol_type = other RNA
agctccgcctcctggtgggttc

SEQ ID NO: 118667 - RNA, 22 nt, synthetic construct
  source 1..22: mol_type = other RNA
agctcctcagaaggccaaggca

SEQ ID NO: 118668 - RNA, 22 nt, synthetic construct
  source 1..22: mol_type = other RNA
agctcctgacctcagatatcca

SEQ ID NO: 118669 - RNA, 22 nt, synthetic construct
  source 1..22: mol_type = other RNA
agctcctgggaaaaggatttgt

SEQ ID NO: 118670 - RNA, 22 nt, synthetic construct
  source 1..22: mol_type = other RNA
agctcgaccaggggaaggagtc

SEQ ID NO: 118671 - RNA, 22 nt, synthetic construct
  source 1..22: mol_type = other RNA
agctcgccgtctccctcggcca

SEQ ID NO: 118672 - RNA, 22 nt, synthetic construct
  source 1..22: mol_type = other RNA
agctctaataaaagctggagtt

SEQ ID NO: 118673 - RNA, 22 nt, synthetic construct
  source 1..22: mol_type = other RNA
agctctaatagttcacctctcc

SEQ ID NO: 118674 - RNA, 22 nt, synthetic construct
  source 1..22: mol_type = other RNA
agctctagcaaacaaacacact

SEQ ID NO: 118675 - RNA, 22 nt, synthetic construct
  source 1..22: mol_type = other RNA
agctctagccttgtactgtgtg

SEQ ID NO: 118676 - RNA, 22 nt, synthetic construct
  source 1..22: mol_type = other RNA
agctctagtgagctatgattgt

SEQ ID NO: 118677 - RNA, 22 nt, synthetic construct
  source 1..22: mol_type = other RNA
agctctatggcatttgagggtt

SEQ ID NO: 118678 - RNA, 22 nt, synthetic construct
  source 1..22: mol_type = other RNA
agctctcaattaatgcccaatc

SEQ ID NO: 118679 - RNA, 22 nt, synthetic construct
  source 1..22: mol_type = other RNA
agctctcagtggccctgttggc

SEQ ID NO: 118680 - RNA, 22 nt, synthetic construct
  source 1..22: mol_type = other RNA
agctctcatgagtcctgaaaat

SEQ ID NO: 118681 - RNA, 22 nt, synthetic construct
  source 1..22: mol_type = other RNA
agctctcatgtcagagacacat

SEQ ID NO: 118682 - RNA, 22 nt, synthetic construct
  source 1..22: mol_type = other RNA
agctctgatgctttctctagtt

SEQ ID NO: 118683 - RNA, 22 nt, synthetic construct
  source 1..22: mol_type = other RNA
agctctgtcttgatgatagaat

SEQ ID NO: 118684 - RNA, 22 nt, synthetic construct
  source 1..22: mol_type = other RNA
agctcttaagcttaggtctttg

SEQ ID NO: 118685 - RNA, 22 nt, synthetic construct
  source 1..22: mol_type = other RNA
agctcttcccttaacctttttc

SEQ ID NO: 118686 - RNA, 22 nt, synthetic construct
  source 1..22: mol_type = other RNA
agctcttctcagttgcagcatg

SEQ ID NO: 118687 - RNA, 22 nt, synthetic construct
  source 1..22: mol_type = other RNA
agctcttttgtgtctttttata

SEQ ID NO: 118688 - RNA, 22 nt, synthetic construct
  source 1..22: mol_type = other RNA
agctgaaagtaaagatagcccc

SEQ ID NO: 118689 - RNA, 22 nt, synthetic construct
  source 1..22: mol_type = other RNA
agctgaactcctttcttaccct

SEQ ID NO: 118690 - RNA, 22 nt, synthetic construct
  source 1..22: mol_type = other RNA
agctgaactctgtggagtcctg

SEQ ID NO: 118691 - RNA, 22 nt, synthetic construct
  source 1..22: mol_type = other RNA
agctgaaggcactgtatggttc

SEQ ID NO: 118692 - RNA, 22 nt, synthetic construct
  source 1..22: mol_type = other RNA
agctgacccactggtttcagtc

SEQ ID NO: 118693 - RNA, 22 nt, synthetic construct
  source 1..22: mol_type = other RNA
agctgactttcatttgtaattc

SEQ ID NO: 118694 - RNA, 22 nt, synthetic construct
  source 1..22: mol_type = other RNA
agctgacttttaaaatatgtgg

SEQ ID NO: 118695 - RNA, 22 nt, synthetic construct
  source 1..22: mol_type = other RNA
agctgagaagtaacattacaac

SEQ ID NO: 118696 - RNA, 22 nt, synthetic construct
  source 1..22: mol_type = other RNA
agctgagaccacagacgtgcag

SEQ ID NO: 118697 - RNA, 22 nt, synthetic construct
  source 1..22: mol_type = other RNA
agctgagattgccccattgcac

SEQ ID NO: 118698 - RNA, 22 nt, synthetic construct
  source 1..22: mol_type = other RNA
agctgagattgtgccagtgaac

SEQ ID NO: 118699 - RNA, 22 nt, synthetic construct
  source 1..22: mol_type = other RNA
agctgagtagcgctttaagcat

SEQ ID NO: 118700 - RNA, 22 nt, synthetic construct
  source 1..22: mol_type = other RNA
agctgatcaaggaagcttccta

SEQ ID NO: 118701 - RNA, 22 nt, synthetic construct
  source 1..22: mol_type = other RNA
agctgcctcttcctgttgcttt

SEQ ID NO: 118702 - RNA, 22 nt, synthetic construct
  source 1..22: mol_type = other RNA
agctgctgtaacaaagatgcca

SEQ ID NO: 118703 - RNA, 22 nt, synthetic construct
  source 1..22: mol_type = other RNA
agctggaagtaaggattttcta

SEQ ID NO: 118704 - RNA, 22 nt, synthetic construct
  source 1..22: mol_type = other RNA
agctggacccttaccttaaacc

SEQ ID NO: 118705 - RNA, 22 nt, synthetic construct
  source 1..22: mol_type = other RNA
agctggactcattccaatcctt

SEQ ID NO: 118706 - RNA, 22 nt, synthetic construct
  source 1..22: mol_type = other RNA
agctggagttatttgtataaat

SEQ ID NO: 118707 - RNA, 22 nt, synthetic construct
  source 1..22: mol_type = other RNA
agctggatgtggtgtggcatgt

SEQ ID NO: 118708 - RNA, 22 nt, synthetic construct
  source 1..22: mol_type = other RNA
agctggcaaaatggagacatct

SEQ ID NO: 118709 - RNA, 22 nt, synthetic construct
  source 1..22: mol_type = other RNA
agctggcatgttggatagtttc

SEQ ID NO: 118710 - RNA, 22 nt, synthetic construct
  source 1..22: mol_type = other RNA
agctgggactacaggtgtgaac

SEQ ID NO: 118711 - RNA, 22 nt, synthetic construct
  source 1..22: mol_type = other RNA
agctgggagaaagctaatttgg

SEQ ID NO: 118712 - RNA, 22 nt, synthetic construct
  source 1..22: mol_type = other RNA
agctgggatcacaggcgttgag

SEQ ID NO: 118713 - RNA, 22 nt, synthetic construct
  source 1..22: mol_type = other RNA
agctgggatggctgaaagagaa

SEQ ID NO: 118714 - RNA, 22 nt, synthetic construct
  source 1..22: mol_type = other RNA
agctgggattacacacacctac

SEQ ID NO: 118715 - RNA, 22 nt, synthetic construct
  source 1..22: mol_type = other RNA
agctgggattacaggcgcacgc

SEQ ID NO: 118716 - RNA, 22 nt, synthetic construct
  source 1..22: mol_type = other RNA
agctgggcccgcagtggctcat

SEQ ID NO: 118717 - RNA, 22 nt, synthetic construct
  source 1..22: mol_type = other RNA
agctgggcgagatggcgtgcgc

SEQ ID NO: 118718 - RNA, 22 nt, synthetic construct
  source 1..22: mol_type = other RNA
agctgggctagagccaggaagt

SEQ ID NO: 118719 - RNA, 22 nt, synthetic construct
  source 1..22: mol_type = other RNA
agctggggcagcaaagcaagaa

SEQ ID NO: 118720 - RNA, 22 nt, synthetic construct
  source 1..22: mol_type = other RNA
agctgggtgatgttcaaccctc

SEQ ID NO: 118721 - RNA, 22 nt, synthetic construct
  source 1..22: mol_type = other RNA
agctggtaatacagtctgattt

SEQ ID NO: 118722 - RNA, 22 nt, synthetic construct
  source 1..22: mol_type = other RNA
agctggtcctgaactcgtggcc

SEQ ID NO: 118723 - RNA, 22 nt, synthetic construct
  source 1..22: mol_type = other RNA
agctgtaacagaggcatgcacg

SEQ ID NO: 118724 - RNA, 22 nt, synthetic construct
  source 1..22: mol_type = other RNA
agctgtatttttgctcacactt

SEQ ID NO: 118725 - RNA, 22 nt, synthetic construct
  source 1..22: mol_type = other RNA
agctgtcactctctttaggaag

SEQ ID NO: 118726 - RNA, 22 nt, synthetic construct
  source 1..22: mol_type = other RNA
agctgtccaacaagggttggtg

SEQ ID NO: 118727 - RNA, 22 nt, synthetic construct
  source 1..22: mol_type = other RNA
agctgtccccaccgccttccta

SEQ ID NO: 118728 - RNA, 22 nt, synthetic construct
  source 1..22: mol_type = other RNA
agctgtccttctcgtgtgagct

SEQ ID NO: 118729 - RNA, 22 nt, synthetic construct
  source 1..22: mol_type = other RNA
agctgtcgctctcctgtgccaa

SEQ ID NO: 118730 - RNA, 22 nt, synthetic construct
  source 1..22: mol_type = other RNA
agctgtctggattgattccagt

SEQ ID NO: 118731 - RNA, 22 nt, synthetic construct
  source 1..22: mol_type = other RNA
agctgtgagtccttccagtatg

SEQ ID NO: 118732 - RNA, 22 nt, synthetic construct
  source 1..22: mol_type = other RNA
agctgtgattaccggcatccgc

SEQ ID NO: 118733 - RNA, 22 nt, synthetic construct
  source 1..22: mol_type = other RNA
agctgtgccgaggcagagagag

SEQ ID NO: 118734 - RNA, 22 nt, synthetic construct
  source 1..22: mol_type = other RNA
agctgtggaagcacagtctctg

SEQ ID NO: 118735 - RNA, 22 nt, synthetic construct
  source 1..22: mol_type = other RNA
agctgtggatgttggtgagaac

SEQ ID NO: 118736 - RNA, 22 nt, synthetic construct
  source 1..22: mol_type = other RNA
agctgtggctcactcatttccg

SEQ ID NO: 118737 - RNA, 22 nt, synthetic construct
  source 1..22: mol_type = other RNA
agctgttaatggttagactgca

SEQ ID NO: 118738 - RNA, 22 nt, synthetic construct
  source 1..22: mol_type = other RNA
agctgttgaattgttgcgcgtc

SEQ ID NO: 118739 - RNA, 22 nt, synthetic construct
  source 1..22: mol_type = other RNA
agctgtttgagctgaaagtaaa

SEQ ID NO: 118740 - RNA, 22 nt, synthetic construct
  source 1..22: mol_type = other RNA
agctgttttcatgcgacatatc

SEQ ID NO: 118741 - RNA, 22 nt, synthetic construct
  source 1..22: mol_type = other RNA
agctgttttggtaaaatgtggc

SEQ ID NO: 118742 - RNA, 22 nt, synthetic construct
  source 1..22: mol_type = other RNA
agcttaagagctaagactataa

SEQ ID NO: 118743 - RNA, 22 nt, synthetic construct
  source 1..22: mol_type = other RNA
agcttaatttagatgagagtgg

SEQ ID NO: 118744 - RNA, 22 nt, synthetic construct
  source 1..22: mol_type = other RNA
agcttacagcagatctgcttgc

SEQ ID NO: 118745 - RNA, 22 nt, synthetic construct
  source 1..22: mol_type = other RNA
agcttacagtcatcacagtcca

SEQ ID NO: 118746 - RNA, 22 nt, synthetic construct
  source 1..22: mol_type = other RNA
agcttaccaagtgccgcgtttt

SEQ ID NO: 118747 - RNA, 22 nt, synthetic construct
  source 1..22: mol_type = other RNA
agcttagaagaagacttaggag

SEQ ID NO: 118748 - RNA, 22 nt, synthetic construct
  source 1..22: mol_type = other RNA
agcttaggtcagattccttttt

SEQ ID NO: 118749 - RNA, 22 nt, synthetic construct
  source 1..22: mol_type = other RNA
agcttaggtctttgatccattt

SEQ ID NO: 118750 - RNA, 22 nt, synthetic construct
  source 1..22: mol_type = other RNA
agcttataatttctgagagtat

SEQ ID NO: 118751 - RNA, 22 nt, synthetic construct
  source 1..22: mol_type = other RNA
agcttatcaggcttgagtctgt

SEQ ID NO: 118752 - RNA, 22 nt, synthetic construct
  source 1..22: mol_type = other RNA
agcttatgatcttgggaatact

SEQ ID NO: 118753 - RNA, 22 nt, synthetic construct
  source 1..22: mol_type = other RNA
agcttattaaaatgaacctgct

SEQ ID NO: 118754 - RNA, 22 nt, synthetic construct
  source 1..22: mol_type = other RNA
agcttattctttttctagtttg

SEQ ID NO: 118755 - RNA, 22 nt, synthetic construct
  source 1..22: mol_type = other RNA
agcttcaaaccactatctaata

SEQ ID NO: 118756 - RNA, 22 nt, synthetic construct
  source 1..22: mol_type = other RNA
agcttcaacctcctgggctcaa

SEQ ID NO: 118757 - RNA, 22 nt, synthetic construct
  source 1..22: mol_type = other RNA
agcttcaatgagggcagagata

SEQ ID NO: 118758 - RNA, 22 nt, synthetic construct
  source 1..22: mol_type = other RNA
agcttcacgtgcattcatactg

SEQ ID NO: 118759 - RNA, 22 nt, synthetic construct
  source 1..22: mol_type = other RNA
agcttcactcttctgcaagttg

SEQ ID NO: 118760 - RNA, 22 nt, synthetic construct
  source 1..22: mol_type = other RNA
agcttcacttctctgctgctga

SEQ ID NO: 118761 - RNA, 22 nt, synthetic construct
  source 1..22: mol_type = other RNA
agcttcatataagtggaatcat

SEQ ID NO: 118762 - RNA, 22 nt, synthetic construct
  source 1..22: mol_type = other RNA
agcttccacccaagtggagcct

SEQ ID NO: 118763 - RNA, 22 nt, synthetic construct
  source 1..22: mol_type = other RNA
agcttcccccctctctctttct

SEQ ID NO: 118764 - RNA, 22 nt, synthetic construct
  source 1..22: mol_type = other RNA
agcttccgggacttggaagtga

SEQ ID NO: 118765 - RNA, 22 nt, synthetic construct
  source 1..22: mol_type = other RNA
agcttcctaaagagagtgacag

SEQ ID NO: 118766 - RNA, 22 nt, synthetic construct
  source 1..22: mol_type = other RNA
agcttcctaagaaagggtgtgt

SEQ ID NO: 118767 - RNA, 22 nt, synthetic construct
  source 1..22: mol_type = other RNA
agcttcctacccaagcttaggt

SEQ ID NO: 118768 - RNA, 22 nt, synthetic construct
  source 1..22: mol_type = other RNA
agcttcctcaggatctacatta

SEQ ID NO: 118769 - RNA, 22 nt, synthetic construct
  source 1..22: mol_type = other RNA
agcttcctctggctgacctggt

SEQ ID NO: 118770 - RNA, 22 nt, synthetic construct
  source 1..22: mol_type = other RNA
agcttccttgatcagcttccta

SEQ ID NO: 118771 - RNA, 22 nt, synthetic construct
  source 1..22: mol_type = other RNA
agcttcgaagcaaaacatatgt

SEQ ID NO: 118772 - RNA, 22 nt, synthetic construct
  source 1..22: mol_type = other RNA
agcttcgacagtcccttgcctg

SEQ ID NO: 118773 - RNA, 22 nt, synthetic construct
  source 1..22: mol_type = other RNA
agcttctgaattgagatgtact

SEQ ID NO: 118774 - RNA, 22 nt, synthetic construct
  source 1..22: mol_type = other RNA
agcttctgagcagtgtttccta

SEQ ID NO: 118775 - RNA, 22 nt, synthetic construct
  source 1..22: mol_type = other RNA
agcttctgagctgttaatggtt

SEQ ID NO: 118776 - RNA, 22 nt, synthetic construct
  source 1..22: mol_type = other RNA
agcttcttgttagaattttgct

SEQ ID NO: 118777 - RNA, 22 nt, synthetic construct
  source 1..22: mol_type = other RNA
agcttgacaaaaggccccttga

SEQ ID NO: 118778 - RNA, 22 nt, synthetic construct
  source 1..22: mol_type = other RNA
agcttgacattcttaccttcta

SEQ ID NO: 118779 - RNA, 22 nt, synthetic construct
  source 1..22: mol_type = other RNA
agcttgatctttacttcccttc

SEQ ID NO: 118780 - RNA, 22 nt, synthetic construct
  source 1..22: mol_type = other RNA
agcttgctagtagcagaatccc

SEQ ID NO: 118781 - RNA, 22 nt, synthetic construct
  source 1..22: mol_type = other RNA
agcttggccaacatggcgaaac

SEQ ID NO: 118782 - RNA, 22 nt, synthetic construct
  source 1..22: mol_type = other RNA
agcttgggcaagagagcaagtc

SEQ ID NO: 118783 - RNA, 22 nt, synthetic construct
  source 1..22: mol_type = other RNA
agcttgggctaaggtggagtgg

SEQ ID NO: 118784 - RNA, 22 nt, synthetic construct
  source 1..22: mol_type = other RNA
agcttgggtaggaagctgatca

SEQ ID NO: 118785 - RNA, 22 nt, synthetic construct
  source 1..22: mol_type = other RNA
agctttaaactggatgaataca

SEQ ID NO: 118786 - RNA, 22 nt, synthetic construct
  source 1..22: mol_type = other RNA
agctttcagacttaactatagg

SEQ ID NO: 118787 - RNA, 22 nt, synthetic construct
  source 1..22: mol_type = other RNA
agctttcagcactgctattgat

SEQ ID NO: 118788 - RNA, 22 nt, synthetic construct
  source 1..22: mol_type = other RNA
agctttcattattaccaggttt

SEQ ID NO: 118789 - RNA, 22 nt, synthetic construct
  source 1..22: mol_type = other RNA
agctttccttagttcgaagttt

SEQ ID NO: 118790 - RNA, 22 nt, synthetic construct
  source 1..22: mol_type = other RNA
agctttctaattctgacaactg

SEQ ID NO: 118791 - RNA, 22 nt, synthetic construct
  source 1..22: mol_type = other RNA
agctttctcccagctgtccaac

SEQ ID NO: 118792 - RNA, 22 nt, synthetic construct
  source 1..22: mol_type = other RNA
agctttcttttaaagacctcag

SEQ ID NO: 118793 - RNA, 22 nt, synthetic construct
  source 1..22: mol_type = other RNA
agctttcttttccaaccaagcc

SEQ ID NO: 118794 - RNA, 22 nt, synthetic construct
  source 1..22: mol_type = other RNA
agctttgatgcccccacccttt

SEQ ID NO: 118795 - RNA, 22 nt, synthetic construct
  source 1..22: mol_type = other RNA
agctttggctgaaatgctgtaa

SEQ ID NO: 118796 - RNA, 22 nt, synthetic construct
  source 1..22: mol_type = other RNA
agctttgtgactgtgagggtaa

SEQ ID NO: 118797 - RNA, 22 nt, synthetic construct
  source 1..22: mol_type = other RNA
agcttttacgaggacagactgc

SEQ ID NO: 118798 - RNA, 22 nt, synthetic construct
  source 1..22: mol_type = other RNA
agcttttcctgctgtcgtttat

SEQ ID NO: 118799 - RNA, 22 nt, synthetic construct
  source 1..22: mol_type = other RNA
agcttttctcctaagtcttctt

SEQ ID NO: 118800 - RNA, 22 nt, synthetic construct
  source 1..22: mol_type = other RNA
agcttttgaaactgagcatccc

SEQ ID NO: 118801 - RNA, 22 nt, synthetic construct
  source 1..22: mol_type = other RNA
agctttttctttttaaacaggt

SEQ ID NO: 118802 - RNA, 22 nt, synthetic construct
  source 1..22: mol_type = other RNA
aggaaaaaacacctaaagatat

SEQ ID NO: 118803 - RNA, 22 nt, synthetic construct
  source 1..22: mol_type = other RNA
aggaaaaaacagttgctattca

SEQ ID NO: 118804 - RNA, 22 nt, synthetic construct
  source 1..22: mol_type = other RNA
aggaaaaaacgggttatacaca

SEQ ID NO: 118805 - RNA, 22 nt, synthetic construct
  source 1..22: mol_type = other RNA
aggaaaaatctaaccctcaatc

SEQ ID NO: 118806 - RNA, 22 nt, synthetic construct
  source 1..22: mol_type = other RNA
aggaaaaccagtttagaaaaat

SEQ ID NO: 118807 - RNA, 22 nt, synthetic construct
  source 1..22: mol_type = other RNA
aggaaaaccatgtcatgtatat

SEQ ID NO: 118808 - RNA, 22 nt, synthetic construct
  source 1..22: mol_type = other RNA
aggaaaagaacacagtgttgag

SEQ ID NO: 118809 - RNA, 22 nt, synthetic construct
  source 1..22: mol_type = other RNA
aggaaaagacttctcaaacagg

SEQ ID NO: 118810 - RNA, 22 nt, synthetic construct
  source 1..22: mol_type = other RNA
aggaaaagacttgaggtttact

SEQ ID NO: 118811 - RNA, 22 nt, synthetic construct
  source 1..22: mol_type = other RNA
aggaaaagagaacattggtttg

SEQ ID NO: 118812 - RNA, 22 nt, synthetic construct
  source 1..22: mol_type = other RNA
aggaaaagagatctagtgaagt

SEQ ID NO: 118813 - RNA, 22 nt, synthetic construct
  source 1..22: mol_type = other RNA
aggaaaagcaaatgtcatcttc

SEQ ID NO: 118814 - RNA, 22 nt, synthetic construct
  source 1..22: mol_type = other RNA
aggaaaagctaccctcgagtaa

SEQ ID NO: 118815 - RNA, 22 nt, synthetic construct
  source 1..22: mol_type = other RNA
aggaaaaggacattagtggaaa

SEQ ID NO: 118816 - RNA, 22 nt, synthetic construct
  source 1..22: mol_type = other RNA
aggaaaagtcagtaaaaaagga

SEQ ID NO: 118817 - RNA, 22 nt, synthetic construct
  source 1..22: mol_type = other RNA
aggaaaataatttgcaacagaa

SEQ ID NO: 118818 - RNA, 22 nt, synthetic construct
  source 1..22: mol_type = other RNA
aggaaaatacatgaggcctctc

SEQ ID NO: 118819 - RNA, 22 nt, synthetic construct
  source 1..22: mol_type = other RNA
aggaaaatagagttccatctgt

SEQ ID NO: 118820 - RNA, 22 nt, synthetic construct
  source 1..22: mol_type = other RNA
aggaaacactataaatcagtaa

SEQ ID NO: 118821 - RNA, 22 nt, synthetic construct
  source 1..22: mol_type = other RNA
aggaaacactgctcagaagctt

SEQ ID NO: 118822 - RNA, 22 nt, synthetic construct
  source 1..22: mol_type = other RNA
aggaaacagagttttccaataa

SEQ ID NO: 118823 - RNA, 22 nt, synthetic construct
  source 1..22: mol_type = other RNA
aggaaacagattgatttatatg

SEQ ID NO: 118824 - RNA, 22 nt, synthetic construct
  source 1..22: mol_type = other RNA
aggaaaccccagggatattttc

SEQ ID NO: 118825 - RNA, 22 nt, synthetic construct
  source 1..22: mol_type = other RNA
aggaaacccgctctgggtgcgt

SEQ ID NO: 118826 - RNA, 22 nt, synthetic construct
  source 1..22: mol_type = other RNA
aggaaacttccagaaacttcca

SEQ ID NO: 118827 - RNA, 22 nt, synthetic construct
  source 1..22: mol_type = other RNA
aggaaactttgcattcctgaaa

SEQ ID NO: 118828 - RNA, 22 nt, synthetic construct
  source 1..22: mol_type = other RNA
aggaaagaccggggactgcaac

SEQ ID NO: 118829 - RNA, 22 nt, synthetic construct
  source 1..22: mol_type = other RNA
aggaaagatgaagtatagaaag

SEQ ID NO: 118830 - RNA, 22 nt, synthetic construct
  source 1..22: mol_type = other RNA
aggaaagatgtcttttaacttg

SEQ ID NO: 118831 - RNA, 22 nt, synthetic construct
  source 1..22: mol_type = other RNA
aggaaagcacgtttgatctggt

SEQ ID NO: 118832 - RNA, 22 nt, synthetic construct
  source 1..22: mol_type = other RNA
aggaaagcaggttgcattaatg

SEQ ID NO: 118833 - RNA, 22 nt, synthetic construct
  source 1..22: mol_type = other RNA
aggaaagcctgtgacagtatgt

SEQ ID NO: 118834 - RNA, 22 nt, synthetic construct
  source 1..22: mol_type = other RNA
aggaaagctcaggaccagatga

SEQ ID NO: 118835 - RNA, 22 nt, synthetic construct
  source 1..22: mol_type = other RNA
aggaaaggagatactggccatg

SEQ ID NO: 118836 - RNA, 22 nt, synthetic construct
  source 1..22: mol_type = other RNA
aggaaaggatggtttgattgtt

SEQ ID NO: 118837 - RNA, 22 nt, synthetic construct
  source 1..22: mol_type = other RNA
aggaaaggtggggaagggattg

SEQ ID NO: 118838 - RNA, 22 nt, synthetic construct
  source 1..22: mol_type = other RNA
aggaaagtaactgttggcaagg

SEQ ID NO: 118839 - RNA, 22 nt, synthetic construct
  source 1..22: mol_type = other RNA
aggaaagtgacagatgagaaat

SEQ ID NO: 118840 - RNA, 22 nt, synthetic construct
  source 1..22: mol_type = other RNA
aggaaagtgccagccacccttg

SEQ ID NO: 118841 - RNA, 22 nt, synthetic construct
  source 1..22: mol_type = other RNA
aggaaagtgtgcttgggctccc

SEQ ID NO: 118842 - RNA, 22 nt, synthetic construct
  source 1..22: mol_type = other RNA
aggaaataagaaggtttgtaga

SEQ ID NO: 118843 - RNA, 22 nt, synthetic construct
  source 1..22: mol_type = other RNA
aggaaatacaaaaagtgatacc

SEQ ID NO: 118844 - RNA, 22 nt, synthetic construct
  source 1..22: mol_type = other RNA
aggaaatacttgatctacattt

SEQ ID NO: 118845 - RNA, 22 nt, synthetic construct
  source 1..22: mol_type = other RNA
aggaaatgagtgtatgcaggga

SEQ ID NO: 118846 - RNA, 22 nt, synthetic construct
  source 1..22: mol_type = other RNA
aggaaatggacagcacattaaa

SEQ ID NO: 118847 - RNA, 22 nt, synthetic construct
  source 1..22: mol_type = other RNA
aggaacacacacctattcatag

SEQ ID NO: 118848 - RNA, 22 nt, synthetic construct
  source 1..22: mol_type = other RNA
aggaacaccttgaacatgaacg

SEQ ID NO: 118849 - RNA, 22 nt, synthetic construct
  source 1..22: mol_type = other RNA
aggaacagattcacgcacaggg

SEQ ID NO: 118850 - RNA, 22 nt, synthetic construct
  source 1..22: mol_type = other RNA
aggaaccatattagagtgaaaa

SEQ ID NO: 118851 - RNA, 22 nt, synthetic construct
  source 1..22: mol_type = other RNA
aggaactaattgataaaactga

SEQ ID NO: 118852 - RNA, 22 nt, synthetic construct
  source 1..22: mol_type = other RNA
aggaactaatttcatacaagtt

SEQ ID NO: 118853 - RNA, 22 nt, synthetic construct
  source 1..22: mol_type = other RNA
aggaactcatattagtctgtag

SEQ ID NO: 118854 - RNA, 22 nt, synthetic construct
  source 1..22: mol_type = other RNA
aggaacttacagtaagatcctg

SEQ ID NO: 118855 - RNA, 22 nt, synthetic construct
  source 1..22: mol_type = other RNA
aggaagaattaacactaatcct

SEQ ID NO: 118856 - RNA, 22 nt, synthetic construct
  source 1..22: mol_type = other RNA
aggaagaattattgtctgcaag

SEQ ID NO: 118857 - RNA, 22 nt, synthetic construct
  source 1..22: mol_type = other RNA
aggaagagactatctcttcctc

SEQ ID NO: 118858 - RNA, 22 nt, synthetic construct
  source 1..22: mol_type = other RNA
aggaagagatagtctcttcctg

SEQ ID NO: 118859 - RNA, 22 nt, synthetic construct
  source 1..22: mol_type = other RNA
aggaagaggaaggttcaagttt

SEQ ID NO: 118860 - RNA, 22 nt, synthetic construct
  source 1..22: mol_type = other RNA
aggaagaggcagctaagcacca

SEQ ID NO: 118861 - RNA, 22 nt, synthetic construct
  source 1..22: mol_type = other RNA
aggaagagtttatattctaagt

SEQ ID NO: 118862 - RNA, 22 nt, synthetic construct
  source 1..22: mol_type = other RNA
aggaagcacattccttccgacc

SEQ ID NO: 118863 - RNA, 22 nt, synthetic construct
  source 1..22: mol_type = other RNA
aggaagcaccaacccttgttgg

SEQ ID NO: 118864 - RNA, 22 nt, synthetic construct
  source 1..22: mol_type = other RNA
aggaagcagaatgtccatcagg

SEQ ID NO: 118865 - RNA, 22 nt, synthetic construct
  source 1..22: mol_type = other RNA
aggaagccactgcattcatcca

SEQ ID NO: 118866 - RNA, 22 nt, synthetic construct
  source 1..22: mol_type = other RNA
aggaagctaatcaagccgcaaa

SEQ ID NO: 118867 - RNA, 22 nt, synthetic construct
  source 1..22: mol_type = other RNA
aggaagctatggagcactgtga

SEQ ID NO: 118868 - RNA, 22 nt, synthetic construct
  source 1..22: mol_type = other RNA
aggaagctgatcaaggaagctt

SEQ ID NO: 118869 - RNA, 22 nt, synthetic construct
  source 1..22: mol_type = other RNA
aggaagcttataatttctgaga

SEQ ID NO: 118870 - RNA, 22 nt, synthetic construct
  source 1..22: mol_type = other RNA
aggaagcttcctaaagagagtg

SEQ ID NO: 118871 - RNA, 22 nt, synthetic construct
  source 1..22: mol_type = other RNA
aggaagcttccttgatcagctt

SEQ ID NO: 118872 - RNA, 22 nt, synthetic construct
  source 1..22: mol_type = other RNA
aggaaggaaaggagatactggc

SEQ ID NO: 118873 - RNA, 22 nt, synthetic construct
  source 1..22: mol_type = other RNA
aggaaggaacacacacctattc

SEQ ID NO: 118874 - RNA, 22 nt, synthetic construct
  source 1..22: mol_type = other RNA
aggaaggaattttaggacaagg

SEQ ID NO: 118875 - RNA, 22 nt, synthetic construct
  source 1..22: mol_type = other RNA
aggaaggagaatcgcttaaacc

SEQ ID NO: 118876 - RNA, 22 nt, synthetic construct
  source 1..22: mol_type = other RNA
aggaaggattggaatgagtcca

SEQ ID NO: 118877 - RNA, 22 nt, synthetic construct
  source 1..22: mol_type = other RNA
aggaaggcaggaggcctcagaa

SEQ ID NO: 118878 - RNA, 22 nt, synthetic construct
  source 1..22: mol_type = other RNA
aggaaggcagggtaggaaggcg

SEQ ID NO: 118879 - RNA, 22 nt, synthetic construct
  source 1..22: mol_type = other RNA
aggaaggcggtggggacagctc

SEQ ID NO: 118880 - RNA, 22 nt, synthetic construct
  source 1..22: mol_type = other RNA
aggaagggagagatgcctatga

SEQ ID NO: 118881 - RNA, 22 nt, synthetic construct
  source 1..22: mol_type = other RNA
aggaagggcttgatctagtaaa

SEQ ID NO: 118882 - RNA, 22 nt, synthetic construct
  source 1..22: mol_type = other RNA
aggaaggtcaaatggtaacagc

SEQ ID NO: 118883 - RNA, 22 nt, synthetic construct
  source 1..22: mol_type = other RNA
aggaaggttcaagtttggctcc

SEQ ID NO: 118884 - RNA, 22 nt, synthetic construct
  source 1..22: mol_type = other RNA
aggaagtatgagtcttccgtct

SEQ ID NO: 118885 - RNA, 22 nt, synthetic construct
  source 1..22: mol_type = other RNA
aggaagtcagcaactcttggcc

SEQ ID NO: 118886 - RNA, 22 nt, synthetic construct
  source 1..22: mol_type = other RNA
aggaagtccatgaaacttattt

SEQ ID NO: 118887 - RNA, 22 nt, synthetic construct
  source 1..22: mol_type = other RNA
aggaagtgaccctgagtccaga

SEQ ID NO: 118888 - RNA, 22 nt, synthetic construct
  source 1..22: mol_type = other RNA
aggaagtggctagacggaaaaa

SEQ ID NO: 118889 - RNA, 22 nt, synthetic construct
  source 1..22: mol_type = other RNA
aggaagttgagaaagagggaag

SEQ ID NO: 118890 - RNA, 22 nt, synthetic construct
  source 1..22: mol_type = other RNA
aggaataaatggtagcttgggc

SEQ ID NO: 118891 - RNA, 22 nt, synthetic construct
  source 1..22: mol_type = other RNA
aggaatagtattcaggacagat

SEQ ID NO: 118892 - RNA, 22 nt, synthetic construct
  source 1..22: mol_type = other RNA
aggaatataaacgtgtgtgtaa

SEQ ID NO: 118893 - RNA, 22 nt, synthetic construct
  source 1..22: mol_type = other RNA
aggaatccggctttatgagaca

SEQ ID NO: 118894 - RNA, 22 nt, synthetic construct
  source 1..22: mol_type = other RNA
aggaatccttcagtcagttctc

SEQ ID NO: 118895 - RNA, 22 nt, synthetic construct
  source 1..22: mol_type = other RNA
aggaatctgacctaagcttggg

SEQ ID NO: 118896 - RNA, 22 nt, synthetic construct
  source 1..22: mol_type = other RNA
aggaatgcaaagtttcctacat

SEQ ID NO: 118897 - RNA, 22 nt, synthetic construct
  source 1..22: mol_type = other RNA
aggaatgcctataaaatgctgg

SEQ ID NO: 118898 - RNA, 22 nt, synthetic construct
  source 1..22: mol_type = other RNA
aggaatggaattctgatgcaca

SEQ ID NO: 118899 - RNA, 22 nt, synthetic construct
  source 1..22: mol_type = other RNA
aggaatgtgcactcttttaaac

SEQ ID NO: 118900 - RNA, 22 nt, synthetic construct
  source 1..22: mol_type = other RNA
aggaatgtgcttcctaaacctg

SEQ ID NO: 118901 - RNA, 22 nt, synthetic construct
  source 1..22: mol_type = other RNA
aggaattgtaatcacagtacgc

SEQ ID NO: 118902 - RNA, 22 nt, synthetic construct
  source 1..22: mol_type = other RNA
aggaatttacatttccattcat

SEQ ID NO: 118903 - RNA, 22 nt, synthetic construct
  source 1..22: mol_type = other RNA
aggaattttaggacaaggaaag

SEQ ID NO: 118904 - RNA, 22 nt, synthetic construct
  source 1..22: mol_type = other RNA
aggaattttcaggactcatgag

SEQ ID NO: 118905 - RNA, 22 nt, synthetic construct
  source 1..22: mol_type = other RNA
aggacaaaaataatatgatacc

SEQ ID NO: 118906 - RNA, 22 nt, synthetic construct
  source 1..22: mol_type = other RNA
aggacaaggaaaggatggtttg

SEQ ID NO: 118907 - RNA, 22 nt, synthetic construct
  source 1..22: mol_type = other RNA
aggacaattgaatggggatgca

SEQ ID NO: 118908 - RNA, 22 nt, synthetic construct
  source 1..22: mol_type = other RNA
aggacacaaattatgactgaga

SEQ ID NO: 118909 - RNA, 22 nt, synthetic construct
  source 1..22: mol_type = other RNA
aggacactagcaatccaggatc

SEQ ID NO: 118910 - RNA, 22 nt, synthetic construct
  source 1..22: mol_type = other RNA
aggacactattgagagtgaaaa

SEQ ID NO: 118911 - RNA, 22 nt, synthetic construct
  source 1..22: mol_type = other RNA
aggacactggaggtgcacattc

SEQ ID NO: 118912 - RNA, 22 nt, synthetic construct
  source 1..22: mol_type = other RNA
aggacagaaattcaacttggta

SEQ ID NO: 118913 - RNA, 22 nt, synthetic construct
  source 1..22: mol_type = other RNA
aggacagactgcagttggatta

SEQ ID NO: 118914 - RNA, 22 nt, synthetic construct
  source 1..22: mol_type = other RNA
aggacagagcagtaggcttaga

SEQ ID NO: 118915 - RNA, 22 nt, synthetic construct
  source 1..22: mol_type = other RNA
aggacagattaaaatcagatta

SEQ ID NO: 118916 - RNA, 22 nt, synthetic construct
  source 1..22: mol_type = other RNA
aggacagcttccacccaagtgg

SEQ ID NO: 118917 - RNA, 22 nt, synthetic construct
  source 1..22: mol_type = other RNA
aggacaggtcacattctgcctg

SEQ ID NO: 118918 - RNA, 22 nt, synthetic construct
  source 1..22: mol_type = other RNA
aggacagtcatcctcaacaaga

SEQ ID NO: 118919 - RNA, 22 nt, synthetic construct
  source 1..22: mol_type = other RNA
aggacagttattcttcagcaag

SEQ ID NO: 118920 - RNA, 22 nt, synthetic construct
  source 1..22: mol_type = other RNA
aggacagttggccttgaggtga

SEQ ID NO: 118921 - RNA, 22 nt, synthetic construct
  source 1..22: mol_type = other RNA
aggacatattttatgatttcac

SEQ ID NO: 118922 - RNA, 22 nt, synthetic construct
  source 1..22: mol_type = other RNA
aggacatccacaacattgtgca

SEQ ID NO: 118923 - RNA, 22 nt, synthetic construct
  source 1..22: mol_type = other RNA
aggacatggagacagtgagcat

SEQ ID NO: 118924 - RNA, 22 nt, synthetic construct
  source 1..22: mol_type = other RNA
aggacattagtggaaaaactgc

SEQ ID NO: 118925 - RNA, 22 nt, synthetic construct
  source 1..22: mol_type = other RNA
aggacattatgctaagtaaaat

SEQ ID NO: 118926 - RNA, 22 nt, synthetic construct
  source 1..22: mol_type = other RNA
aggaccaactttaagcaaaatt

SEQ ID NO: 118927 - RNA, 22 nt, synthetic construct
  source 1..22: mol_type = other RNA
aggaccaatttaccatctgaca

SEQ ID NO: 118928 - RNA, 22 nt, synthetic construct
  source 1..22: mol_type = other RNA
aggaccagcttgggcaagagag

SEQ ID NO: 118929 - RNA, 22 nt, synthetic construct
  source 1..22: mol_type = other RNA
aggaccaggcagtcctctcact

SEQ ID NO: 118930 - RNA, 22 nt, synthetic construct
  source 1..22: mol_type = other RNA
aggaccaggtatggcgactcat

SEQ ID NO: 118931 - RNA, 22 nt, synthetic construct
  source 1..22: mol_type = other RNA
aggaccataggcacgcgccccc

SEQ ID NO: 118932 - RNA, 22 nt, synthetic construct
  source 1..22: mol_type = other RNA
aggaccatctgttaaaagatac

SEQ ID NO: 118933 - RNA, 22 nt, synthetic construct
  source 1..22: mol_type = other RNA
aggaccattagcagttctgtac

SEQ ID NO: 118934 - RNA, 22 nt, synthetic construct
  source 1..22: mol_type = other RNA
aggacgatttttccaacagttt

SEQ ID NO: 118935 - RNA, 22 nt, synthetic construct
  source 1..22: mol_type = other RNA
aggacgctgatgacagttactc

SEQ ID NO: 118936 - RNA, 22 nt, synthetic construct
  source 1..22: mol_type = other RNA
aggactcacagcttaccaagtg

SEQ ID NO: 118937 - RNA, 22 nt, synthetic construct
  source 1..22: mol_type = other RNA
aggactcatgagagctgtgccg

SEQ ID NO: 118938 - RNA, 22 nt, synthetic construct
  source 1..22: mol_type = other RNA
aggactccacagagttcagctt

SEQ ID NO: 118939 - RNA, 22 nt, synthetic construct
  source 1..22: mol_type = other RNA
aggactctgctcaaaggggcat

SEQ ID NO: 118940 - RNA, 22 nt, synthetic construct
  source 1..22: mol_type = other RNA
aggactgaagtcctttcttggt

SEQ ID NO: 118941 - RNA, 22 nt, synthetic construct
  source 1..22: mol_type = other RNA
aggactgcctattttgtaattt

SEQ ID NO: 118942 - RNA, 22 nt, synthetic construct
  source 1..22: mol_type = other RNA
aggactgcctggtcctgagggc

SEQ ID NO: 118943 - RNA, 22 nt, synthetic construct
  source 1..22: mol_type = other RNA
aggactgcttgaggccacgagt

SEQ ID NO: 118944 - RNA, 22 nt, synthetic construct
  source 1..22: mol_type = other RNA
aggactggaactcatttctgct

SEQ ID NO: 118945 - RNA, 22 nt, synthetic construct
  source 1..22: mol_type = other RNA
aggactggactccttctgaagg

SEQ ID NO: 118946 - RNA, 22 nt, synthetic construct
  source 1..22: mol_type = other RNA
aggactggcttcagtgccaaca

SEQ ID NO: 118947 - RNA, 22 nt, synthetic construct
  source 1..22: mol_type = other RNA
aggactgggatcctaagcatga

SEQ ID NO: 118948 - RNA, 22 nt, synthetic construct
  source 1..22: mol_type = other RNA
aggactgtgtgtgtccaggcca

SEQ ID NO: 118949 - RNA, 22 nt, synthetic construct
  source 1..22: mol_type = other RNA
aggacttcagtccttaccactg

SEQ ID NO: 118950 - RNA, 22 nt, synthetic construct
  source 1..22: mol_type = other RNA
aggacttcatgtacaatgaatt

SEQ ID NO: 118951 - RNA, 22 nt, synthetic construct
  source 1..22: mol_type = other RNA
aggacttgatctaaaatggaag

SEQ ID NO: 118952 - RNA, 22 nt, synthetic construct
  source 1..22: mol_type = other RNA
aggacttttggtacacatcttt

SEQ ID NO: 118953 - RNA, 22 nt, synthetic construct
  source 1..22: mol_type = other RNA
aggagaaaacaaaaagaaacta

SEQ ID NO: 118954 - RNA, 22 nt, synthetic construct
  source 1..22: mol_type = other RNA
aggagaaaagcttcataacatt

SEQ ID NO: 118955 - RNA, 22 nt, synthetic construct
  source 1..22: mol_type = other RNA
aggagaaacatggcttagaaat

SEQ ID NO: 118956 - RNA, 22 nt, synthetic construct
  source 1..22: mol_type = other RNA
aggagaaaccatttacccctta

SEQ ID NO: 118957 - RNA, 22 nt, synthetic construct
  source 1..22: mol_type = other RNA
aggagaactgcctggacccggg

SEQ ID NO: 118958 - RNA, 22 nt, synthetic construct
  source 1..22: mol_type = other RNA
aggagaacttgtctcggattta

SEQ ID NO: 118959 - RNA, 22 nt, synthetic construct
  source 1..22: mol_type = other RNA
aggagaaggccttccacggaat

SEQ ID NO: 118960 - RNA, 22 nt, synthetic construct
  source 1..22: mol_type = other RNA
aggagaatctgggaggtggagg

SEQ ID NO: 118961 - RNA, 22 nt, synthetic construct
  source 1..22: mol_type = other RNA
aggagaatggcatgaacccacc

SEQ ID NO: 118962 - RNA, 22 nt, synthetic construct
  source 1..22: mol_type = other RNA
aggagacattacaattgatacc

SEQ ID NO: 118963 - RNA, 22 nt, synthetic construct
  source 1..22: mol_type = other RNA
aggagaccagttaggaagccac

SEQ ID NO: 118964 - RNA, 22 nt, synthetic construct
  source 1..22: mol_type = other RNA
aggagacctactaaaagttgac

SEQ ID NO: 118965 - RNA, 22 nt, synthetic construct
  source 1..22: mol_type = other RNA
aggagactatcgttatatcctc

SEQ ID NO: 118966 - RNA, 22 nt, synthetic construct
  source 1..22: mol_type = other RNA
aggagagaaaaacaaaacaaag

SEQ ID NO: 118967 - RNA, 22 nt, synthetic construct
  source 1..22: mol_type = other RNA
aggagagaagagggggcataac

SEQ ID NO: 118968 - RNA, 22 nt, synthetic construct
  source 1..22: mol_type = other RNA
aggagagcgacagctacggagg

SEQ ID NO: 118969 - RNA, 22 nt, synthetic construct
  source 1..22: mol_type = other RNA
aggagagtcgcttgaacctgaa

SEQ ID NO: 118970 - RNA, 22 nt, synthetic construct
  source 1..22: mol_type = other RNA
aggagatactggccatgtttta

SEQ ID NO: 118971 - RNA, 22 nt, synthetic construct
  source 1..22: mol_type = other RNA
aggagatatacaggaagagact

SEQ ID NO: 118972 - RNA, 22 nt, synthetic construct
  source 1..22: mol_type = other RNA
aggagatggcacataccatgga

SEQ ID NO: 118973 - RNA, 22 nt, synthetic construct
  source 1..22: mol_type = other RNA
aggagattaaggctggaggatg

SEQ ID NO: 118974 - RNA, 22 nt, synthetic construct
  source 1..22: mol_type = other RNA
aggagcagtgtgaataggaaag

SEQ ID NO: 118975 - RNA, 22 nt, synthetic construct
  source 1..22: mol_type = other RNA
aggagcagttactcctgagcaa

SEQ ID NO: 118976 - RNA, 22 nt, synthetic construct
  source 1..22: mol_type = other RNA
aggagcatagcttgaaccaggg

SEQ ID NO: 118977 - RNA, 22 nt, synthetic construct
  source 1..22: mol_type = other RNA
aggagccaaacatcatgattta

SEQ ID NO: 118978 - RNA, 22 nt, synthetic construct
  source 1..22: mol_type = other RNA
aggagccaagtaaaagcaacct

SEQ ID NO: 118979 - RNA, 22 nt, synthetic construct
  source 1..22: mol_type = other RNA
aggagcccaccaccatgcctgg

SEQ ID NO: 118980 - RNA, 22 nt, synthetic construct
  source 1..22: mol_type = other RNA
aggagccctgctgtggccgagg

SEQ ID NO: 118981 - RNA, 22 nt, synthetic construct
  source 1..22: mol_type = other RNA
aggagcctagtcatccactgca

SEQ ID NO: 118982 - RNA, 22 nt, synthetic construct
  source 1..22: mol_type = other RNA
aggagccttgctgttgtaatgt

SEQ ID NO: 118983 - RNA, 22 nt, synthetic construct
  source 1..22: mol_type = other RNA
aggagcgccctggcattgtccc

SEQ ID NO: 118984 - RNA, 22 nt, synthetic construct
  source 1..22: mol_type = other RNA
aggagctagaacagaataaaaa

SEQ ID NO: 118985 - RNA, 22 nt, synthetic construct
  source 1..22: mol_type = other RNA
aggagctgagaccacagacgtg

SEQ ID NO: 118986 - RNA, 22 nt, synthetic construct
  source 1..22: mol_type = other RNA
aggaggaaaataatttgcaaca

SEQ ID NO: 118987 - RNA, 22 nt, synthetic construct
  source 1..22: mol_type = other RNA
aggaggaactaattgataaaac

SEQ ID NO: 118988 - RNA, 22 nt, synthetic construct
  source 1..22: mol_type = other RNA
aggaggaagagatagtctcttc

SEQ ID NO: 118989 - RNA, 22 nt, synthetic construct
  source 1..22: mol_type = other RNA
aggaggaggagggtgcagcctc

SEQ ID NO: 118990 - RNA, 22 nt, synthetic construct
  source 1..22: mol_type = other RNA
aggaggagggtgcagcctctaa

SEQ ID NO: 118991 - RNA, 22 nt, synthetic construct
  source 1..22: mol_type = other RNA
aggaggagggttagattatatg

SEQ ID NO: 118992 - RNA, 22 nt, synthetic construct
  source 1..22: mol_type = other RNA
aggaggcaaaggttgagacaag

SEQ ID NO: 118993 - RNA, 22 nt, synthetic construct
  source 1..22: mol_type = other RNA
aggaggcacctgaacccaggag

SEQ ID NO: 118994 - RNA, 22 nt, synthetic construct
  source 1..22: mol_type = other RNA
aggaggcctcagaattaatata

SEQ ID NO: 118995 - RNA, 22 nt, synthetic construct
  source 1..22: mol_type = other RNA
aggaggctattaactttgaaat

SEQ ID NO: 118996 - RNA, 22 nt, synthetic construct
  source 1..22: mol_type = other RNA
aggaggctgaggcaggagaact

SEQ ID NO: 118997 - RNA, 22 nt, synthetic construct
  source 1..22: mol_type = other RNA
aggaggctgaggcaggaggcac

SEQ ID NO: 118998 - RNA, 22 nt, synthetic construct
  source 1..22: mol_type = other RNA
aggagggaaaatgtttatttta

SEQ ID NO: 118999 - RNA, 22 nt, synthetic construct
  source 1..22: mol_type = other RNA
aggagggactgaaaccagtggg

SEQ ID NO: 119000 - RNA, 22 nt, synthetic construct
  source 1..22: mol_type = other RNA
aggagggaggattgtttgaggc

SEQ ID NO: 119001 - RNA, 22 nt, synthetic construct
  source 1..22: mol_type = other RNA
aggagggatgcattctagaaag

SEQ ID NO: 119002 - RNA, 22 nt, synthetic construct
  source 1..22: mol_type = other RNA
aggagggtgcagcctctaatca

SEQ ID NO: 119003 - RNA, 22 nt, synthetic construct
  source 1..22: mol_type = other RNA
aggagggtgtgatcaggaaaga

SEQ ID NO: 119004 - RNA, 22 nt, synthetic construct
  source 1..22: mol_type = other RNA
aggagggttagattatatggtc

SEQ ID NO: 119005 - RNA, 22 nt, synthetic construct
  source 1..22: mol_type = other RNA
aggaggtcatactggagcaggg

SEQ ID NO: 119006 - RNA, 22 nt, synthetic construct
  source 1..22: mol_type = other RNA
aggaggtctaagagataactaa

SEQ ID NO: 119007 - RNA, 22 nt, synthetic construct
  source 1..22: mol_type = other RNA
aggaggttgaagctctagtgag

SEQ ID NO: 119008 - RNA, 22 nt, synthetic construct
  source 1..22: mol_type = other RNA
aggaggtttgcactggcacagc

SEQ ID NO: 119009 - RNA, 22 nt, synthetic construct
  source 1..22: mol_type = other RNA
aggagtaactgctcctctgact

SEQ ID NO: 119010 - RNA, 22 nt, synthetic construct
  source 1..22: mol_type = other RNA
aggagtacagtgcataccacca

SEQ ID NO: 119011 - RNA, 22 nt, synthetic construct
  source 1..22: mol_type = other RNA
aggagtcaactaatcaaacata

SEQ ID NO: 119012 - RNA, 22 nt, synthetic construct
  source 1..22: mol_type = other RNA
aggagtccagtcctgctaacac

SEQ ID NO: 119013 - RNA, 22 nt, synthetic construct
  source 1..22: mol_type = other RNA
aggagtctgcccatcctatcta

SEQ ID NO: 119014 - RNA, 22 nt, synthetic construct
  source 1..22: mol_type = other RNA
aggagttaccataaaaccattt

SEQ ID NO: 119015 - RNA, 22 nt, synthetic construct
  source 1..22: mol_type = other RNA
aggagttcagctttaaagagaa

SEQ ID NO: 119016 - RNA, 22 nt, synthetic construct
  source 1..22: mol_type = other RNA
aggagttcattcgtagcaggtt

SEQ ID NO: 119017 - RNA, 22 nt, synthetic construct
  source 1..22: mol_type = other RNA
aggagttccgatttctcggccg

SEQ ID NO: 119018 - RNA, 22 nt, synthetic construct
  source 1..22: mol_type = other RNA
aggagttcttatgaggttattc

SEQ ID NO: 119019 - RNA, 22 nt, synthetic construct
  source 1..22: mol_type = other RNA
aggagttgcatcacttgaggtg

SEQ ID NO: 119020 - RNA, 22 nt, synthetic construct
  source 1..22: mol_type = other RNA
aggagtttgagactgcagtgac

SEQ ID NO: 119021 - RNA, 22 nt, synthetic construct
  source 1..22: mol_type = other RNA
aggagtttgaggccgcagtgag

SEQ ID NO: 119022 - RNA, 22 nt, synthetic construct
  source 1..22: mol_type = other RNA
aggagttttgcctctttgctaa

SEQ ID NO: 119023 - RNA, 22 nt, synthetic construct
  source 1..22: mol_type = other RNA
aggataaacaaagagaacaatg

SEQ ID NO: 119024 - RNA, 22 nt, synthetic construct
  source 1..22: mol_type = other RNA
aggataaggggcagggtggagt

SEQ ID NO: 119025 - RNA, 22 nt, synthetic construct
  source 1..22: mol_type = other RNA
aggataatatctggactgaaaa

SEQ ID NO: 119026 - RNA, 22 nt, synthetic construct
  source 1..22: mol_type = other RNA
aggataatgtccagaggaggaa

SEQ ID NO: 119027 - RNA, 22 nt, synthetic construct
  source 1..22: mol_type = other RNA
aggatacaaaaagcacctacca

SEQ ID NO: 119028 - RNA, 22 nt, synthetic construct
  source 1..22: mol_type = other RNA
aggatactgagaacagaatttt

SEQ ID NO: 119029 - RNA, 22 nt, synthetic construct
  source 1..22: mol_type = other RNA
aggatagttaaacatgtaaaac

SEQ ID NO: 119030 - RNA, 22 nt, synthetic construct
  source 1..22: mol_type = other RNA
aggatataacgatagtctccta

SEQ ID NO: 119031 - RNA, 22 nt, synthetic construct
  source 1..22: mol_type = other RNA
aggatataagagtgggcaaaaa

SEQ ID NO: 119032 - RNA, 22 nt, synthetic construct
  source 1..22: mol_type = other RNA
aggatatcagaagtgctgactt

SEQ ID NO: 119033 - RNA, 22 nt, synthetic construct
  source 1..22: mol_type = other RNA
aggatatgggccaaagacagat

SEQ ID NO: 119034 - RNA, 22 nt, synthetic construct
  source 1..22: mol_type = other RNA
aggatatgttttctaaacctta

SEQ ID NO: 119035 - RNA, 22 nt, synthetic construct
  source 1..22: mol_type = other RNA
aggatcaaatctggctgcaggg

SEQ ID NO: 119036 - RNA, 22 nt, synthetic construct
  source 1..22: mol_type = other RNA
aggatcaccaaagacttcagga

SEQ ID NO: 119037 - RNA, 22 nt, synthetic construct
  source 1..22: mol_type = other RNA
aggatccagatgtagagaaaca

SEQ ID NO: 119038 - RNA, 22 nt, synthetic construct
  source 1..22: mol_type = other RNA
aggatccagtctctacccagca

SEQ ID NO: 119039 - RNA, 22 nt, synthetic construct
  source 1..22: mol_type = other RNA
aggatcccagtcctttgggagg

SEQ ID NO: 119040 - RNA, 22 nt, synthetic construct
  source 1..22: mol_type = other RNA
aggatcccggaacaggaaaagg

SEQ ID NO: 119041 - RNA, 22 nt, synthetic construct
  source 1..22: mol_type = other RNA
aggatcgttagtattttcacat

SEQ ID NO: 119042 - RNA, 22 nt, synthetic construct
  source 1..22: mol_type = other RNA
aggatctgttggtgcttagctg

SEQ ID NO: 119043 - RNA, 22 nt, synthetic construct
  source 1..22: mol_type = other RNA
aggatcttactgtaagttcctg

SEQ ID NO: 119044 - RNA, 22 nt, synthetic construct
  source 1..22: mol_type = other RNA
aggatgaattacaaatgaaagt

SEQ ID NO: 119045 - RNA, 22 nt, synthetic construct
  source 1..22: mol_type = other RNA
aggatgaccttgacaataaatg

SEQ ID NO: 119046 - RNA, 22 nt, synthetic construct
  source 1..22: mol_type = other RNA
aggatgactgtcctgaattcta

SEQ ID NO: 119047 - RNA, 22 nt, synthetic construct
  source 1..22: mol_type = other RNA
aggatgaggggctgagccttca

SEQ ID NO: 119048 - RNA, 22 nt, synthetic construct
  source 1..22: mol_type = other RNA
aggatgcacaagacagatgtgc

SEQ ID NO: 119049 - RNA, 22 nt, synthetic construct
  source 1..22: mol_type = other RNA
aggatggcatgaaatgggttta

SEQ ID NO: 119050 - RNA, 22 nt, synthetic construct
  source 1..22: mol_type = other RNA
aggatggccagtcatgtgggga

SEQ ID NO: 119051 - RNA, 22 nt, synthetic construct
  source 1..22: mol_type = other RNA
aggatggcttgagcccaggggg

SEQ ID NO: 119052 - RNA, 22 nt, synthetic construct
  source 1..22: mol_type = other RNA
aggatgggcagactccttcccc

SEQ ID NO: 119053 - RNA, 22 nt, synthetic construct
  source 1..22: mol_type = other RNA
aggatgggcattccagagggta

SEQ ID NO: 119054 - RNA, 22 nt, synthetic construct
  source 1..22: mol_type = other RNA
aggatggtctcaatctcctgat

SEQ ID NO: 119055 - RNA, 22 nt, synthetic construct
  source 1..22: mol_type = other RNA
aggatggtttgattgttccagg

SEQ ID NO: 119056 - RNA, 22 nt, synthetic construct
  source 1..22: mol_type = other RNA
aggatgtcaacaaaatactagc

SEQ ID NO: 119057 - RNA, 22 nt, synthetic construct
  source 1..22: mol_type = other RNA
aggatgtcaactgaggcagagt

SEQ ID NO: 119058 - RNA, 22 nt, synthetic construct
  source 1..22: mol_type = other RNA
aggatgtctttgggaaggccct

SEQ ID NO: 119059 - RNA, 22 nt, synthetic construct
  source 1..22: mol_type = other RNA
aggatgtgtacccgtgtgtttt

SEQ ID NO: 119060 - RNA, 22 nt, synthetic construct
  source 1..22: mol_type = other RNA
aggattaagacactacaaaaaa

SEQ ID NO: 119061 - RNA, 22 nt, synthetic construct
  source 1..22: mol_type = other RNA
aggattaatctttctgaactca

SEQ ID NO: 119062 - RNA, 22 nt, synthetic construct
  source 1..22: mol_type = other RNA
aggattacaatgtaaggtgcac

SEQ ID NO: 119063 - RNA, 22 nt, synthetic construct
  source 1..22: mol_type = other RNA
aggattagaaagtagattagct

SEQ ID NO: 119064 - RNA, 22 nt, synthetic construct
  source 1..22: mol_type = other RNA
aggattagtgttaattcttcct

SEQ ID NO: 119065 - RNA, 22 nt, synthetic construct
  source 1..22: mol_type = other RNA
aggattatggctagaaacttgg

SEQ ID NO: 119066 - RNA, 22 nt, synthetic construct
  source 1..22: mol_type = other RNA
aggattccaggtttacaggata

SEQ ID NO: 119067 - RNA, 22 nt, synthetic construct
  source 1..22: mol_type = other RNA
aggattcctccctggagaggca

SEQ ID NO: 119068 - RNA, 22 nt, synthetic construct
  source 1..22: mol_type = other RNA
aggattcgattaaaataacacg

SEQ ID NO: 119069 - RNA, 22 nt, synthetic construct
  source 1..22: mol_type = other RNA
aggattcgggggagagcactgg

SEQ ID NO: 119070 - RNA, 22 nt, synthetic construct
  source 1..22: mol_type = other RNA
aggattcttgttaagcattttc

SEQ ID NO: 119071 - RNA, 22 nt, synthetic construct
  source 1..22: mol_type = other RNA
aggattgaatggaaagaaatag

SEQ ID NO: 119072 - RNA, 22 nt, synthetic construct
  source 1..22: mol_type = other RNA
aggattgcctaacaccagtaag

SEQ ID NO: 119073 - RNA, 22 nt, synthetic construct
  source 1..22: mol_type = other RNA
aggattggaatgagtccagctt

SEQ ID NO: 119074 - RNA, 22 nt, synthetic construct
  source 1..22: mol_type = other RNA
aggattggagactgataaactt

SEQ ID NO: 119075 - RNA, 22 nt, synthetic construct
  source 1..22: mol_type = other RNA
aggattgggaagattggcttta

SEQ ID NO: 119076 - RNA, 22 nt, synthetic construct
  source 1..22: mol_type = other RNA
aggattgttcatgtctgtgtag

SEQ ID NO: 119077 - RNA, 22 nt, synthetic construct
  source 1..22: mol_type = other RNA
aggattgtttgaggctgggagt

SEQ ID NO: 119078 - RNA, 22 nt, synthetic construct
  source 1..22: mol_type = other RNA
aggatttgtttgtgaagataca

SEQ ID NO: 119079 - RNA, 22 nt, synthetic construct
  source 1..22: mol_type = other RNA
aggattttcgtatcttttaaca

SEQ ID NO: 119080 - RNA, 22 nt, synthetic construct
  source 1..22: mol_type = other RNA
aggattttctattcattaccag

SEQ ID NO: 119081 - RNA, 22 nt, synthetic construct
  source 1..22: mol_type = other RNA
aggattttggattgcgattgtt

SEQ ID NO: 119082 - RNA, 22 nt, synthetic construct
  source 1..22: mol_type = other RNA
aggcaaaactcctgaacaaaat

SEQ ID NO: 119083 - RNA, 22 nt, synthetic construct
  source 1..22: mol_type = other RNA
aggcaaaagatgatgaacaaag

SEQ ID NO: 119084 - RNA, 22 nt, synthetic construct
  source 1..22: mol_type = other RNA
aggcaaacagcgccacttaaaa

SEQ ID NO: 119085 - RNA, 22 nt, synthetic construct
  source 1..22: mol_type = other RNA
aggcaaaccacacagagaacag

SEQ ID NO: 119086 - RNA, 22 nt, synthetic construct
  source 1..22: mol_type = other RNA
aggcaaaggaaaaaactttttt

SEQ ID NO: 119087 - RNA, 22 nt, synthetic construct
  source 1..22: mol_type = other RNA
aggcaaaggaaaaatctaaccc

SEQ ID NO: 119088 - RNA, 22 nt, synthetic construct
  source 1..22: mol_type = other RNA
aggcaaaggccgctcttgacct

SEQ ID NO: 119089 - RNA, 22 nt, synthetic construct
  source 1..22: mol_type = other RNA
aggcaaaggttgagacaagacc

SEQ ID NO: 119090 - RNA, 22 nt, synthetic construct
  source 1..22: mol_type = other RNA
aggcaaattcatagatcaccag

SEQ ID NO: 119091 - RNA, 22 nt, synthetic construct
  source 1..22: mol_type = other RNA
aggcaacagtcattcaggtcta

SEQ ID NO: 119092 - RNA, 22 nt, synthetic construct
  source 1..22: mol_type = other RNA
aggcaacatccctatgcaataa

SEQ ID NO: 119093 - RNA, 22 nt, synthetic construct
  source 1..22: mol_type = other RNA
aggcaaccttgggagaaaattt

SEQ ID NO: 119094 - RNA, 22 nt, synthetic construct
  source 1..22: mol_type = other RNA
aggcaagagagcaagactcaaa

SEQ ID NO: 119095 - RNA, 22 nt, synthetic construct
  source 1..22: mol_type = other RNA
aggcaagggactgtcgaagctt

SEQ ID NO: 119096 - RNA, 22 nt, synthetic construct
  source 1..22: mol_type = other RNA
aggcaatccttccgcctcagcc

SEQ ID NO: 119097 - RNA, 22 nt, synthetic construct
  source 1..22: mol_type = other RNA
aggcaatgagtctgacatactg

SEQ ID NO: 119098 - RNA, 22 nt, synthetic construct
  source 1..22: mol_type = other RNA
aggcaatgctctcttcccccaa

SEQ ID NO: 119099 - RNA, 22 nt, synthetic construct
  source 1..22: mol_type = other RNA
aggcaatgtaacacagttctag

SEQ ID NO: 119100 - RNA, 22 nt, synthetic construct
  source 1..22: mol_type = other RNA
aggcaatgtagggaatagacaa

SEQ ID NO: 119101 - RNA, 22 nt, synthetic construct
  source 1..22: mol_type = other RNA
aggcaatgttgattttgaggca

SEQ ID NO: 119102 - RNA, 22 nt, synthetic construct
  source 1..22: mol_type = other RNA
aggcaatttagaattctctctc

SEQ ID NO: 119103 - RNA, 22 nt, synthetic construct
  source 1..22: mol_type = other RNA
aggcacagtctgtgcttaagga

SEQ ID NO: 119104 - RNA, 22 nt, synthetic construct
  source 1..22: mol_type = other RNA
aggcacattcaagcagaaatga

SEQ ID NO: 119105 - RNA, 22 nt, synthetic construct
  source 1..22: mol_type = other RNA
aggcaccgcgcccggccgagaa

SEQ ID NO: 119106 - RNA, 22 nt, synthetic construct
  source 1..22: mol_type = other RNA
aggcacctgaacccaggaggca

SEQ ID NO: 119107 - RNA, 22 nt, synthetic construct
  source 1..22: mol_type = other RNA
aggcaccttcagaagccctgca

SEQ ID NO: 119108 - RNA, 22 nt, synthetic construct
  source 1..22: mol_type = other RNA
aggcactaacaaagggcctgtt

SEQ ID NO: 119109 - RNA, 22 nt, synthetic construct
  source 1..22: mol_type = other RNA
aggcactgtatggttcttaaga

SEQ ID NO: 119110 - RNA, 22 nt, synthetic construct
  source 1..22: mol_type = other RNA
aggcagaacacactgctcttct

SEQ ID NO: 119111 - RNA, 22 nt, synthetic construct
  source 1..22: mol_type = other RNA
aggcagaaccacctgggggaga

SEQ ID NO: 119112 - RNA, 22 nt, synthetic construct
  source 1..22: mol_type = other RNA
aggcagaatgtgacctgtcctt

SEQ ID NO: 119113 - RNA, 22 nt, synthetic construct
  source 1..22: mol_type = other RNA
aggcagaattatagagggccta

SEQ ID NO: 119114 - RNA, 22 nt, synthetic construct
  source 1..22: mol_type = other RNA
aggcagagagagtaactggtcc

SEQ ID NO: 119115 - RNA, 22 nt, synthetic construct
  source 1..22: mol_type = other RNA
aggcagagagatggtgggagag

SEQ ID NO: 119116 - RNA, 22 nt, synthetic construct
  source 1..22: mol_type = other RNA
aggcagagtagagaaggctttg

SEQ ID NO: 119117 - RNA, 22 nt, synthetic construct
  source 1..22: mol_type = other RNA
aggcagatcacaaggtcagaag

SEQ ID NO: 119118 - RNA, 22 nt, synthetic construct
  source 1..22: mol_type = other RNA
aggcagatcacgaggtcgagag

SEQ ID NO: 119119 - RNA, 22 nt, synthetic construct
  source 1..22: mol_type = other RNA
aggcagatgttgcggtgagcag

SEQ ID NO: 119120 - RNA, 22 nt, synthetic construct
  source 1..22: mol_type = other RNA
aggcagcccgacctccagcgct

SEQ ID NO: 119121 - RNA, 22 nt, synthetic construct
  source 1..22: mol_type = other RNA
aggcagctaagcaccaacagat

SEQ ID NO: 119122 - RNA, 22 nt, synthetic construct
  source 1..22: mol_type = other RNA
aggcaggactgcttgaggccac

SEQ ID NO: 119123 - RNA, 22 nt, synthetic construct
  source 1..22: mol_type = other RNA
aggcaggagaactgcctggacc

SEQ ID NO: 119124 - RNA, 22 nt, synthetic construct
  source 1..22: mol_type = other RNA
aggcaggagaatggcatgaacc

SEQ ID NO: 119125 - RNA, 22 nt, synthetic construct
  source 1..22: mol_type = other RNA
aggcaggagagtcgcttgaacc

SEQ ID NO: 119126 - RNA, 22 nt, synthetic construct
  source 1..22: mol_type = other RNA
aggcaggagcagtgtgaatagg

SEQ ID NO: 119127 - RNA, 22 nt, synthetic construct
  source 1..22: mol_type = other RNA
aggcaggagcatagcttgaacc

SEQ ID NO: 119128 - RNA, 22 nt, synthetic construct
  source 1..22: mol_type = other RNA
aggcaggaggcacctgaaccca

SEQ ID NO: 119129 - RNA, 22 nt, synthetic construct
  source 1..22: mol_type = other RNA
aggcaggaggcctcagaattaa

SEQ ID NO: 119130 - RNA, 22 nt, synthetic construct
  source 1..22: mol_type = other RNA
aggcaggcagatcacgaggtcg

SEQ ID NO: 119131 - RNA, 22 nt, synthetic construct
  source 1..22: mol_type = other RNA
aggcagggcttggtggcccaca

SEQ ID NO: 119132 - RNA, 22 nt, synthetic construct
  source 1..22: mol_type = other RNA
aggcagggtaggaaggcggtgg

SEQ ID NO: 119133 - RNA, 22 nt, synthetic construct
  source 1..22: mol_type = other RNA
aggcaggtggatatctgaggtc

SEQ ID NO: 119134 - RNA, 22 nt, synthetic construct
  source 1..22: mol_type = other RNA
aggcaggtggatcaggagattg

SEQ ID NO: 119135 - RNA, 22 nt, synthetic construct
  source 1..22: mol_type = other RNA
aggcagtaccattccccttgcc

SEQ ID NO: 119136 - RNA, 22 nt, synthetic construct
  source 1..22: mol_type = other RNA
aggcagtcctctactttcacat

SEQ ID NO: 119137 - RNA, 22 nt, synthetic construct
  source 1..22: mol_type = other RNA
aggcagtcctctcactccaaag

SEQ ID NO: 119138 - RNA, 22 nt, synthetic construct
  source 1..22: mol_type = other RNA
aggcagtctagtccatgaagaa

SEQ ID NO: 119139 - RNA, 22 nt, synthetic construct
  source 1..22: mol_type = other RNA
aggcagttattaagagtgtgct

SEQ ID NO: 119140 - RNA, 22 nt, synthetic construct
  source 1..22: mol_type = other RNA
aggcagttgagttttcaacctt

SEQ ID NO: 119141 - RNA, 22 nt, synthetic construct
  source 1..22: mol_type = other RNA
aggcataagccaccgcactcag

SEQ ID NO: 119142 - RNA, 22 nt, synthetic construct
  source 1..22: mol_type = other RNA
aggcatagggccttctacttta

SEQ ID NO: 119143 - RNA, 22 nt, synthetic construct
  source 1..22: mol_type = other RNA
aggcatataaactggaaggaaa

SEQ ID NO: 119144 - RNA, 22 nt, synthetic construct
  source 1..22: mol_type = other RNA
aggcatataataagcagaattc

SEQ ID NO: 119145 - RNA, 22 nt, synthetic construct
  source 1..22: mol_type = other RNA
aggcatattattgtaacttgaa

SEQ ID NO: 119146 - RNA, 22 nt, synthetic construct
  source 1..22: mol_type = other RNA
aggcatctagttaccactagca

SEQ ID NO: 119147 - RNA, 22 nt, synthetic construct
  source 1..22: mol_type = other RNA
aggcatctatttccccattaga

SEQ ID NO: 119148 - RNA, 22 nt, synthetic construct
  source 1..22: mol_type = other RNA
aggcatctctcccttcctgttc

SEQ ID NO: 119149 - RNA, 22 nt, synthetic construct
  source 1..22: mol_type = other RNA
aggcatctctctaaaaacatcc

SEQ ID NO: 119150 - RNA, 22 nt, synthetic construct
  source 1..22: mol_type = other RNA
aggcatgaaattcttgggtgaa

SEQ ID NO: 119151 - RNA, 22 nt, synthetic construct
  source 1..22: mol_type = other RNA
aggcatgagccacagggcccag

SEQ ID NO: 119152 - RNA, 22 nt, synthetic construct
  source 1..22: mol_type = other RNA
aggcatgagccactgcgggccc

SEQ ID NO: 119153 - RNA, 22 nt, synthetic construct
  source 1..22: mol_type = other RNA
aggcatgagtcgccatacctgg

SEQ ID NO: 119154 - RNA, 22 nt, synthetic construct
  source 1..22: mol_type = other RNA
aggcatgatggctcaacgcctg

SEQ ID NO: 119155 - RNA, 22 nt, synthetic construct
  source 1..22: mol_type = other RNA
aggcatgcacggacttggcaca

SEQ ID NO: 119156 - RNA, 22 nt, synthetic construct
  source 1..22: mol_type = other RNA
aggcatgccgggacaagagtct

SEQ ID NO: 119157 - RNA, 22 nt, synthetic construct
  source 1..22: mol_type = other RNA
aggcatgcgccatcacacccag

SEQ ID NO: 119158 - RNA, 22 nt, synthetic construct
  source 1..22: mol_type = other RNA
aggcatgctaactgcagaggtc

SEQ ID NO: 119159 - RNA, 22 nt, synthetic construct
  source 1..22: mol_type = other RNA
aggcatgggggcgcgtgcctat

SEQ ID NO: 119160 - RNA, 22 nt, synthetic construct
  source 1..22: mol_type = other RNA
aggcattagtgaattcacagta

SEQ ID NO: 119161 - RNA, 22 nt, synthetic construct
  source 1..22: mol_type = other RNA
aggcattgtgctcagtggttct

SEQ ID NO: 119162 - RNA, 22 nt, synthetic construct
  source 1..22: mol_type = other RNA
aggccaaatgaaaggcgtcggg

SEQ ID NO: 119163 - RNA, 22 nt, synthetic construct
  source 1..22: mol_type = other RNA
aggccaacagggccactgagag

SEQ ID NO: 119164 - RNA, 22 nt, synthetic construct
  source 1..22: mol_type = other RNA
aggccaactgtcctctcttgtt

SEQ ID NO: 119165 - RNA, 22 nt, synthetic construct
  source 1..22: mol_type = other RNA
aggccaaggcaggactgcttga

SEQ ID NO: 119166 - RNA, 22 nt, synthetic construct
  source 1..22: mol_type = other RNA
aggccacaaagtccccacatga

SEQ ID NO: 119167 - RNA, 22 nt, synthetic construct
  source 1..22: mol_type = other RNA
aggccactctcatctaaattaa

SEQ ID NO: 119168 - RNA, 22 nt, synthetic construct
  source 1..22: mol_type = other RNA
aggccagagggaatctaggaaa

SEQ ID NO: 119169 - RNA, 22 nt, synthetic construct
  source 1..22: mol_type = other RNA
aggccagatatccataaggaaa

SEQ ID NO: 119170 - RNA, 22 nt, synthetic construct
  source 1..22: mol_type = other RNA
aggccagtccctagtgtctcca

SEQ ID NO: 119171 - RNA, 22 nt, synthetic construct
  source 1..22: mol_type = other RNA
aggccagtgagtgatgaaaaga

SEQ ID NO: 119172 - RNA, 22 nt, synthetic construct
  source 1..22: mol_type = other RNA
aggccataaatcaaggtacaat

SEQ ID NO: 119173 - RNA, 22 nt, synthetic construct
  source 1..22: mol_type = other RNA
aggccatcttcatttctaagcc

SEQ ID NO: 119174 - RNA, 22 nt, synthetic construct
  source 1..22: mol_type = other RNA
aggccatttgattgccagtttt

SEQ ID NO: 119175 - RNA, 22 nt, synthetic construct
  source 1..22: mol_type = other RNA
aggcccaaaaagtttttaaaaa

SEQ ID NO: 119176 - RNA, 22 nt, synthetic construct
  source 1..22: mol_type = other RNA
aggcccaccatgatgcagcccc

SEQ ID NO: 119177 - RNA, 22 nt, synthetic construct
  source 1..22: mol_type = other RNA
aggccccaggggacatagatga

SEQ ID NO: 119178 - RNA, 22 nt, synthetic construct
  source 1..22: mol_type = other RNA
aggccccgatgccatgtgtttt

SEQ ID NO: 119179 - RNA, 22 nt, synthetic construct
  source 1..22: mol_type = other RNA
aggccccttgaaagatcattta

SEQ ID NO: 119180 - RNA, 22 nt, synthetic construct
  source 1..22: mol_type = other RNA
aggcccggggcagagaactgac

SEQ ID NO: 119181 - RNA, 22 nt, synthetic construct
  source 1..22: mol_type = other RNA
aggccctaaccccagagattgt

SEQ ID NO: 119182 - RNA, 22 nt, synthetic construct
  source 1..22: mol_type = other RNA
aggccctatgccttcagtatga

SEQ ID NO: 119183 - RNA, 22 nt, synthetic construct
  source 1..22: mol_type = other RNA
aggccctattcaacctataaga

SEQ ID NO: 119184 - RNA, 22 nt, synthetic construct
  source 1..22: mol_type = other RNA
aggccctctataattctgcctt

SEQ ID NO: 119185 - RNA, 22 nt, synthetic construct
  source 1..22: mol_type = other RNA
aggccctgagaagtcaaagcct

SEQ ID NO: 119186 - RNA, 22 nt, synthetic construct
  source 1..22: mol_type = other RNA
aggccctgattgagattagcga

SEQ ID NO: 119187 - RNA, 22 nt, synthetic construct
  source 1..22: mol_type = other RNA
aggccctgatttaaagtaggtt

SEQ ID NO: 119188 - RNA, 22 nt, synthetic construct
  source 1..22: mol_type = other RNA
aggccctggtgctttctatctc

SEQ ID NO: 119189 - RNA, 22 nt, synthetic construct
  source 1..22: mol_type = other RNA
aggccctttgttagtgccttca

SEQ ID NO: 119190 - RNA, 22 nt, synthetic construct
  source 1..22: mol_type = other RNA
aggccgaggcaggtggatcagg

SEQ ID NO: 119191 - RNA, 22 nt, synthetic construct
  source 1..22: mol_type = other RNA
aggccgagggttgaacatcacc

SEQ ID NO: 119192 - RNA, 22 nt, synthetic construct
  source 1..22: mol_type = other RNA
aggccgcagtgagccatggctg

SEQ ID NO: 119193 - RNA, 22 nt, synthetic construct
  source 1..22: mol_type = other RNA
aggccgcccgctgctccctctg

SEQ ID NO: 119194 - RNA, 22 nt, synthetic construct
  source 1..22: mol_type = other RNA
aggccgctcttgaccttgtgca

SEQ ID NO: 119195 - RNA, 22 nt, synthetic construct
  source 1..22: mol_type = other RNA
aggccggaggattgcttgagtg

SEQ ID NO: 119196 - RNA, 22 nt, synthetic construct
  source 1..22: mol_type = other RNA
aggccgtccctattttctacag

SEQ ID NO: 119197 - RNA, 22 nt, synthetic construct
  source 1..22: mol_type = other RNA
aggcctaggtgtgataactgat

SEQ ID NO: 119198 - RNA, 22 nt, synthetic construct
  source 1..22: mol_type = other RNA
aggcctattttaggctctgtgg

SEQ ID NO: 119199 - RNA, 22 nt, synthetic construct
  source 1..22: mol_type = other RNA
aggcctcagaattaatataaga

SEQ ID NO: 119200 - RNA, 22 nt, synthetic construct
  source 1..22: mol_type = other RNA
aggcctcatgtattttcctaac

SEQ ID NO: 119201 - RNA, 22 nt, synthetic construct
  source 1..22: mol_type = other RNA
aggcctcctgccttcctgacct

SEQ ID NO: 119202 - RNA, 22 nt, synthetic construct
  source 1..22: mol_type = other RNA
aggcctcgctcttggcttttgg

SEQ ID NO: 119203 - RNA, 22 nt, synthetic construct
  source 1..22: mol_type = other RNA
aggcctctccccttgacgaagt

SEQ ID NO: 119204 - RNA, 22 nt, synthetic construct
  source 1..22: mol_type = other RNA
aggcctgagccgtcggtatgtt

SEQ ID NO: 119205 - RNA, 22 nt, synthetic construct
  source 1..22: mol_type = other RNA
aggcctgatagctgtggaagca

SEQ ID NO: 119206 - RNA, 22 nt, synthetic construct
  source 1..22: mol_type = other RNA
aggcctgcttcattccgcgttt

SEQ ID NO: 119207 - RNA, 22 nt, synthetic construct
  source 1..22: mol_type = other RNA
aggcctggaacaggccctttgt

SEQ ID NO: 119208 - RNA, 22 nt, synthetic construct
  source 1..22: mol_type = other RNA
aggcctgttgtgaggattcgat

SEQ ID NO: 119209 - RNA, 22 nt, synthetic construct
  source 1..22: mol_type = other RNA
aggccttccacctgctctttat

SEQ ID NO: 119210 - RNA, 22 nt, synthetic construct
  source 1..22: mol_type = other RNA
aggccttccacggaatgcccct

SEQ ID NO: 119211 - RNA, 22 nt, synthetic construct
  source 1..22: mol_type = other RNA
aggccttcgaggcatctagtta

SEQ ID NO: 119212 - RNA, 22 nt, synthetic construct
  source 1..22: mol_type = other RNA
aggccttctcctccaacccatt

SEQ ID NO: 119213 - RNA, 22 nt, synthetic construct
  source 1..22: mol_type = other RNA
aggcgaaatatctccctcacag

SEQ ID NO: 119214 - RNA, 22 nt, synthetic construct
  source 1..22: mol_type = other RNA
aggcgaaatgtgaacagacaga

SEQ ID NO: 119215 - RNA, 22 nt, synthetic construct
  source 1..22: mol_type = other RNA
aggcgaagcccgccgctcgcag

SEQ ID NO: 119216 - RNA, 22 nt, synthetic construct
  source 1..22: mol_type = other RNA
aggcgcacgccatctcgcccag

SEQ ID NO: 119217 - RNA, 22 nt, synthetic construct
  source 1..22: mol_type = other RNA
aggcgcagacacaccatgacag

SEQ ID NO: 119218 - RNA, 22 nt, synthetic construct
  source 1..22: mol_type = other RNA
aggcgcctgcattgcatttact

SEQ ID NO: 119219 - RNA, 22 nt, synthetic construct
  source 1..22: mol_type = other RNA
aggcgcctggacaggatcccgg

SEQ ID NO: 119220 - RNA, 22 nt, synthetic construct
  source 1..22: mol_type = other RNA
aggcggaaggattgcctaacac

SEQ ID NO: 119221 - RNA, 22 nt, synthetic construct
  source 1..22: mol_type = other RNA
aggcggaagttgcagtgagccc

SEQ ID NO: 119222 - RNA, 22 nt, synthetic construct
  source 1..22: mol_type = other RNA
aggcggaatgcagtggcgtgat

SEQ ID NO: 119223 - RNA, 22 nt, synthetic construct
  source 1..22: mol_type = other RNA
aggcggaggttgcggtgacgtg

SEQ ID NO: 119224 - RNA, 22 nt, synthetic construct
  source 1..22: mol_type = other RNA
aggcggcagagggagcagcggg

SEQ ID NO: 119225 - RNA, 22 nt, synthetic construct
  source 1..22: mol_type = other RNA
aggcggctggatcgcttgaggt

SEQ ID NO: 119226 - RNA, 22 nt, synthetic construct
  source 1..22: mol_type = other RNA
aggcggtggggacagctcaatt

SEQ ID NO: 119227 - RNA, 22 nt, synthetic construct
  source 1..22: mol_type = other RNA
aggcgtagtatctcatgcttag

SEQ ID NO: 119228 - RNA, 22 nt, synthetic construct
  source 1..22: mol_type = other RNA
aggcgtgagccaccacgtccgg

SEQ ID NO: 119229 - RNA, 22 nt, synthetic construct
  source 1..22: mol_type = other RNA
aggcgtgagccaccgcgcctgg

SEQ ID NO: 119230 - RNA, 22 nt, synthetic construct
  source 1..22: mol_type = other RNA
aggcgtgagccacctcatccgg

SEQ ID NO: 119231 - RNA, 22 nt, synthetic construct
  source 1..22: mol_type = other RNA
aggcgtgagccatcgcgcccag

SEQ ID NO: 119232 - RNA, 22 nt, synthetic construct
  source 1..22: mol_type = other RNA
aggcgtgagcctccacacctgg

SEQ ID NO: 119233 - RNA, 22 nt, synthetic construct
  source 1..22: mol_type = other RNA
aggcgtggtggcggatgccggt

SEQ ID NO: 119234 - RNA, 22 nt, synthetic construct
  source 1..22: mol_type = other RNA
aggcgtgtaaactgttggaaaa

SEQ ID NO: 119235 - RNA, 22 nt, synthetic construct
  source 1..22: mol_type = other RNA
aggcgttgagccatcatgcctg

SEQ ID NO: 119236 - RNA, 22 nt, synthetic construct
  source 1..22: mol_type = other RNA
aggctaaaacatacatgagaaa

SEQ ID NO: 119237 - RNA, 22 nt, synthetic construct
  source 1..22: mol_type = other RNA
aggctaacagccaaagaaattg

SEQ ID NO: 119238 - RNA, 22 nt, synthetic construct
  source 1..22: mol_type = other RNA
aggctaagcatgtaacttgctt

SEQ ID NO: 119239 - RNA, 22 nt, synthetic construct
  source 1..22: mol_type = other RNA
aggctaagttgagaaactatcc

SEQ ID NO: 119240 - RNA, 22 nt, synthetic construct
  source 1..22: mol_type = other RNA
aggctaatgtgtgttccagaca

SEQ ID NO: 119241 - RNA, 22 nt, synthetic construct
  source 1..22: mol_type = other RNA
aggctaattttttctgtaatgt

SEQ ID NO: 119242 - RNA, 22 nt, synthetic construct
  source 1..22: mol_type = other RNA
aggctagaagtcccagttcaag

SEQ ID NO: 119243 - RNA, 22 nt, synthetic construct
  source 1..22: mol_type = other RNA
aggctagagctcacacgagaag

SEQ ID NO: 119244 - RNA, 22 nt, synthetic construct
  source 1..22: mol_type = other RNA
aggctagcacagaggcaacagt

SEQ ID NO: 119245 - RNA, 22 nt, synthetic construct
  source 1..22: mol_type = other RNA
aggctaggtgacctgccagagt

SEQ ID NO: 119246 - RNA, 22 nt, synthetic construct
  source 1..22: mol_type = other RNA
aggctattaactttgaaatcag

SEQ ID NO: 119247 - RNA, 22 nt, synthetic construct
  source 1..22: mol_type = other RNA
aggctcaatacctgaaaagtgt

SEQ ID NO: 119248 - RNA, 22 nt, synthetic construct
  source 1..22: mol_type = other RNA
aggctcagcccctcatcctccg

SEQ ID NO: 119249 - RNA, 22 nt, synthetic construct
  source 1..22: mol_type = other RNA
aggctccacttgggtggaagct

SEQ ID NO: 119250 - RNA, 22 nt, synthetic construct
  source 1..22: mol_type = other RNA
aggctccaggtagaatgaaaat

SEQ ID NO: 119251 - RNA, 22 nt, synthetic construct
  source 1..22: mol_type = other RNA
aggctcctgagaaccggaactt

SEQ ID NO: 119252 - RNA, 22 nt, synthetic construct
  source 1..22: mol_type = other RNA
aggctcctgcagacatgcacga

SEQ ID NO: 119253 - RNA, 22 nt, synthetic construct
  source 1..22: mol_type = other RNA
aggctctcttcaccaactgaag

SEQ ID NO: 119254 - RNA, 22 nt, synthetic construct
  source 1..22: mol_type = other RNA
aggctctgggtcagaatcgtga

SEQ ID NO: 119255 - RNA, 22 nt, synthetic construct
  source 1..22: mol_type = other RNA
aggctctgtggtttcttgaatc

SEQ ID NO: 119256 - RNA, 22 nt, synthetic construct
  source 1..22: mol_type = other RNA
aggctgaactgctgacagatta

SEQ ID NO: 119257 - RNA, 22 nt, synthetic construct
  source 1..22: mol_type = other RNA
aggctgaagcaggctttttacc

SEQ ID NO: 119258 - RNA, 22 nt, synthetic construct
  source 1..22: mol_type = other RNA
aggctgaagggaggaaaaaaca

SEQ ID NO: 119259 - RNA, 22 nt, synthetic construct
  source 1..22: mol_type = other RNA
aggctgacttagagggcttcat

SEQ ID NO: 119260 - RNA, 22 nt, synthetic construct
  source 1..22: mol_type = other RNA
aggctgagacctcatcttagcc

SEQ ID NO: 119261 - RNA, 22 nt, synthetic construct
  source 1..22: mol_type = other RNA
aggctgaggcaggaggcacctg

SEQ ID NO: 119262 - RNA, 22 nt, synthetic construct
  source 1..22: mol_type = other RNA
aggctgaggccggaggattgct

SEQ ID NO: 119263 - RNA, 22 nt, synthetic construct
  source 1..22: mol_type = other RNA
aggctgaggcggaaggattgcc

SEQ ID NO: 119264 - RNA, 22 nt, synthetic construct
  source 1..22: mol_type = other RNA
aggctgaggcggctggatcgct

SEQ ID NO: 119265 - RNA, 22 nt, synthetic construct
  source 1..22: mol_type = other RNA
aggctgaggctggggaattgca

SEQ ID NO: 119266 - RNA, 22 nt, synthetic construct
  source 1..22: mol_type = other RNA
aggctgagtgcggtggcttatg

SEQ ID NO: 119267 - RNA, 22 nt, synthetic construct
  source 1..22: mol_type = other RNA
aggctgcaagcactggtaagga

SEQ ID NO: 119268 - RNA, 22 nt, synthetic construct
  source 1..22: mol_type = other RNA
aggctgcaccctcctcctcctg

SEQ ID NO: 119269 - RNA, 22 nt, synthetic construct
  source 1..22: mol_type = other RNA
aggctgcagtgagctccagcct

SEQ ID NO: 119270 - RNA, 22 nt, synthetic construct
  source 1..22: mol_type = other RNA
aggctgccagcaccagatactc

SEQ ID NO: 119271 - RNA, 22 nt, synthetic construct
  source 1..22: mol_type = other RNA
aggctggaaataatttccctca

SEQ ID NO: 119272 - RNA, 22 nt, synthetic construct
  source 1..22: mol_type = other RNA
aggctggaagaattttaagcct

SEQ ID NO: 119273 - RNA, 22 nt, synthetic construct
  source 1..22: mol_type = other RNA
aggctggagctcactgcagcct

SEQ ID NO: 119274 - RNA, 22 nt, synthetic construct
  source 1..22: mol_type = other RNA
aggctggaggatggcttgagcc

SEQ ID NO: 119275 - RNA, 22 nt, synthetic construct
  source 1..22: mol_type = other RNA
aggctggagtggagtggcatga

SEQ ID NO: 119276 - RNA, 22 nt, synthetic construct
  source 1..22: mol_type = other RNA
aggctggctctttccactctct

SEQ ID NO: 119277 - RNA, 22 nt, synthetic construct
  source 1..22: mol_type = other RNA
aggctgggagtacaagaccagc

SEQ ID NO: 119278 - RNA, 22 nt, synthetic construct
  source 1..22: mol_type = other RNA
aggctggggaattgcatgagac

SEQ ID NO: 119279 - RNA, 22 nt, synthetic construct
  source 1..22: mol_type = other RNA
aggctggtctcaaactccaagt

SEQ ID NO: 119280 - RNA, 22 nt, synthetic construct
  source 1..22: mol_type = other RNA
aggctggtcttgtactcccagc

SEQ ID NO: 119281 - RNA, 22 nt, synthetic construct
  source 1..22: mol_type = other RNA
aggctggttccaaacttctgac

SEQ ID NO: 119282 - RNA, 22 nt, synthetic construct
  source 1..22: mol_type = other RNA
aggctgtattgtaggaaagcct

SEQ ID NO: 119283 - RNA, 22 nt, synthetic construct
  source 1..22: mol_type = other RNA
aggctgtcccaaatgcaccaac

SEQ ID NO: 119284 - RNA, 22 nt, synthetic construct
  source 1..22: mol_type = other RNA
aggctgtctccaacgcttttta

SEQ ID NO: 119285 - RNA, 22 nt, synthetic construct
  source 1..22: mol_type = other RNA
aggctgttattagagttgtaac

SEQ ID NO: 119286 - RNA, 22 nt, synthetic construct
  source 1..22: mol_type = other RNA
aggctgttcaatttagaaaatg

SEQ ID NO: 119287 - RNA, 22 nt, synthetic construct
  source 1..22: mol_type = other RNA
aggctgtttgagatctttctta

SEQ ID NO: 119288 - RNA, 22 nt, synthetic construct
  source 1..22: mol_type = other RNA
aggcttaaaattcttccagcct

SEQ ID NO: 119289 - RNA, 22 nt, synthetic construct
  source 1..22: mol_type = other RNA
aggcttagataggatgggcaga

SEQ ID NO: 119290 - RNA, 22 nt, synthetic construct
  source 1..22: mol_type = other RNA
aggcttagatgagcccaggagt

SEQ ID NO: 119291 - RNA, 22 nt, synthetic construct
  source 1..22: mol_type = other RNA
aggcttagtacagccatcaacc

SEQ ID NO: 119292 - RNA, 22 nt, synthetic construct
  source 1..22: mol_type = other RNA
aggcttcgagttctgggagttc

SEQ ID NO: 119293 - RNA, 22 nt, synthetic construct
  source 1..22: mol_type = other RNA
aggcttgagtctgtgctctgta

SEQ ID NO: 119294 - RNA, 22 nt, synthetic construct
  source 1..22: mol_type = other RNA
aggcttgctttggctagaagca

SEQ ID NO: 119295 - RNA, 22 nt, synthetic construct
  source 1..22: mol_type = other RNA
aggcttggaaaacaaattgcat

SEQ ID NO: 119296 - RNA, 22 nt, synthetic construct
  source 1..22: mol_type = other RNA
aggcttgtgcatcagaattcca

SEQ ID NO: 119297 - RNA, 22 nt, synthetic construct
  source 1..22: mol_type = other RNA
aggctttaagcagaaagttact

SEQ ID NO: 119298 - RNA, 22 nt, synthetic construct
  source 1..22: mol_type = other RNA
aggctttcccagggtgtagcca

SEQ ID NO: 119299 - RNA, 22 nt, synthetic construct
  source 1..22: mol_type = other RNA
aggctttcgtatggaagatggg

SEQ ID NO: 119300 - RNA, 22 nt, synthetic construct
  source 1..22: mol_type = other RNA
aggctttctgtgtaatactgta

SEQ ID NO: 119301 - RNA, 22 nt, synthetic construct
  source 1..22: mol_type = other RNA
aggctttgacttctcagggcct

SEQ ID NO: 119302 - RNA, 22 nt, synthetic construct
  source 1..22: mol_type = other RNA
aggctttgtgttggtgtttctg

SEQ ID NO: 119303 - RNA, 22 nt, synthetic construct
  source 1..22: mol_type = other RNA
aggcttttattggtaatgttat

SEQ ID NO: 119304 - RNA, 22 nt, synthetic construct
  source 1..22: mol_type = other RNA
aggcttttcatagtcatcatta

SEQ ID NO: 119305 - RNA, 22 nt, synthetic construct
  source 1..22: mol_type = other RNA
aggcttttggattttctttcta

SEQ ID NO: 119306 - RNA, 22 nt, synthetic construct
  source 1..22: mol_type = other RNA
aggctttttacccggagaggtg

SEQ ID NO: 119307 - RNA, 22 nt, synthetic construct
  source 1..22: mol_type = other RNA
aggctttttatatttccgatga

SEQ ID NO: 119308 - RNA, 22 nt, synthetic construct
  source 1..22: mol_type = other RNA
agggaaaacaattacttgagag

SEQ ID NO: 119309 - RNA, 22 nt, synthetic construct
  source 1..22: mol_type = other RNA
agggaaaactacatgtaaaaac

SEQ ID NO: 119310 - RNA, 22 nt, synthetic construct
  source 1..22: mol_type = other RNA
agggaaacactcataccaggtt

SEQ ID NO: 119311 - RNA, 22 nt, synthetic construct
  source 1..22: mol_type = other RNA
agggaaacagggttacagtata

SEQ ID NO: 119312 - RNA, 22 nt, synthetic construct
  source 1..22: mol_type = other RNA
agggaaaccttactgtaatatt

SEQ ID NO: 119313 - RNA, 22 nt, synthetic construct
  source 1..22: mol_type = other RNA
agggaaactgtttttgcaattt

SEQ ID NO: 119314 - RNA, 22 nt, synthetic construct
  source 1..22: mol_type = other RNA
agggaaaggatgaccttgacaa

SEQ ID NO: 119315 - RNA, 22 nt, synthetic construct
  source 1..22: mol_type = other RNA
agggaaatatgaaccacactga

SEQ ID NO: 119316 - RNA, 22 nt, synthetic construct
  source 1..22: mol_type = other RNA
agggaaatcattcaggacactg

SEQ ID NO: 119317 - RNA, 22 nt, synthetic construct
  source 1..22: mol_type = other RNA
agggaaatggagggccagagga

SEQ ID NO: 119318 - RNA, 22 nt, synthetic construct
  source 1..22: mol_type = other RNA
agggaaattatttccagccttt

SEQ ID NO: 119319 - RNA, 22 nt, synthetic construct
  source 1..22: mol_type = other RNA
agggaacactaagaagatggtt

SEQ ID NO: 119320 - RNA, 22 nt, synthetic construct
  source 1..22: mol_type = other RNA
agggaacattttcattttaact

SEQ ID NO: 119321 - RNA, 22 nt, synthetic construct
  source 1..22: mol_type = other RNA
agggaaccgtaacttcttttct

SEQ ID NO: 119322 - RNA, 22 nt, synthetic construct
  source 1..22: mol_type = other RNA
agggaagagctaagatgctatt

SEQ ID NO: 119323 - RNA, 22 nt, synthetic construct
  source 1..22: mol_type = other RNA
agggaagaggccacaaagtccc

SEQ ID NO: 119324 - RNA, 22 nt, synthetic construct
  source 1..22: mol_type = other RNA
agggaagatagtactgaccatc

SEQ ID NO: 119325 - RNA, 22 nt, synthetic construct
  source 1..22: mol_type = other RNA
agggaagcagttgatgcaattt

SEQ ID NO: 119326 - RNA, 22 nt, synthetic construct
  source 1..22: mol_type = other RNA
agggaaggctgcaagcactggt

SEQ ID NO: 119327 - RNA, 22 nt, synthetic construct
  source 1..22: mol_type = other RNA
agggaaggtgcccgcgaaggcg

SEQ ID NO: 119328 - RNA, 22 nt, synthetic construct
  source 1..22: mol_type = other RNA
agggaagtaaagatcaagctcg

SEQ ID NO: 119329 - RNA, 22 nt, synthetic construct
  source 1..22: mol_type = other RNA
agggaagtactgagtcaaaacc

SEQ ID NO: 119330 - RNA, 22 nt, synthetic construct
  source 1..22: mol_type = other RNA
agggaatagacaaagacaagtt

SEQ ID NO: 119331 - RNA, 22 nt, synthetic construct
  source 1..22: mol_type = other RNA
agggaatctaggaaacactgct

SEQ ID NO: 119332 - RNA, 22 nt, synthetic construct
  source 1..22: mol_type = other RNA
agggaatgcccctgtagcagac

SEQ ID NO: 119333 - RNA, 22 nt, synthetic construct
  source 1..22: mol_type = other RNA
agggaatggggagctagagggt

SEQ ID NO: 119334 - RNA, 22 nt, synthetic construct
  source 1..22: mol_type = other RNA
agggaatttgttttaccatcta

SEQ ID NO: 119335 - RNA, 22 nt, synthetic construct
  source 1..22: mol_type = other RNA
agggaattttactgatcttttc

SEQ ID NO: 119336 - RNA, 22 nt, synthetic construct
  source 1..22: mol_type = other RNA
agggaatttttcttacctaagc

SEQ ID NO: 119337 - RNA, 22 nt, synthetic construct
  source 1..22: mol_type = other RNA
agggaccacaggcatgcgccat

SEQ ID NO: 119338 - RNA, 22 nt, synthetic construct
  source 1..22: mol_type = other RNA
agggacgaatgcatgggaggta

SEQ ID NO: 119339 - RNA, 22 nt, synthetic construct
  source 1..22: mol_type = other RNA
agggacggggttttgccatgtt

SEQ ID NO: 119340 - RNA, 22 nt, synthetic construct
  source 1..22: mol_type = other RNA
agggactacagtcacacaccac

SEQ ID NO: 119341 - RNA, 22 nt, synthetic construct
  source 1..22: mol_type = other RNA
agggactcccatatctacatgt

SEQ ID NO: 119342 - RNA, 22 nt, synthetic construct
  source 1..22: mol_type = other RNA
agggactgaaaccagtgggtca

SEQ ID NO: 119343 - RNA, 22 nt, synthetic construct
  source 1..22: mol_type = other RNA
agggactgagcagtgaaagtct

SEQ ID NO: 119344 - RNA, 22 nt, synthetic construct
  source 1..22: mol_type = other RNA
agggactgatgaagaacctgtt

SEQ ID NO: 119345 - RNA, 22 nt, synthetic construct
  source 1..22: mol_type = other RNA
agggactggcctcggccaacca

SEQ ID NO: 119346 - RNA, 22 nt, synthetic construct
  source 1..22: mol_type = other RNA
agggactgtcgaagcttaattt

SEQ ID NO: 119347 - RNA, 22 nt, synthetic construct
  source 1..22: mol_type = other RNA
agggacttatggagataaatta

SEQ ID NO: 119348 - RNA, 22 nt, synthetic construct
  source 1..22: mol_type = other RNA
agggagaacccaggaacagatt

SEQ ID NO: 119349 - RNA, 22 nt, synthetic construct
  source 1..22: mol_type = other RNA
agggagaagaaataaacgacac

SEQ ID NO: 119350 - RNA, 22 nt, synthetic construct
  source 1..22: mol_type = other RNA
agggagaattggtagtcaatgc

SEQ ID NO: 119351 - RNA, 22 nt, synthetic construct
  source 1..22: mol_type = other RNA
agggagaccgtggggggaggga

SEQ ID NO: 119352 - RNA, 22 nt, synthetic construct
  source 1..22: mol_type = other RNA
agggagacggcgagcttgatct

SEQ ID NO: 119353 - RNA, 22 nt, synthetic construct
  source 1..22: mol_type = other RNA
agggagactttcactgctcagt

SEQ ID NO: 119354 - RNA, 22 nt, synthetic construct
  source 1..22: mol_type = other RNA
agggagagagaaactttacact

SEQ ID NO: 119355 - RNA, 22 nt, synthetic construct
  source 1..22: mol_type = other RNA
agggagagatgcctatgaaatc

SEQ ID NO: 119356 - RNA, 22 nt, synthetic construct
  source 1..22: mol_type = other RNA
agggagagggagctctgtcttg

SEQ ID NO: 119357 - RNA, 22 nt, synthetic construct
  source 1..22: mol_type = other RNA
agggagatacttgattacaagg

SEQ ID NO: 119358 - RNA, 22 nt, synthetic construct
  source 1..22: mol_type = other RNA
agggagatatttcgcctagata

SEQ ID NO: 119359 - RNA, 22 nt, synthetic construct
  source 1..22: mol_type = other RNA
agggagcatatatactctgaga

SEQ ID NO: 119360 - RNA, 22 nt, synthetic construct
  source 1..22: mol_type = other RNA
agggagcatcttcccatgaaca

SEQ ID NO: 119361 - RNA, 22 nt, synthetic construct
  source 1..22: mol_type = other RNA
agggagcccaagcacactttcc

SEQ ID NO: 119362 - RNA, 22 nt, synthetic construct
  source 1..22: mol_type = other RNA
agggagcgccacgtgaagatgg

SEQ ID NO: 119363 - RNA, 22 nt, synthetic construct
  source 1..22: mol_type = other RNA
agggagcgtacggggtccgcgc

SEQ ID NO: 119364 - RNA, 22 nt, synthetic construct
  source 1..22: mol_type = other RNA
agggagctctgtcttgatgata

SEQ ID NO: 119365 - RNA, 22 nt, synthetic construct
  source 1..22: mol_type = other RNA
agggaggaaaaaacagttgcta

SEQ ID NO: 119366 - RNA, 22 nt, synthetic construct
  source 1..22: mol_type = other RNA
agggaggaatccttcagtcagt

SEQ ID NO: 119367 - RNA, 22 nt, synthetic construct
  source 1..22: mol_type = other RNA
agggaggattgtttgaggctgg

SEQ ID NO: 119368 - RNA, 22 nt, synthetic construct
  source 1..22: mol_type = other RNA
agggaggccatcttcatttcta

SEQ ID NO: 119369 - RNA, 22 nt, synthetic construct
  source 1..22: mol_type = other RNA
agggaggcggaggttgcggtga

SEQ ID NO: 119370 - RNA, 22 nt, synthetic construct
  source 1..22: mol_type = other RNA
agggagggggctgaggattgga

SEQ ID NO: 119371 - RNA, 22 nt, synthetic construct
  source 1..22: mol_type = other RNA
agggaggggtattcagggggct

SEQ ID NO: 119372 - RNA, 22 nt, synthetic construct
  source 1..22: mol_type = other RNA
agggaggggtccccagcatcca

SEQ ID NO: 119373 - RNA, 22 nt, synthetic construct
  source 1..22: mol_type = other RNA
agggaggtaggcttagatgagc

SEQ ID NO: 119374 - RNA, 22 nt, synthetic construct
  source 1..22: mol_type = other RNA
agggagtcagtagaggccgagg

SEQ ID NO: 119375 - RNA, 22 nt, synthetic construct
  source 1..22: mol_type = other RNA
agggataaatcccacttgatcc

SEQ ID NO: 119376 - RNA, 22 nt, synthetic construct
  source 1..22: mol_type = other RNA
agggataagaataccaaattca

SEQ ID NO: 119377 - RNA, 22 nt, synthetic construct
  source 1..22: mol_type = other RNA
agggataatgctatccagaaga

SEQ ID NO: 119378 - RNA, 22 nt, synthetic construct
  source 1..22: mol_type = other RNA
agggatattggcttatagtgtt

SEQ ID NO: 119379 - RNA, 22 nt, synthetic construct
  source 1..22: mol_type = other RNA
agggatattttcgtgtactgaa

SEQ ID NO: 119380 - RNA, 22 nt, synthetic construct
  source 1..22: mol_type = other RNA
agggatcacagatacaactctg

SEQ ID NO: 119381 - RNA, 22 nt, synthetic construct
  source 1..22: mol_type = other RNA
agggatgaatgttgtacattta

SEQ ID NO: 119382 - RNA, 22 nt, synthetic construct
  source 1..22: mol_type = other RNA
agggatgaggaagaggaaggtt

SEQ ID NO: 119383 - RNA, 22 nt, synthetic construct
  source 1..22: mol_type = other RNA
agggatgcattctagaaaggag

SEQ ID NO: 119384 - RNA, 22 nt, synthetic construct
  source 1..22: mol_type = other RNA
agggatgctgcgagccccgggg

SEQ ID NO: 119385 - RNA, 22 nt, synthetic construct
  source 1..22: mol_type = other RNA
agggatgctggagtgtggcagg

SEQ ID NO: 119386 - RNA, 22 nt, synthetic construct
  source 1..22: mol_type = other RNA
agggatgttgcctactagccag

SEQ ID NO: 119387 - RNA, 22 nt, synthetic construct
  source 1..22: mol_type = other RNA
agggattctggccaaatccctg

SEQ ID NO: 119388 - RNA, 22 nt, synthetic construct
  source 1..22: mol_type = other RNA
agggatttggccagaatccctt

SEQ ID NO: 119389 - RNA, 22 nt, synthetic construct
  source 1..22: mol_type = other RNA
agggcaccgtgacagaacaaat

SEQ ID NO: 119390 - RNA, 22 nt, synthetic construct
  source 1..22: mol_type = other RNA
agggcagagataactgggtgtg

SEQ ID NO: 119391 - RNA, 22 nt, synthetic construct
  source 1..22: mol_type = other RNA
agggcagggagagagaaacttt

SEQ ID NO: 119392 - RNA, 22 nt, synthetic construct
  source 1..22: mol_type = other RNA
agggcattttcaaggtagaagt

SEQ ID NO: 119393 - RNA, 22 nt, synthetic construct
  source 1..22: mol_type = other RNA
agggccactgagagctcaggcc

SEQ ID NO: 119394 - RNA, 22 nt, synthetic construct
  source 1..22: mol_type = other RNA
agggccagaggagggatgcatt

SEQ ID NO: 119395 - RNA, 22 nt, synthetic construct
  source 1..22: mol_type = other RNA
agggccattctgctatgaaatg

SEQ ID NO: 119396 - RNA, 22 nt, synthetic construct
  source 1..22: mol_type = other RNA
agggccatttcatttctgtttt

SEQ ID NO: 119397 - RNA, 22 nt, synthetic construct
  source 1..22: mol_type = other RNA
agggcccagcctcaacagcact

SEQ ID NO: 119398 - RNA, 22 nt, synthetic construct
  source 1..22: mol_type = other RNA
agggcctaaataaaacacatgt

SEQ ID NO: 119399 - RNA, 22 nt, synthetic construct
  source 1..22: mol_type = other RNA
agggcctagaaatcatacacga

SEQ ID NO: 119400 - RNA, 22 nt, synthetic construct
  source 1..22: mol_type = other RNA
agggcctcaaatttcatttact

SEQ ID NO: 119401 - RNA, 22 nt, synthetic construct
  source 1..22: mol_type = other RNA
agggcctctgaagacatgctga

SEQ ID NO: 119402 - RNA, 22 nt, synthetic construct
  source 1..22: mol_type = other RNA
agggcctgcttttggaagcatg

SEQ ID NO: 119403 - RNA, 22 nt, synthetic construct
  source 1..22: mol_type = other RNA
agggcctgttccaggcctcgct

SEQ ID NO: 119404 - RNA, 22 nt, synthetic construct
  source 1..22: mol_type = other RNA
agggccttcccaaagacatcct

SEQ ID NO: 119405 - RNA, 22 nt, synthetic construct
  source 1..22: mol_type = other RNA
agggccttctactttaataaat

SEQ ID NO: 119406 - RNA, 22 nt, synthetic construct
  source 1..22: mol_type = other RNA
agggcctttaatcacctcaagt

SEQ ID NO: 119407 - RNA, 22 nt, synthetic construct
  source 1..22: mol_type = other RNA
agggcgctcctctcccgccgga

SEQ ID NO: 119408 - RNA, 22 nt, synthetic construct
  source 1..22: mol_type = other RNA
agggctcccagtgcccacctga

SEQ ID NO: 119409 - RNA, 22 nt, synthetic construct
  source 1..22: mol_type = other RNA
agggctcctccaaggctgcccg

SEQ ID NO: 119410 - RNA, 22 nt, synthetic construct
  source 1..22: mol_type = other RNA
agggctgaaaaacacctcagtt

SEQ ID NO: 119411 - RNA, 22 nt, synthetic construct
  source 1..22: mol_type = other RNA
agggcttcatgctgggagacca

SEQ ID NO: 119412 - RNA, 22 nt, synthetic construct
  source 1..22: mol_type = other RNA
agggcttctgaaggtgcctgcc

SEQ ID NO: 119413 - RNA, 22 nt, synthetic construct
  source 1..22: mol_type = other RNA
agggcttgatctagtaaatata

SEQ ID NO: 119414 - RNA, 22 nt, synthetic construct
  source 1..22: mol_type = other RNA
agggcttggtggcccacacctg

SEQ ID NO: 119415 - RNA, 22 nt, synthetic construct
  source 1..22: mol_type = other RNA
agggctttcaatagtgggtaga

SEQ ID NO: 119416 - RNA, 22 nt, synthetic construct
  source 1..22: mol_type = other RNA
agggctttgtgaagggaggtag

SEQ ID NO: 119417 - RNA, 22 nt, synthetic construct
  source 1..22: mol_type = other RNA
aggggaactcttgtagtatttt

SEQ ID NO: 119418 - RNA, 22 nt, synthetic construct
  source 1..22: mol_type = other RNA
aggggaaggaattttcaggact

SEQ ID NO: 119419 - RNA, 22 nt, synthetic construct
  source 1..22: mol_type = other RNA
aggggaaggagtctgcccatcc

SEQ ID NO: 119420 - RNA, 22 nt, synthetic construct
  source 1..22: mol_type = other RNA
aggggaaggcttcgagttctgg

SEQ ID NO: 119421 - RNA, 22 nt, synthetic construct
  source 1..22: mol_type = other RNA
aggggaatagaaagttagtgtc

SEQ ID NO: 119422 - RNA, 22 nt, synthetic construct
  source 1..22: mol_type = other RNA
aggggaatcatgcagtacttgt

SEQ ID NO: 119423 - RNA, 22 nt, synthetic construct
  source 1..22: mol_type = other RNA
aggggaatggtactgcctccac

SEQ ID NO: 119424 - RNA, 22 nt, synthetic construct
  source 1..22: mol_type = other RNA
aggggacatagatgaaactaaa

SEQ ID NO: 119425 - RNA, 22 nt, synthetic construct
  source 1..22: mol_type = other RNA
aggggacatgaaggaaggattg

SEQ ID NO: 119426 - RNA, 22 nt, synthetic construct
  source 1..22: mol_type = other RNA
aggggacatgctctgataggat

SEQ ID NO: 119427 - RNA, 22 nt, synthetic construct
  source 1..22: mol_type = other RNA
aggggactaacagggtctacaa

SEQ ID NO: 119428 - RNA, 22 nt, synthetic construct
  source 1..22: mol_type = other RNA
aggggactttgatgttttacat

SEQ ID NO: 119429 - RNA, 22 nt, synthetic construct
  source 1..22: mol_type = other RNA
aggggagaggcctcatgtattt

SEQ ID NO: 119430 - RNA, 22 nt, synthetic construct
  source 1..22: mol_type = other RNA
aggggatgggggacgacgtatg

SEQ ID NO: 119431 - RNA, 22 nt, synthetic construct
  source 1..22: mol_type = other RNA
aggggatttcatgaacaatttt

SEQ ID NO: 119432 - RNA, 22 nt, synthetic construct
  source 1..22: mol_type = other RNA
aggggcaggaaaggtggggaag

SEQ ID NO: 119433 - RNA, 22 nt, synthetic construct
  source 1..22: mol_type = other RNA
aggggcagggtggagtccaacc

SEQ ID NO: 119434 - RNA, 22 nt, synthetic construct
  source 1..22: mol_type = other RNA
aggggcattccctgtctgggaa

SEQ ID NO: 119435 - RNA, 22 nt, synthetic construct
  source 1..22: mol_type = other RNA
aggggcattccgtggaaggcct

SEQ ID NO: 119436 - RNA, 22 nt, synthetic construct
  source 1..22: mol_type = other RNA
aggggccaggtgtggaggctca

SEQ ID NO: 119437 - RNA, 22 nt, synthetic construct
  source 1..22: mol_type = other RNA
aggggccagttgagagagaatt

SEQ ID NO: 119438 - RNA, 22 nt, synthetic construct
  source 1..22: mol_type = other RNA
aggggccttttgtcaagctatc

SEQ ID NO: 119439 - RNA, 22 nt, synthetic construct
  source 1..22: mol_type = other RNA
aggggctaagtagtggcagccc

SEQ ID NO: 119440 - RNA, 22 nt, synthetic construct
  source 1..22: mol_type = other RNA
aggggctatctttactttcagc

SEQ ID NO: 119441 - RNA, 22 nt, synthetic construct
  source 1..22: mol_type = other RNA
aggggctgagccttcagaactc

SEQ ID NO: 119442 - RNA, 22 nt, synthetic construct
  source 1..22: mol_type = other RNA
aggggctgcatcatggtgggcc

SEQ ID NO: 119443 - RNA, 22 nt, synthetic construct
  source 1..22: mol_type = other RNA
aggggctgggggatccagggga

SEQ ID NO: 119444 - RNA, 22 nt, synthetic construct
  source 1..22: mol_type = other RNA
aggggctgttcccagataacag

SEQ ID NO: 119445 - RNA, 22 nt, synthetic construct
  source 1..22: mol_type = other RNA
agggggaaaactccaagtgtaa

SEQ ID NO: 119446 - RNA, 22 nt, synthetic construct
  source 1..22: mol_type = other RNA
agggggaatctactcttttgtt

SEQ ID NO: 119447 - RNA, 22 nt, synthetic construct
  source 1..22: mol_type = other RNA
agggggagggagagggagctct

SEQ ID NO: 119448 - RNA, 22 nt, synthetic construct
  source 1..22: mol_type = other RNA
agggggcataacatctatgaag

SEQ ID NO: 119449 - RNA, 22 nt, synthetic construct
  source 1..22: mol_type = other RNA
agggggctaaatgctcacattt

SEQ ID NO: 119450 - RNA, 22 nt, synthetic construct
  source 1..22: mol_type = other RNA
agggggctgaggattggagact

SEQ ID NO: 119451 - RNA, 22 nt, synthetic construct
  source 1..22: mol_type = other RNA
agggggctgagtatgggtctcc

SEQ ID NO: 119452 - RNA, 22 nt, synthetic construct
  source 1..22: mol_type = other RNA
aggggggaaaaaaccataaaat

SEQ ID NO: 119453 - RNA, 22 nt, synthetic construct
  source 1..22: mol_type = other RNA
aggggggaaaacacccttgaaa

SEQ ID NO: 119454 - RNA, 22 nt, synthetic construct
  source 1..22: mol_type = other RNA
aggggggaagcttttcatatac

SEQ ID NO: 119455 - RNA, 22 nt, synthetic construct
  source 1..22: mol_type = other RNA
aggggggccactggaaaccttt

SEQ ID NO: 119456 - RNA, 22 nt, synthetic construct
  source 1..22: mol_type = other RNA
agggggtatggagacactaggg

SEQ ID NO: 119457 - RNA, 22 nt, synthetic construct
  source 1..22: mol_type = other RNA
agggggtcgagactgtaatgag

SEQ ID NO: 119458 - RNA, 22 nt, synthetic construct
  source 1..22: mol_type = other RNA
aggggtaaaggggatgggggac

SEQ ID NO: 119459 - RNA, 22 nt, synthetic construct
  source 1..22: mol_type = other RNA
aggggtaaatctttgtacagta

SEQ ID NO: 119460 - RNA, 22 nt, synthetic construct
  source 1..22: mol_type = other RNA
aggggtaaatggtttctccttc

SEQ ID NO: 119461 - RNA, 22 nt, synthetic construct
  source 1..22: mol_type = other RNA
aggggtattcagggggctaaat

SEQ ID NO: 119462 - RNA, 22 nt, synthetic construct
  source 1..22: mol_type = other RNA
aggggtccccagcatccactag

SEQ ID NO: 119463 - RNA, 22 nt, synthetic construct
  source 1..22: mol_type = other RNA
aggggtcttatgctggtgggct

SEQ ID NO: 119464 - RNA, 22 nt, synthetic construct
  source 1..22: mol_type = other RNA
aggggtggggggatgtagaagg

SEQ ID NO: 119465 - RNA, 22 nt, synthetic construct
  source 1..22: mol_type = other RNA
agggtaaaatagtcaagtaaca

SEQ ID NO: 119466 - RNA, 22 nt, synthetic construct
  source 1..22: mol_type = other RNA
agggtaaacagaattaaacaat

SEQ ID NO: 119467 - RNA, 22 nt, synthetic construct
  source 1..22: mol_type = other RNA
agggtaaagtcaattctagtta

SEQ ID NO: 119468 - RNA, 22 nt, synthetic construct
  source 1..22: mol_type = other RNA
agggtaacgtgagctggaagta

SEQ ID NO: 119469 - RNA, 22 nt, synthetic construct
  source 1..22: mol_type = other RNA
agggtaagaaaattgtacaatt

SEQ ID NO: 119470 - RNA, 22 nt, synthetic construct
  source 1..22: mol_type = other RNA
agggtaagaaaggagttcagct

SEQ ID NO: 119471 - RNA, 22 nt, synthetic construct
  source 1..22: mol_type = other RNA
agggtaagaccaaaatggagac

SEQ ID NO: 119472 - RNA, 22 nt, synthetic construct
  source 1..22: mol_type = other RNA
agggtaagattccgtctcaaaa

SEQ ID NO: 119473 - RNA, 22 nt, synthetic construct
  source 1..22: mol_type = other RNA
agggtaatgctggcttcatggg

SEQ ID NO: 119474 - RNA, 22 nt, synthetic construct
  source 1..22: mol_type = other RNA
agggtacagaactgctaatggt

SEQ ID NO: 119475 - RNA, 22 nt, synthetic construct
  source 1..22: mol_type = other RNA
agggtagagcactttcgtattt

SEQ ID NO: 119476 - RNA, 22 nt, synthetic construct
  source 1..22: mol_type = other RNA
agggtagctttgatgcccccac

SEQ ID NO: 119477 - RNA, 22 nt, synthetic construct
  source 1..22: mol_type = other RNA
agggtagcttttcctgctgtcg

SEQ ID NO: 119478 - RNA, 22 nt, synthetic construct
  source 1..22: mol_type = other RNA
agggtaggaaaagacttctcaa

SEQ ID NO: 119479 - RNA, 22 nt, synthetic construct
  source 1..22: mol_type = other RNA
agggtaggaaggcggtggggac

SEQ ID NO: 119480 - RNA, 22 nt, synthetic construct
  source 1..22: mol_type = other RNA
agggtatatacaatattacagt

SEQ ID NO: 119481 - RNA, 22 nt, synthetic construct
  source 1..22: mol_type = other RNA
agggtatcatattatttttgtc

SEQ ID NO: 119482 - RNA, 22 nt, synthetic construct
  source 1..22: mol_type = other RNA
agggtcactattaaccatatgg

SEQ ID NO: 119483 - RNA, 22 nt, synthetic construct
  source 1..22: mol_type = other RNA
agggtcacttcctctcttaaat

SEQ ID NO: 119484 - RNA, 22 nt, synthetic construct
  source 1..22: mol_type = other RNA
agggtcagaattttattttctt

SEQ ID NO: 119485 - RNA, 22 nt, synthetic construct
  source 1..22: mol_type = other RNA
agggtcatgcacacgctggaag

SEQ ID NO: 119486 - RNA, 22 nt, synthetic construct
  source 1..22: mol_type = other RNA
agggtccagcttcactcttctg

SEQ ID NO: 119487 - RNA, 22 nt, synthetic construct
  source 1..22: mol_type = other RNA
agggtctacaaaaggtttccag

SEQ ID NO: 119488 - RNA, 22 nt, synthetic construct
  source 1..22: mol_type = other RNA
agggtctcactcttaccaaggc

SEQ ID NO: 119489 - RNA, 22 nt, synthetic construct
  source 1..22: mol_type = other RNA
agggtctggtatctaccaaaaa

SEQ ID NO: 119490 - RNA, 22 nt, synthetic construct
  source 1..22: mol_type = other RNA
agggtctgtctcacctcaaggc

SEQ ID NO: 119491 - RNA, 22 nt, synthetic construct
  source 1..22: mol_type = other RNA
agggtctgttttacatgtttaa

SEQ ID NO: 119492 - RNA, 22 nt, synthetic construct
  source 1..22: mol_type = other RNA
agggtcttgctctgtcacccac

SEQ ID NO: 119493 - RNA, 22 nt, synthetic construct
  source 1..22: mol_type = other RNA
agggtgaaacttgaatactcgt

SEQ ID NO: 119494 - RNA, 22 nt, synthetic construct
  source 1..22: mol_type = other RNA
agggtgacagagccgagcagaa

SEQ ID NO: 119495 - RNA, 22 nt, synthetic construct
  source 1..22: mol_type = other RNA
agggtgactagtgtgaatgagg

SEQ ID NO: 119496 - RNA, 22 nt, synthetic construct
  source 1..22: mol_type = other RNA
agggtgagaccaccacacttgc

SEQ ID NO: 119497 - RNA, 22 nt, synthetic construct
  source 1..22: mol_type = other RNA
agggtgataaaaaggagggaaa

SEQ ID NO: 119498 - RNA, 22 nt, synthetic construct
  source 1..22: mol_type = other RNA
agggtgcagcctctaatcaggt

SEQ ID NO: 119499 - RNA, 22 nt, synthetic construct
  source 1..22: mol_type = other RNA
agggtgcgacctcgaagcacaa

SEQ ID NO: 119500 - RNA, 22 nt, synthetic construct
  source 1..22: mol_type = other RNA
agggtgctactcaaagtttagt

SEQ ID NO: 119501 - RNA, 22 nt, synthetic construct
  source 1..22: mol_type = other RNA
agggtgctgatcaggaaagacc

SEQ ID NO: 119502 - RNA, 22 nt, synthetic construct
  source 1..22: mol_type = other RNA
agggtggagtccaaccaatcgc

SEQ ID NO: 119503 - RNA, 22 nt, synthetic construct
  source 1..22: mol_type = other RNA
agggtggctggcactttcctga

SEQ ID NO: 119504 - RNA, 22 nt, synthetic construct
  source 1..22: mol_type = other RNA
agggtgggggcatcaaagctac

SEQ ID NO: 119505 - RNA, 22 nt, synthetic construct
  source 1..22: mol_type = other RNA
agggtggtgctggactggaggg

SEQ ID NO: 119506 - RNA, 22 nt, synthetic construct
  source 1..22: mol_type = other RNA
agggtgtaaaaggctaattttt

SEQ ID NO: 119507 - RNA, 22 nt, synthetic construct
  source 1..22: mol_type = other RNA
agggtgtagccacaagccacat

SEQ ID NO: 119508 - RNA, 22 nt, synthetic construct
  source 1..22: mol_type = other RNA
agggtgtgatcaggaaagatga

SEQ ID NO: 119509 - RNA, 22 nt, synthetic construct
  source 1..22: mol_type = other RNA
agggtgtgtgaatggaaaattc

SEQ ID NO: 119510 - RNA, 22 nt, synthetic construct
  source 1..22: mol_type = other RNA
agggtgtgtttaatttccaccc

SEQ ID NO: 119511 - RNA, 22 nt, synthetic construct
  source 1..22: mol_type = other RNA
agggtgttttcccccctaaaac

SEQ ID NO: 119512 - RNA, 22 nt, synthetic construct
  source 1..22: mol_type = other RNA
agggttacagtataggggaact

SEQ ID NO: 119513 - RNA, 22 nt, synthetic construct
  source 1..22: mol_type = other RNA
agggttagaagacaatactgtt

SEQ ID NO: 119514 - RNA, 22 nt, synthetic construct
  source 1..22: mol_type = other RNA
agggttagattatatggtctac

SEQ ID NO: 119515 - RNA, 22 nt, synthetic construct
  source 1..22: mol_type = other RNA
agggttagatttttcctttgcc

SEQ ID NO: 119516 - RNA, 22 nt, synthetic construct
  source 1..22: mol_type = other RNA
agggttattaacataccgacgg

SEQ ID NO: 119517 - RNA, 22 nt, synthetic construct
  source 1..22: mol_type = other RNA
agggttcttggaaattagaaat

SEQ ID NO: 119518 - RNA, 22 nt, synthetic construct
  source 1..22: mol_type = other RNA
agggttgaacatcacccagctc

SEQ ID NO: 119519 - RNA, 22 nt, synthetic construct
  source 1..22: mol_type = other RNA
agggttggggtatgtttgatta

SEQ ID NO: 119520 - RNA, 22 nt, synthetic construct
  source 1..22: mol_type = other RNA
agggttggtgcttccttctctt

SEQ ID NO: 119521 - RNA, 22 nt, synthetic construct
  source 1..22: mol_type = other RNA
agggtttcagtgagtagggaag

SEQ ID NO: 119522 - RNA, 22 nt, synthetic construct
  source 1..22: mol_type = other RNA
agggtttctgtttggatgaaaa

SEQ ID NO: 119523 - RNA, 22 nt, synthetic construct
  source 1..22: mol_type = other RNA
agggtttggcagtttaagaatt

SEQ ID NO: 119524 - RNA, 22 nt, synthetic construct
  source 1..22: mol_type = other RNA
agggttttctgtagaatatcca

SEQ ID NO: 119525 - RNA, 22 nt, synthetic construct
  source 1..22: mol_type = other RNA
agggttttggtatgttgtgttt

SEQ ID NO: 119526 - RNA, 22 nt, synthetic construct
  source 1..22: mol_type = other RNA
agggttttgttttgttttttca

SEQ ID NO: 119527 - RNA, 22 nt, synthetic construct
  source 1..22: mol_type = other RNA
aggtaagaaaaattccctcagc

SEQ ID NO: 119528 - RNA, 22 nt, synthetic construct
  source 1..22: mol_type = other RNA
aggtaagaacttgtctttgtct

SEQ ID NO: 119529 - RNA, 22 nt, synthetic construct
  source 1..22: mol_type = other RNA
aggtaagaatgtcaagctgttt

SEQ ID NO: 119530 - RNA, 22 nt, synthetic construct
  source 1..22: mol_type = other RNA
aggtaaggaaaccccagggata

SEQ ID NO: 119531 - RNA, 22 nt, synthetic construct
  source 1..22: mol_type = other RNA
aggtaagggtccagcttcactc

SEQ ID NO: 119532 - RNA, 22 nt, synthetic construct
  source 1..22: mol_type = other RNA
aggtaatactataaggaaatac

SEQ ID NO: 119533 - RNA, 22 nt, synthetic construct
  source 1..22: mol_type = other RNA
aggtaatactctagtggtgctt

SEQ ID NO: 119534 - RNA, 22 nt, synthetic construct
  source 1..22: mol_type = other RNA
aggtaatctagtttatctcatt

SEQ ID NO: 119535 - RNA, 22 nt, synthetic construct
  source 1..22: mol_type = other RNA
aggtaatgacaataataactac

SEQ ID NO: 119536 - RNA, 22 nt, synthetic construct
  source 1..22: mol_type = other RNA
aggtacaattacacatctccca

SEQ ID NO: 119537 - RNA, 22 nt, synthetic construct
  source 1..22: mol_type = other RNA
aggtacgacgctcttgttcaaa

SEQ ID NO: 119538 - RNA, 22 nt, synthetic construct
  source 1..22: mol_type = other RNA
aggtactcaacgacaatctctg

SEQ ID NO: 119539 - RNA, 22 nt, synthetic construct
  source 1..22: mol_type = other RNA
aggtagaaacatcccaagtgcc

SEQ ID NO: 119540 - RNA, 22 nt, synthetic construct
  source 1..22: mol_type = other RNA
aggtagaagataatgttagaat

SEQ ID NO: 119541 - RNA, 22 nt, synthetic construct
  source 1..22: mol_type = other RNA
aggtagaagtacaaacattaca

SEQ ID NO: 119542 - RNA, 22 nt, synthetic construct
  source 1..22: mol_type = other RNA
aggtagaatgaaaatttttgtc

SEQ ID NO: 119543 - RNA, 22 nt, synthetic construct
  source 1..22: mol_type = other RNA
aggtagacatgagtaaaaagaa

SEQ ID NO: 119544 - RNA, 22 nt, synthetic construct
  source 1..22: mol_type = other RNA
aggtagacatgtgccatgttgg

SEQ ID NO: 119545 - RNA, 22 nt, synthetic construct
  source 1..22: mol_type = other RNA
aggtagcacaactagtaagtaa

SEQ ID NO: 119546 - RNA, 22 nt, synthetic construct
  source 1..22: mol_type = other RNA
aggtagctgctttttaaaaatt

SEQ ID NO: 119547 - RNA, 22 nt, synthetic construct
  source 1..22: mol_type = other RNA
aggtaggagggtgtgatcagga

SEQ ID NO: 119548 - RNA, 22 nt, synthetic construct
  source 1..22: mol_type = other RNA
aggtaggcttagatgagcccag

SEQ ID NO: 119549 - RNA, 22 nt, synthetic construct
  source 1..22: mol_type = other RNA
aggtagggaggggtattcaggg

SEQ ID NO: 119550 - RNA, 22 nt, synthetic construct
  source 1..22: mol_type = other RNA
aggtagggataagaataccaaa

SEQ ID NO: 119551 - RNA, 22 nt, synthetic construct
  source 1..22: mol_type = other RNA
aggtagggttggggtatgtttg

SEQ ID NO: 119552 - RNA, 22 nt, synthetic construct
  source 1..22: mol_type = other RNA
aggtagtacatattcattgtaa

SEQ ID NO: 119553 - RNA, 22 nt, synthetic construct
  source 1..22: mol_type = other RNA
aggtagtcttgtcataacagta

SEQ ID NO: 119554 - RNA, 22 nt, synthetic construct
  source 1..22: mol_type = other RNA
aggtagtttctttgaacttata

SEQ ID NO: 119555 - RNA, 22 nt, synthetic construct
  source 1..22: mol_type = other RNA
aggtataaaggatgcacaagac

SEQ ID NO: 119556 - RNA, 22 nt, synthetic construct
  source 1..22: mol_type = other RNA
aggtataaagtttccgttttgc

SEQ ID NO: 119557 - RNA, 22 nt, synthetic construct
  source 1..22: mol_type = other RNA
aggtatatttctgtaaacatga

SEQ ID NO: 119558 - RNA, 22 nt, synthetic construct
  source 1..22: mol_type = other RNA
aggtatcacagtgaggacgctg

SEQ ID NO: 119559 - RNA, 22 nt, synthetic construct
  source 1..22: mol_type = other RNA
aggtatcaccatctgataagcc

SEQ ID NO: 119560 - RNA, 22 nt, synthetic construct
  source 1..22: mol_type = other RNA
aggtatcatcggaaatataaaa

SEQ ID NO: 119561 - RNA, 22 nt, synthetic construct
  source 1..22: mol_type = other RNA
aggtatcatttccaagattgaa

SEQ ID NO: 119562 - RNA, 22 nt, synthetic construct
  source 1..22: mol_type = other RNA
aggtatctccccaaagatatta

SEQ ID NO: 119563 - RNA, 22 nt, synthetic construct
  source 1..22: mol_type = other RNA
aggtatggcgactcatgcctgt

SEQ ID NO: 119564 - RNA, 22 nt, synthetic construct
  source 1..22: mol_type = other RNA
aggtattattttcacagacagt

SEQ ID NO: 119565 - RNA, 22 nt, synthetic construct
  source 1..22: mol_type = other RNA
aggtattcatgctgtgaatttg

SEQ ID NO: 119566 - RNA, 22 nt, synthetic construct
  source 1..22: mol_type = other RNA
aggtattgagcctgttccgatt

SEQ ID NO: 119567 - RNA, 22 nt, synthetic construct
  source 1..22: mol_type = other RNA
aggtatttctaaatcaacagtg

SEQ ID NO: 119568 - RNA, 22 nt, synthetic construct
  source 1..22: mol_type = other RNA
aggtatttggggctaggatttc

SEQ ID NO: 119569 - RNA, 22 nt, synthetic construct
  source 1..22: mol_type = other RNA
aggtcaaactcacttattagca

SEQ ID NO: 119570 - RNA, 22 nt, synthetic construct
  source 1..22: mol_type = other RNA
aggtcaaatggtaacagccaaa

SEQ ID NO: 119571 - RNA, 22 nt, synthetic construct
  source 1..22: mol_type = other RNA
aggtcaacacatcagcgctaag

SEQ ID NO: 119572 - RNA, 22 nt, synthetic construct
  source 1..22: mol_type = other RNA
aggtcaagaaataaaacatggc

SEQ ID NO: 119573 - RNA, 22 nt, synthetic construct
  source 1..22: mol_type = other RNA
aggtcaagagagattaaataac

SEQ ID NO: 119574 - RNA, 22 nt, synthetic construct
  source 1..22: mol_type = other RNA
aggtcaagagcggcctttgcct

SEQ ID NO: 119575 - RNA, 22 nt, synthetic construct
  source 1..22: mol_type = other RNA
aggtcaatctaggaggtctaag

SEQ ID NO: 119576 - RNA, 22 nt, synthetic construct
  source 1..22: mol_type = other RNA
aggtcaatctgaaaaatatcaa

SEQ ID NO: 119577 - RNA, 22 nt, synthetic construct
  source 1..22: mol_type = other RNA
aggtcacattcagaggtatttg

SEQ ID NO: 119578 - RNA, 22 nt, synthetic construct
  source 1..22: mol_type = other RNA
aggtcacattctgcctgcagac

SEQ ID NO: 119579 - RNA, 22 nt, synthetic construct
  source 1..22: mol_type = other RNA
aggtcacccaagccacagcgtg

SEQ ID NO: 119580 - RNA, 22 nt, synthetic construct
  source 1..22: mol_type = other RNA
aggtcacctagcctctctgggc

SEQ ID NO: 119581 - RNA, 22 nt, synthetic construct
  source 1..22: mol_type = other RNA
aggtcactgcagtctcaaactc

SEQ ID NO: 119582 - RNA, 22 nt, synthetic construct
  source 1..22: mol_type = other RNA
aggtcagaagtttggaaccagc

SEQ ID NO: 119583 - RNA, 22 nt, synthetic construct
  source 1..22: mol_type = other RNA
aggtcagaatacaaaaatgaca

SEQ ID NO: 119584 - RNA, 22 nt, synthetic construct
  source 1..22: mol_type = other RNA
aggtcagccagaggaagcttat

SEQ ID NO: 119585 - RNA, 22 nt, synthetic construct
  source 1..22: mol_type = other RNA
aggtcaggaaggcaggaggcct

SEQ ID NO: 119586 - RNA, 22 nt, synthetic construct
  source 1..22: mol_type = other RNA
aggtcagtagtacagtgagtag

SEQ ID NO: 119587 - RNA, 22 nt, synthetic construct
  source 1..22: mol_type = other RNA
aggtcatcctttcccttctgct

SEQ ID NO: 119588 - RNA, 22 nt, synthetic construct
  source 1..22: mol_type = other RNA
aggtcatgacttttttgcccac

SEQ ID NO: 119589 - RNA, 22 nt, synthetic construct
  source 1..22: mol_type = other RNA
aggtcattacatattttgtaac

SEQ ID NO: 119590 - RNA, 22 nt, synthetic construct
  source 1..22: mol_type = other RNA
aggtcatttttcacttcttatt

SEQ ID NO: 119591 - RNA, 22 nt, synthetic construct
  source 1..22: mol_type = other RNA
aggtccctacaaaggacatgaa

SEQ ID NO: 119592 - RNA, 22 nt, synthetic construct
  source 1..22: mol_type = other RNA
aggtcgcaccctgagcatcccc

SEQ ID NO: 119593 - RNA, 22 nt, synthetic construct
  source 1..22: mol_type = other RNA
aggtcggaaggaatgtgcttcc

SEQ ID NO: 119594 - RNA, 22 nt, synthetic construct
  source 1..22: mol_type = other RNA
aggtcgggctgcctcagccgcc

SEQ ID NO: 119595 - RNA, 22 nt, synthetic construct
  source 1..22: mol_type = other RNA
aggtcgtttcagattgcttgag

SEQ ID NO: 119596 - RNA, 22 nt, synthetic construct
  source 1..22: mol_type = other RNA
aggtctaagagataactaatga

SEQ ID NO: 119597 - RNA, 22 nt, synthetic construct
  source 1..22: mol_type = other RNA
aggtctaggctaatgtgtgttc

SEQ ID NO: 119598 - RNA, 22 nt, synthetic construct
  source 1..22: mol_type = other RNA
aggtctagtgtgcatgtgttgt

SEQ ID NO: 119599 - RNA, 22 nt, synthetic construct
  source 1..22: mol_type = other RNA
aggtctatgtgacagaatgcat

SEQ ID NO: 119600 - RNA, 22 nt, synthetic construct
  source 1..22: mol_type = other RNA
aggtctcaaaatttaaagttag

SEQ ID NO: 119601 - RNA, 22 nt, synthetic construct
  source 1..22: mol_type = other RNA
aggtctcagccttttctgattt

SEQ ID NO: 119602 - RNA, 22 nt, synthetic construct
  source 1..22: mol_type = other RNA
aggtctccttgtatggagacta

SEQ ID NO: 119603 - RNA, 22 nt, synthetic construct
  source 1..22: mol_type = other RNA
aggtctctctctgtcacccaaa

SEQ ID NO: 119604 - RNA, 22 nt, synthetic construct
  source 1..22: mol_type = other RNA
aggtctctctgaaattagctaa

SEQ ID NO: 119605 - RNA, 22 nt, synthetic construct
  source 1..22: mol_type = other RNA
aggtctctttgaaaggaatccg

SEQ ID NO: 119606 - RNA, 22 nt, synthetic construct
  source 1..22: mol_type = other RNA
aggtctgtaagtcagttaacag

SEQ ID NO: 119607 - RNA, 22 nt, synthetic construct
  source 1..22: mol_type = other RNA
aggtctgtctttcagtatgtgt

SEQ ID NO: 119608 - RNA, 22 nt, synthetic construct
  source 1..22: mol_type = other RNA
aggtctgttactcccgatttca

SEQ ID NO: 119609 - RNA, 22 nt, synthetic construct
  source 1..22: mol_type = other RNA
aggtcttcaacctcaactttag

SEQ ID NO: 119610 - RNA, 22 nt, synthetic construct
  source 1..22: mol_type = other RNA
aggtcttctagctttcagcact

SEQ ID NO: 119611 - RNA, 22 nt, synthetic construct
  source 1..22: mol_type = other RNA
aggtctttaaaagaaagctctc

SEQ ID NO: 119612 - RNA, 22 nt, synthetic construct
  source 1..22: mol_type = other RNA
aggtctttgatccattttgagt

SEQ ID NO: 119613 - RNA, 22 nt, synthetic construct
  source 1..22: mol_type = other RNA
aggtgaactattagagctttta

SEQ ID NO: 119614 - RNA, 22 nt, synthetic construct
  source 1..22: mol_type = other RNA
aggtgaagttaagggccatttc

SEQ ID NO: 119615 - RNA, 22 nt, synthetic construct
  source 1..22: mol_type = other RNA
aggtgacctgccagagttggca

SEQ ID NO: 119616 - RNA, 22 nt, synthetic construct
  source 1..22: mol_type = other RNA
aggtgagacagaccctggcttg

SEQ ID NO: 119617 - RNA, 22 nt, synthetic construct
  source 1..22: mol_type = other RNA
aggtgagctttttctttttaaa

SEQ ID NO: 119618 - RNA, 22 nt, synthetic construct
  source 1..22: mol_type = other RNA
aggtgaggacatggagacagtg

SEQ ID NO: 119619 - RNA, 22 nt, synthetic construct
  source 1..22: mol_type = other RNA
aggtgagggactgagcagtgaa

SEQ ID NO: 119620 - RNA, 22 nt, synthetic construct
  source 1..22: mol_type = other RNA
aggtgagtgagatgggaagaaa

SEQ ID NO: 119621 - RNA, 22 nt, synthetic construct
  source 1..22: mol_type = other RNA
aggtgagtggactgtgagggag

SEQ ID NO: 119622 - RNA, 22 nt, synthetic construct
  source 1..22: mol_type = other RNA
aggtgagtggatcatttgaggt

SEQ ID NO: 119623 - RNA, 22 nt, synthetic construct
  source 1..22: mol_type = other RNA
aggtgattaaaggccctgattt

SEQ ID NO: 119624 - RNA, 22 nt, synthetic construct
  source 1..22: mol_type = other RNA
aggtgattcagagtgctgggta

SEQ ID NO: 119625 - RNA, 22 nt, synthetic construct
  source 1..22: mol_type = other RNA
aggtgcacaagggaagaggcca

SEQ ID NO: 119626 - RNA, 22 nt, synthetic construct
  source 1..22: mol_type = other RNA
aggtgcacacaacactcagata

SEQ ID NO: 119627 - RNA, 22 nt, synthetic construct
  source 1..22: mol_type = other RNA
aggtgcacattccaagagagga

SEQ ID NO: 119628 - RNA, 22 nt, synthetic construct
  source 1..22: mol_type = other RNA
aggtgcacgctgtgaatgtgag

SEQ ID NO: 119629 - RNA, 22 nt, synthetic construct
  source 1..22: mol_type = other RNA
aggtgccccactccacacacga

SEQ ID NO: 119630 - RNA, 22 nt, synthetic construct
  source 1..22: mol_type = other RNA
aggtgcccgcgaaggcgtgtaa

SEQ ID NO: 119631 - RNA, 22 nt, synthetic construct
  source 1..22: mol_type = other RNA
aggtgcctcctgcctcagcctc

SEQ ID NO: 119632 - RNA, 22 nt, synthetic construct
  source 1..22: mol_type = other RNA
aggtgcctgccatagagggagc

SEQ ID NO: 119633 - RNA, 22 nt, synthetic construct
  source 1..22: mol_type = other RNA
aggtgcgggattatttggaaga

SEQ ID NO: 119634 - RNA, 22 nt, synthetic construct
  source 1..22: mol_type = other RNA
aggtgctaattgtttgttgggt

SEQ ID NO: 119635 - RNA, 22 nt, synthetic construct
  source 1..22: mol_type = other RNA
aggtgctggcttcaatatgcag

SEQ ID NO: 119636 - RNA, 22 nt, synthetic construct
  source 1..22: mol_type = other RNA
aggtgctgttgtattttacacc

SEQ ID NO: 119637 - RNA, 22 nt, synthetic construct
  source 1..22: mol_type = other RNA
aggtgcttacagactgattaat

SEQ ID NO: 119638 - RNA, 22 nt, synthetic construct
  source 1..22: mol_type = other RNA
aggtgctttttgtatcctgttt

SEQ ID NO: 119639 - RNA, 22 nt, synthetic construct
  source 1..22: mol_type = other RNA
aggtggaactctgtcatggtgt

SEQ ID NO: 119640 - RNA, 22 nt, synthetic construct
  source 1..22: mol_type = other RNA
aggtggaaggcctgatagctgt

SEQ ID NO: 119641 - RNA, 22 nt, synthetic construct
  source 1..22: mol_type = other RNA
aggtggacgcggccccggcctt

SEQ ID NO: 119642 - RNA, 22 nt, synthetic construct
  source 1..22: mol_type = other RNA
aggtggagtggtggatagagag

SEQ ID NO: 119643 - RNA, 22 nt, synthetic construct
  source 1..22: mol_type = other RNA
aggtggagttctgctcttgtcg

SEQ ID NO: 119644 - RNA, 22 nt, synthetic construct
  source 1..22: mol_type = other RNA
aggtggatatctgaggtcagga

SEQ ID NO: 119645 - RNA, 22 nt, synthetic construct
  source 1..22: mol_type = other RNA
aggtggatcaggagattgagac

SEQ ID NO: 119646 - RNA, 22 nt, synthetic construct
  source 1..22: mol_type = other RNA
aggtgggaggcccggagccgag

SEQ ID NO: 119647 - RNA, 22 nt, synthetic construct
  source 1..22: mol_type = other RNA
aggtgggcactgggagccctcc

SEQ ID NO: 119648 - RNA, 22 nt, synthetic construct
  source 1..22: mol_type = other RNA
aggtggtatgggagatgtgtaa

SEQ ID NO: 119649 - RNA, 22 nt, synthetic construct
  source 1..22: mol_type = other RNA
aggtggtatttaatctgtcagc

SEQ ID NO: 119650 - RNA, 22 nt, synthetic construct
  source 1..22: mol_type = other RNA
aggtggttctgcctaatctcta

SEQ ID NO: 119651 - RNA, 22 nt, synthetic construct
  source 1..22: mol_type = other RNA
aggtggtttgaaccccagaagg

SEQ ID NO: 119652 - RNA, 22 nt, synthetic construct
  source 1..22: mol_type = other RNA
aggtgtaagagattaattcagt

SEQ ID NO: 119653 - RNA, 22 nt, synthetic construct
  source 1..22: mol_type = other RNA
aggtgtacaattaggctgtttg

SEQ ID NO: 119654 - RNA, 22 nt, synthetic construct
  source 1..22: mol_type = other RNA
aggtgtatgatcttattaatgt

SEQ ID NO: 119655 - RNA, 22 nt, synthetic construct
  source 1..22: mol_type = other RNA
aggtgtcactggatagaagtgt

SEQ ID NO: 119656 - RNA, 22 nt, synthetic construct
  source 1..22: mol_type = other RNA
aggtgtctcatttaataactaa

SEQ ID NO: 119657 - RNA, 22 nt, synthetic construct
  source 1..22: mol_type = other RNA
aggtgtctgatgtgtgtctctg

SEQ ID NO: 119658 - RNA, 22 nt, synthetic construct
  source 1..22: mol_type = other RNA
aggtgtgaaccacgcatctggt

SEQ ID NO: 119659 - RNA, 22 nt, synthetic construct
  source 1..22: mol_type = other RNA
aggtgtgagattgatagatcat

SEQ ID NO: 119660 - RNA, 22 nt, synthetic construct
  source 1..22: mol_type = other RNA
aggtgtgagccaccgtgccggg

SEQ ID NO: 119661 - RNA, 22 nt, synthetic construct
  source 1..22: mol_type = other RNA
aggtgtgagccactacgcccgg

SEQ ID NO: 119662 - RNA, 22 nt, synthetic construct
  source 1..22: mol_type = other RNA
aggtgtgataactgatatgagg

SEQ ID NO: 119663 - RNA, 22 nt, synthetic construct
  source 1..22: mol_type = other RNA
aggtgtgggccaccaagccctg

SEQ ID NO: 119664 - RNA, 22 nt, synthetic construct
  source 1..22: mol_type = other RNA
aggtgtggtgctgcacgtctgt

SEQ ID NO: 119665 - RNA, 22 nt, synthetic construct
  source 1..22: mol_type = other RNA
aggtgtgtaaacactgttctgc

SEQ ID NO: 119666 - RNA, 22 nt, synthetic construct
  source 1..22: mol_type = other RNA
aggtgtgtgtaatcccagctac

SEQ ID NO: 119667 - RNA, 22 nt, synthetic construct
  source 1..22: mol_type = other RNA
aggtgtgtgttccttcctacac

SEQ ID NO: 119668 - RNA, 22 nt, synthetic construct
  source 1..22: mol_type = other RNA
aggtgttaagccgttccatcag

SEQ ID NO: 119669 - RNA, 22 nt, synthetic construct
  source 1..22: mol_type = other RNA
aggtgttagcaggactggactc

SEQ ID NO: 119670 - RNA, 22 nt, synthetic construct
  source 1..22: mol_type = other RNA
aggtgttcctgaagtctttggt

SEQ ID NO: 119671 - RNA, 22 nt, synthetic construct
  source 1..22: mol_type = other RNA
aggtgttggtgcatttgggaca

SEQ ID NO: 119672 - RNA, 22 nt, synthetic construct
  source 1..22: mol_type = other RNA
aggtgtttggtgaattttattc

SEQ ID NO: 119673 - RNA, 22 nt, synthetic construct
  source 1..22: mol_type = other RNA
aggtgtttttcagccctgatag

SEQ ID NO: 119674 - RNA, 22 nt, synthetic construct
  source 1..22: mol_type = other RNA
aggtgttttttccttctttggg

SEQ ID NO: 119675 - RNA, 22 nt, synthetic construct
  source 1..22: mol_type = other RNA
aggttaaaaccacaaacatgaa

SEQ ID NO: 119676 - RNA, 22 nt, synthetic construct
  source 1..22: mol_type = other RNA
aggttaaagcaacaggaagagg

SEQ ID NO: 119677 - RNA, 22 nt, synthetic construct
  source 1..22: mol_type = other RNA
aggttaactaatagccagtgca

SEQ ID NO: 119678 - RNA, 22 nt, synthetic construct
  source 1..22: mol_type = other RNA
aggttaagggaagagctaagat

SEQ ID NO: 119679 - RNA, 22 nt, synthetic construct
  source 1..22: mol_type = other RNA
aggttacgtactaggtatcaca

SEQ ID NO: 119680 - RNA, 22 nt, synthetic construct
  source 1..22: mol_type = other RNA
aggttataatcagccgtgattg

SEQ ID NO: 119681 - RNA, 22 nt, synthetic construct
  source 1..22: mol_type = other RNA
aggttatccaattttttggcat

SEQ ID NO: 119682 - RNA, 22 nt, synthetic construct
  source 1..22: mol_type = other RNA
aggttatctgttttcttactga

SEQ ID NO: 119683 - RNA, 22 nt, synthetic construct
  source 1..22: mol_type = other RNA
aggttattaagataatgctgtt

SEQ ID NO: 119684 - RNA, 22 nt, synthetic construct
  source 1..22: mol_type = other RNA
aggttattcaaaacaaaacaca

SEQ ID NO: 119685 - RNA, 22 nt, synthetic construct
  source 1..22: mol_type = other RNA
aggttcaagtttggctcccatg

SEQ ID NO: 119686 - RNA, 22 nt, synthetic construct
  source 1..22: mol_type = other RNA
aggttcacaaattagaacaaat

SEQ ID NO: 119687 - RNA, 22 nt, synthetic construct
  source 1..22: mol_type = other RNA
aggttcatccatgttgttgaat

SEQ ID NO: 119688 - RNA, 22 nt, synthetic construct
  source 1..22: mol_type = other RNA
aggttcatgaacataaatttgt

SEQ ID NO: 119689 - RNA, 22 nt, synthetic construct
  source 1..22: mol_type = other RNA
aggttcatgtgtgcttacacac

SEQ ID NO: 119690 - RNA, 22 nt, synthetic construct
  source 1..22: mol_type = other RNA
aggttcattttaataagcttcg

SEQ ID NO: 119691 - RNA, 22 nt, synthetic construct
  source 1..22: mol_type = other RNA
aggttctgctatgctgaaaggc

SEQ ID NO: 119692 - RNA, 22 nt, synthetic construct
  source 1..22: mol_type = other RNA
aggttcttcatcagtccctgtg

SEQ ID NO: 119693 - RNA, 22 nt, synthetic construct
  source 1..22: mol_type = other RNA
aggttcttttaaatgccaattt

SEQ ID NO: 119694 - RNA, 22 nt, synthetic construct
  source 1..22: mol_type = other RNA
aggttgaaaactcaactgcctc

SEQ ID NO: 119695 - RNA, 22 nt, synthetic construct
  source 1..22: mol_type = other RNA
aggttgaaagttcagaatacca

SEQ ID NO: 119696 - RNA, 22 nt, synthetic construct
  source 1..22: mol_type = other RNA
aggttgaagacctgcagtctgc

SEQ ID NO: 119697 - RNA, 22 nt, synthetic construct
  source 1..22: mol_type = other RNA
aggttgaagctctagtgagcta

SEQ ID NO: 119698 - RNA, 22 nt, synthetic construct
  source 1..22: mol_type = other RNA
aggttgaatagggcctcaaatt

SEQ ID NO: 119699 - RNA, 22 nt, synthetic construct
  source 1..22: mol_type = other RNA
aggttgagacaagaccacacca

SEQ ID NO: 119700 - RNA, 22 nt, synthetic construct
  source 1..22: mol_type = other RNA
aggttgagacttagatttattt

SEQ ID NO: 119701 - RNA, 22 nt, synthetic construct
  source 1..22: mol_type = other RNA
aggttgaggctgcagtgagctc

SEQ ID NO: 119702 - RNA, 22 nt, synthetic construct
  source 1..22: mol_type = other RNA
aggttgatactagtttagtgca

SEQ ID NO: 119703 - RNA, 22 nt, synthetic construct
  source 1..22: mol_type = other RNA
aggttgatggctgtactaagcc

SEQ ID NO: 119704 - RNA, 22 nt, synthetic construct
  source 1..22: mol_type = other RNA
aggttgcattaatgcttcatat

SEQ ID NO: 119705 - RNA, 22 nt, synthetic construct
  source 1..22: mol_type = other RNA
aggttgcggtgacgtgagatca

SEQ ID NO: 119706 - RNA, 22 nt, synthetic construct
  source 1..22: mol_type = other RNA
aggttgcttaattgagctgtcc

SEQ ID NO: 119707 - RNA, 22 nt, synthetic construct
  source 1..22: mol_type = other RNA
aggttgcttttacttggctcct

SEQ ID NO: 119708 - RNA, 22 nt, synthetic construct
  source 1..22: mol_type = other RNA
aggttgggcttatcagatggtg

SEQ ID NO: 119709 - RNA, 22 nt, synthetic construct
  source 1..22: mol_type = other RNA
aggttgttcttggttaatatta

SEQ ID NO: 119710 - RNA, 22 nt, synthetic construct
  source 1..22: mol_type = other RNA
aggttgtttccatgtcttggct

SEQ ID NO: 119711 - RNA, 22 nt, synthetic construct
  source 1..22: mol_type = other RNA
aggtttaataaatactagtagg

SEQ ID NO: 119712 - RNA, 22 nt, synthetic construct
  source 1..22: mol_type = other RNA
aggtttacaggatatcagaagt

SEQ ID NO: 119713 - RNA, 22 nt, synthetic construct
  source 1..22: mol_type = other RNA
aggtttactccaagaaggctag

SEQ ID NO: 119714 - RNA, 22 nt, synthetic construct
  source 1..22: mol_type = other RNA
aggtttacttggggagagtggg

SEQ ID NO: 119715 - RNA, 22 nt, synthetic construct
  source 1..22: mol_type = other RNA
aggtttagaaaacatatccttc

SEQ ID NO: 119716 - RNA, 22 nt, synthetic construct
  source 1..22: mol_type = other RNA
aggtttaggaagcacattcctt

SEQ ID NO: 119717 - RNA, 22 nt, synthetic construct
  source 1..22: mol_type = other RNA
aggtttaggtttttcttgtggg

SEQ ID NO: 119718 - RNA, 22 nt, synthetic construct
  source 1..22: mol_type = other RNA
aggtttcaagtgaaccaaaaac

SEQ ID NO: 119719 - RNA, 22 nt, synthetic construct
  source 1..22: mol_type = other RNA
aggtttccagtggcccccctga

SEQ ID NO: 119720 - RNA, 22 nt, synthetic construct
  source 1..22: mol_type = other RNA
aggtttccctggggaataagat

SEQ ID NO: 119721 - RNA, 22 nt, synthetic construct
  source 1..22: mol_type = other RNA
aggtttctcatttttcaggggg

SEQ ID NO: 119722 - RNA, 22 nt, synthetic construct
  source 1..22: mol_type = other RNA
aggtttctctccaaggtacaat

SEQ ID NO: 119723 - RNA, 22 nt, synthetic construct
  source 1..22: mol_type = other RNA
aggtttcttcactcttaaaagg

SEQ ID NO: 119724 - RNA, 22 nt, synthetic construct
  source 1..22: mol_type = other RNA
aggtttgcactggcacagcact

SEQ ID NO: 119725 - RNA, 22 nt, synthetic construct
  source 1..22: mol_type = other RNA
aggtttggagtttgtagctcaa

SEQ ID NO: 119726 - RNA, 22 nt, synthetic construct
  source 1..22: mol_type = other RNA
aggtttgtagagcaagcaacac

SEQ ID NO: 119727 - RNA, 22 nt, synthetic construct
  source 1..22: mol_type = other RNA
aggtttgtgcttggatattcta

SEQ ID NO: 119728 - RNA, 22 nt, synthetic construct
  source 1..22: mol_type = other RNA
aggttttacgatgttggccagg

SEQ ID NO: 119729 - RNA, 22 nt, synthetic construct
  source 1..22: mol_type = other RNA
aggttttatctctctcaagcaa

SEQ ID NO: 119730 - RNA, 22 nt, synthetic construct
  source 1..22: mol_type = other RNA
aggttttcgaccaagttactag

SEQ ID NO: 119731 - RNA, 22 nt, synthetic construct
  source 1..22: mol_type = other RNA
aggttttggtaatgggaaagac

SEQ ID NO: 119732 - RNA, 22 nt, synthetic construct
  source 1..22: mol_type = other RNA
aggtttttaaaagatgcattct

SEQ ID NO: 119733 - RNA, 22 nt, synthetic construct
  source 1..22: mol_type = other RNA
aggtttttattttatgtacacg

SEQ ID NO: 119734 - RNA, 22 nt, synthetic construct
  source 1..22: mol_type = other RNA
aggtttttcttgtgggtatttt

SEQ ID NO: 119735 - RNA, 22 nt, synthetic construct
  source 1..22: mol_type = other RNA
aggtttttgaacaagagcgtcg

SEQ ID NO: 119736 - RNA, 22 nt, synthetic construct
  source 1..22: mol_type = other RNA
aggtttttgattactgactcaa

SEQ ID NO: 119737 - RNA, 22 nt, synthetic construct
  source 1..22: mol_type = other RNA
aggttttttcattttactgcta

SEQ ID NO: 119738 - RNA, 22 nt, synthetic construct
  source 1..22: mol_type = other RNA
agtaaaaaaggaccatctgtta

SEQ ID NO: 119739 - RNA, 22 nt, synthetic construct
  source 1..22: mol_type = other RNA
agtaaaaagaaatctgcatcca

SEQ ID NO: 119740 - RNA, 22 nt, synthetic construct
  source 1..22: mol_type = other RNA
agtaaaaagcactatccacatt

SEQ ID NO: 119741 - RNA, 22 nt, synthetic construct
  source 1..22: mol_type = other RNA
agtaaaaccaaatgtggatagt

SEQ ID NO: 119742 - RNA, 22 nt, synthetic construct
  source 1..22: mol_type = other RNA
agtaaaagaagatgcagttgct

SEQ ID NO: 119743 - RNA, 22 nt, synthetic construct
  source 1..22: mol_type = other RNA
agtaaaagcaacctcatttgca

SEQ ID NO: 119744 - RNA, 22 nt, synthetic construct
  source 1..22: mol_type = other RNA
agtaaaatcggaacaggctcaa

SEQ ID NO: 119745 - RNA, 22 nt, synthetic construct
  source 1..22: mol_type = other RNA
agtaaaattcccttcagtgtag

SEQ ID NO: 119746 - RNA, 22 nt, synthetic construct
  source 1..22: mol_type = other RNA
agtaaacaactgactctaaagt

SEQ ID NO: 119747 - RNA, 22 nt, synthetic construct
  source 1..22: mol_type = other RNA
agtaaacctcaagtcttttcct

SEQ ID NO: 119748 - RNA, 22 nt, synthetic construct
  source 1..22: mol_type = other RNA
agtaaagatagccccttatcag

SEQ ID NO: 119749 - RNA, 22 nt, synthetic construct
  source 1..22: mol_type = other RNA
agtaaagatcaagctcgccgtc

SEQ ID NO: 119750 - RNA, 22 nt, synthetic construct
  source 1..22: mol_type = other RNA
agtaaagcaaatgtgactagaa

SEQ ID NO: 119751 - RNA, 22 nt, synthetic construct
  source 1..22: mol_type = other RNA
agtaaagccccattgtacacat

SEQ ID NO: 119752 - RNA, 22 nt, synthetic construct
  source 1..22: mol_type = other RNA
agtaaagggtaagaaaattgta

SEQ ID NO: 119753 - RNA, 22 nt, synthetic construct
  source 1..22: mol_type = other RNA
agtaaagtcactgtggaaaaca

SEQ ID NO: 119754 - RNA, 22 nt, synthetic construct
  source 1..22: mol_type = other RNA
agtaaatatactgactagtggc

SEQ ID NO: 119755 - RNA, 22 nt, synthetic construct
  source 1..22: mol_type = other RNA
agtaaatatccgaaagaactga

SEQ ID NO: 119756 - RNA, 22 nt, synthetic construct
  source 1..22: mol_type = other RNA
agtaaatatttaacaccatggc

SEQ ID NO: 119757 - RNA, 22 nt, synthetic construct
  source 1..22: mol_type = other RNA
agtaaatcagactgtattacca

SEQ ID NO: 119758 - RNA, 22 nt, synthetic construct
  source 1..22: mol_type = other RNA
agtaaatcccggccaggtgcgg

SEQ ID NO: 119759 - RNA, 22 nt, synthetic construct
  source 1..22: mol_type = other RNA
agtaaatctttggtgaaggttc

SEQ ID NO: 119760 - RNA, 22 nt, synthetic construct
  source 1..22: mol_type = other RNA
agtaaatgaaatttgaggccct

SEQ ID NO: 119761 - RNA, 22 nt, synthetic construct
  source 1..22: mol_type = other RNA
agtaaatgcaatgcaggcgcct

SEQ ID NO: 119762 - RNA, 22 nt, synthetic construct
  source 1..22: mol_type = other RNA
agtaaattcgcataaccaaatt

SEQ ID NO: 119763 - RNA, 22 nt, synthetic construct
  source 1..22: mol_type = other RNA
agtaacaaataagaagattgag

SEQ ID NO: 119764 - RNA, 22 nt, synthetic construct
  source 1..22: mol_type = other RNA
agtaacactcagaagtactact

SEQ ID NO: 119765 - RNA, 22 nt, synthetic construct
  source 1..22: mol_type = other RNA
agtaacagacctctgaagagtc

SEQ ID NO: 119766 - RNA, 22 nt, synthetic construct
  source 1..22: mol_type = other RNA
agtaacagttcaatactactgc

SEQ ID NO: 119767 - RNA, 22 nt, synthetic construct
  source 1..22: mol_type = other RNA
agtaacatgtggaacataatct

SEQ ID NO: 119768 - RNA, 22 nt, synthetic construct
  source 1..22: mol_type = other RNA
agtaacattacaacagcaaggc

SEQ ID NO: 119769 - RNA, 22 nt, synthetic construct
  source 1..22: mol_type = other RNA
agtaactcttgagttaggaatt

SEQ ID NO: 119770 - RNA, 22 nt, synthetic construct
  source 1..22: mol_type = other RNA
agtaactgctcctctgacttta

SEQ ID NO: 119771 - RNA, 22 nt, synthetic construct
  source 1..22: mol_type = other RNA
agtaactggtccagatgaagca

SEQ ID NO: 119772 - RNA, 22 nt, synthetic construct
  source 1..22: mol_type = other RNA
agtaactgtcatcagcgtcctc

SEQ ID NO: 119773 - RNA, 22 nt, synthetic construct
  source 1..22: mol_type = other RNA
agtaactgttggcaaggatgtg

SEQ ID NO: 119774 - RNA, 22 nt, synthetic construct
  source 1..22: mol_type = other RNA
agtaacttggtcgaaaacctga

SEQ ID NO: 119775 - RNA, 22 nt, synthetic construct
  source 1..22: mol_type = other RNA
agtaactttctgcttaaagcct

SEQ ID NO: 119776 - RNA, 22 nt, synthetic construct
  source 1..22: mol_type = other RNA
agtaagaaaacagataacctag

SEQ ID NO: 119777 - RNA, 22 nt, synthetic construct
  source 1..22: mol_type = other RNA
agtaagaggtatcaccatctga

SEQ ID NO: 119778 - RNA, 22 nt, synthetic construct
  source 1..22: mol_type = other RNA
agtaagatcctggattgctagt

SEQ ID NO: 119779 - RNA, 22 nt, synthetic construct
  source 1..22: mol_type = other RNA
agtaagattctgtctctacaaa

SEQ ID NO: 119780 - RNA, 22 nt, synthetic construct
  source 1..22: mol_type = other RNA
agtaagcaactgcatcttcttt

SEQ ID NO: 119781 - RNA, 22 nt, synthetic construct
  source 1..22: mol_type = other RNA
agtaaggatcgttagtattttc

SEQ ID NO: 119782 - RNA, 22 nt, synthetic construct
  source 1..22: mol_type = other RNA
agtaagggtaaacagaattaaa

SEQ ID NO: 119783 - RNA, 22 nt, synthetic construct
  source 1..22: mol_type = other RNA
agtaaggtttccctggggaata

SEQ ID NO: 119784 - RNA, 22 nt, synthetic construct
  source 1..22: mol_type = other RNA
agtaagtaaaatcggaacaggc

SEQ ID NO: 119785 - RNA, 22 nt, synthetic construct
  source 1..22: mol_type = other RNA
agtaagtgtgagcaaaaataca

SEQ ID NO: 119786 - RNA, 22 nt, synthetic construct
  source 1..22: mol_type = other RNA
agtaagttgcatacgtcgtccc

SEQ ID NO: 119787 - RNA, 22 nt, synthetic construct
  source 1..22: mol_type = other RNA
agtaagttgtgtcatttttgta

SEQ ID NO: 119788 - RNA, 22 nt, synthetic construct
  source 1..22: mol_type = other RNA
agtaataaagcaagtatgagcc

SEQ ID NO: 119789 - RNA, 22 nt, synthetic construct
  source 1..22: mol_type = other RNA
agtaataaaggcaatgctctct

SEQ ID NO: 119790 - RNA, 22 nt, synthetic construct
  source 1..22: mol_type = other RNA
agtaatcaaaaacctcccaaca

SEQ ID NO: 119791 - RNA, 22 nt, synthetic construct
  source 1..22: mol_type = other RNA
agtaatcaaacagtgtgatatt

SEQ ID NO: 119792 - RNA, 22 nt, synthetic construct
  source 1..22: mol_type = other RNA
agtaatcaagtgaaatgatctt

SEQ ID NO: 119793 - RNA, 22 nt, synthetic construct
  source 1..22: mol_type = other RNA
agtaatcttgctaaacatgtat

SEQ ID NO: 119794 - RNA, 22 nt, synthetic construct
  source 1..22: mol_type = other RNA
agtaatgaaaattagctggatg

SEQ ID NO: 119795 - RNA, 22 nt, synthetic construct
  source 1..22: mol_type = other RNA
agtaatgctggccagtgagttc

SEQ ID NO: 119796 - RNA, 22 nt, synthetic construct
  source 1..22: mol_type = other RNA
agtaatggatgtttttagagag

SEQ ID NO: 119797 - RNA, 22 nt, synthetic construct
  source 1..22: mol_type = other RNA
agtaatggttggccgaggccag

SEQ ID NO: 119798 - RNA, 22 nt, synthetic construct
  source 1..22: mol_type = other RNA
agtaattagttacatgaggtca

SEQ ID NO: 119799 - RNA, 22 nt, synthetic construct
  source 1..22: mol_type = other RNA
agtaattctccactttcatgat

SEQ ID NO: 119800 - RNA, 22 nt, synthetic construct
  source 1..22: mol_type = other RNA
agtaattctgcagtgaacatgg

SEQ ID NO: 119801 - RNA, 22 nt, synthetic construct
  source 1..22: mol_type = other RNA
agtaattgggatctgataaatt

SEQ ID NO: 119802 - RNA, 22 nt, synthetic construct
  source 1..22: mol_type = other RNA
agtaattgtagtttccatggag

SEQ ID NO: 119803 - RNA, 22 nt, synthetic construct
  source 1..22: mol_type = other RNA
agtaattgttttcccttttgta

SEQ ID NO: 119804 - RNA, 22 nt, synthetic construct
  source 1..22: mol_type = other RNA
agtacaaaagtgctgttgaggc

SEQ ID NO: 119805 - RNA, 22 nt, synthetic construct
  source 1..22: mol_type = other RNA
agtacaaggctagagctcacac

SEQ ID NO: 119806 - RNA, 22 nt, synthetic construct
  source 1..22: mol_type = other RNA
agtacacgaaaatatccctggg

SEQ ID NO: 119807 - RNA, 22 nt, synthetic construct
  source 1..22: mol_type = other RNA
agtacactgttgatttagaaat

SEQ ID NO: 119808 - RNA, 22 nt, synthetic construct
  source 1..22: mol_type = other RNA
agtacagataaccaataagaag

SEQ ID NO: 119809 - RNA, 22 nt, synthetic construct
  source 1..22: mol_type = other RNA
agtacagccatcaacctaatga

SEQ ID NO: 119810 - RNA, 22 nt, synthetic construct
  source 1..22: mol_type = other RNA
agtacagtagtaaaaccaaatg

SEQ ID NO: 119811 - RNA, 22 nt, synthetic construct
  source 1..22: mol_type = other RNA
agtacagtgagtagaagagtaa

SEQ ID NO: 119812 - RNA, 22 nt, synthetic construct
  source 1..22: mol_type = other RNA
agtacagtgcataccaccacat

SEQ ID NO: 119813 - RNA, 22 nt, synthetic construct
  source 1..22: mol_type = other RNA
agtacagtggcacgattttggc

SEQ ID NO: 119814 - RNA, 22 nt, synthetic construct
  source 1..22: mol_type = other RNA
agtacatctcaattcagaagct

SEQ ID NO: 119815 - RNA, 22 nt, synthetic construct
  source 1..22: mol_type = other RNA
agtacatgaaatactcaaacta

SEQ ID NO: 119816 - RNA, 22 nt, synthetic construct
  source 1..22: mol_type = other RNA
agtaccaggtcagccagaggaa

SEQ ID NO: 119817 - RNA, 22 nt, synthetic construct
  source 1..22: mol_type = other RNA
agtaccattccccttgccaagg

SEQ ID NO: 119818 - RNA, 22 nt, synthetic construct
  source 1..22: mol_type = other RNA
agtacctctgggatgctcagtt

SEQ ID NO: 119819 - RNA, 22 nt, synthetic construct
  source 1..22: mol_type = other RNA
agtacgcttttatgttataatg

SEQ ID NO: 119820 - RNA, 22 nt, synthetic construct
  source 1..22: mol_type = other RNA
agtacgtaacctaaagttgagg

SEQ ID NO: 119821 - RNA, 22 nt, synthetic construct
  source 1..22: mol_type = other RNA
agtacgtgcagagcaggggtgg

SEQ ID NO: 119822 - RNA, 22 nt, synthetic construct
  source 1..22: mol_type = other RNA
agtactatcttccctaaagaga

SEQ ID NO: 119823 - RNA, 22 nt, synthetic construct
  source 1..22: mol_type = other RNA
agtactatgcagcaacggaaat

SEQ ID NO: 119824 - RNA, 22 nt, synthetic construct
  source 1..22: mol_type = other RNA
agtactgaccatctcagcacag

SEQ ID NO: 119825 - RNA, 22 nt, synthetic construct
  source 1..22: mol_type = other RNA
agtactgagtcaaaaccaaaga

SEQ ID NO: 119826 - RNA, 22 nt, synthetic construct
  source 1..22: mol_type = other RNA
agtactgcatgattccccttat

SEQ ID NO: 119827 - RNA, 22 nt, synthetic construct
  source 1..22: mol_type = other RNA
agtactggaaatggacagcggg

SEQ ID NO: 119828 - RNA, 22 nt, synthetic construct
  source 1..22: mol_type = other RNA
agtacttcaaggttcacaaatt

SEQ ID NO: 119829 - RNA, 22 nt, synthetic construct
  source 1..22: mol_type = other RNA
agtacttcagcgcttgaacaaa

SEQ ID NO: 119830 - RNA, 22 nt, synthetic construct
  source 1..22: mol_type = other RNA
agtacttccctctttctcaact

SEQ ID NO: 119831 - RNA, 22 nt, synthetic construct
  source 1..22: mol_type = other RNA
agtacttctgagtgttacttga

SEQ ID NO: 119832 - RNA, 22 nt, synthetic construct
  source 1..22: mol_type = other RNA
agtacttgtctttttgtgactt

SEQ ID NO: 119833 - RNA, 22 nt, synthetic construct
  source 1..22: mol_type = other RNA
agtactttttcatccaaacaga

SEQ ID NO: 119834 - RNA, 22 nt, synthetic construct
  source 1..22: mol_type = other RNA
agtagaaagcaggttcatttta

SEQ ID NO: 119835 - RNA, 22 nt, synthetic construct
  source 1..22: mol_type = other RNA
agtagaaatcttccagaaggag

SEQ ID NO: 119836 - RNA, 22 nt, synthetic construct
  source 1..22: mol_type = other RNA
agtagaagactcagcagtttta

SEQ ID NO: 119837 - RNA, 22 nt, synthetic construct
  source 1..22: mol_type = other RNA
agtagaagagtaatggttggcc

SEQ ID NO: 119838 - RNA, 22 nt, synthetic construct
  source 1..22: mol_type = other RNA
agtagaaggccctatgccttca

SEQ ID NO: 119839 - RNA, 22 nt, synthetic construct
  source 1..22: mol_type = other RNA
agtagaaggtcaatctaggagg

SEQ ID NO: 119840 - RNA, 22 nt, synthetic construct
  source 1..22: mol_type = other RNA
agtagaattctccagtgaagtc

SEQ ID NO: 119841 - RNA, 22 nt, synthetic construct
  source 1..22: mol_type = other RNA
agtagagaaggctttgtgttgg

SEQ ID NO: 119842 - RNA, 22 nt, synthetic construct
  source 1..22: mol_type = other RNA
agtagagatgaggttttacgat

SEQ ID NO: 119843 - RNA, 22 nt, synthetic construct
  source 1..22: mol_type = other RNA
agtagaggactgcctattttgt

SEQ ID NO: 119844 - RNA, 22 nt, synthetic construct
  source 1..22: mol_type = other RNA
agtagaggccgagggttgaaca

SEQ ID NO: 119845 - RNA, 22 nt, synthetic construct
  source 1..22: mol_type = other RNA
agtagattagcttttacgagga

SEQ ID NO: 119846 - RNA, 22 nt, synthetic construct
  source 1..22: mol_type = other RNA
agtagattcccccttatgtgtg

SEQ ID NO: 119847 - RNA, 22 nt, synthetic construct
  source 1..22: mol_type = other RNA
agtagcaccctatttatgttgc

SEQ ID NO: 119848 - RNA, 22 nt, synthetic construct
  source 1..22: mol_type = other RNA
agtagcagaatccccaaataac

SEQ ID NO: 119849 - RNA, 22 nt, synthetic construct
  source 1..22: mol_type = other RNA
agtagcagggactacagtcaca

SEQ ID NO: 119850 - RNA, 22 nt, synthetic construct
  source 1..22: mol_type = other RNA
agtagccaaaggtagaaacatc

SEQ ID NO: 119851 - RNA, 22 nt, synthetic construct
  source 1..22: mol_type = other RNA
agtagcgctttaagcatcccat

SEQ ID NO: 119852 - RNA, 22 nt, synthetic construct
  source 1..22: mol_type = other RNA
agtagctaggaccataggcacg

SEQ ID NO: 119853 - RNA, 22 nt, synthetic construct
  source 1..22: mol_type = other RNA
agtagctcatcatttataccca

SEQ ID NO: 119854 - RNA, 22 nt, synthetic construct
  source 1..22: mol_type = other RNA
agtagctgggatcacaggcgtt

SEQ ID NO: 119855 - RNA, 22 nt, synthetic construct
  source 1..22: mol_type = other RNA
agtagctgggattacacacacc

SEQ ID NO: 119856 - RNA, 22 nt, synthetic construct
  source 1..22: mol_type = other RNA
agtagctgtctttaatgtaaaa

SEQ ID NO: 119857 - RNA, 22 nt, synthetic construct
  source 1..22: mol_type = other RNA
agtagctgtgattaccggcatc

SEQ ID NO: 119858 - RNA, 22 nt, synthetic construct
  source 1..22: mol_type = other RNA
agtagctgttgaattgttgcgc

SEQ ID NO: 119859 - RNA, 22 nt, synthetic construct
  source 1..22: mol_type = other RNA
agtagcttcaatgagggcagag

SEQ ID NO: 119860 - RNA, 22 nt, synthetic construct
  source 1..22: mol_type = other RNA
agtaggaaaaccatgtcatgta

SEQ ID NO: 119861 - RNA, 22 nt, synthetic construct
  source 1..22: mol_type = other RNA
agtaggaattaaacatttctga

SEQ ID NO: 119862 - RNA, 22 nt, synthetic construct
  source 1..22: mol_type = other RNA
agtaggatgaattacaaatgaa

SEQ ID NO: 119863 - RNA, 22 nt, synthetic construct
  source 1..22: mol_type = other RNA
agtaggcaacatccctatgcaa

SEQ ID NO: 119864 - RNA, 22 nt, synthetic construct
  source 1..22: mol_type = other RNA
agtaggcttagataggatgggc

SEQ ID NO: 119865 - RNA, 22 nt, synthetic construct
  source 1..22: mol_type = other RNA
agtagggaaggtgcccgcgaag

SEQ ID NO: 119866 - RNA, 22 nt, synthetic construct
  source 1..22: mol_type = other RNA
agtagggacggggttttgccat

SEQ ID NO: 119867 - RNA, 22 nt, synthetic construct
  source 1..22: mol_type = other RNA
agtaggggtaaatctttgtaca

SEQ ID NO: 119868 - RNA, 22 nt, synthetic construct
  source 1..22: mol_type = other RNA
agtaggtctccttgtatggaga

SEQ ID NO: 119869 - RNA, 22 nt, synthetic construct
  source 1..22: mol_type = other RNA
agtaggttgagacttagattta

SEQ ID NO: 119870 - RNA, 22 nt, synthetic construct
  source 1..22: mol_type = other RNA
agtagtaaaaccaaatgtggat

SEQ ID NO: 119871 - RNA, 22 nt, synthetic construct
  source 1..22: mol_type = other RNA
agtagtaaagcaaatgtgacta

SEQ ID NO: 119872 - RNA, 22 nt, synthetic construct
  source 1..22: mol_type = other RNA
agtagtaagttgtgtcattttt

SEQ ID NO: 119873 - RNA, 22 nt, synthetic construct
  source 1..22: mol_type = other RNA
agtagtacaaaagtgctgttga

SEQ ID NO: 119874 - RNA, 22 nt, synthetic construct
  source 1..22: mol_type = other RNA
agtagtacagtgagtagaagag

SEQ ID NO: 119875 - RNA, 22 nt, synthetic construct
  source 1..22: mol_type = other RNA
agtagtacttctgagtgttact

SEQ ID NO: 119876 - RNA, 22 nt, synthetic construct
  source 1..22: mol_type = other RNA
agtagtattgaactgttacttg

SEQ ID NO: 119877 - RNA, 22 nt, synthetic construct
  source 1..22: mol_type = other RNA
agtagtggcagccccgcttcag

SEQ ID NO: 119878 - RNA, 22 nt, synthetic construct
  source 1..22: mol_type = other RNA
agtagttaggtggtttgaaccc

SEQ ID NO: 119879 - RNA, 22 nt, synthetic construct
  source 1..22: mol_type = other RNA
agtagttcatgttagcataatt

SEQ ID NO: 119880 - RNA, 22 nt, synthetic construct
  source 1..22: mol_type = other RNA
agtagttgctcagaaaattttc

SEQ ID NO: 119881 - RNA, 22 nt, synthetic construct
  source 1..22: mol_type = other RNA
agtagttgtaactacagacatg

SEQ ID NO: 119882 - RNA, 22 nt, synthetic construct
  source 1..22: mol_type = other RNA
agtagtttgctagtggtaacta

SEQ ID NO: 119883 - RNA, 22 nt, synthetic construct
  source 1..22: mol_type = other RNA
agtataaatgaggtatcatttc

SEQ ID NO: 119884 - RNA, 22 nt, synthetic construct
  source 1..22: mol_type = other RNA
agtataagagaaggaagcacca

SEQ ID NO: 119885 - RNA, 22 nt, synthetic construct
  source 1..22: mol_type = other RNA
agtatacatgtttagcaagatt

SEQ ID NO: 119886 - RNA, 22 nt, synthetic construct
  source 1..22: mol_type = other RNA
agtatagaaaggagaccagtta

SEQ ID NO: 119887 - RNA, 22 nt, synthetic construct
  source 1..22: mol_type = other RNA
agtataggggaactcttgtagt

SEQ ID NO: 119888 - RNA, 22 nt, synthetic construct
  source 1..22: mol_type = other RNA
agtatatatcatagagtaccag

SEQ ID NO: 119889 - RNA, 22 nt, synthetic construct
  source 1..22: mol_type = other RNA
agtatatatgctccctaaatac

SEQ ID NO: 119890 - RNA, 22 nt, synthetic construct
  source 1..22: mol_type = other RNA
agtatatattttctaagagcca

SEQ ID NO: 119891 - RNA, 22 nt, synthetic construct
  source 1..22: mol_type = other RNA
agtatattcatagtagctgttg

SEQ ID NO: 119892 - RNA, 22 nt, synthetic construct
  source 1..22: mol_type = other RNA
agtatattctgtgaattgtgac

SEQ ID NO: 119893 - RNA, 22 nt, synthetic construct
  source 1..22: mol_type = other RNA
agtatatttactgcttgctgca

SEQ ID NO: 119894 - RNA, 22 nt, synthetic construct
  source 1..22: mol_type = other RNA
agtatattttcaaggcttgtgc

SEQ ID NO: 119895 - RNA, 22 nt, synthetic construct
  source 1..22: mol_type = other RNA
agtatcaacctgcaggtatttc

SEQ ID NO: 119896 - RNA, 22 nt, synthetic construct
  source 1..22: mol_type = other RNA
agtatcccagatggggattgag

SEQ ID NO: 119897 - RNA, 22 nt, synthetic construct
  source 1..22: mol_type = other RNA
agtatcctttcaaggtatctcc

SEQ ID NO: 119898 - RNA, 22 nt, synthetic construct
  source 1..22: mol_type = other RNA
agtatcgtgagactattatgag

SEQ ID NO: 119899 - RNA, 22 nt, synthetic construct
  source 1..22: mol_type = other RNA
agtatctaggagtacagtgcat

SEQ ID NO: 119900 - RNA, 22 nt, synthetic construct
  source 1..22: mol_type = other RNA
agtatctcagtcataatttgtg

SEQ ID NO: 119901 - RNA, 22 nt, synthetic construct
  source 1..22: mol_type = other RNA
agtatctcatgcttaggatccc

SEQ ID NO: 119902 - RNA, 22 nt, synthetic construct
  source 1..22: mol_type = other RNA
agtatctccctgtgcgtgaatc

SEQ ID NO: 119903 - RNA, 22 nt, synthetic construct
  source 1..22: mol_type = other RNA
agtatctcctttccttccttgc

SEQ ID NO: 119904 - RNA, 22 nt, synthetic construct
  source 1..22: mol_type = other RNA
agtatctcggtcattctggagt

SEQ ID NO: 119905 - RNA, 22 nt, synthetic construct
  source 1..22: mol_type = other RNA
agtatctggtgctggcagcctt

SEQ ID NO: 119906 - RNA, 22 nt, synthetic construct
  source 1..22: mol_type = other RNA
agtatctggtgttgcttgctct

SEQ ID NO: 119907 - RNA, 22 nt, synthetic construct
  source 1..22: mol_type = other RNA
agtatcttgaagaaaccaagag

SEQ ID NO: 119908 - RNA, 22 nt, synthetic construct
  source 1..22: mol_type = other RNA
agtatcttttcatgttgaccat

SEQ ID NO: 119909 - RNA, 22 nt, synthetic construct
  source 1..22: mol_type = other RNA
agtatctttttcagcagcagag

SEQ ID NO: 119910 - RNA, 22 nt, synthetic construct
  source 1..22: mol_type = other RNA
agtatgaatgcacgtgaagcta

SEQ ID NO: 119911 - RNA, 22 nt, synthetic construct
  source 1..22: mol_type = other RNA
agtatgacctcctcccacttac

SEQ ID NO: 119912 - RNA, 22 nt, synthetic construct
  source 1..22: mol_type = other RNA
agtatgagaaatgtctggtttg

SEQ ID NO: 119913 - RNA, 22 nt, synthetic construct
  source 1..22: mol_type = other RNA
agtatgagccactagtcagtat

SEQ ID NO: 119914 - RNA, 22 nt, synthetic construct
  source 1..22: mol_type = other RNA
agtatgagtcttccgtctcaag

SEQ ID NO: 119915 - RNA, 22 nt, synthetic construct
  source 1..22: mol_type = other RNA
agtatgatgccactcaaaactg

SEQ ID NO: 119916 - RNA, 22 nt, synthetic construct
  source 1..22: mol_type = other RNA
agtatgcacaaataattaacac

SEQ ID NO: 119917 - RNA, 22 nt, synthetic construct
  source 1..22: mol_type = other RNA
agtatgcagaaaccagttgtaa

SEQ ID NO: 119918 - RNA, 22 nt, synthetic construct
  source 1..22: mol_type = other RNA
agtatgcatagatcacaaggac

SEQ ID NO: 119919 - RNA, 22 nt, synthetic construct
  source 1..22: mol_type = other RNA
agtatgcatagcagggtcatgc

SEQ ID NO: 119920 - RNA, 22 nt, synthetic construct
  source 1..22: mol_type = other RNA
agtatgcggggtttcagcacaa

SEQ ID NO: 119921 - RNA, 22 nt, synthetic construct
  source 1..22: mol_type = other RNA
agtatgctgtttacattagaga

SEQ ID NO: 119922 - RNA, 22 nt, synthetic construct
  source 1..22: mol_type = other RNA
agtatgggtctccattttggtc

SEQ ID NO: 119923 - RNA, 22 nt, synthetic construct
  source 1..22: mol_type = other RNA
agtatggttgaagaaagtagga

SEQ ID NO: 119924 - RNA, 22 nt, synthetic construct
  source 1..22: mol_type = other RNA
agtatgtaattacaggggactt

SEQ ID NO: 119925 - RNA, 22 nt, synthetic construct
  source 1..22: mol_type = other RNA
agtatgtaggaaactttgcatt

SEQ ID NO: 119926 - RNA, 22 nt, synthetic construct
  source 1..22: mol_type = other RNA
agtatgtcagactcattgccta

SEQ ID NO: 119927 - RNA, 22 nt, synthetic construct
  source 1..22: mol_type = other RNA
agtatgtgtctctgacatgaga

SEQ ID NO: 119928 - RNA, 22 nt, synthetic construct
  source 1..22: mol_type = other RNA
agtattaaaagcacaagcacag

SEQ ID NO: 119929 - RNA, 22 nt, synthetic construct
  source 1..22: mol_type = other RNA
agtattaaattttctaggaacc

SEQ ID NO: 119930 - RNA, 22 nt, synthetic construct
  source 1..22: mol_type = other RNA
agtattacacagaaagcctctt

SEQ ID NO: 119931 - RNA, 22 nt, synthetic construct
  source 1..22: mol_type = other RNA
agtattacctatgaataggtgt

SEQ ID NO: 119932 - RNA, 22 nt, synthetic construct
  source 1..22: mol_type = other RNA
agtattacctcccatgcattcg

SEQ ID NO: 119933 - RNA, 22 nt, synthetic construct
  source 1..22: mol_type = other RNA
agtattcaagtttcaccctgcg

SEQ ID NO: 119934 - RNA, 22 nt, synthetic construct
  source 1..22: mol_type = other RNA
agtattcaggacagattaaaat

SEQ ID NO: 119935 - RNA, 22 nt, synthetic construct
  source 1..22: mol_type = other RNA
agtattccatggtatgtgccat

SEQ ID NO: 119936 - RNA, 22 nt, synthetic construct
  source 1..22: mol_type = other RNA
agtattcccaagatcataagct

SEQ ID NO: 119937 - RNA, 22 nt, synthetic construct
  source 1..22: mol_type = other RNA
agtattctagttctagctctgt

SEQ ID NO: 119938 - RNA, 22 nt, synthetic construct
  source 1..22: mol_type = other RNA
agtattgaactgttacttgact

SEQ ID NO: 119939 - RNA, 22 nt, synthetic construct
  source 1..22: mol_type = other RNA
agtattgatttgaccatgggac

SEQ ID NO: 119940 - RNA, 22 nt, synthetic construct
  source 1..22: mol_type = other RNA
agtattgcattgaatctgtaga

SEQ ID NO: 119941 - RNA, 22 nt, synthetic construct
  source 1..22: mol_type = other RNA
agtattgccaggtttgtgcttg

SEQ ID NO: 119942 - RNA, 22 nt, synthetic construct
  source 1..22: mol_type = other RNA
agtattgtcttctaaccctcaa

SEQ ID NO: 119943 - RNA, 22 nt, synthetic construct
  source 1..22: mol_type = other RNA
agtattgtgctgaaaccccgca

SEQ ID NO: 119944 - RNA, 22 nt, synthetic construct
  source 1..22: mol_type = other RNA
agtattgttaactgtagagaaa

SEQ ID NO: 119945 - RNA, 22 nt, synthetic construct
  source 1..22: mol_type = other RNA
agtatttccacgggtaaaaata

SEQ ID NO: 119946 - RNA, 22 nt, synthetic construct
  source 1..22: mol_type = other RNA
agtatttctcatctgtcacttt

SEQ ID NO: 119947 - RNA, 22 nt, synthetic construct
  source 1..22: mol_type = other RNA
agtattttgttgacatcctttg

SEQ ID NO: 119948 - RNA, 22 nt, synthetic construct
  source 1..22: mol_type = other RNA
agtcaaaaccaaagaaagggga

SEQ ID NO: 119949 - RNA, 22 nt, synthetic construct
  source 1..22: mol_type = other RNA
agtcaaagcctgtggaggcagt

SEQ ID NO: 119950 - RNA, 22 nt, synthetic construct
  source 1..22: mol_type = other RNA
agtcaacacactagccactggg

SEQ ID NO: 119951 - RNA, 22 nt, synthetic construct
  source 1..22: mol_type = other RNA
agtcaacaccaagcaacactaa

SEQ ID NO: 119952 - RNA, 22 nt, synthetic construct
  source 1..22: mol_type = other RNA
agtcaacacttttccagtcttc

SEQ ID NO: 119953 - RNA, 22 nt, synthetic construct
  source 1..22: mol_type = other RNA
agtcaactaatcaaacataccc

SEQ ID NO: 119954 - RNA, 22 nt, synthetic construct
  source 1..22: mol_type = other RNA
agtcaagatgaatctgcaacta

SEQ ID NO: 119955 - RNA, 22 nt, synthetic construct
  source 1..22: mol_type = other RNA
agtcaagtaacagttcaatact

SEQ ID NO: 119956 - RNA, 22 nt, synthetic construct
  source 1..22: mol_type = other RNA
agtcaatgcaatgcgtgtgaaa

SEQ ID NO: 119957 - RNA, 22 nt, synthetic construct
  source 1..22: mol_type = other RNA
agtcaattctagttaataaagg

SEQ ID NO: 119958 - RNA, 22 nt, synthetic construct
  source 1..22: mol_type = other RNA
agtcaatttcagatctctgaca

SEQ ID NO: 119959 - RNA, 22 nt, synthetic construct
  source 1..22: mol_type = other RNA
agtcacaaaaagacaagtactg

SEQ ID NO: 119960 - RNA, 22 nt, synthetic construct
  source 1..22: mol_type = other RNA
agtcacaaagctttaaactgga

SEQ ID NO: 119961 - RNA, 22 nt, synthetic construct
  source 1..22: mol_type = other RNA
agtcacacaccactacacccgg

SEQ ID NO: 119962 - RNA, 22 nt, synthetic construct
  source 1..22: mol_type = other RNA
agtcacagtgaattctgactta

SEQ ID NO: 119963 - RNA, 22 nt, synthetic construct
  source 1..22: mol_type = other RNA
agtcacattctagtgatgggag

SEQ ID NO: 119964 - RNA, 22 nt, synthetic construct
  source 1..22: mol_type = other RNA
agtcacatttgctttactactg

SEQ ID NO: 119965 - RNA, 22 nt, synthetic construct
  source 1..22: mol_type = other RNA
agtcaccaaacgtttagatgaa

SEQ ID NO: 119966 - RNA, 22 nt, synthetic construct
  source 1..22: mol_type = other RNA
agtcaccctacagactcaataa

SEQ ID NO: 119967 - RNA, 22 nt, synthetic construct
  source 1..22: mol_type = other RNA
agtcactaaaaatcagattaag

SEQ ID NO: 119968 - RNA, 22 nt, synthetic construct
  source 1..22: mol_type = other RNA
agtcactccatttgtggcatct

SEQ ID NO: 119969 - RNA, 22 nt, synthetic construct
  source 1..22: mol_type = other RNA
agtcactgtggaaaacagtttg

SEQ ID NO: 119970 - RNA, 22 nt, synthetic construct
  source 1..22: mol_type = other RNA
agtcactttttattctgttcta

SEQ ID NO: 119971 - RNA, 22 nt, synthetic construct
  source 1..22: mol_type = other RNA
agtcagaattcactgtgactcc

SEQ ID NO: 119972 - RNA, 22 nt, synthetic construct
  source 1..22: mol_type = other RNA
agtcagacacactagctgaccc

SEQ ID NO: 119973 - RNA, 22 nt, synthetic construct
  source 1..22: mol_type = other RNA
agtcagactaagacactagcta

SEQ ID NO: 119974 - RNA, 22 nt, synthetic construct
  source 1..22: mol_type = other RNA
agtcagagattttcccaaagat

SEQ ID NO: 119975 - RNA, 22 nt, synthetic construct
  source 1..22: mol_type = other RNA
agtcagaggagcagttactcct

SEQ ID NO: 119976 - RNA, 22 nt, synthetic construct
  source 1..22: mol_type = other RNA
agtcagcaactcttggccattt

SEQ ID NO: 119977 - RNA, 22 nt, synthetic construct
  source 1..22: mol_type = other RNA
agtcagcacactcttaataact

SEQ ID NO: 119978 - RNA, 22 nt, synthetic construct
  source 1..22: mol_type = other RNA
agtcagcacttctgatatcctg

SEQ ID NO: 119979 - RNA, 22 nt, synthetic construct
  source 1..22: mol_type = other RNA
agtcagcctgggcacacgccac

SEQ ID NO: 119980 - RNA, 22 nt, synthetic construct
  source 1..22: mol_type = other RNA
agtcagctaattttctaatctt

SEQ ID NO: 119981 - RNA, 22 nt, synthetic construct
  source 1..22: mol_type = other RNA
agtcagctaggcgtagtatctc

SEQ ID NO: 119982 - RNA, 22 nt, synthetic construct
  source 1..22: mol_type = other RNA
agtcagtaaaaaaggaccatct

SEQ ID NO: 119983 - RNA, 22 nt, synthetic construct
  source 1..22: mol_type = other RNA
agtcagtaatcaaaaacctccc

SEQ ID NO: 119984 - RNA, 22 nt, synthetic construct
  source 1..22: mol_type = other RNA
agtcagtagaggccgagggttg

SEQ ID NO: 119985 - RNA, 22 nt, synthetic construct
  source 1..22: mol_type = other RNA
agtcagtatatttactgcttgc

SEQ ID NO: 119986 - RNA, 22 nt, synthetic construct
  source 1..22: mol_type = other RNA
agtcagtgaagatgctgaactt

SEQ ID NO: 119987 - RNA, 22 nt, synthetic construct
  source 1..22: mol_type = other RNA
agtcagtgatggaggtggaact

SEQ ID NO: 119988 - RNA, 22 nt, synthetic construct
  source 1..22: mol_type = other RNA
agtcagttaacagtgctgtgcc

SEQ ID NO: 119989 - RNA, 22 nt, synthetic construct
  source 1..22: mol_type = other RNA
agtcagttacagcatttcagcc

SEQ ID NO: 119990 - RNA, 22 nt, synthetic construct
  source 1..22: mol_type = other RNA
agtcagttctctgccccgggcc

SEQ ID NO: 119991 - RNA, 22 nt, synthetic construct
  source 1..22: mol_type = other RNA
agtcagttgtttacttgggtat

SEQ ID NO: 119992 - RNA, 22 nt, synthetic construct
  source 1..22: mol_type = other RNA
agtcataatttgtgtccttttt

SEQ ID NO: 119993 - RNA, 22 nt, synthetic construct
  source 1..22: mol_type = other RNA
agtcatagcagtgggaagtgga

SEQ ID NO: 119994 - RNA, 22 nt, synthetic construct
  source 1..22: mol_type = other RNA
agtcatcaaaggaaggaatttt

SEQ ID NO: 119995 - RNA, 22 nt, synthetic construct
  source 1..22: mol_type = other RNA
agtcatcacagtccaggaactt

SEQ ID NO: 119996 - RNA, 22 nt, synthetic construct
  source 1..22: mol_type = other RNA
agtcatcattattagcaaacat

SEQ ID NO: 119997 - RNA, 22 nt, synthetic construct
  source 1..22: mol_type = other RNA
agtcatccactgcacagtatgc

SEQ ID NO: 119998 - RNA, 22 nt, synthetic construct
  source 1..22: mol_type = other RNA
agtcatcctcaacaagagagga

SEQ ID NO: 119999 - RNA, 22 nt, synthetic construct
  source 1..22: mol_type = other RNA
agtcatctggtcctgagctttc

SEQ ID NO: 120000 - RNA, 22 nt, synthetic construct
  source 1..22: mol_type = other RNA
agtcatgacctgctttcttggg

SEQ ID NO: 120001 - RNA, 22 nt, synthetic construct
  source 1..22: mol_type = other RNA
agtcatgtggggactttgtggc

SEQ ID NO: 120002 - RNA, 22 nt, synthetic construct
  source 1..22: mol_type = other RNA
agtcattcaggtctatgtgaca

SEQ ID NO: 120003 - RNA, 22 nt, synthetic construct
  source 1..22: mol_type = other RNA
agtcattccgctaaacatttta

SEQ ID NO: 120004 - RNA, 22 nt, synthetic construct
  source 1..22: mol_type = other RNA
agtcattgaaactcaatgttgg

SEQ ID NO: 120005 - RNA, 22 nt, synthetic construct
  source 1..22: mol_type = other RNA
agtcatttgagcccaggaggtt

SEQ ID NO: 120006 - RNA, 22 nt, synthetic construct
  source 1..22: mol_type = other RNA
agtcatttgatcttttttatgc

SEQ ID NO: 120007 - RNA, 22 nt, synthetic construct
  source 1..22: mol_type = other RNA
agtccaaccaatcgcagggcca

SEQ ID NO: 120008 - RNA, 22 nt, synthetic construct
  source 1..22: mol_type = other RNA
agtccacagatctttttgtgta

SEQ ID NO: 120009 - RNA, 22 nt, synthetic construct
  source 1..22: mol_type = other RNA
agtccactcacctgtcatgtca

SEQ ID NO: 120010 - RNA, 22 nt, synthetic construct
  source 1..22: mol_type = other RNA
agtccactttccatcttaggcc

SEQ ID NO: 120011 - RNA, 22 nt, synthetic construct
  source 1..22: mol_type = other RNA
agtccagaggtgagctttttct

SEQ ID NO: 120012 - RNA, 22 nt, synthetic construct
  source 1..22: mol_type = other RNA
agtccagatattatcctccaat

SEQ ID NO: 120013 - RNA, 22 nt, synthetic construct
  source 1..22: mol_type = other RNA
agtccagcaccacccttgatgt

SEQ ID NO: 120014 - RNA, 22 nt, synthetic construct
  source 1..22: mol_type = other RNA
agtccagctttctaattctgac

SEQ ID NO: 120015 - RNA, 22 nt, synthetic construct
  source 1..22: mol_type = other RNA
agtccaggaacttacagtaaga

SEQ ID NO: 120016 - RNA, 22 nt, synthetic construct
  source 1..22: mol_type = other RNA
agtccagtcctgctaacacctt

SEQ ID NO: 120017 - RNA, 22 nt, synthetic construct
  source 1..22: mol_type = other RNA
agtccatgaaacttatttccag

SEQ ID NO: 120018 - RNA, 22 nt, synthetic construct
  source 1..22: mol_type = other RNA
agtccatgaagaaaacactcca

SEQ ID NO: 120019 - RNA, 22 nt, synthetic construct
  source 1..22: mol_type = other RNA
agtcccaaatgggagcatgcac

SEQ ID NO: 120020 - RNA, 22 nt, synthetic construct
  source 1..22: mol_type = other RNA
agtcccactgacagtggacaaa

SEQ ID NO: 120021 - RNA, 22 nt, synthetic construct
  source 1..22: mol_type = other RNA
agtcccagttcaaggtgttagc

SEQ ID NO: 120022 - RNA, 22 nt, synthetic construct
  source 1..22: mol_type = other RNA
agtcccatcttccatacgaaag

SEQ ID NO: 120023 - RNA, 22 nt, synthetic construct
  source 1..22: mol_type = other RNA
agtccccaactgcaaaactttc

SEQ ID NO: 120024 - RNA, 22 nt, synthetic construct
  source 1..22: mol_type = other RNA
agtccccacatgactggccatc

SEQ ID NO: 120025 - RNA, 22 nt, synthetic construct
  source 1..22: mol_type = other RNA
agtccccggtctttcctgatca

SEQ ID NO: 120026 - RNA, 22 nt, synthetic construct
  source 1..22: mol_type = other RNA
agtcccctagtggatgctgggg

SEQ ID NO: 120027 - RNA, 22 nt, synthetic construct
  source 1..22: mol_type = other RNA
agtcccctgtaattacatactt

SEQ ID NO: 120028 - RNA, 22 nt, synthetic construct
  source 1..22: mol_type = other RNA
agtcccggaagctgggctagag

SEQ ID NO: 120029 - RNA, 22 nt, synthetic construct
  source 1..22: mol_type = other RNA
agtccctaacagtctcgtgaat

SEQ ID NO: 120030 - RNA, 22 nt, synthetic construct
  source 1..22: mol_type = other RNA
agtccctagtgtctccataccc

SEQ ID NO: 120031 - RNA, 22 nt, synthetic construct
  source 1..22: mol_type = other RNA
agtccctcaccttctgctgggc

SEQ ID NO: 120032 - RNA, 22 nt, synthetic construct
  source 1..22: mol_type = other RNA
agtccctcctttctagaatgca

SEQ ID NO: 120033 - RNA, 22 nt, synthetic construct
  source 1..22: mol_type = other RNA
agtccctgctacttgtggggct

SEQ ID NO: 120034 - RNA, 22 nt, synthetic construct
  source 1..22: mol_type = other RNA
agtccctgctttcagttctttc

SEQ ID NO: 120035 - RNA, 22 nt, synthetic construct
  source 1..22: mol_type = other RNA
agtcccttgcctgacagcaaat

SEQ ID NO: 120036 - RNA, 22 nt, synthetic construct
  source 1..22: mol_type = other RNA
agtccgcggctgggctttctcc

SEQ ID NO: 120037 - RNA, 22 nt, synthetic construct
  source 1..22: mol_type = other RNA
agtccgtgcatgcctctgttac

SEQ ID NO: 120038 - RNA, 22 nt, synthetic construct
  source 1..22: mol_type = other RNA
agtcctcaatcatgtcaagaat

SEQ ID NO: 120039 - RNA, 22 nt, synthetic construct
  source 1..22: mol_type = other RNA
agtcctctactttcacataagg

SEQ ID NO: 120040 - RNA, 22 nt, synthetic construct
  source 1..22: mol_type = other RNA
agtcctctcactccaaagcaaa

SEQ ID NO: 120041 - RNA, 22 nt, synthetic construct
  source 1..22: mol_type = other RNA
agtcctgaaaattccttcccct

SEQ ID NO: 120042 - RNA, 22 nt, synthetic construct
  source 1..22: mol_type = other RNA
agtcctgagggtgagaccacca

SEQ ID NO: 120043 - RNA, 22 nt, synthetic construct
  source 1..22: mol_type = other RNA
agtcctgccttggcctccccaa

SEQ ID NO: 120044 - RNA, 22 nt, synthetic construct
  source 1..22: mol_type = other RNA
agtcctgctaacaccttgaact

SEQ ID NO: 120045 - RNA, 22 nt, synthetic construct
  source 1..22: mol_type = other RNA
agtcctgtcagtttctgattta

SEQ ID NO: 120046 - RNA, 22 nt, synthetic construct
  source 1..22: mol_type = other RNA
agtcctgtgtttctgctattct

SEQ ID NO: 120047 - RNA, 22 nt, synthetic construct
  source 1..22: mol_type = other RNA
agtcctgttcttttgtaatcta

SEQ ID NO: 120048 - RNA, 22 nt, synthetic construct
  source 1..22: mol_type = other RNA
agtccttaccactgaagtgttg

SEQ ID NO: 120049 - RNA, 22 nt, synthetic construct
  source 1..22: mol_type = other RNA
agtccttccagtatgatgccac

SEQ ID NO: 120050 - RNA, 22 nt, synthetic construct
  source 1..22: mol_type = other RNA
agtccttgtgatctatgcatac

SEQ ID NO: 120051 - RNA, 22 nt, synthetic construct
  source 1..22: mol_type = other RNA
agtcctttccagaggttctttt

SEQ ID NO: 120052 - RNA, 22 nt, synthetic construct
  source 1..22: mol_type = other RNA
agtcctttcttggtctgcagac

SEQ ID NO: 120053 - RNA, 22 nt, synthetic construct
  source 1..22: mol_type = other RNA
agtcctttgggaggtcaaggca

SEQ ID NO: 120054 - RNA, 22 nt, synthetic construct
  source 1..22: mol_type = other RNA
agtcctttgtgtcaagtacaac

SEQ ID NO: 120055 - RNA, 22 nt, synthetic construct
  source 1..22: mol_type = other RNA
agtcgccatacctggtccttaa

SEQ ID NO: 120056 - RNA, 22 nt, synthetic construct
  source 1..22: mol_type = other RNA
agtcgcttgaacctgaaaaacg

SEQ ID NO: 120057 - RNA, 22 nt, synthetic construct
  source 1..22: mol_type = other RNA
agtcggttcttcaccgtgcaac

SEQ ID NO: 120058 - RNA, 22 nt, synthetic construct
  source 1..22: mol_type = other RNA
agtctaaccattaacagctcag

SEQ ID NO: 120059 - RNA, 22 nt, synthetic construct
  source 1..22: mol_type = other RNA
agtctagccaagggtttgtcaa

SEQ ID NO: 120060 - RNA, 22 nt, synthetic construct
  source 1..22: mol_type = other RNA
agtctaggaaaagacttgaggt

SEQ ID NO: 120061 - RNA, 22 nt, synthetic construct
  source 1..22: mol_type = other RNA
agtctagtccatgaagaaaaca

SEQ ID NO: 120062 - RNA, 22 nt, synthetic construct
  source 1..22: mol_type = other RNA
agtctatctttgggaaaatctc

SEQ ID NO: 120063 - RNA, 22 nt, synthetic construct
  source 1..22: mol_type = other RNA
agtctatgctcttggtttcttc

SEQ ID NO: 120064 - RNA, 22 nt, synthetic construct
  source 1..22: mol_type = other RNA
agtctatttctgaacaaatatc

SEQ ID NO: 120065 - RNA, 22 nt, synthetic construct
  source 1..22: mol_type = other RNA
agtctcaacctactttaaatca

SEQ ID NO: 120066 - RNA, 22 nt, synthetic construct
  source 1..22: mol_type = other RNA
agtctcacgatactttttattt

SEQ ID NO: 120067 - RNA, 22 nt, synthetic construct
  source 1..22: mol_type = other RNA
agtctcatctgtcaaaaagaga

SEQ ID NO: 120068 - RNA, 22 nt, synthetic construct
  source 1..22: mol_type = other RNA
agtctcatgcaattccccagcc

SEQ ID NO: 120069 - RNA, 22 nt, synthetic construct
  source 1..22: mol_type = other RNA
agtctccaatcctcagccccct

SEQ ID NO: 120070 - RNA, 22 nt, synthetic construct
  source 1..22: mol_type = other RNA
agtctccatacaaggagaccta

SEQ ID NO: 120071 - RNA, 22 nt, synthetic construct
  source 1..22: mol_type = other RNA
agtctcccccaggtggttctgc

SEQ ID NO: 120072 - RNA, 22 nt, synthetic construct
  source 1..22: mol_type = other RNA
agtctccctaaccaggcccggg

SEQ ID NO: 120073 - RNA, 22 nt, synthetic construct
  source 1..22: mol_type = other RNA
agtctcctatattgtcaatggg

SEQ ID NO: 120074 - RNA, 22 nt, synthetic construct
  source 1..22: mol_type = other RNA
agtctcgaaaaggaatggaatt

SEQ ID NO: 120075 - RNA, 22 nt, synthetic construct
  source 1..22: mol_type = other RNA
agtctcgaccccctgggctcaa

SEQ ID NO: 120076 - RNA, 22 nt, synthetic construct
  source 1..22: mol_type = other RNA
agtctcgctctgtcgcccaggc

SEQ ID NO: 120077 - RNA, 22 nt, synthetic construct
  source 1..22: mol_type = other RNA
agtctcgtgaatttggtattct

SEQ ID NO: 120078 - RNA, 22 nt, synthetic construct
  source 1..22: mol_type = other RNA
agtctctacccagcactctgaa

SEQ ID NO: 120079 - RNA, 22 nt, synthetic construct
  source 1..22: mol_type = other RNA
agtctctgcaacatttgttgca

SEQ ID NO: 120080 - RNA, 22 nt, synthetic construct
  source 1..22: mol_type = other RNA
agtctctgcagagcaggctcca

SEQ ID NO: 120081 - RNA, 22 nt, synthetic construct
  source 1..22: mol_type = other RNA
agtctctgctcactgcaacctt

SEQ ID NO: 120082 - RNA, 22 nt, synthetic construct
  source 1..22: mol_type = other RNA
agtctcttaagaccacaaggat

SEQ ID NO: 120083 - RNA, 22 nt, synthetic construct
  source 1..22: mol_type = other RNA
agtctcttcctgtatatctcct

SEQ ID NO: 120084 - RNA, 22 nt, synthetic construct
  source 1..22: mol_type = other RNA
agtctgaaagcttctgagcagt

SEQ ID NO: 120085 - RNA, 22 nt, synthetic construct
  source 1..22: mol_type = other RNA
agtctgacatactgtcacaggc

SEQ ID NO: 120086 - RNA, 22 nt, synthetic construct
  source 1..22: mol_type = other RNA
agtctgacttctctcagaggga

SEQ ID NO: 120087 - RNA, 22 nt, synthetic construct
  source 1..22: mol_type = other RNA
agtctgcagaccaagaaaggac

SEQ ID NO: 120088 - RNA, 22 nt, synthetic construct
  source 1..22: mol_type = other RNA
agtctgcaggcagaatgtgacc

SEQ ID NO: 120089 - RNA, 22 nt, synthetic construct
  source 1..22: mol_type = other RNA
agtctgcccatcctatctaagc

SEQ ID NO: 120090 - RNA, 22 nt, synthetic construct
  source 1..22: mol_type = other RNA
agtctgtaagcacctgtataaa

SEQ ID NO: 120091 - RNA, 22 nt, synthetic construct
  source 1..22: mol_type = other RNA
agtctgtagcttcacgtgcatt

SEQ ID NO: 120092 - RNA, 22 nt, synthetic construct
  source 1..22: mol_type = other RNA
agtctgtagggtgactagtgtg

SEQ ID NO: 120093 - RNA, 22 nt, synthetic construct
  source 1..22: mol_type = other RNA
agtctgtcctcgtaaaagctaa

SEQ ID NO: 120094 - RNA, 22 nt, synthetic construct
  source 1..22: mol_type = other RNA
agtctgtgctctgtatttaatc

SEQ ID NO: 120095 - RNA, 22 nt, synthetic construct
  source 1..22: mol_type = other RNA
agtctgtgcttaaggaaatgga

SEQ ID NO: 120096 - RNA, 22 nt, synthetic construct
  source 1..22: mol_type = other RNA
agtctgtttgccatcttcaaga

SEQ ID NO: 120097 - RNA, 22 nt, synthetic construct
  source 1..22: mol_type = other RNA
agtcttaaccattgagccaaag

SEQ ID NO: 120098 - RNA, 22 nt, synthetic construct
  source 1..22: mol_type = other RNA
agtcttagctcttaagcttagg

SEQ ID NO: 120099 - RNA, 22 nt, synthetic construct
  source 1..22: mol_type = other RNA
agtcttcaggtctctctgaaat

SEQ ID NO: 120100 - RNA, 22 nt, synthetic construct
  source 1..22: mol_type = other RNA
agtcttccaaaatattgaagag

SEQ ID NO: 120101 - RNA, 22 nt, synthetic construct
  source 1..22: mol_type = other RNA
agtcttccaattgcagaaaaat

SEQ ID NO: 120102 - RNA, 22 nt, synthetic construct
  source 1..22: mol_type = other RNA
agtcttccattttagatcaagt

SEQ ID NO: 120103 - RNA, 22 nt, synthetic construct
  source 1..22: mol_type = other RNA
agtcttccgtctcaagattgtg

SEQ ID NO: 120104 - RNA, 22 nt, synthetic construct
  source 1..22: mol_type = other RNA
agtcttctactgtgaattcact

SEQ ID NO: 120105 - RNA, 22 nt, synthetic construct
  source 1..22: mol_type = other RNA
agtcttctcagatctgttgcag

SEQ ID NO: 120106 - RNA, 22 nt, synthetic construct
  source 1..22: mol_type = other RNA
agtcttctcatacagattttat

SEQ ID NO: 120107 - RNA, 22 nt, synthetic construct
  source 1..22: mol_type = other RNA
agtcttcttctaagctaagagt

SEQ ID NO: 120108 - RNA, 22 nt, synthetic construct
  source 1..22: mol_type = other RNA
agtcttgctggaagttggccca

SEQ ID NO: 120109 - RNA, 22 nt, synthetic construct
  source 1..22: mol_type = other RNA
agtcttggtagtttgcacgttt

SEQ ID NO: 120110 - RNA, 22 nt, synthetic construct
  source 1..22: mol_type = other RNA
agtcttgtcataacagtattgt

SEQ ID NO: 120111 - RNA, 22 nt, synthetic construct
  source 1..22: mol_type = other RNA
agtcttgtcttttctttttctt

SEQ ID NO: 120112 - RNA, 22 nt, synthetic construct
  source 1..22: mol_type = other RNA
agtcttgtttacccagtgtgtt

SEQ ID NO: 120113 - RNA, 22 nt, synthetic construct
  source 1..22: mol_type = other RNA
agtctttggcccattttcgaat

SEQ ID NO: 120114 - RNA, 22 nt, synthetic construct
  source 1..22: mol_type = other RNA
agtctttgggtaatttatctcc

SEQ ID NO: 120115 - RNA, 22 nt, synthetic construct
  source 1..22: mol_type = other RNA
agtctttggtgatcctaagcca

SEQ ID NO: 120116 - RNA, 22 nt, synthetic construct
  source 1..22: mol_type = other RNA
agtcttttcctaccctgaggat

SEQ ID NO: 120117 - RNA, 22 nt, synthetic construct
  source 1..22: mol_type = other RNA
agtcttttcctagactgccagg

SEQ ID NO: 120118 - RNA, 22 nt, synthetic construct
  source 1..22: mol_type = other RNA
agtgaaaaatgacctaaaatct

SEQ ID NO: 120119 - RNA, 22 nt, synthetic construct
  source 1..22: mol_type = other RNA
agtgaaaacacaaactgcagaa

SEQ ID NO: 120120 - RNA, 22 nt, synthetic construct
  source 1..22: mol_type = other RNA
agtgaaaactaaggtcaagaga

SEQ ID NO: 120121 - RNA, 22 nt, synthetic construct
  source 1..22: mol_type = other RNA
agtgaaaagaaacaagtgaaat

SEQ ID NO: 120122 - RNA, 22 nt, synthetic construct
  source 1..22: mol_type = other RNA
agtgaaaaggcaaaccacacag

SEQ ID NO: 120123 - RNA, 22 nt, synthetic construct
  source 1..22: mol_type = other RNA
agtgaaactctggctcagaaac

SEQ ID NO: 120124 - RNA, 22 nt, synthetic construct
  source 1..22: mol_type = other RNA
agtgaaaggcaaaggaaaaaac

SEQ ID NO: 120125 - RNA, 22 nt, synthetic construct
  source 1..22: mol_type = other RNA
agtgaaagtctccctaaccagg

SEQ ID NO: 120126 - RNA, 22 nt, synthetic construct
  source 1..22: mol_type = other RNA
agtgaaatagttggtcagaaaa

SEQ ID NO: 120127 - RNA, 22 nt, synthetic construct
  source 1..22: mol_type = other RNA
agtgaaatcataaaatatgtcc

SEQ ID NO: 120128 - RNA, 22 nt, synthetic construct
  source 1..22: mol_type = other RNA
agtgaaatgatttcaagtaaca

SEQ ID NO: 120129 - RNA, 22 nt, synthetic construct
  source 1..22: mol_type = other RNA
agtgaacaggcaaccttgggag

SEQ ID NO: 120130 - RNA, 22 nt, synthetic construct
  source 1..22: mol_type = other RNA
agtgaacatgggaatgcatata

SEQ ID NO: 120131 - RNA, 22 nt, synthetic construct
  source 1..22: mol_type = other RNA
agtgaaccaaaaaccacatttc

SEQ ID NO: 120132 - RNA, 22 nt, synthetic construct
  source 1..22: mol_type = other RNA
agtgaactccagtctgggcaac

SEQ ID NO: 120133 - RNA, 22 nt, synthetic construct
  source 1..22: mol_type = other RNA
agtgaagaaacctttctcaaag

SEQ ID NO: 120134 - RNA, 22 nt, synthetic construct
  source 1..22: mol_type = other RNA
agtgaagatgctgaacttgtca

SEQ ID NO: 120135 - RNA, 22 nt, synthetic construct
  source 1..22: mol_type = other RNA
agtgaagcagagagagaagatg

SEQ ID NO: 120136 - RNA, 22 nt, synthetic construct
  source 1..22: mol_type = other RNA
agtgaagcccagagaggctagg

SEQ ID NO: 120137 - RNA, 22 nt, synthetic construct
  source 1..22: mol_type = other RNA
agtgaagctggacccttacctt

SEQ ID NO: 120138 - RNA, 22 nt, synthetic construct
  source 1..22: mol_type = other RNA
agtgaagcttcaaaccactatc

SEQ ID NO: 120139 - RNA, 22 nt, synthetic construct
  source 1..22: mol_type = other RNA
agtgaagtcaagatgaatctgc

SEQ ID NO: 120140 - RNA, 22 nt, synthetic construct
  source 1..22: mol_type = other RNA
agtgaagtcaatttcagatctc

SEQ ID NO: 120141 - RNA, 22 nt, synthetic construct
  source 1..22: mol_type = other RNA
agtgaagtcatctggtcctgag

SEQ ID NO: 120142 - RNA, 22 nt, synthetic construct
  source 1..22: mol_type = other RNA
agtgaagtcccatcttccatac

SEQ ID NO: 120143 - RNA, 22 nt, synthetic construct
  source 1..22: mol_type = other RNA
agtgaatatagctaagaaacag

SEQ ID NO: 120144 - RNA, 22 nt, synthetic construct
  source 1..22: mol_type = other RNA
agtgaatatcatttgaatgatg

SEQ ID NO: 120145 - RNA, 22 nt, synthetic construct
  source 1..22: mol_type = other RNA
agtgaatcactacagcatatta

SEQ ID NO: 120146 - RNA, 22 nt, synthetic construct
  source 1..22: mol_type = other RNA
agtgaatgagaccaaatgcata

SEQ ID NO: 120147 - RNA, 22 nt, synthetic construct
  source 1..22: mol_type = other RNA
agtgaatggggtaattttgggg

SEQ ID NO: 120148 - RNA, 22 nt, synthetic construct
  source 1..22: mol_type = other RNA
agtgaattcacagtagaagact

SEQ ID NO: 120149 - RNA, 22 nt, synthetic construct
  source 1..22: mol_type = other RNA
agtgaattctgacttagtgagg

SEQ ID NO: 120150 - RNA, 22 nt, synthetic construct
  source 1..22: mol_type = other RNA
agtgacacctgaggggtcttat

SEQ ID NO: 120151 - RNA, 22 nt, synthetic construct
  source 1..22: mol_type = other RNA
agtgacagatgagaaatacttg

SEQ ID NO: 120152 - RNA, 22 nt, synthetic construct
  source 1..22: mol_type = other RNA
agtgacagctgagtagcgcttt

SEQ ID NO: 120153 - RNA, 22 nt, synthetic construct
  source 1..22: mol_type = other RNA
agtgacagttctgtgaatttga

SEQ ID NO: 120154 - RNA, 22 nt, synthetic construct
  source 1..22: mol_type = other RNA
agtgacatatgccggctgttag

SEQ ID NO: 120155 - RNA, 22 nt, synthetic construct
  source 1..22: mol_type = other RNA
agtgaccacagtttgaaacttt

SEQ ID NO: 120156 - RNA, 22 nt, synthetic construct
  source 1..22: mol_type = other RNA
agtgaccagtgtgatgggggta

SEQ ID NO: 120157 - RNA, 22 nt, synthetic construct
  source 1..22: mol_type = other RNA
agtgaccctgagtccagaggtg

SEQ ID NO: 120158 - RNA, 22 nt, synthetic construct
  source 1..22: mol_type = other RNA
agtgaccctttgaagtatgtaa

SEQ ID NO: 120159 - RNA, 22 nt, synthetic construct
  source 1..22: mol_type = other RNA
agtgactccaagcacacagttt

SEQ ID NO: 120160 - RNA, 22 nt, synthetic construct
  source 1..22: mol_type = other RNA
agtgactggcttaatgcatata

SEQ ID NO: 120161 - RNA, 22 nt, synthetic construct
  source 1..22: mol_type = other RNA
agtgacttaagcaacagaaatt

SEQ ID NO: 120162 - RNA, 22 nt, synthetic construct
  source 1..22: mol_type = other RNA
agtgacttctggatgtgtatga

SEQ ID NO: 120163 - RNA, 22 nt, synthetic construct
  source 1..22: mol_type = other RNA
agtgactttactgttctccagt

SEQ ID NO: 120164 - RNA, 22 nt, synthetic construct
  source 1..22: mol_type = other RNA
agtgagaggactgcctggtcct

SEQ ID NO: 120165 - RNA, 22 nt, synthetic construct
  source 1..22: mol_type = other RNA
agtgagatgggaagaaaaaata

SEQ ID NO: 120166 - RNA, 22 nt, synthetic construct
  source 1..22: mol_type = other RNA
agtgagcagaaggaggaaaata

SEQ ID NO: 120167 - RNA, 22 nt, synthetic construct
  source 1..22: mol_type = other RNA
agtgagcatgctgcaactgaga

SEQ ID NO: 120168 - RNA, 22 nt, synthetic construct
  source 1..22: mol_type = other RNA
agtgagccacagctacactcaa

SEQ ID NO: 120169 - RNA, 22 nt, synthetic construct
  source 1..22: mol_type = other RNA
agtgagcccagagatcccacca

SEQ ID NO: 120170 - RNA, 22 nt, synthetic construct
  source 1..22: mol_type = other RNA
agtgagctccagcctgggcgac

SEQ ID NO: 120171 - RNA, 22 nt, synthetic construct
  source 1..22: mol_type = other RNA
agtgaggacgctgatgacagtt

SEQ ID NO: 120172 - RNA, 22 nt, synthetic construct
  source 1..22: mol_type = other RNA
agtgagggaggccatcttcatt

SEQ ID NO: 120173 - RNA, 22 nt, synthetic construct
  source 1..22: mol_type = other RNA
agtgagtagaagagtaatggtt

SEQ ID NO: 120174 - RNA, 22 nt, synthetic construct
  source 1..22: mol_type = other RNA
agtgagtagggaaggtgcccgc

SEQ ID NO: 120175 - RNA, 22 nt, synthetic construct
  source 1..22: mol_type = other RNA
agtgagtgatgaaaagagcaca

SEQ ID NO: 120176 - RNA, 22 nt, synthetic construct
  source 1..22: mol_type = other RNA
agtgagttcaaatgttaagccc

SEQ ID NO: 120177 - RNA, 22 nt, synthetic construct
  source 1..22: mol_type = other RNA
agtgagtttgacctgtaatttt

SEQ ID NO: 120178 - RNA, 22 nt, synthetic construct
  source 1..22: mol_type = other RNA
agtgataccataaagtcagagg

SEQ ID NO: 120179 - RNA, 22 nt, synthetic construct
  source 1..22: mol_type = other RNA
agtgatgaaaagagcacaccaa

SEQ ID NO: 120180 - RNA, 22 nt, synthetic construct
  source 1..22: mol_type = other RNA
agtgatgcaactcctgggctca

SEQ ID NO: 120181 - RNA, 22 nt, synthetic construct
  source 1..22: mol_type = other RNA
agtgatggaggtggaactctgt

SEQ ID NO: 120182 - RNA, 22 nt, synthetic construct
  source 1..22: mol_type = other RNA
agtgatgggagatggacactgc

SEQ ID NO: 120183 - RNA, 22 nt, synthetic construct
  source 1..22: mol_type = other RNA
agtgatgtcttttgaagaagtt

SEQ ID NO: 120184 - RNA, 22 nt, synthetic construct
  source 1..22: mol_type = other RNA
agtgatgttgagtatcttttca

SEQ ID NO: 120185 - RNA, 22 nt, synthetic construct
  source 1..22: mol_type = other RNA
agtgattcacttttgagttcag

SEQ ID NO: 120186 - RNA, 22 nt, synthetic construct
  source 1..22: mol_type = other RNA
agtgattggatatttgcagtag

SEQ ID NO: 120187 - RNA, 22 nt, synthetic construct
  source 1..22: mol_type = other RNA
agtgattttaccaaggctaagt

SEQ ID NO: 120188 - RNA, 22 nt, synthetic construct
  source 1..22: mol_type = other RNA
agtgcaaacctcctggttttga

SEQ ID NO: 120189 - RNA, 22 nt, synthetic construct
  source 1..22: mol_type = other RNA
agtgcaatggggcaatctcagc

SEQ ID NO: 120190 - RNA, 22 nt, synthetic construct
  source 1..22: mol_type = other RNA
agtgcaatggtgggatctctgg

SEQ ID NO: 120191 - RNA, 22 nt, synthetic construct
  source 1..22: mol_type = other RNA
agtgcacaatgcagtattgtta

SEQ ID NO: 120192 - RNA, 22 nt, synthetic construct
  source 1..22: mol_type = other RNA
agtgcacattccttcttcacac

SEQ ID NO: 120193 - RNA, 22 nt, synthetic construct
  source 1..22: mol_type = other RNA
agtgcagcaagcagtaaatata

SEQ ID NO: 120194 - RNA, 22 nt, synthetic construct
  source 1..22: mol_type = other RNA
agtgcaggagtttgagactgca

SEQ ID NO: 120195 - RNA, 22 nt, synthetic construct
  source 1..22: mol_type = other RNA
agtgcagtatcttgaagaaacc

SEQ ID NO: 120196 - RNA, 22 nt, synthetic construct
  source 1..22: mol_type = other RNA
agtgcagtatgtaggaaacttt

SEQ ID NO: 120197 - RNA, 22 nt, synthetic construct
  source 1..22: mol_type = other RNA
agtgcagtggtgtggtcttgtc

SEQ ID NO: 120198 - RNA, 22 nt, synthetic construct
  source 1..22: mol_type = other RNA
agtgcataccaccacattcggc

SEQ ID NO: 120199 - RNA, 22 nt, synthetic construct
  source 1..22: mol_type = other RNA
agtgcatttcggctctgtgctg

SEQ ID NO: 120200 - RNA, 22 nt, synthetic construct
  source 1..22: mol_type = other RNA
agtgccaacacatggggcatta

SEQ ID NO: 120201 - RNA, 22 nt, synthetic construct
  source 1..22: mol_type = other RNA
agtgccagccacccttgctgct

SEQ ID NO: 120202 - RNA, 22 nt, synthetic construct
  source 1..22: mol_type = other RNA
agtgcccacctgacaagtagta

SEQ ID NO: 120203 - RNA, 22 nt, synthetic construct
  source 1..22: mol_type = other RNA
agtgcccattaacagatgaatg

SEQ ID NO: 120204 - RNA, 22 nt, synthetic construct
  source 1..22: mol_type = other RNA
agtgccgcgttttttgtccacc

SEQ ID NO: 120205 - RNA, 22 nt, synthetic construct
  source 1..22: mol_type = other RNA
agtgccttcagaaggagtccag

SEQ ID NO: 120206 - RNA, 22 nt, synthetic construct
  source 1..22: mol_type = other RNA
agtgccttcagctatggtgtta

SEQ ID NO: 120207 - RNA, 22 nt, synthetic construct
  source 1..22: mol_type = other RNA
agtgcgagtgtgaacgatggtt

SEQ ID NO: 120208 - RNA, 22 nt, synthetic construct
  source 1..22: mol_type = other RNA
agtgctccatagcttcctaaga

SEQ ID NO: 120209 - RNA, 22 nt, synthetic construct
  source 1..22: mol_type = other RNA
agtgctctaccctttccaaatt

SEQ ID NO: 120210 - RNA, 22 nt, synthetic construct
  source 1..22: mol_type = other RNA
agtgctctcccccgaatccttt

SEQ ID NO: 120211 - RNA, 22 nt, synthetic construct
  source 1..22: mol_type = other RNA
agtgctcttctgatcacagaag

SEQ ID NO: 120212 - RNA, 22 nt, synthetic construct
  source 1..22: mol_type = other RNA
agtgctgaaagctagaagacct

SEQ ID NO: 120213 - RNA, 22 nt, synthetic construct
  source 1..22: mol_type = other RNA
agtgctgagattacagatgtga

SEQ ID NO: 120214 - RNA, 22 nt, synthetic construct
  source 1..22: mol_type = other RNA
agtgctgcagtatgcatagatc

SEQ ID NO: 120215 - RNA, 22 nt, synthetic construct
  source 1..22: mol_type = other RNA
agtgctgctctgacgtttaaat

SEQ ID NO: 120216 - RNA, 22 nt, synthetic construct
  source 1..22: mol_type = other RNA
agtgctgggctagggaagcagt

SEQ ID NO: 120217 - RNA, 22 nt, synthetic construct
  source 1..22: mol_type = other RNA
agtgctgggtagagactggatc

SEQ ID NO: 120218 - RNA, 22 nt, synthetic construct
  source 1..22: mol_type = other RNA
agtgctgtgattgcaggtgtgg

SEQ ID NO: 120219 - RNA, 22 nt, synthetic construct
  source 1..22: mol_type = other RNA
agtgctgtgccagtgcaaacct

SEQ ID NO: 120220 - RNA, 22 nt, synthetic construct
  source 1..22: mol_type = other RNA
agtgctgttgaggctgggccct

SEQ ID NO: 120221 - RNA, 22 nt, synthetic construct
  source 1..22: mol_type = other RNA
agtgcttagcgctggaggtcgg

SEQ ID NO: 120222 - RNA, 22 nt, synthetic construct
  source 1..22: mol_type = other RNA
agtgcttctagtaacttggtcg

SEQ ID NO: 120223 - RNA, 22 nt, synthetic construct
  source 1..22: mol_type = other RNA
agtgcttgcagccttccctgaa

SEQ ID NO: 120224 - RNA, 22 nt, synthetic construct
  source 1..22: mol_type = other RNA
agtgctttttactttgcgaaac

SEQ ID NO: 120225 - RNA, 22 nt, synthetic construct
  source 1..22: mol_type = other RNA
agtggaaaaactgcagcaatta

SEQ ID NO: 120226 - RNA, 22 nt, synthetic construct
  source 1..22: mol_type = other RNA
agtggaaacaactcaaacgtcc

SEQ ID NO: 120227 - RNA, 22 nt, synthetic construct
  source 1..22: mol_type = other RNA
agtggaaagagccagcctgatg

SEQ ID NO: 120228 - RNA, 22 nt, synthetic construct
  source 1..22: mol_type = other RNA
agtggaagaatcaggtctcttt

SEQ ID NO: 120229 - RNA, 22 nt, synthetic construct
  source 1..22: mol_type = other RNA
agtggaatcattccgtatatat

SEQ ID NO: 120230 - RNA, 22 nt, synthetic construct
  source 1..22: mol_type = other RNA
agtggactatgtaggcacattc

SEQ ID NO: 120231 - RNA, 22 nt, synthetic construct
  source 1..22: mol_type = other RNA
agtggactgtgagggagatatt

SEQ ID NO: 120232 - RNA, 22 nt, synthetic construct
  source 1..22: mol_type = other RNA
agtggagaattactaaaattcc

SEQ ID NO: 120233 - RNA, 22 nt, synthetic construct
  source 1..22: mol_type = other RNA
agtggagcctgctctgcagaga

SEQ ID NO: 120234 - RNA, 22 nt, synthetic construct
  source 1..22: mol_type = other RNA
agtggaggggcaggaaaggtgg

SEQ ID NO: 120235 - RNA, 22 nt, synthetic construct
  source 1..22: mol_type = other RNA
agtggagtgcgagtgtgaacga

SEQ ID NO: 120236 - RNA, 22 nt, synthetic construct
  source 1..22: mol_type = other RNA
agtggagtggcatgatctcacg

SEQ ID NO: 120237 - RNA, 22 nt, synthetic construct
  source 1..22: mol_type = other RNA
agtggatcatttgaggtcaaga

SEQ ID NO: 120238 - RNA, 22 nt, synthetic construct
  source 1..22: mol_type = other RNA
agtggatgactaggctcctgag

SEQ ID NO: 120239 - RNA, 22 nt, synthetic construct
  source 1..22: mol_type = other RNA
agtggatgctggggacccctcc

SEQ ID NO: 120240 - RNA, 22 nt, synthetic construct
  source 1..22: mol_type = other RNA
agtggcacaatcatagctcact

SEQ ID NO: 120241 - RNA, 22 nt, synthetic construct
  source 1..22: mol_type = other RNA
agtggcagccccgcttcagttg

SEQ ID NO: 120242 - RNA, 22 nt, synthetic construct
  source 1..22: mol_type = other RNA
agtggcatcatactggaaggac

SEQ ID NO: 120243 - RNA, 22 nt, synthetic construct
  source 1..22: mol_type = other RNA
agtggcatgatctcacgtcacc

SEQ ID NO: 120244 - RNA, 22 nt, synthetic construct
  source 1..22: mol_type = other RNA
agtggccagtgaccagtgtgat

SEQ ID NO: 120245 - RNA, 22 nt, synthetic construct
  source 1..22: mol_type = other RNA
agtggcccccctgaaaaatgag

SEQ ID NO: 120246 - RNA, 22 nt, synthetic construct
  source 1..22: mol_type = other RNA
agtggccctgttggcctggaca

SEQ ID NO: 120247 - RNA, 22 nt, synthetic construct
  source 1..22: mol_type = other RNA
agtggcctaaatcaggatgtct

SEQ ID NO: 120248 - RNA, 22 nt, synthetic construct
  source 1..22: mol_type = other RNA
agtggcgcagccatggctcact

SEQ ID NO: 120249 - RNA, 22 nt, synthetic construct
  source 1..22: mol_type = other RNA
agtggcgctgtttgcctgcgtc

SEQ ID NO: 120250 - RNA, 22 nt, synthetic construct
  source 1..22: mol_type = other RNA
agtggcgtgtgcccaggctgac

SEQ ID NO: 120251 - RNA, 22 nt, synthetic construct
  source 1..22: mol_type = other RNA
agtggctaatgtggcttgcaag

SEQ ID NO: 120252 - RNA, 22 nt, synthetic construct
  source 1..22: mol_type = other RNA
agtggctagacggaaaaacatt

SEQ ID NO: 120253 - RNA, 22 nt, synthetic construct
  source 1..22: mol_type = other RNA
agtggctagtgtgttgactgac

SEQ ID NO: 120254 - RNA, 22 nt, synthetic construct
  source 1..22: mol_type = other RNA
agtggctcacagtgctccatag

SEQ ID NO: 120255 - RNA, 22 nt, synthetic construct
  source 1..22: mol_type = other RNA
agtggctcatacttgctttatt

SEQ ID NO: 120256 - RNA, 22 nt, synthetic construct
  source 1..22: mol_type = other RNA
agtggctgcaccattttttcac

SEQ ID NO: 120257 - RNA, 22 nt, synthetic construct
  source 1..22: mol_type = other RNA
agtggcttcctaactggtctcc

SEQ ID NO: 120258 - RNA, 22 nt, synthetic construct
  source 1..22: mol_type = other RNA
agtgggaagcaaaggattcggg

SEQ ID NO: 120259 - RNA, 22 nt, synthetic construct
  source 1..22: mol_type = other RNA
agtgggaagtggagtgcgagtg

SEQ ID NO: 120260 - RNA, 22 nt, synthetic construct
  source 1..22: mol_type = other RNA
agtgggaccccgtctctgcaaa

SEQ ID NO: 120261 - RNA, 22 nt, synthetic construct
  source 1..22: mol_type = other RNA
agtgggactggagaacagtaaa

SEQ ID NO: 120262 - RNA, 22 nt, synthetic construct
  source 1..22: mol_type = other RNA
agtgggaggaggtcatactgga

SEQ ID NO: 120263 - RNA, 22 nt, synthetic construct
  source 1..22: mol_type = other RNA
agtgggatcaaaccatgttcat

SEQ ID NO: 120264 - RNA, 22 nt, synthetic construct
  source 1..22: mol_type = other RNA
agtgggcaaaaaagtcatgacc

SEQ ID NO: 120265 - RNA, 22 nt, synthetic construct
  source 1..22: mol_type = other RNA
agtgggcccagcagaaggtgag

SEQ ID NO: 120266 - RNA, 22 nt, synthetic construct
  source 1..22: mol_type = other RNA
agtggggcacctaaaaggttgc

SEQ ID NO: 120267 - RNA, 22 nt, synthetic construct
  source 1..22: mol_type = other RNA
agtgggtagaagcagcaagggt

SEQ ID NO: 120268 - RNA, 22 nt, synthetic construct
  source 1..22: mol_type = other RNA
agtgggtcagctagtgtgtctg

SEQ ID NO: 120269 - RNA, 22 nt, synthetic construct
  source 1..22: mol_type = other RNA
agtgggtcgggtgtcagaaacc

SEQ ID NO: 120270 - RNA, 22 nt, synthetic construct
  source 1..22: mol_type = other RNA
agtgggtggatgggtgtagggt

SEQ ID NO: 120271 - RNA, 22 nt, synthetic construct
  source 1..22: mol_type = other RNA
agtgggttcaattatgtggaaa

SEQ ID NO: 120272 - RNA, 22 nt, synthetic construct
  source 1..22: mol_type = other RNA
agtggtaactagatgcctcgaa

SEQ ID NO: 120273 - RNA, 22 nt, synthetic construct
  source 1..22: mol_type = other RNA
agtggtaaggactgaagtcctt

SEQ ID NO: 120274 - RNA, 22 nt, synthetic construct
  source 1..22: mol_type = other RNA
agtggtaaggagccaaacatca

SEQ ID NO: 120275 - RNA, 22 nt, synthetic construct
  source 1..22: mol_type = other RNA
agtggtagttacacaagtgttt

SEQ ID NO: 120276 - RNA, 22 nt, synthetic construct
  source 1..22: mol_type = other RNA
agtggtattctatcatcaagac

SEQ ID NO: 120277 - RNA, 22 nt, synthetic construct
  source 1..22: mol_type = other RNA
agtggtgcaatcacggctgatt

SEQ ID NO: 120278 - RNA, 22 nt, synthetic construct
  source 1..22: mol_type = other RNA
agtggtgcaatgataggtcact

SEQ ID NO: 120279 - RNA, 22 nt, synthetic construct
  source 1..22: mol_type = other RNA
agtggtgcttaattcaaacaaa

SEQ ID NO: 120280 - RNA, 22 nt, synthetic construct
  source 1..22: mol_type = other RNA
agtggtgcttgaactgctggtc

SEQ ID NO: 120281 - RNA, 22 nt, synthetic construct
  source 1..22: mol_type = other RNA
agtggtgcttttgctgcatccc

SEQ ID NO: 120282 - RNA, 22 nt, synthetic construct
  source 1..22: mol_type = other RNA
agtggtggatagagagattcaa

SEQ ID NO: 120283 - RNA, 22 nt, synthetic construct
  source 1..22: mol_type = other RNA
agtggtggtagtaaggatcgtt

SEQ ID NO: 120284 - RNA, 22 nt, synthetic construct
  source 1..22: mol_type = other RNA
agtggtgtggtcttgtctcaac

SEQ ID NO: 120285 - RNA, 22 nt, synthetic construct
  source 1..22: mol_type = other RNA
agtggtgtgtgactgtagtccc

SEQ ID NO: 120286 - RNA, 22 nt, synthetic construct
  source 1..22: mol_type = other RNA
agtggttaggaaaatacatgag

SEQ ID NO: 120287 - RNA, 22 nt, synthetic construct
  source 1..22: mol_type = other RNA
agtggttccatttgttttgtgt

SEQ ID NO: 120288 - RNA, 22 nt, synthetic construct
  source 1..22: mol_type = other RNA
agtggttctgcgtgttatttta

SEQ ID NO: 120289 - RNA, 22 nt, synthetic construct
  source 1..22: mol_type = other RNA
agtggttgacccataaactgaa

SEQ ID NO: 120290 - RNA, 22 nt, synthetic construct
  source 1..22: mol_type = other RNA
agtggttggaaaacttttaact

SEQ ID NO: 120291 - RNA, 22 nt, synthetic construct
  source 1..22: mol_type = other RNA
agtggttgtgcttcgaggtcgc

SEQ ID NO: 120292 - RNA, 22 nt, synthetic construct
  source 1..22: mol_type = other RNA
agtggttgtggaattaactcca

SEQ ID NO: 120293 - RNA, 22 nt, synthetic construct
  source 1..22: mol_type = other RNA
agtggtttgaagcttcacttct

SEQ ID NO: 120294 - RNA, 22 nt, synthetic construct
  source 1..22: mol_type = other RNA
agtgtaaagtttctctctccct

SEQ ID NO: 120295 - RNA, 22 nt, synthetic construct
  source 1..22: mol_type = other RNA
agtgtaacatacacatcagatt

SEQ ID NO: 120296 - RNA, 22 nt, synthetic construct
  source 1..22: mol_type = other RNA
agtgtaaggtgtttggtgaatt

SEQ ID NO: 120297 - RNA, 22 nt, synthetic construct
  source 1..22: mol_type = other RNA
agtgtacaattcggtggcatta

SEQ ID NO: 120298 - RNA, 22 nt, synthetic construct
  source 1..22: mol_type = other RNA
agtgtactagtctccatacaag

SEQ ID NO: 120299 - RNA, 22 nt, synthetic construct
  source 1..22: mol_type = other RNA
agtgtagctgtggctcactcat

SEQ ID NO: 120300 - RNA, 22 nt, synthetic construct
  source 1..22: mol_type = other RNA
agtgtagtcagacacactagct

SEQ ID NO: 120301 - RNA, 22 nt, synthetic construct
  source 1..22: mol_type = other RNA
agtgtatcagatgcttctagcc

SEQ ID NO: 120302 - RNA, 22 nt, synthetic construct
  source 1..22: mol_type = other RNA
agtgtatgcagggaaatcattc

SEQ ID NO: 120303 - RNA, 22 nt, synthetic construct
  source 1..22: mol_type = other RNA
agtgtattattctaaacacacg

SEQ ID NO: 120304 - RNA, 22 nt, synthetic construct
  source 1..22: mol_type = other RNA
agtgtattgtaccttgatttat

SEQ ID NO: 120305 - RNA, 22 nt, synthetic construct
  source 1..22: mol_type = other RNA
agtgtccatctcccatcactag

SEQ ID NO: 120306 - RNA, 22 nt, synthetic construct
  source 1..22: mol_type = other RNA
agtgtcctcaggctccaggtag

SEQ ID NO: 120307 - RNA, 22 nt, synthetic construct
  source 1..22: mol_type = other RNA
agtgtcctgaatgatttccctg

SEQ ID NO: 120308 - RNA, 22 nt, synthetic construct
  source 1..22: mol_type = other RNA
agtgtcctttgatgcacaaaag

SEQ ID NO: 120309 - RNA, 22 nt, synthetic construct
  source 1..22: mol_type = other RNA
agtgtctaatgggtacagggtt

SEQ ID NO: 120310 - RNA, 22 nt, synthetic construct
  source 1..22: mol_type = other RNA
agtgtctcagcctcccaagtag

SEQ ID NO: 120311 - RNA, 22 nt, synthetic construct
  source 1..22: mol_type = other RNA
agtgtctccataccccctggaa

SEQ ID NO: 120312 - RNA, 22 nt, synthetic construct
  source 1..22: mol_type = other RNA
agtgtctgctacaggggcattc

SEQ ID NO: 120313 - RNA, 22 nt, synthetic construct
  source 1..22: mol_type = other RNA
agtgtcttaatcctattttgtt

SEQ ID NO: 120314 - RNA, 22 nt, synthetic construct
  source 1..22: mol_type = other RNA
agtgtcttagtctgacttctct

SEQ ID NO: 120315 - RNA, 22 nt, synthetic construct
  source 1..22: mol_type = other RNA
agtgtgaaagtattaaaagcac

SEQ ID NO: 120316 - RNA, 22 nt, synthetic construct
  source 1..22: mol_type = other RNA
agtgtgaacgatggtttctgac

SEQ ID NO: 120317 - RNA, 22 nt, synthetic construct
  source 1..22: mol_type = other RNA
agtgtgaagattaagcacatct

SEQ ID NO: 120318 - RNA, 22 nt, synthetic construct
  source 1..22: mol_type = other RNA
agtgtgaataggaaagtgacag

SEQ ID NO: 120319 - RNA, 22 nt, synthetic construct
  source 1..22: mol_type = other RNA
agtgtgaatgaggagtgaattt

SEQ ID NO: 120320 - RNA, 22 nt, synthetic construct
  source 1..22: mol_type = other RNA
agtgtgaccacattcccaaatg

SEQ ID NO: 120321 - RNA, 22 nt, synthetic construct
  source 1..22: mol_type = other RNA
agtgtgagcaaaaatacagctc

SEQ ID NO: 120322 - RNA, 22 nt, synthetic construct
  source 1..22: mol_type = other RNA
agtgtgatgggggtaagattgt

SEQ ID NO: 120323 - RNA, 22 nt, synthetic construct
  source 1..22: mol_type = other RNA
agtgtgcatgtgttgtgcacac

SEQ ID NO: 120324 - RNA, 22 nt, synthetic construct
  source 1..22: mol_type = other RNA
agtgtgcccaaggaaggcaggg

SEQ ID NO: 120325 - RNA, 22 nt, synthetic construct
  source 1..22: mol_type = other RNA
agtgtgctgactagtacgtgca

SEQ ID NO: 120326 - RNA, 22 nt, synthetic construct
  source 1..22: mol_type = other RNA
agtgtgcttgggctcccttcca

SEQ ID NO: 120327 - RNA, 22 nt, synthetic construct
  source 1..22: mol_type = other RNA
agtgtggcaggggctgcatcat

SEQ ID NO: 120328 - RNA, 22 nt, synthetic construct
  source 1..22: mol_type = other RNA
agtgtggctttaaggcgcagac

SEQ ID NO: 120329 - RNA, 22 nt, synthetic construct
  source 1..22: mol_type = other RNA
agtgtggtggtctcaccctcag

SEQ ID NO: 120330 - RNA, 22 nt, synthetic construct
  source 1..22: mol_type = other RNA
agtgtggttcatatttcccttt

SEQ ID NO: 120331 - RNA, 22 nt, synthetic construct
  source 1..22: mol_type = other RNA
agtgtgtccacacaatggtcag

SEQ ID NO: 120332 - RNA, 22 nt, synthetic construct
  source 1..22: mol_type = other RNA
agtgtgtctgactacactgaag

SEQ ID NO: 120333 - RNA, 22 nt, synthetic construct
  source 1..22: mol_type = other RNA
agtgtgttctgccttgaggtga

SEQ ID NO: 120334 - RNA, 22 nt, synthetic construct
  source 1..22: mol_type = other RNA
agtgtgttgactgacataactg

SEQ ID NO: 120335 - RNA, 22 nt, synthetic construct
  source 1..22: mol_type = other RNA
agtgtgtttcgcaaagtaaaaa

SEQ ID NO: 120336 - RNA, 22 nt, synthetic construct
  source 1..22: mol_type = other RNA
agtgtgtttgtttgctagagct

SEQ ID NO: 120337 - RNA, 22 nt, synthetic construct
  source 1..22: mol_type = other RNA
agtgtgtttttgtaaatgaaac

SEQ ID NO: 120338 - RNA, 22 nt, synthetic construct
  source 1..22: mol_type = other RNA
agtgttaattatttgtgcatac

SEQ ID NO: 120339 - RNA, 22 nt, synthetic construct
  source 1..22: mol_type = other RNA
agtgttaattcttccttaatgt

SEQ ID NO: 120340 - RNA, 22 nt, synthetic construct
  source 1..22: mol_type = other RNA
agtgttacttgaaatcatttca

SEQ ID NO: 120341 - RNA, 22 nt, synthetic construct
  source 1..22: mol_type = other RNA
agtgttagaattacaggcatga

SEQ ID NO: 120342 - RNA, 22 nt, synthetic construct
  source 1..22: mol_type = other RNA
agtgttcaaaagccccaaacca

SEQ ID NO: 120343 - RNA, 22 nt, synthetic construct
  source 1..22: mol_type = other RNA
agtgttcccttcttaaatgtga

SEQ ID NO: 120344 - RNA, 22 nt, synthetic construct
  source 1..22: mol_type = other RNA
agtgttctgtgtttatgaatga

SEQ ID NO: 120345 - RNA, 22 nt, synthetic construct
  source 1..22: mol_type = other RNA
agtgttgactaccatctctcca

SEQ ID NO: 120346 - RNA, 22 nt, synthetic construct
  source 1..22: mol_type = other RNA
agtgttgagaaagcacataaaa

SEQ ID NO: 120347 - RNA, 22 nt, synthetic construct
  source 1..22: mol_type = other RNA
agtgttgagaggctttaagcag

SEQ ID NO: 120348 - RNA, 22 nt, synthetic construct
  source 1..22: mol_type = other RNA
agtgttgcttggtgttgactga

SEQ ID NO: 120349 - RNA, 22 nt, synthetic construct
  source 1..22: mol_type = other RNA
agtgttgtgtgcacctaataaa

SEQ ID NO: 120350 - RNA, 22 nt, synthetic construct
  source 1..22: mol_type = other RNA
agtgttgtttttaaacaatagg

SEQ ID NO: 120351 - RNA, 22 nt, synthetic construct
  source 1..22: mol_type = other RNA
agtgtttacacacctgaaattc

SEQ ID NO: 120352 - RNA, 22 nt, synthetic construct
  source 1..22: mol_type = other RNA
agtgtttaggatataagagtgg

SEQ ID NO: 120353 - RNA, 22 nt, synthetic construct
  source 1..22: mol_type = other RNA
agtgtttagggacgaatgcatg

SEQ ID NO: 120354 - RNA, 22 nt, synthetic construct
  source 1..22: mol_type = other RNA
agtgtttcatttacaaaaacac

SEQ ID NO: 120355 - RNA, 22 nt, synthetic construct
  source 1..22: mol_type = other RNA
agtgtttcccttaaaaggaact

SEQ ID NO: 120356 - RNA, 22 nt, synthetic construct
  source 1..22: mol_type = other RNA
agtgtttcctagattccctctg

SEQ ID NO: 120357 - RNA, 22 nt, synthetic construct
  source 1..22: mol_type = other RNA
agtgtttccttccagatgtttt

SEQ ID NO: 120358 - RNA, 22 nt, synthetic construct
  source 1..22: mol_type = other RNA
agtgtttgaaaagtgtttgtca

SEQ ID NO: 120359 - RNA, 22 nt, synthetic construct
  source 1..22: mol_type = other RNA
agtgtttggtttttatggaata

SEQ ID NO: 120360 - RNA, 22 nt, synthetic construct
  source 1..22: mol_type = other RNA
agtgtttgtcacatagaagcgc

SEQ ID NO: 120361 - RNA, 22 nt, synthetic construct
  source 1..22: mol_type = other RNA
agtgttttaaagcagggagggg

SEQ ID NO: 120362 - RNA, 22 nt, synthetic construct
  source 1..22: mol_type = other RNA
agtgttttaggggggaaaacac

SEQ ID NO: 120363 - RNA, 22 nt, synthetic construct
  source 1..22: mol_type = other RNA
agtgttttcttcatggactaga

SEQ ID NO: 120364 - RNA, 22 nt, synthetic construct
  source 1..22: mol_type = other RNA
agtgttttgatagttgcagatt

SEQ ID NO: 120365 - RNA, 22 nt, synthetic construct
  source 1..22: mol_type = other RNA
agtgtttttgaattctgcttat

SEQ ID NO: 120366 - RNA, 22 nt, synthetic construct
  source 1..22: mol_type = other RNA
agttaaaactcacaaaaagtgt

SEQ ID NO: 120367 - RNA, 22 nt, synthetic construct
  source 1..22: mol_type = other RNA
agttaaaacttgtagaggagga

SEQ ID NO: 120368 - RNA, 22 nt, synthetic construct
  source 1..22: mol_type = other RNA
agttaaaagacatctttcctgt

SEQ ID NO: 120369 - RNA, 22 nt, synthetic construct
  source 1..22: mol_type = other RNA
agttaaaagttttccaaccact

SEQ ID NO: 120370 - RNA, 22 nt, synthetic construct
  source 1..22: mol_type = other RNA
agttaaaatgaaaatgttccct

SEQ ID NO: 120371 - RNA, 22 nt, synthetic construct
  source 1..22: mol_type = other RNA
agttaaacatgtaaaacagacc

SEQ ID NO: 120372 - RNA, 22 nt, synthetic construct
  source 1..22: mol_type = other RNA
agttaaacccaacaaacaatta

SEQ ID NO: 120373 - RNA, 22 nt, synthetic construct
  source 1..22: mol_type = other RNA
agttaaacttttgtgcatcaaa

SEQ ID NO: 120374 - RNA, 22 nt, synthetic construct
  source 1..22: mol_type = other RNA
agttaacaatactgcattgtgc

SEQ ID NO: 120375 - RNA, 22 nt, synthetic construct
  source 1..22: mol_type = other RNA
agttaacagtgctgtgccagtg

SEQ ID NO: 120376 - RNA, 22 nt, synthetic construct
  source 1..22: mol_type = other RNA
agttaaccttctggggttcaaa

SEQ ID NO: 120377 - RNA, 22 nt, synthetic construct
  source 1..22: mol_type = other RNA
agttaacgtttatctacagagg

SEQ ID NO: 120378 - RNA, 22 nt, synthetic construct
  source 1..22: mol_type = other RNA
agttaactgaaatcgggagtaa

SEQ ID NO: 120379 - RNA, 22 nt, synthetic construct
  source 1..22: mol_type = other RNA
agttaacttattggaaaactct

SEQ ID NO: 120380 - RNA, 22 nt, synthetic construct
  source 1..22: mol_type = other RNA
agttaagggccatttcatttct

SEQ ID NO: 120381 - RNA, 22 nt, synthetic construct
  source 1..22: mol_type = other RNA
agttaagtctgaaagcttctga

SEQ ID NO: 120382 - RNA, 22 nt, synthetic construct
  source 1..22: mol_type = other RNA
agttaataaaggtgctaattgt

SEQ ID NO: 120383 - RNA, 22 nt, synthetic construct
  source 1..22: mol_type = other RNA
agttaatagcctcctaagtttt

SEQ ID NO: 120384 - RNA, 22 nt, synthetic construct
  source 1..22: mol_type = other RNA
agttaatattgtaggtgtctca

SEQ ID NO: 120385 - RNA, 22 nt, synthetic construct
  source 1..22: mol_type = other RNA
agttaatgtgtgaagaaggaat

SEQ ID NO: 120386 - RNA, 22 nt, synthetic construct
  source 1..22: mol_type = other RNA
agttaattccacaaccactggg

SEQ ID NO: 120387 - RNA, 22 nt, synthetic construct
  source 1..22: mol_type = other RNA
agttacaaacatatgcatgtta

SEQ ID NO: 120388 - RNA, 22 nt, synthetic construct
  source 1..22: mol_type = other RNA
agttacaactactcgggaggct

SEQ ID NO: 120389 - RNA, 22 nt, synthetic construct
  source 1..22: mol_type = other RNA
agttacaaggattgaatggaaa

SEQ ID NO: 120390 - RNA, 22 nt, synthetic construct
  source 1..22: mol_type = other RNA
agttacaataatatgcctcatg

SEQ ID NO: 120391 - RNA, 22 nt, synthetic construct
  source 1..22: mol_type = other RNA
agttacacaagtgtttcattta

SEQ ID NO: 120392 - RNA, 22 nt, synthetic construct
  source 1..22: mol_type = other RNA
agttacagcatttcagccaaag

SEQ ID NO: 120393 - RNA, 22 nt, synthetic construct
  source 1..22: mol_type = other RNA
agttacatgaggtcacccaagc

SEQ ID NO: 120394 - RNA, 22 nt, synthetic construct
  source 1..22: mol_type = other RNA
agttacatgcttagccttccag

SEQ ID NO: 120395 - RNA, 22 nt, synthetic construct
  source 1..22: mol_type = other RNA
agttaccaccaagaaaaagcag

SEQ ID NO: 120396 - RNA, 22 nt, synthetic construct
  source 1..22: mol_type = other RNA
agttaccactagcaaactactg

SEQ ID NO: 120397 - RNA, 22 nt, synthetic construct
  source 1..22: mol_type = other RNA
agttaccataaaaccatttttc

SEQ ID NO: 120398 - RNA, 22 nt, synthetic construct
  source 1..22: mol_type = other RNA
agttacgctgccaaaagccaag

SEQ ID NO: 120399 - RNA, 22 nt, synthetic construct
  source 1..22: mol_type = other RNA
agttacggttccctgtagagat

SEQ ID NO: 120400 - RNA, 22 nt, synthetic construct
  source 1..22: mol_type = other RNA
agttactagaagcactttttac

SEQ ID NO: 120401 - RNA, 22 nt, synthetic construct
  source 1..22: mol_type = other RNA
agttactcaaatccaaattcac

SEQ ID NO: 120402 - RNA, 22 nt, synthetic construct
  source 1..22: mol_type = other RNA
agttactcctgagcaaggaagg

SEQ ID NO: 120403 - RNA, 22 nt, synthetic construct
  source 1..22: mol_type = other RNA
agttactctctctgcctcggca

SEQ ID NO: 120404 - RNA, 22 nt, synthetic construct
  source 1..22: mol_type = other RNA
agttactgattagaaggattgt

SEQ ID NO: 120405 - RNA, 22 nt, synthetic construct
  source 1..22: mol_type = other RNA
agttacttctggaaagttcaaa

SEQ ID NO: 120406 - RNA, 22 nt, synthetic construct
  source 1..22: mol_type = other RNA
agttagaagtatcccagatggg

SEQ ID NO: 120407 - RNA, 22 nt, synthetic construct
  source 1..22: mol_type = other RNA
agttagcatgcctgacaaagta

SEQ ID NO: 120408 - RNA, 22 nt, synthetic construct
  source 1..22: mol_type = other RNA
agttagctggcaaaatggagac

SEQ ID NO: 120409 - RNA, 22 nt, synthetic construct
  source 1..22: mol_type = other RNA
agttaggaagccactgcattca

SEQ ID NO: 120410 - RNA, 22 nt, synthetic construct
  source 1..22: mol_type = other RNA
agttaggaatttacatttccat

SEQ ID NO: 120411 - RNA, 22 nt, synthetic construct
  source 1..22: mol_type = other RNA
agttaggtggtttgaaccccag

SEQ ID NO: 120412 - RNA, 22 nt, synthetic construct
  source 1..22: mol_type = other RNA
agttagtgaagcagagagagaa

SEQ ID NO: 120413 - RNA, 22 nt, synthetic construct
  source 1..22: mol_type = other RNA
agttagtgtctaatgggtacag

SEQ ID NO: 120414 - RNA, 22 nt, synthetic construct
  source 1..22: mol_type = other RNA
agttagtttgttgacccaatca

SEQ ID NO: 120415 - RNA, 22 nt, synthetic construct
  source 1..22: mol_type = other RNA
agttatcacacctaggcctatt

SEQ ID NO: 120416 - RNA, 22 nt, synthetic construct
  source 1..22: mol_type = other RNA
agttatcaccatgtgcttatca

SEQ ID NO: 120417 - RNA, 22 nt, synthetic construct
  source 1..22: mol_type = other RNA
agttatctctgccctcattgaa

SEQ ID NO: 120418 - RNA, 22 nt, synthetic construct
  source 1..22: mol_type = other RNA
agttatctcttagacctcctag

SEQ ID NO: 120419 - RNA, 22 nt, synthetic construct
  source 1..22: mol_type = other RNA
agttatgataaaaataacgggc

SEQ ID NO: 120420 - RNA, 22 nt, synthetic construct
  source 1..22: mol_type = other RNA
agttatgcaagatgtcaacatt

SEQ ID NO: 120421 - RNA, 22 nt, synthetic construct
  source 1..22: mol_type = other RNA
agttatgtagctgggatggctg

SEQ ID NO: 120422 - RNA, 22 nt, synthetic construct
  source 1..22: mol_type = other RNA
agttatgtcagtcaacacacta

SEQ ID NO: 120423 - RNA, 22 nt, synthetic construct
  source 1..22: mol_type = other RNA
agttattaaatgagacacctac

SEQ ID NO: 120424 - RNA, 22 nt, synthetic construct
  source 1..22: mol_type = other RNA
agttattaagagtgtgctgact

SEQ ID NO: 120425 - RNA, 22 nt, synthetic construct
  source 1..22: mol_type = other RNA
agttattcttcagcaaggacca

SEQ ID NO: 120426 - RNA, 22 nt, synthetic construct
  source 1..22: mol_type = other RNA
agttattgcatagggatgttgc

SEQ ID NO: 120427 - RNA, 22 nt, synthetic construct
  source 1..22: mol_type = other RNA
agttatttaatctctcttgacc

SEQ ID NO: 120428 - RNA, 22 nt, synthetic construct
  source 1..22: mol_type = other RNA
agttcaaagaaactacctagaa

SEQ ID NO: 120429 - RNA, 22 nt, synthetic construct
  source 1..22: mol_type = other RNA
agttcaaatgaggcttttattg

SEQ ID NO: 120430 - RNA, 22 nt, synthetic construct
  source 1..22: mol_type = other RNA
agttcaaatgttaagcccaact

SEQ ID NO: 120431 - RNA, 22 nt, synthetic construct
  source 1..22: mol_type = other RNA
agttcaagatgcataccaagcc

SEQ ID NO: 120432 - RNA, 22 nt, synthetic construct
  source 1..22: mol_type = other RNA
agttcaagcaccacttcgagaa

SEQ ID NO: 120433 - RNA, 22 nt, synthetic construct
  source 1..22: mol_type = other RNA
agttcaaggtgttagcaggact

SEQ ID NO: 120434 - RNA, 22 nt, synthetic construct
  source 1..22: mol_type = other RNA
agttcaaggttataatcagccg

SEQ ID NO: 120435 - RNA, 22 nt, synthetic construct
  source 1..22: mol_type = other RNA
agttcaatactactgcaaatat

SEQ ID NO: 120436 - RNA, 22 nt, synthetic construct
  source 1..22: mol_type = other RNA
agttcaccagtttctaattaga

SEQ ID NO: 120437 - RNA, 22 nt, synthetic construct
  source 1..22: mol_type = other RNA
agttcacctctccgggtaaaaa

SEQ ID NO: 120438 - RNA, 22 nt, synthetic construct
  source 1..22: mol_type = other RNA
agttcagaaagattaatccttg

SEQ ID NO: 120439 - RNA, 22 nt, synthetic construct
  source 1..22: mol_type = other RNA
agttcagaataccagagattgg

SEQ ID NO: 120440 - RNA, 22 nt, synthetic construct
  source 1..22: mol_type = other RNA
agttcagcatcttcactgacta

SEQ ID NO: 120441 - RNA, 22 nt, synthetic construct
  source 1..22: mol_type = other RNA
agttcagcctgcagaaggagaa

SEQ ID NO: 120442 - RNA, 22 nt, synthetic construct
  source 1..22: mol_type = other RNA
agttcagcttacagtcatcaca

SEQ ID NO: 120443 - RNA, 22 nt, synthetic construct
  source 1..22: mol_type = other RNA
agttcagctttaaagagaaata

SEQ ID NO: 120444 - RNA, 22 nt, synthetic construct
  source 1..22: mol_type = other RNA
agttcaggaccagcttgggcaa

SEQ ID NO: 120445 - RNA, 22 nt, synthetic construct
  source 1..22: mol_type = other RNA
agttcagtggtgcaatcacggc

SEQ ID NO: 120446 - RNA, 22 nt, synthetic construct
  source 1..22: mol_type = other RNA
agttcagttttgtatatggttt

SEQ ID NO: 120447 - RNA, 22 nt, synthetic construct
  source 1..22: mol_type = other RNA
agttcatgttagcataattcga

SEQ ID NO: 120448 - RNA, 22 nt, synthetic construct
  source 1..22: mol_type = other RNA
agttcattagaattcaggacag

SEQ ID NO: 120449 - RNA, 22 nt, synthetic construct
  source 1..22: mol_type = other RNA
agttcattcgtagcaggtttag

SEQ ID NO: 120450 - RNA, 22 nt, synthetic construct
  source 1..22: mol_type = other RNA
agttccaactgtataaatgttc

SEQ ID NO: 120451 - RNA, 22 nt, synthetic construct
  source 1..22: mol_type = other RNA
agttccaagattttcccaatct

SEQ ID NO: 120452 - RNA, 22 nt, synthetic construct
  source 1..22: mol_type = other RNA
agttccacctccatcactgact

SEQ ID NO: 120453 - RNA, 22 nt, synthetic construct
  source 1..22: mol_type = other RNA
agttccagtcctttgtgtcaag

SEQ ID NO: 120454 - RNA, 22 nt, synthetic construct
  source 1..22: mol_type = other RNA
agttccatctgttatagtgtga

SEQ ID NO: 120455 - RNA, 22 nt, synthetic construct
  source 1..22: mol_type = other RNA
agttccattattccataaaaac

SEQ ID NO: 120456 - RNA, 22 nt, synthetic construct
  source 1..22: mol_type = other RNA
agttccccattgacaatatagg

SEQ ID NO: 120457 - RNA, 22 nt, synthetic construct
  source 1..22: mol_type = other RNA
agttcccctatactgtaaccct

SEQ ID NO: 120458 - RNA, 22 nt, synthetic construct
  source 1..22: mol_type = other RNA
agttccgatttctcggccgggc

SEQ ID NO: 120459 - RNA, 22 nt, synthetic construct
  source 1..22: mol_type = other RNA
agttccggttctcaggagccta

SEQ ID NO: 120460 - RNA, 22 nt, synthetic construct
  source 1..22: mol_type = other RNA
agttcctccttttgtagaggga

SEQ ID NO: 120461 - RNA, 22 nt, synthetic construct
  source 1..22: mol_type = other RNA
agttcctgcttcccccaaagaa

SEQ ID NO: 120462 - RNA, 22 nt, synthetic construct
  source 1..22: mol_type = other RNA
agttcctggactgtgatgactg

SEQ ID NO: 120463 - RNA, 22 nt, synthetic construct
  source 1..22: mol_type = other RNA
agttccttttaagggaaacact

SEQ ID NO: 120464 - RNA, 22 nt, synthetic construct
  source 1..22: mol_type = other RNA
agttctaataaacgcggaatga

SEQ ID NO: 120465 - RNA, 22 nt, synthetic construct
  source 1..22: mol_type = other RNA
agttctagagatttgctgtata

SEQ ID NO: 120466 - RNA, 22 nt, synthetic construct
  source 1..22: mol_type = other RNA
agttctagttctaataaacgcg

SEQ ID NO: 120467 - RNA, 22 nt, synthetic construct
  source 1..22: mol_type = other RNA
agttctatttctttccattcaa

SEQ ID NO: 120468 - RNA, 22 nt, synthetic construct
  source 1..22: mol_type = other RNA
agttctcaggggtaaaggggat

SEQ ID NO: 120469 - RNA, 22 nt, synthetic construct
  source 1..22: mol_type = other RNA
agttctccaagttattacaaaa

SEQ ID NO: 120470 - RNA, 22 nt, synthetic construct
  source 1..22: mol_type = other RNA
agttctcctgtgtgcatgctcc

SEQ ID NO: 120471 - RNA, 22 nt, synthetic construct
  source 1..22: mol_type = other RNA
agttctctgccccgggcctggt

SEQ ID NO: 120472 - RNA, 22 nt, synthetic construct
  source 1..22: mol_type = other RNA
agttctgaaggctcagcccctc

SEQ ID NO: 120473 - RNA, 22 nt, synthetic construct
  source 1..22: mol_type = other RNA
agttctgcgcaattgcagccag

SEQ ID NO: 120474 - RNA, 22 nt, synthetic construct
  source 1..22: mol_type = other RNA
agttctgcttccacatttctaa

SEQ ID NO: 120475 - RNA, 22 nt, synthetic construct
  source 1..22: mol_type = other RNA
agttctgggagttcattagaat

SEQ ID NO: 120476 - RNA, 22 nt, synthetic construct
  source 1..22: mol_type = other RNA
agttctggtgtcgtttatttct

SEQ ID NO: 120477 - RNA, 22 nt, synthetic construct
  source 1..22: mol_type = other RNA
agttctgtacccttacgcgtgg

SEQ ID NO: 120478 - RNA, 22 nt, synthetic construct
  source 1..22: mol_type = other RNA
agttctgtgaatttgattatgt

SEQ ID NO: 120479 - RNA, 22 nt, synthetic construct
  source 1..22: mol_type = other RNA
agttcttacctcaaaggagaga

SEQ ID NO: 120480 - RNA, 22 nt, synthetic construct
  source 1..22: mol_type = other RNA
agttcttatgaggttattcaaa

SEQ ID NO: 120481 - RNA, 22 nt, synthetic construct
  source 1..22: mol_type = other RNA
agttctttatatattctggatg

SEQ ID NO: 120482 - RNA, 22 nt, synthetic construct
  source 1..22: mol_type = other RNA
agttctttcggatatttactaa

SEQ ID NO: 120483 - RNA, 22 nt, synthetic construct
  source 1..22: mol_type = other RNA
agttgaaaagtatggttgaaga

SEQ ID NO: 120484 - RNA, 22 nt, synthetic construct
  source 1..22: mol_type = other RNA
agttgaatttctgtccttggat

SEQ ID NO: 120485 - RNA, 22 nt, synthetic construct
  source 1..22: mol_type = other RNA
agttgacatcctttaatttggg

SEQ ID NO: 120486 - RNA, 22 nt, synthetic construct
  source 1..22: mol_type = other RNA
agttgactcctaaaacatggtc

SEQ ID NO: 120487 - RNA, 22 nt, synthetic construct
  source 1..22: mol_type = other RNA
agttgagaaactatccaacatg

SEQ ID NO: 120488 - RNA, 22 nt, synthetic construct
  source 1..22: mol_type = other RNA
agttgagaaagagggaagtact

SEQ ID NO: 120489 - RNA, 22 nt, synthetic construct
  source 1..22: mol_type = other RNA
agttgagagagaattctaaatt

SEQ ID NO: 120490 - RNA, 22 nt, synthetic construct
  source 1..22: mol_type = other RNA
agttgaggttgaagacctgcag

SEQ ID NO: 120491 - RNA, 22 nt, synthetic construct
  source 1..22: mol_type = other RNA
agttgagttttcaacctttgtt

SEQ ID NO: 120492 - RNA, 22 nt, synthetic construct
  source 1..22: mol_type = other RNA
agttgatgcaatttgttttcca

SEQ ID NO: 120493 - RNA, 22 nt, synthetic construct
  source 1..22: mol_type = other RNA
agttgattatttttacccaaca

SEQ ID NO: 120494 - RNA, 22 nt, synthetic construct
  source 1..22: mol_type = other RNA
agttgcaaaaatactacaagag

SEQ ID NO: 120495 - RNA, 22 nt, synthetic construct
  source 1..22: mol_type = other RNA
agttgcacggtgaagaaccgac

SEQ ID NO: 120496 - RNA, 22 nt, synthetic construct
  source 1..22: mol_type = other RNA
agttgcagattcatcttgactt

SEQ ID NO: 120497 - RNA, 22 nt, synthetic construct
  source 1..22: mol_type = other RNA
agttgcagcatgctcactgtct

SEQ ID NO: 120498 - RNA, 22 nt, synthetic construct
  source 1..22: mol_type = other RNA
agttgcagtgagcccagagatc

SEQ ID NO: 120499 - RNA, 22 nt, synthetic construct
  source 1..22: mol_type = other RNA
agttgcatacgtcgtcccccat

SEQ ID NO: 120500 - RNA, 22 nt, synthetic construct
  source 1..22: mol_type = other RNA
agttgcatcacttgaggtgatt

SEQ ID NO: 120501 - RNA, 22 nt, synthetic construct
  source 1..22: mol_type = other RNA
agttgcatgaatttgttttctt

SEQ ID NO: 120502 - RNA, 22 nt, synthetic construct
  source 1..22: mol_type = other RNA
agttgctatccagtctctgcaa

SEQ ID NO: 120503 - RNA, 22 nt, synthetic construct
  source 1..22: mol_type = other RNA
agttgctcagaaaattttcttt

SEQ ID NO: 120504 - RNA, 22 nt, synthetic construct
  source 1..22: mol_type = other RNA
agttgctgacttcctggctcta

SEQ ID NO: 120505 - RNA, 22 nt, synthetic construct
  source 1..22: mol_type = other RNA
agttgcttactctaatggggaa

SEQ ID NO: 120506 - RNA, 22 nt, synthetic construct
  source 1..22: mol_type = other RNA
agttgcttggcacagaattatt

SEQ ID NO: 120507 - RNA, 22 nt, synthetic construct
  source 1..22: mol_type = other RNA
agttgctttttcttcttgtttt

SEQ ID NO: 120508 - RNA, 22 nt, synthetic construct
  source 1..22: mol_type = other RNA
agttggaactcttgcggtcttt

SEQ ID NO: 120509 - RNA, 22 nt, synthetic construct
  source 1..22: mol_type = other RNA
agttggattatatgttctaaag

SEQ ID NO: 120510 - RNA, 22 nt, synthetic construct
  source 1..22: mol_type = other RNA
agttggattcccaggtattttg

SEQ ID NO: 120511 - RNA, 22 nt, synthetic construct
  source 1..22: mol_type = other RNA
agttggcacagccagtcagtga

SEQ ID NO: 120512 - RNA, 22 nt, synthetic construct
  source 1..22: mol_type = other RNA
agttggcccaacatgctcttaa

SEQ ID NO: 120513 - RNA, 22 nt, synthetic construct
  source 1..22: mol_type = other RNA
agttggccttgaggtgagacag

SEQ ID NO: 120514 - RNA, 22 nt, synthetic construct
  source 1..22: mol_type = other RNA
agttgggagtctatttctgaac

SEQ ID NO: 120515 - RNA, 22 nt, synthetic construct
  source 1..22: mol_type = other RNA
agttgggcttaacatttgaact

SEQ ID NO: 120516 - RNA, 22 nt, synthetic construct
  source 1..22: mol_type = other RNA
agttgggcttggttggaaaaga

SEQ ID NO: 120517 - RNA, 22 nt, synthetic construct
  source 1..22: mol_type = other RNA
agttggggactcttatggctat

SEQ ID NO: 120518 - RNA, 22 nt, synthetic construct
  source 1..22: mol_type = other RNA
agttggtcagaaaaatggaata

SEQ ID NO: 120519 - RNA, 22 nt, synthetic construct
  source 1..22: mol_type = other RNA
agttggtcctgcatatgttttt

SEQ ID NO: 120520 - RNA, 22 nt, synthetic construct
  source 1..22: mol_type = other RNA
agttggtgaagagagcctgtgg

SEQ ID NO: 120521 - RNA, 22 nt, synthetic construct
  source 1..22: mol_type = other RNA
agttggtgcaaggataaacaaa

SEQ ID NO: 120522 - RNA, 22 nt, synthetic construct
  source 1..22: mol_type = other RNA
agttgtaactacagacatgcca

SEQ ID NO: 120523 - RNA, 22 nt, synthetic construct
  source 1..22: mol_type = other RNA
agttgtaatttttaaaagagcg

SEQ ID NO: 120524 - RNA, 22 nt, synthetic construct
  source 1..22: mol_type = other RNA
agttgtacttgacacaaaggac

SEQ ID NO: 120525 - RNA, 22 nt, synthetic construct
  source 1..22: mol_type = other RNA
agttgtatctgtgatccctgat

SEQ ID NO: 120526 - RNA, 22 nt, synthetic construct
  source 1..22: mol_type = other RNA
agttgtatgccaaaaaattgga

SEQ ID NO: 120527 - RNA, 22 nt, synthetic construct
  source 1..22: mol_type = other RNA
agttgtcagaattagaaagctg

SEQ ID NO: 120528 - RNA, 22 nt, synthetic construct
  source 1..22: mol_type = other RNA
agttgtgatatattatgaacca

SEQ ID NO: 120529 - RNA, 22 nt, synthetic construct
  source 1..22: mol_type = other RNA
agttgtgctacctcaaattgtg

SEQ ID NO: 120530 - RNA, 22 nt, synthetic construct
  source 1..22: mol_type = other RNA
agttgtggtgagccaagatcgc

SEQ ID NO: 120531 - RNA, 22 nt, synthetic construct
  source 1..22: mol_type = other RNA
agttgtgtcatttttgtattct

SEQ ID NO: 120532 - RNA, 22 nt, synthetic construct
  source 1..22: mol_type = other RNA
agttgtttacttgggtataaat

SEQ ID NO: 120533 - RNA, 22 nt, synthetic construct
  source 1..22: mol_type = other RNA
agttgtttccactttgaggtta

SEQ ID NO: 120534 - RNA, 22 nt, synthetic construct
  source 1..22: mol_type = other RNA
agtttaaagctttgtgactgtg

SEQ ID NO: 120535 - RNA, 22 nt, synthetic construct
  source 1..22: mol_type = other RNA
agtttaaccaattatgctgagt

SEQ ID NO: 120536 - RNA, 22 nt, synthetic construct
  source 1..22: mol_type = other RNA
agtttaactttgatgaattcca

SEQ ID NO: 120537 - RNA, 22 nt, synthetic construct
  source 1..22: mol_type = other RNA
agtttaattgggggaaaattga

SEQ ID NO: 120538 - RNA, 22 nt, synthetic construct
  source 1..22: mol_type = other RNA
agtttacacgccttcgcgggca

SEQ ID NO: 120539 - RNA, 22 nt, synthetic construct
  source 1..22: mol_type = other RNA
agtttacactatggcttttgag

SEQ ID NO: 120540 - RNA, 22 nt, synthetic construct
  source 1..22: mol_type = other RNA
agtttagcaatccaaggacaga

SEQ ID NO: 120541 - RNA, 22 nt, synthetic construct
  source 1..22: mol_type = other RNA
agtttagtaaatctttggtgaa

SEQ ID NO: 120542 - RNA, 22 nt, synthetic construct
  source 1..22: mol_type = other RNA
agtttagtgcagtatcttgaag

SEQ ID NO: 120543 - RNA, 22 nt, synthetic construct
  source 1..22: mol_type = other RNA
agtttagttactcaaatccaaa

SEQ ID NO: 120544 - RNA, 22 nt, synthetic construct
  source 1..22: mol_type = other RNA
agtttatatgcctagatgattc

SEQ ID NO: 120545 - RNA, 22 nt, synthetic construct
  source 1..22: mol_type = other RNA
agtttatattctaagtttgcca

SEQ ID NO: 120546 - RNA, 22 nt, synthetic construct
  source 1..22: mol_type = other RNA
agtttatcagtctccaatcctc

SEQ ID NO: 120547 - RNA, 22 nt, synthetic construct
  source 1..22: mol_type = other RNA
agtttatgggtcaaccactaag

SEQ ID NO: 120548 - RNA, 22 nt, synthetic construct
  source 1..22: mol_type = other RNA
agtttattcatacgttaactgt

SEQ ID NO: 120549 - RNA, 22 nt, synthetic construct
  source 1..22: mol_type = other RNA
agtttcaaaagctccccggatg

SEQ ID NO: 120550 - RNA, 22 nt, synthetic construct
  source 1..22: mol_type = other RNA
agtttcaaactgtggtcactgt

SEQ ID NO: 120551 - RNA, 22 nt, synthetic construct
  source 1..22: mol_type = other RNA
agtttcaccctgcgaaggcaat

SEQ ID NO: 120552 - RNA, 22 nt, synthetic construct
  source 1..22: mol_type = other RNA
agtttcatctatgtcccctggg

SEQ ID NO: 120553 - RNA, 22 nt, synthetic construct
  source 1..22: mol_type = other RNA
agtttcatggacttcctatttt

SEQ ID NO: 120554 - RNA, 22 nt, synthetic construct
  source 1..22: mol_type = other RNA
agtttccagaaaactggcaatc

SEQ ID NO: 120555 - RNA, 22 nt, synthetic construct
  source 1..22: mol_type = other RNA
agtttccatggaggggccagtt

SEQ ID NO: 120556 - RNA, 22 nt, synthetic construct
  source 1..22: mol_type = other RNA
agtttccctctgagagaagtca

SEQ ID NO: 120557 - RNA, 22 nt, synthetic construct
  source 1..22: mol_type = other RNA
agtttccgttttgcaagatgca

SEQ ID NO: 120558 - RNA, 22 nt, synthetic construct
  source 1..22: mol_type = other RNA
agtttcctacatactgcactct

SEQ ID NO: 120559 - RNA, 22 nt, synthetic construct
  source 1..22: mol_type = other RNA
agtttcctagaaaatcatacat

SEQ ID NO: 120560 - RNA, 22 nt, synthetic construct
  source 1..22: mol_type = other RNA
agtttcctgcacatgcacaagg

SEQ ID NO: 120561 - RNA, 22 nt, synthetic construct
  source 1..22: mol_type = other RNA
agtttctagccataatccttag

SEQ ID NO: 120562 - RNA, 22 nt, synthetic construct
  source 1..22: mol_type = other RNA
agtttctcaacttagccttggt

SEQ ID NO: 120563 - RNA, 22 nt, synthetic construct
  source 1..22: mol_type = other RNA
agtttctctctccctgccctgt

SEQ ID NO: 120564 - RNA, 22 nt, synthetic construct
  source 1..22: mol_type = other RNA
agtttctctgctttttcttggt

SEQ ID NO: 120565 - RNA, 22 nt, synthetic construct
  source 1..22: mol_type = other RNA
agtttctggaagtttcctgcac

SEQ ID NO: 120566 - RNA, 22 nt, synthetic construct
  source 1..22: mol_type = other RNA
agtttctttttgttttctcctt

SEQ ID NO: 120567 - RNA, 22 nt, synthetic construct
  source 1..22: mol_type = other RNA
agtttgaaactttaagagtatc

SEQ ID NO: 120568 - RNA, 22 nt, synthetic construct
  source 1..22: mol_type = other RNA
agtttgacctgtaatttttctc

SEQ ID NO: 120569 - RNA, 22 nt, synthetic construct
  source 1..22: mol_type = other RNA
agtttgagaagccacacagtac

SEQ ID NO: 120570 - RNA, 22 nt, synthetic construct
  source 1..22: mol_type = other RNA
agtttgagaccagcgtgggcaa

SEQ ID NO: 120571 - RNA, 22 nt, synthetic construct
  source 1..22: mol_type = other RNA
agtttgagactgcagtgaccta

SEQ ID NO: 120572 - RNA, 22 nt, synthetic construct
  source 1..22: mol_type = other RNA
agtttgaggccgcagtgagcca

SEQ ID NO: 120573 - RNA, 22 nt, synthetic construct
  source 1..22: mol_type = other RNA
agtttgaggtgtacaattaggc

SEQ ID NO: 120574 - RNA, 22 nt, synthetic construct
  source 1..22: mol_type = other RNA
agtttgagtatttcatgtactt

SEQ ID NO: 120575 - RNA, 22 nt, synthetic construct
  source 1..22: mol_type = other RNA
agtttgcaatacagttaacgta

SEQ ID NO: 120576 - RNA, 22 nt, synthetic construct
  source 1..22: mol_type = other RNA
agtttgcacgtttttagaaatt

SEQ ID NO: 120577 - RNA, 22 nt, synthetic construct
  source 1..22: mol_type = other RNA
agtttgcattacatgaatggaa

SEQ ID NO: 120578 - RNA, 22 nt, synthetic construct
  source 1..22: mol_type = other RNA
agtttgccaaagattcttgtca

SEQ ID NO: 120579 - RNA, 22 nt, synthetic construct
  source 1..22: mol_type = other RNA
agtttgctagtattttgttgac

SEQ ID NO: 120580 - RNA, 22 nt, synthetic construct
  source 1..22: mol_type = other RNA
agtttgctagtggtaactagat

SEQ ID NO: 120581 - RNA, 22 nt, synthetic construct
  source 1..22: mol_type = other RNA
agtttgctctgcaaatgaggtt

SEQ ID NO: 120582 - RNA, 22 nt, synthetic construct
  source 1..22: mol_type = other RNA
agtttggaaccagcctggccaa

SEQ ID NO: 120583 - RNA, 22 nt, synthetic construct
  source 1..22: mol_type = other RNA
agtttggcaatttctcaaaaat

SEQ ID NO: 120584 - RNA, 22 nt, synthetic construct
  source 1..22: mol_type = other RNA
agtttggctcccatgattcaaa

SEQ ID NO: 120585 - RNA, 22 nt, synthetic construct
  source 1..22: mol_type = other RNA
agtttgggtgacagagagagac

SEQ ID NO: 120586 - RNA, 22 nt, synthetic construct
  source 1..22: mol_type = other RNA
agtttggttcatttcaggaatg

SEQ ID NO: 120587 - RNA, 22 nt, synthetic construct
  source 1..22: mol_type = other RNA
agtttgtagctcaaagcatatg

SEQ ID NO: 120588 - RNA, 22 nt, synthetic construct
  source 1..22: mol_type = other RNA
agtttgtgttttcactctcaat

SEQ ID NO: 120589 - RNA, 22 nt, synthetic construct
  source 1..22: mol_type = other RNA
agtttgttctgctgttgatgga

SEQ ID NO: 120590 - RNA, 22 nt, synthetic construct
  source 1..22: mol_type = other RNA
agtttgttctgtcacatttgaa

SEQ ID NO: 120591 - RNA, 22 nt, synthetic construct
  source 1..22: mol_type = other RNA
agtttgttgacccaatcatgtt

SEQ ID NO: 120592 - RNA, 22 nt, synthetic construct
  source 1..22: mol_type = other RNA
agttttaactcttgcattagag

SEQ ID NO: 120593 - RNA, 22 nt, synthetic construct
  source 1..22: mol_type = other RNA
agttttaagaaaagaagttacg

SEQ ID NO: 120594 - RNA, 22 nt, synthetic construct
  source 1..22: mol_type = other RNA
agttttaggaaaatagagttcc

SEQ ID NO: 120595 - RNA, 22 nt, synthetic construct
  source 1..22: mol_type = other RNA
agttttatagtcttagctctta

SEQ ID NO: 120596 - RNA, 22 nt, synthetic construct
  source 1..22: mol_type = other RNA
agttttatcaattagttcctcc

SEQ ID NO: 120597 - RNA, 22 nt, synthetic construct
  source 1..22: mol_type = other RNA
agttttcaacctttgttgaaaa

SEQ ID NO: 120598 - RNA, 22 nt, synthetic construct
  source 1..22: mol_type = other RNA
agttttcacttttgtgcaacat

SEQ ID NO: 120599 - RNA, 22 nt, synthetic construct
  source 1..22: mol_type = other RNA
agttttccaaccactgaatcag

SEQ ID NO: 120600 - RNA, 22 nt, synthetic construct
  source 1..22: mol_type = other RNA
agttttccaataagttaactga

SEQ ID NO: 120601 - RNA, 22 nt, synthetic construct
  source 1..22: mol_type = other RNA
agttttccaatccgggaacatg

SEQ ID NO: 120602 - RNA, 22 nt, synthetic construct
  source 1..22: mol_type = other RNA
agttttccaggaaaagcaaatg

SEQ ID NO: 120603 - RNA, 22 nt, synthetic construct
  source 1..22: mol_type = other RNA
agttttccagtatattcatagt

SEQ ID NO: 120604 - RNA, 22 nt, synthetic construct
  source 1..22: mol_type = other RNA
agttttccccctacacccagtt

SEQ ID NO: 120605 - RNA, 22 nt, synthetic construct
  source 1..22: mol_type = other RNA
agttttccctgtgtatgtgtag

SEQ ID NO: 120606 - RNA, 22 nt, synthetic construct
  source 1..22: mol_type = other RNA
agttttcctgcctcagccccct

SEQ ID NO: 120607 - RNA, 22 nt, synthetic construct
  source 1..22: mol_type = other RNA
agttttctggaaactcaaaccc

SEQ ID NO: 120608 - RNA, 22 nt, synthetic construct
  source 1..22: mol_type = other RNA
agttttgaccaaaacaaaaaac

SEQ ID NO: 120609 - RNA, 22 nt, synthetic construct
  source 1..22: mol_type = other RNA
agttttgagtggcatcatactg

SEQ ID NO: 120610 - RNA, 22 nt, synthetic construct
  source 1..22: mol_type = other RNA
agttttgcagttggggactctt

SEQ ID NO: 120611 - RNA, 22 nt, synthetic construct
  source 1..22: mol_type = other RNA
agttttgcctctttgctaataa

SEQ ID NO: 120612 - RNA, 22 nt, synthetic construct
  source 1..22: mol_type = other RNA
agttttgggggaagagagcatt

SEQ ID NO: 120613 - RNA, 22 nt, synthetic construct
  source 1..22: mol_type = other RNA
agttttggtgtcatttttaaga

SEQ ID NO: 120614 - RNA, 22 nt, synthetic construct
  source 1..22: mol_type = other RNA
agttttgtatatggtttaaggt

SEQ ID NO: 120615 - RNA, 22 nt, synthetic construct
  source 1..22: mol_type = other RNA
agtttttacatgtagttttccc

SEQ ID NO: 120616 - RNA, 22 nt, synthetic construct
  source 1..22: mol_type = other RNA
agttttttcctttgcctttcac

SEQ ID NO: 120617 - RNA, 22 nt, synthetic construct
  source 1..22: mol_type = other RNA
agttttttggtagataccagac

SEQ ID NO: 120618 - RNA, 22 nt, synthetic construct
  source 1..22: mol_type = other RNA
ataaaaaaggaatctgggccgg

SEQ ID NO: 120619 - RNA, 22 nt, synthetic construct
  source 1..22: mol_type = other RNA
ataaaaacatatgcaggaccaa

SEQ ID NO: 120620 - RNA, 22 nt, synthetic construct
  source 1..22: mol_type = other RNA
ataaaaaccaaacactggaaat

SEQ ID NO: 120621 - RNA, 22 nt, synthetic construct
  source 1..22: mol_type = other RNA
ataaaaacctttttgggatctg

SEQ ID NO: 120622 - RNA, 22 nt, synthetic construct
  source 1..22: mol_type = other RNA
ataaaaagacacaaaagagctg

SEQ ID NO: 120623 - RNA, 22 nt, synthetic construct
  source 1..22: mol_type = other RNA
ataaaaagcctctctgatggaa

SEQ ID NO: 120624 - RNA, 22 nt, synthetic construct
  source 1..22: mol_type = other RNA
ataaaaagcctctgtggaccat

SEQ ID NO: 120625 - RNA, 22 nt, synthetic construct
  source 1..22: mol_type = other RNA
ataaaaagcgttggagacagcc

SEQ ID NO: 120626 - RNA, 22 nt, synthetic construct
  source 1..22: mol_type = other RNA
ataaaaaggagggaaaatgttt

SEQ ID NO: 120627 - RNA, 22 nt, synthetic construct
  source 1..22: mol_type = other RNA
ataaaaaggttgagttcatgtc

SEQ ID NO: 120628 - RNA, 22 nt, synthetic construct
  source 1..22: mol_type = other RNA
ataaaaagtatcgtgagactat

SEQ ID NO: 120629 - RNA, 22 nt, synthetic construct
  source 1..22: mol_type = other RNA
ataaaaagtgacttctggatgt

SEQ ID NO: 120630 - RNA, 22 nt, synthetic construct
  source 1..22: mol_type = other RNA
ataaaaataacgggccgggcgc

SEQ ID NO: 120631 - RNA, 22 nt, synthetic construct
  source 1..22: mol_type = other RNA
ataaaaatctctacagggaacc

SEQ ID NO: 120632 - RNA, 22 nt, synthetic construct
  source 1..22: mol_type = other RNA
ataaaaatggcacatactgcat

SEQ ID NO: 120633 - RNA, 22 nt, synthetic construct
  source 1..22: mol_type = other RNA
ataaaaattccgctctggtttt

SEQ ID NO: 120634 - RNA, 22 nt, synthetic construct
  source 1..22: mol_type = other RNA
ataaaacacaaggacaggtcac

SEQ ID NO: 120635 - RNA, 22 nt, synthetic construct
  source 1..22: mol_type = other RNA
ataaaacacatgtcatgggccg

SEQ ID NO: 120636 - RNA, 22 nt, synthetic construct
  source 1..22: mol_type = other RNA
ataaaacatggccagtatctcc

SEQ ID NO: 120637 - RNA, 22 nt, synthetic construct
  source 1..22: mol_type = other RNA
ataaaacctggaatgggttgga

SEQ ID NO: 120638 - RNA, 22 nt, synthetic construct
  source 1..22: mol_type = other RNA
ataaaactcttagcttagaaga

SEQ ID NO: 120639 - RNA, 22 nt, synthetic construct
  source 1..22: mol_type = other RNA
ataaaagcctcatttgaacttt

SEQ ID NO: 120640 - RNA, 22 nt, synthetic construct
  source 1..22: mol_type = other RNA
ataaaagcgtactgtgattaca

SEQ ID NO: 120641 - RNA, 22 nt, synthetic construct
  source 1..22: mol_type = other RNA
ataaaagctctaatagttcacc

SEQ ID NO: 120642 - RNA, 22 nt, synthetic construct
  source 1..22: mol_type = other RNA
ataaaagctggagttatttgta

SEQ ID NO: 120643 - RNA, 22 nt, synthetic construct
  source 1..22: mol_type = other RNA
ataaaagcttatgatcttggga

SEQ ID NO: 120644 - RNA, 22 nt, synthetic construct
  source 1..22: mol_type = other RNA
ataaaaggaatataaacgtgtg

SEQ ID NO: 120645 - RNA, 22 nt, synthetic construct
  source 1..22: mol_type = other RNA
ataaaaggatatgggccaaaga

SEQ ID NO: 120646 - RNA, 22 nt, synthetic construct
  source 1..22: mol_type = other RNA
ataaaagttccaagattttccc

SEQ ID NO: 120647 - RNA, 22 nt, synthetic construct
  source 1..22: mol_type = other RNA
ataaaataaacattttccctcc

SEQ ID NO: 120648 - RNA, 22 nt, synthetic construct
  source 1..22: mol_type = other RNA
ataaaatagcaggattcttgtt

SEQ ID NO: 120649 - RNA, 22 nt, synthetic construct
  source 1..22: mol_type = other RNA
ataaaataggaagtccatgaaa

SEQ ID NO: 120650 - RNA, 22 nt, synthetic construct
  source 1..22: mol_type = other RNA
ataaaatctgtatgagaagact

SEQ ID NO: 120651 - RNA, 22 nt, synthetic construct
  source 1..22: mol_type = other RNA
ataaaatgagggtaaaatagtc

SEQ ID NO: 120652 - RNA, 22 nt, synthetic construct
  source 1..22: mol_type = other RNA
ataaaatgatggcaacaatcaa

SEQ ID NO: 120653 - RNA, 22 nt, synthetic construct
  source 1..22: mol_type = other RNA
ataaaatggaatattgttcagc

SEQ ID NO: 120654 - RNA, 22 nt, synthetic construct
  source 1..22: mol_type = other RNA
ataaaatgtctggccgggcacg

SEQ ID NO: 120655 - RNA, 22 nt, synthetic construct
  source 1..22: mol_type = other RNA
ataaaatgtttagcggaatgac

SEQ ID NO: 120656 - RNA, 22 nt, synthetic construct
  source 1..22: mol_type = other RNA
ataaaattcaccaaacacctta

SEQ ID NO: 120657 - RNA, 22 nt, synthetic construct
  source 1..22: mol_type = other RNA
ataaaattctgaccctttattc

SEQ ID NO: 120658 - RNA, 22 nt, synthetic construct
  source 1..22: mol_type = other RNA
ataaaattctgatagcttgaca

SEQ ID NO: 120659 - RNA, 22 nt, synthetic construct
  source 1..22: mol_type = other RNA
ataaacaaagagaacaatggaa

SEQ ID NO: 120660 - RNA, 22 nt, synthetic construct
  source 1..22: mol_type = other RNA
ataaacaagtcacaaaaagaca

SEQ ID NO: 120661 - RNA, 22 nt, synthetic construct
  source 1..22: mol_type = other RNA
ataaacacagaacactaaaggg

SEQ ID NO: 120662 - RNA, 22 nt, synthetic construct
  source 1..22: mol_type = other RNA
ataaacattttccctccttttt

SEQ ID NO: 120663 - RNA, 22 nt, synthetic construct
  source 1..22: mol_type = other RNA
ataaaccaagtttggttcattt

SEQ ID NO: 120664 - RNA, 22 nt, synthetic construct
  source 1..22: mol_type = other RNA
ataaaccacgcagtttgttctg

SEQ ID NO: 120665 - RNA, 22 nt, synthetic construct
  source 1..22: mol_type = other RNA
ataaacgacaccagaactacac

SEQ ID NO: 120666 - RNA, 22 nt, synthetic construct
  source 1..22: mol_type = other RNA
ataaacgacagcaggaaaagct

SEQ ID NO: 120667 - RNA, 22 nt, synthetic construct
  source 1..22: mol_type = other RNA
ataaacgcggaatgaagcaggc

SEQ ID NO: 120668 - RNA, 22 nt, synthetic construct
  source 1..22: mol_type = other RNA
ataaacgtgtgtgtaagcacac

SEQ ID NO: 120669 - RNA, 22 nt, synthetic construct
  source 1..22: mol_type = other RNA
ataaactaacaaagaacaggaa

SEQ ID NO: 120670 - RNA, 22 nt, synthetic construct
  source 1..22: mol_type = other RNA
ataaactagattaccttgaagt

SEQ ID NO: 120671 - RNA, 22 nt, synthetic construct
  source 1..22: mol_type = other RNA
ataaactcttccttatccgata

SEQ ID NO: 120672 - RNA, 22 nt, synthetic construct
  source 1..22: mol_type = other RNA
ataaactggaaggaaataagaa

SEQ ID NO: 120673 - RNA, 22 nt, synthetic construct
  source 1..22: mol_type = other RNA
ataaactggaattcatcaaagt

SEQ ID NO: 120674 - RNA, 22 nt, synthetic construct
  source 1..22: mol_type = other RNA
ataaacttcagttttgagtggc

SEQ ID NO: 120675 - RNA, 22 nt, synthetic construct
  source 1..22: mol_type = other RNA
ataaacttccctctcagtggtg

SEQ ID NO: 120676 - RNA, 22 nt, synthetic construct
  source 1..22: mol_type = other RNA
ataaagaacatgattgggtcaa

SEQ ID NO: 120677 - RNA, 22 nt, synthetic construct
  source 1..22: mol_type = other RNA
ataaagaactccaacaattcaa

SEQ ID NO: 120678 - RNA, 22 nt, synthetic construct
  source 1..22: mol_type = other RNA
ataaagacagacatttggaata

SEQ ID NO: 120679 - RNA, 22 nt, synthetic construct
  source 1..22: mol_type = other RNA
ataaagacttcacgatgcttag

SEQ ID NO: 120680 - RNA, 22 nt, synthetic construct
  source 1..22: mol_type = other RNA
ataaagagcaggtggaaggcct

SEQ ID NO: 120681 - RNA, 22 nt, synthetic construct
  source 1..22: mol_type = other RNA
ataaagcaagtatgagccacta

SEQ ID NO: 120682 - RNA, 22 nt, synthetic construct
  source 1..22: mol_type = other RNA
ataaagccggattcctttcaaa

SEQ ID NO: 120683 - RNA, 22 nt, synthetic construct
  source 1..22: mol_type = other RNA
ataaaggatgcacaagacagat

SEQ ID NO: 120684 - RNA, 22 nt, synthetic construct
  source 1..22: mol_type = other RNA
ataaaggcaatgctctcttccc

SEQ ID NO: 120685 - RNA, 22 nt, synthetic construct
  source 1..22: mol_type = other RNA
ataaaggctttcgtatggaaga

SEQ ID NO: 120686 - RNA, 22 nt, synthetic construct
  source 1..22: mol_type = other RNA
ataaagggtctggtatctacca

SEQ ID NO: 120687 - RNA, 22 nt, synthetic construct
  source 1..22: mol_type = other RNA
ataaaggtaaggaaaccccagg

SEQ ID NO: 120688 - RNA, 22 nt, synthetic construct
  source 1..22: mol_type = other RNA
ataaaggtgctaattgtttgtt

SEQ ID NO: 120689 - RNA, 22 nt, synthetic construct
  source 1..22: mol_type = other RNA
ataaagtcagaggagcagttac

SEQ ID NO: 120690 - RNA, 22 nt, synthetic construct
  source 1..22: mol_type = other RNA
ataaagtcttccattttagatc

SEQ ID NO: 120691 - RNA, 22 nt, synthetic construct
  source 1..22: mol_type = other RNA
ataaagtcttgctggaagttgg

SEQ ID NO: 120692 - RNA, 22 nt, synthetic construct
  source 1..22: mol_type = other RNA
ataaagttccccattgacaata

SEQ ID NO: 120693 - RNA, 22 nt, synthetic construct
  source 1..22: mol_type = other RNA
ataaagtttccgttttgcaaga

SEQ ID NO: 120694 - RNA, 22 nt, synthetic construct
  source 1..22: mol_type = other RNA
ataaataaaatgtctggccggg

SEQ ID NO: 120695 - RNA, 22 nt, synthetic construct
  source 1..22: mol_type = other RNA
ataaatacgtatatgaaaagcc

SEQ ID NO: 120696 - RNA, 22 nt, synthetic construct
  source 1..22: mol_type = other RNA
ataaatacgtgtatactgggtg

SEQ ID NO: 120697 - RNA, 22 nt, synthetic construct
  source 1..22: mol_type = other RNA
ataaatagggtgctactcaaag

SEQ ID NO: 120698 - RNA, 22 nt, synthetic construct
  source 1..22: mol_type = other RNA
ataaatcaaggtacaatacact

SEQ ID NO: 120699 - RNA, 22 nt, synthetic construct
  source 1..22: mol_type = other RNA
ataaatcacaggaaagatgtct

SEQ ID NO: 120700 - RNA, 22 nt, synthetic construct
  source 1..22: mol_type = other RNA
ataaatcagaaactgacaggac

SEQ ID NO: 120701 - RNA, 22 nt, synthetic construct
  source 1..22: mol_type = other RNA
ataaatccaacgaccggacgtg

SEQ ID NO: 120702 - RNA, 22 nt, synthetic construct
  source 1..22: mol_type = other RNA
ataaatcccacttgatccaggt

SEQ ID NO: 120703 - RNA, 22 nt, synthetic construct
  source 1..22: mol_type = other RNA
ataaatcctcacatgtttggtc

SEQ ID NO: 120704 - RNA, 22 nt, synthetic construct
  source 1..22: mol_type = other RNA
ataaatctaaagccaatcttcc

SEQ ID NO: 120705 - RNA, 22 nt, synthetic construct
  source 1..22: mol_type = other RNA
ataaatctaagtctcaacctac

SEQ ID NO: 120706 - RNA, 22 nt, synthetic construct
  source 1..22: mol_type = other RNA
ataaatgaatattcgttccagc

SEQ ID NO: 120707 - RNA, 22 nt, synthetic construct
  source 1..22: mol_type = other RNA
ataaatgaggtatcatttccaa

SEQ ID NO: 120708 - RNA, 22 nt, synthetic construct
  source 1..22: mol_type = other RNA
ataaatgatgagctactgcatg

SEQ ID NO: 120709 - RNA, 22 nt, synthetic construct
  source 1..22: mol_type = other RNA
ataaatgcataaacgacagcag

SEQ ID NO: 120710 - RNA, 22 nt, synthetic construct
  source 1..22: mol_type = other RNA
ataaatgctcagtgggttcaat

SEQ ID NO: 120711 - RNA, 22 nt, synthetic construct
  source 1..22: mol_type = other RNA
ataaatggctttttacgatgaa

SEQ ID NO: 120712 - RNA, 22 nt, synthetic construct
  source 1..22: mol_type = other RNA
ataaatggtagcttgggctaag

SEQ ID NO: 120713 - RNA, 22 nt, synthetic construct
  source 1..22: mol_type = other RNA
ataaatggtgcaggccagatat

SEQ ID NO: 120714 - RNA, 22 nt, synthetic construct
  source 1..22: mol_type = other RNA
ataaatgttcagtttatgggtc

SEQ ID NO: 120715 - RNA, 22 nt, synthetic construct
  source 1..22: mol_type = other RNA
ataaattacaaaataggcagtc

SEQ ID NO: 120716 - RNA, 22 nt, synthetic construct
  source 1..22: mol_type = other RNA
ataaattacccaaagactttgt

SEQ ID NO: 120717 - RNA, 22 nt, synthetic construct
  source 1..22: mol_type = other RNA
ataaattatagctccaaaagcg

SEQ ID NO: 120718 - RNA, 22 nt, synthetic construct
  source 1..22: mol_type = other RNA
ataaattgcaaaaacagtttcc

SEQ ID NO: 120719 - RNA, 22 nt, synthetic construct
  source 1..22: mol_type = other RNA
ataaatttctgttgcttaagtc

SEQ ID NO: 120720 - RNA, 22 nt, synthetic construct
  source 1..22: mol_type = other RNA
ataaatttgccacattttacca

SEQ ID NO: 120721 - RNA, 22 nt, synthetic construct
  source 1..22: mol_type = other RNA
ataacaaaaatacgaaagtgct

SEQ ID NO: 120722 - RNA, 22 nt, synthetic construct
  source 1..22: mol_type = other RNA
ataacaaagctctgatgctttc

SEQ ID NO: 120723 - RNA, 22 nt, synthetic construct
  source 1..22: mol_type = other RNA
ataacaaagggttcttggaaat

SEQ ID NO: 120724 - RNA, 22 nt, synthetic construct
  source 1..22: mol_type = other RNA
ataacaccatagctgaaggcac

SEQ ID NO: 120725 - RNA, 22 nt, synthetic construct
  source 1..22: mol_type = other RNA
ataacacgcagaaccactgagc

SEQ ID NO: 120726 - RNA, 22 nt, synthetic construct
  source 1..22: mol_type = other RNA
ataacagatggaactctatttt

SEQ ID NO: 120727 - RNA, 22 nt, synthetic construct
  source 1..22: mol_type = other RNA
ataacagcctaagcaaatgtaa

SEQ ID NO: 120728 - RNA, 22 nt, synthetic construct
  source 1..22: mol_type = other RNA
ataacagtattgtcttctaacc

SEQ ID NO: 120729 - RNA, 22 nt, synthetic construct
  source 1..22: mol_type = other RNA
ataacagtggttaggaaaatac

SEQ ID NO: 120730 - RNA, 22 nt, synthetic construct
  source 1..22: mol_type = other RNA
ataacataaaagcgtactgtga

SEQ ID NO: 120731 - RNA, 22 nt, synthetic construct
  source 1..22: mol_type = other RNA
ataacatgcatatgtttgtaac

SEQ ID NO: 120732 - RNA, 22 nt, synthetic construct
  source 1..22: mol_type = other RNA
ataacattaccaataaaagcct

SEQ ID NO: 120733 - RNA, 22 nt, synthetic construct
  source 1..22: mol_type = other RNA
ataaccaatgtcagagatctga

SEQ ID NO: 120734 - RNA, 22 nt, synthetic construct
  source 1..22: mol_type = other RNA
ataaccacatgtggcttgtggc

SEQ ID NO: 120735 - RNA, 22 nt, synthetic construct
  source 1..22: mol_type = other RNA
ataaccacgagtaatggatgtt

SEQ ID NO: 120736 - RNA, 22 nt, synthetic construct
  source 1..22: mol_type = other RNA
ataacccatatctttgcttata

SEQ ID NO: 120737 - RNA, 22 nt, synthetic construct
  source 1..22: mol_type = other RNA
ataacccgttttttccttcatt

SEQ ID NO: 120738 - RNA, 22 nt, synthetic construct
  source 1..22: mol_type = other RNA
ataaccctgttttgtagattaa

SEQ ID NO: 120739 - RNA, 22 nt, synthetic construct
  source 1..22: mol_type = other RNA
ataacctcaaagtggaaacaac

SEQ ID NO: 120740 - RNA, 22 nt, synthetic construct
  source 1..22: mol_type = other RNA
ataacctcataagaactcctgg

SEQ ID NO: 120741 - RNA, 22 nt, synthetic construct
  source 1..22: mol_type = other RNA
ataaccttgaacttccaggctc

SEQ ID NO: 120742 - RNA, 22 nt, synthetic construct
  source 1..22: mol_type = other RNA
ataacgatagtctcctatattg

SEQ ID NO: 120743 - RNA, 22 nt, synthetic construct
  source 1..22: mol_type = other RNA
ataacgggccgggcgctgtggc

SEQ ID NO: 120744 - RNA, 22 nt, synthetic construct
  source 1..22: mol_type = other RNA
ataactaaactttgagtagcac

SEQ ID NO: 120745 - RNA, 22 nt, synthetic construct
  source 1..22: mol_type = other RNA
ataactacacatcagtgctgct

SEQ ID NO: 120746 - RNA, 22 nt, synthetic construct
  source 1..22: mol_type = other RNA
ataactagaaacttcttctgtt

SEQ ID NO: 120747 - RNA, 22 nt, synthetic construct
  source 1..22: mol_type = other RNA
ataactccagcttttattagag

SEQ ID NO: 120748 - RNA, 22 nt, synthetic construct
  source 1..22: mol_type = other RNA
ataactcgtaatgcgatgatca

SEQ ID NO: 120749 - RNA, 22 nt, synthetic construct
  source 1..22: mol_type = other RNA
ataactgaacatgtatgtttct

SEQ ID NO: 120750 - RNA, 22 nt, synthetic construct
  source 1..22: mol_type = other RNA
ataactgatatgagggatgagg

SEQ ID NO: 120751 - RNA, 22 nt, synthetic construct
  source 1..22: mol_type = other RNA
ataactgcctaagtaatgctgg

SEQ ID NO: 120752 - RNA, 22 nt, synthetic construct
  source 1..22: mol_type = other RNA
ataactgggtgtgcacgtttgc

SEQ ID NO: 120753 - RNA, 22 nt, synthetic construct
  source 1..22: mol_type = other RNA
ataactggtgcttttttggtgt

SEQ ID NO: 120754 - RNA, 22 nt, synthetic construct
  source 1..22: mol_type = other RNA
ataactgtaaagtaatcaagtg

SEQ ID NO: 120755 - RNA, 22 nt, synthetic construct
  source 1..22: mol_type = other RNA
ataactgtcctgaattctaaca

SEQ ID NO: 120756 - RNA, 22 nt, synthetic construct
  source 1..22: mol_type = other RNA
ataacttccatgagattacata

SEQ ID NO: 120757 - RNA, 22 nt, synthetic construct
  source 1..22: mol_type = other RNA
ataacttcccagacagggaatg

SEQ ID NO: 120758 - RNA, 22 nt, synthetic construct
  source 1..22: mol_type = other RNA
ataacttggagaacttaaaggt

SEQ ID NO: 120759 - RNA, 22 nt, synthetic construct
  source 1..22: mol_type = other RNA
ataactttaatcaccaggcgcg

SEQ ID NO: 120760 - RNA, 22 nt, synthetic construct
  source 1..22: mol_type = other RNA
ataagaaaatgtgacattagtg

SEQ ID NO: 120761 - RNA, 22 nt, synthetic construct
  source 1..22: mol_type = other RNA
ataagaaagatctcaaacagcc

SEQ ID NO: 120762 - RNA, 22 nt, synthetic construct
  source 1..22: mol_type = other RNA
ataagaactcctggtctcccag

SEQ ID NO: 120763 - RNA, 22 nt, synthetic construct
  source 1..22: mol_type = other RNA
ataagaagattgagtcagtaat

SEQ ID NO: 120764 - RNA, 22 nt, synthetic construct
  source 1..22: mol_type = other RNA
ataagaaggtttgtagagcaag

SEQ ID NO: 120765 - RNA, 22 nt, synthetic construct
  source 1..22: mol_type = other RNA
ataagaagtgaaaaatgaccta

SEQ ID NO: 120766 - RNA, 22 nt, synthetic construct
  source 1..22: mol_type = other RNA
ataagaataccaaattcacgag

SEQ ID NO: 120767 - RNA, 22 nt, synthetic construct
  source 1..22: mol_type = other RNA
ataagacaccgctccacgccca

SEQ ID NO: 120768 - RNA, 22 nt, synthetic construct
  source 1..22: mol_type = other RNA
ataagacccagtggctagtgtg

SEQ ID NO: 120769 - RNA, 22 nt, synthetic construct
  source 1..22: mol_type = other RNA
ataagacccctcaggtgtcact

SEQ ID NO: 120770 - RNA, 22 nt, synthetic construct
  source 1..22: mol_type = other RNA
ataagagaaggaagcaccaacc

SEQ ID NO: 120771 - RNA, 22 nt, synthetic construct
  source 1..22: mol_type = other RNA
ataagagtccccaactgcaaaa

SEQ ID NO: 120772 - RNA, 22 nt, synthetic construct
  source 1..22: mol_type = other RNA
ataagagtgggcaaaaaagtca

SEQ ID NO: 120773 - RNA, 22 nt, synthetic construct
  source 1..22: mol_type = other RNA
ataagatcatacacctggatca

SEQ ID NO: 120774 - RNA, 22 nt, synthetic construct
  source 1..22: mol_type = other RNA
ataagatccaagtattgtatca

SEQ ID NO: 120775 - RNA, 22 nt, synthetic construct
  source 1..22: mol_type = other RNA
ataagatctgtctttggcccat

SEQ ID NO: 120776 - RNA, 22 nt, synthetic construct
  source 1..22: mol_type = other RNA
ataagatgatctaaatggtgtg

SEQ ID NO: 120777 - RNA, 22 nt, synthetic construct
  source 1..22: mol_type = other RNA
ataagcaaaattgacaaaccct

SEQ ID NO: 120778 - RNA, 22 nt, synthetic construct
  source 1..22: mol_type = other RNA
ataagcaaagatatgggttatt

SEQ ID NO: 120779 - RNA, 22 nt, synthetic construct
  source 1..22: mol_type = other RNA
ataagcacatggtgataactgg

SEQ ID NO: 120780 - RNA, 22 nt, synthetic construct
  source 1..22: mol_type = other RNA
ataagcagaattcaaaaacact

SEQ ID NO: 120781 - RNA, 22 nt, synthetic construct
  source 1..22: mol_type = other RNA
ataagccaatatccctgataat

SEQ ID NO: 120782 - RNA, 22 nt, synthetic construct
  source 1..22: mol_type = other RNA
ataagccaccgcactcagcctg

SEQ ID NO: 120783 - RNA, 22 nt, synthetic construct
  source 1..22: mol_type = other RNA
ataagcccaacctgattagagg

SEQ ID NO: 120784 - RNA, 22 nt, synthetic construct
  source 1..22: mol_type = other RNA
ataagctaatcccaaagtgagc

SEQ ID NO: 120785 - RNA, 22 nt, synthetic construct
  source 1..22: mol_type = other RNA
ataagctcccagccaaacagtt

SEQ ID NO: 120786 - RNA, 22 nt, synthetic construct
  source 1..22: mol_type = other RNA
ataagcttcctctggctgacct

SEQ ID NO: 120787 - RNA, 22 nt, synthetic construct
  source 1..22: mol_type = other RNA
ataagcttcgaagcaaaacata

SEQ ID NO: 120788 - RNA, 22 nt, synthetic construct
  source 1..22: mol_type = other RNA
ataaggaaagcacgtttgatct

SEQ ID NO: 120789 - RNA, 22 nt, synthetic construct
  source 1..22: mol_type = other RNA
ataagggcattttcaaggtaga

SEQ ID NO: 120790 - RNA, 22 nt, synthetic construct
  source 1..22: mol_type = other RNA
ataaggggaatcatgcagtact

SEQ ID NO: 120791 - RNA, 22 nt, synthetic construct
  source 1..22: mol_type = other RNA
ataaggggcagggtggagtcca

SEQ ID NO: 120792 - RNA, 22 nt, synthetic construct
  source 1..22: mol_type = other RNA
ataaggggctatctttactttc

SEQ ID NO: 120793 - RNA, 22 nt, synthetic construct
  source 1..22: mol_type = other RNA
ataagggggaatctactctttt

SEQ ID NO: 120794 - RNA, 22 nt, synthetic construct
  source 1..22: mol_type = other RNA
ataagggtctgttttacatgtt

SEQ ID NO: 120795 - RNA, 22 nt, synthetic construct
  source 1..22: mol_type = other RNA
ataagggtgataaaaaggaggg

SEQ ID NO: 120796 - RNA, 22 nt, synthetic construct
  source 1..22: mol_type = other RNA
ataaggtcacattcagaggtat

SEQ ID NO: 120797 - RNA, 22 nt, synthetic construct
  source 1..22: mol_type = other RNA
ataaggtctgtaagtcagttaa

SEQ ID NO: 120798 - RNA, 22 nt, synthetic construct
  source 1..22: mol_type = other RNA
ataaggttgttcttggttaata

SEQ ID NO: 120799 - RNA, 22 nt, synthetic construct
  source 1..22: mol_type = other RNA
ataagtagaaggtcaatctagg

SEQ ID NO: 120800 - RNA, 22 nt, synthetic construct
  source 1..22: mol_type = other RNA
ataagtccctaacagtctcgtg

SEQ ID NO: 120801 - RNA, 22 nt, synthetic construct
  source 1..22: mol_type = other RNA
ataagtgagtttgacctgtaat

SEQ ID NO: 120802 - RNA, 22 nt, synthetic construct
  source 1..22: mol_type = other RNA
ataagtggaatcattccgtata

SEQ ID NO: 120803 - RNA, 22 nt, synthetic construct
  source 1..22: mol_type = other RNA
ataagttaactgaaatcgggag

SEQ ID NO: 120804 - RNA, 22 nt, synthetic construct
  source 1..22: mol_type = other RNA
ataagttcaaagaaactaccta

SEQ ID NO: 120805 - RNA, 22 nt, synthetic construct
  source 1..22: mol_type = other RNA
ataagttctagagatttgctgt

SEQ ID NO: 120806 - RNA, 22 nt, synthetic construct
  source 1..22: mol_type = other RNA
ataagttgggagtctatttctg

SEQ ID NO: 120807 - RNA, 22 nt, synthetic construct
  source 1..22: mol_type = other RNA
ataagtttcatggacttcctat

SEQ ID NO: 120808 - RNA, 22 nt, synthetic construct
  source 1..22: mol_type = other RNA
ataataactacacatcagtgct

SEQ ID NO: 120809 - RNA, 22 nt, synthetic construct
  source 1..22: mol_type = other RNA
ataatacaaatgatgaagggtt

SEQ ID NO: 120810 - RNA, 22 nt, synthetic construct
  source 1..22: mol_type = other RNA
ataatacacttttcaggtattg

SEQ ID NO: 120811 - RNA, 22 nt, synthetic construct
  source 1..22: mol_type = other RNA
ataatacctaacagccggcata

SEQ ID NO: 120812 - RNA, 22 nt, synthetic construct
  source 1..22: mol_type = other RNA
ataatagctatcctaatgggcg

SEQ ID NO: 120813 - RNA, 22 nt, synthetic construct
  source 1..22: mol_type = other RNA
ataatagtaataaaggcaatgc

SEQ ID NO: 120814 - RNA, 22 nt, synthetic construct
  source 1..22: mol_type = other RNA
ataatagtctcacgatactttt

SEQ ID NO: 120815 - RNA, 22 nt, synthetic construct
  source 1..22: mol_type = other RNA
ataatatctggactgaaaagat

SEQ ID NO: 120816 - RNA, 22 nt, synthetic construct
  source 1..22: mol_type = other RNA
ataatatgataccctcaaaaga

SEQ ID NO: 120817 - RNA, 22 nt, synthetic construct
  source 1..22: mol_type = other RNA
ataatatgcctcatgcatccac

SEQ ID NO: 120818 - RNA, 22 nt, synthetic construct
  source 1..22: mol_type = other RNA
ataatcaaattcacagaactgt

SEQ ID NO: 120819 - RNA, 22 nt, synthetic construct
  source 1..22: mol_type = other RNA
ataatcacagacgcaaaggatg

SEQ ID NO: 120820 - RNA, 22 nt, synthetic construct
  source 1..22: mol_type = other RNA
ataatcagccgtgattgcacca

SEQ ID NO: 120821 - RNA, 22 nt, synthetic construct
  source 1..22: mol_type = other RNA
ataatcattgttaggtgctggc

SEQ ID NO: 120822 - RNA, 22 nt, synthetic construct
  source 1..22: mol_type = other RNA
ataatccaactgcagtctgtcc

SEQ ID NO: 120823 - RNA, 22 nt, synthetic construct
  source 1..22: mol_type = other RNA
ataatccagatggacaaattac

SEQ ID NO: 120824 - RNA, 22 nt, synthetic construct
  source 1..22: mol_type = other RNA
ataatccattgggtacataccg

SEQ ID NO: 120825 - RNA, 22 nt, synthetic construct
  source 1..22: mol_type = other RNA
ataatcccgcaccttgattttg

SEQ ID NO: 120826 - RNA, 22 nt, synthetic construct
  source 1..22: mol_type = other RNA
ataatctaaccctcctcctcta

SEQ ID NO: 120827 - RNA, 22 nt, synthetic construct
  source 1..22: mol_type = other RNA
ataatctttggtgctgataaat

SEQ ID NO: 120828 - RNA, 22 nt, synthetic construct
  source 1..22: mol_type = other RNA
ataatgaaagctcccaatgctt

SEQ ID NO: 120829 - RNA, 22 nt, synthetic construct
  source 1..22: mol_type = other RNA
ataatgagatagaccagatgcg

SEQ ID NO: 120830 - RNA, 22 nt, synthetic construct
  source 1..22: mol_type = other RNA
ataatgagtaacatgtggaaca

SEQ ID NO: 120831 - RNA, 22 nt, synthetic construct
  source 1..22: mol_type = other RNA
ataatgatgactatgaaaagcc

SEQ ID NO: 120832 - RNA, 22 nt, synthetic construct
  source 1..22: mol_type = other RNA
ataatgcacatgggcatgggtc

SEQ ID NO: 120833 - RNA, 22 nt, synthetic construct
  source 1..22: mol_type = other RNA
ataatgctatcattttaaaggg

SEQ ID NO: 120834 - RNA, 22 nt, synthetic construct
  source 1..22: mol_type = other RNA
ataatgctatccagaagagaat

SEQ ID NO: 120835 - RNA, 22 nt, synthetic construct
  source 1..22: mol_type = other RNA
ataatgctgttctctgtgtggt

SEQ ID NO: 120836 - RNA, 22 nt, synthetic construct
  source 1..22: mol_type = other RNA
ataatggagtactatgcagcaa

SEQ ID NO: 120837 - RNA, 22 nt, synthetic construct
  source 1..22: mol_type = other RNA
ataatgtccagaggaggaagag

SEQ ID NO: 120838 - RNA, 22 nt, synthetic construct
  source 1..22: mol_type = other RNA
ataatgtctttttacacttgga

SEQ ID NO: 120839 - RNA, 22 nt, synthetic construct
  source 1..22: mol_type = other RNA
ataatgttagaattcaggacag

SEQ ID NO: 120840 - RNA, 22 nt, synthetic construct
  source 1..22: mol_type = other RNA
ataatgttatgaagcttttctc

SEQ ID NO: 120841 - RNA, 22 nt, synthetic construct
  source 1..22: mol_type = other RNA
ataatgttttccgtgtgacaaa

SEQ ID NO: 120842 - RNA, 22 nt, synthetic construct
  source 1..22: mol_type = other RNA
ataattaagacaatgtggagtt

SEQ ID NO: 120843 - RNA, 22 nt, synthetic construct
  source 1..22: mol_type = other RNA
ataattacaataatgcacatgg

SEQ ID NO: 120844 - RNA, 22 nt, synthetic construct
  source 1..22: mol_type = other RNA
ataattcaattttcatgggttg

SEQ ID NO: 120845 - RNA, 22 nt, synthetic construct
  source 1..22: mol_type = other RNA
ataattctgccttcaatgtttg

SEQ ID NO: 120846 - RNA, 22 nt, synthetic construct
  source 1..22: mol_type = other RNA
ataattctgtgccaagcaactt

SEQ ID NO: 120847 - RNA, 22 nt, synthetic construct
  source 1..22: mol_type = other RNA
ataattcttcctgtcttggacc

SEQ ID NO: 120848 - RNA, 22 nt, synthetic construct
  source 1..22: mol_type = other RNA
ataattgaacccactgagcatt

SEQ ID NO: 120849 - RNA, 22 nt, synthetic construct
  source 1..22: mol_type = other RNA
ataattgctgcagtttttccac

SEQ ID NO: 120850 - RNA, 22 nt, synthetic construct
  source 1..22: mol_type = other RNA
ataattgcttttgctgagggaa

SEQ ID NO: 120851 - RNA, 22 nt, synthetic construct
  source 1..22: mol_type = other RNA
ataattggttaaacttggtctg

SEQ ID NO: 120852 - RNA, 22 nt, synthetic construct
  source 1..22: mol_type = other RNA
ataatttacatagtgctcttct

SEQ ID NO: 120853 - RNA, 22 nt, synthetic construct
  source 1..22: mol_type = other RNA
ataatttccaggtcattacata

SEQ ID NO: 120854 - RNA, 22 nt, synthetic construct
  source 1..22: mol_type = other RNA
ataatttccctcagaatttgag

SEQ ID NO: 120855 - RNA, 22 nt, synthetic construct
  source 1..22: mol_type = other RNA
ataatttctgagagtattgcca

SEQ ID NO: 120856 - RNA, 22 nt, synthetic construct
  source 1..22: mol_type = other RNA
ataatttggatgaacgctaaat

SEQ ID NO: 120857 - RNA, 22 nt, synthetic construct
  source 1..22: mol_type = other RNA
ataatttggcaaaaaatgcagt

SEQ ID NO: 120858 - RNA, 22 nt, synthetic construct
  source 1..22: mol_type = other RNA
ataattttttgagacggaatct

SEQ ID NO: 120859 - RNA, 22 nt, synthetic construct
  source 1..22: mol_type = other RNA
atacaaaaagcacctaccataa

SEQ ID NO: 120860 - RNA, 22 nt, synthetic construct
  source 1..22: mol_type = other RNA
atacaaaaatgacacaacttac

SEQ ID NO: 120861 - RNA, 22 nt, synthetic construct
  source 1..22: mol_type = other RNA
atacaaaactgaactcaaaatg

SEQ ID NO: 120862 - RNA, 22 nt, synthetic construct
  source 1..22: mol_type = other RNA
atacaaaccaaaaaatgtggca

SEQ ID NO: 120863 - RNA, 22 nt, synthetic construct
  source 1..22: mol_type = other RNA
atacaaaggtgttaagccgttc

SEQ ID NO: 120864 - RNA, 22 nt, synthetic construct
  source 1..22: mol_type = other RNA
atacaaataactccagctttta

SEQ ID NO: 120865 - RNA, 22 nt, synthetic construct
  source 1..22: mol_type = other RNA
atacaaatgatgaagggttttc

SEQ ID NO: 120866 - RNA, 22 nt, synthetic construct
  source 1..22: mol_type = other RNA
atacaacagcaccttttttggt

SEQ ID NO: 120867 - RNA, 22 nt, synthetic construct
  source 1..22: mol_type = other RNA
atacaaccggaaaatgcttaac

SEQ ID NO: 120868 - RNA, 22 nt, synthetic construct
  source 1..22: mol_type = other RNA
atacaactctgaccattgtgtg

SEQ ID NO: 120869 - RNA, 22 nt, synthetic construct
  source 1..22: mol_type = other RNA
atacaactgctcataatagtct

SEQ ID NO: 120870 - RNA, 22 nt, synthetic construct
  source 1..22: mol_type = other RNA
atacaaggagacctactaaaag

SEQ ID NO: 120871 - RNA, 22 nt, synthetic construct
  source 1..22: mol_type = other RNA
atacaaggtcaatctgaaaaat

SEQ ID NO: 120872 - RNA, 22 nt, synthetic construct
  source 1..22: mol_type = other RNA
atacaatacttggatcttatct

SEQ ID NO: 120873 - RNA, 22 nt, synthetic construct
  source 1..22: mol_type = other RNA
atacaatgtgagccacatacat

SEQ ID NO: 120874 - RNA, 22 nt, synthetic construct
  source 1..22: mol_type = other RNA
atacacaaaaagatctgtggac

SEQ ID NO: 120875 - RNA, 22 nt, synthetic construct
  source 1..22: mol_type = other RNA
atacacaagatctctatgcaga

SEQ ID NO: 120876 - RNA, 22 nt, synthetic construct
  source 1..22: mol_type = other RNA
atacacacataagggggaatct

SEQ ID NO: 120877 - RNA, 22 nt, synthetic construct
  source 1..22: mol_type = other RNA
atacacagggaaaactacatgt

SEQ ID NO: 120878 - RNA, 22 nt, synthetic construct
  source 1..22: mol_type = other RNA
atacacatcagattttgaagat

SEQ ID NO: 120879 - RNA, 22 nt, synthetic construct
  source 1..22: mol_type = other RNA
atacacatccagaagtcacttt

SEQ ID NO: 120880 - RNA, 22 nt, synthetic construct
  source 1..22: mol_type = other RNA
atacacatgttgagtcttgttt

SEQ ID NO: 120881 - RNA, 22 nt, synthetic construct
  source 1..22: mol_type = other RNA
atacaccaaactcaaaaggaca

SEQ ID NO: 120882 - RNA, 22 nt, synthetic construct
  source 1..22: mol_type = other RNA
atacacctggatcaagtgggat

SEQ ID NO: 120883 - RNA, 22 nt, synthetic construct
  source 1..22: mol_type = other RNA
atacacgagtgtgtttcgcaaa

SEQ ID NO: 120884 - RNA, 22 nt, synthetic construct
  source 1..22: mol_type = other RNA
atacacgtggctgtcaaaaatg

SEQ ID NO: 120885 - RNA, 22 nt, synthetic construct
  source 1..22: mol_type = other RNA
atacactcatttcctttcagtc

SEQ ID NO: 120886 - RNA, 22 nt, synthetic construct
  source 1..22: mol_type = other RNA
atacacttctatccagtgacac

SEQ ID NO: 120887 - RNA, 22 nt, synthetic construct
  source 1..22: mol_type = other RNA
atacacttttcaggtattgagc

SEQ ID NO: 120888 - RNA, 22 nt, synthetic construct
  source 1..22: mol_type = other RNA
atacagagcacagactcaagcc

SEQ ID NO: 120889 - RNA, 22 nt, synthetic construct
  source 1..22: mol_type = other RNA
atacagcaaaagaattaaactc

SEQ ID NO: 120890 - RNA, 22 nt, synthetic construct
  source 1..22: mol_type = other RNA
atacagcaaatctctagaactt

SEQ ID NO: 120891 - RNA, 22 nt, synthetic construct
  source 1..22: mol_type = other RNA
atacagctccaaagaacaggag

SEQ ID NO: 120892 - RNA, 22 nt, synthetic construct
  source 1..22: mol_type = other RNA
atacaggaagagactatctctt

SEQ ID NO: 120893 - RNA, 22 nt, synthetic construct
  source 1..22: mol_type = other RNA
atacaggagttccgatttctcg

SEQ ID NO: 120894 - RNA, 22 nt, synthetic construct
  source 1..22: mol_type = other RNA
atacaggtgcttacagactgat

SEQ ID NO: 120895 - RNA, 22 nt, synthetic construct
  source 1..22: mol_type = other RNA
atacagtaaagccccattgtac

SEQ ID NO: 120896 - RNA, 22 nt, synthetic construct
  source 1..22: mol_type = other RNA
atacagtgccttcagctatggt

SEQ ID NO: 120897 - RNA, 22 nt, synthetic construct
  source 1..22: mol_type = other RNA
atacagtgtttttgaattctgc

SEQ ID NO: 120898 - RNA, 22 nt, synthetic construct
  source 1..22: mol_type = other RNA
atacagttggaactcttgcggt

SEQ ID NO: 120899 - RNA, 22 nt, synthetic construct
  source 1..22: mol_type = other RNA
atacagttttgaccaaaacaaa

SEQ ID NO: 120900 - RNA, 22 nt, synthetic construct
  source 1..22: mol_type = other RNA
atacatgacatggttttcctac

SEQ ID NO: 120901 - RNA, 22 nt, synthetic construct
  source 1..22: mol_type = other RNA
atacatgaggcctctccccttg

SEQ ID NO: 120902 - RNA, 22 nt, synthetic construct
  source 1..22: mol_type = other RNA
atacatgtcatgttcccggatt

SEQ ID NO: 120903 - RNA, 22 nt, synthetic construct
  source 1..22: mol_type = other RNA
atacatgtttagcaagattact

SEQ ID NO: 120904 - RNA, 22 nt, synthetic construct
  source 1..22: mol_type = other RNA
atacatttaaaagaaaatggcc

SEQ ID NO: 120905 - RNA, 22 nt, synthetic construct
  source 1..22: mol_type = other RNA
ataccaaaaaaggtgctgttgt

SEQ ID NO: 120906 - RNA, 22 nt, synthetic construct
  source 1..22: mol_type = other RNA
ataccaaaacccttgggatgca

SEQ ID NO: 120907 - RNA, 22 nt, synthetic construct
  source 1..22: mol_type = other RNA
ataccaaattcacgagactgtt

SEQ ID NO: 120908 - RNA, 22 nt, synthetic construct
  source 1..22: mol_type = other RNA
ataccaagcccggcacggtggc

SEQ ID NO: 120909 - RNA, 22 nt, synthetic construct
  source 1..22: mol_type = other RNA
ataccacattttgttcattcat

SEQ ID NO: 120910 - RNA, 22 nt, synthetic construct
  source 1..22: mol_type = other RNA
ataccaccacattcggccaaga

SEQ ID NO: 120911 - RNA, 22 nt, synthetic construct
  source 1..22: mol_type = other RNA
ataccacctgaaatctgatttg

SEQ ID NO: 120912 - RNA, 22 nt, synthetic construct
  source 1..22: mol_type = other RNA
ataccacctgtcagaaacacca

SEQ ID NO: 120913 - RNA, 22 nt, synthetic construct
  source 1..22: mol_type = other RNA
ataccacttagtttgcaataca

SEQ ID NO: 120914 - RNA, 22 nt, synthetic construct
  source 1..22: mol_type = other RNA
ataccagaccctttatcggata

SEQ ID NO: 120915 - RNA, 22 nt, synthetic construct
  source 1..22: mol_type = other RNA
ataccagagattgggaaaatct

SEQ ID NO: 120916 - RNA, 22 nt, synthetic construct
  source 1..22: mol_type = other RNA
ataccagaggttaaagcaacag

SEQ ID NO: 120917 - RNA, 22 nt, synthetic construct
  source 1..22: mol_type = other RNA
ataccaggttttggtaatggga

SEQ ID NO: 120918 - RNA, 22 nt, synthetic construct
  source 1..22: mol_type = other RNA
ataccataaagtcagaggagca

SEQ ID NO: 120919 - RNA, 22 nt, synthetic construct
  source 1..22: mol_type = other RNA
atacccaagtaaacaactgact

SEQ ID NO: 120920 - RNA, 22 nt, synthetic construct
  source 1..22: mol_type = other RNA
atacccacaagaaaaacctaaa

SEQ ID NO: 120921 - RNA, 22 nt, synthetic construct
  source 1..22: mol_type = other RNA
atacccaggtgtgagattgata

SEQ ID NO: 120922 - RNA, 22 nt, synthetic construct
  source 1..22: mol_type = other RNA
ataccccaaccctacctagggt

SEQ ID NO: 120923 - RNA, 22 nt, synthetic construct
  source 1..22: mol_type = other RNA
ataccccctggaaataagtttc

SEQ ID NO: 120924 - RNA, 22 nt, synthetic construct
  source 1..22: mol_type = other RNA
atacccctccctacctggcagt

SEQ ID NO: 120925 - RNA, 22 nt, synthetic construct
  source 1..22: mol_type = other RNA
ataccctcaaaagatgcagaaa

SEQ ID NO: 120926 - RNA, 22 nt, synthetic construct
  source 1..22: mol_type = other RNA
atacccttctgttaatagatag

SEQ ID NO: 120927 - RNA, 22 nt, synthetic construct
  source 1..22: mol_type = other RNA
ataccgacggctcaggcctgtt

SEQ ID NO: 120928 - RNA, 22 nt, synthetic construct
  source 1..22: mol_type = other RNA
ataccgagtaatgggatggctg

SEQ ID NO: 120929 - RNA, 22 nt, synthetic construct
  source 1..22: mol_type = other RNA
atacctaacagccggcatatgt

SEQ ID NO: 120930 - RNA, 22 nt, synthetic construct
  source 1..22: mol_type = other RNA
atacctagtacgtaacctaaag

SEQ ID NO: 120931 - RNA, 22 nt, synthetic construct
  source 1..22: mol_type = other RNA
atacctagttttccaatccggg

SEQ ID NO: 120932 - RNA, 22 nt, synthetic construct
  source 1..22: mol_type = other RNA
atacctatttagagggatgaat

SEQ ID NO: 120933 - RNA, 22 nt, synthetic construct
  source 1..22: mol_type = other RNA
atacctgaaaagtgtattattc

SEQ ID NO: 120934 - RNA, 22 nt, synthetic construct
  source 1..22: mol_type = other RNA
atacctgcaggttgatactagt

SEQ ID NO: 120935 - RNA, 22 nt, synthetic construct
  source 1..22: mol_type = other RNA
atacctggtccttaaatttcta

SEQ ID NO: 120936 - RNA, 22 nt, synthetic construct
  source 1..22: mol_type = other RNA
atacctgtagaaaatagggacg

SEQ ID NO: 120937 - RNA, 22 nt, synthetic construct
  source 1..22: mol_type = other RNA
atacctgttgaatagcaactgt

SEQ ID NO: 120938 - RNA, 22 nt, synthetic construct
  source 1..22: mol_type = other RNA
ataccttatgtgaaagtagagg

SEQ ID NO: 120939 - RNA, 22 nt, synthetic construct
  source 1..22: mol_type = other RNA
ataccttcttgagagtctctta

SEQ ID NO: 120940 - RNA, 22 nt, synthetic construct
  source 1..22: mol_type = other RNA
ataccttgaaaggatactgaga

SEQ ID NO: 120941 - RNA, 22 nt, synthetic construct
  source 1..22: mol_type = other RNA
atacgaaagcctttattttttc

SEQ ID NO: 120942 - RNA, 22 nt, synthetic construct
  source 1..22: mol_type = other RNA
atacgaaagtgctctacccttt

SEQ ID NO: 120943 - RNA, 22 nt, synthetic construct
  source 1..22: mol_type = other RNA
atacggaaatataacattacca

SEQ ID NO: 120944 - RNA, 22 nt, synthetic construct
  source 1..22: mol_type = other RNA
atacggaatgattccacttata

SEQ ID NO: 120945 - RNA, 22 nt, synthetic construct
  source 1..22: mol_type = other RNA
atacggagtctcgctctgtccc

SEQ ID NO: 120946 - RNA, 22 nt, synthetic construct
  source 1..22: mol_type = other RNA
atacgtatatgaaaagcccaat

SEQ ID NO: 120947 - RNA, 22 nt, synthetic construct
  source 1..22: mol_type = other RNA
atacgtatttatcatgtcttct

SEQ ID NO: 120948 - RNA, 22 nt, synthetic construct
  source 1..22: mol_type = other RNA
atacgtcgtcccccatcccctt

SEQ ID NO: 120949 - RNA, 22 nt, synthetic construct
  source 1..22: mol_type = other RNA
atacgtgtatactgggtgtgat

SEQ ID NO: 120950 - RNA, 22 nt, synthetic construct
  source 1..22: mol_type = other RNA
atacgttaaaggaaaagagatc

SEQ ID NO: 120951 - RNA, 22 nt, synthetic construct
  source 1..22: mol_type = other RNA
atacgttaactgtattgcaaac

SEQ ID NO: 120952 - RNA, 22 nt, synthetic construct
  source 1..22: mol_type = other RNA
atactaaatacaccaaactcaa

SEQ ID NO: 120953 - RNA, 22 nt, synthetic construct
  source 1..22: mol_type = other RNA
atactaacgatccttactacca

SEQ ID NO: 120954 - RNA, 22 nt, synthetic construct
  source 1..22: mol_type = other RNA
atactacaagagttcccctata

SEQ ID NO: 120955 - RNA, 22 nt, synthetic construct
  source 1..22: mol_type = other RNA
atactacgcctagctgactttt

SEQ ID NO: 120956 - RNA, 22 nt, synthetic construct
  source 1..22: mol_type = other RNA
atactactgcaaatatccaatc

SEQ ID NO: 120957 - RNA, 22 nt, synthetic construct
  source 1..22: mol_type = other RNA
atactagcaaactgaatcagac

SEQ ID NO: 120958 - RNA, 22 nt, synthetic construct
  source 1..22: mol_type = other RNA
atactagtagaaagcaggttca

SEQ ID NO: 120959 - RNA, 22 nt, synthetic construct
  source 1..22: mol_type = other RNA
atactagtaggatgaattacaa

SEQ ID NO: 120960 - RNA, 22 nt, synthetic construct
  source 1..22: mol_type = other RNA
atactagtttagtgcagtatct

SEQ ID NO: 120961 - RNA, 22 nt, synthetic construct
  source 1..22: mol_type = other RNA
atactatgtatgtggctcacat

SEQ ID NO: 120962 - RNA, 22 nt, synthetic construct
  source 1..22: mol_type = other RNA
atactattttctatagtggctg

SEQ ID NO: 120963 - RNA, 22 nt, synthetic construct
  source 1..22: mol_type = other RNA
atactcaaactatgcttaatct

SEQ ID NO: 120964 - RNA, 22 nt, synthetic construct
  source 1..22: mol_type = other RNA
atactcaacatcactagctatt

SEQ ID NO: 120965 - RNA, 22 nt, synthetic construct
  source 1..22: mol_type = other RNA
atactcaagggctttcaatagt

SEQ ID NO: 120966 - RNA, 22 nt, synthetic construct
  source 1..22: mol_type = other RNA
atactcaatcagtggccagtga

SEQ ID NO: 120967 - RNA, 22 nt, synthetic construct
  source 1..22: mol_type = other RNA
atactcagccccctcgaagaga

SEQ ID NO: 120968 - RNA, 22 nt, synthetic construct
  source 1..22: mol_type = other RNA
atactcatgcttgctccagaga

SEQ ID NO: 120969 - RNA, 22 nt, synthetic construct
  source 1..22: mol_type = other RNA
atactccaccagcatcttttga

SEQ ID NO: 120970 - RNA, 22 nt, synthetic construct
  source 1..22: mol_type = other RNA
atactcgtagttttttggtaga

SEQ ID NO: 120971 - RNA, 22 nt, synthetic construct
  source 1..22: mol_type = other RNA
atactcgtgtgtctcataaagc

SEQ ID NO: 120972 - RNA, 22 nt, synthetic construct
  source 1..22: mol_type = other RNA
atactctagtggtgcttaattc

SEQ ID NO: 120973 - RNA, 22 nt, synthetic construct
  source 1..22: mol_type = other RNA
atactctcagaaattataagct

SEQ ID NO: 120974 - RNA, 22 nt, synthetic construct
  source 1..22: mol_type = other RNA
atactctgagacaggatccaga

SEQ ID NO: 120975 - RNA, 22 nt, synthetic construct
  source 1..22: mol_type = other RNA
atactcttaaagtttcaaactg

SEQ ID NO: 120976 - RNA, 22 nt, synthetic construct
  source 1..22: mol_type = other RNA
atactgaaagacagacctctat

SEQ ID NO: 120977 - RNA, 22 nt, synthetic construct
  source 1..22: mol_type = other RNA
atactgaaggcatagggccttc

SEQ ID NO: 120978 - RNA, 22 nt, synthetic construct
  source 1..22: mol_type = other RNA
atactgaagttctcaggggtaa

SEQ ID NO: 120979 - RNA, 22 nt, synthetic construct
  source 1..22: mol_type = other RNA
atactgactagtggctcatact

SEQ ID NO: 120980 - RNA, 22 nt, synthetic construct
  source 1..22: mol_type = other RNA
atactgcactaaactagtatca

SEQ ID NO: 120981 - RNA, 22 nt, synthetic construct
  source 1..22: mol_type = other RNA
atactgcactctcaaaattaaa

SEQ ID NO: 120982 - RNA, 22 nt, synthetic construct
  source 1..22: mol_type = other RNA
atactgcagcacttttaaggct

SEQ ID NO: 120983 - RNA, 22 nt, synthetic construct
  source 1..22: mol_type = other RNA
atactgcatattgaagccagca

SEQ ID NO: 120984 - RNA, 22 nt, synthetic construct
  source 1..22: mol_type = other RNA
atactgcattgtgcacttaaaa

SEQ ID NO: 120985 - RNA, 22 nt, synthetic construct
  source 1..22: mol_type = other RNA
atactggaaaactagagatggg

SEQ ID NO: 120986 - RNA, 22 nt, synthetic construct
  source 1..22: mol_type = other RNA
atactggaaggactcacagctt

SEQ ID NO: 120987 - RNA, 22 nt, synthetic construct
  source 1..22: mol_type = other RNA
atactggccatgttttatttct

SEQ ID NO: 120988 - RNA, 22 nt, synthetic construct
  source 1..22: mol_type = other RNA
atactgggtgtgatggcgcatg

SEQ ID NO: 120989 - RNA, 22 nt, synthetic construct
  source 1..22: mol_type = other RNA
atactgtaaccctgtttccctt

SEQ ID NO: 120990 - RNA, 22 nt, synthetic construct
  source 1..22: mol_type = other RNA
atactgtagaatgtttttccgt

SEQ ID NO: 120991 - RNA, 22 nt, synthetic construct
  source 1..22: mol_type = other RNA
atactgtcacaggctttcctac

SEQ ID NO: 120992 - RNA, 22 nt, synthetic construct
  source 1..22: mol_type = other RNA
atactgtctcagtcccaaatgg

SEQ ID NO: 120993 - RNA, 22 nt, synthetic construct
  source 1..22: mol_type = other RNA
atactgtgatgattttagaagg

SEQ ID NO: 120994 - RNA, 22 nt, synthetic construct
  source 1..22: mol_type = other RNA
atactgtgcagtggatgactag

SEQ ID NO: 120995 - RNA, 22 nt, synthetic construct
  source 1..22: mol_type = other RNA
atactgttatgacaagactacc

SEQ ID NO: 120996 - RNA, 22 nt, synthetic construct
  source 1..22: mol_type = other RNA
atacttaagagcatgttgggcc

SEQ ID NO: 120997 - RNA, 22 nt, synthetic construct
  source 1..22: mol_type = other RNA
atacttaatagcccaacagggt

SEQ ID NO: 120998 - RNA, 22 nt, synthetic construct
  source 1..22: mol_type = other RNA
atacttagctaatttcagagag

SEQ ID NO: 120999 - RNA, 22 nt, synthetic construct
  source 1..22: mol_type = other RNA
atacttcaaagggtcactatta

SEQ ID NO: 121000 - RNA, 22 nt, synthetic construct
  source 1..22: mol_type = other RNA
atacttcaatgctacagtaagc

SEQ ID NO: 121001 - RNA, 22 nt, synthetic construct
  source 1..22: mol_type = other RNA
atacttcatctttcctgatcac

SEQ ID NO: 121002 - RNA, 22 nt, synthetic construct
  source 1..22: mol_type = other RNA
atacttcctgatttcaaaactt

SEQ ID NO: 121003 - RNA, 22 nt, synthetic construct
  source 1..22: mol_type = other RNA
atacttgaacattctgtagaag

SEQ ID NO: 121004 - RNA, 22 nt, synthetic construct
  source 1..22: mol_type = other RNA
atacttgattacaagggtgaca

SEQ ID NO: 121005 - RNA, 22 nt, synthetic construct
  source 1..22: mol_type = other RNA
atacttgctttattacttcagt

SEQ ID NO: 121006 - RNA, 22 nt, synthetic construct
  source 1..22: mol_type = other RNA
atacttggacaggggacatgaa

SEQ ID NO: 121007 - RNA, 22 nt, synthetic construct
  source 1..22: mol_type = other RNA
atacttggatcttatctgctgt

SEQ ID NO: 121008 - RNA, 22 nt, synthetic construct
  source 1..22: mol_type = other RNA
atacttgtcaagttctgatttc

SEQ ID NO: 121009 - RNA, 22 nt, synthetic construct
  source 1..22: mol_type = other RNA
atacttgtgtagcgggaaaaaa

SEQ ID NO: 121010 - RNA, 22 nt, synthetic construct
  source 1..22: mol_type = other RNA
atactttagacatgggctaaat

SEQ ID NO: 121011 - RNA, 22 nt, synthetic construct
  source 1..22: mol_type = other RNA
atactttcacactgattttctg

SEQ ID NO: 121012 - RNA, 22 nt, synthetic construct
  source 1..22: mol_type = other RNA
atactttcccatctctagtttt

SEQ ID NO: 121013 - RNA, 22 nt, synthetic construct
  source 1..22: mol_type = other RNA
atactttggaaggtaggagggt

SEQ ID NO: 121014 - RNA, 22 nt, synthetic construct
  source 1..22: mol_type = other RNA
atactttgtcaggcatgctaac

SEQ ID NO: 121015 - RNA, 22 nt, synthetic construct
  source 1..22: mol_type = other RNA
atacttttcaactgaacaacgc

SEQ ID NO: 121016 - RNA, 22 nt, synthetic construct
  source 1..22: mol_type = other RNA
atagaaaacttgagcagatcag

SEQ ID NO: 121017 - RNA, 22 nt, synthetic construct
  source 1..22: mol_type = other RNA
atagaaaagacaatagctagtg

SEQ ID NO: 121018 - RNA, 22 nt, synthetic construct
  source 1..22: mol_type = other RNA
atagaaaatagtatgaaggttc

SEQ ID NO: 121019 - RNA, 22 nt, synthetic construct
  source 1..22: mol_type = other RNA
atagaaaatccttacttccagc

SEQ ID NO: 121020 - RNA, 22 nt, synthetic construct
  source 1..22: mol_type = other RNA
atagaaagcaccagggcctctg

SEQ ID NO: 121021 - RNA, 22 nt, synthetic construct
  source 1..22: mol_type = other RNA
atagaaaggagaccagttagga

SEQ ID NO: 121022 - RNA, 22 nt, synthetic construct
  source 1..22: mol_type = other RNA
atagaaagttagtgtctaatgg

SEQ ID NO: 121023 - RNA, 22 nt, synthetic construct
  source 1..22: mol_type = other RNA
atagaactgtcacaattcacag

SEQ ID NO: 121024 - RNA, 22 nt, synthetic construct
  source 1..22: mol_type = other RNA
atagaagagcagtgtgttctgc

SEQ ID NO: 121025 - RNA, 22 nt, synthetic construct
  source 1..22: mol_type = other RNA
atagaagcgctcttcaagcatt

SEQ ID NO: 121026 - RNA, 22 nt, synthetic construct
  source 1..22: mol_type = other RNA
atagaaggccagagggaatcta

SEQ ID NO: 121027 - RNA, 22 nt, synthetic construct
  source 1..22: mol_type = other RNA
atagaagggagaacccaggaac

SEQ ID NO: 121028 - RNA, 22 nt, synthetic construct
  source 1..22: mol_type = other RNA
atagaagtaaatcccggccagg

SEQ ID NO: 121029 - RNA, 22 nt, synthetic construct
  source 1..22: mol_type = other RNA
atagaagtgtatcagatgcttc

SEQ ID NO: 121030 - RNA, 22 nt, synthetic construct
  source 1..22: mol_type = other RNA
atagaataccacttagtttgca

SEQ ID NO: 121031 - RNA, 22 nt, synthetic construct
  source 1..22: mol_type = other RNA
atagacaaagacaagttcttac

SEQ ID NO: 121032 - RNA, 22 nt, synthetic construct
  source 1..22: mol_type = other RNA
atagacagcatccccagaaaga

SEQ ID NO: 121033 - RNA, 22 nt, synthetic construct
  source 1..22: mol_type = other RNA
atagaccagatgcgtggttcac

SEQ ID NO: 121034 - RNA, 22 nt, synthetic construct
  source 1..22: mol_type = other RNA
atagacccaaagcaaaagcaaa

SEQ ID NO: 121035 - RNA, 22 nt, synthetic construct
  source 1..22: mol_type = other RNA
atagacctgaatgactgttgcc

SEQ ID NO: 121036 - RNA, 22 nt, synthetic construct
  source 1..22: mol_type = other RNA
atagactcccaacttataatat

SEQ ID NO: 121037 - RNA, 22 nt, synthetic construct
  source 1..22: mol_type = other RNA
atagactcttcagaggtctgtt

SEQ ID NO: 121038 - RNA, 22 nt, synthetic construct
  source 1..22: mol_type = other RNA
atagactggattaaggagatgg

SEQ ID NO: 121039 - RNA, 22 nt, synthetic construct
  source 1..22: mol_type = other RNA
atagactttagagtcagttgtt

SEQ ID NO: 121040 - RNA, 22 nt, synthetic construct
  source 1..22: mol_type = other RNA
atagagagattcaagaaaccac

SEQ ID NO: 121041 - RNA, 22 nt, synthetic construct
  source 1..22: mol_type = other RNA
atagagatcttgtgtatctttt

SEQ ID NO: 121042 - RNA, 22 nt, synthetic construct
  source 1..22: mol_type = other RNA
atagaggatgggcattccagag

SEQ ID NO: 121043 - RNA, 22 nt, synthetic construct
  source 1..22: mol_type = other RNA
atagagggagcatcttcccatg

SEQ ID NO: 121044 - RNA, 22 nt, synthetic construct
  source 1..22: mol_type = other RNA
atagagggcctaaataaaacac

SEQ ID NO: 121045 - RNA, 22 nt, synthetic construct
  source 1..22: mol_type = other RNA
atagaggtctgtctttcagtat

SEQ ID NO: 121046 - RNA, 22 nt, synthetic construct
  source 1..22: mol_type = other RNA
atagagtaccaggtcagccaga

SEQ ID NO: 121047 - RNA, 22 nt, synthetic construct
  source 1..22: mol_type = other RNA
atagagttccatctgttatagt

SEQ ID NO: 121048 - RNA, 22 nt, synthetic construct
  source 1..22: mol_type = other RNA
atagataaactggaattcatca

SEQ ID NO: 121049 - RNA, 22 nt, synthetic construct
  source 1..22: mol_type = other RNA
atagataaggttgttcttggtt

SEQ ID NO: 121050 - RNA, 22 nt, synthetic construct
  source 1..22: mol_type = other RNA
atagataggtcatgtacataaa

SEQ ID NO: 121051 - RNA, 22 nt, synthetic construct
  source 1..22: mol_type = other RNA
atagatcacaaggactggcttc

SEQ ID NO: 121052 - RNA, 22 nt, synthetic construct
  source 1..22: mol_type = other RNA
atagatcaccaggggctggggg

SEQ ID NO: 121053 - RNA, 22 nt, synthetic construct
  source 1..22: mol_type = other RNA
atagatgaaactaaatgtgagc

SEQ ID NO: 121054 - RNA, 22 nt, synthetic construct
  source 1..22: mol_type = other RNA
atagatgacgaaagtgaagccc

SEQ ID NO: 121055 - RNA, 22 nt, synthetic construct
  source 1..22: mol_type = other RNA
atagatgcctagaaaggaattg

SEQ ID NO: 121056 - RNA, 22 nt, synthetic construct
  source 1..22: mol_type = other RNA
atagatgttatgccccctcttc

SEQ ID NO: 121057 - RNA, 22 nt, synthetic construct
  source 1..22: mol_type = other RNA
atagcaactgttttttcctccc

SEQ ID NO: 121058 - RNA, 22 nt, synthetic construct
  source 1..22: mol_type = other RNA
atagcaacttgcagaagagtga

SEQ ID NO: 121059 - RNA, 22 nt, synthetic construct
  source 1..22: mol_type = other RNA
atagcaaggaagcagaatgtcc

SEQ ID NO: 121060 - RNA, 22 nt, synthetic construct
  source 1..22: mol_type = other RNA
atagcagaaacacaggactgtg

SEQ ID NO: 121061 - RNA, 22 nt, synthetic construct
  source 1..22: mol_type = other RNA
atagcagaaccttagaaattta

SEQ ID NO: 121062 - RNA, 22 nt, synthetic construct
  source 1..22: mol_type = other RNA
atagcagaatggccctgcgatt

SEQ ID NO: 121063 - RNA, 22 nt, synthetic construct
  source 1..22: mol_type = other RNA
atagcagcattgtttacagtag

SEQ ID NO: 121064 - RNA, 22 nt, synthetic construct
  source 1..22: mol_type = other RNA
atagcaggattcttgttaagca

SEQ ID NO: 121065 - RNA, 22 nt, synthetic construct
  source 1..22: mol_type = other RNA
atagcagggtcatgcacacgct

SEQ ID NO: 121066 - RNA, 22 nt, synthetic construct
  source 1..22: mol_type = other RNA
atagcagtaaaatgaaaaaacc

SEQ ID NO: 121067 - RNA, 22 nt, synthetic construct
  source 1..22: mol_type = other RNA
atagcagtgctgaaagctagaa

SEQ ID NO: 121068 - RNA, 22 nt, synthetic construct
  source 1..22: mol_type = other RNA
atagcagtgggaagtggagtgc

SEQ ID NO: 121069 - RNA, 22 nt, synthetic construct
  source 1..22: mol_type = other RNA
atagcatcttagctcttccctt

SEQ ID NO: 121070 - RNA, 22 nt, synthetic construct
  source 1..22: mol_type = other RNA
atagcattatcccagatctaac

SEQ ID NO: 121071 - RNA, 22 nt, synthetic construct
  source 1..22: mol_type = other RNA
atagcattatccctttaaaatg

SEQ ID NO: 121072 - RNA, 22 nt, synthetic construct
  source 1..22: mol_type = other RNA
atagccagtgcagcaagcagta

SEQ ID NO: 121073 - RNA, 22 nt, synthetic construct
  source 1..22: mol_type = other RNA
atagccataagagtccccaact

SEQ ID NO: 121074 - RNA, 22 nt, synthetic construct
  source 1..22: mol_type = other RNA
atagcccaacagggttttgttt

SEQ ID NO: 121075 - RNA, 22 nt, synthetic construct
  source 1..22: mol_type = other RNA
atagccccttatcaggaaagtg

SEQ ID NO: 121076 - RNA, 22 nt, synthetic construct
  source 1..22: mol_type = other RNA
atagcctcctaagttttggggg

SEQ ID NO: 121077 - RNA, 22 nt, synthetic construct
  source 1..22: mol_type = other RNA
atagcgaaaggtacgacgctct

SEQ ID NO: 121078 - RNA, 22 nt, synthetic construct
  source 1..22: mol_type = other RNA
atagcgagacctcatctctgca

SEQ ID NO: 121079 - RNA, 22 nt, synthetic construct
  source 1..22: mol_type = other RNA
atagctaagaaacagtaattag

SEQ ID NO: 121080 - RNA, 22 nt, synthetic construct
  source 1..22: mol_type = other RNA
atagctagtgatgttgagtatc

SEQ ID NO: 121081 - RNA, 22 nt, synthetic construct
  source 1..22: mol_type = other RNA
atagctagtgtcttagtctgac

SEQ ID NO: 121082 - RNA, 22 nt, synthetic construct
  source 1..22: mol_type = other RNA
atagctatcctaatgggcgtgg

SEQ ID NO: 121083 - RNA, 22 nt, synthetic construct
  source 1..22: mol_type = other RNA
atagctcactagagcttcaacc

SEQ ID NO: 121084 - RNA, 22 nt, synthetic construct
  source 1..22: mol_type = other RNA
atagctccaaaagcgaaaggca

SEQ ID NO: 121085 - RNA, 22 nt, synthetic construct
  source 1..22: mol_type = other RNA
atagctgaaggcactgtatggt

SEQ ID NO: 121086 - RNA, 22 nt, synthetic construct
  source 1..22: mol_type = other RNA
atagctgagaagtaacattaca

SEQ ID NO: 121087 - RNA, 22 nt, synthetic construct
  source 1..22: mol_type = other RNA
atagctgtggaagcacagtctc

SEQ ID NO: 121088 - RNA, 22 nt, synthetic construct
  source 1..22: mol_type = other RNA
atagcttcctaagaaagggtgt

SEQ ID NO: 121089 - RNA, 22 nt, synthetic construct
  source 1..22: mol_type = other RNA
atagcttctgagctgttaatgg

SEQ ID NO: 121090 - RNA, 22 nt, synthetic construct
  source 1..22: mol_type = other RNA
atagcttgacaaaaggcccctt

SEQ ID NO: 121091 - RNA, 22 nt, synthetic construct
  source 1..22: mol_type = other RNA
ataggaaagtgacagatgagaa

SEQ ID NO: 121092 - RNA, 22 nt, synthetic construct
  source 1..22: mol_type = other RNA
ataggaaatacttgatctacat

SEQ ID NO: 121093 - RNA, 22 nt, synthetic construct
  source 1..22: mol_type = other RNA
ataggaagtccatgaaacttat

SEQ ID NO: 121094 - RNA, 22 nt, synthetic construct
  source 1..22: mol_type = other RNA
ataggaagtggctagacggaaa

SEQ ID NO: 121095 - RNA, 22 nt, synthetic construct
  source 1..22: mol_type = other RNA
ataggaatagtattcaggacag

SEQ ID NO: 121096 - RNA, 22 nt, synthetic construct
  source 1..22: mol_type = other RNA
ataggagactatcgttatatcc

SEQ ID NO: 121097 - RNA, 22 nt, synthetic construct
  source 1..22: mol_type = other RNA
ataggagttcattcgtagcagg

SEQ ID NO: 121098 - RNA, 22 nt, synthetic construct
  source 1..22: mol_type = other RNA
ataggataatgtccagaggagg

SEQ ID NO: 121099 - RNA, 22 nt, synthetic construct
  source 1..22: mol_type = other RNA
ataggatgggcagactccttcc

SEQ ID NO: 121100 - RNA, 22 nt, synthetic construct
  source 1..22: mol_type = other RNA
ataggattaagacactacaaaa

SEQ ID NO: 121101 - RNA, 22 nt, synthetic construct
  source 1..22: mol_type = other RNA
ataggcaaattcatagatcacc

SEQ ID NO: 121102 - RNA, 22 nt, synthetic construct
  source 1..22: mol_type = other RNA
ataggcaatgagtctgacatac

SEQ ID NO: 121103 - RNA, 22 nt, synthetic construct
  source 1..22: mol_type = other RNA
ataggcaatttagaattctctc

SEQ ID NO: 121104 - RNA, 22 nt, synthetic construct
  source 1..22: mol_type = other RNA
ataggcacgcgcccccatgcct

SEQ ID NO: 121105 - RNA, 22 nt, synthetic construct
  source 1..22: mol_type = other RNA
ataggcagtcctctactttcac

SEQ ID NO: 121106 - RNA, 22 nt, synthetic construct
  source 1..22: mol_type = other RNA
ataggcatctctcccttcctgt

SEQ ID NO: 121107 - RNA, 22 nt, synthetic construct
  source 1..22: mol_type = other RNA
ataggcctaggtgtgataactg

SEQ ID NO: 121108 - RNA, 22 nt, synthetic construct
  source 1..22: mol_type = other RNA
ataggcgtgagccatcgcgccc

SEQ ID NO: 121109 - RNA, 22 nt, synthetic construct
  source 1..22: mol_type = other RNA
ataggcttagtacagccatcaa

SEQ ID NO: 121110 - RNA, 22 nt, synthetic construct
  source 1..22: mol_type = other RNA
atagggatgttgcctactagcc

SEQ ID NO: 121111 - RNA, 22 nt, synthetic construct
  source 1..22: mol_type = other RNA
atagggcctcaaatttcattta

SEQ ID NO: 121112 - RNA, 22 nt, synthetic construct
  source 1..22: mol_type = other RNA
atagggccttctactttaataa

SEQ ID NO: 121113 - RNA, 22 nt, synthetic construct
  source 1..22: mol_type = other RNA
ataggggaactcttgtagtatt

SEQ ID NO: 121114 - RNA, 22 nt, synthetic construct
  source 1..22: mol_type = other RNA
atagggtgctactcaaagttta

SEQ ID NO: 121115 - RNA, 22 nt, synthetic construct
  source 1..22: mol_type = other RNA
ataggtaatactctagtggtgc

SEQ ID NO: 121116 - RNA, 22 nt, synthetic construct
  source 1..22: mol_type = other RNA
ataggtagtacatattcattgt

SEQ ID NO: 121117 - RNA, 22 nt, synthetic construct
  source 1..22: mol_type = other RNA
ataggtattcatgctgtgaatt

SEQ ID NO: 121118 - RNA, 22 nt, synthetic construct
  source 1..22: mol_type = other RNA
ataggtcactgcagtctcaaac

SEQ ID NO: 121119 - RNA, 22 nt, synthetic construct
  source 1..22: mol_type = other RNA
ataggtgtgtgttccttcctac

SEQ ID NO: 121120 - RNA, 22 nt, synthetic construct
  source 1..22: mol_type = other RNA
ataggttgaatagggcctcaaa

SEQ ID NO: 121121 - RNA, 22 nt, synthetic construct
  source 1..22: mol_type = other RNA
ataggttttttcattttactgc

SEQ ID NO: 121122 - RNA, 22 nt, synthetic construct
  source 1..22: mol_type = other RNA
atagtaactttctgcttaaagc

SEQ ID NO: 121123 - RNA, 22 nt, synthetic construct
  source 1..22: mol_type = other RNA
atagtaataaaggcaatgctct

SEQ ID NO: 121124 - RNA, 22 nt, synthetic construct
  source 1..22: mol_type = other RNA
atagtactgaccatctcagcac

SEQ ID NO: 121125 - RNA, 22 nt, synthetic construct
  source 1..22: mol_type = other RNA
atagtagctgttgaattgttgc

SEQ ID NO: 121126 - RNA, 22 nt, synthetic construct
  source 1..22: mol_type = other RNA
atagtagcttcaatgagggcag

SEQ ID NO: 121127 - RNA, 22 nt, synthetic construct
  source 1..22: mol_type = other RNA
atagtagttgctcagaaaattt

SEQ ID NO: 121128 - RNA, 22 nt, synthetic construct
  source 1..22: mol_type = other RNA
atagtattacctcccatgcatt

SEQ ID NO: 121129 - RNA, 22 nt, synthetic construct
  source 1..22: mol_type = other RNA
atagtattcaggacagattaaa

SEQ ID NO: 121130 - RNA, 22 nt, synthetic construct
  source 1..22: mol_type = other RNA
atagtattccatggtatgtgcc

SEQ ID NO: 121131 - RNA, 22 nt, synthetic construct
  source 1..22: mol_type = other RNA
atagtcaagtaacagttcaata

SEQ ID NO: 121132 - RNA, 22 nt, synthetic construct
  source 1..22: mol_type = other RNA
atagtcatcattattagcaaac

SEQ ID NO: 121133 - RNA, 22 nt, synthetic construct
  source 1..22: mol_type = other RNA
atagtcattccgctaaacattt

SEQ ID NO: 121134 - RNA, 22 nt, synthetic construct
  source 1..22: mol_type = other RNA
atagtccactttccatcttagg

SEQ ID NO: 121135 - RNA, 22 nt, synthetic construct
  source 1..22: mol_type = other RNA
atagtctcacgatactttttat

SEQ ID NO: 121136 - RNA, 22 nt, synthetic construct
  source 1..22: mol_type = other RNA
atagtctcctatattgtcaatg

SEQ ID NO: 121137 - RNA, 22 nt, synthetic construct
  source 1..22: mol_type = other RNA
atagtctcttcctgtatatctc

SEQ ID NO: 121138 - RNA, 22 nt, synthetic construct
  source 1..22: mol_type = other RNA
atagtcttagctcttaagctta

SEQ ID NO: 121139 - RNA, 22 nt, synthetic construct
  source 1..22: mol_type = other RNA
atagtcttccaaaatattgaag

SEQ ID NO: 121140 - RNA, 22 nt, synthetic construct
  source 1..22: mol_type = other RNA
atagtcttccaattgcagaaaa

SEQ ID NO: 121141 - RNA, 22 nt, synthetic construct
  source 1..22: mol_type = other RNA
atagtgaccctttgaagtatgt

SEQ ID NO: 121142 - RNA, 22 nt, synthetic construct
  source 1..22: mol_type = other RNA
atagtgctcttctgatcacaga

SEQ ID NO: 121143 - RNA, 22 nt, synthetic construct
  source 1..22: mol_type = other RNA
atagtgctttttactttgcgaa

SEQ ID NO: 121144 - RNA, 22 nt, synthetic construct
  source 1..22: mol_type = other RNA
atagtggctgcaccattttttc

SEQ ID NO: 121145 - RNA, 22 nt, synthetic construct
  source 1..22: mol_type = other RNA
atagtgggaccccgtctctgca

SEQ ID NO: 121146 - RNA, 22 nt, synthetic construct
  source 1..22: mol_type = other RNA
atagtgggtagaagcagcaagg

SEQ ID NO: 121147 - RNA, 22 nt, synthetic construct
  source 1..22: mol_type = other RNA
atagtggtaaggagccaaacat

SEQ ID NO: 121148 - RNA, 22 nt, synthetic construct
  source 1..22: mol_type = other RNA
atagtggtttgaagcttcactt

SEQ ID NO: 121149 - RNA, 22 nt, synthetic construct
  source 1..22: mol_type = other RNA
atagtgtcctttgatgcacaaa

SEQ ID NO: 121150 - RNA, 22 nt, synthetic construct
  source 1..22: mol_type = other RNA
atagtgtttccttccagatgtt

SEQ ID NO: 121151 - RNA, 22 nt, synthetic construct
  source 1..22: mol_type = other RNA
atagttaacgtttatctacaga

SEQ ID NO: 121152 - RNA, 22 nt, synthetic construct
  source 1..22: mol_type = other RNA
atagttaagtctgaaagcttct

SEQ ID NO: 121153 - RNA, 22 nt, synthetic construct
  source 1..22: mol_type = other RNA
atagttaatgtgtgaagaagga

SEQ ID NO: 121154 - RNA, 22 nt, synthetic construct
  source 1..22: mol_type = other RNA
atagttcacctctccgggtaaa

SEQ ID NO: 121155 - RNA, 22 nt, synthetic construct
  source 1..22: mol_type = other RNA
atagttgcagattcatcttgac

SEQ ID NO: 121156 - RNA, 22 nt, synthetic construct
  source 1..22: mol_type = other RNA
atagttggtcagaaaaatggaa

SEQ ID NO: 121157 - RNA, 22 nt, synthetic construct
  source 1..22: mol_type = other RNA
atagtttaattgggggaaaatt

SEQ ID NO: 121158 - RNA, 22 nt, synthetic construct
  source 1..22: mol_type = other RNA
atagtttagttactcaaatcca

SEQ ID NO: 121159 - RNA, 22 nt, synthetic construct
  source 1..22: mol_type = other RNA
atagtttctcaacttagccttg

SEQ ID NO: 121160 - RNA, 22 nt, synthetic construct
  source 1..22: mol_type = other RNA
atagtttgagtatttcatgtac

SEQ ID NO: 121161 - RNA, 22 nt, synthetic construct
  source 1..22: mol_type = other RNA
atataaaaagacacaaaagagc

SEQ ID NO: 121162 - RNA, 22 nt, synthetic construct
  source 1..22: mol_type = other RNA
atataaaaagcctctgtggacc

SEQ ID NO: 121163 - RNA, 22 nt, synthetic construct
  source 1..22: mol_type = other RNA
atataaaaattccgctctggtt

SEQ ID NO: 121164 - RNA, 22 nt, synthetic construct
  source 1..22: mol_type = other RNA
atataaacgtgtgtgtaagcac

SEQ ID NO: 121165 - RNA, 22 nt, synthetic construct
  source 1..22: mol_type = other RNA
atataaactcttccttatccga

SEQ ID NO: 121166 - RNA, 22 nt, synthetic construct
  source 1..22: mol_type = other RNA
atataaactggaaggaaataag

SEQ ID NO: 121167 - RNA, 22 nt, synthetic construct
  source 1..22: mol_type = other RNA
atataaagaactccaacaattc

SEQ ID NO: 121168 - RNA, 22 nt, synthetic construct
  source 1..22: mol_type = other RNA
atataaatacgtgtatactggg

SEQ ID NO: 121169 - RNA, 22 nt, synthetic construct
  source 1..22: mol_type = other RNA
atataaatgctcagtgggttca

SEQ ID NO: 121170 - RNA, 22 nt, synthetic construct
  source 1..22: mol_type = other RNA
atataacgatagtctcctatat

SEQ ID NO: 121171 - RNA, 22 nt, synthetic construct
  source 1..22: mol_type = other RNA
atataagagtgggcaaaaaagt

SEQ ID NO: 121172 - RNA, 22 nt, synthetic construct
  source 1..22: mol_type = other RNA
atataagatgatctaaatggtg

SEQ ID NO: 121173 - RNA, 22 nt, synthetic construct
  source 1..22: mol_type = other RNA
atataaggggaatcatgcagta

SEQ ID NO: 121174 - RNA, 22 nt, synthetic construct
  source 1..22: mol_type = other RNA
atataagtggaatcattccgta

SEQ ID NO: 121175 - RNA, 22 nt, synthetic construct
  source 1..22: mol_type = other RNA
atataagttcaaagaaactacc

SEQ ID NO: 121176 - RNA, 22 nt, synthetic construct
  source 1..22: mol_type = other RNA
atataatccaactgcagtctgt

SEQ ID NO: 121177 - RNA, 22 nt, synthetic construct
  source 1..22: mol_type = other RNA
atataatctaaccctcctcctc

SEQ ID NO: 121178 - RNA, 22 nt, synthetic construct
  source 1..22: mol_type = other RNA
atataatggagtactatgcagc

SEQ ID NO: 121179 - RNA, 22 nt, synthetic construct
  source 1..22: mol_type = other RNA
atatacacaaaaagatctgtgg

SEQ ID NO: 121180 - RNA, 22 nt, synthetic construct
  source 1..22: mol_type = other RNA
atatacaggaagagactatctc

SEQ ID NO: 121181 - RNA, 22 nt, synthetic construct
  source 1..22: mol_type = other RNA
atatacatgacatggttttcct

SEQ ID NO: 121182 - RNA, 22 nt, synthetic construct
  source 1..22: mol_type = other RNA
atataccacattttgttcattc

SEQ ID NO: 121183 - RNA, 22 nt, synthetic construct
  source 1..22: mol_type = other RNA
atatacccttctgttaatagat

SEQ ID NO: 121184 - RNA, 22 nt, synthetic construct
  source 1..22: mol_type = other RNA
atatacctgtagaaaataggga

SEQ ID NO: 121185 - RNA, 22 nt, synthetic construct
  source 1..22: mol_type = other RNA
atataccttatgtgaaagtaga

SEQ ID NO: 121186 - RNA, 22 nt, synthetic construct
  source 1..22: mol_type = other RNA
atatacggaatgattccactta

SEQ ID NO: 121187 - RNA, 22 nt, synthetic construct
  source 1..22: mol_type = other RNA
atatactaaatacaccaaactc

SEQ ID NO: 121188 - RNA, 22 nt, synthetic construct
  source 1..22: mol_type = other RNA
atatactctgagacaggatcca

SEQ ID NO: 121189 - RNA, 22 nt, synthetic construct
  source 1..22: mol_type = other RNA
atatactgaagttctcaggggt

SEQ ID NO: 121190 - RNA, 22 nt, synthetic construct
  source 1..22: mol_type = other RNA
atatactgactagtggctcata

SEQ ID NO: 121191 - RNA, 22 nt, synthetic construct
  source 1..22: mol_type = other RNA
atatactggaaaactagagatg

SEQ ID NO: 121192 - RNA, 22 nt, synthetic construct
  source 1..22: mol_type = other RNA
atatacttgtcaagttctgatt

SEQ ID NO: 121193 - RNA, 22 nt, synthetic construct
  source 1..22: mol_type = other RNA
atatagaaggccagagggaatc

SEQ ID NO: 121194 - RNA, 22 nt, synthetic construct
  source 1..22: mol_type = other RNA
atatagaagtaaatcccggcca

SEQ ID NO: 121195 - RNA, 22 nt, synthetic construct
  source 1..22: mol_type = other RNA
atatagcgagacctcatctctg

SEQ ID NO: 121196 - RNA, 22 nt, synthetic construct
  source 1..22: mol_type = other RNA
atataggagactatcgttatat

SEQ ID NO: 121197 - RNA, 22 nt, synthetic construct
  source 1..22: mol_type = other RNA
atatagtgggaccccgtctctg

SEQ ID NO: 121198 - RNA, 22 nt, synthetic construct
  source 1..22: mol_type = other RNA
atatatacggaatgattccact

SEQ ID NO: 121199 - RNA, 22 nt, synthetic construct
  source 1..22: mol_type = other RNA
atatatactctgagacaggatc

SEQ ID NO: 121200 - RNA, 22 nt, synthetic construct
  source 1..22: mol_type = other RNA
atatatactgaagttctcaggg

SEQ ID NO: 121201 - RNA, 22 nt, synthetic construct
  source 1..22: mol_type = other RNA
atatatcatagagtaccaggtc

SEQ ID NO: 121202 - RNA, 22 nt, synthetic construct
  source 1..22: mol_type = other RNA
atatatctgtctgggataatga

SEQ ID NO: 121203 - RNA, 22 nt, synthetic construct
  source 1..22: mol_type = other RNA
atatatgatgatttttgccagt

SEQ ID NO: 121204 - RNA, 22 nt, synthetic construct
  source 1..22: mol_type = other RNA
atatatgcattcccatgttcac

SEQ ID NO: 121205 - RNA, 22 nt, synthetic construct
  source 1..22: mol_type = other RNA
atatatgctccctaaatacaca

SEQ ID NO: 121206 - RNA, 22 nt, synthetic construct
  source 1..22: mol_type = other RNA
atatattatggtctttttccag

SEQ ID NO: 121207 - RNA, 22 nt, synthetic construct
  source 1..22: mol_type = other RNA
atatattctaaacctgaggtct

SEQ ID NO: 121208 - RNA, 22 nt, synthetic construct
  source 1..22: mol_type = other RNA
atatattttctaagagccaaag

SEQ ID NO: 121209 - RNA, 22 nt, synthetic construct
  source 1..22: mol_type = other RNA
atatcacactgtttgattactg

SEQ ID NO: 121210 - RNA, 22 nt, synthetic construct
  source 1..22: mol_type = other RNA
atatcacccagaccaagtttaa

SEQ ID NO: 121211 - RNA, 22 nt, synthetic construct
  source 1..22: mol_type = other RNA
atatcagaagtgctgacttggc

SEQ ID NO: 121212 - RNA, 22 nt, synthetic construct
  source 1..22: mol_type = other RNA
atatcagggatcacagatacaa

SEQ ID NO: 121213 - RNA, 22 nt, synthetic construct
  source 1..22: mol_type = other RNA
atatcagttatcacacctaggc

SEQ ID NO: 121214 - RNA, 22 nt, synthetic construct
  source 1..22: mol_type = other RNA
atatcatagagtaccaggtcag

SEQ ID NO: 121215 - RNA, 22 nt, synthetic construct
  source 1..22: mol_type = other RNA
atatcatcatcttatacttggc

SEQ ID NO: 121216 - RNA, 22 nt, synthetic construct
  source 1..22: mol_type = other RNA
atatcatcttaagaaccataca

SEQ ID NO: 121217 - RNA, 22 nt, synthetic construct
  source 1..22: mol_type = other RNA
atatcatttgaatgatgcgaaa

SEQ ID NO: 121218 - RNA, 22 nt, synthetic construct
  source 1..22: mol_type = other RNA
atatccaaagataaaggtaagg

SEQ ID NO: 121219 - RNA, 22 nt, synthetic construct
  source 1..22: mol_type = other RNA
atatccaagcacaaacctggca

SEQ ID NO: 121220 - RNA, 22 nt, synthetic construct
  source 1..22: mol_type = other RNA
atatccaatcactggctagtag

SEQ ID NO: 121221 - RNA, 22 nt, synthetic construct
  source 1..22: mol_type = other RNA
atatccacagtatgctgtttac

SEQ ID NO: 121222 - RNA, 22 nt, synthetic construct
  source 1..22: mol_type = other RNA
atatccagattgatatctgagt

SEQ ID NO: 121223 - RNA, 22 nt, synthetic construct
  source 1..22: mol_type = other RNA
atatcccaaattggcatttaaa

SEQ ID NO: 121224 - RNA, 22 nt, synthetic construct
  source 1..22: mol_type = other RNA
atatcccatataaggggaatca

SEQ ID NO: 121225 - RNA, 22 nt, synthetic construct
  source 1..22: mol_type = other RNA
atatccccatttttctcgacac

SEQ ID NO: 121226 - RNA, 22 nt, synthetic construct
  source 1..22: mol_type = other RNA
atatccctgataatcacagacg

SEQ ID NO: 121227 - RNA, 22 nt, synthetic construct
  source 1..22: mol_type = other RNA
atatccctggggtttccttacc

SEQ ID NO: 121228 - RNA, 22 nt, synthetic construct
  source 1..22: mol_type = other RNA
atatccgaaagaactgaaagca

SEQ ID NO: 121229 - RNA, 22 nt, synthetic construct
  source 1..22: mol_type = other RNA
atatcctaaacacttagcatgt

SEQ ID NO: 121230 - RNA, 22 nt, synthetic construct
  source 1..22: mol_type = other RNA
atatcctcagggtaggaaaaga

SEQ ID NO: 121231 - RNA, 22 nt, synthetic construct
  source 1..22: mol_type = other RNA
atatcctgtaaacctggaatcc

SEQ ID NO: 121232 - RNA, 22 nt, synthetic construct
  source 1..22: mol_type = other RNA
atatccttctacatccccccac

SEQ ID NO: 121233 - RNA, 22 nt, synthetic construct
  source 1..22: mol_type = other RNA
atatccttttatgtgcagtcta

SEQ ID NO: 121234 - RNA, 22 nt, synthetic construct
  source 1..22: mol_type = other RNA
atatctacatgtacgccaattt

SEQ ID NO: 121235 - RNA, 22 nt, synthetic construct
  source 1..22: mol_type = other RNA
atatctatcagggctgaaaaac

SEQ ID NO: 121236 - RNA, 22 nt, synthetic construct
  source 1..22: mol_type = other RNA
atatctccctcacagtccactc

SEQ ID NO: 121237 - RNA, 22 nt, synthetic construct
  source 1..22: mol_type = other RNA
atatctccttttaagagtgaag

SEQ ID NO: 121238 - RNA, 22 nt, synthetic construct
  source 1..22: mol_type = other RNA
atatctgaggtcaggagctcga

SEQ ID NO: 121239 - RNA, 22 nt, synthetic construct
  source 1..22: mol_type = other RNA
atatctgagtgttgtgtgcacc

SEQ ID NO: 121240 - RNA, 22 nt, synthetic construct
  source 1..22: mol_type = other RNA
atatctgattttgtgtcttctg

SEQ ID NO: 121241 - RNA, 22 nt, synthetic construct
  source 1..22: mol_type = other RNA
atatctggactgaaaagataca

SEQ ID NO: 121242 - RNA, 22 nt, synthetic construct
  source 1..22: mol_type = other RNA
atatctggcctgcaccatttat

SEQ ID NO: 121243 - RNA, 22 nt, synthetic construct
  source 1..22: mol_type = other RNA
atatctgtaagtcatcaaagga

SEQ ID NO: 121244 - RNA, 22 nt, synthetic construct
  source 1..22: mol_type = other RNA
atatctgtctgggataatgagt

SEQ ID NO: 121245 - RNA, 22 nt, synthetic construct
  source 1..22: mol_type = other RNA
atatctttaggtgttttttcct

SEQ ID NO: 121246 - RNA, 22 nt, synthetic construct
  source 1..22: mol_type = other RNA
atatctttggaaaaatgtccgt

SEQ ID NO: 121247 - RNA, 22 nt, synthetic construct
  source 1..22: mol_type = other RNA
atatctttggggagataccttg

SEQ ID NO: 121248 - RNA, 22 nt, synthetic construct
  source 1..22: mol_type = other RNA
atatgaaaagcccaatctacag

SEQ ID NO: 121249 - RNA, 22 nt, synthetic construct
  source 1..22: mol_type = other RNA
atatgaaaagcttcccccctct

SEQ ID NO: 121250 - RNA, 22 nt, synthetic construct
  source 1..22: mol_type = other RNA
atatgaaagaggagacattaca

SEQ ID NO: 121251 - RNA, 22 nt, synthetic construct
  source 1..22: mol_type = other RNA
atatgaaatcacacaatcttga

SEQ ID NO: 121252 - RNA, 22 nt, synthetic construct
  source 1..22: mol_type = other RNA
atatgaaccacactgacaggac

SEQ ID NO: 121253 - RNA, 22 nt, synthetic construct
  source 1..22: mol_type = other RNA
atatgaagcattaatgcaacct

SEQ ID NO: 121254 - RNA, 22 nt, synthetic construct
  source 1..22: mol_type = other RNA
atatgaataaaccacgcagttt

SEQ ID NO: 121255 - RNA, 22 nt, synthetic construct
  source 1..22: mol_type = other RNA
atatgactggtgtccttctgag

SEQ ID NO: 121256 - RNA, 22 nt, synthetic construct
  source 1..22: mol_type = other RNA
atatgagaattcattgttgtgt

SEQ ID NO: 121257 - RNA, 22 nt, synthetic construct
  source 1..22: mol_type = other RNA
atatgagggatgaggaagagga

SEQ ID NO: 121258 - RNA, 22 nt, synthetic construct
  source 1..22: mol_type = other RNA
atatgagttcctgcttccccca

SEQ ID NO: 121259 - RNA, 22 nt, synthetic construct
  source 1..22: mol_type = other RNA
atatgataccctcaaaagatgc

SEQ ID NO: 121260 - RNA, 22 nt, synthetic construct
  source 1..22: mol_type = other RNA
atatgatactcgtagttttttg

SEQ ID NO: 121261 - RNA, 22 nt, synthetic construct
  source 1..22: mol_type = other RNA
atatgatccagcagtttcactt

SEQ ID NO: 121262 - RNA, 22 nt, synthetic construct
  source 1..22: mol_type = other RNA
atatgatctatcaatctcacac

SEQ ID NO: 121263 - RNA, 22 nt, synthetic construct
  source 1..22: mol_type = other RNA
atatgatgatttttgccagtgt

SEQ ID NO: 121264 - RNA, 22 nt, synthetic construct
  source 1..22: mol_type = other RNA
atatgcacaatggaatattact

SEQ ID NO: 121265 - RNA, 22 nt, synthetic construct
  source 1..22: mol_type = other RNA
atatgcaggaccaactttaagc

SEQ ID NO: 121266 - RNA, 22 nt, synthetic construct
  source 1..22: mol_type = other RNA
atatgcagtatgtgccattttt

SEQ ID NO: 121267 - RNA, 22 nt, synthetic construct
  source 1..22: mol_type = other RNA
atatgcatgttatttggggatt

SEQ ID NO: 121268 - RNA, 22 nt, synthetic construct
  source 1..22: mol_type = other RNA
atatgcattaagccagtcacta

SEQ ID NO: 121269 - RNA, 22 nt, synthetic construct
  source 1..22: mol_type = other RNA
atatgcattcccatgttcactg

SEQ ID NO: 121270 - RNA, 22 nt, synthetic construct
  source 1..22: mol_type = other RNA
atatgccacattttttggtttg

SEQ ID NO: 121271 - RNA, 22 nt, synthetic construct
  source 1..22: mol_type = other RNA
atatgccggctgttaggtatta

SEQ ID NO: 121272 - RNA, 22 nt, synthetic construct
  source 1..22: mol_type = other RNA
atatgcctagatgattcgcatt

SEQ ID NO: 121273 - RNA, 22 nt, synthetic construct
  source 1..22: mol_type = other RNA
atatgcctagatttcaatctgg

SEQ ID NO: 121274 - RNA, 22 nt, synthetic construct
  source 1..22: mol_type = other RNA
atatgcctcatgcatccacatt

SEQ ID NO: 121275 - RNA, 22 nt, synthetic construct
  source 1..22: mol_type = other RNA
atatgctccctaaatacacatg

SEQ ID NO: 121276 - RNA, 22 nt, synthetic construct
  source 1..22: mol_type = other RNA
atatgctgtagtgattcacttt

SEQ ID NO: 121277 - RNA, 22 nt, synthetic construct
  source 1..22: mol_type = other RNA
atatgctgtttttgaaaagaac

SEQ ID NO: 121278 - RNA, 22 nt, synthetic construct
  source 1..22: mol_type = other RNA
atatgctttgagctacaaactc

SEQ ID NO: 121279 - RNA, 22 nt, synthetic construct
  source 1..22: mol_type = other RNA
atatggaggcaatgttgatttt

SEQ ID NO: 121280 - RNA, 22 nt, synthetic construct
  source 1..22: mol_type = other RNA
atatggcaattccataaatgtt

SEQ ID NO: 121281 - RNA, 22 nt, synthetic construct
  source 1..22: mol_type = other RNA
atatgggagtccctgctttcag

SEQ ID NO: 121282 - RNA, 22 nt, synthetic construct
  source 1..22: mol_type = other RNA
atatgggatatctaacataatc

SEQ ID NO: 121283 - RNA, 22 nt, synthetic construct
  source 1..22: mol_type = other RNA
atatgggatgcttaaagcgcta

SEQ ID NO: 121284 - RNA, 22 nt, synthetic construct
  source 1..22: mol_type = other RNA
atatgggccaaagacagatctt

SEQ ID NO: 121285 - RNA, 22 nt, synthetic construct
  source 1..22: mol_type = other RNA
atatgggttattcacccaagaa

SEQ ID NO: 121286 - RNA, 22 nt, synthetic construct
  source 1..22: mol_type = other RNA
atatggtcactgctgatgtaag

SEQ ID NO: 121287 - RNA, 22 nt, synthetic construct
  source 1..22: mol_type = other RNA
atatggtctaccatgttgttct

SEQ ID NO: 121288 - RNA, 22 nt, synthetic construct
  source 1..22: mol_type = other RNA
atatggttaatagtgacccttt

SEQ ID NO: 121289 - RNA, 22 nt, synthetic construct
  source 1..22: mol_type = other RNA
atatggtttaaggtaagggtcc

SEQ ID NO: 121290 - RNA, 22 nt, synthetic construct
  source 1..22: mol_type = other RNA
atatggtttacaatggttcata

SEQ ID NO: 121291 - RNA, 22 nt, synthetic construct
  source 1..22: mol_type = other RNA
atatgtaatgacctggaaatta

SEQ ID NO: 121292 - RNA, 22 nt, synthetic construct
  source 1..22: mol_type = other RNA
atatgtactacctatagaattc

SEQ ID NO: 121293 - RNA, 22 nt, synthetic construct
  source 1..22: mol_type = other RNA
atatgtagggcaccgtgacaga

SEQ ID NO: 121294 - RNA, 22 nt, synthetic construct
  source 1..22: mol_type = other RNA
atatgtcactgtaagaataatg

SEQ ID NO: 121295 - RNA, 22 nt, synthetic construct
  source 1..22: mol_type = other RNA
atatgtcagatggtaaattggt

SEQ ID NO: 121296 - RNA, 22 nt, synthetic construct
  source 1..22: mol_type = other RNA
atatgtccttttgagtttggtg

SEQ ID NO: 121297 - RNA, 22 nt, synthetic construct
  source 1..22: mol_type = other RNA
atatgtcgcatgaaaacagcta

SEQ ID NO: 121298 - RNA, 22 nt, synthetic construct
  source 1..22: mol_type = other RNA
atatgtgaaaatactaacgatc

SEQ ID NO: 121299 - RNA, 22 nt, synthetic construct
  source 1..22: mol_type = other RNA
atatgtgtacaatggggcttta

SEQ ID NO: 121300 - RNA, 22 nt, synthetic construct
  source 1..22: mol_type = other RNA
atatgtgtaggaaggaacacac

SEQ ID NO: 121301 - RNA, 22 nt, synthetic construct
  source 1..22: mol_type = other RNA
atatgttcctatatttttccac

SEQ ID NO: 121302 - RNA, 22 nt, synthetic construct
  source 1..22: mol_type = other RNA
atatgttgatgtaatggatcaa

SEQ ID NO: 121303 - RNA, 22 nt, synthetic construct
  source 1..22: mol_type = other RNA
atatgtttgtaacttgttcatg

SEQ ID NO: 121304 - RNA, 22 nt, synthetic construct
  source 1..22: mol_type = other RNA
atatgttttgcttcgaagctta

SEQ ID NO: 121305 - RNA, 22 nt, synthetic construct
  source 1..22: mol_type = other RNA
atattaaaacccatgatctttg

SEQ ID NO: 121306 - RNA, 22 nt, synthetic construct
  source 1..22: mol_type = other RNA
atattaaccaagaacaacctta

SEQ ID NO: 121307 - RNA, 22 nt, synthetic construct
  source 1..22: mol_type = other RNA
atattaaccactgaaacttttc

SEQ ID NO: 121308 - RNA, 22 nt, synthetic construct
  source 1..22: mol_type = other RNA
atattaagagtctcatctgtca

SEQ ID NO: 121309 - RNA, 22 nt, synthetic construct
  source 1..22: mol_type = other RNA
atattaattctgaggcctcctg

SEQ ID NO: 121310 - RNA, 22 nt, synthetic construct
  source 1..22: mol_type = other RNA
atattacagtaaggtttccctg

SEQ ID NO: 121311 - RNA, 22 nt, synthetic construct
  source 1..22: mol_type = other RNA
atattactcagtctcgaaaagg

SEQ ID NO: 121312 - RNA, 22 nt, synthetic construct
  source 1..22: mol_type = other RNA
atattagctacaaaagggaaaa

SEQ ID NO: 121313 - RNA, 22 nt, synthetic construct
  source 1..22: mol_type = other RNA
atattagctgtctggattgatt

SEQ ID NO: 121314 - RNA, 22 nt, synthetic construct
  source 1..22: mol_type = other RNA
atattagtctgtagcttcacgt

SEQ ID NO: 121315 - RNA, 22 nt, synthetic construct
  source 1..22: mol_type = other RNA
atattataagttgggagtctat

SEQ ID NO: 121316 - RNA, 22 nt, synthetic construct
  source 1..22: mol_type = other RNA
atattatgaaccattgtaaacc

SEQ ID NO: 121317 - RNA, 22 nt, synthetic construct
  source 1..22: mol_type = other RNA
atattatggtctttttccagga

SEQ ID NO: 121318 - RNA, 22 nt, synthetic construct
  source 1..22: mol_type = other RNA
atattatgtgcaagttctcttt

SEQ ID NO: 121319 - RNA, 22 nt, synthetic construct
  source 1..22: mol_type = other RNA
atattattttttcccgctacac

SEQ ID NO: 121320 - RNA, 22 nt, synthetic construct
  source 1..22: mol_type = other RNA
atattcatagtagctgttgaat

SEQ ID NO: 121321 - RNA, 22 nt, synthetic construct
  source 1..22: mol_type = other RNA
atattcatttccaaagatcatg

SEQ ID NO: 121322 - RNA, 22 nt, synthetic construct
  source 1..22: mol_type = other RNA
atattccatttttctgaccaac

SEQ ID NO: 121323 - RNA, 22 nt, synthetic construct
  source 1..22: mol_type = other RNA
atattcctatcagaagcacacc

SEQ ID NO: 121324 - RNA, 22 nt, synthetic construct
  source 1..22: mol_type = other RNA
atattcgttccagcagggtaaa

SEQ ID NO: 121325 - RNA, 22 nt, synthetic construct
  source 1..22: mol_type = other RNA
atattctaaacctgaggtcttt

SEQ ID NO: 121326 - RNA, 22 nt, synthetic construct
  source 1..22: mol_type = other RNA
atattctaagtttgccaaagat

SEQ ID NO: 121327 - RNA, 22 nt, synthetic construct
  source 1..22: mol_type = other RNA
atattctacagaaaacccttca

SEQ ID NO: 121328 - RNA, 22 nt, synthetic construct
  source 1..22: mol_type = other RNA
atattctgtgaattgtgacagt

SEQ ID NO: 121329 - RNA, 22 nt, synthetic construct
  source 1..22: mol_type = other RNA
atattgaaacgatgcattccag

SEQ ID NO: 121330 - RNA, 22 nt, synthetic construct
  source 1..22: mol_type = other RNA
atattgaagagggaacattttc

SEQ ID NO: 121331 - RNA, 22 nt, synthetic construct
  source 1..22: mol_type = other RNA
atattgaagccagcacctaaca

SEQ ID NO: 121332 - RNA, 22 nt, synthetic construct
  source 1..22: mol_type = other RNA
atattgaataatttccaggtca

SEQ ID NO: 121333 - RNA, 22 nt, synthetic construct
  source 1..22: mol_type = other RNA
atattgcccaggctggtcttgt

SEQ ID NO: 121334 - RNA, 22 nt, synthetic construct
  source 1..22: mol_type = other RNA
atattggattaagggcccaccc

SEQ ID NO: 121335 - RNA, 22 nt, synthetic construct
  source 1..22: mol_type = other RNA
atattggcaacattttaattcc

SEQ ID NO: 121336 - RNA, 22 nt, synthetic construct
  source 1..22: mol_type = other RNA
atattggcataaagacagacat

SEQ ID NO: 121337 - RNA, 22 nt, synthetic construct
  source 1..22: mol_type = other RNA
atattggccaggctggttccaa

SEQ ID NO: 121338 - RNA, 22 nt, synthetic construct
  source 1..22: mol_type = other RNA
atattggcttatagtgttcttt

SEQ ID NO: 121339 - RNA, 22 nt, synthetic construct
  source 1..22: mol_type = other RNA
atattgtaggtgtctcatttaa

SEQ ID NO: 121340 - RNA, 22 nt, synthetic construct
  source 1..22: mol_type = other RNA
atattgtatatacccttctgtt

SEQ ID NO: 121341 - RNA, 22 nt, synthetic construct
  source 1..22: mol_type = other RNA
atattgtcaatggggaacttta

SEQ ID NO: 121342 - RNA, 22 nt, synthetic construct
  source 1..22: mol_type = other RNA
atatttaacaccatggcaggtt

SEQ ID NO: 121343 - RNA, 22 nt, synthetic construct
  source 1..22: mol_type = other RNA
atatttactagatcaagccctt

SEQ ID NO: 121344 - RNA, 22 nt, synthetic construct
  source 1..22: mol_type = other RNA
atatttactgcttgctgcactg

SEQ ID NO: 121345 - RNA, 22 nt, synthetic construct
  source 1..22: mol_type = other RNA
atatttccaaataaggtcacat

SEQ ID NO: 121346 - RNA, 22 nt, synthetic construct
  source 1..22: mol_type = other RNA
atatttcccttttggatgcaga

SEQ ID NO: 121347 - RNA, 22 nt, synthetic construct
  source 1..22: mol_type = other RNA
atatttccgatgataccttctt

SEQ ID NO: 121348 - RNA, 22 nt, synthetic construct
  source 1..22: mol_type = other RNA
atatttccgtatccagtggttt

SEQ ID NO: 121349 - RNA, 22 nt, synthetic construct
  source 1..22: mol_type = other RNA
atatttcgcctagataagaaaa

SEQ ID NO: 121350 - RNA, 22 nt, synthetic construct
  source 1..22: mol_type = other RNA
atatttgcagtagtattgaact

SEQ ID NO: 121351 - RNA, 22 nt, synthetic construct
  source 1..22: mol_type = other RNA
atatttgttcaagcgctgaagt

SEQ ID NO: 121352 - RNA, 22 nt, synthetic construct
  source 1..22: mol_type = other RNA
atatttgttcagaaatagactc

SEQ ID NO: 121353 - RNA, 22 nt, synthetic construct
  source 1..22: mol_type = other RNA
atattttaaaagtcagctaggc

SEQ ID NO: 121354 - RNA, 22 nt, synthetic construct
  source 1..22: mol_type = other RNA
atattttaagttctagggaaca

SEQ ID NO: 121355 - RNA, 22 nt, synthetic construct
  source 1..22: mol_type = other RNA
atattttatgctttgtctctgg

SEQ ID NO: 121356 - RNA, 22 nt, synthetic construct
  source 1..22: mol_type = other RNA
atattttcaaggcttgtgcatc

SEQ ID NO: 121357 - RNA, 22 nt, synthetic construct
  source 1..22: mol_type = other RNA
atattttccttatccattcatc

SEQ ID NO: 121358 - RNA, 22 nt, synthetic construct
  source 1..22: mol_type = other RNA
atattttcgtgtactgaaacca

SEQ ID NO: 121359 - RNA, 22 nt, synthetic construct
  source 1..22: mol_type = other RNA
atattttctaagagccaaagac

SEQ ID NO: 121360 - RNA, 22 nt, synthetic construct
  source 1..22: mol_type = other RNA
atattttctgtcattctgcagt

SEQ ID NO: 121361 - RNA, 22 nt, synthetic construct
  source 1..22: mol_type = other RNA
atattttggaagactatgagaa

SEQ ID NO: 121362 - RNA, 22 nt, synthetic construct
  source 1..22: mol_type = other RNA
atattttggtagagatggggtc

SEQ ID NO: 121363 - RNA, 22 nt, synthetic construct
  source 1..22: mol_type = other RNA
atattttgtaacgtgtatagct

SEQ ID NO: 121364 - RNA, 22 nt, synthetic construct
  source 1..22: mol_type = other RNA
atattttgtgggaattcagtca

SEQ ID NO: 121365 - RNA, 22 nt, synthetic construct
  source 1..22: mol_type = other RNA
atatttttatgcatttggtctc

SEQ ID NO: 121366 - RNA, 22 nt, synthetic construct
  source 1..22: mol_type = other RNA
atatttttcagattgaccttgt

SEQ ID NO: 121367 - RNA, 22 nt, synthetic construct
  source 1..22: mol_type = other RNA
atcaaaaacctcccaacaggct

SEQ ID NO: 121368 - RNA, 22 nt, synthetic construct
  source 1..22: mol_type = other RNA
atcaaaacaataagacaccgct

SEQ ID NO: 121369 - RNA, 22 nt, synthetic construct
  source 1..22: mol_type = other RNA
atcaaaacacttctgtgatcag

SEQ ID NO: 121370 - RNA, 22 nt, synthetic construct
  source 1..22: mol_type = other RNA
atcaaaaccaggaggtttgcac

SEQ ID NO: 121371 - RNA, 22 nt, synthetic construct
  source 1..22: mol_type = other RNA
atcaaaagaccaagaattttcc

SEQ ID NO: 121372 - RNA, 22 nt, synthetic construct
  source 1..22: mol_type = other RNA
atcaaaatcaaggtgcgggatt

SEQ ID NO: 121373 - RNA, 22 nt, synthetic construct
  source 1..22: mol_type = other RNA
atcaaacagtgtgatattggca

SEQ ID NO: 121374 - RNA, 22 nt, synthetic construct
  source 1..22: mol_type = other RNA
atcaaacataccccaaccctac

SEQ ID NO: 121375 - RNA, 22 nt, synthetic construct
  source 1..22: mol_type = other RNA
atcaaaccatcctttccttgtc

SEQ ID NO: 121376 - RNA, 22 nt, synthetic construct
  source 1..22: mol_type = other RNA
atcaaaccatgttcatgggaag

SEQ ID NO: 121377 - RNA, 22 nt, synthetic construct
  source 1..22: mol_type = other RNA
atcaaacgtgctttccttattg

SEQ ID NO: 121378 - RNA, 22 nt, synthetic construct
  source 1..22: mol_type = other RNA
atcaaagaaagagttgggtttt

SEQ ID NO: 121379 - RNA, 22 nt, synthetic construct
  source 1..22: mol_type = other RNA
atcaaagacctaagcttaagag

SEQ ID NO: 121380 - RNA, 22 nt, synthetic construct
  source 1..22: mol_type = other RNA
atcaaagctaccctttcttgtt

SEQ ID NO: 121381 - RNA, 22 nt, synthetic construct
  source 1..22: mol_type = other RNA
atcaaaggaaggaattttagga

SEQ ID NO: 121382 - RNA, 22 nt, synthetic construct
  source 1..22: mol_type = other RNA
atcaaaggacactattgagagt

SEQ ID NO: 121383 - RNA, 22 nt, synthetic construct
  source 1..22: mol_type = other RNA
atcaaagtcccctgtaattaca

SEQ ID NO: 121384 - RNA, 22 nt, synthetic construct
  source 1..22: mol_type = other RNA
atcaaagtgaaaggcaaaggaa

SEQ ID NO: 121385 - RNA, 22 nt, synthetic construct
  source 1..22: mol_type = other RNA
atcaaagttaaacttttgtgca

SEQ ID NO: 121386 - RNA, 22 nt, synthetic construct
  source 1..22: mol_type = other RNA
atcaaatccagtcttcaggtct

SEQ ID NO: 121387 - RNA, 22 nt, synthetic construct
  source 1..22: mol_type = other RNA
atcaaatctggctgcagggctt

SEQ ID NO: 121388 - RNA, 22 nt, synthetic construct
  source 1..22: mol_type = other RNA
atcaaatggccttctttctttc

SEQ ID NO: 121389 - RNA, 22 nt, synthetic construct
  source 1..22: mol_type = other RNA
atcaaatgggaaattagatgat

SEQ ID NO: 121390 - RNA, 22 nt, synthetic construct
  source 1..22: mol_type = other RNA
atcaaattcacagaactgtcac

SEQ ID NO: 121391 - RNA, 22 nt, synthetic construct
  source 1..22: mol_type = other RNA
atcaacacattcaaaattgttc

SEQ ID NO: 121392 - RNA, 22 nt, synthetic construct
  source 1..22: mol_type = other RNA
atcaacagcagaacaaactgcg

SEQ ID NO: 121393 - RNA, 22 nt, synthetic construct
  source 1..22: mol_type = other RNA
atcaacaggtagctgcttttta

SEQ ID NO: 121394 - RNA, 22 nt, synthetic construct
  source 1..22: mol_type = other RNA
atcaacagtgtactagtctcca

SEQ ID NO: 121395 - RNA, 22 nt, synthetic construct
  source 1..22: mol_type = other RNA
atcaacattgcctccatatggg

SEQ ID NO: 121396 - RNA, 22 nt, synthetic construct
  source 1..22: mol_type = other RNA
atcaacccatgaaaattgaatt

SEQ ID NO: 121397 - RNA, 22 nt, synthetic construct
  source 1..22: mol_type = other RNA
atcaaccccatcaacaagtggg

SEQ ID NO: 121398 - RNA, 22 nt, synthetic construct
  source 1..22: mol_type = other RNA
atcaacctgcaggtatttctaa

SEQ ID NO: 121399 - RNA, 22 nt, synthetic construct
  source 1..22: mol_type = other RNA
atcaactattccataagatctg

SEQ ID NO: 121400 - RNA, 22 nt, synthetic construct
  source 1..22: mol_type = other RNA
atcaactgcttccctagcccag

SEQ ID NO: 121401 - RNA, 22 nt, synthetic construct
  source 1..22: mol_type = other RNA
atcaagacagagctccctctcc

SEQ ID NO: 121402 - RNA, 22 nt, synthetic construct
  source 1..22: mol_type = other RNA
atcaagcccttccttgcttgtc

SEQ ID NO: 121403 - RNA, 22 nt, synthetic construct
  source 1..22: mol_type = other RNA
atcaagccgcaaataatcattc

SEQ ID NO: 121404 - RNA, 22 nt, synthetic construct
  source 1..22: mol_type = other RNA
atcaagctcgccgtctccctcg

SEQ ID NO: 121405 - RNA, 22 nt, synthetic construct
  source 1..22: mol_type = other RNA
atcaaggaagcttcctaaagag

SEQ ID NO: 121406 - RNA, 22 nt, synthetic construct
  source 1..22: mol_type = other RNA
atcaaggcacagtctgtgctta

SEQ ID NO: 121407 - RNA, 22 nt, synthetic construct
  source 1..22: mol_type = other RNA
atcaagggtggtgctggactgg

SEQ ID NO: 121408 - RNA, 22 nt, synthetic construct
  source 1..22: mol_type = other RNA
atcaaggtacaatacactaaat

SEQ ID NO: 121409 - RNA, 22 nt, synthetic construct
  source 1..22: mol_type = other RNA
atcaaggtgcgggattatttgg

SEQ ID NO: 121410 - RNA, 22 nt, synthetic construct
  source 1..22: mol_type = other RNA
atcaagtatctccctgtgcgtg

SEQ ID NO: 121411 - RNA, 22 nt, synthetic construct
  source 1..22: mol_type = other RNA
atcaagtcctttccagaggttc

SEQ ID NO: 121412 - RNA, 22 nt, synthetic construct
  source 1..22: mol_type = other RNA
atcaagtgaaatgatctttgaa

SEQ ID NO: 121413 - RNA, 22 nt, synthetic construct
  source 1..22: mol_type = other RNA
atcaagttgcttggcacagaat

SEQ ID NO: 121414 - RNA, 22 nt, synthetic construct
  source 1..22: mol_type = other RNA
atcaataattctgtgccaagca

SEQ ID NO: 121415 - RNA, 22 nt, synthetic construct
  source 1..22: mol_type = other RNA
atcaatacttcatttccattgt

SEQ ID NO: 121416 - RNA, 22 nt, synthetic construct
  source 1..22: mol_type = other RNA
atcaatagcagtgctgaaagct

SEQ ID NO: 121417 - RNA, 22 nt, synthetic construct
  source 1..22: mol_type = other RNA
atcaatccagacagctaatatg

SEQ ID NO: 121418 - RNA, 22 nt, synthetic construct
  source 1..22: mol_type = other RNA
atcaatctcacacctgggtata

SEQ ID NO: 121419 - RNA, 22 nt, synthetic construct
  source 1..22: mol_type = other RNA
atcaatctggatataacaaatc

SEQ ID NO: 121420 - RNA, 22 nt, synthetic construct
  source 1..22: mol_type = other RNA
atcaatctgtttcctaatctaa

SEQ ID NO: 121421 - RNA, 22 nt, synthetic construct
  source 1..22: mol_type = other RNA
atcaatgatagactggattaag

SEQ ID NO: 121422 - RNA, 22 nt, synthetic construct
  source 1..22: mol_type = other RNA
atcaattagttcctccttttgt

SEQ ID NO: 121423 - RNA, 22 nt, synthetic construct
  source 1..22: mol_type = other RNA
atcaattgaccaaacatgtgag

SEQ ID NO: 121424 - RNA, 22 nt, synthetic construct
  source 1..22: mol_type = other RNA
atcaattgtaatgtctcctctt

SEQ ID NO: 121425 - RNA, 22 nt, synthetic construct
  source 1..22: mol_type = other RNA
atcaatttaacttctaatgccc

SEQ ID NO: 121426 - RNA, 22 nt, synthetic construct
  source 1..22: mol_type = other RNA
atcacaacttgtatgaaattag

SEQ ID NO: 121427 - RNA, 22 nt, synthetic construct
  source 1..22: mol_type = other RNA
atcacaaggactggcttcagtg

SEQ ID NO: 121428 - RNA, 22 nt, synthetic construct
  source 1..22: mol_type = other RNA
atcacaaggtcagaagtttgga

SEQ ID NO: 121429 - RNA, 22 nt, synthetic construct
  source 1..22: mol_type = other RNA
atcacaatgcgtttgttagatc

SEQ ID NO: 121430 - RNA, 22 nt, synthetic construct
  source 1..22: mol_type = other RNA
atcacacaatcttgagacggaa

SEQ ID NO: 121431 - RNA, 22 nt, synthetic construct
  source 1..22: mol_type = other RNA
atcacacccagtatacacgtat

SEQ ID NO: 121432 - RNA, 22 nt, synthetic construct
  source 1..22: mol_type = other RNA
atcacaccctcctaccttccaa

SEQ ID NO: 121433 - RNA, 22 nt, synthetic construct
  source 1..22: mol_type = other RNA
atcacaccgctgcattccagcc

SEQ ID NO: 121434 - RNA, 22 nt, synthetic construct
  source 1..22: mol_type = other RNA
atcacacctaggcctattttag

SEQ ID NO: 121435 - RNA, 22 nt, synthetic construct
  source 1..22: mol_type = other RNA
atcacactggtcactggccact

SEQ ID NO: 121436 - RNA, 22 nt, synthetic construct
  source 1..22: mol_type = other RNA
atcacactgtttgattactgta

SEQ ID NO: 121437 - RNA, 22 nt, synthetic construct
  source 1..22: mol_type = other RNA
atcacacttgatggtttggggc

SEQ ID NO: 121438 - RNA, 22 nt, synthetic construct
  source 1..22: mol_type = other RNA
atcacagaagtgttttgatagt

SEQ ID NO: 121439 - RNA, 22 nt, synthetic construct
  source 1..22: mol_type = other RNA
atcacagacagggaatggggag

SEQ ID NO: 121440 - RNA, 22 nt, synthetic construct
  source 1..22: mol_type = other RNA
atcacagacgcaaaggatgtca

SEQ ID NO: 121441 - RNA, 22 nt, synthetic construct
  source 1..22: mol_type = other RNA
atcacagatacaactctgacca

SEQ ID NO: 121442 - RNA, 22 nt, synthetic construct
  source 1..22: mol_type = other RNA
atcacaggaaagatgtctttta

SEQ ID NO: 121443 - RNA, 22 nt, synthetic construct
  source 1..22: mol_type = other RNA
atcacaggcgttgagccatcat

SEQ ID NO: 121444 - RNA, 22 nt, synthetic construct
  source 1..22: mol_type = other RNA
atcacaggtttaggtttttctt

SEQ ID NO: 121445 - RNA, 22 nt, synthetic construct
  source 1..22: mol_type = other RNA
atcacagtacgcttttatgtta

SEQ ID NO: 121446 - RNA, 22 nt, synthetic construct
  source 1..22: mol_type = other RNA
atcacagtatgcacaaataatt

SEQ ID NO: 121447 - RNA, 22 nt, synthetic construct
  source 1..22: mol_type = other RNA
atcacagtccaggaacttacag

SEQ ID NO: 121448 - RNA, 22 nt, synthetic construct
  source 1..22: mol_type = other RNA
atcacagtgaggacgctgatga

SEQ ID NO: 121449 - RNA, 22 nt, synthetic construct
  source 1..22: mol_type = other RNA
atcacatatctaattaacatcc

SEQ ID NO: 121450 - RNA, 22 nt, synthetic construct
  source 1..22: mol_type = other RNA
atcacattttgaatcatgggag

SEQ ID NO: 121451 - RNA, 22 nt, synthetic construct
  source 1..22: mol_type = other RNA
atcaccaaagacttcaggaaca

SEQ ID NO: 121452 - RNA, 22 nt, synthetic construct
  source 1..22: mol_type = other RNA
atcaccaggggctgggggatcc

SEQ ID NO: 121453 - RNA, 22 nt, synthetic construct
  source 1..22: mol_type = other RNA
atcaccatcatcatcaggctgg

SEQ ID NO: 121454 - RNA, 22 nt, synthetic construct
  source 1..22: mol_type = other RNA
atcaccatctgataagcccaac

SEQ ID NO: 121455 - RNA, 22 nt, synthetic construct
  source 1..22: mol_type = other RNA
atcaccatgtgcttatcaataa

SEQ ID NO: 121456 - RNA, 22 nt, synthetic construct
  source 1..22: mol_type = other RNA
atcacccagaccaagtttaacc

SEQ ID NO: 121457 - RNA, 22 nt, synthetic construct
  source 1..22: mol_type = other RNA
atcacccagctcgaccagggga

SEQ ID NO: 121458 - RNA, 22 nt, synthetic construct
  source 1..22: mol_type = other RNA
atcacccttataaaatgagggt

SEQ ID NO: 121459 - RNA, 22 nt, synthetic construct
  source 1..22: mol_type = other RNA
atcacctcaaggcagaacacac

SEQ ID NO: 121460 - RNA, 22 nt, synthetic construct
  source 1..22: mol_type = other RNA
atcacctcaagtgatgcaactc

SEQ ID NO: 121461 - RNA, 22 nt, synthetic construct
  source 1..22: mol_type = other RNA
atcacgattctgacccagagcc

SEQ ID NO: 121462 - RNA, 22 nt, synthetic construct
  source 1..22: mol_type = other RNA
atcacgccactgcattccgcct

SEQ ID NO: 121463 - RNA, 22 nt, synthetic construct
  source 1..22: mol_type = other RNA
atcacggctgattataaccttg

SEQ ID NO: 121464 - RNA, 22 nt, synthetic construct
  source 1..22: mol_type = other RNA
atcactaagagtgaaaaggcaa

SEQ ID NO: 121465 - RNA, 22 nt, synthetic construct
  source 1..22: mol_type = other RNA
atcactacagcatattagctgt

SEQ ID NO: 121466 - RNA, 22 nt, synthetic construct
  source 1..22: mol_type = other RNA
atcactagaatgtgacttcgtc

SEQ ID NO: 121467 - RNA, 22 nt, synthetic construct
  source 1..22: mol_type = other RNA
atcactagctattagagaaatg

SEQ ID NO: 121468 - RNA, 22 nt, synthetic construct
  source 1..22: mol_type = other RNA
atcactcactggcctgagctct

SEQ ID NO: 121469 - RNA, 22 nt, synthetic construct
  source 1..22: mol_type = other RNA
atcactgactggctgtgccaac

SEQ ID NO: 121470 - RNA, 22 nt, synthetic construct
  source 1..22: mol_type = other RNA
atcactggctagtaggcaacat

SEQ ID NO: 121471 - RNA, 22 nt, synthetic construct
  source 1..22: mol_type = other RNA
atcacttgaggtgattaaaggc

SEQ ID NO: 121472 - RNA, 22 nt, synthetic construct
  source 1..22: mol_type = other RNA
atcagaaaaggctgagacctca

SEQ ID NO: 121473 - RNA, 22 nt, synthetic construct
  source 1..22: mol_type = other RNA
atcagaaactgacaggactcca

SEQ ID NO: 121474 - RNA, 22 nt, synthetic construct
  source 1..22: mol_type = other RNA
atcagaacttgacaagtatatt

SEQ ID NO: 121475 - RNA, 22 nt, synthetic construct
  source 1..22: mol_type = other RNA
atcagaagagcactatgtaaat

SEQ ID NO: 121476 - RNA, 22 nt, synthetic construct
  source 1..22: mol_type = other RNA
atcagaagcacaccaaggtttc

SEQ ID NO: 121477 - RNA, 22 nt, synthetic construct
  source 1..22: mol_type = other RNA
atcagaagtgctgacttggcag

SEQ ID NO: 121478 - RNA, 22 nt, synthetic construct
  source 1..22: mol_type = other RNA
atcagaattccattccttttcg

SEQ ID NO: 121479 - RNA, 22 nt, synthetic construct
  source 1..22: mol_type = other RNA
atcagacaacacattaataaga

SEQ ID NO: 121480 - RNA, 22 nt, synthetic construct
  source 1..22: mol_type = other RNA
atcagacacctacattaatctc

SEQ ID NO: 121481 - RNA, 22 nt, synthetic construct
  source 1..22: mol_type = other RNA
atcagactgtattaccagctta

SEQ ID NO: 121482 - RNA, 22 nt, synthetic construct
  source 1..22: mol_type = other RNA
atcagagaggctttttattaga

SEQ ID NO: 121483 - RNA, 22 nt, synthetic construct
  source 1..22: mol_type = other RNA
atcagagcatgtcccctggagt

SEQ ID NO: 121484 - RNA, 22 nt, synthetic construct
  source 1..22: mol_type = other RNA
atcagagctttgttatgaaaat

SEQ ID NO: 121485 - RNA, 22 nt, synthetic construct
  source 1..22: mol_type = other RNA
atcagagtgaacaggcaacctt

SEQ ID NO: 121486 - RNA, 22 nt, synthetic construct
  source 1..22: mol_type = other RNA
atcagatatgaaagaggagaca

SEQ ID NO: 121487 - RNA, 22 nt, synthetic construct
  source 1..22: mol_type = other RNA
atcagatcccaattacttccag

SEQ ID NO: 121488 - RNA, 22 nt, synthetic construct
  source 1..22: mol_type = other RNA
atcagatgcttctagccaaagc

SEQ ID NO: 121489 - RNA, 22 nt, synthetic construct
  source 1..22: mol_type = other RNA
atcagatggtgatacctcttac

SEQ ID NO: 121490 - RNA, 22 nt, synthetic construct
  source 1..22: mol_type = other RNA
atcagattaagcatagtttgag

SEQ ID NO: 121491 - RNA, 22 nt, synthetic construct
  source 1..22: mol_type = other RNA
atcagatttcaggtggtattta

SEQ ID NO: 121492 - RNA, 22 nt, synthetic construct
  source 1..22: mol_type = other RNA
atcagcaccaaagattatgttc

SEQ ID NO: 121493 - RNA, 22 nt, synthetic construct
  source 1..22: mol_type = other RNA
atcagcaccatctaacagaaat

SEQ ID NO: 121494 - RNA, 22 nt, synthetic construct
  source 1..22: mol_type = other RNA
atcagcaccctcaaatgtctca

SEQ ID NO: 121495 - RNA, 22 nt, synthetic construct
  source 1..22: mol_type = other RNA
atcagcagtgaccatatttcca

SEQ ID NO: 121496 - RNA, 22 nt, synthetic construct
  source 1..22: mol_type = other RNA
atcagccgtgattgcaccactg

SEQ ID NO: 121497 - RNA, 22 nt, synthetic construct
  source 1..22: mol_type = other RNA
atcagcgctaagtgcatttcgg

SEQ ID NO: 121498 - RNA, 22 nt, synthetic construct
  source 1..22: mol_type = other RNA
atcagcgtcctcactgtgatac

SEQ ID NO: 121499 - RNA, 22 nt, synthetic construct
  source 1..22: mol_type = other RNA
atcagcttcctacccaagctta

SEQ ID NO: 121500 - RNA, 22 nt, synthetic construct
  source 1..22: mol_type = other RNA
atcaggaaaaccagtttagaaa

SEQ ID NO: 121501 - RNA, 22 nt, synthetic construct
  source 1..22: mol_type = other RNA
atcaggaaagaccggggactgc

SEQ ID NO: 121502 - RNA, 22 nt, synthetic construct
  source 1..22: mol_type = other RNA
atcaggaaagatgaagtataga

SEQ ID NO: 121503 - RNA, 22 nt, synthetic construct
  source 1..22: mol_type = other RNA
atcaggaaagtgccagccaccc

SEQ ID NO: 121504 - RNA, 22 nt, synthetic construct
  source 1..22: mol_type = other RNA
atcaggaagtatgagtcttccg

SEQ ID NO: 121505 - RNA, 22 nt, synthetic construct
  source 1..22: mol_type = other RNA
atcaggatgtctttgggaaggc

SEQ ID NO: 121506 - RNA, 22 nt, synthetic construct
  source 1..22: mol_type = other RNA
atcaggccttccacctgctctt

SEQ ID NO: 121507 - RNA, 22 nt, synthetic construct
  source 1..22: mol_type = other RNA
atcaggctggctctttccactc

SEQ ID NO: 121508 - RNA, 22 nt, synthetic construct
  source 1..22: mol_type = other RNA
atcaggcttgagtctgtgctct

SEQ ID NO: 121509 - RNA, 22 nt, synthetic construct
  source 1..22: mol_type = other RNA
atcagggatattggcttatagt

SEQ ID NO: 121510 - RNA, 22 nt, synthetic construct
  source 1..22: mol_type = other RNA
atcagggatcacagatacaact

SEQ ID NO: 121511 - RNA, 22 nt, synthetic construct
  source 1..22: mol_type = other RNA
atcagggatttggccagaatcc

SEQ ID NO: 121512 - RNA, 22 nt, synthetic construct
  source 1..22: mol_type = other RNA
atcagggccttcccaaagacat

SEQ ID NO: 121513 - RNA, 22 nt, synthetic construct
  source 1..22: mol_type = other RNA
atcagggcctttaatcacctca

SEQ ID NO: 121514 - RNA, 22 nt, synthetic construct
  source 1..22: mol_type = other RNA
atcagggctgaaaaacacctca

SEQ ID NO: 121515 - RNA, 22 nt, synthetic construct
  source 1..22: mol_type = other RNA
atcaggtctctttgaaaggaat

SEQ ID NO: 121516 - RNA, 22 nt, synthetic construct
  source 1..22: mol_type = other RNA
atcaggttgggcttatcagatg

SEQ ID NO: 121517 - RNA, 22 nt, synthetic construct
  source 1..22: mol_type = other RNA
atcagtaaaattcccttcagtg

SEQ ID NO: 121518 - RNA, 22 nt, synthetic construct
  source 1..22: mol_type = other RNA
atcagtaagaaaacagataacc

SEQ ID NO: 121519 - RNA, 22 nt, synthetic construct
  source 1..22: mol_type = other RNA
atcagtagtttgctagtggtaa

SEQ ID NO: 121520 - RNA, 22 nt, synthetic construct
  source 1..22: mol_type = other RNA
atcagtctccaatcctcagccc

SEQ ID NO: 121521 - RNA, 22 nt, synthetic construct
  source 1..22: mol_type = other RNA
atcagtctgtaagcacctgtat

SEQ ID NO: 121522 - RNA, 22 nt, synthetic construct
  source 1..22: mol_type = other RNA
atcagtgaatatcatttgaatg

SEQ ID NO: 121523 - RNA, 22 nt, synthetic construct
  source 1..22: mol_type = other RNA
atcagtgctgctctgacgttta

SEQ ID NO: 121524 - RNA, 22 nt, synthetic construct
  source 1..22: mol_type = other RNA
atcagtggccagtgaccagtgt

SEQ ID NO: 121525 - RNA, 22 nt, synthetic construct
  source 1..22: mol_type = other RNA
atcagtggttgtgcttcgaggt

SEQ ID NO: 121526 - RNA, 22 nt, synthetic construct
  source 1..22: mol_type = other RNA
atcagtgtgaaagtattaaaag

SEQ ID NO: 121527 - RNA, 22 nt, synthetic construct
  source 1..22: mol_type = other RNA
atcagttaccaccaagaaaaag

SEQ ID NO: 121528 - RNA, 22 nt, synthetic construct
  source 1..22: mol_type = other RNA
atcagttatcacacctaggcct

SEQ ID NO: 121529 - RNA, 22 nt, synthetic construct
  source 1..22: mol_type = other RNA
atcatacacatccagaagtcac

SEQ ID NO: 121530 - RNA, 22 nt, synthetic construct
  source 1..22: mol_type = other RNA
atcatacacctggatcaagtgg

SEQ ID NO: 121531 - RNA, 22 nt, synthetic construct
  source 1..22: mol_type = other RNA
atcatacacgagtgtgtttcgc

SEQ ID NO: 121532 - RNA, 22 nt, synthetic construct
  source 1..22: mol_type = other RNA
atcatactggaaggactcacag

SEQ ID NO: 121533 - RNA, 22 nt, synthetic construct
  source 1..22: mol_type = other RNA
atcatagagtaccaggtcagcc

SEQ ID NO: 121534 - RNA, 22 nt, synthetic construct
  source 1..22: mol_type = other RNA
atcatagctcactagagcttca

SEQ ID NO: 121535 - RNA, 22 nt, synthetic construct
  source 1..22: mol_type = other RNA
atcatatagtaattctgtgctt

SEQ ID NO: 121536 - RNA, 22 nt, synthetic construct
  source 1..22: mol_type = other RNA
atcatatgatctatcaatctca

SEQ ID NO: 121537 - RNA, 22 nt, synthetic construct
  source 1..22: mol_type = other RNA
atcatattttccttatccattc

SEQ ID NO: 121538 - RNA, 22 nt, synthetic construct
  source 1..22: mol_type = other RNA
atcatcaagacagagctccctc

SEQ ID NO: 121539 - RNA, 22 nt, synthetic construct
  source 1..22: mol_type = other RNA
atcatcacagtatgcacaaata

SEQ ID NO: 121540 - RNA, 22 nt, synthetic construct
  source 1..22: mol_type = other RNA
atcatcaggctggctctttcca

SEQ ID NO: 121541 - RNA, 22 nt, synthetic construct
  source 1..22: mol_type = other RNA
atcatcatcaggctggctcttt

SEQ ID NO: 121542 - RNA, 22 nt, synthetic construct
  source 1..22: mol_type = other RNA
atcatcatcttatacttggcaa

SEQ ID NO: 121543 - RNA, 22 nt, synthetic construct
  source 1..22: mol_type = other RNA
atcatccggggagcttttgaaa

SEQ ID NO: 121544 - RNA, 22 nt, synthetic construct
  source 1..22: mol_type = other RNA
atcatcgcattacgagttatgc

SEQ ID NO: 121545 - RNA, 22 nt, synthetic construct
  source 1..22: mol_type = other RNA
atcatcggaaatataaaaagcc

SEQ ID NO: 121546 - RNA, 22 nt, synthetic construct
  source 1..22: mol_type = other RNA
atcatctaatttcccatttgat

SEQ ID NO: 121547 - RNA, 22 nt, synthetic construct
  source 1..22: mol_type = other RNA
atcatctaggcatataaactgg

SEQ ID NO: 121548 - RNA, 22 nt, synthetic construct
  source 1..22: mol_type = other RNA
atcatcttaagaaccatacagt

SEQ ID NO: 121549 - RNA, 22 nt, synthetic construct
  source 1..22: mol_type = other RNA
atcatcttatacttggcaaaaa

SEQ ID NO: 121550 - RNA, 22 nt, synthetic construct
  source 1..22: mol_type = other RNA
atcatcttttgcctggatgaat

SEQ ID NO: 121551 - RNA, 22 nt, synthetic construct
  source 1..22: mol_type = other RNA
atcatgaaagtggagaattact

SEQ ID NO: 121552 - RNA, 22 nt, synthetic construct
  source 1..22: mol_type = other RNA
atcatgatgtttggctccttac

SEQ ID NO: 121553 - RNA, 22 nt, synthetic construct
  source 1..22: mol_type = other RNA
atcatgatttaatagaggtctg

SEQ ID NO: 121554 - RNA, 22 nt, synthetic construct
  source 1..22: mol_type = other RNA
atcatgcagtacttgtcttttt

SEQ ID NO: 121555 - RNA, 22 nt, synthetic construct
  source 1..22: mol_type = other RNA
atcatgcctgggtaattaaaca

SEQ ID NO: 121556 - RNA, 22 nt, synthetic construct
  source 1..22: mol_type = other RNA
atcatgggagccaaacttgaac

SEQ ID NO: 121557 - RNA, 22 nt, synthetic construct
  source 1..22: mol_type = other RNA
atcatggtgggccttgcaagcc

SEQ ID NO: 121558 - RNA, 22 nt, synthetic construct
  source 1..22: mol_type = other RNA
atcatgtcaagaatgaagtcag

SEQ ID NO: 121559 - RNA, 22 nt, synthetic construct
  source 1..22: mol_type = other RNA
atcatgtcttcttggattttct

SEQ ID NO: 121560 - RNA, 22 nt, synthetic construct
  source 1..22: mol_type = other RNA
atcatgttctttatagcatttg

SEQ ID NO: 121561 - RNA, 22 nt, synthetic construct
  source 1..22: mol_type = other RNA
atcattcaaatgatattcactg

SEQ ID NO: 121562 - RNA, 22 nt, synthetic construct
  source 1..22: mol_type = other RNA
atcattcaggacactggaggtg

SEQ ID NO: 121563 - RNA, 22 nt, synthetic construct
  source 1..22: mol_type = other RNA
atcattcataaacacagaacac

SEQ ID NO: 121564 - RNA, 22 nt, synthetic construct
  source 1..22: mol_type = other RNA
atcattcatctaaacgtttggt

SEQ ID NO: 121565 - RNA, 22 nt, synthetic construct
  source 1..22: mol_type = other RNA
atcattcttattgattcagatg

SEQ ID NO: 121566 - RNA, 22 nt, synthetic construct
  source 1..22: mol_type = other RNA
atcattcttctaataggaagtg

SEQ ID NO: 121567 - RNA, 22 nt, synthetic construct
  source 1..22: mol_type = other RNA
atcattgcaccactgcactcca

SEQ ID NO: 121568 - RNA, 22 nt, synthetic construct
  source 1..22: mol_type = other RNA
atcattgtagctatatcccaaa

SEQ ID NO: 121569 - RNA, 22 nt, synthetic construct
  source 1..22: mol_type = other RNA
atcattgttaggtgctggcttc

SEQ ID NO: 121570 - RNA, 22 nt, synthetic construct
  source 1..22: mol_type = other RNA
atcattgttcagggaaggctgc

SEQ ID NO: 121571 - RNA, 22 nt, synthetic construct
  source 1..22: mol_type = other RNA
atcatttagtaagtgtgagcaa

SEQ ID NO: 121572 - RNA, 22 nt, synthetic construct
  source 1..22: mol_type = other RNA
atcatttatacccaagtaaaca

SEQ ID NO: 121573 - RNA, 22 nt, synthetic construct
  source 1..22: mol_type = other RNA
atcatttcaaaccaatgttctc

SEQ ID NO: 121574 - RNA, 22 nt, synthetic construct
  source 1..22: mol_type = other RNA
atcatttcactcttttaaggtt

SEQ ID NO: 121575 - RNA, 22 nt, synthetic construct
  source 1..22: mol_type = other RNA
atcatttccaagattgaaaatg

SEQ ID NO: 121576 - RNA, 22 nt, synthetic construct
  source 1..22: mol_type = other RNA
atcatttgaatgatgcgaaaga

SEQ ID NO: 121577 - RNA, 22 nt, synthetic construct
  source 1..22: mol_type = other RNA
atcattttaaagggataatgct

SEQ ID NO: 121578 - RNA, 22 nt, synthetic construct
  source 1..22: mol_type = other RNA
atcattttggcaaattgtcaga

SEQ ID NO: 121579 - RNA, 22 nt, synthetic construct
  source 1..22: mol_type = other RNA
atccaaaagcctcaaaatttag

SEQ ID NO: 121580 - RNA, 22 nt, synthetic construct
  source 1..22: mol_type = other RNA
atccaaaagggaaatatgaacc

SEQ ID NO: 121581 - RNA, 22 nt, synthetic construct
  source 1..22: mol_type = other RNA
atccaaaatcctctgtagataa

SEQ ID NO: 121582 - RNA, 22 nt, synthetic construct
  source 1..22: mol_type = other RNA
atccaaacagaaaccctgtacc

SEQ ID NO: 121583 - RNA, 22 nt, synthetic construct
  source 1..22: mol_type = other RNA
atccaaagataaaggtaaggaa

SEQ ID NO: 121584 - RNA, 22 nt, synthetic construct
  source 1..22: mol_type = other RNA
atccaaattattgacaagacgt

SEQ ID NO: 121585 - RNA, 22 nt, synthetic construct
  source 1..22: mol_type = other RNA
atccaaattcacagcatgaata

SEQ ID NO: 121586 - RNA, 22 nt, synthetic construct
  source 1..22: mol_type = other RNA
atccaacatgccagctttggct

SEQ ID NO: 121587 - RNA, 22 nt, synthetic construct
  source 1..22: mol_type = other RNA
atccaacgaccggacgtggtgg

SEQ ID NO: 121588 - RNA, 22 nt, synthetic construct
  source 1..22: mol_type = other RNA
atccaactgcagtctgtcctcg

SEQ ID NO: 121589 - RNA, 22 nt, synthetic construct
  source 1..22: mol_type = other RNA
atccaagaagacatgataaata

SEQ ID NO: 121590 - RNA, 22 nt, synthetic construct
  source 1..22: mol_type = other RNA
atccaagcacaaacctggcaat

SEQ ID NO: 121591 - RNA, 22 nt, synthetic construct
  source 1..22: mol_type = other RNA
atccaaggacagaaattcaact

SEQ ID NO: 121592 - RNA, 22 nt, synthetic construct
  source 1..22: mol_type = other RNA
atccaagtattgtatcaatgtt

SEQ ID NO: 121593 - RNA, 22 nt, synthetic construct
  source 1..22: mol_type = other RNA
atccaagtttctagccataatc

SEQ ID NO: 121594 - RNA, 22 nt, synthetic construct
  source 1..22: mol_type = other RNA
atccaatcactggctagtaggc

SEQ ID NO: 121595 - RNA, 22 nt, synthetic construct
  source 1..22: mol_type = other RNA
atccaattttttggcatacaac

SEQ ID NO: 121596 - RNA, 22 nt, synthetic construct
  source 1..22: mol_type = other RNA
atccacaacattgtgcaaccat

SEQ ID NO: 121597 - RNA, 22 nt, synthetic construct
  source 1..22: mol_type = other RNA
atccacaatgagacatttgagg

SEQ ID NO: 121598 - RNA, 22 nt, synthetic construct
  source 1..22: mol_type = other RNA
atccacagctttcttttccaac

SEQ ID NO: 121599 - RNA, 22 nt, synthetic construct
  source 1..22: mol_type = other RNA
atccacagtatgctgtttacat

SEQ ID NO: 121600 - RNA, 22 nt, synthetic construct
  source 1..22: mol_type = other RNA
atccacatttggttttactact

SEQ ID NO: 121601 - RNA, 22 nt, synthetic construct
  source 1..22: mol_type = other RNA
atccacattttgtgacaagttc

SEQ ID NO: 121602 - RNA, 22 nt, synthetic construct
  source 1..22: mol_type = other RNA
atccaccactccaccttagccc

SEQ ID NO: 121603 - RNA, 22 nt, synthetic construct
  source 1..22: mol_type = other RNA
atccacccacttgtcccatggt

SEQ ID NO: 121604 - RNA, 22 nt, synthetic construct
  source 1..22: mol_type = other RNA
atccacgcgtaagggtacagaa

SEQ ID NO: 121605 - RNA, 22 nt, synthetic construct
  source 1..22: mol_type = other RNA
atccactaggggactaacaggg

SEQ ID NO: 121606 - RNA, 22 nt, synthetic construct
  source 1..22: mol_type = other RNA
atccactgcacagtatgcgggg

SEQ ID NO: 121607 - RNA, 22 nt, synthetic construct
  source 1..22: mol_type = other RNA
atccagaagagaatggctggaa

SEQ ID NO: 121608 - RNA, 22 nt, synthetic construct
  source 1..22: mol_type = other RNA
atccagaagtcactttttattc

SEQ ID NO: 121609 - RNA, 22 nt, synthetic construct
  source 1..22: mol_type = other RNA
atccagacagctaatatgctgt

SEQ ID NO: 121610 - RNA, 22 nt, synthetic construct
  source 1..22: mol_type = other RNA
atccagataaattatagctcca

SEQ ID NO: 121611 - RNA, 22 nt, synthetic construct
  source 1..22: mol_type = other RNA
atccagatggacaaattaccat

SEQ ID NO: 121612 - RNA, 22 nt, synthetic construct
  source 1..22: mol_type = other RNA
atccagatgtagagaaacagga

SEQ ID NO: 121613 - RNA, 22 nt, synthetic construct
  source 1..22: mol_type = other RNA
atccagattgatatctgagtgt

SEQ ID NO: 121614 - RNA, 22 nt, synthetic construct
  source 1..22: mol_type = other RNA
atccagcagtttcacttcttag

SEQ ID NO: 121615 - RNA, 22 nt, synthetic construct
  source 1..22: mol_type = other RNA
atccagctaattttcattactt

SEQ ID NO: 121616 - RNA, 22 nt, synthetic construct
  source 1..22: mol_type = other RNA
atccaggatcttactgtaagtt

SEQ ID NO: 121617 - RNA, 22 nt, synthetic construct
  source 1..22: mol_type = other RNA
atccaggatggcatgaaatggg

SEQ ID NO: 121618 - RNA, 22 nt, synthetic construct
  source 1..22: mol_type = other RNA
atccaggcaaaagatgatgaac

SEQ ID NO: 121619 - RNA, 22 nt, synthetic construct
  source 1..22: mol_type = other RNA
atccaggggaatagaaagttag

SEQ ID NO: 121620 - RNA, 22 nt, synthetic construct
  source 1..22: mol_type = other RNA
atccaggtgtatgatcttatta

SEQ ID NO: 121621 - RNA, 22 nt, synthetic construct
  source 1..22: mol_type = other RNA
atccagtaatcttgctaaacat

SEQ ID NO: 121622 - RNA, 22 nt, synthetic construct
  source 1..22: mol_type = other RNA
atccagtctctacccagcactc

SEQ ID NO: 121623 - RNA, 22 nt, synthetic construct
  source 1..22: mol_type = other RNA
atccagtctctgcaacatttgt

SEQ ID NO: 121624 - RNA, 22 nt, synthetic construct
  source 1..22: mol_type = other RNA
atccagtcttcaggtctctctg

SEQ ID NO: 121625 - RNA, 22 nt, synthetic construct
  source 1..22: mol_type = other RNA
atccagtgacacctgaggggtc

SEQ ID NO: 121626 - RNA, 22 nt, synthetic construct
  source 1..22: mol_type = other RNA
atccagtggttttttgtttttt

SEQ ID NO: 121627 - RNA, 22 nt, synthetic construct
  source 1..22: mol_type = other RNA
atccagtttaaagctttgtgac

SEQ ID NO: 121628 - RNA, 22 nt, synthetic construct
  source 1..22: mol_type = other RNA
atccatgttgttgaatgtggca

SEQ ID NO: 121629 - RNA, 22 nt, synthetic construct
  source 1..22: mol_type = other RNA
atccattactcgtggttatagc

SEQ ID NO: 121630 - RNA, 22 nt, synthetic construct
  source 1..22: mol_type = other RNA
atccattcatctctcgatggac

SEQ ID NO: 121631 - RNA, 22 nt, synthetic construct
  source 1..22: mol_type = other RNA
atccattgggtacataccgagt

SEQ ID NO: 121632 - RNA, 22 nt, synthetic construct
  source 1..22: mol_type = other RNA
atcccaaagtgagcagaaggag

SEQ ID NO: 121633 - RNA, 22 nt, synthetic construct
  source 1..22: mol_type = other RNA
atcccaaattggcatttaaaag

SEQ ID NO: 121634 - RNA, 22 nt, synthetic construct
  source 1..22: mol_type = other RNA
atcccaagggttttggtatgtt

SEQ ID NO: 121635 - RNA, 22 nt, synthetic construct
  source 1..22: mol_type = other RNA
atcccaagtgcccattaacaga

SEQ ID NO: 121636 - RNA, 22 nt, synthetic construct
  source 1..22: mol_type = other RNA
atcccaattacttccagtgttt

SEQ ID NO: 121637 - RNA, 22 nt, synthetic construct
  source 1..22: mol_type = other RNA
atcccactagtggaagaatcag

SEQ ID NO: 121638 - RNA, 22 nt, synthetic construct
  source 1..22: mol_type = other RNA
atcccacttgatccaggtgtat

SEQ ID NO: 121639 - RNA, 22 nt, synthetic construct
  source 1..22: mol_type = other RNA
atcccagacagatatatgcatt

SEQ ID NO: 121640 - RNA, 22 nt, synthetic construct
  source 1..22: mol_type = other RNA
atcccagaggtactcaacgaca

SEQ ID NO: 121641 - RNA, 22 nt, synthetic construct
  source 1..22: mol_type = other RNA
atcccagatctaacaaacgcat

SEQ ID NO: 121642 - RNA, 22 nt, synthetic construct
  source 1..22: mol_type = other RNA
atcccagatggggattgagggt

SEQ ID NO: 121643 - RNA, 22 nt, synthetic construct
  source 1..22: mol_type = other RNA
atcccagctacataacttccca

SEQ ID NO: 121644 - RNA, 22 nt, synthetic construct
  source 1..22: mol_type = other RNA
atcccagggataaatcccactt

SEQ ID NO: 121645 - RNA, 22 nt, synthetic construct
  source 1..22: mol_type = other RNA
atcccagtcctttgggaggtca

SEQ ID NO: 121646 - RNA, 22 nt, synthetic construct
  source 1..22: mol_type = other RNA
atcccatataaggggaatcatg

SEQ ID NO: 121647 - RNA, 22 nt, synthetic construct
  source 1..22: mol_type = other RNA
atcccatatggaggcaatgttg

SEQ ID NO: 121648 - RNA, 22 nt, synthetic construct
  source 1..22: mol_type = other RNA
atcccattactcggtatgtacc

SEQ ID NO: 121649 - RNA, 22 nt, synthetic construct
  source 1..22: mol_type = other RNA
atcccatttgtaacatgttaga

SEQ ID NO: 121650 - RNA, 22 nt, synthetic construct
  source 1..22: mol_type = other RNA
atccccaaataacatgcatatg

SEQ ID NO: 121651 - RNA, 22 nt, synthetic construct
  source 1..22: mol_type = other RNA
atccccagaaagagagaggggg

SEQ ID NO: 121652 - RNA, 22 nt, synthetic construct
  source 1..22: mol_type = other RNA
atccccatctgggatacttcta

SEQ ID NO: 121653 - RNA, 22 nt, synthetic construct
  source 1..22: mol_type = other RNA
atccccattcaattgtcctggc

SEQ ID NO: 121654 - RNA, 22 nt, synthetic construct
  source 1..22: mol_type = other RNA
atccccatttttctcgacacac

SEQ ID NO: 121655 - RNA, 22 nt, synthetic construct
  source 1..22: mol_type = other RNA
atcccccagcccctggtgatct

SEQ ID NO: 121656 - RNA, 22 nt, synthetic construct
  source 1..22: mol_type = other RNA
atccccccacccctgctctgca

SEQ ID NO: 121657 - RNA, 22 nt, synthetic construct
  source 1..22: mol_type = other RNA
atccccgctgcgagaaaggcga

SEQ ID NO: 121658 - RNA, 22 nt, synthetic construct
  source 1..22: mol_type = other RNA
atccccgctgtccatttccagt

SEQ ID NO: 121659 - RNA, 22 nt, synthetic construct
  source 1..22: mol_type = other RNA
atcccctttacccctgagaact

SEQ ID NO: 121660 - RNA, 22 nt, synthetic construct
  source 1..22: mol_type = other RNA
atcccctttagtgttctgtgtt

SEQ ID NO: 121661 - RNA, 22 nt, synthetic construct
  source 1..22: mol_type = other RNA
atcccgcaccttgattttgata

SEQ ID NO: 121662 - RNA, 22 nt, synthetic construct
  source 1..22: mol_type = other RNA
atcccggaacaggaaaaggaca

SEQ ID NO: 121663 - RNA, 22 nt, synthetic construct
  source 1..22: mol_type = other RNA
atcccggccaggtgcggtggct

SEQ ID NO: 121664 - RNA, 22 nt, synthetic construct
  source 1..22: mol_type = other RNA
atccctacctaaaaagggagtc

SEQ ID NO: 121665 - RNA, 22 nt, synthetic construct
  source 1..22: mol_type = other RNA
atccctatgcaataactcaaaa

SEQ ID NO: 121666 - RNA, 22 nt, synthetic construct
  source 1..22: mol_type = other RNA
atccctcatatcagttatcaca

SEQ ID NO: 121667 - RNA, 22 nt, synthetic construct
  source 1..22: mol_type = other RNA
atccctccagtccagcaccacc

SEQ ID NO: 121668 - RNA, 22 nt, synthetic construct
  source 1..22: mol_type = other RNA
atccctcctctggccctccatt

SEQ ID NO: 121669 - RNA, 22 nt, synthetic construct
  source 1..22: mol_type = other RNA
atccctctaaataggtattcat

SEQ ID NO: 121670 - RNA, 22 nt, synthetic construct
  source 1..22: mol_type = other RNA
atccctgataatcacagacgca

SEQ ID NO: 121671 - RNA, 22 nt, synthetic construct
  source 1..22: mol_type = other RNA
atccctgatatgtcgcatgaaa

SEQ ID NO: 121672 - RNA, 22 nt, synthetic construct
  source 1..22: mol_type = other RNA
atccctgatcaagttgcttggc

SEQ ID NO: 121673 - RNA, 22 nt, synthetic construct
  source 1..22: mol_type = other RNA
atccctgccgcgcgcgaaggcc

SEQ ID NO: 121674 - RNA, 22 nt, synthetic construct
  source 1..22: mol_type = other RNA
atccctggggtttccttacctt

SEQ ID NO: 121675 - RNA, 22 nt, synthetic construct
  source 1..22: mol_type = other RNA
atcccttccccacctttcctgc

SEQ ID NO: 121676 - RNA, 22 nt, synthetic construct
  source 1..22: mol_type = other RNA
atccctttaaaatgatagcatt

SEQ ID NO: 121677 - RNA, 22 nt, synthetic construct
  source 1..22: mol_type = other RNA
atccctttcgctaatctcaatc

SEQ ID NO: 121678 - RNA, 22 nt, synthetic construct
  source 1..22: mol_type = other RNA
atccgaaagaactgaaagcagg

SEQ ID NO: 121679 - RNA, 22 nt, synthetic construct
  source 1..22: mol_type = other RNA
atccgagacaagttctcctgtg

SEQ ID NO: 121680 - RNA, 22 nt, synthetic construct
  source 1..22: mol_type = other RNA
atccgataaagggtctggtatc

SEQ ID NO: 121681 - RNA, 22 nt, synthetic construct
  source 1..22: mol_type = other RNA
atccgccaccacgcctggctaa

SEQ ID NO: 121682 - RNA, 22 nt, synthetic construct
  source 1..22: mol_type = other RNA
atccggctttatgagacacacg

SEQ ID NO: 121683 - RNA, 22 nt, synthetic construct
  source 1..22: mol_type = other RNA
atccgggaacatgacatgtatt

SEQ ID NO: 121684 - RNA, 22 nt, synthetic construct
  source 1..22: mol_type = other RNA
atccgggagggaggtagggggg

SEQ ID NO: 121685 - RNA, 22 nt, synthetic construct
  source 1..22: mol_type = other RNA
atccggggagcttttgaaactg

SEQ ID NO: 121686 - RNA, 22 nt, synthetic construct
  source 1..22: mol_type = other RNA
atccggtctcagtttttaattt

SEQ ID NO: 121687 - RNA, 22 nt, synthetic construct
  source 1..22: mol_type = other RNA
atcctaaacacttagcatgttg

SEQ ID NO: 121688 - RNA, 22 nt, synthetic construct
  source 1..22: mol_type = other RNA
atcctaagcatgagatactacg

SEQ ID NO: 121689 - RNA, 22 nt, synthetic construct
  source 1..22: mol_type = other RNA
atcctaagccatctaattcaca

SEQ ID NO: 121690 - RNA, 22 nt, synthetic construct
  source 1..22: mol_type = other RNA
atcctaatacagtaaagcccca

SEQ ID NO: 121691 - RNA, 22 nt, synthetic construct
  source 1..22: mol_type = other RNA
atcctaatgggcgtggagcggt

SEQ ID NO: 121692 - RNA, 22 nt, synthetic construct
  source 1..22: mol_type = other RNA
atcctagccccaaatacctctg

SEQ ID NO: 121693 - RNA, 22 nt, synthetic construct
  source 1..22: mol_type = other RNA
atcctatcagagcatgtcccct

SEQ ID NO: 121694 - RNA, 22 nt, synthetic construct
  source 1..22: mol_type = other RNA
atcctatctaagcctactgctc

SEQ ID NO: 121695 - RNA, 22 nt, synthetic construct
  source 1..22: mol_type = other RNA
atcctatgtggggaatgctcat

SEQ ID NO: 121696 - RNA, 22 nt, synthetic construct
  source 1..22: mol_type = other RNA
atcctattttgttattagggta

SEQ ID NO: 121697 - RNA, 22 nt, synthetic construct
  source 1..22: mol_type = other RNA
atcctcaacaagagaggacagt

SEQ ID NO: 121698 - RNA, 22 nt, synthetic construct
  source 1..22: mol_type = other RNA
atcctcacaacaggcctgagcc

SEQ ID NO: 121699 - RNA, 22 nt, synthetic construct
  source 1..22: mol_type = other RNA
atcctcacatcagttaccacca

SEQ ID NO: 121700 - RNA, 22 nt, synthetic construct
  source 1..22: mol_type = other RNA
atcctcacatgtttggtcaatt

SEQ ID NO: 121701 - RNA, 22 nt, synthetic construct
  source 1..22: mol_type = other RNA
atcctcagccccctccctacca

SEQ ID NO: 121702 - RNA, 22 nt, synthetic construct
  source 1..22: mol_type = other RNA
atcctcagggtaggaaaagact

SEQ ID NO: 121703 - RNA, 22 nt, synthetic construct
  source 1..22: mol_type = other RNA
atcctccaatgtttttaattct

SEQ ID NO: 121704 - RNA, 22 nt, synthetic construct
  source 1..22: mol_type = other RNA
atcctccagccttaatctcctg

SEQ ID NO: 121705 - RNA, 22 nt, synthetic construct
  source 1..22: mol_type = other RNA
atcctccggcctcagcctcccg

SEQ ID NO: 121706 - RNA, 22 nt, synthetic construct
  source 1..22: mol_type = other RNA
atcctccgtagctgtcgctctc

SEQ ID NO: 121707 - RNA, 22 nt, synthetic construct
  source 1..22: mol_type = other RNA
atcctcctgccttggccttctg

SEQ ID NO: 121708 - RNA, 22 nt, synthetic construct
  source 1..22: mol_type = other RNA
atcctctatttttgtctggtgg

SEQ ID NO: 121709 - RNA, 22 nt, synthetic construct
  source 1..22: mol_type = other RNA
atcctctgtagataaacgttaa

SEQ ID NO: 121710 - RNA, 22 nt, synthetic construct
  source 1..22: mol_type = other RNA
atcctcttctgaagaggctttc

SEQ ID NO: 121711 - RNA, 22 nt, synthetic construct
  source 1..22: mol_type = other RNA
atcctgagacttaggcaaagga

SEQ ID NO: 121712 - RNA, 22 nt, synthetic construct
  source 1..22: mol_type = other RNA
atcctgaggaagctaatcaagc

SEQ ID NO: 121713 - RNA, 22 nt, synthetic construct
  source 1..22: mol_type = other RNA
atcctgatttaggccactctca

SEQ ID NO: 121714 - RNA, 22 nt, synthetic construct
  source 1..22: mol_type = other RNA
atcctgctattttattagatag

SEQ ID NO: 121715 - RNA, 22 nt, synthetic construct
  source 1..22: mol_type = other RNA
atcctgctgggctattgttttg

SEQ ID NO: 121716 - RNA, 22 nt, synthetic construct
  source 1..22: mol_type = other RNA
atcctggaatagtagcttcaat

SEQ ID NO: 121717 - RNA, 22 nt, synthetic construct
  source 1..22: mol_type = other RNA
atcctggagggctcccagtgcc

SEQ ID NO: 121718 - RNA, 22 nt, synthetic construct
  source 1..22: mol_type = other RNA
atcctggattgctagtgtcctc

SEQ ID NO: 121719 - RNA, 22 nt, synthetic construct
  source 1..22: mol_type = other RNA
atcctggatttgggaaggatgg

SEQ ID NO: 121720 - RNA, 22 nt, synthetic construct
  source 1..22: mol_type = other RNA
atcctgtaaacctggaatcctc

SEQ ID NO: 121721 - RNA, 22 nt, synthetic construct
  source 1..22: mol_type = other RNA
atcctgtccaggcgcctgcatt

SEQ ID NO: 121722 - RNA, 22 nt, synthetic construct
  source 1..22: mol_type = other RNA
atcctgtctcagagtatatatg

SEQ ID NO: 121723 - RNA, 22 nt, synthetic construct
  source 1..22: mol_type = other RNA
atcctgtttctctacatctgga

SEQ ID NO: 121724 - RNA, 22 nt, synthetic construct
  source 1..22: mol_type = other RNA
atcctgtttgagaagtcttttc

SEQ ID NO: 121725 - RNA, 22 nt, synthetic construct
  source 1..22: mol_type = other RNA
atccttactaccaccactaatg

SEQ ID NO: 121726 - RNA, 22 nt, synthetic construct
  source 1..22: mol_type = other RNA
atccttacttccagctcacgtt

SEQ ID NO: 121727 - RNA, 22 nt, synthetic construct
  source 1..22: mol_type = other RNA
atccttagattacaaaagaaca

SEQ ID NO: 121728 - RNA, 22 nt, synthetic construct
  source 1..22: mol_type = other RNA
atccttcagtcagttctctgcc

SEQ ID NO: 121729 - RNA, 22 nt, synthetic construct
  source 1..22: mol_type = other RNA
atccttcccaaatccaggatgg

SEQ ID NO: 121730 - RNA, 22 nt, synthetic construct
  source 1..22: mol_type = other RNA
atccttccttcatgtcccctgt

SEQ ID NO: 121731 - RNA, 22 nt, synthetic construct
  source 1..22: mol_type = other RNA
atccttctaatcagtaacttaa

SEQ ID NO: 121732 - RNA, 22 nt, synthetic construct
  source 1..22: mol_type = other RNA
atccttctacatccccccaccc

SEQ ID NO: 121733 - RNA, 22 nt, synthetic construct
  source 1..22: mol_type = other RNA
atccttctcatagtcttccaaa

SEQ ID NO: 121734 - RNA, 22 nt, synthetic construct
  source 1..22: mol_type = other RNA
atccttctgccttgacctccca

SEQ ID NO: 121735 - RNA, 22 nt, synthetic construct
  source 1..22: mol_type = other RNA
atccttgcaccaactccacatt

SEQ ID NO: 121736 - RNA, 22 nt, synthetic construct
  source 1..22: mol_type = other RNA
atccttgccaacagttactttc

SEQ ID NO: 121737 - RNA, 22 nt, synthetic construct
  source 1..22: mol_type = other RNA
atccttgtggtcttaagagact

SEQ ID NO: 121738 - RNA, 22 nt, synthetic construct
  source 1..22: mol_type = other RNA
atcctttaatttgggtttgagt

SEQ ID NO: 121739 - RNA, 22 nt, synthetic construct
  source 1..22: mol_type = other RNA
atcctttcaaggtatctcccca

SEQ ID NO: 121740 - RNA, 22 nt, synthetic construct
  source 1..22: mol_type = other RNA
atcctttcccttctgctcggct

SEQ ID NO: 121741 - RNA, 22 nt, synthetic construct
  source 1..22: mol_type = other RNA
atcctttccttgtcctaaaatt

SEQ ID NO: 121742 - RNA, 22 nt, synthetic construct
  source 1..22: mol_type = other RNA
atcctttgcacacaccaaatca

SEQ ID NO: 121743 - RNA, 22 nt, synthetic construct
  source 1..22: mol_type = other RNA
atcctttgcgtctgtgattatc

SEQ ID NO: 121744 - RNA, 22 nt, synthetic construct
  source 1..22: mol_type = other RNA
atcctttgcttcccacttcgaa

SEQ ID NO: 121745 - RNA, 22 nt, synthetic construct
  source 1..22: mol_type = other RNA
atcctttgtgcaggtctgggtt

SEQ ID NO: 121746 - RNA, 22 nt, synthetic construct
  source 1..22: mol_type = other RNA
atccttttatgtgcagtctaac

SEQ ID NO: 121747 - RNA, 22 nt, synthetic construct
  source 1..22: mol_type = other RNA
atccttttcccaggagctagaa

SEQ ID NO: 121748 - RNA, 22 nt, synthetic construct
  source 1..22: mol_type = other RNA
atcgaatcctcacaacaggcct

SEQ ID NO: 121749 - RNA, 22 nt, synthetic construct
  source 1..22: mol_type = other RNA
atcgagagatgaatggataagg

SEQ ID NO: 121750 - RNA, 22 nt, synthetic construct
  source 1..22: mol_type = other RNA
atcgcaatccaaaatcctctgt

SEQ ID NO: 121751 - RNA, 22 nt, synthetic construct
  source 1..22: mol_type = other RNA
atcgcagggccattctgctatg

SEQ ID NO: 121752 - RNA, 22 nt, synthetic construct
  source 1..22: mol_type = other RNA
atcgcattacgagttatgcaag

SEQ ID NO: 121753 - RNA, 22 nt, synthetic construct
  source 1..22: mol_type = other RNA
atcgcgcccagcccgtgtgttt

SEQ ID NO: 121754 - RNA, 22 nt, synthetic construct
  source 1..22: mol_type = other RNA
atcggaaatataaaaagcctct

SEQ ID NO: 121755 - RNA, 22 nt, synthetic construct
  source 1..22: mol_type = other RNA
atcggaacaggctcaatacctg

SEQ ID NO: 121756 - RNA, 22 nt, synthetic construct
  source 1..22: mol_type = other RNA
atcggaactcctgtatgccgct

SEQ ID NO: 121757 - RNA, 22 nt, synthetic construct
  source 1..22: mol_type = other RNA
atcggataaggaagagtttata

SEQ ID NO: 121758 - RNA, 22 nt, synthetic construct
  source 1..22: mol_type = other RNA
atcggccgggcgtgggggctca

SEQ ID NO: 121759 - RNA, 22 nt, synthetic construct
  source 1..22: mol_type = other RNA
atcgggagtaacagacctctga

SEQ ID NO: 121760 - RNA, 22 nt, synthetic construct
  source 1..22: mol_type = other RNA
atcggggcctacagtggttcca

SEQ ID NO: 121761 - RNA, 22 nt, synthetic construct
  source 1..22: mol_type = other RNA
atcggtctgtatttctgctttg

SEQ ID NO: 121762 - RNA, 22 nt, synthetic construct
  source 1..22: mol_type = other RNA
atcgtaaaaagccatttatcag

SEQ ID NO: 121763 - RNA, 22 nt, synthetic construct
  source 1..22: mol_type = other RNA
atcgtaaaacctcatctctact

SEQ ID NO: 121764 - RNA, 22 nt, synthetic construct
  source 1..22: mol_type = other RNA
atcgtcctcttcgggtgtcaga

SEQ ID NO: 121765 - RNA, 22 nt, synthetic construct
  source 1..22: mol_type = other RNA
atcgtgagactattatgagcag

SEQ ID NO: 121766 - RNA, 22 nt, synthetic construct
  source 1..22: mol_type = other RNA
atcgtgatagtcttccaattgc

SEQ ID NO: 121767 - RNA, 22 nt, synthetic construct
  source 1..22: mol_type = other RNA
atcgttatatcctcagggtagg

SEQ ID NO: 121768 - RNA, 22 nt, synthetic construct
  source 1..22: mol_type = other RNA
atcgttcacactcgcactccac

SEQ ID NO: 121769 - RNA, 22 nt, synthetic construct
  source 1..22: mol_type = other RNA
atcgtttcaatattaagagtct

SEQ ID NO: 121770 - RNA, 22 nt, synthetic construct
  source 1..22: mol_type = other RNA
atctaaaatggaagactttatg

SEQ ID NO: 121771 - RNA, 22 nt, synthetic construct
  source 1..22: mol_type = other RNA
atctaaacgtttggtgactgaa

SEQ ID NO: 121772 - RNA, 22 nt, synthetic construct
  source 1..22: mol_type = other RNA
atctaaagccaatcttcccaat

SEQ ID NO: 121773 - RNA, 22 nt, synthetic construct
  source 1..22: mol_type = other RNA
atctaaagccaggctttcccag

SEQ ID NO: 121774 - RNA, 22 nt, synthetic construct
  source 1..22: mol_type = other RNA
atctaaatggtgtgaagttggg

SEQ ID NO: 121775 - RNA, 22 nt, synthetic construct
  source 1..22: mol_type = other RNA
atctaaattaagcttcgacagt

SEQ ID NO: 121776 - RNA, 22 nt, synthetic construct
  source 1..22: mol_type = other RNA
atctaacaaaagatacacaaga

SEQ ID NO: 121777 - RNA, 22 nt, synthetic construct
  source 1..22: mol_type = other RNA
atctaacaaacgcattgtgatg

SEQ ID NO: 121778 - RNA, 22 nt, synthetic construct
  source 1..22: mol_type = other RNA
atctaacagaaatacaatgtga

SEQ ID NO: 121779 - RNA, 22 nt, synthetic construct
  source 1..22: mol_type = other RNA
atctaaccctcaatccccatct

SEQ ID NO: 121780 - RNA, 22 nt, synthetic construct
  source 1..22: mol_type = other RNA
atctaaccctcctcctctacaa

SEQ ID NO: 121781 - RNA, 22 nt, synthetic construct
  source 1..22: mol_type = other RNA
atctaagcctacctcccttcac

SEQ ID NO: 121782 - RNA, 22 nt, synthetic construct
  source 1..22: mol_type = other RNA
atctaagcctactgctctgtcc

SEQ ID NO: 121783 - RNA, 22 nt, synthetic construct
  source 1..22: mol_type = other RNA
atctaaggattatggctagaaa

SEQ ID NO: 121784 - RNA, 22 nt, synthetic construct
  source 1..22: mol_type = other RNA
atctaagtctcaacctacttta

SEQ ID NO: 121785 - RNA, 22 nt, synthetic construct
  source 1..22: mol_type = other RNA
atctaataaaaagcctctctga

SEQ ID NO: 121786 - RNA, 22 nt, synthetic construct
  source 1..22: mol_type = other RNA
atctaataaaatagcaggattc

SEQ ID NO: 121787 - RNA, 22 nt, synthetic construct
  source 1..22: mol_type = other RNA
atctaattcacatttaagaagg

SEQ ID NO: 121788 - RNA, 22 nt, synthetic construct
  source 1..22: mol_type = other RNA
atctaattcgaaaatgggccaa

SEQ ID NO: 121789 - RNA, 22 nt, synthetic construct
  source 1..22: mol_type = other RNA
atctaatttcccatttgatttc

SEQ ID NO: 121790 - RNA, 22 nt, synthetic construct
  source 1..22: mol_type = other RNA
atctacaaaacagggttattaa

SEQ ID NO: 121791 - RNA, 22 nt, synthetic construct
  source 1..22: mol_type = other RNA
atctacagaggattttggattg

SEQ ID NO: 121792 - RNA, 22 nt, synthetic construct
  source 1..22: mol_type = other RNA
atctacagattcaatgcaatac

SEQ ID NO: 121793 - RNA, 22 nt, synthetic construct
  source 1..22: mol_type = other RNA
atctacaggtcggaaggaatgt

SEQ ID NO: 121794 - RNA, 22 nt, synthetic construct
  source 1..22: mol_type = other RNA
atctacatgtacgccaattttc

SEQ ID NO: 121795 - RNA, 22 nt, synthetic construct
  source 1..22: mol_type = other RNA
atctaccaaaaaactacgagta

SEQ ID NO: 121796 - RNA, 22 nt, synthetic construct
  source 1..22: mol_type = other RNA
atctaccaaacattgaaggcag

SEQ ID NO: 121797 - RNA, 22 nt, synthetic construct
  source 1..22: mol_type = other RNA
atctactcttttgtttttgggg

SEQ ID NO: 121798 - RNA, 22 nt, synthetic construct
  source 1..22: mol_type = other RNA
atctactttctaatcctttgca

SEQ ID NO: 121799 - RNA, 22 nt, synthetic construct
  source 1..22: mol_type = other RNA
atctagaaagataaatccaacg

SEQ ID NO: 121800 - RNA, 22 nt, synthetic construct
  source 1..22: mol_type = other RNA
atctagcacagaaccatgtaac

SEQ ID NO: 121801 - RNA, 22 nt, synthetic construct
  source 1..22: mol_type = other RNA
atctaggaaacactgctcagaa

SEQ ID NO: 121802 - RNA, 22 nt, synthetic construct
  source 1..22: mol_type = other RNA
atctaggaggtctaagagataa

SEQ ID NO: 121803 - RNA, 22 nt, synthetic construct
  source 1..22: mol_type = other RNA
atctaggagtacagtgcatacc

SEQ ID NO: 121804 - RNA, 22 nt, synthetic construct
  source 1..22: mol_type = other RNA
atctaggcatataaactggaag

SEQ ID NO: 121805 - RNA, 22 nt, synthetic construct
  source 1..22: mol_type = other RNA
atctaggcatataataagcaga

SEQ ID NO: 121806 - RNA, 22 nt, synthetic construct
  source 1..22: mol_type = other RNA
atctaggcgaaatatctccctc

SEQ ID NO: 121807 - RNA, 22 nt, synthetic construct
  source 1..22: mol_type = other RNA
atctaggttatctgttttctta

SEQ ID NO: 121808 - RNA, 22 nt, synthetic construct
  source 1..22: mol_type = other RNA
atctagtgaagtcaatttcaga

SEQ ID NO: 121809 - RNA, 22 nt, synthetic construct
  source 1..22: mol_type = other RNA
atctagttaccactagcaaact

SEQ ID NO: 121810 - RNA, 22 nt, synthetic construct
  source 1..22: mol_type = other RNA
atctatcaatctcacacctggg

SEQ ID NO: 121811 - RNA, 22 nt, synthetic construct
  source 1..22: mol_type = other RNA
atctatcagggctgaaaaacac

SEQ ID NO: 121812 - RNA, 22 nt, synthetic construct
  source 1..22: mol_type = other RNA
atctatgaatttgcctattctg

SEQ ID NO: 121813 - RNA, 22 nt, synthetic construct
  source 1..22: mol_type = other RNA
atctatgcatactgcagcactt

SEQ ID NO: 121814 - RNA, 22 nt, synthetic construct
  source 1..22: mol_type = other RNA
atctatgtcccctggggcctca

SEQ ID NO: 121815 - RNA, 22 nt, synthetic construct
  source 1..22: mol_type = other RNA
atctattaacagaagggtatat

SEQ ID NO: 121816 - RNA, 22 nt, synthetic construct
  source 1..22: mol_type = other RNA
atctatttccccattagagtaa

SEQ ID NO: 121817 - RNA, 22 nt, synthetic construct
  source 1..22: mol_type = other RNA
atctcaaacagcctaattgtac

SEQ ID NO: 121818 - RNA, 22 nt, synthetic construct
  source 1..22: mol_type = other RNA
atctcaatcagggccttcccaa

SEQ ID NO: 121819 - RNA, 22 nt, synthetic construct
  source 1..22: mol_type = other RNA
atctcaattcagaagctaaatt

SEQ ID NO: 121820 - RNA, 22 nt, synthetic construct
  source 1..22: mol_type = other RNA
atctcacacctgggtatacagc

SEQ ID NO: 121821 - RNA, 22 nt, synthetic construct
  source 1..22: mol_type = other RNA
atctcacgtcaccgcaacctcc

SEQ ID NO: 121822 - RNA, 22 nt, synthetic construct
  source 1..22: mol_type = other RNA
atctcactcacctagctgtttt

SEQ ID NO: 121823 - RNA, 22 nt, synthetic construct
  source 1..22: mol_type = other RNA
atctcagcacagagccgaaatg

SEQ ID NO: 121824 - RNA, 22 nt, synthetic construct
  source 1..22: mol_type = other RNA
atctcagctcattacagtctcg

SEQ ID NO: 121825 - RNA, 22 nt, synthetic construct
  source 1..22: mol_type = other RNA
atctcagtcataatttgtgtcc

SEQ ID NO: 121826 - RNA, 22 nt, synthetic construct
  source 1..22: mol_type = other RNA
atctcatccacaatgagacatt

SEQ ID NO: 121827 - RNA, 22 nt, synthetic construct
  source 1..22: mol_type = other RNA
atctcatgcttaggatcccagt

SEQ ID NO: 121828 - RNA, 22 nt, synthetic construct
  source 1..22: mol_type = other RNA
atctcatggaagttatttaatc

SEQ ID NO: 121829 - RNA, 22 nt, synthetic construct
  source 1..22: mol_type = other RNA
atctcattaaaaatcaacccat

SEQ ID NO: 121830 - RNA, 22 nt, synthetic construct
  source 1..22: mol_type = other RNA
atctcattataacataaaagcg

SEQ ID NO: 121831 - RNA, 22 nt, synthetic construct
  source 1..22: mol_type = other RNA
atctcattttgaaaaacagatc

SEQ ID NO: 121832 - RNA, 22 nt, synthetic construct
  source 1..22: mol_type = other RNA
atctccacatttctacacaaca

SEQ ID NO: 121833 - RNA, 22 nt, synthetic construct
  source 1..22: mol_type = other RNA
atctccataagtccctaacagt

SEQ ID NO: 121834 - RNA, 22 nt, synthetic construct
  source 1..22: mol_type = other RNA
atctcccataccacctgtcaga

SEQ ID NO: 121835 - RNA, 22 nt, synthetic construct
  source 1..22: mol_type = other RNA
atctcccatcactagaatgtga

SEQ ID NO: 121836 - RNA, 22 nt, synthetic construct
  source 1..22: mol_type = other RNA
atctccccaaagatattagcta

SEQ ID NO: 121837 - RNA, 22 nt, synthetic construct
  source 1..22: mol_type = other RNA
atctccctcacagtccactcac

SEQ ID NO: 121838 - RNA, 22 nt, synthetic construct
  source 1..22: mol_type = other RNA
atctccctgtgcgtgaatctgt

SEQ ID NO: 121839 - RNA, 22 nt, synthetic construct
  source 1..22: mol_type = other RNA
atctcctgagtagcagggacca

SEQ ID NO: 121840 - RNA, 22 nt, synthetic construct
  source 1..22: mol_type = other RNA
atctccttaatccagtctatca

SEQ ID NO: 121841 - RNA, 22 nt, synthetic construct
  source 1..22: mol_type = other RNA
atctcctttccttccttgctca

SEQ ID NO: 121842 - RNA, 22 nt, synthetic construct
  source 1..22: mol_type = other RNA
atctccttttaagagtgaagaa

SEQ ID NO: 121843 - RNA, 22 nt, synthetic construct
  source 1..22: mol_type = other RNA
atctcggcttactgcaacctcc

SEQ ID NO: 121844 - RNA, 22 nt, synthetic construct
  source 1..22: mol_type = other RNA
atctcggtcattctggagtgtt

SEQ ID NO: 121845 - RNA, 22 nt, synthetic construct
  source 1..22: mol_type = other RNA
atctctacagggaaccgtaact

SEQ ID NO: 121846 - RNA, 22 nt, synthetic construct
  source 1..22: mol_type = other RNA
atctctagaacttatgcatctt

SEQ ID NO: 121847 - RNA, 22 nt, synthetic construct
  source 1..22: mol_type = other RNA
atctctaggcttaaaattcttc

SEQ ID NO: 121848 - RNA, 22 nt, synthetic construct
  source 1..22: mol_type = other RNA
atctctagttttccagtatatt

SEQ ID NO: 121849 - RNA, 22 nt, synthetic construct
  source 1..22: mol_type = other RNA
atctctatgcagaaatctacca

SEQ ID NO: 121850 - RNA, 22 nt, synthetic construct
  source 1..22: mol_type = other RNA
atctctcagatctgagtttgct

SEQ ID NO: 121851 - RNA, 22 nt, synthetic construct
  source 1..22: mol_type = other RNA
atctctccaacagaagaagttt

SEQ ID NO: 121852 - RNA, 22 nt, synthetic construct
  source 1..22: mol_type = other RNA
atctctcccttcctgttctttg

SEQ ID NO: 121853 - RNA, 22 nt, synthetic construct
  source 1..22: mol_type = other RNA
atctctcgatggacatttaggt

SEQ ID NO: 121854 - RNA, 22 nt, synthetic construct
  source 1..22: mol_type = other RNA
atctctctaaaaacatccatta

SEQ ID NO: 121855 - RNA, 22 nt, synthetic construct
  source 1..22: mol_type = other RNA
atctctctatccaccactccac

SEQ ID NO: 121856 - RNA, 22 nt, synthetic construct
  source 1..22: mol_type = other RNA
atctctctcaagcaatctgaaa

SEQ ID NO: 121857 - RNA, 22 nt, synthetic construct
  source 1..22: mol_type = other RNA
atctctctgcctcaaaatcaac

SEQ ID NO: 121858 - RNA, 22 nt, synthetic construct
  source 1..22: mol_type = other RNA
atctctcttgaccttagttttc

SEQ ID NO: 121859 - RNA, 22 nt, synthetic construct
  source 1..22: mol_type = other RNA
atctctgacattggttattcat

SEQ ID NO: 121860 - RNA, 22 nt, synthetic construct
  source 1..22: mol_type = other RNA
atctctgacttcattcttgaca

SEQ ID NO: 121861 - RNA, 22 nt, synthetic construct
  source 1..22: mol_type = other RNA
atctctgccctcattgaagcta

SEQ ID NO: 121862 - RNA, 22 nt, synthetic construct
  source 1..22: mol_type = other RNA
atctctgggctcactgcaactt

SEQ ID NO: 121863 - RNA, 22 nt, synthetic construct
  source 1..22: mol_type = other RNA
atctctggggttagggcctaga

SEQ ID NO: 121864 - RNA, 22 nt, synthetic construct
  source 1..22: mol_type = other RNA
atctctggtattctgaactttc

SEQ ID NO: 121865 - RNA, 22 nt, synthetic construct
  source 1..22: mol_type = other RNA
atctcttacacctgtttaaaaa

SEQ ID NO: 121866 - RNA, 22 nt, synthetic construct
  source 1..22: mol_type = other RNA
atctcttagacctcctagattg

SEQ ID NO: 121867 - RNA, 22 nt, synthetic construct
  source 1..22: mol_type = other RNA
atctcttcctcctctggacatt

SEQ ID NO: 121868 - RNA, 22 nt, synthetic construct
  source 1..22: mol_type = other RNA
atctcttttcctttaacgtatc

SEQ ID NO: 121869 - RNA, 22 nt, synthetic construct
  source 1..22: mol_type = other RNA
atctgaaacgaccttgctcatt

SEQ ID NO: 121870 - RNA, 22 nt, synthetic construct
  source 1..22: mol_type = other RNA
atctgaaattgacttcactaga

SEQ ID NO: 121871 - RNA, 22 nt, synthetic construct
  source 1..22: mol_type = other RNA
atctgaacattttagctggggc

SEQ ID NO: 121872 - RNA, 22 nt, synthetic construct
  source 1..22: mol_type = other RNA
atctgaacgtctttaaatttca

SEQ ID NO: 121873 - RNA, 22 nt, synthetic construct
  source 1..22: mol_type = other RNA
atctgaactttcgaagtgggaa

SEQ ID NO: 121874 - RNA, 22 nt, synthetic construct
  source 1..22: mol_type = other RNA
atctgacaatttgccaaaatga

SEQ ID NO: 121875 - RNA, 22 nt, synthetic construct
  source 1..22: mol_type = other RNA
atctgacatatgttttgcttcg

SEQ ID NO: 121876 - RNA, 22 nt, synthetic construct
  source 1..22: mol_type = other RNA
atctgacctaagcttgggtagg

SEQ ID NO: 121877 - RNA, 22 nt, synthetic construct
  source 1..22: mol_type = other RNA
atctgagaagactaagcagaaa

SEQ ID NO: 121878 - RNA, 22 nt, synthetic construct
  source 1..22: mol_type = other RNA
atctgagacatcacaatgcgtt

SEQ ID NO: 121879 - RNA, 22 nt, synthetic construct
  source 1..22: mol_type = other RNA
atctgagagatagaaagcacca

SEQ ID NO: 121880 - RNA, 22 nt, synthetic construct
  source 1..22: mol_type = other RNA
atctgagtaaagggtaagaaaa

SEQ ID NO: 121881 - RNA, 22 nt, synthetic construct
  source 1..22: mol_type = other RNA
atctgagtgttgtgtgcaccta

SEQ ID NO: 121882 - RNA, 22 nt, synthetic construct
  source 1..22: mol_type = other RNA
atctgagtttgctctgcaaatg

SEQ ID NO: 121883 - RNA, 22 nt, synthetic construct
  source 1..22: mol_type = other RNA
atctgataaattattagcttgc

SEQ ID NO: 121884 - RNA, 22 nt, synthetic construct
  source 1..22: mol_type = other RNA
atctgataagcccaacctgatt

SEQ ID NO: 121885 - RNA, 22 nt, synthetic construct
  source 1..22: mol_type = other RNA
atctgatacacttctatccagt

SEQ ID NO: 121886 - RNA, 22 nt, synthetic construct
  source 1..22: mol_type = other RNA
atctgatgtgtatgttacactt

SEQ ID NO: 121887 - RNA, 22 nt, synthetic construct
  source 1..22: mol_type = other RNA
atctgattcagtggttggaaaa

SEQ ID NO: 121888 - RNA, 22 nt, synthetic construct
  source 1..22: mol_type = other RNA
atctgatttgtttagtagctgt

SEQ ID NO: 121889 - RNA, 22 nt, synthetic construct
  source 1..22: mol_type = other RNA
atctgattttaatctgtcctga

SEQ ID NO: 121890 - RNA, 22 nt, synthetic construct
  source 1..22: mol_type = other RNA
atctgattttgtgtcttctgtt

SEQ ID NO: 121891 - RNA, 22 nt, synthetic construct
  source 1..22: mol_type = other RNA
atctgatttttagtgactggct

SEQ ID NO: 121892 - RNA, 22 nt, synthetic construct
  source 1..22: mol_type = other RNA
atctgcaactatcaaaacactt

SEQ ID NO: 121893 - RNA, 22 nt, synthetic construct
  source 1..22: mol_type = other RNA
atctgcagtgtccatctcccat

SEQ ID NO: 121894 - RNA, 22 nt, synthetic construct
  source 1..22: mol_type = other RNA
atctgcatccaaaagggaaata

SEQ ID NO: 121895 - RNA, 22 nt, synthetic construct
  source 1..22: mol_type = other RNA
atctgccaggacaattgaatgg

SEQ ID NO: 121896 - RNA, 22 nt, synthetic construct
  source 1..22: mol_type = other RNA
atctgcctcccgggtccaggca

SEQ ID NO: 121897 - RNA, 22 nt, synthetic construct
  source 1..22: mol_type = other RNA
atctgctgtaagctggtaatac

SEQ ID NO: 121898 - RNA, 22 nt, synthetic construct
  source 1..22: mol_type = other RNA
atctgctgtcggttttctagtt

SEQ ID NO: 121899 - RNA, 22 nt, synthetic construct
  source 1..22: mol_type = other RNA
atctgcttgcagacaataattc

SEQ ID NO: 121900 - RNA, 22 nt, synthetic construct
  source 1..22: mol_type = other RNA
atctggaaggaaacactataaa

SEQ ID NO: 121901 - RNA, 22 nt, synthetic construct
  source 1..22: mol_type = other RNA
atctggaatgcatcgtttcaat

SEQ ID NO: 121902 - RNA, 22 nt, synthetic construct
  source 1..22: mol_type = other RNA
atctggaccagttactctctct

SEQ ID NO: 121903 - RNA, 22 nt, synthetic construct
  source 1..22: mol_type = other RNA
atctggactgaaaagatacaga

SEQ ID NO: 121904 - RNA, 22 nt, synthetic construct
  source 1..22: mol_type = other RNA
atctggatcctgtctcagagta

SEQ ID NO: 121905 - RNA, 22 nt, synthetic construct
  source 1..22: mol_type = other RNA
atctggattatagtggtaagga

SEQ ID NO: 121906 - RNA, 22 nt, synthetic construct
  source 1..22: mol_type = other RNA
atctggatttttgtgtagaggt

SEQ ID NO: 121907 - RNA, 22 nt, synthetic construct
  source 1..22: mol_type = other RNA
atctggcagcaggggctaagta

SEQ ID NO: 121908 - RNA, 22 nt, synthetic construct
  source 1..22: mol_type = other RNA
atctggcctgcaccatttattg

SEQ ID NO: 121909 - RNA, 22 nt, synthetic construct
  source 1..22: mol_type = other RNA
atctggctgcagggcttctgaa

SEQ ID NO: 121910 - RNA, 22 nt, synthetic construct
  source 1..22: mol_type = other RNA
atctgggaaaaaataagaaaac

SEQ ID NO: 121911 - RNA, 22 nt, synthetic construct
  source 1..22: mol_type = other RNA
atctgggaacagcccctagcat

SEQ ID NO: 121912 - RNA, 22 nt, synthetic construct
  source 1..22: mol_type = other RNA
atctgggataatgctatcattt

SEQ ID NO: 121913 - RNA, 22 nt, synthetic construct
  source 1..22: mol_type = other RNA
atctgggatacttctaacttta

SEQ ID NO: 121914 - RNA, 22 nt, synthetic construct
  source 1..22: mol_type = other RNA
atctggtcacaaacacaaaaca

SEQ ID NO: 121915 - RNA, 22 nt, synthetic construct
  source 1..22: mol_type = other RNA
atctggtcctgagctttcctta

SEQ ID NO: 121916 - RNA, 22 nt, synthetic construct
  source 1..22: mol_type = other RNA
atctggtctatctcattataac

SEQ ID NO: 121917 - RNA, 22 nt, synthetic construct
  source 1..22: mol_type = other RNA
atctggtgctggcagccttctc

SEQ ID NO: 121918 - RNA, 22 nt, synthetic construct
  source 1..22: mol_type = other RNA
atctggtgttgcttgctctaca

SEQ ID NO: 121919 - RNA, 22 nt, synthetic construct
  source 1..22: mol_type = other RNA
atctgtaagtcatcaaaggaag

SEQ ID NO: 121920 - RNA, 22 nt, synthetic construct
  source 1..22: mol_type = other RNA
atctgtagattgttttaggtag

SEQ ID NO: 121921 - RNA, 22 nt, synthetic construct
  source 1..22: mol_type = other RNA
atctgtatatgaaaagcttccc

SEQ ID NO: 121922 - RNA, 22 nt, synthetic construct
  source 1..22: mol_type = other RNA
atctgtatgagaagactggaaa

SEQ ID NO: 121923 - RNA, 22 nt, synthetic construct
  source 1..22: mol_type = other RNA
atctgtcaaaaagagaacacac

SEQ ID NO: 121924 - RNA, 22 nt, synthetic construct
  source 1..22: mol_type = other RNA
atctgtcactttcctattcaca

SEQ ID NO: 121925 - RNA, 22 nt, synthetic construct
  source 1..22: mol_type = other RNA
atctgtcagcagttcagcctgc

SEQ ID NO: 121926 - RNA, 22 nt, synthetic construct
  source 1..22: mol_type = other RNA
atctgtcatgtttgaattttcc

SEQ ID NO: 121927 - RNA, 22 nt, synthetic construct
  source 1..22: mol_type = other RNA
atctgtcctgaatactattcct

SEQ ID NO: 121928 - RNA, 22 nt, synthetic construct
  source 1..22: mol_type = other RNA
atctgtctgggataatgagttt

SEQ ID NO: 121929 - RNA, 22 nt, synthetic construct
  source 1..22: mol_type = other RNA
atctgtcttgtgcatcctttat

SEQ ID NO: 121930 - RNA, 22 nt, synthetic construct
  source 1..22: mol_type = other RNA
atctgtctttggcccatatcct

SEQ ID NO: 121931 - RNA, 22 nt, synthetic construct
  source 1..22: mol_type = other RNA
atctgtgatccctgatatgtcg

SEQ ID NO: 121932 - RNA, 22 nt, synthetic construct
  source 1..22: mol_type = other RNA
atctgtggactttaggctgttc

SEQ ID NO: 121933 - RNA, 22 nt, synthetic construct
  source 1..22: mol_type = other RNA
atctgtgggttaaaagttagct

SEQ ID NO: 121934 - RNA, 22 nt, synthetic construct
  source 1..22: mol_type = other RNA
atctgttaatgggcacttggga

SEQ ID NO: 121935 - RNA, 22 nt, synthetic construct
  source 1..22: mol_type = other RNA
atctgttcctgggttctccctt

SEQ ID NO: 121936 - RNA, 22 nt, synthetic construct
  source 1..22: mol_type = other RNA
atctgttgcagtccccggtctt

SEQ ID NO: 121937 - RNA, 22 nt, synthetic construct
  source 1..22: mol_type = other RNA
atctgttggtgcttagctgcct

SEQ ID NO: 121938 - RNA, 22 nt, synthetic construct
  source 1..22: mol_type = other RNA
atctgtttcctaatctaacatg

SEQ ID NO: 121939 - RNA, 22 nt, synthetic construct
  source 1..22: mol_type = other RNA
atctgtttttcaaaatgagatc

SEQ ID NO: 121940 - RNA, 22 nt, synthetic construct
  source 1..22: mol_type = other RNA
atcttaaaataccagaggttaa

SEQ ID NO: 121941 - RNA, 22 nt, synthetic construct
  source 1..22: mol_type = other RNA
atcttaacatttctcatgtatg

SEQ ID NO: 121942 - RNA, 22 nt, synthetic construct
  source 1..22: mol_type = other RNA
atcttaagaaccatacagtgcc

SEQ ID NO: 121943 - RNA, 22 nt, synthetic construct
  source 1..22: mol_type = other RNA
atcttaataacctcaaagtgga

SEQ ID NO: 121944 - RNA, 22 nt, synthetic construct
  source 1..22: mol_type = other RNA
atcttacccccatcacactggt

SEQ ID NO: 121945 - RNA, 22 nt, synthetic construct
  source 1..22: mol_type = other RNA
atcttaccctgttgaccaggct

SEQ ID NO: 121946 - RNA, 22 nt, synthetic construct
  source 1..22: mol_type = other RNA
atcttactggtgttaggcaatc

SEQ ID NO: 121947 - RNA, 22 nt, synthetic construct
  source 1..22: mol_type = other RNA
atcttactgtaagttcctggac

SEQ ID NO: 121948 - RNA, 22 nt, synthetic construct
  source 1..22: mol_type = other RNA
atcttagccgggaggagccaag

SEQ ID NO: 121949 - RNA, 22 nt, synthetic construct
  source 1..22: mol_type = other RNA
atcttagctcttcccttaacct

SEQ ID NO: 121950 - RNA, 22 nt, synthetic construct
  source 1..22: mol_type = other RNA
atcttaggccataaatcaaggt

SEQ ID NO: 121951 - RNA, 22 nt, synthetic construct
  source 1..22: mol_type = other RNA
atcttatattaattctgaggcc

SEQ ID NO: 121952 - RNA, 22 nt, synthetic construct
  source 1..22: mol_type = other RNA
atcttatctgctgtcggttttc

SEQ ID NO: 121953 - RNA, 22 nt, synthetic construct
  source 1..22: mol_type = other RNA
atcttattaatgtgttgtctga

SEQ ID NO: 121954 - RNA, 22 nt, synthetic construct
  source 1..22: mol_type = other RNA
atcttattccccagggaaacct

SEQ ID NO: 121955 - RNA, 22 nt, synthetic construct
  source 1..22: mol_type = other RNA
atcttcaaaatctgatgtgtat

SEQ ID NO: 121956 - RNA, 22 nt, synthetic construct
  source 1..22: mol_type = other RNA
atcttcaagatttcataggcat

SEQ ID NO: 121957 - RNA, 22 nt, synthetic construct
  source 1..22: mol_type = other RNA
atcttcacaaacaaatcctttt

SEQ ID NO: 121958 - RNA, 22 nt, synthetic construct
  source 1..22: mol_type = other RNA
atcttcacacttagttcaagat

SEQ ID NO: 121959 - RNA, 22 nt, synthetic construct
  source 1..22: mol_type = other RNA
atcttcacgtggcgctccctct

SEQ ID NO: 121960 - RNA, 22 nt, synthetic construct
  source 1..22: mol_type = other RNA
atcttcactgactacacataca

SEQ ID NO: 121961 - RNA, 22 nt, synthetic construct
  source 1..22: mol_type = other RNA
atcttcatttctaagccatgtt

SEQ ID NO: 121962 - RNA, 22 nt, synthetic construct
  source 1..22: mol_type = other RNA
atcttccagaaggagaaaacaa

SEQ ID NO: 121963 - RNA, 22 nt, synthetic construct
  source 1..22: mol_type = other RNA
atcttccatacgaaagccttta

SEQ ID NO: 121964 - RNA, 22 nt, synthetic construct
  source 1..22: mol_type = other RNA
atcttcccaatcctttgtgcag

SEQ ID NO: 121965 - RNA, 22 nt, synthetic construct
  source 1..22: mol_type = other RNA
atcttcccatgaacatggtttg

SEQ ID NO: 121966 - RNA, 22 nt, synthetic construct
  source 1..22: mol_type = other RNA
atcttccctaaagagaatctta

SEQ ID NO: 121967 - RNA, 22 nt, synthetic construct
  source 1..22: mol_type = other RNA
atcttctctctctgcttcacta

SEQ ID NO: 121968 - RNA, 22 nt, synthetic construct
  source 1..22: mol_type = other RNA
atcttcttagtgttcccttctt

SEQ ID NO: 121969 - RNA, 22 nt, synthetic construct
  source 1..22: mol_type = other RNA
atcttcttatttgttactgatc

SEQ ID NO: 121970 - RNA, 22 nt, synthetic construct
  source 1..22: mol_type = other RNA
atcttcttttacttgcttggtt

SEQ ID NO: 121971 - RNA, 22 nt, synthetic construct
  source 1..22: mol_type = other RNA
atcttgaaaggggccaggtgtg

SEQ ID NO: 121972 - RNA, 22 nt, synthetic construct
  source 1..22: mol_type = other RNA
atcttgaactaagtgtgaagat

SEQ ID NO: 121973 - RNA, 22 nt, synthetic construct
  source 1..22: mol_type = other RNA
atcttgaagaaaccaagagcat

SEQ ID NO: 121974 - RNA, 22 nt, synthetic construct
  source 1..22: mol_type = other RNA
atcttgaagatggcaaacagac

SEQ ID NO: 121975 - RNA, 22 nt, synthetic construct
  source 1..22: mol_type = other RNA
atcttgacttcacttccaagtc

SEQ ID NO: 121976 - RNA, 22 nt, synthetic construct
  source 1..22: mol_type = other RNA
atcttgagacggaagactcata

SEQ ID NO: 121977 - RNA, 22 nt, synthetic construct
  source 1..22: mol_type = other RNA
atcttgcaaaacaatagcccag

SEQ ID NO: 121978 - RNA, 22 nt, synthetic construct
  source 1..22: mol_type = other RNA
atcttgcaaaacggaaacttta

SEQ ID NO: 121979 - RNA, 22 nt, synthetic construct
  source 1..22: mol_type = other RNA
atcttgcataactcgtaatgcg

SEQ ID NO: 121980 - RNA, 22 nt, synthetic construct
  source 1..22: mol_type = other RNA
atcttgctaaacatgtatacta

SEQ ID NO: 121981 - RNA, 22 nt, synthetic construct
  source 1..22: mol_type = other RNA
atcttggaaatgatacctcatt

SEQ ID NO: 121982 - RNA, 22 nt, synthetic construct
  source 1..22: mol_type = other RNA
atcttggccgaatgtggtggta

SEQ ID NO: 121983 - RNA, 22 nt, synthetic construct
  source 1..22: mol_type = other RNA
atcttgggaatactttcccatc

SEQ ID NO: 121984 - RNA, 22 nt, synthetic construct
  source 1..22: mol_type = other RNA
atcttgtgaattgataaaagtc

SEQ ID NO: 121985 - RNA, 22 nt, synthetic construct
  source 1..22: mol_type = other RNA
atcttgtgtatcttttgttaga

SEQ ID NO: 121986 - RNA, 22 nt, synthetic construct
  source 1..22: mol_type = other RNA
atctttacttcccttctcgaag

SEQ ID NO: 121987 - RNA, 22 nt, synthetic construct
  source 1..22: mol_type = other RNA
atctttactttcagctcaaaca

SEQ ID NO: 121988 - RNA, 22 nt, synthetic construct
  source 1..22: mol_type = other RNA
atctttaggtgttttttccttc

SEQ ID NO: 121989 - RNA, 22 nt, synthetic construct
  source 1..22: mol_type = other RNA
atctttagtgttgcttggtgtt

SEQ ID NO: 121990 - RNA, 22 nt, synthetic construct
  source 1..22: mol_type = other RNA
atctttcaaggggccttttgtc

SEQ ID NO: 121991 - RNA, 22 nt, synthetic construct
  source 1..22: mol_type = other RNA
atctttcctgatcacaccctcc

SEQ ID NO: 121992 - RNA, 22 nt, synthetic construct
  source 1..22: mol_type = other RNA
atctttcctgtgatttatgtgg

SEQ ID NO: 121993 - RNA, 22 nt, synthetic construct
  source 1..22: mol_type = other RNA
atctttctagattcatatgctt

SEQ ID NO: 121994 - RNA, 22 nt, synthetic construct
  source 1..22: mol_type = other RNA
atctttctgaactcaaaagtga

SEQ ID NO: 121995 - RNA, 22 nt, synthetic construct
  source 1..22: mol_type = other RNA
atctttgaataaagggtcagaa

SEQ ID NO: 121996 - RNA, 22 nt, synthetic construct
  source 1..22: mol_type = other RNA
atctttggaaaaatgtccgttg

SEQ ID NO: 121997 - RNA, 22 nt, synthetic construct
  source 1..22: mol_type = other RNA
atctttggatatccccattttt

SEQ ID NO: 121998 - RNA, 22 nt, synthetic construct
  source 1..22: mol_type = other RNA
atctttggcaaacttagaatat

SEQ ID NO: 121999 - RNA, 22 nt, synthetic construct
  source 1..22: mol_type = other RNA
atctttgggaaaatctctgact

SEQ ID NO: 122000 - RNA, 22 nt, synthetic construct
  source 1..22: mol_type = other RNA
atctttggggagataccttgaa

SEQ ID NO: 122001 - RNA, 22 nt, synthetic construct
  source 1..22: mol_type = other RNA
atctttggtgaaggttcatgaa

SEQ ID NO: 122002 - RNA, 22 nt, synthetic construct
  source 1..22: mol_type = other RNA
atctttggtgctgataaatggc

SEQ ID NO: 122003 - RNA, 22 nt, synthetic construct
  source 1..22: mol_type = other RNA
atctttgtacagtaattgtagt

SEQ ID NO: 122004 - RNA, 22 nt, synthetic construct
  source 1..22: mol_type = other RNA
atctttgttacagcagctctag

SEQ ID NO: 122005 - RNA, 22 nt, synthetic construct
  source 1..22: mol_type = other RNA
atcttttaacagatggtccttt

SEQ ID NO: 122006 - RNA, 22 nt, synthetic construct
  source 1..22: mol_type = other RNA
atcttttcaaaaacccaactct

SEQ ID NO: 122007 - RNA, 22 nt, synthetic construct
  source 1..22: mol_type = other RNA
atcttttcagtccagatattat

SEQ ID NO: 122008 - RNA, 22 nt, synthetic construct
  source 1..22: mol_type = other RNA
atcttttcatgttgaccatttt

SEQ ID NO: 122009 - RNA, 22 nt, synthetic construct
  source 1..22: mol_type = other RNA
atcttttctgacaatttcaggg

SEQ ID NO: 122010 - RNA, 22 nt, synthetic construct
  source 1..22: mol_type = other RNA
atcttttgacgcgcaacaattc

SEQ ID NO: 122011 - RNA, 22 nt, synthetic construct
  source 1..22: mol_type = other RNA
atcttttgagggtatcatatta

SEQ ID NO: 122012 - RNA, 22 nt, synthetic construct
  source 1..22: mol_type = other RNA
atcttttgcctggatgaatgca

SEQ ID NO: 122013 - RNA, 22 nt, synthetic construct
  source 1..22: mol_type = other RNA
atctttttcagcagcagagaag

SEQ ID NO: 122014 - RNA, 22 nt, synthetic construct
  source 1..22: mol_type = other RNA
atgaaaaagtactggaaatgga

SEQ ID NO: 122015 - RNA, 22 nt, synthetic construct
  source 1..22: mol_type = other RNA
atgaaaaattcactcctcattc

SEQ ID NO: 122016 - RNA, 22 nt, synthetic construct
  source 1..22: mol_type = other RNA
atgaaaacacaacataccaaaa

SEQ ID NO: 122017 - RNA, 22 nt, synthetic construct
  source 1..22: mol_type = other RNA
atgaaaacagctaggtgagtga

SEQ ID NO: 122018 - RNA, 22 nt, synthetic construct
  source 1..22: mol_type = other RNA
atgaaaagagcacaccaagaca

SEQ ID NO: 122019 - RNA, 22 nt, synthetic construct
  source 1..22: mol_type = other RNA
atgaaaagatactcaacatcac

SEQ ID NO: 122020 - RNA, 22 nt, synthetic construct
  source 1..22: mol_type = other RNA
atgaaaagcccaatctacaggt

SEQ ID NO: 122021 - RNA, 22 nt, synthetic construct
  source 1..22: mol_type = other RNA
atgaaaagcctcaaacgaacca

SEQ ID NO: 122022 - RNA, 22 nt, synthetic construct
  source 1..22: mol_type = other RNA
atgaaaagcttcccccctctct

SEQ ID NO: 122023 - RNA, 22 nt, synthetic construct
  source 1..22: mol_type = other RNA
atgaaaatagtaactttctgct

SEQ ID NO: 122024 - RNA, 22 nt, synthetic construct
  source 1..22: mol_type = other RNA
atgaaaatgttccctcttcaat

SEQ ID NO: 122025 - RNA, 22 nt, synthetic construct
  source 1..22: mol_type = other RNA
atgaaaattagctggatgtggt

SEQ ID NO: 122026 - RNA, 22 nt, synthetic construct
  source 1..22: mol_type = other RNA
atgaaaattggcgtacatgtag

SEQ ID NO: 122027 - RNA, 22 nt, synthetic construct
  source 1..22: mol_type = other RNA
atgaaaatttttgtctggaaca

SEQ ID NO: 122028 - RNA, 22 nt, synthetic construct
  source 1..22: mol_type = other RNA
atgaaacacttgtgtaactacc

SEQ ID NO: 122029 - RNA, 22 nt, synthetic construct
  source 1..22: mol_type = other RNA
atgaaactaaatgtgagcattt

SEQ ID NO: 122030 - RNA, 22 nt, synthetic construct
  source 1..22: mol_type = other RNA
atgaaacttatttccagggggt

SEQ ID NO: 122031 - RNA, 22 nt, synthetic construct
  source 1..22: mol_type = other RNA
atgaaagctcccaatgcttgaa

SEQ ID NO: 122032 - RNA, 22 nt, synthetic construct
  source 1..22: mol_type = other RNA
atgaaaggcgtcggggctgctg

SEQ ID NO: 122033 - RNA, 22 nt, synthetic construct
  source 1..22: mol_type = other RNA
atgaaagtcagctaattttcta

SEQ ID NO: 122034 - RNA, 22 nt, synthetic construct
  source 1..22: mol_type = other RNA
atgaaagtggagaattactaaa

SEQ ID NO: 122035 - RNA, 22 nt, synthetic construct
  source 1..22: mol_type = other RNA
atgaaatactcaaactatgctt

SEQ ID NO: 122036 - RNA, 22 nt, synthetic construct
  source 1..22: mol_type = other RNA
atgaaatcacacaatcttgaga

SEQ ID NO: 122037 - RNA, 22 nt, synthetic construct
  source 1..22: mol_type = other RNA
atgaaatcccctttagtgttct

SEQ ID NO: 122038 - RNA, 22 nt, synthetic construct
  source 1..22: mol_type = other RNA
atgaaatcttgaagatggcaaa

SEQ ID NO: 122039 - RNA, 22 nt, synthetic construct
  source 1..22: mol_type = other RNA
atgaaatggcccttaacttcac

SEQ ID NO: 122040 - RNA, 22 nt, synthetic construct
  source 1..22: mol_type = other RNA
atgaaatgggtttaaaagagtg

SEQ ID NO: 122041 - RNA, 22 nt, synthetic construct
  source 1..22: mol_type = other RNA
atgaaatgtggtttttggttca

SEQ ID NO: 122042 - RNA, 22 nt, synthetic construct
  source 1..22: mol_type = other RNA
atgaaattagttccttttaagg

SEQ ID NO: 122043 - RNA, 22 nt, synthetic construct
  source 1..22: mol_type = other RNA
atgaaattcttgggtgaataac

SEQ ID NO: 122044 - RNA, 22 nt, synthetic construct
  source 1..22: mol_type = other RNA
atgaaattgaccattccacgct

SEQ ID NO: 122045 - RNA, 22 nt, synthetic construct
  source 1..22: mol_type = other RNA
atgaaatttgaggccctattca

SEQ ID NO: 122046 - RNA, 22 nt, synthetic construct
  source 1..22: mol_type = other RNA
atgaacaaaggcaggagcagtg

SEQ ID NO: 122047 - RNA, 22 nt, synthetic construct
  source 1..22: mol_type = other RNA
atgaacaagttacaaacatatg

SEQ ID NO: 122048 - RNA, 22 nt, synthetic construct
  source 1..22: mol_type = other RNA
atgaacaatccttctaatcagt

SEQ ID NO: 122049 - RNA, 22 nt, synthetic construct
  source 1..22: mol_type = other RNA
atgaacaattttctctcatgtt

SEQ ID NO: 122050 - RNA, 22 nt, synthetic construct
  source 1..22: mol_type = other RNA
atgaacaggttcttcatcagtc

SEQ ID NO: 122051 - RNA, 22 nt, synthetic construct
  source 1..22: mol_type = other RNA
atgaacatggtttgatcccact

SEQ ID NO: 122052 - RNA, 22 nt, synthetic construct
  source 1..22: mol_type = other RNA
atgaacattttgagttattgca

SEQ ID NO: 122053 - RNA, 22 nt, synthetic construct
  source 1..22: mol_type = other RNA
atgaaccaaacttggtttattt

SEQ ID NO: 122054 - RNA, 22 nt, synthetic construct
  source 1..22: mol_type = other RNA
atgaaccacactgacaggacag

SEQ ID NO: 122055 - RNA, 22 nt, synthetic construct
  source 1..22: mol_type = other RNA
atgaaccattgtaaaccatatg

SEQ ID NO: 122056 - RNA, 22 nt, synthetic construct
  source 1..22: mol_type = other RNA
atgaacccaccaggaggcggag

SEQ ID NO: 122057 - RNA, 22 nt, synthetic construct
  source 1..22: mol_type = other RNA
atgaacctgcatggtgtaaaat

SEQ ID NO: 122058 - RNA, 22 nt, synthetic construct
  source 1..22: mol_type = other RNA
atgaacctgctttctactagta

SEQ ID NO: 122059 - RNA, 22 nt, synthetic construct
  source 1..22: mol_type = other RNA
atgaaccttcaccaaagattta

SEQ ID NO: 122060 - RNA, 22 nt, synthetic construct
  source 1..22: mol_type = other RNA
atgaacgagaacaaaacaagaa

SEQ ID NO: 122061 - RNA, 22 nt, synthetic construct
  source 1..22: mol_type = other RNA
atgaacgctaaattaaaggctg

SEQ ID NO: 122062 - RNA, 22 nt, synthetic construct
  source 1..22: mol_type = other RNA
atgaactacacagacatgaaca

SEQ ID NO: 122063 - RNA, 22 nt, synthetic construct
  source 1..22: mol_type = other RNA
atgaactcccagaactcgaagc

SEQ ID NO: 122064 - RNA, 22 nt, synthetic construct
  source 1..22: mol_type = other RNA
atgaactcctatagttaagtct

SEQ ID NO: 122065 - RNA, 22 nt, synthetic construct
  source 1..22: mol_type = other RNA
atgaagaaaacactccagaatg

SEQ ID NO: 122066 - RNA, 22 nt, synthetic construct
  source 1..22: mol_type = other RNA
atgaagaaaatccaagaagaca

SEQ ID NO: 122067 - RNA, 22 nt, synthetic construct
  source 1..22: mol_type = other RNA
atgaagaaatagaaaacttgag

SEQ ID NO: 122068 - RNA, 22 nt, synthetic construct
  source 1..22: mol_type = other RNA
atgaagaacctgttcatttgag

SEQ ID NO: 122069 - RNA, 22 nt, synthetic construct
  source 1..22: mol_type = other RNA
atgaagatggcctccctcacta

SEQ ID NO: 122070 - RNA, 22 nt, synthetic construct
  source 1..22: mol_type = other RNA
atgaagattagaaaattagctg

SEQ ID NO: 122071 - RNA, 22 nt, synthetic construct
  source 1..22: mol_type = other RNA
atgaagcaggccttcgaggcat

SEQ ID NO: 122072 - RNA, 22 nt, synthetic construct
  source 1..22: mol_type = other RNA
atgaagcagggaaatggagggc

SEQ ID NO: 122073 - RNA, 22 nt, synthetic construct
  source 1..22: mol_type = other RNA
atgaagcattaatgcaacctgc

SEQ ID NO: 122074 - RNA, 22 nt, synthetic construct
  source 1..22: mol_type = other RNA
atgaagccctctaagtcagcct

SEQ ID NO: 122075 - RNA, 22 nt, synthetic construct
  source 1..22: mol_type = other RNA
atgaagcttttctcctaagtct

SEQ ID NO: 122076 - RNA, 22 nt, synthetic construct
  source 1..22: mol_type = other RNA
atgaaggaaaaaacgggttata

SEQ ID NO: 122077 - RNA, 22 nt, synthetic construct
  source 1..22: mol_type = other RNA
atgaaggaaggattggaatgag

SEQ ID NO: 122078 - RNA, 22 nt, synthetic construct
  source 1..22: mol_type = other RNA
atgaagggttttctgtagaata

SEQ ID NO: 122079 - RNA, 22 nt, synthetic construct
  source 1..22: mol_type = other RNA
atgaagtatagaaaggagacca

SEQ ID NO: 122080 - RNA, 22 nt, synthetic construct
  source 1..22: mol_type = other RNA
atgaagtattgatttgaccatg

SEQ ID NO: 122081 - RNA, 22 nt, synthetic construct
  source 1..22: mol_type = other RNA
atgaagtcagagattttcccaa

SEQ ID NO: 122082 - RNA, 22 nt, synthetic construct
  source 1..22: mol_type = other RNA
atgaagtcctcaatcatgtcaa

SEQ ID NO: 122083 - RNA, 22 nt, synthetic construct
  source 1..22: mol_type = other RNA
atgaataaaccacgcagtttgt

SEQ ID NO: 122084 - RNA, 22 nt, synthetic construct
  source 1..22: mol_type = other RNA
atgaataaccaatgtcagagat

SEQ ID NO: 122085 - RNA, 22 nt, synthetic construct
  source 1..22: mol_type = other RNA
atgaatacaaaggtgttaagcc

SEQ ID NO: 122086 - RNA, 22 nt, synthetic construct
  source 1..22: mol_type = other RNA
atgaatacctatttagagggat

SEQ ID NO: 122087 - RNA, 22 nt, synthetic construct
  source 1..22: mol_type = other RNA
atgaatagaaaatccttacttc

SEQ ID NO: 122088 - RNA, 22 nt, synthetic construct
  source 1..22: mol_type = other RNA
atgaataggtgtgtgttccttc

SEQ ID NO: 122089 - RNA, 22 nt, synthetic construct
  source 1..22: mol_type = other RNA
atgaatatactggaaaactaga

SEQ ID NO: 122090 - RNA, 22 nt, synthetic construct
  source 1..22: mol_type = other RNA
atgaatatgtactacctataga

SEQ ID NO: 122091 - RNA, 22 nt, synthetic construct
  source 1..22: mol_type = other RNA
atgaatattcgttccagcaggg

SEQ ID NO: 122092 - RNA, 22 nt, synthetic construct
  source 1..22: mol_type = other RNA
atgaatctagaaagataaatcc

SEQ ID NO: 122093 - RNA, 22 nt, synthetic construct
  source 1..22: mol_type = other RNA
atgaatctgcaactatcaaaac

SEQ ID NO: 122094 - RNA, 22 nt, synthetic construct
  source 1..22: mol_type = other RNA
atgaatgaacaaaatgtggtat

SEQ ID NO: 122095 - RNA, 22 nt, synthetic construct
  source 1..22: mol_type = other RNA
atgaatgagcaaggtcgtttca

SEQ ID NO: 122096 - RNA, 22 nt, synthetic construct
  source 1..22: mol_type = other RNA
atgaatgatgccatcacatttt

SEQ ID NO: 122097 - RNA, 22 nt, synthetic construct
  source 1..22: mol_type = other RNA
atgaatgcacgtgaagctacag

SEQ ID NO: 122098 - RNA, 22 nt, synthetic construct
  source 1..22: mol_type = other RNA
atgaatgcagtggcttcctaac

SEQ ID NO: 122099 - RNA, 22 nt, synthetic construct
  source 1..22: mol_type = other RNA
atgaatggaaaattcttggtct

SEQ ID NO: 122100 - RNA, 22 nt, synthetic construct
  source 1..22: mol_type = other RNA
atgaatggaaatgtaaattcct

SEQ ID NO: 122101 - RNA, 22 nt, synthetic construct
  source 1..22: mol_type = other RNA
atgaatggataaggaaaatatg

SEQ ID NO: 122102 - RNA, 22 nt, synthetic construct
  source 1..22: mol_type = other RNA
atgaattacaaatgaaagtcag

SEQ ID NO: 122103 - RNA, 22 nt, synthetic construct
  source 1..22: mol_type = other RNA
atgaattagcaatgcgaatcat

SEQ ID NO: 122104 - RNA, 22 nt, synthetic construct
  source 1..22: mol_type = other RNA
atgaatttaattttgagagtgc

SEQ ID NO: 122105 - RNA, 22 nt, synthetic construct
  source 1..22: mol_type = other RNA
atgaatttgcctattctggggc

SEQ ID NO: 122106 - RNA, 22 nt, synthetic construct
  source 1..22: mol_type = other RNA
atgacaagaatctttggcaaac

SEQ ID NO: 122107 - RNA, 22 nt, synthetic construct
  source 1..22: mol_type = other RNA
atgacaagactacctaaaacaa

SEQ ID NO: 122108 - RNA, 22 nt, synthetic construct
  source 1..22: mol_type = other RNA
atgacaagtaaatgcaatgcag

SEQ ID NO: 122109 - RNA, 22 nt, synthetic construct
  source 1..22: mol_type = other RNA
atgacaataataactacacatc

SEQ ID NO: 122110 - RNA, 22 nt, synthetic construct
  source 1..22: mol_type = other RNA
atgacacaacttactactaaaa

SEQ ID NO: 122111 - RNA, 22 nt, synthetic construct
  source 1..22: mol_type = other RNA
atgacaccaaaactacaggcaa

SEQ ID NO: 122112 - RNA, 22 nt, synthetic construct
  source 1..22: mol_type = other RNA
atgacagagtgagactcggtct

SEQ ID NO: 122113 - RNA, 22 nt, synthetic construct
  source 1..22: mol_type = other RNA
atgacagagttccacctccatc

SEQ ID NO: 122114 - RNA, 22 nt, synthetic construct
  source 1..22: mol_type = other RNA
atgacagatcccaaaaaggttt

SEQ ID NO: 122115 - RNA, 22 nt, synthetic construct
  source 1..22: mol_type = other RNA
atgacaggtgagtggactgtga

SEQ ID NO: 122116 - RNA, 22 nt, synthetic construct
  source 1..22: mol_type = other RNA
atgacagttactctaaaagaat

SEQ ID NO: 122117 - RNA, 22 nt, synthetic construct
  source 1..22: mol_type = other RNA
atgacatggttttcctactaac

SEQ ID NO: 122118 - RNA, 22 nt, synthetic construct
  source 1..22: mol_type = other RNA
atgacatgtgttttatttaggc

SEQ ID NO: 122119 - RNA, 22 nt, synthetic construct
  source 1..22: mol_type = other RNA
atgacatttgcttttcctggaa

SEQ ID NO: 122120 - RNA, 22 nt, synthetic construct
  source 1..22: mol_type = other RNA
atgaccctgctatgcatacttt

SEQ ID NO: 122121 - RNA, 22 nt, synthetic construct
  source 1..22: mol_type = other RNA
atgaccgagatacttaagtttt

SEQ ID NO: 122122 - RNA, 22 nt, synthetic construct
  source 1..22: mol_type = other RNA
atgacctaaaatcttattcccc

SEQ ID NO: 122123 - RNA, 22 nt, synthetic construct
  source 1..22: mol_type = other RNA
atgacctatctattaacagaag

SEQ ID NO: 122124 - RNA, 22 nt, synthetic construct
  source 1..22: mol_type = other RNA
atgacctcctcccacttacatc

SEQ ID NO: 122125 - RNA, 22 nt, synthetic construct
  source 1..22: mol_type = other RNA
atgacctgctttcttggggctc

SEQ ID NO: 122126 - RNA, 22 nt, synthetic construct
  source 1..22: mol_type = other RNA
atgacctggaaattattcaata

SEQ ID NO: 122127 - RNA, 22 nt, synthetic construct
  source 1..22: mol_type = other RNA
atgaccttgacaataaatggtg

SEQ ID NO: 122128 - RNA, 22 nt, synthetic construct
  source 1..22: mol_type = other RNA
atgacgaaagtgaagcccagag

SEQ ID NO: 122129 - RNA, 22 nt, synthetic construct
  source 1..22: mol_type = other RNA
atgactaatttgaggcattagt

SEQ ID NO: 122130 - RNA, 22 nt, synthetic construct
  source 1..22: mol_type = other RNA
atgactaggctcctgagaaccg

SEQ ID NO: 122131 - RNA, 22 nt, synthetic construct
  source 1..22: mol_type = other RNA
atgactatgaaaagcctcaaac

SEQ ID NO: 122132 - RNA, 22 nt, synthetic construct
  source 1..22: mol_type = other RNA
atgactgagatacttaagtttt

SEQ ID NO: 122133 - RNA, 22 nt, synthetic construct
  source 1..22: mol_type = other RNA
atgactggccatccttcccaaa

SEQ ID NO: 122134 - RNA, 22 nt, synthetic construct
  source 1..22: mol_type = other RNA
atgactggtgtccttctgagaa

SEQ ID NO: 122135 - RNA, 22 nt, synthetic construct
  source 1..22: mol_type = other RNA
atgactgtaagctgaactctgt

SEQ ID NO: 122136 - RNA, 22 nt, synthetic construct
  source 1..22: mol_type = other RNA
atgactgtcctgaattctaatg

SEQ ID NO: 122137 - RNA, 22 nt, synthetic construct
  source 1..22: mol_type = other RNA
atgactgttgcctctgtgctag

SEQ ID NO: 122138 - RNA, 22 nt, synthetic construct
  source 1..22: mol_type = other RNA
atgacttacagatatcacccag

SEQ ID NO: 122139 - RNA, 22 nt, synthetic construct
  source 1..22: mol_type = other RNA
atgacttcactggagaattcta

SEQ ID NO: 122140 - RNA, 22 nt, synthetic construct
  source 1..22: mol_type = other RNA
atgacttttatcaattcacaag

SEQ ID NO: 122141 - RNA, 22 nt, synthetic construct
  source 1..22: mol_type = other RNA
atgacttttttgcccactctta

SEQ ID NO: 122142 - RNA, 22 nt, synthetic construct
  source 1..22: mol_type = other RNA
atgagaaacatacatgttcagt

SEQ ID NO: 122143 - RNA, 22 nt, synthetic construct
  source 1..22: mol_type = other RNA
atgagaaacctaagaaaggtct

SEQ ID NO: 122144 - RNA, 22 nt, synthetic construct
  source 1..22: mol_type = other RNA
atgagaaatacttggacagggg

SEQ ID NO: 122145 - RNA, 22 nt, synthetic construct
  source 1..22: mol_type = other RNA
atgagaaatgtctggtttgctt

SEQ ID NO: 122146 - RNA, 22 nt, synthetic construct
  source 1..22: mol_type = other RNA
atgagaaatgttaagattcaac

SEQ ID NO: 122147 - RNA, 22 nt, synthetic construct
  source 1..22: mol_type = other RNA
atgagaagactggaaaagtgtt

SEQ ID NO: 122148 - RNA, 22 nt, synthetic construct
  source 1..22: mol_type = other RNA
atgagaaggattagtgttaatt

SEQ ID NO: 122149 - RNA, 22 nt, synthetic construct
  source 1..22: mol_type = other RNA
atgagaattcattgttgtgtgt

SEQ ID NO: 122150 - RNA, 22 nt, synthetic construct
  source 1..22: mol_type = other RNA
atgagaatttcagaaagagaat

SEQ ID NO: 122151 - RNA, 22 nt, synthetic construct
  source 1..22: mol_type = other RNA
atgagacacacgagtattcaag

SEQ ID NO: 122152 - RNA, 22 nt, synthetic construct
  source 1..22: mol_type = other RNA
atgagacacctacaatattaac

SEQ ID NO: 122153 - RNA, 22 nt, synthetic construct
  source 1..22: mol_type = other RNA
atgagacatttgagggtgctga

SEQ ID NO: 122154 - RNA, 22 nt, synthetic construct
  source 1..22: mol_type = other RNA
atgagaccaaatgcataaaaat

SEQ ID NO: 122155 - RNA, 22 nt, synthetic construct
  source 1..22: mol_type = other RNA
atgagaccccatctctaccaaa

SEQ ID NO: 122156 - RNA, 22 nt, synthetic construct
  source 1..22: mol_type = other RNA
atgagactcttaatattgaaac

SEQ ID NO: 122157 - RNA, 22 nt, synthetic construct
  source 1..22: mol_type = other RNA
atgagacttggagtttgagacc

SEQ ID NO: 122158 - RNA, 22 nt, synthetic construct
  source 1..22: mol_type = other RNA
atgagagaaaattgttcatgaa

SEQ ID NO: 122159 - RNA, 22 nt, synthetic construct
  source 1..22: mol_type = other RNA
atgagagctaagggaagttttt

SEQ ID NO: 122160 - RNA, 22 nt, synthetic construct
  source 1..22: mol_type = other RNA
atgagagctgtgccgaggcaga

SEQ ID NO: 122161 - RNA, 22 nt, synthetic construct
  source 1..22: mol_type = other RNA
atgagagggagaccgtgggggg

SEQ ID NO: 122162 - RNA, 22 nt, synthetic construct
  source 1..22: mol_type = other RNA
atgagagtggcctaaatcagga

SEQ ID NO: 122163 - RNA, 22 nt, synthetic construct
  source 1..22: mol_type = other RNA
atgagataaactagattacctt

SEQ ID NO: 122164 - RNA, 22 nt, synthetic construct
  source 1..22: mol_type = other RNA
atgagatactacgcctagctga

SEQ ID NO: 122165 - RNA, 22 nt, synthetic construct
  source 1..22: mol_type = other RNA
atgagatagaccagatgcgtgg

SEQ ID NO: 122166 - RNA, 22 nt, synthetic construct
  source 1..22: mol_type = other RNA
atgagatctaaattttaagtgc

SEQ ID NO: 122167 - RNA, 22 nt, synthetic construct
  source 1..22: mol_type = other RNA
atgagattaatgtaggtgtctg

SEQ ID NO: 122168 - RNA, 22 nt, synthetic construct
  source 1..22: mol_type = other RNA
atgagattacatagcaaggaag

SEQ ID NO: 122169 - RNA, 22 nt, synthetic construct
  source 1..22: mol_type = other RNA
atgagcaaggtcgtttcagatt

SEQ ID NO: 122170 - RNA, 22 nt, synthetic construct
  source 1..22: mol_type = other RNA
atgagcagttgtatgccaaaaa

SEQ ID NO: 122171 - RNA, 22 nt, synthetic construct
  source 1..22: mol_type = other RNA
atgagcattccccacataggat

SEQ ID NO: 122172 - RNA, 22 nt, synthetic construct
  source 1..22: mol_type = other RNA
atgagccacagggcccagcctc

SEQ ID NO: 122173 - RNA, 22 nt, synthetic construct
  source 1..22: mol_type = other RNA
atgagccaccgtgcccggccag

SEQ ID NO: 122174 - RNA, 22 nt, synthetic construct
  source 1..22: mol_type = other RNA
atgagccactagtcagtatatt

SEQ ID NO: 122175 - RNA, 22 nt, synthetic construct
  source 1..22: mol_type = other RNA
atgagccactgcgggcccagct

SEQ ID NO: 122176 - RNA, 22 nt, synthetic construct
  source 1..22: mol_type = other RNA
atgagccaggcatggtggtggg

SEQ ID NO: 122177 - RNA, 22 nt, synthetic construct
  source 1..22: mol_type = other RNA
atgagcccaggagttgcatcac

SEQ ID NO: 122178 - RNA, 22 nt, synthetic construct
  source 1..22: mol_type = other RNA
atgagctactgcatgctagggg

SEQ ID NO: 122179 - RNA, 22 nt, synthetic construct
  source 1..22: mol_type = other RNA
atgaggaaagcaggttgcatta

SEQ ID NO: 122180 - RNA, 22 nt, synthetic construct
  source 1..22: mol_type = other RNA
atgaggaagaggaaggttcaag

SEQ ID NO: 122181 - RNA, 22 nt, synthetic construct
  source 1..22: mol_type = other RNA
atgaggagtgaatttttcattt

SEQ ID NO: 122182 - RNA, 22 nt, synthetic construct
  source 1..22: mol_type = other RNA
atgaggcatattattgtaactt

SEQ ID NO: 122183 - RNA, 22 nt, synthetic construct
  source 1..22: mol_type = other RNA
atgaggcctctccccttgacga

SEQ ID NO: 122184 - RNA, 22 nt, synthetic construct
  source 1..22: mol_type = other RNA
atgaggcttttattggtaatgt

SEQ ID NO: 122185 - RNA, 22 nt, synthetic construct
  source 1..22: mol_type = other RNA
atgagggatgaggaagaggaag

SEQ ID NO: 122186 - RNA, 22 nt, synthetic construct
  source 1..22: mol_type = other RNA
atgagggcagagataactgggt

SEQ ID NO: 122187 - RNA, 22 nt, synthetic construct
  source 1..22: mol_type = other RNA
atgaggggctgagccttcagaa

SEQ ID NO: 122188 - RNA, 22 nt, synthetic construct
  source 1..22: mol_type = other RNA
atgagggtaaaatagtcaagta

SEQ ID NO: 122189 - RNA, 22 nt, synthetic construct
  source 1..22: mol_type = other RNA
atgaggtatcatttccaagatt

SEQ ID NO: 122190 - RNA, 22 nt, synthetic construct
  source 1..22: mol_type = other RNA
atgaggtcacccaagccacagc

SEQ ID NO: 122191 - RNA, 22 nt, synthetic construct
  source 1..22: mol_type = other RNA
atgaggtctcagccttttctga

SEQ ID NO: 122192 - RNA, 22 nt, synthetic construct
  source 1..22: mol_type = other RNA
atgaggttattcaaaacaaaac

SEQ ID NO: 122193 - RNA, 22 nt, synthetic construct
  source 1..22: mol_type = other RNA
atgaggttgcttttacttggct

SEQ ID NO: 122194 - RNA, 22 nt, synthetic construct
  source 1..22: mol_type = other RNA
atgaggttttacgatgttggcc

SEQ ID NO: 122195 - RNA, 22 nt, synthetic construct
  source 1..22: mol_type = other RNA
atgagtaaaaagaaatctgcat

SEQ ID NO: 122196 - RNA, 22 nt, synthetic construct
  source 1..22: mol_type = other RNA
atgagtaacatgtggaacataa

SEQ ID NO: 122197 - RNA, 22 nt, synthetic construct
  source 1..22: mol_type = other RNA
atgagtagtacttctgagtgtt

SEQ ID NO: 122198 - RNA, 22 nt, synthetic construct
  source 1..22: mol_type = other RNA
atgagtatctggtgttgcttgc

SEQ ID NO: 122199 - RNA, 22 nt, synthetic construct
  source 1..22: mol_type = other RNA
atgagtccagctttctaattct

SEQ ID NO: 122200 - RNA, 22 nt, synthetic construct
  source 1..22: mol_type = other RNA
atgagtcctgaaaattccttcc

SEQ ID NO: 122201 - RNA, 22 nt, synthetic construct
  source 1..22: mol_type = other RNA
atgagtcgccatacctggtcct

SEQ ID NO: 122202 - RNA, 22 nt, synthetic construct
  source 1..22: mol_type = other RNA
atgagtctgacatactgtcaca

SEQ ID NO: 122203 - RNA, 22 nt, synthetic construct
  source 1..22: mol_type = other RNA
atgagtcttccgtctcaagatt

SEQ ID NO: 122204 - RNA, 22 nt, synthetic construct
  source 1..22: mol_type = other RNA
atgagtgagccacagctacact

SEQ ID NO: 122205 - RNA, 22 nt, synthetic construct
  source 1..22: mol_type = other RNA
atgagtgtatgcagggaaatca

SEQ ID NO: 122206 - RNA, 22 nt, synthetic construct
  source 1..22: mol_type = other RNA
atgagtgtttcccttaaaagga

SEQ ID NO: 122207 - RNA, 22 nt, synthetic construct
  source 1..22: mol_type = other RNA
atgagttccagtcctttgtgtc

SEQ ID NO: 122208 - RNA, 22 nt, synthetic construct
  source 1..22: mol_type = other RNA
atgagttcctgcttcccccaaa

SEQ ID NO: 122209 - RNA, 22 nt, synthetic construct
  source 1..22: mol_type = other RNA
atgagtttaattcttttgctgt

SEQ ID NO: 122210 - RNA, 22 nt, synthetic construct
  source 1..22: mol_type = other RNA
atgataaaaataacgggccggg

SEQ ID NO: 122211 - RNA, 22 nt, synthetic construct
  source 1..22: mol_type = other RNA
atgataccctcaaaagatgcag

SEQ ID NO: 122212 - RNA, 22 nt, synthetic construct
  source 1..22: mol_type = other RNA
atgataccttcttgagagtctc

SEQ ID NO: 122213 - RNA, 22 nt, synthetic construct
  source 1..22: mol_type = other RNA
atgatactcgtagttttttggt

SEQ ID NO: 122214 - RNA, 22 nt, synthetic construct
  source 1..22: mol_type = other RNA
atgatagaataccacttagttt

SEQ ID NO: 122215 - RNA, 22 nt, synthetic construct
  source 1..22: mol_type = other RNA
atgatagactggattaaggaga

SEQ ID NO: 122216 - RNA, 22 nt, synthetic construct
  source 1..22: mol_type = other RNA
atgatagcattatcccagatct

SEQ ID NO: 122217 - RNA, 22 nt, synthetic construct
  source 1..22: mol_type = other RNA
atgataggtcactgcagtctca

SEQ ID NO: 122218 - RNA, 22 nt, synthetic construct
  source 1..22: mol_type = other RNA
atgatcaaaaccaggaggtttg

SEQ ID NO: 122219 - RNA, 22 nt, synthetic construct
  source 1..22: mol_type = other RNA
atgatcaaagtgaaaggcaaag

SEQ ID NO: 122220 - RNA, 22 nt, synthetic construct
  source 1..22: mol_type = other RNA
atgatccagcagtttcacttct

SEQ ID NO: 122221 - RNA, 22 nt, synthetic construct
  source 1..22: mol_type = other RNA
atgatctaaatggtgtgaagtt

SEQ ID NO: 122222 - RNA, 22 nt, synthetic construct
  source 1..22: mol_type = other RNA
atgatctatcaatctcacacct

SEQ ID NO: 122223 - RNA, 22 nt, synthetic construct
  source 1..22: mol_type = other RNA
atgatctcacgtcaccgcaacc

SEQ ID NO: 122224 - RNA, 22 nt, synthetic construct
  source 1..22: mol_type = other RNA
atgatctcggcttactgcaacc

SEQ ID NO: 122225 - RNA, 22 nt, synthetic construct
  source 1..22: mol_type = other RNA
atgatcttattaatgtgttgtc

SEQ ID NO: 122226 - RNA, 22 nt, synthetic construct
  source 1..22: mol_type = other RNA
atgatcttgggaatactttccc

SEQ ID NO: 122227 - RNA, 22 nt, synthetic construct
  source 1..22: mol_type = other RNA
atgatctttcaaggggcctttt

SEQ ID NO: 122228 - RNA, 22 nt, synthetic construct
  source 1..22: mol_type = other RNA
atgatctttgaataaagggtca

SEQ ID NO: 122229 - RNA, 22 nt, synthetic construct
  source 1..22: mol_type = other RNA
atgatgaacaaaggcaggagca

SEQ ID NO: 122230 - RNA, 22 nt, synthetic construct
  source 1..22: mol_type = other RNA
atgatgaagggttttctgtaga

SEQ ID NO: 122231 - RNA, 22 nt, synthetic construct
  source 1..22: mol_type = other RNA
atgatgactatgaaaagcctca

SEQ ID NO: 122232 - RNA, 22 nt, synthetic construct
  source 1..22: mol_type = other RNA
atgatgagctactgcatgctag

SEQ ID NO: 122233 - RNA, 22 nt, synthetic construct
  source 1..22: mol_type = other RNA
atgatgatggtgatgctaacgt

SEQ ID NO: 122234 - RNA, 22 nt, synthetic construct
  source 1..22: mol_type = other RNA
atgatgatttttgccagtgttt

SEQ ID NO: 122235 - RNA, 22 nt, synthetic construct
  source 1..22: mol_type = other RNA
atgatgcagcccctgccacact

SEQ ID NO: 122236 - RNA, 22 nt, synthetic construct
  source 1..22: mol_type = other RNA
atgatgccactcaaaactgaag

SEQ ID NO: 122237 - RNA, 22 nt, synthetic construct
  source 1..22: mol_type = other RNA
atgatgccatcacattttgaat

SEQ ID NO: 122238 - RNA, 22 nt, synthetic construct
  source 1..22: mol_type = other RNA
atgatggcaacaatcaacaggt

SEQ ID NO: 122239 - RNA, 22 nt, synthetic construct
  source 1..22: mol_type = other RNA
atgatggctcaacgcctgtgat

SEQ ID NO: 122240 - RNA, 22 nt, synthetic construct
  source 1..22: mol_type = other RNA
atgatggtgatgctaacgtgct

SEQ ID NO: 122241 - RNA, 22 nt, synthetic construct
  source 1..22: mol_type = other RNA
atgatgtttggctccttaccac

SEQ ID NO: 122242 - RNA, 22 nt, synthetic construct
  source 1..22: mol_type = other RNA
atgatgttttgaacgaatgaaa

SEQ ID NO: 122243 - RNA, 22 nt, synthetic construct
  source 1..22: mol_type = other RNA
atgattatttgcggcttgatta

SEQ ID NO: 122244 - RNA, 22 nt, synthetic construct
  source 1..22: mol_type = other RNA
atgattcaaaatgtgatggcat

SEQ ID NO: 122245 - RNA, 22 nt, synthetic construct
  source 1..22: mol_type = other RNA
atgattcagtcttggtagtttg

SEQ ID NO: 122246 - RNA, 22 nt, synthetic construct
  source 1..22: mol_type = other RNA
atgattccacttatatgaagct

SEQ ID NO: 122247 - RNA, 22 nt, synthetic construct
  source 1..22: mol_type = other RNA
atgattccccttatatgggata

SEQ ID NO: 122248 - RNA, 22 nt, synthetic construct
  source 1..22: mol_type = other RNA
atgattcgcattgctaattcat

SEQ ID NO: 122249 - RNA, 22 nt, synthetic construct
  source 1..22: mol_type = other RNA
atgattctaatgtgcaaggaga

SEQ ID NO: 122250 - RNA, 22 nt, synthetic construct
  source 1..22: mol_type = other RNA
atgattgaggacttcatgtaca

SEQ ID NO: 122251 - RNA, 22 nt, synthetic construct
  source 1..22: mol_type = other RNA
atgattgggtcaacaaactaac

SEQ ID NO: 122252 - RNA, 22 nt, synthetic construct
  source 1..22: mol_type = other RNA
atgatttaatagaggtctgtct

SEQ ID NO: 122253 - RNA, 22 nt, synthetic construct
  source 1..22: mol_type = other RNA
atgatttataatccattgggta

SEQ ID NO: 122254 - RNA, 22 nt, synthetic construct
  source 1..22: mol_type = other RNA
atgatttcaagtaacactcaga

SEQ ID NO: 122255 - RNA, 22 nt, synthetic construct
  source 1..22: mol_type = other RNA
atgatttcacttacttgagccc

SEQ ID NO: 122256 - RNA, 22 nt, synthetic construct
  source 1..22: mol_type = other RNA
atgatttccctgcatacactca

SEQ ID NO: 122257 - RNA, 22 nt, synthetic construct
  source 1..22: mol_type = other RNA
atgatttctaggccctaacccc

SEQ ID NO: 122258 - RNA, 22 nt, synthetic construct
  source 1..22: mol_type = other RNA
atgatttggtgtgtgcaaagga

SEQ ID NO: 122259 - RNA, 22 nt, synthetic construct
  source 1..22: mol_type = other RNA
atgatttgtttgaattaagcac

SEQ ID NO: 122260 - RNA, 22 nt, synthetic construct
  source 1..22: mol_type = other RNA
atgattttagaaggtaagaatg

SEQ ID NO: 122261 - RNA, 22 nt, synthetic construct
  source 1..22: mol_type = other RNA
atgattttcacagggcagggag

SEQ ID NO: 122262 - RNA, 22 nt, synthetic construct
  source 1..22: mol_type = other RNA
atgatttttgccagtgttttaa

SEQ ID NO: 122263 - RNA, 22 nt, synthetic construct
  source 1..22: mol_type = other RNA
atgcaaactctaaataataggt

SEQ ID NO: 122264 - RNA, 22 nt, synthetic construct
  source 1..22: mol_type = other RNA
atgcaaagtttcctacatactg

SEQ ID NO: 122265 - RNA, 22 nt, synthetic construct
  source 1..22: mol_type = other RNA
atgcaaatcaaaacaataagac

SEQ ID NO: 122266 - RNA, 22 nt, synthetic construct
  source 1..22: mol_type = other RNA
atgcaacaaatgttgcagagac

SEQ ID NO: 122267 - RNA, 22 nt, synthetic construct
  source 1..22: mol_type = other RNA
atgcaacctgctttcctcatgt

SEQ ID NO: 122268 - RNA, 22 nt, synthetic construct
  source 1..22: mol_type = other RNA
atgcaactcctgggctcatcta

SEQ ID NO: 122269 - RNA, 22 nt, synthetic construct
  source 1..22: mol_type = other RNA
atgcaactgaaaacatcttttt

SEQ ID NO: 122270 - RNA, 22 nt, synthetic construct
  source 1..22: mol_type = other RNA
atgcaacttactctcaaataat

SEQ ID NO: 122271 - RNA, 22 nt, synthetic construct
  source 1..22: mol_type = other RNA
atgcaagaatggtttaacacat

SEQ ID NO: 122272 - RNA, 22 nt, synthetic construct
  source 1..22: mol_type = other RNA
atgcaagagttaaaactcacaa

SEQ ID NO: 122273 - RNA, 22 nt, synthetic construct
  source 1..22: mol_type = other RNA
atgcaagatggcaagtttccat

SEQ ID NO: 122274 - RNA, 22 nt, synthetic construct
  source 1..22: mol_type = other RNA
atgcaagatgtcaacattaagg

SEQ ID NO: 122275 - RNA, 22 nt, synthetic construct
  source 1..22: mol_type = other RNA
atgcaataactcaaaatgttca

SEQ ID NO: 122276 - RNA, 22 nt, synthetic construct
  source 1..22: mol_type = other RNA
atgcaatacttaatagcccaac

SEQ ID NO: 122277 - RNA, 22 nt, synthetic construct
  source 1..22: mol_type = other RNA
atgcaatgcaggcgcctggaca

SEQ ID NO: 122278 - RNA, 22 nt, synthetic construct
  source 1..22: mol_type = other RNA
atgcaatgcgtgtgaaaccaag

SEQ ID NO: 122279 - RNA, 22 nt, synthetic construct
  source 1..22: mol_type = other RNA
atgcaattccccagcctcagcc

SEQ ID NO: 122280 - RNA, 22 nt, synthetic construct
  source 1..22: mol_type = other RNA
atgcaatttgttttccaagcct

SEQ ID NO: 122281 - RNA, 22 nt, synthetic construct
  source 1..22: mol_type = other RNA
atgcacaaaagtttaactttga

SEQ ID NO: 122282 - RNA, 22 nt, synthetic construct
  source 1..22: mol_type = other RNA
atgcacaagacagatgtgctta

SEQ ID NO: 122283 - RNA, 22 nt, synthetic construct
  source 1..22: mol_type = other RNA
atgcacaagccttgaaaatata

SEQ ID NO: 122284 - RNA, 22 nt, synthetic construct
  source 1..22: mol_type = other RNA
atgcacaaggtcaagagcggcc

SEQ ID NO: 122285 - RNA, 22 nt, synthetic construct
  source 1..22: mol_type = other RNA
atgcacaatggaatattactca

SEQ ID NO: 122286 - RNA, 22 nt, synthetic construct
  source 1..22: mol_type = other RNA
atgcacacagagggagcgccac

SEQ ID NO: 122287 - RNA, 22 nt, synthetic construct
  source 1..22: mol_type = other RNA
atgcacacaggagaacttgtct

SEQ ID NO: 122288 - RNA, 22 nt, synthetic construct
  source 1..22: mol_type = other RNA
atgcacacgctggaagggagcc

SEQ ID NO: 122289 - RNA, 22 nt, synthetic construct
  source 1..22: mol_type = other RNA
atgcacactagacctttcttag

SEQ ID NO: 122290 - RNA, 22 nt, synthetic construct
  source 1..22: mol_type = other RNA
atgcacatgggcatgggtccaa

SEQ ID NO: 122291 - RNA, 22 nt, synthetic construct
  source 1..22: mol_type = other RNA
atgcaccaacacctgcagtggc

SEQ ID NO: 122292 - RNA, 22 nt, synthetic construct
  source 1..22: mol_type = other RNA
atgcacgagaaaagcacaggca

SEQ ID NO: 122293 - RNA, 22 nt, synthetic construct
  source 1..22: mol_type = other RNA
atgcacggacttggcacaggag

SEQ ID NO: 122294 - RNA, 22 nt, synthetic construct
  source 1..22: mol_type = other RNA
atgcacgtgaagctacagacta

SEQ ID NO: 122295 - RNA, 22 nt, synthetic construct
  source 1..22: mol_type = other RNA
atgcactgtactcctagatact

SEQ ID NO: 122296 - RNA, 22 nt, synthetic construct
  source 1..22: mol_type = other RNA
atgcacttagcgctgatgtgtt

SEQ ID NO: 122297 - RNA, 22 nt, synthetic construct
  source 1..22: mol_type = other RNA
atgcagaaaataaaccaagttt

SEQ ID NO: 122298 - RNA, 22 nt, synthetic construct
  source 1..22: mol_type = other RNA
atgcagaaaccagttgtaattt

SEQ ID NO: 122299 - RNA, 22 nt, synthetic construct
  source 1..22: mol_type = other RNA
atgcagaaatctaccaaacatt

SEQ ID NO: 122300 - RNA, 22 nt, synthetic construct
  source 1..22: mol_type = other RNA
atgcagatttctttttactcat

SEQ ID NO: 122301 - RNA, 22 nt, synthetic construct
  source 1..22: mol_type = other RNA
atgcagcaaaagcaccactgag

SEQ ID NO: 122302 - RNA, 22 nt, synthetic construct
  source 1..22: mol_type = other RNA
atgcagcaacggaaatgagtga

SEQ ID NO: 122303 - RNA, 22 nt, synthetic construct
  source 1..22: mol_type = other RNA
atgcagcccctgccacactcca

SEQ ID NO: 122304 - RNA, 22 nt, synthetic construct
  source 1..22: mol_type = other RNA
atgcaggaccaactttaagcaa

SEQ ID NO: 122305 - RNA, 22 nt, synthetic construct
  source 1..22: mol_type = other RNA
atgcaggagaaacatggcttag

SEQ ID NO: 122306 - RNA, 22 nt, synthetic construct
  source 1..22: mol_type = other RNA
atgcaggcgcctggacaggatc

SEQ ID NO: 122307 - RNA, 22 nt, synthetic construct
  source 1..22: mol_type = other RNA
atgcagggaaatcattcaggac

SEQ ID NO: 122308 - RNA, 22 nt, synthetic construct
  source 1..22: mol_type = other RNA
atgcaggttcatgtgtgcttac

SEQ ID NO: 122309 - RNA, 22 nt, synthetic construct
  source 1..22: mol_type = other RNA
atgcagtacttgtctttttgtg

SEQ ID NO: 122310 - RNA, 22 nt, synthetic construct
  source 1..22: mol_type = other RNA
atgcagtagctcatcatttata

SEQ ID NO: 122311 - RNA, 22 nt, synthetic construct
  source 1..22: mol_type = other RNA
atgcagtagtaaagcaaatgtg

SEQ ID NO: 122312 - RNA, 22 nt, synthetic construct
  source 1..22: mol_type = other RNA
atgcagtatgtgccatttttat

SEQ ID NO: 122313 - RNA, 22 nt, synthetic construct
  source 1..22: mol_type = other RNA
atgcagtattgttaactgtaga

SEQ ID NO: 122314 - RNA, 22 nt, synthetic construct
  source 1..22: mol_type = other RNA
atgcagtggcttcctaactggt

SEQ ID NO: 122315 - RNA, 22 nt, synthetic construct
  source 1..22: mol_type = other RNA
atgcagttgcttactctaatgg

SEQ ID NO: 122316 - RNA, 22 nt, synthetic construct
  source 1..22: mol_type = other RNA
atgcataaacgacagcaggaaa

SEQ ID NO: 122317 - RNA, 22 nt, synthetic construct
  source 1..22: mol_type = other RNA
atgcataagttctagagatttg

SEQ ID NO: 122318 - RNA, 22 nt, synthetic construct
  source 1..22: mol_type = other RNA
atgcataccaagcccggcacgg

SEQ ID NO: 122319 - RNA, 22 nt, synthetic construct
  source 1..22: mol_type = other RNA
atgcatactgcagcacttttaa

SEQ ID NO: 122320 - RNA, 22 nt, synthetic construct
  source 1..22: mol_type = other RNA
atgcatactttggaaggtagga

SEQ ID NO: 122321 - RNA, 22 nt, synthetic construct
  source 1..22: mol_type = other RNA
atgcatagatcacaaggactgg

SEQ ID NO: 122322 - RNA, 22 nt, synthetic construct
  source 1..22: mol_type = other RNA
atgcatagcagggtcatgcaca

SEQ ID NO: 122323 - RNA, 22 nt, synthetic construct
  source 1..22: mol_type = other RNA
atgcatatatctgtctgggata

SEQ ID NO: 122324 - RNA, 22 nt, synthetic construct
  source 1..22: mol_type = other RNA
atgcatatgtttgtaacttgtt

SEQ ID NO: 122325 - RNA, 22 nt, synthetic construct
  source 1..22: mol_type = other RNA
atgcatccacattttgtgacaa

SEQ ID NO: 122326 - RNA, 22 nt, synthetic construct
  source 1..22: mol_type = other RNA
atgcatccctcctctggccctc

SEQ ID NO: 122327 - RNA, 22 nt, synthetic construct
  source 1..22: mol_type = other RNA
atgcatcgtttcaatattaaga

SEQ ID NO: 122328 - RNA, 22 nt, synthetic construct
  source 1..22: mol_type = other RNA
atgcatcttgaactaagtgtga

SEQ ID NO: 122329 - RNA, 22 nt, synthetic construct
  source 1..22: mol_type = other RNA
atgcatcttgcaaaacggaaac

SEQ ID NO: 122330 - RNA, 22 nt, synthetic construct
  source 1..22: mol_type = other RNA
atgcatgaggcatattattgta

SEQ ID NO: 122331 - RNA, 22 nt, synthetic construct
  source 1..22: mol_type = other RNA
atgcatgcacacagagggagcg

SEQ ID NO: 122332 - RNA, 22 nt, synthetic construct
  source 1..22: mol_type = other RNA
atgcatgggaggtaatactata

SEQ ID NO: 122333 - RNA, 22 nt, synthetic construct
  source 1..22: mol_type = other RNA
atgcatgtctgtctgttcacat

SEQ ID NO: 122334 - RNA, 22 nt, synthetic construct
  source 1..22: mol_type = other RNA
atgcatgttatttggggattct

SEQ ID NO: 122335 - RNA, 22 nt, synthetic construct
  source 1..22: mol_type = other RNA
atgcattaagccagtcactaaa

SEQ ID NO: 122336 - RNA, 22 nt, synthetic construct
  source 1..22: mol_type = other RNA
atgcattccagattgaaatcta

SEQ ID NO: 122337 - RNA, 22 nt, synthetic construct
  source 1..22: mol_type = other RNA
atgcattcccatgttcactgca

SEQ ID NO: 122338 - RNA, 22 nt, synthetic construct
  source 1..22: mol_type = other RNA
atgcattcgtccctaaacactg

SEQ ID NO: 122339 - RNA, 22 nt, synthetic construct
  source 1..22: mol_type = other RNA
atgcattctagaaaggagggac

SEQ ID NO: 122340 - RNA, 22 nt, synthetic construct
  source 1..22: mol_type = other RNA
atgcattctgtcacatagacct

SEQ ID NO: 122341 - RNA, 22 nt, synthetic construct
  source 1..22: mol_type = other RNA
atgcatttattagtagttaggt

SEQ ID NO: 122342 - RNA, 22 nt, synthetic construct
  source 1..22: mol_type = other RNA
atgcatttggtctcattcacta

SEQ ID NO: 122343 - RNA, 22 nt, synthetic construct
  source 1..22: mol_type = other RNA
atgccaatatcacactgtttga

SEQ ID NO: 122344 - RNA, 22 nt, synthetic construct
  source 1..22: mol_type = other RNA
atgccaatttgggatatagcta

SEQ ID NO: 122345 - RNA, 22 nt, synthetic construct
  source 1..22: mol_type = other RNA
atgccacaaatggagtgactta

SEQ ID NO: 122346 - RNA, 22 nt, synthetic construct
  source 1..22: mol_type = other RNA
atgccacaccacatccagctaa

SEQ ID NO: 122347 - RNA, 22 nt, synthetic construct
  source 1..22: mol_type = other RNA
atgccacataaatcacaggaaa

SEQ ID NO: 122348 - RNA, 22 nt, synthetic construct
  source 1..22: mol_type = other RNA
atgccacattttttggtttgta

SEQ ID NO: 122349 - RNA, 22 nt, synthetic construct
  source 1..22: mol_type = other RNA
atgccactcaaaactgaagttt

SEQ ID NO: 122350 - RNA, 22 nt, synthetic construct
  source 1..22: mol_type = other RNA
atgccagctttggctgaaatgc

SEQ ID NO: 122351 - RNA, 22 nt, synthetic construct
  source 1..22: mol_type = other RNA
atgccagggcgctcctctcccg

SEQ ID NO: 122352 - RNA, 22 nt, synthetic construct
  source 1..22: mol_type = other RNA
atgccatagagctttaaagtta

SEQ ID NO: 122353 - RNA, 22 nt, synthetic construct
  source 1..22: mol_type = other RNA
atgccatcacattttgaatcat

SEQ ID NO: 122354 - RNA, 22 nt, synthetic construct
  source 1..22: mol_type = other RNA
atgccatcctggatttgggaag

SEQ ID NO: 122355 - RNA, 22 nt, synthetic construct
  source 1..22: mol_type = other RNA
atgccatgtgttttgttttgaa

SEQ ID NO: 122356 - RNA, 22 nt, synthetic construct
  source 1..22: mol_type = other RNA
atgcccaatcaaatccagtctt

SEQ ID NO: 122357 - RNA, 22 nt, synthetic construct
  source 1..22: mol_type = other RNA
atgcccatcctctatttttgtc

SEQ ID NO: 122358 - RNA, 22 nt, synthetic construct
  source 1..22: mol_type = other RNA
atgcccatgtgcattattgtaa

SEQ ID NO: 122359 - RNA, 22 nt, synthetic construct
  source 1..22: mol_type = other RNA
atgcccattaaaaccatgaaaa

SEQ ID NO: 122360 - RNA, 22 nt, synthetic construct
  source 1..22: mol_type = other RNA
atgccccatgtgttggcactga

SEQ ID NO: 122361 - RNA, 22 nt, synthetic construct
  source 1..22: mol_type = other RNA
atgccccctcttctctcctttg

SEQ ID NO: 122362 - RNA, 22 nt, synthetic construct
  source 1..22: mol_type = other RNA
atgcccctgtagcagacactgg

SEQ ID NO: 122363 - RNA, 22 nt, synthetic construct
  source 1..22: mol_type = other RNA
atgcccctttgagcagagtcct

SEQ ID NO: 122364 - RNA, 22 nt, synthetic construct
  source 1..22: mol_type = other RNA
atgcccttatttaatgtgctgt

SEQ ID NO: 122365 - RNA, 22 nt, synthetic construct
  source 1..22: mol_type = other RNA
atgccgctggtgaaaaaatggt

SEQ ID NO: 122366 - RNA, 22 nt, synthetic construct
  source 1..22: mol_type = other RNA
atgccggctgttaggtattatt

SEQ ID NO: 122367 - RNA, 22 nt, synthetic construct
  source 1..22: mol_type = other RNA
atgccgggacaagagtctgcag

SEQ ID NO: 122368 - RNA, 22 nt, synthetic construct
  source 1..22: mol_type = other RNA
atgccggtaatcacagctactc

SEQ ID NO: 122369 - RNA, 22 nt, synthetic construct
  source 1..22: mol_type = other RNA
atgcctagaaaggaattgtaat

SEQ ID NO: 122370 - RNA, 22 nt, synthetic construct
  source 1..22: mol_type = other RNA
atgcctagatgattcgcattgc

SEQ ID NO: 122371 - RNA, 22 nt, synthetic construct
  source 1..22: mol_type = other RNA
atgcctagatttcaatctggaa

SEQ ID NO: 122372 - RNA, 22 nt, synthetic construct
  source 1..22: mol_type = other RNA
atgcctataaaatgctggaaat

SEQ ID NO: 122373 - RNA, 22 nt, synthetic construct
  source 1..22: mol_type = other RNA
atgcctatgaaatcttgaagat

SEQ ID NO: 122374 - RNA, 22 nt, synthetic construct
  source 1..22: mol_type = other RNA
atgcctcaaattagtcatagca

SEQ ID NO: 122375 - RNA, 22 nt, synthetic construct
  source 1..22: mol_type = other RNA
atgcctcatgcatccacatttt

SEQ ID NO: 122376 - RNA, 22 nt, synthetic construct
  source 1..22: mol_type = other RNA
atgcctcgaaggcctgcttcat

SEQ ID NO: 122377 - RNA, 22 nt, synthetic construct
  source 1..22: mol_type = other RNA
atgcctctcccaccatctctct

SEQ ID NO: 122378 - RNA, 22 nt, synthetic construct
  source 1..22: mol_type = other RNA
atgcctctgttacagctcttct

SEQ ID NO: 122379 - RNA, 22 nt, synthetic construct
  source 1..22: mol_type = other RNA
atgcctgacaaagtatgagaaa

SEQ ID NO: 122380 - RNA, 22 nt, synthetic construct
  source 1..22: mol_type = other RNA
atgcctgccgcagagcaagcac

SEQ ID NO: 122381 - RNA, 22 nt, synthetic construct
  source 1..22: mol_type = other RNA
atgcctgggtaattaaacattt

SEQ ID NO: 122382 - RNA, 22 nt, synthetic construct
  source 1..22: mol_type = other RNA
atgcctgtgcttgtctctctct

SEQ ID NO: 122383 - RNA, 22 nt, synthetic construct
  source 1..22: mol_type = other RNA
atgcctgtgcttttctcgtgca

SEQ ID NO: 122384 - RNA, 22 nt, synthetic construct
  source 1..22: mol_type = other RNA
atgccttcagtatgaatgcacg

SEQ ID NO: 122385 - RNA, 22 nt, synthetic construct
  source 1..22: mol_type = other RNA
atgcctttcagcatagcagaac

SEQ ID NO: 122386 - RNA, 22 nt, synthetic construct
  source 1..22: mol_type = other RNA
atgcgaatcatctaggcatata

SEQ ID NO: 122387 - RNA, 22 nt, synthetic construct
  source 1..22: mol_type = other RNA
atgcgaatttacttttaaactg

SEQ ID NO: 122388 - RNA, 22 nt, synthetic construct
  source 1..22: mol_type = other RNA
atgcgacatatcagggatcaca

SEQ ID NO: 122389 - RNA, 22 nt, synthetic construct
  source 1..22: mol_type = other RNA
atgcgatgatcaaaaccaggag

SEQ ID NO: 122390 - RNA, 22 nt, synthetic construct
  source 1..22: mol_type = other RNA
atgcgccatcacacccagtata

SEQ ID NO: 122391 - RNA, 22 nt, synthetic construct
  source 1..22: mol_type = other RNA
atgcggggtttcagcacaatac

SEQ ID NO: 122392 - RNA, 22 nt, synthetic construct
  source 1..22: mol_type = other RNA
atgcgtggttcacacctgtagt

SEQ ID NO: 122393 - RNA, 22 nt, synthetic construct
  source 1..22: mol_type = other RNA
atgcgtgtgaaaccaagcaagt

SEQ ID NO: 122394 - RNA, 22 nt, synthetic construct
  source 1..22: mol_type = other RNA
atgcgtttgttagatctgggat

SEQ ID NO: 122395 - RNA, 22 nt, synthetic construct
  source 1..22: mol_type = other RNA
atgctaaacagtacagtagtaa

SEQ ID NO: 122396 - RNA, 22 nt, synthetic construct
  source 1..22: mol_type = other RNA
atgctaacatgaactactcaaa

SEQ ID NO: 122397 - RNA, 22 nt, synthetic construct
  source 1..22: mol_type = other RNA
atgctaacgtgcttgctctgcg

SEQ ID NO: 122398 - RNA, 22 nt, synthetic construct
  source 1..22: mol_type = other RNA
atgctaactgcagaggtcagga

SEQ ID NO: 122399 - RNA, 22 nt, synthetic construct
  source 1..22: mol_type = other RNA
atgctaagtgtttaggatataa

SEQ ID NO: 122400 - RNA, 22 nt, synthetic construct
  source 1..22: mol_type = other RNA
atgctacagtaagcaaaacagc

SEQ ID NO: 122401 - RNA, 22 nt, synthetic construct
  source 1..22: mol_type = other RNA
atgctaggggctgttcccagat

SEQ ID NO: 122402 - RNA, 22 nt, synthetic construct
  source 1..22: mol_type = other RNA
atgctataaagaacatgattgg

SEQ ID NO: 122403 - RNA, 22 nt, synthetic construct
  source 1..22: mol_type = other RNA
atgctatcattttaaagggata

SEQ ID NO: 122404 - RNA, 22 nt, synthetic construct
  source 1..22: mol_type = other RNA
atgctatccagaagagaatggc

SEQ ID NO: 122405 - RNA, 22 nt, synthetic construct
  source 1..22: mol_type = other RNA
atgctattataaatggcatctt

SEQ ID NO: 122406 - RNA, 22 nt, synthetic construct
  source 1..22: mol_type = other RNA
atgctattcaagacaagcaagg

SEQ ID NO: 122407 - RNA, 22 nt, synthetic construct
  source 1..22: mol_type = other RNA
atgctcacatttagtttcatct

SEQ ID NO: 122408 - RNA, 22 nt, synthetic construct
  source 1..22: mol_type = other RNA
atgctcactgtctccatgtcct

SEQ ID NO: 122409 - RNA, 22 nt, synthetic construct
  source 1..22: mol_type = other RNA
atgctcagggtgcgacctcgaa

SEQ ID NO: 122410 - RNA, 22 nt, synthetic construct
  source 1..22: mol_type = other RNA
atgctcagtgggttcaattatg

SEQ ID NO: 122411 - RNA, 22 nt, synthetic construct
  source 1..22: mol_type = other RNA
atgctcagtttcaaaagctccc

SEQ ID NO: 122412 - RNA, 22 nt, synthetic construct
  source 1..22: mol_type = other RNA
atgctcataattaaagagagta

SEQ ID NO: 122413 - RNA, 22 nt, synthetic construct
  source 1..22: mol_type = other RNA
atgctcccatttgggactgaga

SEQ ID NO: 122414 - RNA, 22 nt, synthetic construct
  source 1..22: mol_type = other RNA
atgctccctaaatacacatgtt

SEQ ID NO: 122415 - RNA, 22 nt, synthetic construct
  source 1..22: mol_type = other RNA
atgctccctctatggcaggcac

SEQ ID NO: 122416 - RNA, 22 nt, synthetic construct
  source 1..22: mol_type = other RNA
atgctctcttcccccaaaactt

SEQ ID NO: 122417 - RNA, 22 nt, synthetic construct
  source 1..22: mol_type = other RNA
atgctctgataggataatgtcc

SEQ ID NO: 122418 - RNA, 22 nt, synthetic construct
  source 1..22: mol_type = other RNA
atgctcttggtttcttcaagat

SEQ ID NO: 122419 - RNA, 22 nt, synthetic construct
  source 1..22: mol_type = other RNA
atgctgaaaggcatgaaattct

SEQ ID NO: 122420 - RNA, 22 nt, synthetic construct
  source 1..22: mol_type = other RNA
atgctgaacttgtcacaaaatg

SEQ ID NO: 122421 - RNA, 22 nt, synthetic construct
  source 1..22: mol_type = other RNA
atgctgaggccccaggggacat

SEQ ID NO: 122422 - RNA, 22 nt, synthetic construct
  source 1..22: mol_type = other RNA
atgctgagtgaatggggtaatt

SEQ ID NO: 122423 - RNA, 22 nt, synthetic construct
  source 1..22: mol_type = other RNA
atgctgatgaactacacagaca

SEQ ID NO: 122424 - RNA, 22 nt, synthetic construct
  source 1..22: mol_type = other RNA
atgctgcaactgagaagagctg

SEQ ID NO: 122425 - RNA, 22 nt, synthetic construct
  source 1..22: mol_type = other RNA
atgctgcgagccccgggggagc

SEQ ID NO: 122426 - RNA, 22 nt, synthetic construct
  source 1..22: mol_type = other RNA
atgctgctatgaaaattggcgt

SEQ ID NO: 122427 - RNA, 22 nt, synthetic construct
  source 1..22: mol_type = other RNA
atgctggaaattttcaagggtg

SEQ ID NO: 122428 - RNA, 22 nt, synthetic construct
  source 1..22: mol_type = other RNA
atgctggagtgtggcaggggct

SEQ ID NO: 122429 - RNA, 22 nt, synthetic construct
  source 1..22: mol_type = other RNA
atgctggccagtgagttcaaat

SEQ ID NO: 122430 - RNA, 22 nt, synthetic construct
  source 1..22: mol_type = other RNA
atgctggcttcatgggtggaaa

SEQ ID NO: 122431 - RNA, 22 nt, synthetic construct
  source 1..22: mol_type = other RNA
atgctgggagaccaggagttct

SEQ ID NO: 122432 - RNA, 22 nt, synthetic construct
  source 1..22: mol_type = other RNA
atgctggggacccctccctgct

SEQ ID NO: 122433 - RNA, 22 nt, synthetic construct
  source 1..22: mol_type = other RNA
atgctggtggagtattctagtt

SEQ ID NO: 122434 - RNA, 22 nt, synthetic construct
  source 1..22: mol_type = other RNA
atgctggtgggctttgagaaag

SEQ ID NO: 122435 - RNA, 22 nt, synthetic construct
  source 1..22: mol_type = other RNA
atgctgtaactgacttcaagag

SEQ ID NO: 122436 - RNA, 22 nt, synthetic construct
  source 1..22: mol_type = other RNA
atgctgtagtgattcacttttg

SEQ ID NO: 122437 - RNA, 22 nt, synthetic construct
  source 1..22: mol_type = other RNA
atgctgtctataggcaatgagt

SEQ ID NO: 122438 - RNA, 22 nt, synthetic construct
  source 1..22: mol_type = other RNA
atgctgtgaatttggatttgag

SEQ ID NO: 122439 - RNA, 22 nt, synthetic construct
  source 1..22: mol_type = other RNA
atgctgttctctgtgtggtttg

SEQ ID NO: 122440 - RNA, 22 nt, synthetic construct
  source 1..22: mol_type = other RNA
atgctgtttacattagagaaga

SEQ ID NO: 122441 - RNA, 22 nt, synthetic construct
  source 1..22: mol_type = other RNA
atgctgttttgcttactgtagc

SEQ ID NO: 122442 - RNA, 22 nt, synthetic construct
  source 1..22: mol_type = other RNA
atgctgtttttgaaaagaacaa

SEQ ID NO: 122443 - RNA, 22 nt, synthetic construct
  source 1..22: mol_type = other RNA
atgcttaaagcgctactcagct

SEQ ID NO: 122444 - RNA, 22 nt, synthetic construct
  source 1..22: mol_type = other RNA
atgcttaacaagaatcctgcta

SEQ ID NO: 122445 - RNA, 22 nt, synthetic construct
  source 1..22: mol_type = other RNA
atgcttaatctgatttttagtg

SEQ ID NO: 122446 - RNA, 22 nt, synthetic construct
  source 1..22: mol_type = other RNA
atgcttagccttccagagacaa

SEQ ID NO: 122447 - RNA, 22 nt, synthetic construct
  source 1..22: mol_type = other RNA
atgcttaggatcccagtccttt

SEQ ID NO: 122448 - RNA, 22 nt, synthetic construct
  source 1..22: mol_type = other RNA
atgcttaggtaagaaaaattcc

SEQ ID NO: 122449 - RNA, 22 nt, synthetic construct
  source 1..22: mol_type = other RNA
atgcttatgtcttgtggctgac

SEQ ID NO: 122450 - RNA, 22 nt, synthetic construct
  source 1..22: mol_type = other RNA
atgcttcatattttgtgggaat

SEQ ID NO: 122451 - RNA, 22 nt, synthetic construct
  source 1..22: mol_type = other RNA
atgcttccaaaagcaggccctg

SEQ ID NO: 122452 - RNA, 22 nt, synthetic construct
  source 1..22: mol_type = other RNA
atgcttctagccaaagcaagcc

SEQ ID NO: 122453 - RNA, 22 nt, synthetic construct
  source 1..22: mol_type = other RNA
atgcttgaagagcgcttctatg

SEQ ID NO: 122454 - RNA, 22 nt, synthetic construct
  source 1..22: mol_type = other RNA
atgcttgctccagagaagtttt

SEQ ID NO: 122455 - RNA, 22 nt, synthetic construct
  source 1..22: mol_type = other RNA
atgctttctctagttgcacggt

SEQ ID NO: 122456 - RNA, 22 nt, synthetic construct
  source 1..22: mol_type = other RNA
atgctttgagctacaaactcca

SEQ ID NO: 122457 - RNA, 22 nt, synthetic construct
  source 1..22: mol_type = other RNA
atgctttgtctctggaaggcta

SEQ ID NO: 122458 - RNA, 22 nt, synthetic construct
  source 1..22: mol_type = other RNA
atgctttttctgcatcttttga

SEQ ID NO: 122459 - RNA, 22 nt, synthetic construct
  source 1..22: mol_type = other RNA
atggaaaattcaaacatgacag

SEQ ID NO: 122460 - RNA, 22 nt, synthetic construct
  source 1..22: mol_type = other RNA
atggaaaattcttggtcttttg

SEQ ID NO: 122461 - RNA, 22 nt, synthetic construct
  source 1..22: mol_type = other RNA
atggaaacaacctaaatgtcca

SEQ ID NO: 122462 - RNA, 22 nt, synthetic construct
  source 1..22: mol_type = other RNA
atggaaacatggtaatttgtcc

SEQ ID NO: 122463 - RNA, 22 nt, synthetic construct
  source 1..22: mol_type = other RNA
atggaaactacaattactgtac

SEQ ID NO: 122464 - RNA, 22 nt, synthetic construct
  source 1..22: mol_type = other RNA
atggaaacttgccatcttgcat

SEQ ID NO: 122465 - RNA, 22 nt, synthetic construct
  source 1..22: mol_type = other RNA
atggaaagaaatagaactgtca

SEQ ID NO: 122466 - RNA, 22 nt, synthetic construct
  source 1..22: mol_type = other RNA
atggaaagtggactatgtaggc

SEQ ID NO: 122467 - RNA, 22 nt, synthetic construct
  source 1..22: mol_type = other RNA
atggaaatgaagtattgatttg

SEQ ID NO: 122468 - RNA, 22 nt, synthetic construct
  source 1..22: mol_type = other RNA
atggaaatgtaaattcctaact

SEQ ID NO: 122469 - RNA, 22 nt, synthetic construct
  source 1..22: mol_type = other RNA
atggaaccactgtaggccccga

SEQ ID NO: 122470 - RNA, 22 nt, synthetic construct
  source 1..22: mol_type = other RNA
atggaacggcttaacacctttg

SEQ ID NO: 122471 - RNA, 22 nt, synthetic construct
  source 1..22: mol_type = other RNA
atggaactctattttcctaaaa

SEQ ID NO: 122472 - RNA, 22 nt, synthetic construct
  source 1..22: mol_type = other RNA
atggaagactttatggtaattg

SEQ ID NO: 122473 - RNA, 22 nt, synthetic construct
  source 1..22: mol_type = other RNA
atggaagatgggacttcactag

SEQ ID NO: 122474 - RNA, 22 nt, synthetic construct
  source 1..22: mol_type = other RNA
atggaagtgctgggctagggaa

SEQ ID NO: 122475 - RNA, 22 nt, synthetic construct
  source 1..22: mol_type = other RNA
atggaagttatttaatctctct

SEQ ID NO: 122476 - RNA, 22 nt, synthetic construct
  source 1..22: mol_type = other RNA
atggaataatggaactaagaaa

SEQ ID NO: 122477 - RNA, 22 nt, synthetic construct
  source 1..22: mol_type = other RNA
atggaatagaagggagaaccca

SEQ ID NO: 122478 - RNA, 22 nt, synthetic construct
  source 1..22: mol_type = other RNA
atggaatattactcagtctcga

SEQ ID NO: 122479 - RNA, 22 nt, synthetic construct
  source 1..22: mol_type = other RNA
atggaatattgttcagccttaa

SEQ ID NO: 122480 - RNA, 22 nt, synthetic construct
  source 1..22: mol_type = other RNA
atggaattctgacacccgaaga

SEQ ID NO: 122481 - RNA, 22 nt, synthetic construct
  source 1..22: mol_type = other RNA
atggaattctgatgcacaagcc

SEQ ID NO: 122482 - RNA, 22 nt, synthetic construct
  source 1..22: mol_type = other RNA
atggaattgccatatgtagggc

SEQ ID NO: 122483 - RNA, 22 nt, synthetic construct
  source 1..22: mol_type = other RNA
atggacaaattaccatgtttcc

SEQ ID NO: 122484 - RNA, 22 nt, synthetic construct
  source 1..22: mol_type = other RNA
atggacactgcagatgaatgag

SEQ ID NO: 122485 - RNA, 22 nt, synthetic construct
  source 1..22: mol_type = other RNA
atggacagcacattaaataagg

SEQ ID NO: 122486 - RNA, 22 nt, synthetic construct
  source 1..22: mol_type = other RNA
atggacagcggggatggttgca

SEQ ID NO: 122487 - RNA, 22 nt, synthetic construct
  source 1..22: mol_type = other RNA
atggacatgaggaaagcaggtt

SEQ ID NO: 122488 - RNA, 22 nt, synthetic construct
  source 1..22: mol_type = other RNA
atggacattctgcttccttgct

SEQ ID NO: 122489 - RNA, 22 nt, synthetic construct
  source 1..22: mol_type = other RNA
atggacgtttgagttgtttcca

SEQ ID NO: 122490 - RNA, 22 nt, synthetic construct
  source 1..22: mol_type = other RNA
atggactagactgcctgaggtc

SEQ ID NO: 122491 - RNA, 22 nt, synthetic construct
  source 1..22: mol_type = other RNA
atggacttcctattttataatg

SEQ ID NO: 122492 - RNA, 22 nt, synthetic construct
  source 1..22: mol_type = other RNA
atggagacactagggactggcc

SEQ ID NO: 122493 - RNA, 22 nt, synthetic construct
  source 1..22: mol_type = other RNA
atggagacagtgagcatgctgc

SEQ ID NO: 122494 - RNA, 22 nt, synthetic construct
  source 1..22: mol_type = other RNA
atggagacatctgagacatcac

SEQ ID NO: 122495 - RNA, 22 nt, synthetic construct
  source 1..22: mol_type = other RNA
atggagacccatactcagcccc

SEQ ID NO: 122496 - RNA, 22 nt, synthetic construct
  source 1..22: mol_type = other RNA
atggagactagtacactgttga

SEQ ID NO: 122497 - RNA, 22 nt, synthetic construct
  source 1..22: mol_type = other RNA
atggagataaattacccaaaga

SEQ ID NO: 122498 - RNA, 22 nt, synthetic construct
  source 1..22: mol_type = other RNA
atggagcactgtgagccactaa

SEQ ID NO: 122499 - RNA, 22 nt, synthetic construct
  source 1..22: mol_type = other RNA
atggaggcaatgttgattttga

SEQ ID NO: 122500 - RNA, 22 nt, synthetic construct
  source 1..22: mol_type = other RNA
atggagggccagaggagggatg

SEQ ID NO: 122501 - RNA, 22 nt, synthetic construct
  source 1..22: mol_type = other RNA
atggaggggccagttgagagag

SEQ ID NO: 122502 - RNA, 22 nt, synthetic construct
  source 1..22: mol_type = other RNA
atggaggtggaactctgtcatg

SEQ ID NO: 122503 - RNA, 22 nt, synthetic construct
  source 1..22: mol_type = other RNA
atggagtactatgcagcaacgg

SEQ ID NO: 122504 - RNA, 22 nt, synthetic construct
  source 1..22: mol_type = other RNA
atggagtgacttaagcaacaga

SEQ ID NO: 122505 - RNA, 22 nt, synthetic construct
  source 1..22: mol_type = other RNA
atggagttacgctgccaaaagc

SEQ ID NO: 122506 - RNA, 22 nt, synthetic construct
  source 1..22: mol_type = other RNA
atggatatctggcctgcaccat

SEQ ID NO: 122507 - RNA, 22 nt, synthetic construct
  source 1..22: mol_type = other RNA
atggatatttggccgggcgcgg

SEQ ID NO: 122508 - RNA, 22 nt, synthetic construct
  source 1..22: mol_type = other RNA
atggatcaaagacctaagctta

SEQ ID NO: 122509 - RNA, 22 nt, synthetic construct
  source 1..22: mol_type = other RNA
atggatcaaggcacagtctgtg

SEQ ID NO: 122510 - RNA, 22 nt, synthetic construct
  source 1..22: mol_type = other RNA
atggatgtttttagagagatgc

SEQ ID NO: 122511 - RNA, 22 nt, synthetic construct
  source 1..22: mol_type = other RNA
atggatttttctgtttctgtga

SEQ ID NO: 122512 - RNA, 22 nt, synthetic construct
  source 1..22: mol_type = other RNA
atggcaaacagactgagccagc

SEQ ID NO: 122513 - RNA, 22 nt, synthetic construct
  source 1..22: mol_type = other RNA
atggcaacaatcaacaggtagc

SEQ ID NO: 122514 - RNA, 22 nt, synthetic construct
  source 1..22: mol_type = other RNA
atggcaaggctaacagccaaag

SEQ ID NO: 122515 - RNA, 22 nt, synthetic construct
  source 1..22: mol_type = other RNA
atggcaagtttccattctctta

SEQ ID NO: 122516 - RNA, 22 nt, synthetic construct
  source 1..22: mol_type = other RNA
atggcaattccataaatgtttg

SEQ ID NO: 122517 - RNA, 22 nt, synthetic construct
  source 1..22: mol_type = other RNA
atggcacatactgcatattgaa

SEQ ID NO: 122518 - RNA, 22 nt, synthetic construct
  source 1..22: mol_type = other RNA
atggcaggcaccttcagaagcc

SEQ ID NO: 122519 - RNA, 22 nt, synthetic construct
  source 1..22: mol_type = other RNA
atggcaggtttcaagtgaacca

SEQ ID NO: 122520 - RNA, 22 nt, synthetic construct
  source 1..22: mol_type = other RNA
atggcatcattcataaacacag

SEQ ID NO: 122521 - RNA, 22 nt, synthetic construct
  source 1..22: mol_type = other RNA
atggcatcggggcctacagtgg

SEQ ID NO: 122522 - RNA, 22 nt, synthetic construct
  source 1..22: mol_type = other RNA
atggcatctttaagattttttg

SEQ ID NO: 122523 - RNA, 22 nt, synthetic construct
  source 1..22: mol_type = other RNA
atggcatgaaatgggtttaaaa

SEQ ID NO: 122524 - RNA, 22 nt, synthetic construct
  source 1..22: mol_type = other RNA
atggcatgaacccaccaggagg

SEQ ID NO: 122525 - RNA, 22 nt, synthetic construct
  source 1..22: mol_type = other RNA
atggcatttgagggttagaaga

SEQ ID NO: 122526 - RNA, 22 nt, synthetic construct
  source 1..22: mol_type = other RNA
atggccaagagttgctgacttc

SEQ ID NO: 122527 - RNA, 22 nt, synthetic construct
  source 1..22: mol_type = other RNA
atggccagtatctcctttcctt

SEQ ID NO: 122528 - RNA, 22 nt, synthetic construct
  source 1..22: mol_type = other RNA
atggccagtcatgtggggactt

SEQ ID NO: 122529 - RNA, 22 nt, synthetic construct
  source 1..22: mol_type = other RNA
atggccccaaaattaccccatt

SEQ ID NO: 122530 - RNA, 22 nt, synthetic construct
  source 1..22: mol_type = other RNA
atggccctgcgattggttggac

SEQ ID NO: 122531 - RNA, 22 nt, synthetic construct
  source 1..22: mol_type = other RNA
atggcccttaacttcacctcta

SEQ ID NO: 122532 - RNA, 22 nt, synthetic construct
  source 1..22: mol_type = other RNA
atggcctaagatggaaagtgga

SEQ ID NO: 122533 - RNA, 22 nt, synthetic construct
  source 1..22: mol_type = other RNA
atggcctccctcactaagtcag

SEQ ID NO: 122534 - RNA, 22 nt, synthetic construct
  source 1..22: mol_type = other RNA
atggccttctttctttcaaatg

SEQ ID NO: 122535 - RNA, 22 nt, synthetic construct
  source 1..22: mol_type = other RNA
atggcgactcatgcctgtaatt

SEQ ID NO: 122536 - RNA, 22 nt, synthetic construct
  source 1..22: mol_type = other RNA
atggcggctttgtggagtggag

SEQ ID NO: 122537 - RNA, 22 nt, synthetic construct
  source 1..22: mol_type = other RNA
atggctagaaacttggattgtg

SEQ ID NO: 122538 - RNA, 22 nt, synthetic construct
  source 1..22: mol_type = other RNA
atggctataaccacgagtaatg

SEQ ID NO: 122539 - RNA, 22 nt, synthetic construct
  source 1..22: mol_type = other RNA
atggctcaacgcctgtgatccc

SEQ ID NO: 122540 - RNA, 22 nt, synthetic construct
  source 1..22: mol_type = other RNA
atggctgaaagagaaagaagta

SEQ ID NO: 122541 - RNA, 22 nt, synthetic construct
  source 1..22: mol_type = other RNA
atggctgcgccactgcactcca

SEQ ID NO: 122542 - RNA, 22 nt, synthetic construct
  source 1..22: mol_type = other RNA
atggctggaatggtgaagaatg

SEQ ID NO: 122543 - RNA, 22 nt, synthetic construct
  source 1..22: mol_type = other RNA
atggctgtactaagcctatgta

SEQ ID NO: 122544 - RNA, 22 nt, synthetic construct
  source 1..22: mol_type = other RNA
atggcttaaggaaataaatatg

SEQ ID NO: 122545 - RNA, 22 nt, synthetic construct
  source 1..22: mol_type = other RNA
atggcttagaaatgaagatggc

SEQ ID NO: 122546 - RNA, 22 nt, synthetic construct
  source 1..22: mol_type = other RNA
atggcttaggatcaccaaagac

SEQ ID NO: 122547 - RNA, 22 nt, synthetic construct
  source 1..22: mol_type = other RNA
atggcttgagcccagggggtcg

SEQ ID NO: 122548 - RNA, 22 nt, synthetic construct
  source 1..22: mol_type = other RNA
atggcttttgagtgtaaggtgt

SEQ ID NO: 122549 - RNA, 22 nt, synthetic construct
  source 1..22: mol_type = other RNA
atggctttttacgatgaaattg

SEQ ID NO: 122550 - RNA, 22 nt, synthetic construct
  source 1..22: mol_type = other RNA
atgggaaagacaggtagacatg

SEQ ID NO: 122551 - RNA, 22 nt, synthetic construct
  source 1..22: mol_type = other RNA
atgggaaagtattcccaagatc

SEQ ID NO: 122552 - RNA, 22 nt, synthetic construct
  source 1..22: mol_type = other RNA
atgggaaattagatgatgtttt

SEQ ID NO: 122553 - RNA, 22 nt, synthetic construct
  source 1..22: mol_type = other RNA
atgggaagaaaaaataaaggct

SEQ ID NO: 122554 - RNA, 22 nt, synthetic construct
  source 1..22: mol_type = other RNA
atgggaagatgctccctctatg

SEQ ID NO: 122555 - RNA, 22 nt, synthetic construct
  source 1..22: mol_type = other RNA
atgggaatgcatatatctgtct

SEQ ID NO: 122556 - RNA, 22 nt, synthetic construct
  source 1..22: mol_type = other RNA
atgggacaagtgggtggatggg

SEQ ID NO: 122557 - RNA, 22 nt, synthetic construct
  source 1..22: mol_type = other RNA
atgggacttcactagtgggtcg

SEQ ID NO: 122558 - RNA, 22 nt, synthetic construct
  source 1..22: mol_type = other RNA
atgggagatggacactgcagat

SEQ ID NO: 122559 - RNA, 22 nt, synthetic construct
  source 1..22: mol_type = other RNA
atgggagatgtgtaattgtacc

SEQ ID NO: 122560 - RNA, 22 nt, synthetic construct
  source 1..22: mol_type = other RNA
atgggagcatgcacacaggaga

SEQ ID NO: 122561 - RNA, 22 nt, synthetic construct
  source 1..22: mol_type = other RNA
atgggagccaaacttgaacctt

SEQ ID NO: 122562 - RNA, 22 nt, synthetic construct
  source 1..22: mol_type = other RNA
atgggaggtaatactataagga

SEQ ID NO: 122563 - RNA, 22 nt, synthetic construct
  source 1..22: mol_type = other RNA
atgggagtccctgctttcagtt

SEQ ID NO: 122564 - RNA, 22 nt, synthetic construct
  source 1..22: mol_type = other RNA
atgggatatctaacataatcaa

SEQ ID NO: 122565 - RNA, 22 nt, synthetic construct
  source 1..22: mol_type = other RNA
atgggatgcttaaagcgctact

SEQ ID NO: 122566 - RNA, 22 nt, synthetic construct
  source 1..22: mol_type = other RNA
atgggcacttgggatgtttcta

SEQ ID NO: 122567 - RNA, 22 nt, synthetic construct
  source 1..22: mol_type = other RNA
atgggcagactccttcccctgg

SEQ ID NO: 122568 - RNA, 22 nt, synthetic construct
  source 1..22: mol_type = other RNA
atgggcatgggtccaagacagg

SEQ ID NO: 122569 - RNA, 22 nt, synthetic construct
  source 1..22: mol_type = other RNA
atgggcattagaagttaaattg

SEQ ID NO: 122570 - RNA, 22 nt, synthetic construct
  source 1..22: mol_type = other RNA
atgggcattccagagggtaacg

SEQ ID NO: 122571 - RNA, 22 nt, synthetic construct
  source 1..22: mol_type = other RNA
atgggccaaagacagatcttat

SEQ ID NO: 122572 - RNA, 22 nt, synthetic construct
  source 1..22: mol_type = other RNA
atgggccaaagacttcaacgga

SEQ ID NO: 122573 - RNA, 22 nt, synthetic construct
  source 1..22: mol_type = other RNA
atgggccgggcgtagtggctca

SEQ ID NO: 122574 - RNA, 22 nt, synthetic construct
  source 1..22: mol_type = other RNA
atgggcgtggagcggtgtctta

SEQ ID NO: 122575 - RNA, 22 nt, synthetic construct
  source 1..22: mol_type = other RNA
atggggaaatagatgcctagaa

SEQ ID NO: 122576 - RNA, 22 nt, synthetic construct
  source 1..22: mol_type = other RNA
atggggacttgctctcttgccc

SEQ ID NO: 122577 - RNA, 22 nt, synthetic construct
  source 1..22: mol_type = other RNA
atggggagctagagggtaagac

SEQ ID NO: 122578 - RNA, 22 nt, synthetic construct
  source 1..22: mol_type = other RNA
atggggagttttaggaaaatag

SEQ ID NO: 122579 - RNA, 22 nt, synthetic construct
  source 1..22: mol_type = other RNA
atggggatatccaaagataaag

SEQ ID NO: 122580 - RNA, 22 nt, synthetic construct
  source 1..22: mol_type = other RNA
atggggatgcaacaaatgttgc

SEQ ID NO: 122581 - RNA, 22 nt, synthetic construct
  source 1..22: mol_type = other RNA
atggggattgagggttagattt

SEQ ID NO: 122582 - RNA, 22 nt, synthetic construct
  source 1..22: mol_type = other RNA
atggggcaatctcagctcatta

SEQ ID NO: 122583 - RNA, 22 nt, synthetic construct
  source 1..22: mol_type = other RNA
atggggcgatcttggctcacca

SEQ ID NO: 122584 - RNA, 22 nt, synthetic construct
  source 1..22: mol_type = other RNA
atggggctttactgtattagga

SEQ ID NO: 122585 - RNA, 22 nt, synthetic construct
  source 1..22: mol_type = other RNA
atgggggacgacgtatgcaact

SEQ ID NO: 122586 - RNA, 22 nt, synthetic construct
  source 1..22: mol_type = other RNA
atgggggcgcgtgcctatggtc

SEQ ID NO: 122587 - RNA, 22 nt, synthetic construct
  source 1..22: mol_type = other RNA
atgggggtaagattgtggtcca

SEQ ID NO: 122588 - RNA, 22 nt, synthetic construct
  source 1..22: mol_type = other RNA
atggggtaattttggggccatc

SEQ ID NO: 122589 - RNA, 22 nt, synthetic construct
  source 1..22: mol_type = other RNA
atggggtctcattgtgttgccc

SEQ ID NO: 122590 - RNA, 22 nt, synthetic construct
  source 1..22: mol_type = other RNA
atggggtttgtccatgttggtc

SEQ ID NO: 122591 - RNA, 22 nt, synthetic construct
  source 1..22: mol_type = other RNA
atgggtaaatttctaaaaacgt

SEQ ID NO: 122592 - RNA, 22 nt, synthetic construct
  source 1..22: mol_type = other RNA
atgggtacagggtttctgtttg

SEQ ID NO: 122593 - RNA, 22 nt, synthetic construct
  source 1..22: mol_type = other RNA
atgggtcaaccactaaggtcaa

SEQ ID NO: 122594 - RNA, 22 nt, synthetic construct
  source 1..22: mol_type = other RNA
atgggtccaagacaggaagaat

SEQ ID NO: 122595 - RNA, 22 nt, synthetic construct
  source 1..22: mol_type = other RNA
atgggtctccattttggtctta

SEQ ID NO: 122596 - RNA, 22 nt, synthetic construct
  source 1..22: mol_type = other RNA
atgggtggaaattaaacacacc

SEQ ID NO: 122597 - RNA, 22 nt, synthetic construct
  source 1..22: mol_type = other RNA
atgggtgtagggtttggcagtt

SEQ ID NO: 122598 - RNA, 22 nt, synthetic construct
  source 1..22: mol_type = other RNA
atgggttattcacccaagaatt

SEQ ID NO: 122599 - RNA, 22 nt, synthetic construct
  source 1..22: mol_type = other RNA
atgggttgatttttaatgagat

SEQ ID NO: 122600 - RNA, 22 nt, synthetic construct
  source 1..22: mol_type = other RNA
atgggttggaggagaaggcctt

SEQ ID NO: 122601 - RNA, 22 nt, synthetic construct
  source 1..22: mol_type = other RNA
atgggtttaaaagagtgcacat

SEQ ID NO: 122602 - RNA, 22 nt, synthetic construct
  source 1..22: mol_type = other RNA
atggtaaaacaaattccctcta

SEQ ID NO: 122603 - RNA, 22 nt, synthetic construct
  source 1..22: mol_type = other RNA
atggtaaattggtcctggaaaa

SEQ ID NO: 122604 - RNA, 22 nt, synthetic construct
  source 1..22: mol_type = other RNA
atggtaacagccaaataaaaca

SEQ ID NO: 122605 - RNA, 22 nt, synthetic construct
  source 1..22: mol_type = other RNA
atggtaactcctgttctttgga

SEQ ID NO: 122606 - RNA, 22 nt, synthetic construct
  source 1..22: mol_type = other RNA
atggtaattggttcgtttgagg

SEQ ID NO: 122607 - RNA, 22 nt, synthetic construct
  source 1..22: mol_type = other RNA
atggtaatttgtccatctggat

SEQ ID NO: 122608 - RNA, 22 nt, synthetic construct
  source 1..22: mol_type = other RNA
atggtactgcctccacaggctt

SEQ ID NO: 122609 - RNA, 22 nt, synthetic construct
  source 1..22: mol_type = other RNA
atggtactggtaccaaagcaga

SEQ ID NO: 122610 - RNA, 22 nt, synthetic construct
  source 1..22: mol_type = other RNA
atggtagaccatataatctaac

SEQ ID NO: 122611 - RNA, 22 nt, synthetic construct
  source 1..22: mol_type = other RNA
atggtagcttgggctaaggtgg

SEQ ID NO: 122612 - RNA, 22 nt, synthetic construct
  source 1..22: mol_type = other RNA
atggtaggtgctttttgtatcc

SEQ ID NO: 122613 - RNA, 22 nt, synthetic construct
  source 1..22: mol_type = other RNA
atggtagtcaacacttttccag

SEQ ID NO: 122614 - RNA, 22 nt, synthetic construct
  source 1..22: mol_type = other RNA
atggtatcaattgtaatgtctc

SEQ ID NO: 122615 - RNA, 22 nt, synthetic construct
  source 1..22: mol_type = other RNA
atggtatcactttttgtatttc

SEQ ID NO: 122616 - RNA, 22 nt, synthetic construct
  source 1..22: mol_type = other RNA
atggtatgtgccatctccttaa

SEQ ID NO: 122617 - RNA, 22 nt, synthetic construct
  source 1..22: mol_type = other RNA
atggtcaaatcaatacttcatt

SEQ ID NO: 122618 - RNA, 22 nt, synthetic construct
  source 1..22: mol_type = other RNA
atggtcaacatgaaaagatact

SEQ ID NO: 122619 - RNA, 22 nt, synthetic construct
  source 1..22: mol_type = other RNA
atggtcaatttcatcgtaaaaa

SEQ ID NO: 122620 - RNA, 22 nt, synthetic construct
  source 1..22: mol_type = other RNA
atggtcactgctgatgtaagtg

SEQ ID NO: 122621 - RNA, 22 nt, synthetic construct
  source 1..22: mol_type = other RNA
atggtcagagttgtatctgtga

SEQ ID NO: 122622 - RNA, 22 nt, synthetic construct
  source 1..22: mol_type = other RNA
atggtcagtactatcttcccta

SEQ ID NO: 122623 - RNA, 22 nt, synthetic construct
  source 1..22: mol_type = other RNA
atggtccacagaggctttttat

SEQ ID NO: 122624 - RNA, 22 nt, synthetic construct
  source 1..22: mol_type = other RNA
atggtccttgctgaagaataac

SEQ ID NO: 122625 - RNA, 22 nt, synthetic construct
  source 1..22: mol_type = other RNA
atggtccttttttactgacttt

SEQ ID NO: 122626 - RNA, 22 nt, synthetic construct
  source 1..22: mol_type = other RNA
atggtctaccatgttgttcttt

SEQ ID NO: 122627 - RNA, 22 nt, synthetic construct
  source 1..22: mol_type = other RNA
atggtctcaatctcctgatcca

SEQ ID NO: 122628 - RNA, 22 nt, synthetic construct
  source 1..22: mol_type = other RNA
atggtctttttccaggaccaat

SEQ ID NO: 122629 - RNA, 22 nt, synthetic construct
  source 1..22: mol_type = other RNA
atggtgaagaatgtgaaaaatt

SEQ ID NO: 122630 - RNA, 22 nt, synthetic construct
  source 1..22: mol_type = other RNA
atggtgataactggtgcttttt

SEQ ID NO: 122631 - RNA, 22 nt, synthetic construct
  source 1..22: mol_type = other RNA
atggtgatacctcttactaaaa

SEQ ID NO: 122632 - RNA, 22 nt, synthetic construct
  source 1..22: mol_type = other RNA
atggtgatgctaacgtgcttgc

SEQ ID NO: 122633 - RNA, 22 nt, synthetic construct
  source 1..22: mol_type = other RNA
atggtgcagccactatagaaaa

SEQ ID NO: 122634 - RNA, 22 nt, synthetic construct
  source 1..22: mol_type = other RNA
atggtgcaggccagatatccat

SEQ ID NO: 122635 - RNA, 22 nt, synthetic construct
  source 1..22: mol_type = other RNA
atggtgctgatttaaaattttg

SEQ ID NO: 122636 - RNA, 22 nt, synthetic construct
  source 1..22: mol_type = other RNA
atggtgggagaggcatgccggg

SEQ ID NO: 122637 - RNA, 22 nt, synthetic construct
  source 1..22: mol_type = other RNA
atggtgggatctctgggctcac

SEQ ID NO: 122638 - RNA, 22 nt, synthetic construct
  source 1..22: mol_type = other RNA
atggtgggccttgcaagccaca

SEQ ID NO: 122639 - RNA, 22 nt, synthetic construct
  source 1..22: mol_type = other RNA
atggtggtaggtgtgtgtaatc

SEQ ID NO: 122640 - RNA, 22 nt, synthetic construct
  source 1..22: mol_type = other RNA
atggtgtaaaatacaacagcac

SEQ ID NO: 122641 - RNA, 22 nt, synthetic construct
  source 1..22: mol_type = other RNA
atggtgtgaagttgggcttaac

SEQ ID NO: 122642 - RNA, 22 nt, synthetic construct
  source 1..22: mol_type = other RNA
atggtgtgatctctgctcaccg

SEQ ID NO: 122643 - RNA, 22 nt, synthetic construct
  source 1..22: mol_type = other RNA
atggtgtgtctgcgccttaaag

SEQ ID NO: 122644 - RNA, 22 nt, synthetic construct
  source 1..22: mol_type = other RNA
atggtgttatttgttctgtcac

SEQ ID NO: 122645 - RNA, 22 nt, synthetic construct
  source 1..22: mol_type = other RNA
atggttaagactgctgtttacc

SEQ ID NO: 122646 - RNA, 22 nt, synthetic construct
  source 1..22: mol_type = other RNA
atggttaatagtgaccctttga

SEQ ID NO: 122647 - RNA, 22 nt, synthetic construct
  source 1..22: mol_type = other RNA
atggttagactgcacataaaag

SEQ ID NO: 122648 - RNA, 22 nt, synthetic construct
  source 1..22: mol_type = other RNA
atggttcataatatatcacaac

SEQ ID NO: 122649 - RNA, 22 nt, synthetic construct
  source 1..22: mol_type = other RNA
atggttctgtgctagatgctaa

SEQ ID NO: 122650 - RNA, 22 nt, synthetic construct
  source 1..22: mol_type = other RNA
atggttgaagaaagtaggaatt

SEQ ID NO: 122651 - RNA, 22 nt, synthetic construct
  source 1..22: mol_type = other RNA
atggttgcacaatgttgtggat

SEQ ID NO: 122652 - RNA, 22 nt, synthetic construct
  source 1..22: mol_type = other RNA
atggttggaagtttctggaagt

SEQ ID NO: 122653 - RNA, 22 nt, synthetic construct
  source 1..22: mol_type = other RNA
atggttggccgaggccagtccc

SEQ ID NO: 122654 - RNA, 22 nt, synthetic construct
  source 1..22: mol_type = other RNA
atggttgttggctaaaagaccg

SEQ ID NO: 122655 - RNA, 22 nt, synthetic construct
  source 1..22: mol_type = other RNA
atggtttaacacatacaaacca

SEQ ID NO: 122656 - RNA, 22 nt, synthetic construct
  source 1..22: mol_type = other RNA
atggtttaaggtaagggtccag

SEQ ID NO: 122657 - RNA, 22 nt, synthetic construct
  source 1..22: mol_type = other RNA
atggtttacaatggttcataat

SEQ ID NO: 122658 - RNA, 22 nt, synthetic construct
  source 1..22: mol_type = other RNA
atggtttaggctgtctccaacg

SEQ ID NO: 122659 - RNA, 22 nt, synthetic construct
  source 1..22: mol_type = other RNA
atggtttcataaaatgatggca

SEQ ID NO: 122660 - RNA, 22 nt, synthetic construct
  source 1..22: mol_type = other RNA
atggtttctccttctgcaggct

SEQ ID NO: 122661 - RNA, 22 nt, synthetic construct
  source 1..22: mol_type = other RNA
atggtttctgacacccgaccca

SEQ ID NO: 122662 - RNA, 22 nt, synthetic construct
  source 1..22: mol_type = other RNA
atggtttgatcccactagtgga

SEQ ID NO: 122663 - RNA, 22 nt, synthetic construct
  source 1..22: mol_type = other RNA
atggtttgattgttccaggggg

SEQ ID NO: 122664 - RNA, 22 nt, synthetic construct
  source 1..22: mol_type = other RNA
atggtttggggcttttgaacac

SEQ ID NO: 122665 - RNA, 22 nt, synthetic construct
  source 1..22: mol_type = other RNA
atggttttaatgggcattagaa

SEQ ID NO: 122666 - RNA, 22 nt, synthetic construct
  source 1..22: mol_type = other RNA
atggttttatggtaactcctgt

SEQ ID NO: 122667 - RNA, 22 nt, synthetic construct
  source 1..22: mol_type = other RNA
atggttttcctactaacaagaa

SEQ ID NO: 122668 - RNA, 22 nt, synthetic construct
  source 1..22: mol_type = other RNA
atggttttttcccccctggaac

SEQ ID NO: 122669 - RNA, 22 nt, synthetic construct
  source 1..22: mol_type = other RNA
atgtaaaaactgtttggctggg

SEQ ID NO: 122670 - RNA, 22 nt, synthetic construct
  source 1..22: mol_type = other RNA
atgtaaaaatatagaaggccag

SEQ ID NO: 122671 - RNA, 22 nt, synthetic construct
  source 1..22: mol_type = other RNA
atgtaaaacagacccttatgtc

SEQ ID NO: 122672 - RNA, 22 nt, synthetic construct
  source 1..22: mol_type = other RNA
atgtaaaacatcaaagtcccct

SEQ ID NO: 122673 - RNA, 22 nt, synthetic construct
  source 1..22: mol_type = other RNA
atgtaaacagcatactgtggat

SEQ ID NO: 122674 - RNA, 22 nt, synthetic construct
  source 1..22: mol_type = other RNA
atgtaaattcctaactcaagag

SEQ ID NO: 122675 - RNA, 22 nt, synthetic construct
  source 1..22: mol_type = other RNA
atgtaaattctgccacattcaa

SEQ ID NO: 122676 - RNA, 22 nt, synthetic construct
  source 1..22: mol_type = other RNA
atgtaacacagttctagttcta

SEQ ID NO: 122677 - RNA, 22 nt, synthetic construct
  source 1..22: mol_type = other RNA
atgtaacttgcttaggctgaag

SEQ ID NO: 122678 - RNA, 22 nt, synthetic construct
  source 1..22: mol_type = other RNA
atgtaagacaatgtctttggct

SEQ ID NO: 122679 - RNA, 22 nt, synthetic construct
  source 1..22: mol_type = other RNA
atgtaaggtgcacgctgtgaat

SEQ ID NO: 122680 - RNA, 22 nt, synthetic construct
  source 1..22: mol_type = other RNA
atgtaagtgggaggaggtcata

SEQ ID NO: 122681 - RNA, 22 nt, synthetic construct
  source 1..22: mol_type = other RNA
atgtaatctcatggaagttatt

SEQ ID NO: 122682 - RNA, 22 nt, synthetic construct
  source 1..22: mol_type = other RNA
atgtaatgacctggaaattatt

SEQ ID NO: 122683 - RNA, 22 nt, synthetic construct
  source 1..22: mol_type = other RNA
atgtaatggatcaaggcacagt

SEQ ID NO: 122684 - RNA, 22 nt, synthetic construct
  source 1..22: mol_type = other RNA
atgtaattacaggggactttga

SEQ ID NO: 122685 - RNA, 22 nt, synthetic construct
  source 1..22: mol_type = other RNA
atgtacaacattcatccctcta

SEQ ID NO: 122686 - RNA, 22 nt, synthetic construct
  source 1..22: mol_type = other RNA
atgtacaatgaattagcaatgc

SEQ ID NO: 122687 - RNA, 22 nt, synthetic construct
  source 1..22: mol_type = other RNA
atgtacacgtcttgtcaataat

SEQ ID NO: 122688 - RNA, 22 nt, synthetic construct
  source 1..22: mol_type = other RNA
atgtacatgacctatctattaa

SEQ ID NO: 122689 - RNA, 22 nt, synthetic construct
  source 1..22: mol_type = other RNA
atgtacattttaccatatacac

SEQ ID NO: 122690 - RNA, 22 nt, synthetic construct
  source 1..22: mol_type = other RNA
atgtacccaatggattataaat

SEQ ID NO: 122691 - RNA, 22 nt, synthetic construct
  source 1..22: mol_type = other RNA
atgtacgccaattttcatagca

SEQ ID NO: 122692 - RNA, 22 nt, synthetic construct
  source 1..22: mol_type = other RNA
atgtactacctatagaattctt

SEQ ID NO: 122693 - RNA, 22 nt, synthetic construct
  source 1..22: mol_type = other RNA
atgtactggaagtgtaacatac

SEQ ID NO: 122694 - RNA, 22 nt, synthetic construct
  source 1..22: mol_type = other RNA
atgtagaaggatatgttttcta

SEQ ID NO: 122695 - RNA, 22 nt, synthetic construct
  source 1..22: mol_type = other RNA
atgtagagaaacaggattacaa

SEQ ID NO: 122696 - RNA, 22 nt, synthetic construct
  source 1..22: mol_type = other RNA
atgtagaggcagttgagttttc

SEQ ID NO: 122697 - RNA, 22 nt, synthetic construct
  source 1..22: mol_type = other RNA
atgtagatatgggagtccctgc

SEQ ID NO: 122698 - RNA, 22 nt, synthetic construct
  source 1..22: mol_type = other RNA
atgtagatcaagtatttcctat

SEQ ID NO: 122699 - RNA, 22 nt, synthetic construct
  source 1..22: mol_type = other RNA
atgtagatcctgaggaagctaa

SEQ ID NO: 122700 - RNA, 22 nt, synthetic construct
  source 1..22: mol_type = other RNA
atgtagctgggatggctgaaag

SEQ ID NO: 122701 - RNA, 22 nt, synthetic construct
  source 1..22: mol_type = other RNA
atgtaggaaactttgcattcct

SEQ ID NO: 122702 - RNA, 22 nt, synthetic construct
  source 1..22: mol_type = other RNA
atgtaggcacattcaagcagaa

SEQ ID NO: 122703 - RNA, 22 nt, synthetic construct
  source 1..22: mol_type = other RNA
atgtagggaatagacaaagaca

SEQ ID NO: 122704 - RNA, 22 nt, synthetic construct
  source 1..22: mol_type = other RNA
atgtagggcaccgtgacagaac

SEQ ID NO: 122705 - RNA, 22 nt, synthetic construct
  source 1..22: mol_type = other RNA
atgtaggtgtctgatgtgtgtc

SEQ ID NO: 122706 - RNA, 22 nt, synthetic construct
  source 1..22: mol_type = other RNA
atgtagttttccctgtgtatgt

SEQ ID NO: 122707 - RNA, 22 nt, synthetic construct
  source 1..22: mol_type = other RNA
atgtatgattttctaggaaact

SEQ ID NO: 122708 - RNA, 22 nt, synthetic construct
  source 1..22: mol_type = other RNA
atgtatgtggctcacattgtat

SEQ ID NO: 122709 - RNA, 22 nt, synthetic construct
  source 1..22: mol_type = other RNA
atgtatgtttctcattcttctc

SEQ ID NO: 122710 - RNA, 22 nt, synthetic construct
  source 1..22: mol_type = other RNA
atgtattttcctaaccactgtt

SEQ ID NO: 122711 - RNA, 22 nt, synthetic construct
  source 1..22: mol_type = other RNA
atgtcaacaaaatactagcaaa

SEQ ID NO: 122712 - RNA, 22 nt, synthetic construct
  source 1..22: mol_type = other RNA
atgtcaacattaagggaaacag

SEQ ID NO: 122713 - RNA, 22 nt, synthetic construct
  source 1..22: mol_type = other RNA
atgtcaactgaggcagagtaga

SEQ ID NO: 122714 - RNA, 22 nt, synthetic construct
  source 1..22: mol_type = other RNA
atgtcaagaatgaagtcagaga

SEQ ID NO: 122715 - RNA, 22 nt, synthetic construct
  source 1..22: mol_type = other RNA
atgtcaagctgtttgagctgaa

SEQ ID NO: 122716 - RNA, 22 nt, synthetic construct
  source 1..22: mol_type = other RNA
atgtcaattttcccccaattaa

SEQ ID NO: 122717 - RNA, 22 nt, synthetic construct
  source 1..22: mol_type = other RNA
atgtcacaagccagggtctgtc

SEQ ID NO: 122718 - RNA, 22 nt, synthetic construct
  source 1..22: mol_type = other RNA
atgtcacattttcttatctagg

SEQ ID NO: 122719 - RNA, 22 nt, synthetic construct
  source 1..22: mol_type = other RNA
atgtcactgtaagaataatgtc

SEQ ID NO: 122720 - RNA, 22 nt, synthetic construct
  source 1..22: mol_type = other RNA
atgtcagactcattgcctatag

SEQ ID NO: 122721 - RNA, 22 nt, synthetic construct
  source 1..22: mol_type = other RNA
atgtcagagacacatactgaaa

SEQ ID NO: 122722 - RNA, 22 nt, synthetic construct
  source 1..22: mol_type = other RNA
atgtcagagatctgaaattgac

SEQ ID NO: 122723 - RNA, 22 nt, synthetic construct
  source 1..22: mol_type = other RNA
atgtcagatggtaaattggtcc

SEQ ID NO: 122724 - RNA, 22 nt, synthetic construct
  source 1..22: mol_type = other RNA
atgtcagccacaagacataagc

SEQ ID NO: 122725 - RNA, 22 nt, synthetic construct
  source 1..22: mol_type = other RNA
atgtcagtcaacacactagcca

SEQ ID NO: 122726 - RNA, 22 nt, synthetic construct
  source 1..22: mol_type = other RNA
atgtcatcttctctctctgctt

SEQ ID NO: 122727 - RNA, 22 nt, synthetic construct
  source 1..22: mol_type = other RNA
atgtcatgggccgggcgtagtg

SEQ ID NO: 122728 - RNA, 22 nt, synthetic construct
  source 1..22: mol_type = other RNA
atgtcatgtatatgctgttttt

SEQ ID NO: 122729 - RNA, 22 nt, synthetic construct
  source 1..22: mol_type = other RNA
atgtcatgttcccggattggaa

SEQ ID NO: 122730 - RNA, 22 nt, synthetic construct
  source 1..22: mol_type = other RNA
atgtccagaggaggaagagata

SEQ ID NO: 122731 - RNA, 22 nt, synthetic construct
  source 1..22: mol_type = other RNA
atgtccagcccccagttttgtt

SEQ ID NO: 122732 - RNA, 22 nt, synthetic construct
  source 1..22: mol_type = other RNA
atgtccatagttaatgtgtgaa

SEQ ID NO: 122733 - RNA, 22 nt, synthetic construct
  source 1..22: mol_type = other RNA
atgtccatcaggaaaaccagtt

SEQ ID NO: 122734 - RNA, 22 nt, synthetic construct
  source 1..22: mol_type = other RNA
atgtccatcgagagatgaatgg

SEQ ID NO: 122735 - RNA, 22 nt, synthetic construct
  source 1..22: mol_type = other RNA
atgtcccctggagttaattcca

SEQ ID NO: 122736 - RNA, 22 nt, synthetic construct
  source 1..22: mol_type = other RNA
atgtcccctggggcctcagcat

SEQ ID NO: 122737 - RNA, 22 nt, synthetic construct
  source 1..22: mol_type = other RNA
atgtcccctgtccaagtatttc

SEQ ID NO: 122738 - RNA, 22 nt, synthetic construct
  source 1..22: mol_type = other RNA
atgtccgttgaagtctttggcc

SEQ ID NO: 122739 - RNA, 22 nt, synthetic construct
  source 1..22: mol_type = other RNA
atgtcctcacctcacattcaca

SEQ ID NO: 122740 - RNA, 22 nt, synthetic construct
  source 1..22: mol_type = other RNA
atgtccttaatgccaccgaatt

SEQ ID NO: 122741 - RNA, 22 nt, synthetic construct
  source 1..22: mol_type = other RNA
atgtccttttcctgttccggga

SEQ ID NO: 122742 - RNA, 22 nt, synthetic construct
  source 1..22: mol_type = other RNA
atgtccttttgagtttggtgta

SEQ ID NO: 122743 - RNA, 22 nt, synthetic construct
  source 1..22: mol_type = other RNA
atgtcgcatgaaaacagctagg

SEQ ID NO: 122744 - RNA, 22 nt, synthetic construct
  source 1..22: mol_type = other RNA
atgtctacctgtctttcccatt

SEQ ID NO: 122745 - RNA, 22 nt, synthetic construct
  source 1..22: mol_type = other RNA
atgtctacctgtgtaacaaacc

SEQ ID NO: 122746 - RNA, 22 nt, synthetic construct
  source 1..22: mol_type = other RNA
atgtctcagatgtctccatttt

SEQ ID NO: 122747 - RNA, 22 nt, synthetic construct
  source 1..22: mol_type = other RNA
atgtctcattgtggatgagatt

SEQ ID NO: 122748 - RNA, 22 nt, synthetic construct
  source 1..22: mol_type = other RNA
atgtctccattttgccagctaa

SEQ ID NO: 122749 - RNA, 22 nt, synthetic construct
  source 1..22: mol_type = other RNA
atgtctcctctttcatatctga

SEQ ID NO: 122750 - RNA, 22 nt, synthetic construct
  source 1..22: mol_type = other RNA
atgtctgcaggagccttgctgt

SEQ ID NO: 122751 - RNA, 22 nt, synthetic construct
  source 1..22: mol_type = other RNA
atgtctggtttgctttggagtc

SEQ ID NO: 122752 - RNA, 22 nt, synthetic construct
  source 1..22: mol_type = other RNA
atgtctgtagttacaactactc

SEQ ID NO: 122753 - RNA, 22 nt, synthetic construct
  source 1..22: mol_type = other RNA
atgtctgtctgttcacatttcg

SEQ ID NO: 122754 - RNA, 22 nt, synthetic construct
  source 1..22: mol_type = other RNA
atgtctgtgtagttcatcagca

SEQ ID NO: 122755 - RNA, 22 nt, synthetic construct
  source 1..22: mol_type = other RNA
atgtcttaagaaggaaaagaac

SEQ ID NO: 122756 - RNA, 22 nt, synthetic construct
  source 1..22: mol_type = other RNA
atgtcttcagaggccctggtgc

SEQ ID NO: 122757 - RNA, 22 nt, synthetic construct
  source 1..22: mol_type = other RNA
atgtcttcttggattttcttca

SEQ ID NO: 122758 - RNA, 22 nt, synthetic construct
  source 1..22: mol_type = other RNA
atgtcttggctattgtcagtaa

SEQ ID NO: 122759 - RNA, 22 nt, synthetic construct
  source 1..22: mol_type = other RNA
atgtcttggtgtgctcttttca

SEQ ID NO: 122760 - RNA, 22 nt, synthetic construct
  source 1..22: mol_type = other RNA
atgtcttgtggctgacatgtgt

SEQ ID NO: 122761 - RNA, 22 nt, synthetic construct
  source 1..22: mol_type = other RNA
atgtctttggctcttagaaaat

SEQ ID NO: 122762 - RNA, 22 nt, synthetic construct
  source 1..22: mol_type = other RNA
atgtctttgggaaggccctgat

SEQ ID NO: 122763 - RNA, 22 nt, synthetic construct
  source 1..22: mol_type = other RNA
atgtcttttaacttgctttgaa

SEQ ID NO: 122764 - RNA, 22 nt, synthetic construct
  source 1..22: mol_type = other RNA
atgtcttttgaagaagttctta

SEQ ID NO: 122765 - RNA, 22 nt, synthetic construct
  source 1..22: mol_type = other RNA
atgtctttttacacttggagtt

SEQ ID NO: 122766 - RNA, 22 nt, synthetic construct
  source 1..22: mol_type = other RNA
atgtgaaaaatttgacatgaca

SEQ ID NO: 122767 - RNA, 22 nt, synthetic construct
  source 1..22: mol_type = other RNA
atgtgaaaagaaaaaggttaag

SEQ ID NO: 122768 - RNA, 22 nt, synthetic construct
  source 1..22: mol_type = other RNA
atgtgaaaatactaacgatcct

SEQ ID NO: 122769 - RNA, 22 nt, synthetic construct
  source 1..22: mol_type = other RNA
atgtgaaagtagaggactgcct

SEQ ID NO: 122770 - RNA, 22 nt, synthetic construct
  source 1..22: mol_type = other RNA
atgtgaacagacagacatgcat

SEQ ID NO: 122771 - RNA, 22 nt, synthetic construct
  source 1..22: mol_type = other RNA
atgtgaattagatggcttagga

SEQ ID NO: 122772 - RNA, 22 nt, synthetic construct
  source 1..22: mol_type = other RNA
atgtgacaaacacttttcaaac

SEQ ID NO: 122773 - RNA, 22 nt, synthetic construct
  source 1..22: mol_type = other RNA
atgtgacagaacaaactcaagt

SEQ ID NO: 122774 - RNA, 22 nt, synthetic construct
  source 1..22: mol_type = other RNA
atgtgacagaatgcatctttta

SEQ ID NO: 122775 - RNA, 22 nt, synthetic construct
  source 1..22: mol_type = other RNA
atgtgacattagtggtggtagt

SEQ ID NO: 122776 - RNA, 22 nt, synthetic construct
  source 1..22: mol_type = other RNA
atgtgacctgtccttgtgtttt

SEQ ID NO: 122777 - RNA, 22 nt, synthetic construct
  source 1..22: mol_type = other RNA
atgtgactagaagaaatgttaa

SEQ ID NO: 122778 - RNA, 22 nt, synthetic construct
  source 1..22: mol_type = other RNA
atgtgacttcgtcaaggggaga

SEQ ID NO: 122779 - RNA, 22 nt, synthetic construct
  source 1..22: mol_type = other RNA
atgtgagcatttagccccctga

SEQ ID NO: 122780 - RNA, 22 nt, synthetic construct
  source 1..22: mol_type = other RNA
atgtgagccacatacatagtat

SEQ ID NO: 122781 - RNA, 22 nt, synthetic construct
  source 1..22: mol_type = other RNA
atgtgagcccccacgcccggcc

SEQ ID NO: 122782 - RNA, 22 nt, synthetic construct
  source 1..22: mol_type = other RNA
atgtgaggatctgttggtgctt

SEQ ID NO: 122783 - RNA, 22 nt, synthetic construct
  source 1..22: mol_type = other RNA
atgtgaggtgaggacatggaga

SEQ ID NO: 122784 - RNA, 22 nt, synthetic construct
  source 1..22: mol_type = other RNA
atgtgatatgccacattttttg

SEQ ID NO: 122785 - RNA, 22 nt, synthetic construct
  source 1..22: mol_type = other RNA
atgtgatggcatcattcataaa

SEQ ID NO: 122786 - RNA, 22 nt, synthetic construct
  source 1..22: mol_type = other RNA
atgtgcaaggagagaaaaacaa

SEQ ID NO: 122787 - RNA, 22 nt, synthetic construct
  source 1..22: mol_type = other RNA
atgtgcacctccagtgtcctga

SEQ ID NO: 122788 - RNA, 22 nt, synthetic construct
  source 1..22: mol_type = other RNA
atgtgcactcttttaaacccat

SEQ ID NO: 122789 - RNA, 22 nt, synthetic construct
  source 1..22: mol_type = other RNA
atgtgcaggaaacttccagaaa

SEQ ID NO: 122790 - RNA, 22 nt, synthetic construct
  source 1..22: mol_type = other RNA
atgtgcagtctaaccattaaca

SEQ ID NO: 122791 - RNA, 22 nt, synthetic construct
  source 1..22: mol_type = other RNA
atgtgccatctccttaatccag

SEQ ID NO: 122792 - RNA, 22 nt, synthetic construct
  source 1..22: mol_type = other RNA
atgtgcctacatagtccacttt

SEQ ID NO: 122793 - RNA, 22 nt, synthetic construct
  source 1..22: mol_type = other RNA
atgtgctgtccatttccttaag

SEQ ID NO: 122794 - RNA, 22 nt, synthetic construct
  source 1..22: mol_type = other RNA
atgtgcttaatcttcacactta

SEQ ID NO: 122795 - RNA, 22 nt, synthetic construct
  source 1..22: mol_type = other RNA
atgtgcttcctaaacctgctac

SEQ ID NO: 122796 - RNA, 22 nt, synthetic construct
  source 1..22: mol_type = other RNA
atgtgctttctcaacactgtgt

SEQ ID NO: 122797 - RNA, 22 nt, synthetic construct
  source 1..22: mol_type = other RNA
atgtggaaaaatataggaacat

SEQ ID NO: 122798 - RNA, 22 nt, synthetic construct
  source 1..22: mol_type = other RNA
atgtggaaaatgtatgattttc

SEQ ID NO: 122799 - RNA, 22 nt, synthetic construct
  source 1..22: mol_type = other RNA
atgtggaacataatctttggtg

SEQ ID NO: 122800 - RNA, 22 nt, synthetic construct
  source 1..22: mol_type = other RNA
atgtggaagcagaactaagacc

SEQ ID NO: 122801 - RNA, 22 nt, synthetic construct
  source 1..22: mol_type = other RNA
atgtggagataaagagcaggtg

SEQ ID NO: 122802 - RNA, 22 nt, synthetic construct
  source 1..22: mol_type = other RNA
atgtggagttggtgcaaggata

SEQ ID NO: 122803 - RNA, 22 nt, synthetic construct
  source 1..22: mol_type = other RNA
atgtggatagtgctttttactt

SEQ ID NO: 122804 - RNA, 22 nt, synthetic construct
  source 1..22: mol_type = other RNA
atgtggatgcatgaggcatatt

SEQ ID NO: 122805 - RNA, 22 nt, synthetic construct
  source 1..22: mol_type = other RNA
atgtggcaaatttatgtgaaaa

SEQ ID NO: 122806 - RNA, 22 nt, synthetic construct
  source 1..22: mol_type = other RNA
atgtggcagaatttacattttt

SEQ ID NO: 122807 - RNA, 22 nt, synthetic construct
  source 1..22: mol_type = other RNA
atgtggcatttcttacacatta

SEQ ID NO: 122808 - RNA, 22 nt, synthetic construct
  source 1..22: mol_type = other RNA
atgtggccaggaggaggagggt

SEQ ID NO: 122809 - RNA, 22 nt, synthetic construct
  source 1..22: mol_type = other RNA
atgtggctcacattgtatttct

SEQ ID NO: 122810 - RNA, 22 nt, synthetic construct
  source 1..22: mol_type = other RNA
atgtggcttgcaaggcccacca

SEQ ID NO: 122811 - RNA, 22 nt, synthetic construct
  source 1..22: mol_type = other RNA
atgtggcttgtggctacaccct

SEQ ID NO: 122812 - RNA, 22 nt, synthetic construct
  source 1..22: mol_type = other RNA
atgtggggaatgctcataatta

SEQ ID NO: 122813 - RNA, 22 nt, synthetic construct
  source 1..22: mol_type = other RNA
atgtggggactttgtggcctct

SEQ ID NO: 122814 - RNA, 22 nt, synthetic construct
  source 1..22: mol_type = other RNA
atgtggtcacactttttgtgag

SEQ ID NO: 122815 - RNA, 22 nt, synthetic construct
  source 1..22: mol_type = other RNA
atgtggtggtatgcactgtact

SEQ ID NO: 122816 - RNA, 22 nt, synthetic construct
  source 1..22: mol_type = other RNA
atgtggtgtggcatgtctgtag

SEQ ID NO: 122817 - RNA, 22 nt, synthetic construct
  source 1..22: mol_type = other RNA
atgtggttattgagtctgtagg

SEQ ID NO: 122818 - RNA, 22 nt, synthetic construct
  source 1..22: mol_type = other RNA
atgtggtttttggttcacttga

SEQ ID NO: 122819 - RNA, 22 nt, synthetic construct
  source 1..22: mol_type = other RNA
atgtgtaaaacatctggaagga

SEQ ID NO: 122820 - RNA, 22 nt, synthetic construct
  source 1..22: mol_type = other RNA
atgtgtaagaaatgccacattt

SEQ ID NO: 122821 - RNA, 22 nt, synthetic construct
  source 1..22: mol_type = other RNA
atgtgtaattgtaccttggaga

SEQ ID NO: 122822 - RNA, 22 nt, synthetic construct
  source 1..22: mol_type = other RNA
atgtgtacaatggggctttact

SEQ ID NO: 122823 - RNA, 22 nt, synthetic construct
  source 1..22: mol_type = other RNA
atgtgtaccaaaagtcctgttc

SEQ ID NO: 122824 - RNA, 22 nt, synthetic construct
  source 1..22: mol_type = other RNA
atgtgtacccgtgtgttttgtt

SEQ ID NO: 122825 - RNA, 22 nt, synthetic construct
  source 1..22: mol_type = other RNA
atgtgtaggaaggaacacacac

SEQ ID NO: 122826 - RNA, 22 nt, synthetic construct
  source 1..22: mol_type = other RNA
atgtgtagtcagtgaagatgct

SEQ ID NO: 122827 - RNA, 22 nt, synthetic construct
  source 1..22: mol_type = other RNA
atgtgtagttctggtgtcgttt

SEQ ID NO: 122828 - RNA, 22 nt, synthetic construct
  source 1..22: mol_type = other RNA
atgtgtatgatcaaagtgaaag

SEQ ID NO: 122829 - RNA, 22 nt, synthetic construct
  source 1..22: mol_type = other RNA
atgtgtatgttacacttccagt

SEQ ID NO: 122830 - RNA, 22 nt, synthetic construct
  source 1..22: mol_type = other RNA
atgtgtatttagggagcatata

SEQ ID NO: 122831 - RNA, 22 nt, synthetic construct
  source 1..22: mol_type = other RNA
atgtgtctagtgaatgagacca

SEQ ID NO: 122832 - RNA, 22 nt, synthetic construct
  source 1..22: mol_type = other RNA
atgtgtctctgacatgagagct

SEQ ID NO: 122833 - RNA, 22 nt, synthetic construct
  source 1..22: mol_type = other RNA
atgtgtgaagaaggaatgtgca

SEQ ID NO: 122834 - RNA, 22 nt, synthetic construct
  source 1..22: mol_type = other RNA
atgtgtgcacaacacatgcaca

SEQ ID NO: 122835 - RNA, 22 nt, synthetic construct
  source 1..22: mol_type = other RNA
atgtgtgcttacacacacgttt

SEQ ID NO: 122836 - RNA, 22 nt, synthetic construct
  source 1..22: mol_type = other RNA
atgtgtgtataacccgtttttt

SEQ ID NO: 122837 - RNA, 22 nt, synthetic construct
  source 1..22: mol_type = other RNA
atgtgtgtctctgctctcaagt

SEQ ID NO: 122838 - RNA, 22 nt, synthetic construct
  source 1..22: mol_type = other RNA
atgtgtgttccagacaaaaatt

SEQ ID NO: 122839 - RNA, 22 nt, synthetic construct
  source 1..22: mol_type = other RNA
atgtgttaaaccattcttgcat

SEQ ID NO: 122840 - RNA, 22 nt, synthetic construct
  source 1..22: mol_type = other RNA
atgtgttacaactctaataaca

SEQ ID NO: 122841 - RNA, 22 nt, synthetic construct
  source 1..22: mol_type = other RNA
atgtgttgaccttagtggttga

SEQ ID NO: 122842 - RNA, 22 nt, synthetic construct
  source 1..22: mol_type = other RNA
atgtgttggcactgaagccagt

SEQ ID NO: 122843 - RNA, 22 nt, synthetic construct
  source 1..22: mol_type = other RNA
atgtgttgtctgattcagtttg

SEQ ID NO: 122844 - RNA, 22 nt, synthetic construct
  source 1..22: mol_type = other RNA
atgtgttgtgcacacatccacg

SEQ ID NO: 122845 - RNA, 22 nt, synthetic construct
  source 1..22: mol_type = other RNA
atgtgttttatttaggccctct

SEQ ID NO: 122846 - RNA, 22 nt, synthetic construct
  source 1..22: mol_type = other RNA
atgtgttttgttttgaataacc

SEQ ID NO: 122847 - RNA, 22 nt, synthetic construct
  source 1..22: mol_type = other RNA
atgttaaatgaaggaaaaaacg

SEQ ID NO: 122848 - RNA, 22 nt, synthetic construct
  source 1..22: mol_type = other RNA
atgttaacaattggtgaatctg

SEQ ID NO: 122849 - RNA, 22 nt, synthetic construct
  source 1..22: mol_type = other RNA
atgttaagattcaacaaaactg

SEQ ID NO: 122850 - RNA, 22 nt, synthetic construct
  source 1..22: mol_type = other RNA
atgttaagcccaacttcacacc

SEQ ID NO: 122851 - RNA, 22 nt, synthetic construct
  source 1..22: mol_type = other RNA
atgttaagtgtttgaaaagtgt

SEQ ID NO: 122852 - RNA, 22 nt, synthetic construct
  source 1..22: mol_type = other RNA
atgttaataaccctgttttgta

SEQ ID NO: 122853 - RNA, 22 nt, synthetic construct
  source 1..22: mol_type = other RNA
atgttacacttccagtacatct

SEQ ID NO: 122854 - RNA, 22 nt, synthetic construct
  source 1..22: mol_type = other RNA
atgttactcattatggttgttg

SEQ ID NO: 122855 - RNA, 22 nt, synthetic construct
  source 1..22: mol_type = other RNA
atgttacttctcagctatagct

SEQ ID NO: 122856 - RNA, 22 nt, synthetic construct
  source 1..22: mol_type = other RNA
atgttagaattcaggacagtta

SEQ ID NO: 122857 - RNA, 22 nt, synthetic construct
  source 1..22: mol_type = other RNA
atgttagatatcccatataagg

SEQ ID NO: 122858 - RNA, 22 nt, synthetic construct
  source 1..22: mol_type = other RNA
atgttagattaggaaacagatt

SEQ ID NO: 122859 - RNA, 22 nt, synthetic construct
  source 1..22: mol_type = other RNA
atgttaggttgaaagttcagaa

SEQ ID NO: 122860 - RNA, 22 nt, synthetic construct
  source 1..22: mol_type = other RNA
atgttataatgagatagaccag

SEQ ID NO: 122861 - RNA, 22 nt, synthetic construct
  source 1..22: mol_type = other RNA
atgttatatttccgtatccagt

SEQ ID NO: 122862 - RNA, 22 nt, synthetic construct
  source 1..22: mol_type = other RNA
atgttatgaagcttttctccta

SEQ ID NO: 122863 - RNA, 22 nt, synthetic construct
  source 1..22: mol_type = other RNA
atgttatgccccctcttctctc

SEQ ID NO: 122864 - RNA, 22 nt, synthetic construct
  source 1..22: mol_type = other RNA
atgttatttggggattctgcta

SEQ ID NO: 122865 - RNA, 22 nt, synthetic construct
  source 1..22: mol_type = other RNA
atgttcaaccctcggcctctac

SEQ ID NO: 122866 - RNA, 22 nt, synthetic construct
  source 1..22: mol_type = other RNA
atgttcaaggtgttcctgaagt

SEQ ID NO: 122867 - RNA, 22 nt, synthetic construct
  source 1..22: mol_type = other RNA
atgttcaagtatttccacgggt

SEQ ID NO: 122868 - RNA, 22 nt, synthetic construct
  source 1..22: mol_type = other RNA
atgttcactgcagaattactga

SEQ ID NO: 122869 - RNA, 22 nt, synthetic construct
  source 1..22: mol_type = other RNA
atgttcagatagaaaagacaat

SEQ ID NO: 122870 - RNA, 22 nt, synthetic construct
  source 1..22: mol_type = other RNA
atgttcagtttatgggtcaacc

SEQ ID NO: 122871 - RNA, 22 nt, synthetic construct
  source 1..22: mol_type = other RNA
atgttcatgaaccttcaccaaa

SEQ ID NO: 122872 - RNA, 22 nt, synthetic construct
  source 1..22: mol_type = other RNA
atgttcatgggaagatgctccc

SEQ ID NO: 122873 - RNA, 22 nt, synthetic construct
  source 1..22: mol_type = other RNA
atgttccacatgttactcatta

SEQ ID NO: 122874 - RNA, 22 nt, synthetic construct
  source 1..22: mol_type = other RNA
atgttcccggattggaaaacta

SEQ ID NO: 122875 - RNA, 22 nt, synthetic construct
  source 1..22: mol_type = other RNA
atgttccctagaacttaaaata

SEQ ID NO: 122876 - RNA, 22 nt, synthetic construct
  source 1..22: mol_type = other RNA
atgttccctcttcaatattttg

SEQ ID NO: 122877 - RNA, 22 nt, synthetic construct
  source 1..22: mol_type = other RNA
atgttcctatatttttccacat
